United States Patent Application Publication US 2008/0034453 A1 - sequence listing, part 17

SEQ ID NO: 136082 - DNA, 248 bp, Glycine max
gcactgttgcatcatcatcttcattgcaaaaccctaaacttcaccttcaaccatgaccacacaagtaccaccacacagtgtccaagtccacacaacaacacaccgctacgaagctggcgtcgtcccccccggagcccgtttcgaaccgccgcgttatgaagccggcgtcaaagcgccctccatttaccattccgagagaggtccaacgacttcccaggtcctcgccgtcctcgccggcctcccggtcg

SEQ ID NO: 136083 - DNA, 237 bp, Glycine max
ggctcgaggttgacattgtgttggcacttctcaaagaagccctttaccttgtttttagaagaaactggctacaccgaagaaaacgttctccttcgagaagcaaaagcaggaattttgaaaccagcttttacaataatagctgatcatgagatgggatgccttttgttattgattcgtggcacgcatagtatcaaggatactttaacagctgttactggaaatgtggtaccatttcat

SEQ ID NO: 136084 - DNA, 157 bp, Glycine max
gagtaatcgagaaagagaagaagcatatatatcaaaatggctgcagagatggagagggagtcattgataactgaagctcctaatgcaccagttactgcacagagaagggtcagaaatgacttagaaaattctctaccaaaaccatactggccaagag

SEQ ID NO: 136085 - DNA, 269 bp, Glycine max
tgcggctcgagcacacacaactacaagaaagaacttcctgataaccaaaaccaacaacaactatggcaagttatcagaagcactacgatgatcagggtcgcaaggtcgacgagtatggcaatgttgagaggcaaactgacgaatatggcaacccggttcatgccactagtgtcacttatgtagccaccaaaagtgttggtggctacaatgatgacgctaataagcaacatgatattactggtgtctatcccgagacagacaccggtaga

SEQ ID NO: 136086 - DNA, 250 bp, Glycine max
gccagtagtcatatgcttgtctcaaagattaagccatgcatgtgtaagtatgaactaattcagactgtgaaactgcgaatggctcattaaatcagttatagtttgtttgatggtatctactactcggataaccgtagtaattctagagctaatacgtgcaacaaaccccgacttctggaagggatgcatttattagataaaaggtcaacacaggctctgcctgttcgctttgatgattcatgataactcg

SEQ ID NO: 136087 - DNA, 246 bp, Glycine max
tgctgccatggccacccacgcggctcttgcttctacaaggatcccttcaaacacaaggttcccatccaaggcctctcactctttcccaacccaatgcgccttaaagagacttgaggtgacagaattctctgggcttagatccacttcatgtgtcacatatgctaacagtgctagagaatcttccttttttgatcttgtagcttcccaactcactcccaagaccaatggatcaactcctgtgagggg

SEQ ID NO: 136088 - DNA, 242 bp, Glycine max
gaaaaaagcgatcatagtttcacttcggccttatccagtttagggtttcggttctctaccctatctttcacgtatcgaaaccttaaatttacgatcaggtctgagcaatctggttggtagaacctttggtcttagtgagtcaagttttatgtctgaattagacgatcaaattcctactgccttcgatccagttgctgatgcaaatgctgatgactcgggtgctgggtcaaaggagtatgtgc

SEQ ID NO: 136089 - DNA, 245 bp, Glycine max
gaggtttgggaaggaagctgctgagatggacaagaggtctttcaagtatgcctgggtgctggacaaacttaaggctgagcgtgaaagaggaatcaccattgatattgctttgtggaagtttgaaacaacaaagtattattgcacagttattgatgcgcctggacatagggatttcattaagaatatgattactgggacatcccaagctgactgtgctgttcttatcattgattcgaccactggtg

SEQ ID NO: 136090 - DNA, 247 bp, Glycine max
gtcttctctttcctccaatgggttcccagaactctcaccaagacccaacaatgtctttgcccaaagggaccaaaacaaaaacttgttcttgtgcagggctgaggctgctgcagcctcctttggggaaccagaaagtgagaaacaaaagtttttgggtattgaagttgccaccttgaagaagattgtgcctctggggatgaggttcttttgcatcctcttcaactatacaattttaagggacacaaaa

SEQ ID NO: 136091 - DNA, 244 bp, Glycine max; identical to SEQ ID NO: 134752

SEQ ID NO: 136092 - DNA, 245 bp, Glycine max
agcttatggtggatacctaggcacccagagacgaggaagggcgtagtaagcgacgaaatgcttcggggagttgaaaaggctgaactcgagggaataacaagagtggtggtgggaagagagtgcagcaaagaggagaaacaaggaagaacaagagagaaagtagaggcagagaaagcaagatcaatggagaaaactagagatgaagctaaaggaagagaacaagctgaaaccaaaggtcaaaccaa

SEQ ID NO: 136093 - DNA, 250 bp, Glycine max
aataaatgcaacctccacaaaggcttatgctaccagaaccatccttattcctgaaaaatgacggaactttaaggccacttgacatagagttgagtttgacacatcctcagggcgatcaatctggtgcttttagtcacatgtgtctgactgcagataaaggtgttaaaagttctatttggctgctagcaaaggcttatgtagttgtgaatgactcgtgctatcatcaacttatcagccattggttaaacac

SEQ ID NO: 136094 - DNA, 245 bp, Glycine max
agccattgttggtggtggttacattgccttggagtttgctggtatctttaatggtttgaaaagtgaggttcatgtatttatacggcaaaagaaggttttgcggggatttgatgaagagattagagattttgttgaagaacaaatgtctgtaagaggtattgaattccataccgaggagtctcctcaagctatcacgaagtcagcggatggctcattctctttaaagaccaacaaagaacttaggc

SEQ ID NO: 136095 - DNA, 246 bp, Glycine max
caagatggcacaagttgaacttcgtgacgagcatgggaacccagttgaactaacagatgcatatgggcatccggtgtagctaacggacgagagatgcaacccggtgcacctcacggctgtggcaaccaaggcacacaaatctatgcttcagaatgacaccccacaagagcttccgcactccaagagctcaagctcgtctgaggatagagaggatggagagaggatcacgaagggactgcaggataa

SEQ ID NO: 136096 - DNA, 245 bp, Glycine max
ataagatggcccgttctctctcgcaagccaaacgtattggtgtccttgttgctcaatctatctccctaattcccgttcatcggcgaggttacgcagtggcatccgatgtatcggtaagagttggattgggtaatattgggcgaaggaatggaatcgtgggaggtgtagaagagaagcctgatacaagagatggttcaaaagcctactcaactgattgggccccagacccagtaacaggttactat

SEQ ID NO: 136097 - DNA, 247 bp, Glycine max
gcttcttcgagtttcacagccaagtcgtaaaagggtttcaagggatggaaaacatgcagagcttctggcaattgggtgatgaactccgtgggcactcaaaagcatcggaggatcacaagtggttaatggttgcctcgaaactggccgaacagacaagattgaagggggagcgtgtgaacaaccttgatctttcaaagggacccattgaaacaaggtcaagggataaatttgggttccaggaagagaa

SEQ ID NO: 136098 - DNA, 252 bp, Glycine max
cttcctccaagagaagtaaacaaccctcacattcaccacagcagcacacacagacaaagacaaccttgtttgtctccaatcaaaacctttcaagctggcgttcgaaaaccaagacaaccctgtccgagaaatcaagcccaagaataggagaatcatgggtgctggaggccctgatgatgaggacaacaacaggtggccaccgtggctgaagcctctgctaaaagaaagtttctttgttcaatgcaagcttca

SEQ ID NO: 136099 - DNA, 83 bp, Glycine max
cgtggccatgttgactctgggaagtccactaccactggccacctgatctacaagcttggaggcattgacaagcgtgttattga

SEQ ID NO: 136100 - DNA, 244 bp, Glycine max
cacaactacaagaaagaacttccttataaccaaaaccaacaacaactatggcaagttatcagaagcactacgatgatcagggtcgcaaggtcgacgagtatggcaatgttgagaggcaaactgacgaatatggcaacccggttcatgccactagtgtcacttatgtagccaccaaaagtgttggtggctacaatgatgacgctaataagcaacatgatattactggtgtctatcccgagaaaga

SEQ ID NO: 136101 - DNA, 244 bp, Glycine max
caacgcgcactctctctttttctctctgttttttgttctctcttcgcttaaaccctatcgttcttctcgttttcgccgattctcgccatgccgaaagctaaatccgacgccaaagccgccgatagcaggttgaagcggaagggcgctggtgctgggaggaagcaatcgaggaaagctgctaaggaccctaacaagccgaagagacctccaagcgctttcttcgttttcatgtccgagttcagag

SEQ ID NO: 136102 - DNA, 246 bp, Glycine max; identical to SEQ ID NO: 134734

SEQ ID NO: 136103 - DNA, 245 bp, Glycine max
gtgagaaacaaagaaaggaaataattgatctttgaaaatgcagggaggaaagaaagctggagagtccatcaaggaaacagctgcaaacattggtgcttctgccaaggctggcatggagaaaaccaaggccactgtccaggagaaggcagaaagaatgacggcacgtgatccgatgcaaaaggagttggcaacccagaagaaagaggcaaagatgagccaggcagagctggacaagcaggcggcgc

SEQ ID NO: 136104 - DNA, 244 bp, Glycine max; identical to SEQ ID NO: 133685

SEQ ID NO: 136105 - DNA, 244 bp, Glycine max
gaagaaaacctaagcttagaattagaaacaaagaaaagaagaaaggaaagaattgatcgttgaaaatgcagggaggaaagaaagcgggagagtccattaaggaaacagctacaaacattggtgcttctgccaaggctggcatggagaagaccaaggccactgtccaagagaaggcagaaagaatgacagcacgtgatccggtgcaaaaggagttggcaacccaaaagaaagaggcaaagatgaa

SEQ ID NO: 136106 - DNA, 247 bp, Glycine max
ggcaagtgaggagaaaggatttgaggaatcaagaattcccactgcatttgttgctaccccagaggttgtggcccggaagcccaccttccctgagaatagcaggaccataatggatgtattggtatcattgatatacaagtacggcgatgagcgaactaaagcacgtgcaatgctctgtgatatataccaccatgctcttcttgatgaattctcaattgcccgtgatctgctgcttatgagtcatctg

SEQ ID NO: 136107 - DNA, 237 bp, Glycine max
ctttaaacactcatcaccatggccaagctagaactttccctttgattccttcttttcagtggctgcttcgctctgacagagcaggcacagcaaaatgagtgccagatccaaaagctgaatgccctcaaaccggataaccgtatagagtcggaaggtgggttcattgagacctggaaccctaacaacaagccattccagtgtgccggtgttgccctctctcgctgcaccttaaccgga

SEQ ID NO: 136108 - DNA, 243 bp, Glycine max
attcattcattcattcgttcttcttctttcaccaacaacaaagaaaacagagaaactttcatttcatatattttcatcatcgcagcaaaggaatcaatcaatcaaaaaccatggcaggcttcagtggcgacgaaaccgctcctttcttcggcttcctcggtgccgctgcggccctcgtcttctcctgtatgggagcggcgtacggaacggcaaagagtggggtgggggtggcgtcgatgggcg

SEQ ID NO: 136109 - DNA, 240 bp, Glycine max
gaccgagctagctagctagcaagcaagcacagagatggaggcaaagcgaggacatgccctcatgtgcttggcacgtgtttcactcttcctctgcgctctaaccctatccgctgctcacggaagcaccacggttcaagacatcgcgagaaggttgaaactcggggacaacgagcttctgcgcacggagaagaagttcaaggttttcatggagaattacgggaggagctactccacagagga

SEQ ID NO: 136110 - DNA, 242 bp, Glycine max
caaaaccaagcatcctcaattgttgtacgaatcaaagctgtataaaatactgcaaggaggaaatgggattccaaatgtgaaatggtatggtgttgaaggagagtacaatgtgctcgtgatggatttacttggccctagccttgaggatttattcaacttctgtagtcggaaattgtctctcaaaactgttcttatgcttgctgatcagatgctaaatcgagttgaatttgttcattccaaat

SEQ ID NO: 136111 - DNA, 243 bp, Glycine max
ctttgaacactcatcaccatggccaagcttgttctttccctttgattccttcttgccagtggctgcttcgctctgagagagcaggcacagcaaaatgagtgccagatccaaaagctgaatgccctcaaaccggataaccgtatagagtcggaaggtgggttcattgagacctggaaccctaacaacaagccattccagtgtgccggtgttgccctctctcgctgcacccttaaccgcaatgcc

SEQ ID NO: 136112 - DNA, 243 bp, Glycine max
cttacacaaaacttccacttgagagaaaagtagtgtattaagactacaaattttcaatttttcaatggcgtcgaggcaacaaaaagaggatcgagctgaggcagctgcgaaagttgctgcgaaagaactcgaacaactcaaccgagaaaaagaccgtgatttcagtgttggtgttgcagaccaacaccaacaagaagaacatcagttagatcaacaaaagcgtggtgtaatcggatccatgtt

SEQ ID NO: 136113 - DNA, 243 bp, Glycine max
cacaactactacaagtacttccttacaatcaaaaccaacaacaactatggcaagttatcaaaagcactacgatgatcagggtcgcaaggttgacgagtatggcaacgttgagaagcaaaccgacgaatacggcaaccctgttcatgctgctagtgtcacctatgtagccaccagaactgctgctggtggttacagtgatgacattaataagcaacatgataccaccaatgcctacggcgtaga

SEQ ID NO: 136114 - DNA, 242 bp, Glycine max
aatttgaatacttcttatgcaactatagtgaggctaagagattggtccataattaatcaaaatgttggctatattccacaaagcttttgctcatccacctgaagagctcaacagccctgcatcttacaaaggttccaagaagcctaaggttcccgaggaaactctcaaagatttcctttcccaccatcctcacaacacttgctctatgagctttggtgatgctgctgttctagcttatgtcc

SEQ ID NO: 136115 - DNA, 243 bp, Glycine max
aaatttgaagagtttgtttattgtgaaaaaaagaaaaatgcaggcagcaaagaaagccatagagacctttaaggaaaccgcagccaacattggcgcctctgccaagtctggcttggagaaaaccaaggccactatccaagagaagaatgagaagatgaatgcagaagatcaaactcaaatggatatggctaccaagaggaaagaagagaagatcaaccaggctgagatggagaagcagcaggc

SEQ ID NO: 136116 - DNA, 240 bp, Glycine max
gcgatactgataagagagataccaacaagaaaagaaaaaaaagaagagttgagattccctttgaagaaaagatggcatcccataggcaaagctatgaagctggtcaaactaagggccgaactgaggaaaagacgaaccagacgatgggcaatattggagagaaggctcaagctgcaaaggagaagacccaggaaatggcccaagctgcaaaggagaagacccaacaaacagcccaagctg

SEQ ID NO: 136117 - DNA, 239 bp, Glycine max
cttcttcgccgtttcagctgaagagccatccgcaggtaagcaatggttaagcataataatgttatccccaatgggcacttccggaaacactggcaaaactatgtgaagacttggtttaatcaaccagcccgaaagaccagaagacgagaggctcggcagaagaaggctgtcaagattttccccaggcctactgctggatctctcaggcctattgttcatggccagactctgaaatacaa

SEQ ID NO: 136118 - DNA, 239 bp, Glycine max
gggaagggaggacctcaaaattctcagtgtaactacagaggagttaggcagaggacatgggggaaatgggttggtgagattagggaacccaatagaggaagcaggctttggttgggtaccttctcttctgcccaggaagctgctcttgcctatgatgaagctgctagagctatgtatggtccttgtgcacgcctcaattttcccaaaatcacagattatccttctgttaaggaatcgtt

SEQ ID NO: 136119 - DNA, 241 bp, Glycine max
gaagaaaggaaagaattgatcgttgaaaatgcagggaggaaagaaagcgggagagtccattaaggaaacagctacaaacattggtgcttctgccaaggctggcatggagaagaccaaggccactgtccaagagaaggcagaaagaatgacagcacgtgatccggtgcaaaaggagttggcaacccaaaagaaagaggcaaagatgaaccaggcggagctggacacgcaggcggcgcgtcac

SEQ ID NO: 136120 - DNA, 239 bp, Glycine max
cagtgatcatatattcattcagttctatacaaaatcctcaaaaactcttcctctctgccatgaccatggaatacagaaccttagaactcaacatcatatccgcaaaggacatcaagaatgttaatctcttctccaagatggacgtatacgccgccgtttcgctctccggtgaccctctccaccctcagggcgccaccacccacgtccacaaagacgccggcagcaaccccacgtggaac

SEQ ID NO: 136121 - DNA, 242 bp, Glycine max
gttctcacctcaccgctgcatcttcacgtcgtctctaacgcatcttcgtgttgttgcagagggaaaatgagtcgaggaggtgcagcagcagcgaagggaaagaagaagggtgctacattcaccattgactgtgcaaagccagtagaagacaagatcatggacattgcttctctcgagaagtttcttcaagagaggatcaaggttggtggcaaagctggtgctcttggtgactctgttaccgt

SEQ ID NO: 136122 - DNA, 241 bp, Glycine max
agcgttgccattctcatcctcttctttctctctctaccattgccatggatccctacaagcaccggccatccagcgccttcaattctcccttctggactacaaattctggtgctcctatttggaacaacaactcctctttaaccgttggagctagaggtccaattctgctggaggattatcatcttatggagaagcttgcaaattttgatagggaacgtatcccagaacgtgttgtccatgc

SEQ ID NO: 136123 - DNA, 239 bp, Glycine max
gcggcgtgttcgaattctgatcgcttttacgcgagacagggggaccaccctctaagcctaagtattcctcaatgaccgatagcgtacaagtaccgtgagggaaaggtgaaaagaaccctatttagggagtgcaatagagaacctgagatccgatgcgaacaatcagtcgaaggagcttagagcctttacttgatatttagtaaagcgcactcactctaacggcgtaccttttgcatgat

SEQ ID NO: 136124 - DNA, 238 bp, Glycine max
agcgatgcggatgaggcgccactcgatgtttccatttgcctgcatgcctttggtattgtggggtgtggttcgtttagtggtgtcaagtcttgcgaacgtgagggtgcatgagtggtaatcgggatgtttttgttgcacggctccatgcttgcgcatgcaacgtgtgacatgcatccttttcattgtcaccttagccttcgtggcttaggtgctgacgattggttcctgtgttgcctac

SEQ ID NO: 136125 - DNA, 249 bp, Glycine max
cttgcagaccgagctagctagctagcaagcaagcacagagatggaggcaaagcgaggccatgccctcatgtgcttggcacgtgtttcactcttcctctgcgctctaaccctatccgctgctcacggaagcaccacggttcaagacatcgcgagacagttgaaactcggggacaacgagcttctgcgcacggagaagaagttcaaggttttcatggagaattacgggaggagctactccacagaggagga

SEQ ID NO: 136126 - DNA, 252 bp, Glycine max
gtaattatgatcaatatgttcagacacgtgctgaactggaagagaaccagatgaagcagtacaaatgggagcaggagcaaattgcctcgatgaaggaatacattgcccgatttggtcatggatcagcaaaactagcccgccaagctcagagtaaagagaaaactcttgcaaaaatggagcggggtggacttgcagagaaggtggtaagagacaaagttttggtattccgctttgttgatgtgggaaaacttc

SEQ ID NO: 136127 - DNA, 247 bp, Glycine max
ggtgtaaatgttgtagttgctatcaacaagttttcaactgacactgaagctgagctaaatgcagttcagagtgctgcattagctgctggagcttatgatgctgtaatttgtacccatcatgcgcacggtggcaaaggagctgttgacctgggcattgcagttcaaaaagcctgcaagaatgtgacacagccattgaagttcctgtatcctgttgaactgagtataaaagagatattagaggcaatag

SEQ ID NO: 136128 - DNA, 250 bp, Glycine max
ctaaattgaaaagctttctagctggtcataatatcaccattactgatggtattgacgaaactagtgcaactttgcaatttagaaagttagcagattgttattttcttaagagaaactttaagcagatgtctaatgttttgtgggtggctcctgaggacaaggcaagtttatggtcacaacttcattatgtttcgtgtaataatctggaaatgcaagaagcttatcttgtcaatctcgtaaatgtgttacg

SEQ ID NO: 136129 - DNA, 249 bp, Glycine max
acaacatcaacaccaatgaaagcaacaacacaaatgcaactgacaaaaggtttaagaccttgcctgctgcggagacactcccccgcaatgaggtgcttggaggatacatctttgtctgtaacaatgacacaatgcaggaagacttgaaacgtcagctatttggtttgcctccaaggtatcgagattctgttagggcaataacaccagggctatcagtatttctttataactatactactcatcagctgc

SEQ ID NO: 136130 - DNA, 252 bp, Glycine max
attcggggatgcacctaacaacatgcgacagtttcaaaaccaagatattttccacgatttggccttcaccccattaaccatcaccctgcagggagagtacaacgtgagagtcaactcaataagaatcaaccagcacagtgtgttcccactgaacaagatatcatccaccatcgtagggtcgacctctggaggaaccatgattagcacctcaactcctcacatggttctccagcaatccgtgtaccaggcttt

SEQ ID NO: 136131 - DNA, 253 bp, Glycine max
atggcttccatcctccactactttttagccctctctctttcttgctcttttcttttcttcttatccgactcagtcacccctacaaaaccaataaaccttgttgttctacccgttcaaaatgatggttccacagggctccattggaccaacctccaaaaaagaacccctctaatgcaagtaccagtcctggtggacctcaatggaaatcacttgtgggttaactgtgagcagcagtactcatccaaaacgtacc

SEQ ID NO: 136132 - DNA, 253 bp, Glycine max
gaaaacctaagcttagaattagaaacaaagaaaagaagaaaggaaagaattgatcgttgaaaatgcagggaggaaagaaagcgggagagtccattaaggaaacagctacaaacattggtgcttctgccaaggctggcatggagaagaccaaggccactgtccaagagaaggcagaaagaatgacagcacgtgatccggtgcaaaaggagttggcaacccaaaagaaagaggcaaagatgaaccaggcggagtg

SEQ ID NO: 136133 - DNA, 257 bp, Glycine max
ctcactgacctcaccatggcgaccagagccaagctttctttagctatcttccttttctttcttttagccttgatttcaaacctagccttgggcaaacttaaagaaaccgaggtcgaagaagatcccgagctcgtaacatgcaaacaccagtgccaacagcaacggcaatacactgagagtgacaagcgaacatgcttgcaacaatgtgacagtatgaagcaagagcgagagaaacaagtcgaagaggaaactcgcga

SEQ ID NO: 136134 - DNA, 249 bp, Glycine max
tttttaagtgtggagtgctgtgcaggtcaaggcccttttacttgttcgtccggttgttcccatcttctctctcgtaccaatcaaatcacacttttgtgttgtgttgggaaaccctaaaccccgttttcggtgagatcgagatcgatcgaacatggatgaggagtacgatgtgatcgtgttgggcacgggtctcaaggagtgcattctcagcggtcttctctccgtcgatggcctcaaggttctgcatat

SEQ ID NO: 136135 - DNA, 248 bp, Glycine max
tttcggtttcttcaggctatcaatgagagacctgacataacggaaggattgaagagattaaaatgtcgtacgcttatttttgtcggggacacttctcctttccattcggaggctcttcatatgacttcaaaacttgataggagatacactgcattggttgaagttcagggttgcggatcaatggttacagaggaacagccacatgcaatgctggtccctatgtagtactttttaatgggatattgctt

SEQ ID NO: 136136 - DNA, 247 bp, Glycine max
caaagcctttctgactcggcctggcccggtcgccctacgcgactggcgcttcaaaaggtagttgacttgcttactcgttagagtaggggtctcgagagagcagagcgtaccgccctgccatagtcgcgagtctgtttatagtcgcgactgttgtactattcaacaaggttgaaacttctaggaaatgacttcgatttgggagggcgatcctcccggtgaactgaccgtaccccaaaccgacacagtg

SEQ ID NO: 136137 - DNA, 250 bp, Glycine max
ccgcaaaggagtccattagaagagtaaaggatttgcctcacgaagggctgcatccaatgttcatgaatgtgttggaaacaggggagttaacggcacttgcatttactgagcatttgaaaaagtttaggccaaagcagaccattttggaagctgaaggggaagcagctaaattagagcatcaacagggcccttctggccaatgggccgatgtgatgaaaaggcaaaagagccattcatgataatattataa

SEQ ID NO: 136138 - DNA, 248 bp, Glycine max
cttccttataaccaaaaccaacaacaactatggcaagttatcagaagcactacgatgatcagggtcgcaaggtcgacgagtatggcaatgttgagaggcaaactgacgaatatggcaacccggttcatgccactagtgtcacttatgtagccaccaaaagtgttggtggctacaatgatgacgctaataagcaccatggtattactggtgtctatcccgagaaagacaccggtagacgtcattttggt

SEQ ID NO: 136139 - DNA, 130 bp, Glycine max
gcagcaagtgagggaaaacaattcttaattgttggtacaaaacacaaagcagcggatttactagcacgggctgcaatgagagctcggtgtcattatgttaataaaaagtggctcggcggtatgttaacga

SEQ ID NO: 136140 - DNA, 250 bp, Glycine max
tgtaattgtagtagtagacagtagcaccatgagccaggaacagctcaagaaacctcaaggggagcaggaccccatcaaatacggcgacgttttcaaagtctccgacgaactcgctttcaaacccatcgcgccaagagacgcagctctcatgcaagccacggagaaccaagcattgggccaaactcaaaaaggaggtcccgcctcggtgatgcaatccgccgcaaccgaaaacctccgcgccggcgtcgtg

SEQ ID NO: 136141 - DNA, 235 bp, Glycine max
caccattgaattttgattctagcaagcagagcttttgtcaattttctattgaccttctcggtggaggaattttagtggacaaaactggagattggatcacacttatacaaaattctccaattagtaacttgttgagagttgctgcttggaagaaaggctgtttaatggttaaaattgtgatgtctgggaatgcagcagtcaaaaggagtgattgggcctcattggtacaagtgtt

SEQ ID NO: 136142 - DNA, 250 bp, Glycine max
aatggccgcctcagcgatggtgttggatccgccgcccttcctcccgtcgacaaagtccgcctacctccaaggcggcgacgccacggccttcgatgaggaagatctctacagccgcctcaaatccctagtgcgtcagctcgagttcgtcgacatccaggaggagtatgtgaaggacgaactgaagaatctcaggcgcgagctcctccgcgcgatggaggaggtgaagcggatccagtcggtgccgctcgtc

SEQ ID NO: 136143 - DNA, 253 bp, Glycine max
cacaactactacaagtacttccttacaatcaaaaccaacaacaactatggcaagttatcaaaagcactacgatgatcagggtcgcaaggttgacgagtatggcaacgttgagaagcaaaccgacgaatacggcaaccctgttcatgctgctagtgtcacctatgtagccaccagaactgctgctggtggttacagtgatgacattaataagcaacatgataccaccaatgcctacggcgtagacactggtaga

SEQ ID NO: 136144 - DNA, 255 bp, Glycine max
gaaagaacttccttataaccaaaaccaacaacaactatggcaagttatcagaagcactacgatgatcagggtcgcaaggtcgacgagtatggcaatgttgagaggcaaactgacgaatatggcaacccggttcatgccactagtgtcacttatgtagccaccaaaagtgttggtggctacaatgatgacgctaataagcaacatgatattactggtgtctatcccgagaaagacaccggtagacatcattttggt

SEQ ID NO: 136145 - DNA, 249 bp, Glycine max
ctttctctttctgggtctccattaaatttttcttctctcccttctttctctctctctctctctgaccattctcttcttcttctttttcttctcctctctctctctcccctccgccatggctgaggataaggagatgtctacctctgtcatcaatgggaatgattccctaactggtcacatcatatctacaactattggaggcaaaaatggggaaccaaacagactattagctacatggcagaacgggtt

SEQ ID NO: 136146 - DNA, 221 bp, Glycine max
cgcctagaaacactcaaggtgtggctgggttaggccaagcaccaatttctcttccaaaccaactcgcttcccactttggcctacaacgccaattcaccacttgcctttctcgctaccctacttcaaagggtgctataatattcggggatgcaccttacaacatgcgacagtttcagaaccaagatattttccacgctttggccttcacgcattaaccatca

SEQ ID NO: 136147 - DNA, 245 bp, Glycine max
accaaaacactcaagttaacttcaacacctttaattttctgaacgaaattcagccacagaatatcaaagggagcgaagatgagtcaggagcagccaaggcgcccccaaggccaagaccccatcaaatacggcgacgtttttgacgtctacggtgaccttgcacagatgcccattgcaccggaagatgctgccatgatgcaaagcgcggaagctcgagtactcggaaaaacccaacccggcggagt

SEQ ID NO: 136148 - DNA, 179 bp, Glycine max
gttcgctcggagttccgctcgagggaccaacaccgtgcacaccggtactggtcccagaagtggaacacacgggcggcaccggttctggaggccatggtgccactggttatggaccaactggtggcactggctatgggagtggaactgggtatggagtcaccactgggggtgcgctcact

SEQ ID NO: 136149 - DNA, 245 bp, Glycine max
gctttgaatgctgcatattaccatgtagttaaccccttgaccaacactgctgttggtgctgaagtgaaccatagattctcaactaatgagaacactctcacccttggtacccagcatcagttggatccattgaccacattgaaggcacgtgtgaacaactttggaaggacaagtgctcttatccagcacgagtggcgtctcaatacgttctttaccatttctggtgatgtagtcaccaaagccat

SEQ ID NO: 136150 - DNA, 245 bp, Glycine max
cccaactaaccaaaccagctatggcggcgatgcagaggccactcaagagaaccattgcaatcgccaagctacgcgcgtgcttttcctctctccgacccgccgccgccgccgacatcgtcgcgtctcctccgccgcagctcccgccgttcgatcaccagccgcacccttacaacggtcccttcgccgatgaagtcctcgccaagcgcaaaacgttcctcggtccttccgtcttccactactataag

SEQ ID NO: 136151 - DNA, 254 bp, Glycine max
ggtggctataatgatgacaccaatagacatcatggaactaccggtgtctatggtatagacaccgataggcaacaacatgggactactggtggctatgccggtgacactggtaggcaacatgggaacatcggtggcccttactatggaaccaacacctcagacaccggtactggtcccagaagtgggaccacgggcggcaccggttatggaggcactggtggcactgattatggaacaactggtggcactggtta

SEQ ID NO: 136152 - DNA, 180 bp, Glycine max
cttctctccctctctattgcagcatggtgtcttcctcccaacacattctggtcaccggtggtgccggtttcattggcacccacaccgtcgttcagcttctcaaagctggcttcagcgtttcaataatcgacaatttcgataactccgtcatggaagcagtggaccgcgtccgccaagtgg

SEQ ID NO: 136153 - DNA, 189 bp, Glycine max
acaatattttggtacgtaagtcttttaaaaagtttgcatctcctctttggttttccttagttctgaaagttatctcctaagaagacaatcatatgtactgtacgtagtgtgaagatatagtattgtatgctgcagaatatgattgtctaataaggtggactagctgtaataaaagatatttccaggttg

SEQ ID NO: 136154 - DNA, 244 bp, Glycine max
ggatcacacttatacaaaattctccaattagtaacttgttgagagttgctgcttggaagaaaggctgtttaatggttaaaattgtgatgtctgggaatgcagcagtcaaaaggagtgattgggcctcattggtacaagtgtttttaacaaatcgcaacagtacagagcatttcgatgcatgtaagtggacaaaatcggaaccacattcctgggaattgatcttcccaatagaggtatgtggtcc

SEQ ID NO: 136155 - DNA, 247 bp, Glycine max
cctcgagcgcatcggctcgaggcgttgccattctcatcctccactgtctctctctctcacccattgccatggatccttaccaagctccggccatccagcgccttcaattctcccttctggactacaaattctggtgctcctgtttggaacagcaactcctctttaaccgttggagctagaggtccagctctccttgaggattatcatcttgtggagaagcttgcaagctttgacacggaacgtatcc

SEQ ID NO: 136156 - DNA, 241 bp, Glycine max
atcacacacaactactacaagtacttccttacaatcaaaaccaacaacaactatggcaagttatcaaaagcactacgatgatcagggtcgcaaggttgacgagtatggcaacgttgagaagcaaaccgacgaatacggcaaccctgttcatgctgctagtgtcacctatgtagccaccagaactgctgctggtggttacagtgatgacattaataagcaacatgataccaccaatgcctac

SEQ ID NO: 136157 - DNA, 242 bp, Glycine max
tcaaagtgctgaagtttactttgacttcttccctgtggaggttgatagtcaagagggagttgctcacattggtgaattgaaatctggtgtctatgttccactgcctacaaaaactaatttggtggaaactcccaaggaatggcaactggatctaccttgtgacaaaattcctagtgttttgactacaactgatgagagattggtaggcacagaacatgagggatatgatccttttcttggtg

SEQ ID NO: 136158 - DNA, 249 bp, Glycine max
tattgaccttcttggtggaggaattttagtggacaaaactggagattggatcacacttatacaaaattctccaattagtaacttgttgagagttgctgcttggaagaaaggctgtttaatggttaagattgtgatgtctgggaatgcagcagtcaaaaggagtgattgggcctcattggtacaagtgtttctaacaaacagcaacagtacagagcattttgatgcatgtaagtggacacaatcggaacc

SEQ ID NO: 136159 - DNA, 185 bp, Glycine max
ttgaatgccggcaacgcagcctctctccctggcaaatgtggcgtcaacatcccttacaagatcagcacctccaccaactgcgccaccatcaagttctgaagggtggatctagtataaggaagaaactgcagggcagtttttcagtcgcaggatactatatatcataatgttgtaaaatttatatt

SEQ ID NO: 136160 - DNA, 256 bp, Glycine max
ggaaatgaggattctgatggtaggtctcgatgctgctggtaagacaaccatcttgtacaagctcaagcttggagaaatcgtcaccactatccccaccatcggatttaatgttgagactgtggagtacaagaacatcagcttcactgtgtgggatgttggtggtcaggacaagatccgtccactgtggaggcattatttccagaacactcagggtctcatttttgtggttgatagcaatgatagagatcgagtggtt

SEQ ID NO: 136161 - DNA, 241 bp, Glycine max
ccagtttcaccgcacgaatatcttgttgtttggagcgatccgagaacaactctgtaaacatgttggtttaccaggacctccttacaggtgatgagcttctctctgactccttccgttacaaggaaattgagaatggaatgctgtgggaagttgaggggaagtgggttgttaaaggagcagttgatgtagacattggtgcaaacccttctgctgagggtggaggagaaaatccaggagttga

SEQ ID NO: 136162 - DNA, 237 bp, Glycine max
ggaaccaacaccgcagacaccggtactggtcccagaagtggaaccacgggcggcaccggttatggaggcactggtggcactgattatggaacaactggtggcactggttatggaagtggaactgggtatggagtcaacactgggggtgcgcacactgaagcaggatataggaaggaacatcgtgcgcatgaccaatctcatggtgatcagaacgagaagaaagggattatggacaag

SEQ ID NO: 136163 - DNA, 240 bp, Glycine max
ctctgtttcacagcatcaagtctttgtttatgaacaagccgttgattatagtctgcaacaagactgacttgcagccacttgaggggatatctgaggaagacatgaagttggtcaatgagatgaaagcggaagccttgaagactctagttggtcaaggtggtgagcctacagacaataacagtgtattgttgaccatgagcactttgacagaagaaggggtaattgctgtgaaaaatgcag

SEQ ID NO: 136164 - DNA, 244 bp, Glycine max
  unsure (1)..(244): unsure at all n locations
cccatggccaccacctccgcattcctcctccttcccctcctcctgctgctccacctcgccatcgccgctcacggcatcggcatcaactacggcacgctcggcgacaaccttccaccgcccgcggcgtggcngaacttcctgaagacgaagacgaccatcgaccgcgtgaagatctacgacgtgaacccggacatcctgcgggccttcgccggcagcggcatctccgtgacggtgaccgccccca

SEQ ID NO: 136165 - DNA, 244 bp, Glycine max
gacaaattccatacacaatgatgaagtttgcttcttttgagaccattgttgagctgatctataagcatgccatgccaacaccaaagaatgagtgcaccagaagcctgcaacttggtgtcagttttgctggtggatatgttgctggtgtactttgtgcaattgtgtctcatcctgctgataatcttgtctcttctctgaacaatgcataaggagcaacagttggtgatgcggtgaagaagcttgg

SEQ ID NO: 136166 - DNA, 250 bp, Glycine max
  unsure (1)..(250): unsure at all n locations
accctccattccatggctccgccgctcgaacacaacggcgtttccacgagcggtgactctcagagatccattcccacgccgtttctcaccaaaacctaccagctcgtcgacgatcacaccatcgacgatgtcatttcgtggaacgattctggatcgtccttnatcgtctgnaacaccacggggttcgcaanggattngcttcctaaatatttcaagcacaacaattctccagcttcgttcgcnaatcaaa

SEQ ID NO: 136167 - DNA, 255 bp, Glycine max
ttcggatctagagtcttcagtttctcctcgttgttcttcgctttcctgttttcagatttcgattctttcgttaatttaataagatgtttgggagggcaccgaagaagagcgataatacgaggtactacgaaatccttggcgtctccaagaacgcttcgcaggatgatctgaagaaggcttacaagaaagccgccattaagatatcacccgacaagggcggtgatcccgagaagtttaaagagctggcgcaagtta

SEQ ID NO: 136168 - DNA, 204 bp, Glycine max
aagacggcctgtaggagaggcccgaggaggccgacgcccagcgccgcaaggaggctgccgccgacctatacgacatcttcgacatgcgagttgacaggcactggagcgataagaatctggaagagctgacagagccggcttagcgtatcttcagagaagactataagatctcctacaagggttccaatattcctcgtcctatga

SEQ ID NO: 136169 - DNA, 237 bp, Glycine max
gctccgacaccattgacaacgttaaggctaagattcaggacaaagagggtatccctccagatcaacagaggctgctctttgctggaaagcagcttgaggatggccgtacccttgctgattacaacatccagaaggagtccactcttcatttggtactccgtctacgtggtggaatgcaaatctctgttaagactctgaccggaaagacaatcacccttgaggtggagagctctgaca

SEQ ID NO: 136170 - DNA, 238 bp, Glycine max
ctcgagcgctccaaatgcaactccaaccggctttggaggaactccaggaaatgagagaatatttattgatgaagattttgcaaaagtgactgttcgccatcatgctattgacaaaacttaccggagtggatctctctttccagatcagggtttccttcctgtcgagggtctgatttctgaagttgaagtttggggacttggtgggaaagtagcaaaggaagtgcagaactcttacaag

SEQ ID NO: 136171 - DNA, 255 bp, Glycine max
gtaataataatgtgtataatgctacagcagcgggtatggtaaaaaaaatcatacgaaaagaaaaagggggatacgaaataactatagtggatgcattggatgggcgtgaagtgattgatattatacctccaggaccagaacttcttgtttcagaaggtgaatctatcaaacttgatcagccattaacaagtaatcccactgtgggtggatttggtcagggggatgcggaaatagtacttcaagatccgttacgtg

SEQ ID NO: 136172 - DNA, 242 bp, Glycine max
tgatgttgaaaaggctgaggattggttgaagcctaatgtagtgttggaagcatttgaagctagggcttctaggatgtcagttgcttgtgctcaaaatcttagcaagtttgctaaccctgaagagggttttcaagaactagctgctgatttagttgatgccgcggttgctcattgccagttaattgttgtttccaaatttattgagaagttgcagcaagatatacctggaaagggagtgaaaa

SEQ ID NO: 136173 - DNA, 247 bp, Glycine max
gattttctcaagagaaactttaagcagatgtctaatgttttgtgggtggctcctgaagacaaggcgagtttatggtcacaacttcattatgtttcgtgtaataatctggaaatgcaagaagcttatcttgtcaatctcgtaaatgtgttacgagaactgtatttgcacagtccagaggaagctcgccaattgagaaggaaagctctctctcgtattgaatggctgcaaaaagctgatgtgcctacca

SEQ ID NO: 136174 - DNA, 247 bp, Glycine max
gaaaagacttcatgtgacaatgggtgtaatggaggtcttatgacaaatgcctacaattatttgctcgagtctggtgggttggaggaggagtcttcatatccctacactggggagagaggtgaatgcaagtttgatccagagaaaatagcagttaagatcacaaatttcaccaatatccctgctgatgagaaccaaattgccgcatatttagtaaaaaatggtccacttgctatgggcgtgaatgcaa

SEQ ID NO: 136175 - DNA, 243 bp, Glycine max
gggtactggagaaactatcaatgacagagatcgctgcccacagtgcaagggagagaaggttgtgcaggagaagaaagtccttgaagttattgtagaaaaggggatgcagaatgggcagaagataacattccctggcgaactgatgaagcgccggacacaattactggggatatcgtctttgtccttcagcagaaggaacatcccaaattcaaaagaaaggctgaagatctttttgtagagcac

SEQ ID NO: 136176 - DNA, 248 bp, Glycine max
gaatggagaaagctttaaggccttgctttgagcttacaaatgctgtgcggattggagacttggaactgtttaggaatattgcagacaagtttgccactacctttaatgcagacagaacccataatttgattgttcgtttgcggcataatgtcatcaggactggtttacgcaacatcagcatctcctattctcgcatctctctagctgatgttgcttaaaaagctgaggctgaactctgcaaatcctgt

SEQ ID NO: 136177 - DNA, 252 bp, Glycine max
caactcacctgccgaatcaactagccccgaaaatggatggcgctaaagcgcgcgacctatacccggccgtcggggcaaggaccaagccccgatgagtaggagggcgcggcggtcgctgcaaaacccagggcgcgagcccgggcggagcggtcgtcggtagatatcttggtggtagtagcaaatattcaaatgagaactttgaaggccgaagaggggaaaggttccatgtgaacggcacttgcacatgggtta

SEQ ID NO: 136178 - DNA, 254 bp, Glycine max
ggaagaagcctaacaatattaagctttatgtccgccgtgtctttatcatggactactgtgaggagttgattcctgagtatttgggctttgtcaagggtattgtggattccgaagatctaccactcaacatttcaagcgaaatgttgcaacagaacaagatcttgaaggtcatcagaaagaacttggttaagaagtgccttgagctcttctttgaaattgcagagaacaaggaggattacaacaagttctatgag

SEQ ID NO: 136179 - DNA, 256 bp, Glycine max
gactattgagaaggtggttactaacttgggggcatctgatattgatgcacggctggaagagcttctgattgatggtattctttacgccttccaagagcagaccagtgacgacgctaatgtgatgcttaatgggtttggtgcagttgtaaactcacttgggcagagagtgaaaccatatcttcctcagatttgtggtactatcaagtggcgattgaacaacaagagtgcaaaggtgagacagcaagcagcagatctc

SEQ ID NO: 136180 - DNA, 251 bp, Glycine max
aaaaaaaatcaatgatatagaattctaatatgtaaaggtctatgggttatctcataaaaggtagtgtaataaagcatcaatctaaatcaattcatatctatttatatatgaattaatttataacgtaaacaaattaagagctctgaatcaataaaaactgagaatattgattcacgaaaaaacaaatcaatattcgaaaaaaaaaaagattattaattttaagatatgagaaaggctccattgtcgaattc

SEQ ID NO: 136181 - DNA, 249 bp, Glycine max
aaatggctgaagcacaactacgagaccagcatggcaaccctgtcccactcaccgatcaatacggtaatccggttatcttaactgacgagcgcggtaatcccgtccaactcactggtgtcgctaccaccgctaccggcacagcaggttctgggtttgggtcctatggtaccggtgcttacggtggtggtgcaagtgcaaccaccgttgcagatcttttggcaacccaaccaaggagtggcagggaggcta

SEQ ID NO: 136182 - DNA, 249 bp, Glycine max
cacgtcgacaccaccctccgcttcctcgccgcccaagccgagggcttcggtcgcttcgctatcggcggcctccacggtccccttcaccccgtcacatctctcgcagatgatggaccggggtcactgcgtgacgcgtgtcgcagaaaagaacctttgtggattgtgttcgaagtttccggcaccattcaactctcctcgtacttgaacgtgtcgtctcacaagaccatcgatggtcgtggccagaggatc

SEQ ID NO: 136183 - DNA, 248 bp, Glycine max; identical to SEQ ID NO: 134514

SEQ ID NO: 136184 - DNA, 245 bp, Glycine max
ctgagtttaagcatatcaataagcggaggaaaagaaactaacaaggattcccttagtaacggcgagcgaaccgggaaaagcccaccatgaaaatcggtcgccctcggcgtccgaattgtagtctggagaagcgtcctcagtggcggaccgggcccaagtcccctggaagggggcgccagagagggtgagagccccgtcgtgcccggaccctgtcgcaccacgaggcgctgtcggcgagtcgggtt

SEQ ID NO: 136185 - DNA, 246 bp, Glycine max; identical to SEQ ID NO: 134855

SEQ ID NO: 136186 - DNA, 205 bp, Glycine max
gagcggcaagacagaggaaaccaaagagaaagtctcggagacggcagaggcgacggctaataaggcggcggagatgaaggaggccaccacggagaaggctgccgggactgcggaagcggccaagaacaaggccgcagaagtaaaggacagagctgcagaaaccgcggaagcggccaagaacaagactggcgatactgccactgca

SEQ ID NO: 136187 - DNA, 249 bp, Glycine max
gatggatattacttaggtggcacatttttgttttcctttcaagtgtctcccatctatccacatgaagcaccaaaggttaaatgcaagacaaaggtctatcatccaaatattgacttggaaggaaatgtttgtctcaacatcttacgagaagattggaaacctgtccttaatataaacactgtcatctatggcttgtatcatctcttcacggaaccaaattacgaggatccactgaatcatgatgctgct

SEQ ID NO: 136188 - DNA, 246 bp, Glycine max
ccaggagtaaaccctgatgaggcagttgccatgctaggtggcattgcacagtggtattctgcgctcggatacttgggcgtttatgcttctgggtgtaccactgctctctctgggtattgagactttgggtggtatctttacaagattgatcaaccgcaacactactattcctacaaagaagagtcaggtcttttcaacagcagctgacaatcaaactcaggtaggtatcaaggtgctacaaggtga

SEQ ID NO: 136189 - DNA, 245 bp, Glycine max
agaggatcgacgacatcttgaacaagttcgaccctgtcgttgaaagggtcatcaagaagcgccgtgagatcgtgaggaggagaaagaacggagaggttgttgagggtgaggtcagcggggttttccttgacacttaccttgaattcgctgaggatgagaccatggagatcaaaatcaccaaggaccacatcaagggtcttgttgtcgactttttctcggcaggaacagactccacagcggtggca

SEQ ID NO: 136190 - DNA, 243 bp, Glycine max
ttcattttaatcctaattctgcacttcttgatcattcgatttttctcctcaagatgcagatattcgtaaaaactttgaccggcaagaccatcacccttgaggtggaatcctccgacaccattgacaacgtaaaagctaagattcaagacaaggaagggatcccacctgaccagcagagacttatctttgcgggtaaacaacttgaggatggtcgcacccttgccgattacaacatccaaaagg

SEQ ID NO: 136191 - DNA, 240 bp, Glycine max
tatgaaagtaattatgatgtttttgtcaaagctgagggtggtggcctgtctggtcaggctcaggcaatctctcttggcattgctcgtgccttgctgaaggtgagcgaagatcatagagtacctttgagacaggaaggacttcttacaagagattccagagtggttgagaggaagaaagttggtctcaagaaagctcgtaaagcccctcaatattccaagcgttgaggttgggatgttaca

SEQ ID NO: 136192 - DNA, 244 bp, Glycine max
aaagaaaggaaataattgatctttgaaaatgcagggaggaaagaaagctggagagtccatcaaggaaacagctgcaaacattggtgcttctgccaaggctggcatggagaaaaccaaggccactgtccaggagaaggcagaaagaatgacggcacgtgatccgatgcaaaaggagttggcaacccagaagaaagaggcaaagatgagccaggcagagctggacaagcaggcggcgcgtcagcat

SEQ ID NO: 136193 - DNA, 243 bp, Glycine max
caccgaatgcggcgacgttttcggtgtctccaccgccgcggacactcacgctgcgccggtggtgtccgccggtatcggttcggctgccatagatggcgaccccataaccatcggagaagctctggaagcggcggcaatatcgatcggcgataaaccagtggaccaaaatgacgccgatgcgattggcgtcgcggagattagggccaccggagagaataaggtgaggtccggtggggtgggtga

SEQ ID NO: 136194 - DNA, 248 bp, Glycine max
gtcactacgattgttctaaaagcaattattactcttgagaagaattaaaatatcatcatcacaataacaagatgagttcaggaattagagcatggagtgtggcagctagtgttggagttgtggaggccttgaaagaccaaggcatatgcaggtggaatcatgctttaagatcagctcaacaccatctcaaaaaccatgttggctcattctctcaggctaacaagctttcttctactgctatgatctcc

SEQ ID NO: 136195 - DNA, 250 bp, Glycine max
tgggtatcagcctcatcttatagctccagaacaaggatatcgtcgtctaattgaatcttctctaataactattaggggccctgctgaggcagctgttgatgcggttcactcgctgttaaaggacttggttcacaaagctatcagtgagactttggacttgaagcagtatcctggtctccgggttgaggttggggctgctgctgttgattcactagaaagaatgagggatgaaagcaaaagagcaacactg

SEQ ID NO: 136196 - DNA, 176 bp, Glycine max
catggctcaccctcgactcactaactcgctctgttcttctccgctgcgaagccgttcgtgcatttttgaggtgccgctgtcatgtttgggcgtggtggaccaaggaggagtgataactccaaatattatgatattctcgggatttccaaaaatgccagtgacgatgaaatcaagaa

SEQ ID NO: 136197 - DNA, 246 bp, Glycine max
cggctcgaggaggaagagatggaggcagaggcagaaggtgaagaaggtgcgaactaagcatttacaaggcggcgagaagcataaagcgaagagagaactcgtttgtacaacgcactgagatccatctaccaagactccatcttcgtctccgagatctctcttctatggcctcagctccctctcctcgccaacctccgctgcggcctctggtactcccgccccgccgccttccactccacctgctat

SEQ ID NO: 136198 - DNA, 245 bp, Glycine max
caagaacgttgagaagaaggatcctaccggagccaaggtcaccaaggctgcccagaagaagaagtgaatcgtgcgggctggttcatcaggggatgttggttacaataaatgttggtttcttttctgtactcttgtgtcttcttttctaggtagcttgtttttcggacaaagtttgaagtctccaccatcatctcgcaactgttgttcccagaactgggttcttgatcgacggtggcaaaattgct

SEQ ID NO: 136199 - DNA, 243 bp, Glycine max
ctttttcttctcccaccaacttcaccgtcttcttcctcgatcatgtctcacttcaagggcaagtaccatgatgagcttattgccaatgctgcttacattggcactcctggaaagggtattcttgctgctgatgagtcaacagggacaattggcaagcgtttggccagcatcagtgtagagaatgttgaatccaacaggcgtgctcttagggagctgcttttcaccgctcccggtgctcttaaa

SEQ ID NO: 136200 - DNA, 240 bp, Glycine max
ctggagatgatgacacgcttgctgaagatcaagccttgctcaaaggatccaagtcaacatccaaattgtggaatcagttcaccatcttctccaaagatatgcaggagctcttgcatgaccaagtgtatgttataaatgttctagggtacatagcatacaattttgtcattggagcttactcatactggggcccaaaggcaggatacagcatttaccatatgaataatgctgacttgttat

SEQ ID NO: 136201 - DNA, 240 bp, Glycine max
ggaattagcagacaagatagtgcaaatgagtcaacagaagtttgcctccaatgttgtggagaaatgtttgacctttggaggtccttctgaacgccaattactagtgagtcagatgcttggcaccaacgatgaaaacgaacctcttcaggcgatgatgaaagatcaatttgcaaattacgttgtacaaaaggtgctggaaacttgtgatgatcaacagcgcgactgattctttcccgaatt

SEQ ID NO: 136202 - DNA, 242 bp, Glycine max
ctcgagccggaaaacctaagcttagaattagaaacaaagaaaagaagaaaggaaagaattgatcgttgaaaatgcagggaggaaagaaagcgggagagtccattaaggaaacagctacaaacattggtgcttctgccaaggctggcatggagaagaccaaggccactgtccaagagaaggcagaaagaatgacagcacgtgatccggtgcaaaaggagttggcaacccaaaagatagaggca

SEQ ID NO: 136203 - DNA, 245 bp, Glycine max
cttttctccaaaaccatccaacaagggaaacagaatattattccattttttcacttccacactttcttgcatataatccccattttcaactatggcctcttcagctcaattttccaccactttggtcgtactatgtctcttccaattcctagcaggttcatattcaacgacattcacaattgtgaacaagtgcagctacacagtttggcccggcattttaaccggcgccggaacctcaccgctct

SEQ ID NO: 136204 - DNA, 245 bp, Glycine max
agatgttccaaatgaatggggtaaagctacattttacagaaaatgctctaagatcaattgccagaaaggcaatatctaaaaatactggtgctcggggattacgatcgatactagaaaatgtgttggtagatgccatgtatgagattcctgatattagaacagacgatgatgttatagatgctgttgtcgttgatgaagaggccgttggaggtgaggggcgtgggagaggggctaaaatcctgtat

SEQ ID NO: 136205 - DNA, 253 bp, Glycine max
ctttgtttgcttctcaagtctctcgaagcctctttctctctcttactagaagctatctgtgtttggtgttactaagtctccaacaagcaaagtacatggttgatttggaaatccaggtccccaccccattcgacccgtttgccgaggcgagagaatcggatgcccccggagcaaaggagtatgtgcatattcgaattcagcagaggaatgggaagaagagtctgaccacagtgcaagggctgaagaaggagtt

SEQ ID NO: 136206 - DNA, 249 bp, Glycine max
cactggtaggcaacatgggaacatcggtggcccttactatggaaccaacaccgcagacaccggtactggtaccagaaaacgcctcccaggaggagaccggtatggacgcaatggtggcactgattgtggaacaactggttgcactggttatgggaatggaactgggtatggagtcaacactgaggggtcgcacaatcaagcaggaattaagaaagaacatcgtcaggatgaccaatctcaaggtgatca

SEQ ID NO: 136207 - DNA, 243 bp, Glycine max
  unsure (1)..(243): unsure at all n locations
ctttgcacaagccactcatgcgcgacaagactgtgctggtatccgccggcactacggtattccggtcctcttagctgacgagcgcggtaatcccgtctaactcactggcgtcgctgaccatcgcgaccgttcctccgaggtttctatccaacgnatcagggagcttgccggcgaatttgggaacaacctctcctttcacaaggtggacctacgggacagggatgcactagagcaaatttttgt

SEQ ID NO: 136208 - DNA, 242 bp, Glycine max
gagatgtcatcatcttcagacctggacaggcaaatagagcagttgaagaggtgtgagcctcttaaggagtctgaagtgaaggtgctctgcctcaaagccatggaaatcctcgtcgaagagagcaacgttcaaagggtcgacgctcctgtcaccatatgtggtgatattcacggtcagttttatgacatgaaggagcttttcaaagtaggaggggattgccccaaaactaactatttattcct

SEQ ID NO: 136209 - DNA, 236 bp, Glycine max
tgaagaaggtgttgtttcccagagaggactaattgctttgtcacatggctgtccagaactcgaatacttggccgtctacgtatccgacattacaaatgcatctctagaacacattggtactcacttgaaaaacctttgtgattttcgccttgtcttgctagaccgcgaagagagaataactgatttgccacttgaccaccgaacaagggctctactgaggggttgtgactagctca

SEQ ID NO: 136210 - DNA, 242 bp, Glycine max
ctcgagccgaatcggctcgagtgcatcgtgatgtgaaaccacatactgtaatgattgatcatgagcagcgtaagcttcgccttatagattgggggcttgcagagttctatcatcctgggaaagaatataatgttcgtgtggcatcaagatatttcaaaggtcccgagcttcttgttgatcttcaagactatgattactctctagatttatggagtcttggttgtatgtttgctgggatgata

SEQ ID NO: 136211 - DNA, 241 bp, Glycine max
aaagaaaggaaataattgatctttgaaaatgcagggaggaaagaaagctggagagtccatcaaggaaacagctgcaaacattggtgcttctgccaaggctggcatggagaaaaccaaggccactgtccaggagaaggcagaaagaatgacggcacgtgatccgatgcaaaaggagttggcaacccagaagaaagaggcaaagatgagccaggcagagctggacaagcaggcggcgcgtcac

SEQ ID NO: 136212 - DNA, 242 bp, Glycine max
gaaggttgctgcagaataagcgatgttcttgctcttctttctcttggaagaagaatggtgttgaatcagtttcaagtggtgggatcatattcatatataatagtagaatcccgtctccttaaaggagcgatctctccctcaaagtagaacgagcataatcgaagacagatggtagcgtattctaagtagttgatctcacgtgctatccgaaagtattattagtcttcgtctgctctcaatgc

SEQ ID NO: 136213 - DNA, 240 bp, Glycine max
cttgcttcccaagatcgtgattatcttctctctccaactggggctcaggtgaaagtttctgatcttgaagggagagtagtgggtctattattcgctgcgaattggtacccaccatgccgtggattcacccaaatcctagttggaatctacgaggagctgaaaagcagagtccctcaattggagattgtgtatgtgtcctctgatgaaaacttggatgcctttaatagcttctatggaaac

SEQ ID NO: 136214 - DNA, 243 bp, Glycine max
gtttctcttcctcccttggagaaaaagaagagccaccgctgcgacgccgttcgtgcatttttgaggtgccgctgtcatgtttgggcgtggtggaccaaggaggagtgataactccaaatattatgatattctcgggatttccaaaaatgccagtgaagatgaaatcaagaaggcctatagaaaggcggctatgaagaaccatccagataagggaggagatcctgaaaagtttaaggagttagg

SEQ ID NO: 136215 - DNA, 235 bp, Glycine max
agggtcgccacgtttagcaacaaccaaaccctctctactctttcttcttctcttcgctagggttttagcttcttcctcttcacttcgttcttctggcctctacaatgagcaacgacaaggacaccttcaacgtcgctgatctcacttccgctctcaacgaggacaatagagcagaccttgtcaatgctctcaagagcaagatacagagtttggctggacagcattctgatattct

SEQ ID NO: 136216 - DNA, 242 bp, Glycine max
ctaatacatcatggcagacgagacccagaacaagtatgagagctctgaggttgaggtccaggatcgtggtgtttttgactttctcggtaagaaaaaggatgaagaagacaagcctcatcctcaggaggaggtcatcgccaccgagtttcaaaaagtcactgtctcagaccaaggagagaacaagcacagcctcttagaaaagcttcaccgatctgacagcagctctagctcttcaagtgagg

SEQ ID NO: 136217 - DNA, 239 bp, Glycine max
gaaggaaatggctgaagcacaactacgagaccagcatggcaaccctgtcccactcaccgatcaatacggtaatccggttatcttaactgacgagcgcggtaatcccgtccaactcactggtgtcgctaccaccgctaccggcacagcaggttctgggtttgggtcctatggtaccggtgcttacggtggtggtgcaagtgcaaccaccgttgcagatcttttggcaacccaaccaagga

SEQ ID NO: 136218 - DNA, 239 bp, Glycine max
ctcgagccgcacagagaagggtcagaaatgacttagaaaattctctaccaaaaccatacttaccaagagcattgaaagctcctgatacgggtcacccaaatggaacagcaggccacaggcaccacaacttatctgttcttcagcagcattgtgctttttttgatcaagatgacaatggaatcatttacccttgggaaacttacatggggctgcgttctattggatttaatgttgttgca

SEQ ID NO: 136219 - DNA, 238 bp, Glycine max
aaagaatcaaagaaaggggtggtggctgcttcgaaagcttaataatttgtttatttccagaacatcatagttttcgcagcagcaaactaacaaattactcatatcatataataagatggcccgttctctctcgcaagccaaacgtattggtgtccttgttgctcaatctatctccctaattcccgttcatcggcgaggttacgcagtggcaagagttggattgggtaatattgggcga

SEQ ID NO: 136220 - DNA, 238 bp, Glycine max
gaaacagaatggtttcatgttcttttattgattggttatttctttctgtttgtatctctttttccaattgtggtctcaatgagtttacaagattgaatggccaattctctgcatttaagcgacaactgcgctgaatgataaagatcccctacccccgttgcggggctccccttgccctttcttggttggtaaaccaaccagcgatttacaacaaacaagtctttcctctccctatggt

SEQ ID NO: 136221 - DNA, 150 bp, Glycine max
caaagaaaggaaataattgatctttgaaaatgcagggaggaaagaaagctggagagtccatcaaggaaacagctgcaaacattggtgcttctgccaaggctggcatggagaaaaccaaggccactgtccaggagaaggcagaaagaatga

SEQ ID NO: 136222 - DNA, 246 bp, Glycine max
atcacacacaactactacaagtacttccttacaatcaaaaccataaacaactatggcaagttatcaaaagcactacgatgatcagggtcgcaaggttgacgagtatggcaacgttgagaagcaaaccgacgaatacggcaaccctgttcatgctgctagtgtcacctatgtagccaccagaactgctgctggtggttacagtgatgacattaataagcaacatgataccaccaatgcctacggcgt

SEQ ID NO: 136223 - DNA, 249 bp, Glycine max
cggggctacccgctgagtttaagcatatcaataagcggaggaaaagaaactaacaaggattcccttagtaacggcgagcgaaccgggaaaagcccaccatgaaaatcggtcgccctcggcgtccgaattgtagtctggagaagcgtcctcagtggcggaccgggcccaagtcccctggaagggggcgccagagagggtgagagccccgtcgtgcccggaccctgtcgcaccacgaggcgctgtcggcga

SEQ ID NO: 136224 - DNA, 256 bp, Glycine max
cttgttcttcatgtagaaaagctcagcagaaatgtcaatgaagggcatttgaaagaaattttcagtaactttggtgaggctataagtgtggagttggcaatggatcgaactgtcaatcttccaaaagggtatggatatgtgcagttcaagacaagaggggaggctgaaaaagcattattgtacatggatggtgcccaaatagatggcaatgtcatcaaggcaagatttactctacctccaaggcagaaagtttcac

SEQ ID NO: 136225 - DNA, 254 bp, Glycine max
gaagataagggatgtttgggttaatcggaagaaaggccaatttgttggtaggatcgggaacaagaagaaggtggttgagcttcgcagcaacagccacaaccacttctaatggtggtgccatggacggcgttgctttcgcaactccaatctaatgtccaaaaggctcttgctggtggaggacccgaggcagtgaagaggaacaagagtaggaacaaatttctgccccgccaaagaatcgatcgcctccttgatcc

SEQ ID NO: 136226 - DNA, 254 bp, Glycine max
ccagactgaagttctgcatttgctcgagtcgccagaagccctgaaagcaaaggtggcggaggcaatggacgtcctaagaaatgttgctcagcaacaggctggcggtactgcggatcagctggcttcattatctcttaatgacaaccttgtttcttaaggtttatattttggatttatttagtgacgatgggttgttattttcggcactggctctgatacagtttcaggttgcgtttgtttcgttagattagaca

SEQ ID NO: 136227 - DNA, 257 bp, Glycine max
ctcatctttctctcttctctctccacccaaaccctaactcccgaccctgttcccctctcgtatccgtcatgaaaggaggaaagtccaagaccgaatctaagagagccgatcccaaacttgctgtgaataagaagggagccgccaccaaggctaggaaacccgccggcaaggggaaggcagcgaaagaccctaacaagccaaagaggcctccaagtgctttcttcgttttcatggaggagttcaggaaggtattcaac

SEQ ID NO: 136228 - DNA, 256 bp, Glycine max
aggtgatcatactagtcaaataaccaaagaacacctagagcccaacttagaagggctcactgtagatgaggcaattcaaaacaagagattgttcctactagatcatcatgacccaatcatgccatatttgaggcgaataaatgcaacctccacaaaggcttatgctaccagaaccatccttttcctgaaaaatgacggaactttaaggccacttgccatagagttgagtttgccacatcctcagggagatcaatct

SEQ ID NO: 136229 - DNA, 255 bp, Glycine max
cgcgatactgataagagagataccaacaagaaaagaaaaaaagaagagttgagattccctttgaagaaaagatggcatcccataggcaaagctatgaagctggtcaaactaagggccgaactgaggaaaagacgaaccagacgatgggcaatattggagagaaggctcaagctgcaaaggagaagacccaggaaatggcccaagctgcaaaggagaagacccaacaaacagcccaagctgccaaggacaagactt

SEQ ID NO: 136230 - DNA, 257 bp, Glycine max
caaagacacaacccagaagacctagacaagaagaaccacgtgaaagaggatgcgagacaagaaacggggttgaggaaaatatctgcaccttgaagcttcacgagaacattgctcgcccttcacgcgctgacttctacaaccctaaagctggtcgcattagtaccctcaacagcctcaccctcccagccctccgccaattccaactcagtgcccaatatgttgtcctctacaagaatggaatttactctccacattgg

SEQ ID NO: 136231 - DNA, 258 bp, Glycine max
cctgccagtagtcatatgcttgtctcaaagattaagccatgcatgtgtaagtatgaactaattcagactgtgaaactgcgaatggctcattaaatcagttatagtttgtttgatggtatctactactcggataaccgtagtaattctagagctaatacgtgcaacaaaccccgacttctggaagggatgcatttattagataaaaggtcaacacaggctctgcctgttgctttgatgattcatgataactcgtcggat

SEQ ID NO: 136232 - DNA, 261 bp, Glycine max
caacaactatggcaagttatcaaaagcactacgatgatcagggtcgcaaggttgacgagtatggcaacgttgagaagcaaaccgacgaatacggcaaccctgttcatgctgctagtgtcacctatgtagccaccagaactgctgctggtggttacagtgatgacattaatcagcaacatgataccaccaatgcctacggcgtagacactggtagacagcattctagtggtggctacgatggtgacactaataaacatcatg

SEQ ID NO: 136233 - DNA, 261 bp, Glycine max
cattgatctttgaaaatgcagggaggaaagaaagctggagagtccatcaaggaaacagctgcaaacattggtgcttctgccaaggctggcatggagaaaaccaaggccactgtccaggagaaggcagaaagaatgacggcacgtgatccgatgcaaaaggagttggcaacccagaagaaagaggcaaagatgagccaggcagagctggacaagcaggcggcgcgtcagcataacacggcggcgaacaggctgccacggcag

SEQ ID NO: 136234 - DNA, 177 bp, Glycine max
ggtactgatttggggacaaccaattcatgtgttgccgtgagggtatgcctgtacgccttagttattgatcagtctaatggtgcacgaagatcaccatcggtgggtgctttcaacctgagaggggagctgctgtaggtaccccagcttagcgtcaagctgtaactaacgcacctgaca

SEQ ID NO: 136235 - DNA, 255 bp, Glycine max
gttcagtgtgtcgtttaaaaatgtcgcagttgctggataaagccaagaacttcgtgtcggagaaggtaaatgatatggccaagccggagggcagtgtcactgacgtggacttcaagcgcgtgagcaaagataatgtcgagtacttggccaaggtctctgttcgtaacccttattcaacttccatacccatttgtgagatcaactactctttcaaaagcgcatccagggagatagcatcagggaaaattccagacc

SEQ ID NO: 136236 - DNA, 253 bp, Glycine max
attcctcagtccatttcacagcaaactgtttggaatcaaatggcaacagtgagaacaccattgaattttgattctagcaagcagagcttttgtcaattttctattgaccttctcggtggaggaattttagtggacaaaactggagattggatcacacttatacaaaattctccaattagtaacttgttgagagttgctgcttggaagaaaggctgtttaatggttaagattgtgatgtctgggaatgcagcag

SEQ ID NO: 136237 - DNA, 251 bp, Glycine max
cgatcttaaggcacagatctcaacacttgtagagaaaggcaaggagatgagcaaggcagagactgaggcaggggatgaaggtcctattgtgactgaagctgacatacagcatattgtctcatcctggactggtattcctgttgagaaagtctcaacagatgaatctgatcgcctcctgaagatggaagagactttacataagcgagtcattggtcaggatgaagcagttaaagccattagtcgggctatcc

SEQ ID NO: 136238 - DNA, 246 bp, Glycine max
ccattcctcagtctatttcacagcaaactgtttggaatcaaatggcaacagtgagaacaccattgaattttgatcctagcaagcagagcttttgtcaattttctattgaccttcttggtggaggaattttagtggacaaaactggagattggatttctcttatacaaaattctccaattagtaacttgttgagagttgctgcttggaagaaaggctgtttaatggttaagattgtgatgtctggga

SEQ ID NO: 136239 - DNA, 255 bp, Glycine max
ccgatactgataagagagataccaacaagaaaagaaaaaaagaagagttgagattccctttgaagaaaagatggcatcccataggcaaagctatgaagctggtcaaactaagggccgaactgaggaaaagacgaaccagacgatgggcaatattggagagaaggctcaagctgcaaaggagaagacccaggaaatggcccaagctgcaaaggagaagacccaacaaacagcccaagctgccaaggacaagacttg

SEQ ID NO: 136240 - DNA, 260 bp, Glycine max
cgcaagatagcaaagatgacgcaggtgacgctgcacagaatgtcagtagattatgcacgtgatgcagtgcagtgagagatcgagtattctggtgatgcttctcacaagagcaaagaggcgtcggatcaggccattgcgacggctaagaagacccaagattcggtcggtgatgctgctcagagaagcaaaggggctgctgcatatgctagtgctgcggctcagaggtccaaagagtaggctggtgatgctagcacagagat

SEQ ID NO: 136241 - DNA, 262 bp, Glycine max
caggctgcttctttccccattgctaaagagggaaagtctggtgtttctctcaggtacaccacaatgttcggtgtttcattgtcggatactctcaaatctgacgctcagcttttcctcattgacatgcaaagaaacaccaacaccttggctggacatgtgccacccaaggctaaccttggtgacttgaggggactagctggaggcttgaatgggctaaacacttcagccatgatagatggaggatcctttgatggcaccaagg

SEQ ID NO: 136242 - DNA, 251 bp, Glycine max
cgaaaccacagccaagggaacgggcttggcggaatcagcggggaaagaagaccctgttgagcttgactctagtccgactttgtgaaatgacttgagaggtgtaggataagtgggagctggaaacagcgaaagtgaaataccactacttttaacgttattttacttattccgtgaatcggaagcggggcactgcccctctttttggacccaaggtcggcttcggccggtcgatccgggcggaagacattgtc

SEQ ID NO: 136243 - DNA, 252 bp, Glycine max
ccacgaggcagtttatgcaaaggaaacaaagatgggtgaatatgcagattatgcgactcagaaggcgagggaaacgaagcagaaggctggggagtatacagactatgcggctcagaaagcaaaagacaccaaagactatgctgctgagaaggctaagaatgctaaagataccactgtgcagaaagctggagagtacaaggattataccgctgagaaggctaagaatgcgaaagataccactgtgcagaaagc

SEQ ID NO: 136244 - DNA, 251 bp, Glycine max
gcagggaggaaagaaagctggagagtccatcaaggaaacagctgcaaacattggtgcttctgccaaggctggcatggagaaaaccaaggccactgtccaggagaaggcagaaagaatgacggcacgtgatccgatgcaaaaggcgttggcaacccagaagaaagaggcaaagatgagccaggcagagctggacaagcaggcggcgcgtcagcataacacggcggcgaagaggctgccacggcagggcacat

SEQ ID NO: 136245 - DNA, 251 bp, Glycine max
ccaacacaaacacaagcacaaggacagtgatctctctttctatctttttgtctgtctctctgaacacgttgatggattccccctctcgcccctccgtcatcatcgtaggtgccggcatctccggtatcgcggcggcgaaggtgttggccgagaacggcatagaggacctggtgatcctggaggcttcggaccgcgtcggcggcaggatccgcaaggagagtttcggcggcgtgtcggtggagctcggtgcc

SEQ ID NO: 136246 - DNA, 252 bp, Glycine max
caaaattctccaattagtaacttgttgagagttgctgcttggaagaaaggctgtataatggtcaagattgtgatgtctgggaatgcagcagtcaaaaggagtgattgggcctcattggtacaagtgtttttaacaaacagcaacagtacagagcattttgatgcatgtaagtggacaaaatcagaaccacattcctgggaattgatcttcccaatagaggtatgtggtcctaataatggttttgaaatgtgg

SEQ ID NO: 136247 - DNA, 221 bp, Glycine max
attcggctcgagaagaacctaagtgagtaaccaagaaaggccttaattgctctttaaaaatgctcagtggagataaagctgttgagtccatcaaggtgttagttgtagatatatcatgcttctatcaatgcttgatatggaggcaatcaaggccactgtccagagaggacggctgactagacatgacggatacgtgatccgatgcaataaggagtttgcaa

SEQ ID NO: 136248 - DNA, 253 bp, Glycine max
cattgcaggtcattgccttggatataaatttaccagttaagcaagcattccatgttctttacgagcaggggatatctatggctcctcgatgggatttgtgcaggaggcagttcgttggagttctgagtgcaatggacttcattctgaatattgaaagagctcggggaagcatagttcaaatttgactcaggaacaactcgagactcatactatagctgcctggctagaaggataatttcaactcttcagaaca

SEQ ID NO: 136249 - DNA, 250 bp, Glycine max
agctattatactctctagagtaattgcggaatctgctagaattttctaataatggcgaaagacgttgagcaggtcacagagcaaggtgaatactccgcgaaggactaccatgaccctcctccggcaccgttgatcgacccagatgagctcacaaagtggtccttgtacagagccgccatagctgagttcatagcaacactcctttttctttacatcaccgtgttgaccattattggctacaagagacaga

SEQ ID NO: 136250 - DNA, 249 bp, Glycine max
caggaaaaagttgtattgaaattttcacaagaggaatttcttacagcttggtcaactcaggtgcgtcctgcaacaactctgttggctgatgggtgtccatatttgtatgctatggtgcatgatagttcagtgtctacaataccaggtgattttgtcattggtgttaagttgacaaccataaacaatatgtgtgcatatgggctcaatcctggtatttcaggttctcgtcttttgggcaccattcctcag

SEQ ID NO: 136251 - DNA, 249 bp, Glycine max
cctcgagccgattcggctcgaggtgcgagtcaacgggcgagtaaacccgtaaggcgcaagaccgctgattggtgggatccacctgtgggttgcaccgccgaccgaccctgatcttctgtgaagggttcgagtgagagcatacctgtcgggacccgaaagatggtgaactatgcctgagcggggcgaaccagaggaaactctggtggaggcccgcagcgatactgacgtgcaaatcgttcgtctgacttg

SEQ ID NO: 136252 - DNA, 249 bp, Glycine max
ggcatctggttttgaggaatctatgaagtataagacgctcaccaatgctcagaggtctggtctaaaccagatacccaaccgaagatttacactatggtggtcgccaaccattaaccgagccaatgtttatgtgggtttccaagtgcagctagatctgactggtattttcatgcatggaaaaataccaactttgaagatatcccttattcagatattcagagctcacttgtggcagaagatccacgagag

SEQ ID NO: 136253 - DNA, 249 bp, Glycine max
cgtgattatgggtgtgagaaatatgcttgctgctaaagatgtcaaagaaacattacttaaggagattccctccgctaaagttgatgccatggagttagatctcagttcattggagtctgtcaagaaatttgcatcagagtttaagtcctctggtcttccattgaatatgttgataaacaatgcaggaattatggcatgtcctttcaagctctctaaagacaaaattgaactacagtttgccacaaatca

SEQ ID NO: 136254 - DNA, 250 bp, Glycine max
cttgcttttgttgcacaattgtttcatcataggagtggtctatctacagacactaaaaagatgtcctatgctgagatgatgactgatgatgtgcaaacatctagagaagagagatgcttccgactgtggatcaatagtcttggaatttctacacatgtaaataatctgtttgaggatgtcagaaatggatggatacttttagaagtgttagacaagatatttccaagatcagttaactggaaacatgcaa

SEQ ID NO: 136255 - DNA, 252 bp, Glycine max
cagaattggaggtgctcagttcactctaaatggaatccattacaaattagttgctaatgaaggaaacaacacacttcatttgacaaggtacataaaagatgatgacaaacccagaatcaccttcagttatcacagttatgatggtgaaggaggatttcctggggacctcctagtaactgtgagctacattcttgggaaaaactcattaagcataatcatgaaagcaaaagctctgaacaagcctaccccagt

SEQ ID NO: 136256 - DNA, 255 bp, Glycine max
cactgatcgggggcgttcgtagtgactgagggggtcaaagaccaagaagtgagttatttatcagccaagcattctattcttcttatggctagatccaatctcctggtccctgtggaaaggaaaaagaatttttcacgttcttcctttcgggaaggaaggattagtaaaatcctattgattgcaattttctccagacccccgggaaaagcatgaaaaaaaggctcgaatggtacgatcccaccgtcaccccagaat

SEQ ID NO: 136257 - DNA, 251 bp, Glycine max
cagaaagagagagaagaagaaaagaagaacaaagatgcaatcctcaaaggagaagatgaaaaacatggcaagtgctgccaaggaacaagtcgacatctataaagccaaaatagacgagaaggcagagaaagcaacggcaagaacagaagaggagagggtgatagcccatgagcacgcaaaggcaaaggaagctggagcaaagatggagctgcatgaagctaaagcaaggcatgcagcagagaagctaagcg

SEQ ID NO: 136258 - DNA, 248 bp, Glycine max
gaaagaaagaccatcaaagtttcacttcagccttatccggtttagggtttcggtttttgacccaacctttgacgtatcgaaaccttaagtttcggatcaggtctgagcaatctggttggtagaactttggtcttagagagtcaagttttatgtctgaattagacgatcaaattcctactgccttcgatccttttgctgatgcaaatgctgatgactcgggtgctgggtcaaaggagtatgtgcatatt

SEQ ID NO: 136259 - DNA, 248 bp, Glycine max
ctcgttgattccaagtttcttcggcaccgggcgaagaaccaacgtcttcgaccccttctccctcgacgtgtgggacccattccatggcttccccggcaccaccgccctctccactccgcgctccgagacggcggccttacgccaacacgcgcatcgactggaaggagacggcggaggcgcacgtgttcaaggcagacctgccggggctgaagaaggaagaggtgaaggtggagatcgaggaggaggga

SEQ ID NO: 136260 - DNA, 247 bp, Glycine max
cttcgccgtgtctctccaacgattcggtttctggattcaaagacaaggagtcaatggttgacccctttttggtcgaggctctccagaaccctcgtcaccgcctcaccattttgaggatggagctggagatccagaagtttttgaataatgctgatcagctgcattttgagtttcatcatttcccttcttcctatctccgactggctgcacaccgtgttgctcaacactacaacatgcaaacaatggt

SEQ ID NO: 136261 - DNA, 248 bp, Glycine max
ctacaacgtgagagtcaactcaataagaatcaaccagcacagtgtgttcccactgaacaagatatcatccaccatcgtagggtcgacctctggaggaaccatgattagcacctcaactcctcacatggttctccagcaatccgtgtaccaggctttcactcaggtgtttgctcagcagctaccaaagcaagcacaggtgaaatctgtggcaccatttgggttatgcttcaactccaacaagatcaatg

SEQ ID NO: 136262 - DNA, 248 bp, Glycine max
caactacaagaaagaacttccttataaccaaaaccaacaacaactatggcaagttatcagaagcactacgatgatcagggtcgcaaggtcgacgagtatggcaatgttgagaggcaaactgacgaatatggcaacccggttcatgccactagtgtcacttatgtagccaccaaaagtgttggtggctacaatgatgacgctaataagcaacatgatattactggtgtctatcccgagaaagacaccgg

SEQ ID NO: 136263 - DNA, 253 bp, Glycine max
ctaaaacgtccacacattctccgtcgccacaacaacaatggctccgaagaaaggtgtgaaaggttccgttgtagcagcgaagaagaaggttcaggagaaggtgacgaatcctttgttcgagaagcgtccgaagcagttcgggatcggaggcgcgctgccgccgaagcgggacctgacgcggttcgtgaagtggccgaagaacgtccaaatccaacgcaagaagcgcatcctcaagcagaggctcaaggtccct

SEQ ID NO: 136264 - DNA, 252 bp, Glycine max
gggaggaaagatagctggagagtccatctaggaaacagctgcaaacattggtgcttctgccaaggctggcatggagaaaaccaaggccactgtccaggagaaggcagaaagaatgacggcacgtgatacgatgcaaaaggagttggcaacccagaagatagaggcaaagatgagccaggcagagctggacaagcaggcggcgcgtcagcataacacggcggcgaacaggctgccacggcagggcacattgga

SEQ ID NO: 136265 - DNA, 255 bp, Glycine max
cggctcgagcggctcgagattagcgttgccattctcatcctcctctgtctctctctctccaccattgccatacatccttacaagctccggccatccagcgccttcaattctcccttctggactacaaattctggtgctcctgtttggaacaacaactcctctttaaccgttggagctagaggtccaattctgcttgaggattatcatcttgtggagcagcttgcaaactttgacagggaacgtatcccagaacgt

SEQ ID NO: 136266 - DNA, 251 bp, Glycine max
cgctcagccatgaacatggtgaagcacccaaacatcgtgcagcttcacgaggtcatggcgagctcgtccaagatctacatcgccacggagctcgtccgcggcggcgagctcttcaactaagatcgccagacgctgtctccgggcggagatggccagactttacttccaacaactcatctctgctgtggacttctgccacagccgcggcgtctaccatcgtgaccttaagccagagaatcttctcctcgacg

SEQ ID NO: 136267 - DNA, 246 bp, Glycine max
gaccgagctagctagctagcaagcaagcacagagatggaggcaaagcgaggccatgccctcatgtgcttggcacgtgtttcactcttcctctgcgctctaaccctatccgctgctcacggaagcaccacggttcaagacatcgcgagacagttgaacctcggggacaacgagcttctgcgcacggagaagaagttcacggttttcatggagaattacgggaggagctactccacagaggaggagta

SEQ ID NO: 136268 - DNA, 242 bp, Glycine max
ctttgaagatggcacaagttgaacttcgtgacgagcatgggaacccagttgaactaacagatgcatatgggaatccggtttggttaacggccgagaaaggcaacccggtgcacctcacggctgtggcaaccaatgcacacaaatctatgcttcagaatgacaccccacaagagcttcctcactccaagagttcaagctcgtctgaggatgaagggcatggagagaggatcaggtagggactg

SEQ ID NO: 136269 - DNA, 244 bp, Glycine max
ctcaaaacaacaagcaagagcttgatgaaagagcaaggcaaggcgagactgttgtcccgggtggaactggtggcaagagcctggaggctcagcaacaccttgctgaagagaagaagggttttggggaaaaggctgaactcgagggaataacaagagtggtggtgggaagagagtgcagcaaagaggagaaacaaggaagaacaagagagaaagtagaggcagagaaagcaagatcaatggagaa

SEQ ID NO: 136270 - DNA, 246 bp, Glycine max
ctggcaacaaaccatactggatcatcaagaattcgtggggggagacatggggagaagatggctattacaagctctgcagagggcatggcatgtgtggaataaacactatggtttctgctgcaatggtgcctcaaccacaaacaacacgtggaaagaattatgcttcttattagctatgcacttaaggcaatctaaataaatattgttcattctaggtgctgtatcatgtatgtaccagaatatttt

SEQ ID NO: 136271 - DNA, 246 bp, Glycine max
ccaggattctacccgccgctcgatgggaattgcgcttcaaggcgtctcgtagggctaatccgcctcacgagggtcaccaacggcacgtgcctttggggggccgaggccccctactgctggtcggcaaacggacggcgggcgcacgcgtcgcttctagcccggattctgacttagaggcgttcagtcataatccaacgcacggtagcttcgcgccactggcttttgcaccaagcgcgatgaccaatt

SEQ ID NO: 136272 - DNA, 249 bp, Glycine max
ctcgagacgatcaactttcgatggtcagatagtagccgacgagagtggtgacgggtgacggcggattagggctcgattccggagagggaggctgagatacggcgaccacatccacggaaggcagcaggcgcgcaaagtaggcaatcctaacacggggaggtagtgcacaataaataacactagcgggctcattactgtctggtcattaggatgactactatctgaatggcatatcgtcgctacattgga

SEQ ID NO: 136273 - DNA, 251 bp, Glycine max
cacagacatccacagcaatacgctgacccaggaacccaggttccaccagtatacccacggtgcgaagcacaccgacgaatgacccgaccctgttcatgctgctagtgtcacctatgtagccaccagaactgctgctggtggttacagtgctgacattaatccgcaccatgataccaccaatgcctacggcgcagacactggtagaccgcattctagtggtggctacgatggtgacactaataaacatcatg

SEQ ID NO: 136274 - DNA, 262 bp, Glycine max
tgatctatctacattcaatggtggtaccaactttgttactccttgttagaccaagggtgcaaagtcttagtgcttctattattgctcatatcgtccttatttacaccattgtctccgcgaccgatgccagactgaacgccagtgattcgctcgtccccattttggcacctcttgcctattgagttcgcgatgttcttggttcacttggcaacgatcgctatcagtgacactggtatcaaggctgctcgtattcttagtgctg

SEQ ID NO: 136275 - DNA, 251 bp, Glycine max
gtcttccttccctttcttctccggaaccacccatatgaattcataacccgatgcttccatcccgcatgcaatctcgtaaagctgtttatccggaaaatagcagagggtcccaaaacttatgtacaccaccgagttgtctcgcttggagtcgagccaactcaggcactcgttcgcactcaccacgctcttctggcccctctctgctttctccagagcggttctgcgaacgagggacgctgggccaaggtgcc

SEQ ID NO: 136276 - DNA, 255 bp, Glycine max
gtagctttagctgcaccaatgccacgatcaagaagttcaaagatgcattagccaaacacaccccagacagatgcagcttaggcccaaccaaagggttagaggagaaagaactcgaagctcttgctgccaacaaagatctttccttcacctactcaccaaaaccattacaaccttcacatgaaaacgaagagttggcaaccgaaactgcttctgctcctgctcttggttcaggatctcttccttcaccttcaatga

SEQ ID NO: 136277 - DNA, 151 bp, Glycine max
ggagcaagaacttaagtacctggaatttgtgcaattcgcgaccatccaggccctgatgcgctgcgccatcctctactcctacgccaaggagcgcgcgggtcctctgaagcccggcgtcaacaccgtcgaggaggccgtgaagaccgtcgtg

SEQ ID NO: 136278 - DNA, 243 bp, Glycine max
gtggttacagtgatgacattaataagcaacatgataccaccaatgcctacggcgtagacactggtagacagcattctagtggtggctacgatggtgacactaataaacatcatggaactactggtggctataatgatgacaccaatagacatcatggaactaccggtgtctatggtatagacaccgataggcaacaacatgggactactggtggctatgccggtgacactggtaggcaacatg

SEQ ID NO: 136279 - DNA, 246 bp, Glycine max
gaaaacagcatcgaacccgtcgtagcagaaaaacttgtcaccatggtttcttccgacaaggatccacgagaggatgtccttcaagcctggtacatggatgatagtgatgaagatcaaagactcccccaccacaaagaacccaaggagtttgtctcgttggaccaacttgctgaacttggagtccttagctggaaactagatgctgataaccatgaaaatgatccagagctgaagaagattcgtgaa

SEQ ID NO: 136280 - DNA, 151 bp, Glycine max
tgcagaccgagctagctagctagcaagcaagcacagagatggaggcaaagcgaggccatgccctcatgtgcttggcacgtgtttcactcttcctctgcgctctaaccctatccgctgctcacggaagcaccacggttcaagacatcgcgag

SEQ ID NO: 136281 - DNA, 149 bp, Glycine max
gcagaccgagctagctagctagcaagcaagcacagagatggaggcaaagcgaggccatgccctcatgtgcttggcacgtgtttcactcttcctctgcgctctaaccctatccgctgctcacggaagcaccacggttcaagacatcgcga

SEQ ID NO: 136282 - DNA, 250 bp, Glycine max
tcattttccaactacatttcttccaccaactcataaaatcctcatatctgttcccaaaagcttgtttgtgagaatggcttcgggtgaaaagaaattcccacctcaacaacaacaaacacagcctgggaaggagcatgctatgaatccagtaccccaattcactagccctgactacaagccttcaaataaacttcaaggaaagatagcattagtgcctgggggtgactctgggattggacgagcggtgtgt

SEQ ID NO: 136283 - DNA, 246 bp, Glycine max
ggggaataagccaattgtttattcatcaaaagatggccatgctagcttccctcatcccgggacgtaccttcagggatcatccaaactaggaattggagtacgcaatgatgcagctcaaagcaaatttattgtggattcgagtgtcaaatatcagattgttgcggccgagtatcttggtgaaggagtcattacagaaccatgttggttgcagtatatgagagagtggggtcctaccgttgtatatga

SEQ ID NO: 136284 - DNA, 243 bp, Glycine max
cactgtccctgtctactatccagcgaaaccacagccaagggaacgggcttggcggaatcagcggggaaagaagaccctgttgagcttgactctagtccgactttgtgaaatgacttgagaggtgtaggataagtgggagctggaaacagcgaaagtgaaataccactacttttaacgttattttacttattccgtgaatcggaagcggggcactgcccctctttttggacccaaggtcggctt

SEQ ID NO: 136285 - DNA, 241 bp, Glycine max
agaaaaatggctgatacaagtggaggagatgcagtgagaccggtggtaatatgtgataacaagtgtggctgcacagttccatgcactggtggttccacttgcaggtgcacaagtgtcggcatgacaactggaggcggtgatcacgtgacatgctcgtgcggagagtactgtgggtgcaatccatgctcatgtcccaagactgcggcttctggaactggttgcagatgtggcacagattgct

SEQ ID NO: 136286 - DNA, 247 bp, Glycine max
cttccttataaccaaaaccaacaacaactatggcaagttatcaacagcactacgatgatcagggtcgcaaggtcgacgagtatggcaatgttgagaggcaaactgacgaatatggcaacccggttcatgccactagtgtcacttatgtagccaccaaaagtgttggtggctacaatgatgacgctaataagcaacatgatattactggtgtctatcccgagaaagacaccggtagacatcattttgg

SEQ ID NO: 136287 - DNA, 215 bp, Glycine max
gggaaagaggctgtgagcctaatgtttatacttataccgtgttgattgattacttgtgtaaggagggtaggatggacgaggcgttgaagatgttgaatgagatggtggagaaaggcgtggctcctagtgttgtcccgttcaatgccttgattgatagttattgcaaacgggggatgatggaggatgccgtgggggttttgggtttgatggagtcg

SEQ ID NO: 136288 - DNA, 246 bp, Glycine max
gcccgcgataatttactcttttattagcaataaaaatatacagataaatgaagaggtgaaagaaagagagaaaaaaaatcaatgatatagaattctaatatgtaaaggtctatgggttatctcataaaaggtagtgtaataaagcatcaatctaaatcaattcatatctatttatatatgaattaatttataacgtaaacaaattaagagctctgaatcaataaaaactgagaatattgattcacg

SEQ ID NO: 136289 - DNA, 244 bp, Glycine max
aactcaggtgcgtcctgcaacaactctgttggctgatgggtgtccatatttgtatgctatggtgcatgatagttcagtgtctacaataccaggtgattttgtcattggtgttaagttgacaaccataaacaatatgtgtgcatatgggctcaatcctggtatttcaggttctcgtcttttgggcaccattcctcagtctatttcacagcaaactgtttggactcaaatggcaacagtgagaaca

SEQ ID NO: 136290 - DNA, 251 bp, Glycine max
ctacacagtacacacactagaagaataatggcttccatcctccactactttttagccctctctctttcttgctcttttcttttcttcttatccgactcagtcacccctacaaaaccaataaaccttgttgttctacccgttcaaaatgatggttccacagggctccattgggccaacctccaaaaaagaacccctctaatgcaagtaccagtcctggtggacctcaatggaaatcacttgtgggttaactg

SEQ ID NO: 136291 - DNA, 216 bp, Glycine max
agaggaagggggtgagattgttttcggtggtgttgatcctgctcactataagggaaagcacacttatgtgcctgtgaccagaaaaggatattggcagtttgatatgggagatgtacttattggcggtaaacccactggatattgtgctaatggctgttcagccattgcagactcagggacttctttgttggcaggtccaacgactgtcataactat

SEQ ID NO: 136292 - DNA, 250 bp, Glycine max
gttgggttagcacatcttgtaaaaggttgctgcacagtgcttgagtcatgccacatggtttattgctctggtgtaacttcagttggagtagcaactgtggtttctagttgtcccaacataaaaaaggttcttgttgaaaagtggaaggttagccaacgtactcagcgtcgagtaggctcagtcatctcctacttgtgcatggacctctagatctccttcggtgtatatgtacacctccaagttttttttt

SEQ ID NO: 136293 - DNA, 245 bp, Glycine max
gaagaaaagaagaacaaagatgcaatcctcaaaggagaagatgaaaaacatggcaagtgctgccaaggaacaagtcgacatctataaagccaaaatagacgagaaggcagagaaagcaacggcaagaacagaagaggagagggtgatagcccatgagcacgcaaaggcaaaggaagctggagcaaagatggagctgcatgaagctaaagcaaggcatgcagcagagaagctaagcgccaaccaat

SEQ ID NO: 136294 - DNA, 243 bp, Glycine max
gatggcacaagttgaacttcgtgacgagcatgggaacccagttgaactaacagatgcatatgggaatccggtttggttaacggacgagaaaggcaacccggtgcacctcacggctgtggcaaccaatgcacacaaatctatgcttcagaatgacaccccacaagagcttcctcactccaagagttcaagctcgtctgaggatgaagggcatggagagaggatcaggaagggactgaaggataa

SEQ ID NO: 136295 - DNA, 214 bp, Glycine max
aagaacctaagtgagaaacaaagaaaggaaataattgatctttgaaaatgcagggaggaaagaaagctggagagtccatcaaggaaacagctgcaaacattggtgcttctgccaaggctggcatggagaaaaccaaggccactgtccaggagaaggcagaaagaatgacggcacgtgatccgatgcaaaaggagttggcaacccagaagaaaga

SEQ ID NO: 136296 - DNA, 251 bp, Glycine max
gttttgtgagatagcacatagcatagcaaggaaggagtattacaaccgaaaccctgaagaaaaaaagagtagaggaagaaaaaacacctgcaccaccaacgatgggtgtggattactacaagatcttgcaggttgataggagcgccaaagacgacgacttgaagaaggcttataggaaacttgctatgaaatggcaccctgataagaaccccaacaacaagaaagaagctgaagctaagtttaagcagatt

SEQ ID NO: 136297 - DNA, 172 bp, Glycine max
tattttctcaagagaaactttaagcagatgtctaatgttttgtgggtggctcctgaggacaaggcgagtttatggtcacaacttcattatgtttcgtgtaataatctggaaatgcaagaagcttatcttgtcaatctcgtaaatgtgttacgagaattgtatttgcacagtc

SEQ ID NO: 136298 - DNA, 253 bp, Glycine max
gctgctctaagagaaggtttacctctgaggaagtctgaggaggctttctatctaaactgggctgttcactcatttaggattaccaactgtggtgtggaggacactactcagattcacactcacatgtgctactccaacttcaatgacatcattcactcaatcatagacatggatgctgatgtgatcaccattgagaactctagatcagacgagaagttactttcagtcttccgcgagggagtgaaatatggtg

SEQ ID NO: 136299 - DNA, 248 bp, Glycine max
agtttttctgcctgcagatgaaggtgttgaaagttctatttggctgctagcaaaggcttatgtagttgtgaatgactcgtgctatcatcaacttgtcagccattggttaaacactcatgcagttgttgagccattcatcatagcaacaaacaggcatctcagtgttgttcaccctatttataaactccttcaccctcactatcgtgacaccatgaacataaatggccttgctcggttatcactggtca

SEQ ID NO: 136300 - DNA, 247 bp, Glycine max
gtgcggtttcctttgttggtgttgctgggaactgttttcctggcatcagtttgtgtctcattaaaggtgagagaggatgagaataaccctttctacttgagaagctctaacagcttccaaactctctttgagaaccaaaacggtcgcattcgtctcctccagagattcaacaaacgctccccacaacttgagaaccttcgagactaccggattgtccagtttcagtcaaaacccaacacaatccttc

SEQ ID NO: 136301 - DNA, 249 bp, Glycine max
gcagagaatgctgcaccctagatggcgagagtccagtagccgaaagcatcactagcttacgctctgacccgagtagcatggggcacgtggaatcccgtgtgaatcagcaaggaccaccttgcaaggctaaatactcctgggtgaccgatagtgaagtagtaccgtgagggaagggtgaaaagaacctaagtgagaaacaaagaaaggaaataattgatctttgaaaatgcagggaggaaagaaagctgg

SEQ ID NO: 136302 - DNA, 248 bp, Glycine max
agcatgggaacccagttgaactaacagatgcatatgggaatccggtttggttaacggacgagaaaggcaacccggtgcacctcacggctgtggcaaccaatgcacacaaatctatgcttcagactgacaccccacaagagcttcctcactccaagagttcaagctcgtctgaggatgaagggcatggagagaggatcaggaagggactgaaggataacatagaagaaaagttaccagctggagaagga

SEQ ID NO: 136303 - DNA, 240 bp, Glycine max
aaaaaaggaatggttcttccttttgagccacattctatcacctttgatgaagtcatatactctgttgacatgccacaggaaatgaaggaacagggtgtacaagaggacagattggtgcttttgaagggtgttagtggtgcattcaggcctggtgttctcacagctttgatgggtgtaagtggagctggtaagactactttgatggatgttctggctggtaggaaaaccggaggatatatt

SEQ ID NO: 136304 - DNA, 213 bp, Glycine max
agaagaccaaggactatgcaagtgatgctgcgcagaagaccaaggactatgcaagtgatggtgctcaaaagagcaaagaatatgcgggtgatgtagcactgaatgccaaagattatgctcaaaaaagcaaagattacgcaggtgatgctgcacagaatgtcaagattatgcaagtgatgcagtgcagaagagaaaagagtattctggtgatgc

SEQ ID NO: 136305 - DNA, 245 bp, Glycine max
atatactgtgtccgctgtttagtgaacgttgatattcctctcaatcaaggctgtttggctccagtgaagattcttattccagaaggctcatttctctctccaagtgatactgctgctgtagtaggaggtaatgtccttacatctcagaggataactgatgttatattcactgcatttcaggcctgtgcttgttcccagggatgtatgaataattttacatttggggatgatacttttggttatta

SEQ ID NO: 136306 - DNA, 247 bp, Glycine max
ctggcattcactggcactatggctcaaggtctcacgccccagaactcacagcagggtattacaacacccggttccgtgatggctacatccccattgctcaaatgttggcacgccacggtgccatcttcaacttcacctgtattgagatgcgcgatcacgagcagccacaagatgccctttgtgcacccgagaagcttgtgaagcaagtggctctggcaacgcagaaggcacaggttccacttgctgg

SEQ ID NO: 136307 - DNA, 250 bp, Glycine max
cgtggccgcaacctcgccgcgcaggaactgtggtccgagcttgaccctttctctgacctccttggcttcgataccaccaccaccaccaccaaccaaccaccccttccagacaaaaaagtggtgtcatcatgtgagaagaagaagaagaaaagtgtgagtgcagaaaagaagagtggtgggcgagctcggaagaacgtgtacagaggaatcaggcaaaggccgtggggcaagtgggccgcggaaataaggg

SEQ ID NO: 136308 - DNA, 246 bp, Glycine max
gcgttgccattctcatcctcttctttctctctctaccattgccatggatccctacaagcaccggccatccagcgccttcaattctcccttctggactacaaattctggtgctcctatttggaacaacaactcctctttaaccgttggagctagaggtccaattctgctggaggattatcatcttgtggagaagcttgcaaattttgatagggaacgtatcccagaacgtgttgtccatgccagggg

SEQ ID NO: 136309 - DNA, 244 bp, Glycine max
cgtagacactggtagacagcattctagtggtggctacgatggtgacactaataaacatcatggaactactggtggctataatgatgacaccaatagacatcatggaactaccggtgtctatggtatagacaccgataggcaacaacatgggactactggtggctatgccggtgacactggtaggcaacatgggaacatcggtggcccttactatggaaccaacaccgcagacaccggtactggt

SEQ ID NO: 136310 - DNA, 238 bp, Glycine max
ggtaggcatagatgttgcaacatgtttgcaagacgcattggcacggatatgcctagatgtgcgggtagctgcattggttaatgacactgttggaccattagcagttggacattatcatgatccagatactgttgcagcaattataattggtactggtacaaatgcctgctatttggaacgagttgctgctattatcatgtgtcaaggccttcttataacatccggtcgaatggttgtc

SEQ ID NO: 136311 - DNA, 213 bp, Glycine max
gttccctacctctcctttcaagatgcagatcttcgtcaagaccctcaccggaaagaccatcacccttgaggtggaaagctctgacaccatcgacaacgtcaaggccaagatccaggacaaggaaggaattcccccggatcagcaacgtctcatcttcgccggaaagcagctcgaggacggccgtaccctcgccgactacaacatccagaagga

SEQ ID NO: 136312 - DNA, 249 bp, Glycine max
atcacacacaactactacaagtacttccttacaatcaaaaccaacaacaactatggcaagttatcaaaagcactacgatgatcagggtcgcaaggttgacgagtatggcaacgttgagaagcaaaccgacgaatacggcaaccctgttcatgctgctagtgtcacctatgtagccaccagaactgctgctggtggttacagtgatgacattaataagcaacatgataccaccaatgcctacggcgtaga

SEQ ID NO: 136313 - DNA, 220 bp, Glycine max
gttttgtcatggtcaaagggcatctctaaggacacacgcaggggtggggctacagaaaaatccgatcagaatccaaatgctggtaaatttcctccattaaggagaagaaaacatctgtttgtcattgctgtggattgtgataccacttcaagccttcttgaaactattaaagccatctttgagtctgctggaaaggatagggcagagagcattgtaggtt

SEQ ID NO: 136314 - DNA, 148 bp, Glycine max
caggggttgccagagggtgcacttaggagagttattttaactgcatctggcggtgctttcagggattggccagttgataaactgaaagatgttaaagttgctgatgcattaaaacatcctaactggaatatggggaaaaagataactg

SEQ ID NO: 136315 - DNA, 250 bp, Glycine max
cggatctagagtcttcagtttctcctcgttgttcttcgctttcctgttttcaatttcgattctttcgttaatttaataagatgtttgggagggcaccgaagaagagcgataatacgaggtactacgaaatcctcggcgtctccaagaacgcttcgcaggatgatctgaagaaggcttacaagaaagccgccattaagaatcaccccgacaagggcggtgatcccgagaagtttaaagagctggcgcaact

SEQ ID NO: 136316 - DNA, 246 bp, Glycine max
cttgtgagtttgactcttgaagacattccaaaccatggaagcatcctatttgtttgcaattcgtggatttacaatgccaaactcttcaaaagtgaccgcattttctttgccaaccagacatatcttccaagtgagacaccagctccactagtcaaatatagagaagaagagttgcataatttaagaggagatggcactggagaacgcaaagagtgggaaaggatctatgattatgatgtctacaat

SEQ ID NO: 136317 - DNA, 248 bp, Glycine max
gacattgccttggcaattggagaaaactttgagaaatacctgttatatgcaatgcctatgcttcagagtgccgcagagctctctgctcatacatctggtgctgatgacgatatgacagaatacactaattctttgagaaatggaattctagaggcatactcagggatcttccaagggtttaaaggttccccaaagacccagcttctgatgccatatgctcctcatgtgctgcaattcttggatagttt

SEQ ID NO: 136318 - DNA, 240 bp, Glycine max
gaaccacgacctcggttgttcttgctcagggtcttatagcggaaggtgtcaaggttgttgcagctggggccaaccctgtgctcatcacacgtggcattgagaagacagcgaaagctcttgtatctgagcttaaacagatgtcaaaagaggttgaagatagtgagttggcagatgtggcagcagtcagtgcagggaacaattatgaagtaggaaatatgattgctgaagcattgagcagag

SEQ ID NO: 136319 - DNA, 243 bp, Glycine max
cgttaacaccactgactcacttataaaaggcgctttaacaccaaacggagtctctctatcaaaaaaagctacctagagcttgcacctattggtatcttctacaatatcctaaagtgtttttcttcttcttcatcaccatgtctttactttcagacctcatcaacctcaatctctcagaatccacagaaaagatcattgctgagtacatatgggttggtggatctggtatggacctcagaagca

SEQ ID NO: 136320 - DNA, 145 bp, Glycine max
cacaactactacaagtacttccttacaatcaaaaccaacaacaactatggcaagttatcaaaagcactacgatgatcagggtcgcaaggttgacgagtatggcaacgttgagaagcaaaccgacgaatacggcaaccctgttcat

SEQ ID NO: 136321 - DNA, 260 bp, Glycine max
gtaaatctcaaacgaagcccttttctctctctcttcaatttcacccttttagcatttgtacattcctttcccttccttgaatcgttcttaattgcgagaggggatatcggagaagttgattggcctcccattaattgcaggtctgaatgatctgatggagtctaaagttgggaagaagaagtcgtctagtagtaagtcccttttgtacgaagctcctctcgattacaccattgaagacgttcgaccacacggtggaatta

SEQ ID NO: 136322 - DNA, 255 bp, Glycine max
tgagtttgccacatcctcagggagatcaatctggtgcttttagtcaagtttttctgcctgcagatgaaggtgttgaaagttctatttggctgctagcaaaggcttatgtagttgtgaatgactcgtgctatcatcaacttgtcagccattggttaaacactcatgcagttgttgagccattcatcatagcaacaaacaggcatctcagtgttgttcaccctatttataaactccttcaccctcactatcgtgaca

SEQ ID NO: 136323 - DNA, 256 bp, Glycine max
atgaaaggaaataattgatctttgaaaatgcagggaggaaagaaagctggagagtccatcaaggaaacagctgcaaacattggtgcttctgccaaggctggcatggagaaaaccaaggccactgtccaggagaaggcagaaagaatgacggcacgtgatccgatgcaaaaggagttggcaacccagaagaaagaggcaaagatgagccaggcagagctggacaagcaggcggcgcgtcagcataacacggcggcga

SEQ ID NO: 136324 - DNA, 260 bp, Glycine max
tcaagtccaagaaccaacctaccttttgcaatctcaattcaatggcgtcctctctcattgcgaacgcttcctctcctcttctctcctctccaggtccctccttcgccccgccgcttccgcttcccaccgctctttcaacaccaacgccatgcgccagtatgacaaccgcgccgacgaccacagcaccgacatcgatcgtcactccgaacgctctttccctagcactgcgcgccgcgacgatatcttctcagatgtgttgg

SEQ ID NO: 136325 - DNA, 257 bp, Glycine max
taatcctctcctcttcctctctactaatttcagctatggccgacgaagctgtggttgttccagatcccacccagatcgatgtcaagctctttaaccgctggagcttcgacgatattgagattactgacatttctctggctgattatatcggagtggcgacatccaagcacgccacgtatgtgcctcacaccgccggcaggtactcggtgaagcggttcaggaaggcgcaatgccccattgttgagaggctgaccaac

SEQ ID NO: 136326 - DNA, 257 bp, Glycine max
tgttctagattgcgagctccccacagaagaagaaaagtctgtcgtggttgttaagaggctacatcaaaggcggccattttaacgaggcggcagagacgatcatgaaaatgcttgatttgggattctatccagagtacttggacagggcggctgtattacaaggtttgaggaaaagaatccagcaatatgggaatctagatacttatgtcaggctctgtaagtccctctctgatgcaaaccttatagacctgtcttgt

SEQ ID NO: 136327 - DNA, 263 bp, Glycine max
tctcgagcgaatcggctcgaggttcagtgtgtcgtttaaaaatttcgcagttgctggagctagccaagaacttcgtgtcggagaaggtaaatgctatggccaagccggaggcgagtgtcactgacgtggacttcaagcgcgtgagcaaagataatgtcgagtacttggccaaggtctctgttcgtaacccttattcaacttccatacccatttgtgagatcaactactctttcaaaagcgcatccagggagatagcatcaggg

SEQ ID NO: 136328 - DNA, 266 bp, Glycine max
tggatggactgccaccccaatgcaggatgttcaggttacaattgattggtttatttcctctcaggaatgtgttcccagaacctattgtgttttaaatccacaaaatccttttgtgttgaataggtggatggggaaactgactttcccccagggcacttcccgaagtgttaaaagaatgcctctttctatagggggaggagctggtgcaaagaatgctattctcatgaatatgccaaatgctgttctttcaatgtggagatattttg

SEQ ID NO: 136329 - DNA, 236 bp, Glycine max
tttggacatcgagtgtacaaaaactatgatcccagggcaaaggtcttaagaaaactggcagaggaagtgttttccattgtgggcagggatcctcttattgaggtggcagttgccttggagaaggttgcactatctgatgaatatttcatcaagaggaagctatatccaaatgttgacttctactctggattaatttatagggccatgggatttccaccagagtatttcactgtttt

SEQ ID NO: 136330 - DNA, 257 bp, Glycine max
cacacaactactacaagtacttccttacaatcaaaaccaacaacaactatggcaagttatcaaaagcactacgatgatcagggtcgcaaggttgacgagtatggcaacgttgagaagcaaaccgacgaatacggcaaccctgttcatgctgctagtgtcacctatgtagccaccagaactgctgctggtggttacagtgatgacattaataagcaacatgataccaccaatgcctacggcgtagacactggtagaca

SEQ ID NO: 136331 - DNA, 213 bp, Glycine max
ctgtaattgtagtagtagacagtagcaccatgagccaggagcagttcaagagacctcaaggggagcaggaccccatcaaatacggcgacgttttcaatgtctccgacgaactcgctttcaaacccatcgcgccatgagacgcagctctcatgcaagccacggagaaccaagcattgggccaaactcaataaggaggtcccgcctcggtgatgc

SEQ ID NO: 136332 - DNA, 258 bp, Glycine max
tgataacctaagcttagaattagaaacaaagataagaagaaaggaaagaattgatcgttgaaaatgcagggaggaaagaaagcgggagagtccattaaggaaacagctacaaacattggtgcttctgccaaggctggcatggagaagaccaaggccactgtccaagagaaggcagaaagaatgacagcacgtgatccggtgcaaaaggagttggcaacccaaaagatagaggcaaagatgaaccaggcggagctggac

SEQ ID NO: 136333 - DNA, 259 bp, Glycine max
tttagctttctcttccttcataatttctcacctttcaaatctccattcagcttcattttctgcatagaaaaaacccttttctggagaaagaatatagtcttcagctggacaaggatcattcatcttgaaagaagagtttgtgtgtgacaatctttatagttctaaggagggtgcaagagagaactgaatttgctgtgatggcaactcgtagatatgcttttggaagagctgatgaggccactcatccagactccatgag

SEQ ID NO: 136334 - DNA, 257 bp, Glycine max
ttagaacctatttcaccaagtagtgctaatttcttcctttttagaatggctccagtggctacatttatgttaagtctggttgcttgggccgttgtaccttttgattatggtatggtattgtcagatttgaacatagggctactttatttgtttgccatatcttcgttaggtgtttatggaattattatagcaggttggtctagtaattagggggcggccgttcggtcgcctatgatactaggaccaataggtcaaaa

SEQ ID NO: 136335 - DNA, 257 bp, Glycine max
atctgagtcttgtgtttagcgtaggggattgaaaatgagtatgtacggtagggatccgtggggagggccgttggagatccacgccacagactccgccaccgacgacgagcgcaccggaatctccaggagctggaccgaggcgctttagacgagacacaacagagctggctcttgggcgccggagaacagaaaaagaagaagaaaaggtacgtagatcttggctgcatcatcgtcagccgcaagctcttcatctggac

SEQ ID NO: 136336 - DNA, 242 bp, Glycine max
gaaaggaaataattgatcttagtaaatgcagggaggagtgaaagctggagagtccatcaaggaaacagctgcaaacattggtgcttctgccaaggctggcatggagaaaaccaaggccactgtccaggagaaggcagaaagaatgacggcacgtgatccgatgcaaaaggagttggcaacccagaagaaagaggcaaagatgagccaggcagagctggtacaagctaggcggcgcgtcacat

SEQ ID NO: 136337 - DNA, 216 bp, Glycine max
cgccaccgttgttgcccccaaatacaccgcgattaagcctctgggagacagagtgctgataaaagattaaggaagcagaggagaaaactgagggtgggattttgcttccatcaactgctcaaacgaagcctcaagggggtgaggtggttgctgttggagaaggaaagacaattgggaagaacaatgtagagattagtgtgaagactggtgcacaat

SEQ ID NO: 136338 - DNA, 258 bp, Glycine max
agcgatgcggatgaggcgccactcgatgtttccatttgcctgcatgcctttggtattgtggggtgtggttcgtttagtggtgtcaagtcttgcgaacgtgagggtgcatgagtggtaatcgggatgtttttgttgcacggctccatgcttgcgcatgcaacgtgtgacatgcatccttttcattgtacacttagccttcgtggcttaggtgctgacgattggttcctgtgttgcctacctaccaaacggtattcgtgt

SEQ ID NO: 136339 - DNA, 253 bp, Glycine max
gtttcggcaaaggacatggatcggataaaagggccatggagtcctgaagaggacgaagcgttacggaggttggttcagacttacggccctaggaactggtccgttataagcaaatccattccgggtcggtctgggaaatcgtgccgcttgcggtggtgcaaccagctgtctccggaggtggagcgccggcctttcacggcggaggaagacgaggcgatcctgaaggctcacgccagttcgggaacaagtgggc

SEQ ID NO: 136340 - DNA, 212 bp, Glycine max
  unsure (1)..(212): unsure at all n locations
ttaaatgtcgcagttgctggataaagccaagaacttcgtgtcggagaaggtaaatgatatggccaagccggagggangtgtcactgacgtggacttcaagcgcgtgagcaaagataatgtcgagtacttggccaaggtctctgttcgtaacccttattcaacttccatacccatttgtgagatcaactactctttcaaaagcgcatccaggg

SEQ ID NO: 136341 - DNA, 254 bp, Glycine max
ggttaattgtggagtattttggaaggatgtcttacgttgctcacaacgttaatcagccccaagagaaagatttgttggagggaaatttttcctttgatattaaatctcgctctagattggaaaaagtttcctctacaaaagcacaatttgttagtggaaaaaccttcaaatatgatataattggtgctggttcacattcttcagaagattttcctgaaaaggaagatcaagaaaaacccaaaaagattgatacc

SEQ ID NO: 136342 - DNA, 254 bp, Glycine max
tttcaaaccttgctctatactacacagtacacacactagaagaataatggcttccatcctccactactttttagccctctctctttcttgctcttttcttttcttcttatccgactcagtcacccctacaaaaccaataaaccttgttgttctacccgttcaaaatgatggttccacagggctccattgggccaacctccaaaaaagaacccctctaatgcaagtaccagtcctggtggacctcaatggaaatc

SEQ ID NO: 136343 - DNA, 256 bp, Glycine max
gcgatgctcgcattttttgtttaggggttcgtattgttaaaaggcgcacatgcagcagatcctaaactcaatcccaaaggagtctgatggagagaaatttgaagaagctcttgcacgtgtctgccgttgtgttgggggaggaaatgcagctgatgatgctgatagtgacagtgatttggaagtggtttcagatactttcactatcaaccttcgatgtcctatgagtggttcaagaatgaagattgctggaagattt

SEQ ID NO: 136344 - DNA, 259 bp, Glycine max
ggcggttgatcgctcccttacgaggtgctgtagcctcgtactgtggtcgtggatgttgctgaggatgatgatggcgcagggtgcagccgcgagggccaaccggaaggagtgggactcggtcataaagttaccggctgaaccggtcgatgctgactcggatcatgaagtgggaacacgatgggcggttcttgtggctggttcaaacggctatggaaactacaggcatcaagcagatgtgtgccatgcgtaccagttgctg

SEQ ID NO: 136345 - DNA, 87 bp, Glycine max
ggtcatacatagtagtgttggtgggttgcaaagatgcttgggcggtcttctccataggggtcatacgatacaagggacagtggtgtt

SEQ ID NO: 136346 - DNA, 256 bp, Glycine max
gtcagaaatgacttagaaaattctctaccaaaaccatacttgccaagagcattgaaagctcctgatacgggtcacccaaatggaacagcaggccacaggcaccacaacttatctgttcttcagcagcattgtgctttttttgatcaagatgacaatggaatcatttacccttgggaaacttacatggggctgcgttctattggatttaatgttgttgcatctgttattatggctattgttatcaatgttggattga

SEQ ID NO: 136347 - DNA, 251 bp, Glycine max
gtcagaaatgacttagaaaattctctaccaaaaccatacttgccaagagcattgaaagctcctgatacgggtcacccaaatggaacagcaggccacaggcaccacaacttatctgttcttcagcagcattgtgctttttttgatcaagatgacaatggaatcatttacccttgggaaacttacatggggctgcgttctattggatttaatgttgttgcatctgttattatggctattgttatcaatgttgg

SEQ ID NO: 136348 - DNA, 252 bp, Glycine max
ctccatttccatttcctctctctcagtttccaagaatcttaagctatgggaaagtcttacccaaccgtgagcgctgattaccagaaggccgttgagaaggcgaagaagaagctcagaggcttcatcgctgagaagagatgcgctcctctaatgctccgtttggcatggcactctgctggaacttacgacgtgagctcgaagaccggtggtcccttcggaaccataaagcacccctccgaactcgctcacggc

SEQ ID NO: 136349 - DNA, 251 bp, Glycine max
agggtcgcaaggttgacgagtatggcaacgttgagaagcaaaccgacgaatacggcaaccctgttcatgctgctagtgtcacctatgtagccaccagaactgctgctggtggttacagtgatgacattaataagcaacatgataccaccaatgcctacggcgtagacactggtagacagcattctagtggtggctacgatggtgacactaataaacatcatggaactactggtggctataatgatgacacc

SEQ ID NO: 136350 - DNA, 257 bp, Glycine max; identical to SEQ ID NO: 136330

SEQ ID NO: 136351 - DNA, 256 bp, Glycine max
ggattggctctgagggctgggcacgggggtcccagtcccgaacccgtcggctgtcggtggactgctcgagctgcttccgcggcgagagcgggtcgtcgcgtgccggtcgggggacggattgggaacgggcccttcggggcctcttccccgggcgtcgaacagtcaactcagaactggtacggacaaggggaatccgactgtttaattaaaacaaagctctgcgatggtccctgcggatgttgacgcaatgtgattt

SEQ ID NO: 136352 - DNA, 259 bp, Glycine max
ttcctcttcagtgatctttgattagtactaagctaaaccatttcttattccctcaaaatcaaaacctttttctttctagctatttcccttttcaaatcatgccacctaacatcaccaccgttgttgccaatgtcaccaccgagcaattacccaaggctcgtggaggaagtgggcgtgccttcgtgacctttcttgctgggaacggtgattacgtaaagggtgtcgtgggtttggccaaaggactgagaaaggccaaaag

SEQ ID NO: 136353 - DNA, 228 bp, Glycine max
accctgttgagcttgactctagtccgactttgtgaaatgacttgagaggtgtaggataagtgggagctggaaacagcgaaagtgaaataccactacttttaacgttattttacttattccgtgaatcggaagcggggcactgcccctctttttggacccaaggtcggcttcggccggtcgttccgggcggaagacattgtcaggtggggagtttggctggggcggcac

SEQ ID NO: 136354 - DNA, 252 bp, Glycine max
ggtggaggtgccttttcagggaaggaccctaccaaggttgacagaagtggtgcctatatcgtgaggcaggctgcaaagagtgttgtggcaaatggccttgccagaaggtgcattgtccaagtttcctatgccattggtgtccctgagcccttgtcagtgtttgtggacacttatggaactgggaagattcctgacaaggagattcttcaaattgtgaaggagaatttcgacttcagacctggaatgatcacc

SEQ ID NO: 136355 - DNA, 241 bp, Glycine max
ggaattttagtggacaaaactggagattggatcacacttatacaaaattctccaattagtaacttgttgagagttgctgcttggaagaaaggctgtttaatggttaaaattgtgatgtctgggaatgcagcagtcaaaaggagtgattgggcctcattggtacaagtgtttttaacaaacagcaacagtacagagcatttcgatgcatgtaagtggacaaaatcggaaccacatcctggga

SEQ ID NO: 136356 - DNA, 251 bp, Glycine max
aaacacttttttcactgcttccattacgaacatatatttattatatggctcctgaacttgtccccaccgttgtgaaatccagtgctgcgttcacgaaacccgcgacccttccaaggcgtgtctacgtgacattcctcgccggaaacggtgactacgtgaaaggggtggttggcctcgccaaagggttgcgaaaggtgaaaaccgcgtacccgttggtggtggctgtcctccccgatgtgccggaggagcac

SEQ ID NO: 136357 - DNA, 253 bp, Glycine max
gagaagcaaaccgacgaatacggcaaccctgttcatgctgctagtgtcacctatgtagccaccagaactgctgctggtggttacagtgatgacattaataagcaacatgataccaccaatgcctacggcgtagacactggtagacagcattctagtggtggctacgatggtgacactaataaacatcatggcactactggtggctataatgatgacaccaatagacatcatggaactaccggtgtctatggta

SEQ ID NO: 136358 - DNA, 254 bp, Glycine max
gcacaggattctacccgccgctcgatgggaattgcgcttcaaggcgtctcgtagggctaatccgcctcacgagggtcaccaacggcacgtgcctttggggggccgaggcccctactgctggtcggcaaacggacggcgggcgcacgcgtcgcttctagcccggattctgacttagaggcgttcagtcataatccaacgcacggtagcttcgcgccactggctttccaaccaagcgcgatgaccaattgtgcgaa

SEQ ID NO: 136359 - DNA, 256 bp, Glycine max
gatagcttcgctggcaatccgaagtgggaatgggcttctcttgaaaggtggcaaagaagctaagcggtcaaatgcaattttgcacaaagtaattactgaggccataccagatactgttggtggaaaacttataggacttgtgacctcaagggaagaaatccctgagctacttaagctggatgacgtaattgatctggtgattccaagaggcagcaacaaacttgtttctcaaatcaagagttccactaaaattcct

SEQ ID NO: 136360 - DNA, 255 bp, Glycine max
gtacttccttacaatcaaaaccaacaacaactatggcaagttatcaaaagcactacgatgatcagggtcgcaaggttgacgagtatggcaacgttgagaagcaaaccgacgaatacggcaaccctgttcatgctgctagtgtcacctatgtagccaccagaactgctgctggtggttacagtgatgacattaataagcaacatgataccaccaatgcctacggcgtagacactggtagacagcatctagtggtgg

SEQ ID NO: 136361 - DNA, 257 bp, Glycine max
ttgcagagcttttgtcaattttctattgaccttcttggtggaggaattttagtggacaaaactggagattggatcacacttatacaaaattctccaattagtaacttgttgagagttgctgcttggaagaaaggctgtttaatggttaagattgtgatgtctgggaatgcagcagtcaaaaggagtgattgggcctcattggtacaagtgtttctaacaaacagcaacagtacagagcatttgatgcatgtaagtgg

SEQ ID NO: 136362 - DNA, 260 bp, Glycine max
tctcgagccgaatcggctcgagcaccacactaaccctacaaaacacataaaccttctggtactacccgttcaaaatgatgcttccacagggctccattggtccaacctccaaaaaaggacccctctaatgcaagtaccagtcctggtggacctcaatggaaaccacttgtgggttaactgtgagcaacactactcatccaaaacataccaagcacccttctgccactccacccaatgctccagagccaacactcaccaat

SEQ ID NO: 136363 - DNA, 261 bp, Glycine max
cgcaaggttgacgagtatggcaacgttgagaagcaaaccgacgaatacggcaaccctgttcatgctgctagtgtcacctatgtagccaccagaactgctgctggtggttacagtgatgacattaataagcaacatgataccaccaatgcctacggcgtagacactggtagacagcattctagtggtggctacgatggtgacactaataaacatcatggaactactggtggctataatgatgacaccaatagacatcatgga

SEQ ID NO: 136364 - DNA, 249 bp, Glycine max
ttcatagttcagtgtgtcgtttaaagatgtcgcagttgctggataaagccaagaacttcgtgtcggagaaggtaaatgatatggccaagccggaggcgagtgtcactgacgtggacttcaagcgcgtgagcaaagataatgtcgagtacttggccaaggtctctgttcgtaacccttattcaacttccatacccatttgtgagatcaactactctttcaaaagcgcatccagggcgatagcatcaggga

SEQ ID NO: 136365 - DNA, 247 bp, Glycine max
ttacataacaatgtcgttgattccaagtttcttcggcaccgggcgaagaaccaacgtcttcgaccccttctccctcgacgtgtgggacccattccatggcttccccggcaccaccgccctctccgctccgcgctccgtgacggcggccttcgccaacacgcgtcatcgactggaaggagacggcggaggcgcacgtgttgcaagggcagacctgctcggggctcgaagaagggaagaggttgaaggt

SEQ ID NO: 136366 - DNA, 249 bp, Glycine max
tttggatgatgaacggttgaagaagttgggagcgttgggtttgactatgagtaagcctgaggctgtttgggatgaggatacccggaagccgaagaagaagacggtgcaggatgtgctggggaagtttagctttgatgatgatgttatggcgattggggatgtgttctatgctgaagtcgaacgagaatgggtgatgcaaccgggtggaccaattgctcacaaatgcaagactctcattgaacctaatcg

SEQ ID NO: 136367 - DNA, 253 bp, Glycine max
ctagctagctagcaagcaagcacagagatggaggcaaagcgaggccatgccctcatgtgcttggcacgtgtttcactcttcctctgcgctctaaccctatccgctgctcacggaagcaccacggttcaagacatcgcgagaaagttgaaactcggggacaacgagcttctgcgcacggagaagaagttcaaggttttcatggagaattacgggaggagctactccacagaggaggagtatttgcgccgtttgg

SEQ ID NO: 136368 - DNA, 251 bp, Glycine max
gccaaggctggcatggagaaaaccaaggccactgtccaggagaaggcagaaagaatgacggcacgtgatccgatgcaaaaggagttggcaacccagaagaaagaggcaaagatgagccaggcagagctggacaagcaggcggcgcgtcagcataacacggcggcgaacaggctgccacggcagggcacatgggacaacccatggggacccatcagacgtcagctatgcccggtcatggaaccggacagccc

SEQ ID NO: 136369 - DNA, 253 bp, Glycine max
gcagaaacttctctgttttaaatcattgtttgtgatttagctctattttttatggttctgtttgtgattgaacagatgcagatcttcgtgaaaactttgaccggtaagaccatcacccttgaggtggagtcctccgacaccatcgataacgtgaaagctaagattcaagacaaggaagggatcccacctgaccagcagagacttatctttgcgggtaaacagcttgaggatggtcgaacccttgccgactaca

SEQ ID NO: 136370 - DNA, 254 bp, Glycine max
cgtgatccggtgcaaaaggagttggcaacccaaaagaaagaggcaaagatgaaccaggcggactggacaagcaggcggcgcgtcacataacacggcggccaaacagtccgccaccacggctgggcacatgggacatggccaccacaccaccggaaccgggactggaaccgccacgtattccaccaccggggaatatggtcagcccatgggggcccaccagacgtcggcaatgcctggccatggaaccgggcagc

SEQ ID NO: 136371 - DNA, 256 bp, Glycine max
tgcaatctgccgccaccaggaatgaacaggctggccttgtcggtcaccgggacgtcaccgacgttaccggcgaccgtggcgtcacagtcacagaaactaaagtccctggaagacgcattataaccgaggctgttggtggccaggttgtggagcagtatgtggaggcaacagccggttgaggcagggcgaacagtgcaattaaggagaatgccataacaataggagaggcattggaggcgacggcacagactgtggg

SEQ ID NO: 136372 - DNA, 256 bp, Glycine max
gttactttcatttgttgtgcaatcttacaagttccaaacttctctattttgttcttatttgttctcacttctcacacatatagaactctaaaaatttatattatcatggcttctaaggtggtttcggttttggttatagcgatgatgttgtttgccatgaactgtaactgcactagtgtggtaccacatgccttcaaccaaagaggaaggtcacgattttcaggagtctaaagccaagaccacacaaactgcgaac

SEQ ID NO: 136373 - DNA, 261 bp, Glycine max
ctcagtctatttcacagcaaactgtttggaatcaaatggcaacagtgagaacaccattgaattttgatcctagcaagcagagcttttgtcaattttctattgaccttcttggtggaggaattttagtggacaaaactggagattggatcacacttatacaaaattctccaattagtaacttgttgagagttgctgcttggaagaaaggctgtttaatggttaagattgtgatgtctgggaatgcagcagtcaaaaggagtg

SEQ ID NO: 136374 - DNA, 248 bp, Glycine max
  unsure (1)..(248): unsure at all n locations
tctttcccgtgaaaagggaccatggaggcaaattcaggtgccagcgaccgaatttcgagaatcgccggccacctccgcccccagagagaggatgatgtttgtttgaagcgtacgnattgccgtgcaaaaggtggggtctccggattcaaggtggccatattgggtgccgcaggaggcatagggcaacctctggcgatgttgatgaagatgaatccactcgtttcacttctccacctctacgatgttgt

SEQ ID NO: 136375 - DNA, 244 bp, Glycine max
gccagtagtcatatgcttgtctcaaagattaagccatgcatgtgtaagtatgaactaattcagactgtgaaactgcgaatggctcattaaatcagttatagtttgtttgatggtatctactactcggataaccgtagtaattctagagctaatacgtgcaacaaaccccgacttctggaagggatgcatttattagataaaaggtcaacacaggctctgcctgttgctttgatgattcatgata

SEQ ID NO: 136376 - DNA, 242 bp, Glycine max
ccctcgtggggcccaccctgaaggacgaggtgatgaagatcatgcccgtccactagcagacccgcgccggtcagcgaacccgcttcaaggccttcgtggtggtcggcgacaacaacggccacgtcggtctcggagtgaagtgcagcaaggaagtcgccaccgccatacgcggcgccatcattctcgcaaagctctctgttattcctgtgaggagaggctattggggtaacagatcggaaagc

SEQ ID NO: 136377 - DNA, 243 bp, Glycine max
gcactcaaacattgtttgttgtaggaagaggaatcttgagaaatggcaggggacagcaagagcaagattctgttcatcggagggactggttacatcggaaaattcatcgtggaagccagcgccaaagctggccacccaactttccttttggtgagggagtccactctctccaaccccgcaaaatcacccctcatcgacaatttcaaaggcctcggtgtcaatcttgttttaggagatctatac

SEQ ID NO: 136378 - DNA, 243 bp, Glycine max
  unsure (1)..(243): unsure at all n locations
ccttaatcttctttcttcacaatttttatttccttccttattagacgtattagatcagattgaacaaaagggnnnnnnnnnnnnnnnnnnnnggggaataatagaaataagaaaagattagtgaggttgaaatgtcgcaacgatcggtgccggcgccgttcttgacgaagacgtatcagttggtggaggatcaggggacggaccaggtgatatcgtggggtgaaagtgggaacactttgtggt

SEQ ID NO: 136379 - DNA, 242 bp, Glycine max
atacatagtagtgttggtgggttgcaaagatgcttgggggtcttctccataggggtcataagataaaagggacagtggtgttgatgcgcaagaatgtgttggacgtgaatagcgtaaccagcgttgggggagttattggtcaaggtctcgacttagttggctcaacactcgatactcgtactgccttcttgggccgatccgtgtctctccagcttattagtgctaccatagctgatgccaac

SEQ ID NO: 136380 - DNA, 244 bp, Glycine max
  unsure (1)..(244): unsure at all n locations
tggccaagccggaggcangtgtcactgacgtggacttcaagcgcgtgacaaagataatgtcgagtacttggccaaggtctctgttcgtaacccttattcaacttccatacccatttgtgagatcaactactctttcaaaagcgcatccagggagatagcatcagggaaaattccagacccaggatcgttgaaggcaaaggacacaacaatggtggatgtgccagttaaggttccatacagcata

SEQ ID NO: 136381 - DNA, 243 bp, Glycine max
aaagtttccttgacaatctaattctgcaaaaatggcaagcaataaggagtctaagttcccagcacagagccagaaaactcagccaggaaaagaacatgtaatgaatccactcccacaagccacaaatcctgatcacaaggccgccaataaactccagggaaaggtggcgttggtgacaggaggtgactcaggaattggcagagcggtttgcctgtgtttcgcaaaagagggtgcaccgtggcc

SEQ ID NO: 136382 - DNA, 238 bp, Glycine max
taccaggtgattttgtcattggtgttaagttgacaaccataaacaatatgtgtgcatatgggctcaatcctggtatttcaggttctcgtcttttgggcaccattcctcagtctatttcacagcaaactgtttggaatcaaatggcaacagtgagaacaccattgaattttgatcctagcaagcagagcttttgtcaattttctattgaccttcttggtggaggattttagtggacaaa

SEQ ID NO: 136383 - DNA, 246 bp, Glycine max
ccggaggattaggcctccgagcattgtccaaagaccaattggacgagattcttaaaccagcagagtgcactattgtagcatcactttcaaatgattatgttgactcttatgttctgtcagagtcaagcctgttcgtctatccttataaaattatcatcaaaacttgtgggactaccaaattgcttctgtccatccctgtcattctcaagttggctgatgctcttgacatagctgtgaaatctgtga

SEQ ID NO: 136384 - DNA, 239 bp, Glycine max
ctgcgacgacaccggcaccatcgtcttcaccgctcgcaacgaacaagttgatatgatgaaggctggagctacagtaattattcgcaatgcaaagattgacatgttcaagggatcaatgaggatggctgttgacaaatggggccgtgttgaggtaactgatcctgcagattttgaagttaaagaggataacaacctatctctggttgaatatgaattggtgaacgtggttgaagaataat

SEQ ID NO: 136385 - DNA, 241 bp, Glycine max
attcgtgcagatgaaattagtaaaattatccgtgaacgcattgagcaatataatacggaagtaaaaattgtaaatacgggtaccgtacttcaagtaggcgacggtattgctcgtatttatggtcttgatgaagtaatggcgggtgaattagtggaatttgaagagggtactataggcattgctttgaatttggaatccaaaaatgttggtgttgtattaatgggtgatggtttgatgatac

SEQ ID NO: 136386 - DNA, 243 bp, Glycine max
gtgcggtttcctttgttggtgttgctgggaactgttttcctggcatcagtttgtgtctcattaaaggtgagagaggatgagaataaccctttctacttgagaagctctaacagcttccaaactctctttgagaaccaaaacggtcgcattcgtctcctccagagattcaacaaacgctccccacaacttgagaaccttcgagactaccggattgtccagtttcagtcaaaacccaacacaatc

SEQ ID NO: 136387 - DNA, 239 bp, Glycine max
cttcttgtggagtagatggagtgaaggttgatgtgcagaacattattgagacccttggtgcgggacatggtggccgagtgtcacttactcgcagctatcatcacgcgcttgaggcttccattgctagcaattttactgataacggatgcattgcgtgtatgtgtcacaacactgatggactttatagtgctaagcagactgctattgtgagagcttctgatgatttttaccctcgtgat

SEQ ID NO: 136388 - DNA, 244 bp, Glycine max
ataaaaaatggctgatacaggtggaggagatgcagtgagaccagtggtaatatgtgataacaagtgtggctgcacacttccatgcactggtggttccacttgcaggtctcttaagttcatgatttcaacaaagtgcacaagtgctggcactgccacaggagggggtgatcacgtgacatgctcgtgcggagagcactgtggttgcaatccatgctcatgtcccaagattgcggctgctggaagt

SEQ ID NO: 136389 - DNA, 242 bp, Glycine max
caagtacttccttacaatcaaaaccaacaacaactatggcaagttatcaaaagcactacgatgatcagggtcgcaaggttgacgagtatggcaacgttgagaagcaaaccgacgaatacggcaaccctgttcatgctgctagtgtcacctatgtagccaccagaactgctgctggtggttacagtgatgacattaataagcaacatgataccaccaatgcctacggcgtagacactggtaga

SEQ ID NO: 136390 - DNA, 244 bp, Glycine max
tgaacctattcagccagagcctgagcttgaggtgccaaaagagctaatacaatcaacaaagctagaagagttgaaaaagctgcgcaagtcggcctttattcctgtaaatcctgaaacagatgctacaaagcttcatgatgaggaaactgggatcacccggcgccgtctcgctaatggaattcctgttaattataagatatcaaaaactgaaacacaaagcggtgtgatgcggctgattgttggt

SEQ ID NO: 136391 - DNA, 247 bp, Glycine max
ctactacaagtacttccttacaatcaaaaccaacaacaactatggcaagttatcaaaagcactacgatgatcagggtcgcaaggttgacgagtatggcaacgttgagaagcaaaccgacgaatacggcaaccctgttcatgctgctagtgtcacctatgtagccaccagaactgctgctggtggttacagtgatgacattaataagcaacatgataccaccaatgcctacggcgtagacactggtag

SEQ ID NO: 136392 - DNA, 236 bp, Glycine max
gccatgggagatattggtggacgtgggaaagccagagagactcacgagctgggtgcacactttgaatccctggctgacaaagtaactgaccatgcagcagccaatgtagttggaaacaaagagagtcaaagagaagctcgtggtggtgttcgtgatgttgggaagttcgaaatgagaactgaagggggagaaaaaggaaacaaggatagaccagaactgaaaacacgaaccagaga

SEQ ID NO: 136393 - DNA, 241 bp, Glycine max
cttgcagaggcattaactggttatacagtgcacctcactaccatagatggtagaaacttaaccataccaatcaacaatgttattcatcccacttatgaagaggttgtcccaagagaaggaatgccacttccaaaagatccatcaaagaaggggaatttgaggataaagtttaacatcaagttcccaactaggctcactgaagagcaaaaagcaggaatcagaaaactcttaaatgcctaag

SEQ ID NO: 136394 - DNA, 240 bp, Glycine max
taaatttgttatggctcgtgcatagcatatgaagattgagaagatgttttatctggcaatgctttttctgtgtgtgtaaaccttgacctggttactagagcaacaaggacattgttgcacaaataatatctgctagcattgccggcgatttagttcttgctacagcatattcacatgagctgccacgatatggtcttgaagtaggacttacaaattatgcagcaggtgctgtgttcatga

SEQ ID NO: 136395 - DNA, 242 bp, Glycine max
gtttaaaaatgtcgcagttgctggataaagccaagaacttcgtgtcggagaaggtaaatgatatggccaagccggaggcgagtgtcactgacgtggacttcaagcgcgtgagcaaagataatgtcgagtacttggccaagggagatagcatcagggaaaattccagacccaggatcgttgaaggcaaaggacacaacaatggtggatgtgccagttaaggttccatacagcatattgatgag

SEQ ID NO: 136396 - DNA, 238 bp, Glycine max
cacgctcttctctctagagctgctgcgttgctaaaacgcaccggtttgttcctgttctcgttcaaaagaaaactgacacaagtgaggcttggtgcataaacagcaatggcagaaaaaccccaaccggttcgggttctctactgcggcgtgtgcagtttgccccccgaatactgcgaattcggatccgatttcgagaaatgcaaaccctggttgatccaaaacgtccctgacctatacc

SEQ ID NO: 136397 - DNA, 238 bp, Glycine max
gttgcattatcacaaacacctcgtccctcacaatgcagctagcaatggcggccaacgctgtcgtttcaccgtcgccgttccgacctcagccctttctccggtcatccttctccggcgtctccgtcaagctcactccccaatccataacgctttcacgctccaagcccctcaccgtcttcgccgccaccaagaaggccgtcgccgtcctcaaggggacctccgccgtcgaaggcgtcgc

SEQ ID NO: 136398 - DNA, 238 bp, Glycine max
gtttgttgatatatataaccctgagagacacagctggtgtgagattaagaatgctatgggtgttgtgtgtaaaggatggaggtcgtttattcaaagcaaagaattcactactgtgcgaaaattggctgggatgctagaggaatggctctatttcttaacaacagactgtgaaggaaaggaaagtcattgggaggttatggattgtctcggtcataaatgcggatctcttccaccaatg

SEQ ID NO: 136399 - DNA, 240 bp, Glycine max
tcaaaaccaacaacaactatggcaagttatcaaaagcactacgatgatcagggtcgcaaggttgacgagtatggcaacgttgagaagcaaaccgacgaatacggcaaccctgttcatgctgctagtgtcacctatgtagccaccagaactgctgctggtggttacagtgatgacattaataagcaacatgataccaccaatgcctacggcgtagacactggtagacagcattctagtggt

SEQ ID NO: 136400 - DNA, 239 bp, Glycine max
ccaaaacagtaaagctaacttcaacacctttaattttctaaaagtaattcagcggctgaataccaagcggagaagatgagtcaggagcagccacggcgtcccaaaggccaaaaccccatcaaatacggcgacgtttttgtcgtctccggcgaccttgcacagaagcccgtcgcaccggaagatgctgccatgatgcaaagcgcggaaactcgagtgctcggacaaacccaacccggcgg

SEQ ID NO: 136401 - DNA, 239 bp, Glycine max
ctcgagccgcgcccaagaaaacctaggcctcagattcctggacctcctacttcaaaaggagaaactatagagaacaacaagaaaattggtctttgggcagtgaagttaccttcagcagattcaattgtagttcgacgaacgctagggattctaacagaaaacctccatggtctccctgggctgaacgagagtgctgagacagttgagaaaagggaagccttctggtcatctgtgaagcc

SEQ ID NO: 136402 - DNA, 242 bp, Glycine max
gtatacattagcatgggataacaccacaggattctgatcctattgtgttggccttcgggatcggagtaatgattaacagggacagtcgggggcattcgtatttcatagtcagaggtgaaattcttggatttatgaaagacgaacaactgcgaaagcatttgccaaggatgttttcattaatcaagaacgaaagttgggggctcgaagacgatcagataccgtcctagtctcaaccataaacg

SEQ ID NO: 136403 - DNA, 239 bp, Glycine max
gtacagagcattttgatgcatgtaagtggacaaaatcagaaccacattcctgggaattgatcttcccaatagaggtatgtggtagtaataatggttttgaaatgtggagttctgagtgggcaaatcaaacttcatggcatttgagtttccttattgacaatcccaaacagtctacagtttttgatattctcttgggaatctctcaagattttgaaattgctggtaatactcttatgcca

SEQ ID NO: 136404 - DNA, 239 bp, Glycine max; identical to SEQ ID NO: 133867

SEQ ID NO: 136405 - DNA, 235 bp, Glycine max
atcaaaattaaaacgaattcgaatgagtacctgcagcctggcccaagggagaatctcctacgatgctttataaagcgcaaccgttccagccaaacatactatttgtatctcagtttaaccaatacactagctgaagatgggaagttccttcttgctgcacgcaaatgcagacgtccaacctgcacagattatatcatctctcttgatgcagatgatatgtcaaagggaagcaact

SEQ ID NO: 136406 - DNA, 241 bp, Glycine max
gaaaacctaagcttagaattagaaacaaagaaaagaagaaaggaaagaattgatcgttgaaaatgcagggaggaaagaaagcgggagagtccattaaggaaacagctacaaacattggtgcttctgccaaggctggcatggagaagaccaaggccactgtccaagagaaggcagaaagaatgacagcacgtgatccggtgcaaaaggagttggcaacccaaaagaaagaggcaaagatgaa

SEQ ID NO: 136407 - DNA, 244 bp, Glycine max
gccgtttgtgttgttttcgggacgaagaagaagatggtgtcaggttctggaatctgcgcaaagcgggtggtggtggacgcgcgccaccacatgctgggtcgtctagcctccatcgtggcgaaggagcttctgaacggccagaaagtggtggtcgttcgctgtgaagagatttgcatctcgggcgggcttatgaggcagaagatgaaatacttgaggttccttcgcaaacgcatgaacaccaaac

SEQ ID NO: 136408 - DNA, 243 bp, Glycine max
gtttgattaccaagcaagttatgagcaagatggcagaaatgataaacagtctttgtggtggtgatgaaaaattgatgcgtgaaaggacacatttgctgttggcttgttgttcaaggatggcaatttgtaagaaagatgtttggagagttgaatgtggaatcccttctggatttccgctcacagttatttgcaatagcatttttaatgagatgctcattagatatagctatgaaaaatactgcg

SEQ ID NO: 136409 - DNA, 238 bp, Glycine max
tgagaagaccggaacttctcacgtcaatggagcacatgatactactaagcttgctggccttcttgagaacttcattaagacatatgtccagtgttatggttgtggaaatcctgaaactgagatcataatcactaagaaccaaatgatccagctgaaatgcgctgcttgtggttttgtgtctgatgttgatatgagagacaagctgactaccttcatcattaagaaccctccagaagtt

SEQ ID NO: 136410 - DNA, 239 bp, Glycine max
caagtgttagggaggacaaataccgcccctttatgcgcgaagacagtgagaagaacatcaaatggagatatggtgctcctccaaattatgacgttgtcaacaaattatttgatgaaggcagaaccaaggtatggcctccgggttcacttgaagaaaaggtgcagactttagtgaagatatgggagatggaaatgttccacaaggaggatttcaaggataacagatcagtggacccagag

SEQ ID NO: 136411 - DNA, 240 bp, Glycine max
caagtacttccttacaatcaaaaccaacaacaactatggcaagttatcaaaagcactacgatgatcagggtcgcaaggttgacgagtatggcaacgttgagaagcaaaccgacgaatacggtaaccctgttcatgctgctagtgtcacctatgtagccaccagaactgctgctggtggttacagtgatgacattaataagcaacatgataccaccaatgcctacggcgtagacactggta

SEQ ID NO: 136412 - DNA, 240 bp, Glycine max
tgaacactcatcaccatggccaagcttgttctttccctttgtttccttcttttcagtggctgcttcgctctgagagagcaggcacagcaaaatgagtgccagatccaaaagctgaatgccctcaaaccggataaccgtatagagtcggaaggtgggttcattgagacctggaaccctaacaacaagccattccagtgtgccggtgttgccctctctcgctgcacccttaaccgcaatgcc

SEQ ID NO: 136413 - DNA, 241 bp, Glycine max
atagaatcaaagaaaggggtggtggctgcttcgaaagcttaataatttgtttatttccagaacatcatagttttcgcagcagcaaactaacaaattactcatatcatataataagatggcccgttctctctcgcaagccaaacgtattggtgtccttgttgctcaatctatctccctaattcccgttcatcggcgaggttacgcagtggcatccgatgtatcggtaagagttggattgggt

SEQ ID NO: 136414 - DNA, 236 bp, Glycine max
agagaacataaacaagaacaagagaatatatgaacaaatagaaagccttgctaagaaataccagagcactcctccccaattggcattagcttgggtacttcaccaaggcaacgatgttgttcctattcctggaacaactaagattaagaacctggatcaaaacatcggtgcattatcactgaaatttacagaaagtgacttgagagaaatttccgaggcagttcccatacatgatg

SEQ ID NO: 136415 - DNA, 239 bp, Glycine max
atcacccaagtaaagtaccaagggggctgtggaagcgttgggcgttttctgccacgggagccatagaagcagcacatgcaatagcaacaggagaccttgttagcctttctgaacaagaactcgtagactgtgtggaagaaagcgaaggttgttacaatggatggcactatcaatcgttcgaatgggttttagaacatggtgggattgccactgatgatgattatccttacagagctaaa

SEQ ID NO: 136416 - DNA, 243 bp, Glycine max
cacaaaacaaaaagtttacgttacaaatcgcataataaccgtcctaagtttattgagagaattttgcaagtgtgagaaacatggcatctcgtcaaaacaacaagcaagagcttgatgaaagagcaaggcaaggagagactgttgtcccgggtggaactggtggcaagagcctggaggctcagcaacaccttgctgaaggaaggagcaagggagggcaaacaaggaaggaacagctgggtacag

SEQ ID NO: 136417 - DNA, 91 bp, Glycine max
tgcatttcgttactttcatttgttgtgcaatcttacaagttccaaacttctctattttgttattatttgttctcacttctcacacatacag

SEQ ID NO: 136418 - DNA, 236 bp, Glycine max
gtccctgcggatgttgacgcaatgtgatttctgcccagtgctctgaatgtcaaagtgaagaaattcaaccaagcgcgggtaaacggcgggagtaactatgactctcttaaggtagccaaatgcctcgtcatctaattagtgacgcgcatgaatggattaacgagattcccactgtccctgtctactatccagcgaaaccacagccaagggaacgggcttggcggaatcagcgggga

SEQ ID NO: 136419 - DNA, 239 bp, Glycine max
gtttcacttgttgcccgatgctttcaaggggatcaagcagattggtgttatcggttggggatctcagggacctgcgcaggctcagaatctacgggactcacttgctgaagcaaagtctgatattgtggtcaagattggactcaggaagggttctcgttcctttgctgaagctcgtgcagctgggttttctgaggagaatgggactctaggtgatatatgggaaactgtctctggaagtg

SEQ ID NO: 136420 - DNA, 238 bp, Glycine max
caacataacaatgtcgttgattccaagtttcttcggcaccgggcgaagaaccaacgtcttcgaccccttctccctcgacgtgtgggacccattccatggcttccccggcaccaccgccctctccgctccgcgctccgagacggcggccttcgccaacacgcgcatcgactggaaggagacggcggaggcgcacgtgttcaaggcagacctgccggggctgaagaaggaagaggtgaag

SEQ ID NO: 136421 - DNA, 116 bp, Glycine max
gaaagaacttccttataaccaaaaccaacaacaactatggcaagttatcagaagcactacgatgatcagggtcgcaaggtcgacgagtatggcaatgttgagaggcaaactgacga

SEQ ID NO: 136422 - DNA, 245 bp, Glycine max
tcggctcgagggaaaatatctgcaccttgaagcttcacgagaacattgctcgcccttcacgcgctgacttctacaaccctaaagctggtcgcattagtaccctcaacagcctcaccctcccagccctccgccaattccaactcagtgcccaatatgttgtcctctacaagaatggaatttactctccacattggaatctgaatgcaaacagtgtgatctatgtgactcgaggacaaggaaaggtt

SEQ ID NO: 136423 - DNA, 235 bp, Glycine max
tattaccaagcaagttatgagcaagatggcagaaatgataaacagtctttagtggtggtgatgaaaaattgatgcgtgaaaggacacacctgctgttggcttgttgttcaaggatggcaatttgtaagaaagatatttggagagttgaatgtggaatcccgtctggatttccgctcacagttatttgcaatagcatttttaatgagatgctcattagatatagctatgaaaaatt

SEQ ID NO: 136424 - DNA, 228 bp, Glycine max
ctgcagaagagcgtcgcagttgtaaccctaatcagaagaagcgcagcttcaagcgagtgacagccaccagccatgggtcgtatgcacagccgcggtaagggtatatcctcttctgctttgccctacaatcggacacctcctagctggctcaagatctcttcgcaagatgtcgaagaaactatctgcaaatttgcgaagaaaggtttaaccccgtctcagattggtgtc

SEQ ID NO: 136425 - DNA, 232 bp, Glycine max
cacaactacaagaaagaacttccttataaccaaaaccaacaacaactatggcaagttatcagaagcactacgatgatcagggtcgcaaggtcgacgagtatggcaatgttgagaggcaaactgacgaatatggcaacccggttcatgccactagtgtcacttatgtagccaccaaaagtgttggtggctacaatgatgacgctaataagcaacatgatattactggtgtcta

SEQ ID NO: 136426 - DNA, 233 bp, Glycine max
tgcagaccgagctagctagctagcaagcaagcacagagatggaggcaaagcgaagccatgccctacatgtgcttggcacgtgtttcactcttcctctgcgctctaaccctatccgctgctcacggaagcaccacggttcaagacatcgcgagaaagttgaaactcggggacaacgagcttctgcgcacggagaagaagttcaaggttttcatggagaattacgggaggagcta

SEQ ID NO: 136427 - DNA, 229 bp, Glycine max
gattcatgataactcgtcggatcgcacggcctttgtgccggcgacgcatcattcaaatttctgccctatcaactttcgatggtaggatagtggcctaccatggtggtgacgggtgacggagaattagggttcgattccggagagggagcctgagaaacggctaccacatccaaggaaggcagcaggcgcgcaaattacccaatcctgacacggggaggtagtgacaata

SEQ ID NO: 136428 - DNA, 239 bp, Glycine max
gcacaacaacttctccagcttcgttcgtcaactcaacacttatgtaatctaattattcttctctatcaattcctttcttttctctttttacatttttctgatttttcttaattttgcttgacttgtagggatttagaaaagttgtacctgaccgctgggagttctcgaacgagtattttcgaagaggcgaaaagcgtcttctctgcgaaatccagcgacggaagatcctctccgcatct

SEQ ID NO: 136429 - DNA, 237 bp, Glycine max
ttaaatttcgataagaaaagttcccaacttcagctaagagaaaatgtctctgattccaaactttttcggtggccgtaggagcaatgtgtttgatcctttctcccttgaagtgtgggatcccttcaaggattttcattttccctcttctgtttctgctgaaaatttagcatttgtaagcactcgtgtggattggaaggagactccagaagcgcacgtgttgaaggcagatattccagg

SEQ ID NO: 136430 - DNA, 229 bp, Glycine max
gaaggattccaagaaaaagaagaagatcaaggaggtgtctcatgagtggcaactcatcaacaagcagaaaccaatttggctgcgaaagccagaagagatcaccaaggatgaatacgcttctttctacaagagcctcaccaatgactgggaagaacacttggctgtgaaacatttctctgttgagggccagcttgagttcaaggccattctctttgtgccaaagagggca

SEQ ID NO: 136431 - DNA, 231 bp, Glycine max
ctcgagccgttttgatccaaagttggctgatgatgagagagaaaaaggaaatgaattcatcaagcagcagaagtatcctgatgctgtgaagcattacacagagtctatacgaagaaatccaaaagatcctagggcttatagtaacagagcagcatgctacactaaattgggggcaatgcctgaagggttaaaggatgcagagaagtgcattgaacttgatccaacctttgt

SEQ ID NO: 136432 - DNA, 229 bp, Glycine max
tgtaactgcactagtgttggccacatgccttcaaccaaagaggaaggtcacgattttcaggaggctaaagccaagacaacacaaactgcgaacaaggccatggaaactggtaaagatgggaaagaagccgcagagtcatggacagaatgggctaaagagaaactcactgaaggtcttggcttcaaacatgatcaagaatccaccactaagaaagtctctgactatgccg

SEQ ID NO: 136433 - DNA, 228 bp, Glycine max
aagaatcaaagaaaggggtggtggctgcttcgaaagcttaataatttgtttatttccagaacatcatagttttcgcagcagcaaactaacaaattactcatatcatataataagatggcccgttctctctcgcaagccaaacgtattggtgtccttgttgctcaatctatctccctaattcccgttcatcggcgaggttacgcagtggcatccgatgtatcggtaaga

SEQ ID NO: 136434 - DNA, 231 bp, Glycine max
cagaaatcaaagggctatgttggtgatgctgcacaaaagaccaaagaatatgttggtgatgcagcacagaagacaaaggattatgccactgacgcagcacagaagaccaaagattatgctactcagaagaccaaggactatgcaagtgatgcaactgatgctgcaaagaagactaaagattatgctgctcagaagactaaggactatgcaagtgaagctagtgatgttgca

SEQ ID NO: 136435 - DNA, 234 bp, Glycine max; identical to SEQ ID NO: 134923

SEQ ID NO: 136436 - DNA, 232 bp, Glycine max
gttctcacttctcacacatacagattttagccttttatattatcatggcttctaaggtggtttcggttttggttatagcgatgatgttgtttgccatgaactgttactgcactagtgttggccacatgccttcaaccaaagaggaaggtcacgattttcaggagtctaaagccaagaccacacaaactgcgaacaaggccatggaaactggtaaagagggacaagaagccgc

SEQ ID NO: 136437 - DNA, 229 bp, Glycine max
gggatatggtgcaaaaggcttctcaattcttaggcttggcaacaaaccatactggatcatcaagaattcgtggggggagaaatggggagaagatggctattacaagctctgcagagggcatggcatgtgtggaataaacactatggtttctgctgcaatggtgcctcaaccacaaacaacacctacaaagaattatgcttcttattagctatgcacttaaggaaatcta

SEQ ID NO: 136438 - DNA, 231 bp, Glycine max
cagatatcggcgaagatgagggagaaaggtttcgatcgttctccaaccatgtgcaccgataagtggcgcaacctcttgaaggagttcaagaaggccaagcaccaggaccgagggagtggttccgccaagatgtcgtattacaaggagattgacgagatcctcagagagaggagcaagaatgtgcagtataaaagccctactcctccgcccaaggttgattcctttatgcag

SEQ ID NO: 136439 - DNA, 228 bp, Glycine max
ctcgcttgtgctgccttcgtttgcgtttttatcacagaggaattaacatatatatagcaagcatggcagtcacactctacgaccttagctcttcctctgggttgaagaaacttgatgagtaccttctcccacgcagttacatcaccgggtaccaagctacaaaggatgatcttactgtttatgcagctttgccaactgctccatcagatgaatatggaaatgtttcca

SEQ ID NO: 136440 - DNA, 228 bp, Glycine max
gttgaggttaatcctgatggaagccgaaaatgggttggaggagaggttgtgcaagcactggcttatgatgtgccaattccaggttaccaaaccaagaacaccatcagtcttcgtctctgggaggcaaaagcgagtgctgaggatttcaatttatttttatttaatgatgggcaacatgatgctgcttcagtgcttcactcacgagctcaacagatttgtgcagtttta

SEQ ID NO: 136441 - DNA, 228 bp, Glycine max
agaacctaagtgagaaacaaagaaaggaaataattgatctttgaaaatgcagggaggaaagaaagctggagagtccatcaaggaaacagctgcaaacattggtgcttctgccaaggctggcatggagaaaaccaaggccactgtccaggagaaggcagaaagaatgacggcacgtgatccgatgcaaaaggagttggcaacccagaagaaagaggcaaagatgagcca

SEQ ID NO: 136442 - DNA, 229 bp, Glycine max
caaaacagtaaagctaacttcaacacctttaattttctaaaagtaattcagcggctgaataccaagcggagaagatgagtcaggagcagccacggcgtcccaaaggccaaaaccccatcaaatacggcgacgtttttgtcgtctccggcgaccttgcacagaagcccgtcgcaccggaagatgctgccatgatgcaaagcgcggaaactcgagtgctcggacaaaccca

SEQ ID NO: 136443 - DNA, 230 bp, Glycine max
ggaacatcggtggcccttactatggaaccaacaccgcagacaccggtactggtcccagaagtggaaccacgggcggcaccggttatggaggcactggtggcactgattatggaacaactggtggcactggttatggaagtggaactgggtatggagtcaacactgggggtgcgcacactgaagcaggatataggaaggaacatcgtcagcatgaccaatctcatggtgat

SEQ ID NO: 136444 - DNA, 225 bp, Glycine max
cgatcccgtcgtagcagaaaaacttgtcaccatggtttcttccgacaaggatccacgagaggatatccttcaagcctggtacatggatgatagtgatgaagatcaaagattcccccaccacaaagaacccaaggagtttgtctcgttggaccaacttgctgaacttggagtccttagctggaaactagatgctgataaccatgaaaatgatccagagctgaagaa

SEQ ID NO: 136445 - DNA, 230 bp, Glycine max
gaaacaaagaaaggaaataattgatctttgaaaatgcagggaggaaagaaagctggagagtccatcaaggaaacagctgcaaacattggtgcttctgccaaggctggcatggagaaaaccaaggccactgtccaggagaaggcagaaagaatgacggcacgtgatccgatgcaaaaggagttggcaacccagaagaaagaggcaaagatgagccaggcagagctggacaa

SEQ ID NO: 136446 - DNA, 235 bp, Glycine max
gaaaacctaagcttagaattagaaacaaagaaaagaagaaaggaaagaattgatcgttgaaaatgcagggaggaaagaaagcgggagagtccattaaggaaacagctacaaacattggtgcttctgccaaggctggcatggagaagaccaaggccactgtccaagagaaggcagaaagaatgacagcacgtgatccggtgcaaaaggagttggcaacccaaaagaaagaggcaaa

SEQ ID NO: 136447 - DNA, 229 bp, Glycine max
aaacaactctttctcttcttccttcgctcgttgttctccctcgcgtagatcgacaatggcggagacagagacgtttgctttccaggctgagatcaaccagctcctcagtctcatcatcaacaccttctactccaacaaggagattttccttcgtgaactcatcagcaacgcctccgatgctttggacaagattcgatttgagagtttgacagataagagcaagctcgat

SEQ ID NO: 136448 - DNA, 229 bp, Glycine max
gtgcacagcttgaacacaccgcgtttcggagagagacgtcgcaatggggaggaggcctgcaaggtgttatcggcagataaaaaacaagccataccccaaatcacgcttttgccgtggtgttcctgatcctaagatcagaatttatgatgttggtatgaagaagaaaggtgttgatgagtttcccttctgtgttcatctggttagctgggaaaaagaaaatgtttcaagt

SEQ ID NO: 136449 - DNA, 225 bp, Glycine max
ctgaagcagaagctgagtttgagaggcttcttggtgtatcagaagcaaaatttgcaatgtcagagttatccaaggcagatagaggagacgatagtgatagtgtgaagctgtcggaattgcttcatggtcgtcattctaaagttgtttttattggatcaaccctatttgctttacaacagctatctggtataaatgctgtgttttatttctcttcaactgttttta

SEQ ID NO: 136450 - DNA, 222 bp, Glycine max
ggcatctcgtcaaaacaacaagcaagagcttgatgaaagagcaaggcaaggagagactgttgtcccgggtggaactggtggcaagagcctggaggctcagcaacacctgctgaaggaaggagcaagggagggcaaacaaggaaggaacagctgggtacagaagggtaccaggaaatgggacgcaaaggagggttgagcactgtggacaaatcaggagaagaa

SEQ ID NO: 136451 - DNA, 226 bp, Glycine max
ggctcctgaggacaaggcgagtttatggtcacaacttcattatgtttcgtgcaataacctggaaatgcaagaagcttatcttgtcaatctcgtaaatgtgttacgagaattgtatttgcacagtccagaggaagctcgccaattgagaaggaaagctctctctcgtattgaatggctgcaaaaagctgatgtgcctaccatagcacagattgaagagttccattcg

SEQ ID NO: 136452 - DNA, 226 bp, Glycine max
tgaacacaatggagagaagggttggctatgaggtgctggtggctttggtgacccttttggttttctcatttgcttgtgccactgcttcatcatcaggaccaacaaaactccaccaccgtgtggagcaattcaggaggaatctgcttgctaatggccttggtagaactcctccaatggggtggaacagttggaatcatttcagctgtcaaattaacgaaaaaatgat

SEQ ID NO: 136453 - DNA, 227 bp, Glycine max
ttcttctctggttgattcggatctagagtcttcagtttctcctcgttgttcttcgctttcctgttttcaatttcgattctttcgttaatttaataagatgtttggtggggcaccgaagaagagcgataatacgaggtactacgaaatcctcggcgtctccaagaacgcttcgcaggatgatgtgaagaaggcttacaagaaagccgccattaagaatcaccccgaca

SEQ ID NO: 136454 - DNA, 228 bp, Glycine max
tcacacacaactactacaagtacttccttacaatcaaaaccaacaacaactatggcaagttatcaaaagcactacgatgatcagggtcgcaaggttgacgagtatggcaacgttgagaagcaaaccgacgaatacggcaaccctgttcatgctgctagtgtcacctatgtagccaccagaactgctgctggtggttacagtgatgacattaataagcaacatgatacc

SEQ ID NO: 136455 - DNA, 104 bp, Glycine max
gatgtctgggaatgcagcagtcaccaggcgtgattgggcctcattggtacaagtgtttctaacaaacagcaacagtacagagcattttgatgcatgtaagtgga

SEQ ID NO: 136456 - DNA, 227 bp, Glycine max
caaaacagtaaagctaacttcaacacctttaattttctaaaagtaattcagcggctgaataccaagcggagaagatgagtcaggagcagccacggcgtcccaaaggccaaaaccccatcaaatacggcgacgtttttgtcgtctccggcgaccttgcacagaagcccgtcgcaccggtagatgctgccatgatgcagagcgcggaaactcgagtgctcggacaaacc

SEQ ID NO: 136457 - DNA, 225 bp, Glycine max
ctcaattccgcgctttaacaacagaaagaaatccacacatttccctttcaatggcacgaaccaagcaaacagcgcgcaagtccaccggcggcaaggctcctcggaagcagctcgccacaaaagccgctagaaagtccgctccggcaaccggcggagtaaaaaagccgcaccgttttaggcccggcacggtggcgctgagggagatccgaaagtaccagaagagca

SEQ ID NO: 136458 - DNA, 265 bp, Glycine max
cttcttctctggttgattcggatctagagtcttcagtttctcctcgttgttcttcgctttcctgttttcaatttcgattctttcgttaatttaataagatgtttgggagggcaccgaagaagagcgataatacgaggtactacgaaatcctcggcgtctccaagaacgcttcgcaggatgatctgaagaaggcttacaagaaagccgccattaagaatcaccccgacaagggcggtgatcccgagaagtttaaagagctggcgca

SEQ ID NO: 136459 - DNA, 256 bp, Glycine max
cacacaactactacaagtacttccttacaatcaaaaccaacaacaactatggcaagttatcaaaagcactacgatgatcagggtcgcaaggttgacgagtatggcaacgttgagaagcaaaccgacgaatacggcaaccctgttcatgctgctagtgtcacctatgtagccaccagaactgctgctggtggttacagtgatgacattaataagcaacatgataccaccaatgcctacggcgtagacactggtagac

SEQ ID NO: 136460 - DNA, 250 bp, Glycine max
cacaagcagtgggaggaggctcgggactctgaccgcgtgcctgttgaagaatgagccggcgactcataggcagtggcttggttaagggaaaccaccggagccgtagcgaaagcgagtcttcacagggcaattgtcactgcttatggacccgaacctgggtgatctatccatgaccaggatgaagcttgggtgaaactaagtggaggtccgaaccgactgatgttgaagaatcagcggatgagttgtggtt

SEQ ID NO: 136461 - DNA, 253 bp, Glycine max
ccaaactctaagcaattattgtatacattctcttctctctcccttttctcatcacacactaacttgctttcgaggttttcttcttctttctcgaattttcacataccgaacttctcgtctttcacatctccaggtttgaaatgaatcctgagaagtttactcacaagactaatgaagctcttgcgtcggcccacgagctcgcgatgagttcaggccacgcgcaattgactcccatccacttggcccacgcgct

SEQ ID NO: 136462 - DNA, 254 bp, Glycine max
attagaaacaaagaaaagaagaaaggaaagaattgatcgttgaaaatgcagggaggaaagaaagcgggagagtccattaaggaaacagctacaaacattggtgcttctgccaaggctggcatggagaagaccaaggccactgtccaagagaaggcagaaagaatgacagcacgtgatccggtgcaaaaggagttggcaacccaaaagaaagaggcaaagatgaaccaggcggactggacaagcaggcggcgcgt

SEQ ID NO: 136463 - DNA, 255 bp, Glycine max
caacaccttgctgaaggaaggagcaagggagggcaaacaaggaaggaacagctgggtacagaagggtaccaggaaatgggacgcaaaggagggttgagcactgtggacaaatcaggagaagaacgtgctcaagaggaaggcattggcatcgatgagtccaagttcaggactggtaataacaagaaccagaatcagaacgaagaccaggataagtgataatgtaacacccttcactagcatgtgtagtgtgttctt

SEQ ID NO: 136464 - DNA, 259 bp, Glycine max
ctaaagactaagcatgctactcccaagtatggtcttatataccatgcttccttgattggtcaggcagctccaaagttcaaggggaaaatttcccggtcacttgcagcaaagacggcattggctattaggtgtgatgctcttggagatagccaagataacaccatgggattggagaacagagccaagcttgaagcacgattgaggaaccttgaaggcaaagagttaggtcgttttgctggttctgccaagggaaagccca

SEQ ID NO: 136465 - DNA, 264 bp, Glycine max
gatcctgctttggagagacgattccagccagttaaagtgccagagccaactgtagatgaaaccatacaaatactgaaaggacttagagagcggtatgaaattcaccacaagctccgctatactgatgaggctcttgtagctgctgcacagctgtcctaccagtatatcagtgatcgatatttgccagacaaagctatcgatttgattgatgaagctggttcacgagtccggcttcaacatgcacagttacctgaagaagcaaga

SEQ ID NO: 136466 - DNA, 261 bp, Glycine max
ctactctttcaaaagcgcatccagggagatagcatcagggaaaattccagacccaggatcgttgaaggcaaaggacacaacaatggtggatgtgccagttaaggttccatacagcatattgatgagcttggcaaaggacattggtgctgactgggacatagactatcaattggatcttggtctggttattgatgttcctgtcattggcatcttcaccattcctctctctcagaaaggagagatcaagctaccaaccctctc

SEQ ID NO: 136467 - DNA, 258 bp, Glycine max
cactactgctccagactccactagaacttcatacaatgtgctgtctatgattccgatgaatccaaagctcgtctcctcggggtggagtacatcgttcctgctgatgtctttgaagcctttcctccggaggagcagaaactttggcattctcatgcttatgagattaaatcaggcctgttggtgaatcctagagttcctgaggttgttgccatgccagagctcgaaaaccttgcccaaacttacggcaaattctggtgt

SEQ ID NO: 136468 - DNA, 255 bp, Glycine max
agaagaactactttgctgctgctgttgctgaggagggatcccagctgttattgcttcatgctattgaagaattttcttgcaagtctacttccaatgctttaaaggaggttgccctggttctaaagacattctacgatgctgatgtgttggaggaagagcacatagtgcagtggtatcaaaagggactgaagggcaataacaagaactctaagatttggaagaatgctcaacctttcattgattggcttcagagtg

SEQ ID NO: 136469 - DNA, 255 bp, Glycine max
ctgcaggtctagagcttgatgatattgatctttttgaaataactgaggcatttgcctcccagttcgtgtattgccgtaacaagctagggcttgatccagaaaagatcaatgttaatggaggtgcaatggcaattgggcatcctctgggttcaacaggtgctcgatgtgttgcaactctgttgcatgaaatgaagaaacgtggcagggactgtcgatttggagttatatctatgtgcataggtactggaatggggg

SEQ ID NO: 136470 - DNA, 219 bp, Glycine max
tataaaataagagactctgaagtctgaacacggtgctcacataatgttgaggagttttagcatgccctgcaatggaggctgtcaaggatttgtataacagtattttgggtatatttctttcataatttattttgcgattgttatgtgaaaatgttgtatgtgtttaactggatgtacatgttacgttattagtggtctatgtgatgttcattaagactg

SEQ ID NO: 136471 - DNA, 247 bp, Glycine max
gcacgacgtgagatatattgtgaagtagaaatcggtgcaagaaattctccactttatctaaaaaaattcggtgagtttgtgaagacatcaaatcactagctactcaaaaatggccacagtaggaaggaacgttgcagctcctttgctgtttcttaacttgatcatgtcattttattgttcttggctttgctagttagtgcctcaacaggttcatcaatggccaaacttaccaccctagttctcgtgg

SEQ ID NO: 136472 - DNA, 251 bp, Glycine max
  unsure (1)..(251): unsure at all n locations
gattcctgcgagtatgctcatggtgtttttgagtcctggctacatcccgcccaataccggacaaggctttgcaaggatgagacgggctgtgctagaaaagtatgcttctttgctcacaaacctgaagatcctacgccctgtgtatgcttccactgggtcggctatgnccatcaccaaaatcctattcagctagtggacttgacatgacagcgatgagtccattggctcttagttccacatnacnnacgact

SEQ ID NO: 136473 - DNA, 259 bp, Glycine max
gtctgaaccttgtcagccgatcatttgaatttcaggctgatggctttgctaagaagcttggatatgcatctggactacgcggtggtcttgtgaaactacaggaggagaatctttcagctatgaatacagatccttggtactctgcttatcactattctcatcctccccttgttgaaagattggccgcgctggacgaagcggataagaaagaagactaagcaagcaacttaaagatgaagagcagctaaaattggttgta

SEQ ID NO: 136474 - DNA, 259 bp, Glycine max
tttgaggccttgccgagtgtggaaattggagaaggtaacgaagattcggagtgtgtggtttgtttggaggagtttggggttggtggggtggcaaaggagatgccatgtaagcataggtttcatggtaattgtattgagaagtggttggggatgcatgggtcttgccctgtgtgtaggtatgagatgcctgtggaggagattgattgggggaagaagagggaggaggaaggtggtgagaggagaaggagtgatggtggtg

SEQ ID NO: 136475 - DNA, 253 bp, Glycine max
caattggttcagaagataactttaagggagttatagaccttgttaggaataaggctatagtttggtctggagaagagctgggtgccaagtttgatattgtagatattccagaagatcttcaagagcaggctcaggattaccgtgcccagatgatagaaaacatagttgagtttgatgaccaggctatggagaactacctggaaggaattgaaccggatgaggaaactataaaaaaattaattaggaagggaac

SEQ ID NO: 136476 - DNA, 254 bp, Glycine max
gaccgagctagctagctagcaagcaagcacagagatggagtcaaagcgagatcctgccctcatgtgcttggcacgtgtttcactcttcctctgcgctctaaccctatccgctgctcacggaagcaccacggttcaagacatcgcgagaaagttgaaactcggggacaacgagcttctgcgcacggagaagaagttcaaggttttcatggagaattacgggaggagctactccacagaggaggagtatttgcgcc

SEQ ID NO: 136477 - DNA, 252 bp, Glycine max
atttcaggttctcgtcttttgggcaccattcctcagtctatttcacagcaaactgtttggaatcaaatggcaacagtgagaacaccattgaattttgattctagcaagcagagcttttgtcaattttctattgaccttctcggtggaggaattttagtggacaaaactggagattggatcacacttatacaaaattctccaattagtaacttgttgagagttgctgcttggaagaaaggctgtttaatggtt

SEQ ID NO: 136478 - DNA, 248 bp, Glycine max
gttctgttgcaatggaacagttgttcaggacccagaactaggacaggttattcaacttcaaggtgatcagaggaagaatgtttctaccttcctagtccaggctggtatcgtgaagaaggatcatatcaagattcatggtttctgagcggttggagtcttaagtgtcaaattttacctgcctgactatgtgttaggcataatatataatctgagtcgtgtggatgtgattgtggtatttctaatgtgtt

SEQ ID NO: 136479 - DNA, 249 bp, Glycine max
gttaagattgtgatgtctgggaatgcagcagtcaaaaggagtgattgggcctcattggtacaagtgtttttaacaaacagcaacagtacagagcattttgatgcatgtaagtggacaaaatcagaaccacattcctgggaattgatcttgccaatagaggtatgtggtcctaataatggttttgaaatgtggagttctgagtgggcaaatcaaacttcatggcatttgagtttcctaattgacaatccc

SEQ ID NO: 136480 - DNA, 250 bp, Glycine max
acatagtgcagtggtatcaaaagggactgaagggtgataacaagaactctaggatttggaagaatgctcaacctttcattgattggcttcagaatgcagaatcagaaaccgaggaagaataatttgtcctacattctccgttacttatgtttgcttgcttgtgttatgtcctttatttccaattaagggtcttgttggccccatgtgttgttcaactactatacttgctaaaaactggtgtgaggggtgc

SEQ ID NO: 136481 - DNA, 260 bp, Glycine max
aataaatagataaaggagcatgttgattatatagaaagtaaagggcaacaatcatttttgtttaccatgggtaaggacaccatcgctgacataataacctatataagaaatgctgacatgaataaaaaaggaatggttcaaataccatttactaacataacagaaaacattgtaaaaatacttttacgcgagggttttgttgaaaacgtcagaaaacatagagaaaacgacaaatattttttagttttaactctacggta

SEQ ID NO: 136482 - DNA, 264 bp, Glycine max
aaaaaacattgcccttgttctttcaaagttaccaaacacaagtacacaacacaacagcaacatatggcgtctgaacaattggctcgcagagagggtcaaagatcatgcaggaaaagccatgggagatattggtggacgtgggaaagccagagagactcacgagctgggtgcacactttgaatccctggctgacaaagtaactgaccatgcagcagccaatgtagttggaaacaaagagagtcaaagagaagctcgtggtggtgt

SEQ ID NO: 136483 - DNA, 258 bp, Glycine max
aaaaaaaaaacgtgattcgctcttctcttcgaataaaccacaaaaccaacaaacgagaagaggagtgagagaagatggggttgtcgttcacgaagctgttcagcaggttgtttgcgaagaaggaaatgaggattctgatggtaggtctcgatgctgctggtaagacaaccatcttgtacaagctcaagcttggagaaatcgtcaccaccatccccaccatcggatttaatgttgagactgtggagtacaagaacatca

SEQ ID NO: 136484 - DNA, 254 bp, Glycine max
cggctcgaggattgctattggagtatagaggatcagaatgcaatttctattcttttgaccaagcatgatcaaatggaatggtggaaatgtctagtgaaaggtgatcctgagattgatacccaaaaggttgaacctgaaaacagcaaacttggtgacctggatcctgagactcgacagactgttgaaaaaatgatgtttgaccagaggcagaagtctatgggcctccctaccagtgaagagctccagaagcagga

SEQ ID NO: 136485 - DNA, 248 bp, Glycine max
acagaaaagaaaaaggaaaccctagctggataggtcaaacatcatcatgtcggacgaagagcaccatttcgagtccaaggcagacgccggtgcctccaaaacctaccctcagcaagccggtaccattcgcaagaacggctacatcgtcatcaaaggacgcccctgcaaggttgtggaagtttcgacttccaaaactggaaagcacggtcacgccaagtgccactttgttggaattgatattttcactg

SEQ ID NO: 136486 - DNA, 240 bp, Glycine max
attgaagccaaacatggtcacccccggatccaattctgctaaggtttcccctcaggtggttgcggacacactgttagagcccttcagagaaccgtgcctgctgcagttcctgctatcgttttcttgtctggtgggcagagtgaggaggaggcatccgttaacctcaatgccattaaccaggtcaatggaaagaagccatggtcactctctttctcctttggaagggcattcaacagagca

SEQ ID NO: 136487 - DNA, 244 bp, Glycine max
ctctctccgccgatccgtccgccatgagttccggcgagctcctccacatacaaccccaggggctgcagtttccctttgaattgaggaagcagatctcatgctccttgcagttgtctaacaagactgacaactatgtggctttcaaggttaagacaacaaatcctaagaaatattgtgttagacctaacactggagttgtgatgcctaggtctacttgtgatgtcatagtaacaatgcaagccca

SEQ ID NO: 136488 - DNA, 260 bp, Glycine max
cacacaactacaagaaagaacttccttataaccaaaaccaacaacaactatggcaagttatcagaagcactacgatgatcagggtcgcaaggtcgacgagtatggcaatgttgagaggcaaactgacgaatatggcaacccggttcatgccactagtgtcacttatgtagccaccaaaagtgttggtggctacaatgatgacgctaataagcaacatgatattactggtgtctatcccgagaaagacaccggtagacatc

SEQ ID NO: 136489 - DNA, 255 bp, Glycine max
gccaagtcgtaaaagggtttcaagggatggaaaacatgcagagcttctggcaattgggtgatgaactccgtgggcactcaaaagcatcggaggatcacaagtggttaatggttgcctcgaaactggccgaacagacaagattgaagggggagcgtgtgaacaaccttgatctttcaaagggacccattgaaacaaggtcaagggataaatttgggttccaggaagagaacaaatttgattctcttaacttgagca

SEQ ID NO: 136490 - DNA, 255 bp, Glycine max
atcaaaagcactacgatgatcagggtcgcaaggttgacgagtatggcaacgttgagaagcaaaccgacgaatacggcaaccctgttcatgctgctagtgtcacctatgtagccaccagaactgctgctggtggttacagtgatgacattaataagcaacatgataccaccaatgcctacggcgtagacactggtagacagcattctagtggtggctacgatggtgacactaataaacatcatggaactactggtg

SEQ ID NO: 136491 - DNA, 252 bp, Glycine max
gaggaagagttacagaatttcctgtttacgatcttattgcaattttgcaactttcaaagcttattagctaaagtaacatcaaaagatgtcattgattccaagtattttcggtggcccaaggagctacgtgttcgatccattctcactcgatatgtgggatcccttcaaggattttcatgttcccacttcttctgtttctgctgaaaattctgcatttgtgaacacacgtgtggattggaaggagacccaaga

SEQ ID NO: 136492 - DNA, 242 bp, Glycine max
caaaattgaactgtaattgtagtagtagacagtagcaccatgagccaggaacagctcaagaaacctcaaggggagcaggaccccatcgcatacggcgacgttttcaaagtctccgacgaactcgctttcaaacccatcgcgccaagagacgcagctctcatgcaagccacggagaaccaagcattgggccaaactcaaaaaggaggtcccgcctcggtgatgcaatccgccgcaaccgaaaa

SEQ ID NO: 136493 - DNA, 251 bp, Glycine max
agataacttgacaaataaaatcaccatgtctatcatcccaaacttgttcggtggtagacgaagcaacgtcttcgacccattctctctggacgtatgggaccctttcgaggggtttcctttttccacaggtcacgtgccttcctctggtggggaaagcagtgccatagccaacactcgcgtggactggaaggagactccggcggctcacgtgttcaacgttgatcttcccgggttgaagaaggaggaagtga

SEQ ID NO: 136494 - DNA, 260 bp, Glycine max
ctcaatcatgtcttcagaaacaaaagcagaaacacaaactttgaccaccccctcttactcctcagatgttgacaatggtatagtgaaggatgtagtcctatggagaagaaagaaaataaatataagcgttcttgttgcggcaacagcggcatgggtgttgatggaagtgtttgaattcaacttcctcactctcatatcatgggtggccatactcggtcttgcttcaatattcctctatgccaatatgcttagacttttgg

SEQ ID NO: 136495 - DNA, 257 bp, Glycine max
tgcacaaaagaccaaagaatatgttggtgatgctgctcagaagaccatggattatgccactgatgcagcacagaagaccaaagattatgctactcagaagactaaggactatgcaagtgatgcaactgatgctgcaaaaaagactaaagattatgctgctcagaagaccaaggattatgcaagtgatgcaactgatgctgcaaaaaagactaaggattatgctgcgcagaagaccaaggactatgccagtggtggtg

SEQ ID NO: 136496 - DNA, 248 bp, Glycine max
atccaagaaatagctccaagtatatcatttgcagcaatagggctactggatatgttcaacgatggaggagcagtggagcaggttgagattcataaccgagcagcaacgaaaacaatagctcttagtgtaaggggaagaggcagatttggagtttactcctcccagagaccactgaagtgtgtggtaggtggcgctgaaaccgacttcaactatgactcagagaccgggttgacaaccttctccattcc

SEQ ID NO: 136497 - DNA, 248 bp, Glycine max
tgatggttgaatgtggtggaaatagtgggaaaggagtgaacattaaagctggtgtgatcacggagtggaaggatattccagttgagcttttgatgcaaattttgtcacttgtggatgatcaaacggttatcatagcttctgaagtgtgtcgtgggtggagagaggcaatttgctttggccttactcggttatcactctcatggtgtagcaagaacatgaataacttggtcctatccctttctcctaaa

SEQ ID NO: 136498 - DNA, 244 bp, Glycine max
ccaaactctaagcaattattgtatacattctcttctctctcccttttctcatcacacactaacttgctttcgaggttttcttcttctttctcgaattttcacataccgaacttctcgtctttcacatctccaggtttgaaatgaatcctgagaagtttactcacaagactaatgaagctcttgcgtcggcccacgagctcgcgatgagttcaggccacgcgcaattgactcccatccacttggc

SEQ ID NO: 136499 - DNA, 245 bp, Glycine max
  unsure (1)..(245): unsure at all n locations
gttcagtgtgtcgtttaaaaatgtcgcagttgctggataaagccaagaacttcgtgtcggagaaggtaaatgatatggccaagccggagggangtgtcactgacgtggacttcaagcgcgtgagctaagataatgtcgagtacttggccaaggtctctgttcgtaacccttattcaacttccatacccatttgtgagatcaactactctttcaaaagcgcatccagggagatagcatcagggaaa

SEQ ID NO: 136500 - DNA, 243 bp, Glycine max
agaacccttgctgattacaatattcagaaggagtctaccttacacttggttcttcgtttaagaggtggcatgcagattttcgtcaagactttgacgggaaagaccatcaccttggaggtggagagttcagataccatagacaatgtgaaagccaagattcaagataaggagggtatccccccagaccagcagaggcttatctttgctggtaaacagcttgaagatggacgaacccttgcagat

SEQ ID NO: 136501 - DNA, 243 bp, Glycine max
gtggaatggattccccacaatgtgaaatccacagtctgtgacattcccccaaccggcttgaagatggcttcaacattcattggcaactctacctccattcaggagatgttccgtagagtgagtgagcaattcactgctatgttcaggaggaaggccttcttgcattggtataccggggaaggcatggacgagatggagttcactgaggctgagagcaacatgaacgatcttgtgtcagagtat

SEQ ID NO: 136502 - DNA, 246 bp, Glycine max
cacacaactacaagaaagaacttccttataaccaaaaccaacaacaactatggcaagttatcagaagcactacgatgatcagggtcgcaaggtcgacgagtatggcaatgttgagaggcaaactgacgaatatggcaacccggttcatgccactagtgtcacttatgtagccaccaaaagtgttggtggctacaatgatgacgctaataagcaacatgatattactggtgtctatcccgagaaaga

SEQ ID NO: 136503 - DNA, 246 bp, Glycine max
taaccttgctctatactacacagtacacacactagaagaataatggcttccatcctccactactttttagccctctctctttcttgctcttttcttttcttcttatccgactcagtcacccctacaaaaccaataaaccttgttgttctacccgttcaaaatgatggttccacagggctccattgggccaacctccaaaaaagaacccctctaatgcaagtaccagtcctggtggacctcaatgga

SEQ ID NO: 136504 - DNA, 205 bp, Glycine max
tgaaccataaccatgtcagacgaggagcaccacttcgagtcaaaggctgatgctgtgagcatcaaagacatttccccagcaagctggaaccatccgcaaaaacggttacattgtcatcaagaacaggccatgcaaggttgtggaggtttcaacttccaaaactggcaagcatggacacgcaaagtgtcactttgttgcaattgac

SEQ ID NO: 136505 - DNA, 133 bp, Glycine max
ggaagacagcgaaggttgttacaatggatggcactatcaatcgttcgaatgggttttagaacatggtgggattgccactgatgatgattatccttacagagctaaagagggtagatgccaagccaataagata

SEQ ID NO: 136506 - DNA, 247 bp, Glycine max
ccgagctagctagctagcaagcaagcacagagatggaggcaaagcgaggccatgccctcatgtgcttggcacgtgtttcactcttcctctgcgctctaaccctatccgctgctcacggaagcaccacggttcaagacatcgcgagacagttgaaactcggggacaacgagcttctgcgcacggagaagaagttcaaggttttcatggagaattacgggaggagctaactccacagaggaggagtatt

SEQ ID NO: 136507 - DNA, 243 bp, Glycine max
ggaagagcacatagtgcagtggtatcaaaagggactgaagggcaataacaagaactctaagatttggaagaatgctcaacctttcattgattggcttcagagtgcagaatcagaaaccgaggaagaataattttcccacattctccgtttcttatgtttgcttgcttttgtcatgtcctttatgtccaataaaagggtcttgttggccccatgcgttgtggaactactatacttgtctgaagg

SEQ ID NO: 136508 - DNA, 241 bp, Glycine max
tttcctctgtttttttcttcaaatccattgtttcgtggaaatcccgaaatttaaccatgcttctccgaaccgccgcctccgccgcttctgcttcgtccctctccctcttcagccctacctccgaacctctccgttcggttcccgctcgtggattggtggttcgcgccgcgaaaggatccacgaaccaccgcgccctaaccggcgtgatctttgaaccgttcgaagaggtgaagaaggagct

SEQ ID NO: 136509 - DNA, 239 bp, Glycine max
ccgggaggcgctactccacagaggaggagtatttgcgccgtttggggattttcgcccagaacatggtcagagcggcggagcatcaggcgctggaccccaccgccgtccacggcgtcacgcagttctccgatcgcaccgaggacgagtttgagacgctctacactggcgtcaatggcggcttcccgtcatcgaataatgccgccggcggtattgcgccgccgttagacgtggacgggctg

SEQ ID NO: 136510 - DNA, 239 bp, Glycine max
tgcagaccgagctagctagctagcaagcaagcacagagatggaggcaaagcgaggccatgccctcatgtgcttggcacgtgtttcactcttcctctgcgctctaaccctatccgctgctcacggaagcaccacggctcaagacatcgcgagacagttgaaactcggggacaacgagcttctgcgcacggagaagaagttcaaggttttcatggagaattacgggaggagctactccaca

SEQ ID NO: 136511 - DNA, 239 bp, Glycine max
gcagaccgagctagctagctagcaagcaagcacagagatggaggcaaagcgacgccatgccctcatgtgcttggcacgtgtttcactcttcctctgcgctctaaccctatccgctgctcacggaagcaccacggttcaagacatcgcgagacagttgaaactcggggacaacgagcttctgcgcacggagaagaagttcaaggttttcatggagaattacgggaggagctactccacag

SEQ ID NO: 136512 - DNA, 236 bp, Glycine max
cggctggatactatagttacaagtgggctgaggtgctgtctgctgatgctttctctgcatttgaggatgctggattggataatgacaaggctgttaaagaaacggggcgcaagttccgggagaccattcttgctcttggaggtggcaagccaccactagatgtttttgtgcaattccgtgggagagaaccaacaccagatgcattgcttaggcacaatggcctatgtacagttgca

SEQ ID NO: 136513 - DNA, 243 bp, Glycine max
caaagttacctgtttgcgatctcattacaatctccccagtttctaatctcagctaagaaaaaccaaaagatgtctctgattccaggtttcttcggtgcccgaaggagcaacgtcttcgatccattctcactcgacatttgggatcccttcaaggattttcatgttcccacttcttctgtttctgctgaaaattctgcattcgtgagcactcgtgtggattggaaggaaaccccagaggcacac

SEQ ID NO: 136514 - DNA, 247 bp, Glycine max
gacggagtcgttttgggtcatgaggaacgatttaagaagagagaggaaattgcccggatttttcgataaggaggtatatgatattcttgattcaccagcggccttggctctcgctctttcatcctcatctcctcctcctccaaccacaaccagaacaataacactccctgctgaggagcctctgcctcacctctatgatagtaatcggagcgcgcccggtgacggtgaggatggcttgttctcagat

SEQ ID NO: 136515 - DNA, 246 bp, Glycine max
aaaaaaaccctagtaatgccgccgatggggaggaagcgaaaggtagcacccaaatcttctctatccaccgagccacctcccaagcagcaacaaccaaaacccgaaaatccccctcaagaatacgaagaagtcgaagaggaagttgaggaagaagaggtagaggcacaggtcgaagaggacgaagaagaagacgaggaggacgaggcagaagaggaagaggaagaagcagacgacgaagaaaacgac

SEQ ID NO: 136516 - DNA, 240 bp, Glycine max
gttagtgacaagccaggcaatcacaattttgatcttcttaagaagctggttctcccggatggttcggttctccgtgctcagttacctggcaggccaactcgtgattctctatttgtggatccagccagagataggactagcttgctcaaaatatggaacctgaacaaatgctctggagttgttggtgtatttaactgccaaggtgctggatggtgcaagatagagaagaaaacccgcatc

SEQ ID NO: 136517 - DNA, 237 bp, Glycine max
agagagaggagctgttagacaacgtcactggcaacatcaccgagggaggaggcgaggtgttgggagcagtaggtgaaaccgttgctgagattggacagaacatgatgaagccagcggagatagttcaggaacgcgctcacgttcgacaagcgggtggggtcttggatgccattggtgaaacattgctgagattgctgaaacgactcgagtcatggtttctggagaggacgagagagt

SEQ ID NO: 136518 - DNA, 246 bp, Glycine max
cttgctctatactacacagtacacacactagaagaataatggcttccatcctccactactttttagccctctctctttcttgctcttttcttttcttcttatccgactcagtcacccctacaaaaccaataaaccttgttgttctacccgttcaaaatgatggttccacagggctccattggcccaacctccaaaaaagaacccctctaatgcaagtaccagtcctggtggacctcaatggaaatc

SEQ ID NO: 136519 - DNA, 241 bp, Glycine max
cttcttcctccaagagaagtaaacaaccctcacattcaccacagcagcacacacagacaaagacaaccttgtttgtctccaatcaaaacctttcaagctggcgttcgaaaaccaagacaaccctgtccgagaaatcaagcccaagaataggagaatcatgggtgctggaggccctgatgatgaggacaacaacaggtggccaccgtggctgaagcctctgctaaaagaaagtttctttgtt

SEQ ID NO: 136520 - DNA, 237 bp, Glycine max
cttccttcaacacaaggttccaaggctcagccataagacgccacacctatgatagctcagtggccatggttcccttcggaccttactggaagttcgtgaggcagctcatcatgaacgaccttctcaacgccaccactgtaaacaagttgaggcctttgaggacccaacagatccgcaagttccttagggttatggcccaaggcgcagaggcacagaagccccttgacttgaccgagg

SEQ ID NO: 136521 - DNA, 122 bp, Glycine max
ggttttggttatagcgatgatgttgtttgccatgaactgtaactgcactagtgttggccacatgccttcaaccaaagaggaaggtcacgattttcaggcgtctaaagccaagaccacacaaa

SEQ ID NO: 136522 - DNA, 236 bp, Glycine max
cctagctagggtttctgagtttatgtggttgcgcctctgcctgtaagagtgaaaaaaccttctcttttccttctctcaagtctcaagagatttcatcatggctccaaagaaggacaaggctccaccaccttcctccaagcccgccaaatctggcggtggcaagcagaagaagaagaagtggagcaagggaaagcaaaaggagaaggtgaataacatggtgctgtttgatcagggca

SEQ ID NO: 136523 - DNA, 241 bp, Glycine max
gctgttgtcgctgctcatcctccataacctccgagctctacaccgaagaacgaagccatggggaagacacatggaatgggagctgctcgcaagctcaagtctcaccgcaggaggcaaaggtgggctgataagtcatacaagaaatcccatcttgggaatgaatggcagaaaccttttgccggttcatcccatgccaagggaattgtccttgaaaagataggtattgaagctaagcagccca

SEQ ID NO: 136524 - DNA, 245 bp, Glycine max
ggagattctttgtttgctaccttctctcggaaaaatggttacgttcaggtttcaccagtaccaggtggttgggagggctcgtcccacggaagcagatcagcaccccaagatctaccgaatgaagctctgggccaccaacgaggttcgcgccaagtccaagttctggtattttctgaggaaactgaaaaaggtgaagaagagcaatggccaagtgcttgccatcaacgagatttttgagaagaacc

SEQ ID NO: 136525 - DNA, 242 bp, Glycine max
ggaattttgggctagatgggctcatagggctctctggcatgcttcgctgtggcacatgcatgagtcccaccatcgaccaagagaaggacccttcgagcttaacgatgtatttgcaataatcaacgctgtccctgccatcgctctcctttcctatggtttctttaacaagggactggtccctggcctttgctttggtgcgggtcttggaattacggtctttgggatggcctacatgtttgtac

SEQ ID NO: 136526 - DNA, 157 bp, Glycine max
cgtgatccgatgcaaaaggagttggcaacccagaagaaagaggcaaagatgagccaggcagagctggacaagcaggcggcgcgtcagcataacacggcggcgaacaggctgccacggcagggcacatgggacaacccatggggaaccatcagacgtc

SEQ ID NO: 136527 - DNA, 239 bp, Glycine max
gtttcttatggttttaggtactattggggcagttggggaaggcttggccacccctctagtgttgtatatcagtagccgcatgatgaataacattggaatttcctctaacatggatggaaacactttcatccataacatcaataagaatgcagtggcttggttatatttggctggtgcctcttttggggtttgcttcctcgagggttattgttggacaagaacaagcgaaagacaagcgg

SEQ ID NO: 136528 - DNA, 237 bp, Glycine max
gacaccatcaattttgaggcttttccccacaagctggtgcagtttggagagattcaggaaaaagttgtattgaaattttcacaagaggaatttcttacagcttggtcaactcaggtgcgtcctgcaacaactctgttggctgatgggtgtccatatttgtatgctatggtgcatgatagttcagtgtctacaataccaggtgattttgtcattggtgttaagttgacaaccataaac

SEQ ID NO: 136529 - DNA, 231 bp, Glycine max
ggaattttgggctagatgggctcatagggctctctggcatgcttcgctgtggcacatgcatgagtcccaccatcgaccaagagaaggacccttcgagcttaacgatgtatttgcaataatcaacgctgtccctgccatcgctctcctttcctatggtttctttaacaagggactggtccctggcctttgctttggtgcgggtcttggaattacggtctttgggatggccta

SEQ ID NO: 136530 - DNA, 234 bp, Glycine max
cgtgatccgatgcaaaaggagttggcaacccagaagaaagaggcaaagatgagccaggcagagctggacaagcaggcggcgcgtcagcataacacggcggcgaacagagctgccacggcagggcacatgggacaacccatggggacccatcagacgtcagctatgcccggtcatggaaccggacagcccacgggccatgtcaccgagggagtggtgggctcacaccctattgga

SEQ ID NO: 136531 - DNA, 233 bp, Glycine max
gtttcttatggttttaggtactattggggcagttggggaaggcttggccacccctctagtgttgtatatcagtagccgcatgatgaataacattggaatttcctctaacatggatggaaacactttcatccataacatcaataagaatgcagtggcttggttatatttggctggtgcctcttttggggtttgcttcctcgagggttattgttggacaagaacaagcgacagac

SEQ ID NO: 136532 - DNA, 241 bp, Glycine max
gacaccatcaattttgaggcttttccccacaagctggtgcagtttggagagattcaggaaaaagttgtattgaaattttcacaagaggaatttcttacagcttggtcaactcaggtgcgtcctgcaacaactctgttggctgatgggtgtccatatttgtatgctatggtgcatgatagttcagtgtctacaataccaggtgattttgtcattggtgttaagttgacaaccataaacaata

SEQ ID NO: 136533 - DNA, 242 bp, Glycine max
gcggtttcctttgttggtgttgctgggaactgttttcctggcatcagtttgtgtctcattaaaggtgagagaggatgagaataaccctttctacttgagaagctctaacagcttccaaactctctttgagaaccaaaacggtcgcattcgtctcctccagagattcaacaaaggctccccacaacttgagaagcttcgagactaccggattgtccagtttcagtcaaaacccaacacaatct

SEQ ID NO: 136534 - DNA, 240 bp, Glycine max
gtgagaaacaaagaaaggaaataattgatctttgaaaatgcagggaggaaagaaagctggagagtccatcaaggaaacagctgcaaacattggtgcttctgccaaggctggcatggagaaaaccaaggccactgtccaggagaaggcagaaagaatgacggcacgtgatccgatgcaaaaggagttggcaacccagaagacagaggcaaagatgagccaggcagagctggacaagcaggc

SEQ ID NO: 136535 - DNA, 237 bp, Glycine max
aagagttgaaggaaatggctgaagcacaactacgagaccagcatggcaaccctgtcccactcaccgatcaatacggtaatccggttatcttaactgacgagcgcggtaatcccgtccaactcactggtgtcgctaccaccgctaccggcacagcaggttctgggtttgggtcctatggtaccggtgcttacggtggtggtgcaagtgcaaacccgttgcagatcttttggcaaccca

SEQ ID NO: 136536 - DNA, 236 bp, Glycine max
caagaatcaaagaaaggggtggtggctgcttcgaaagcttaataatttgtttatttccagaacatcatagttttcgcagcagcaaactaacaaattactcatatcatataataagatggcccgttctctctcgcaagccaaacgtattggtgtccttgttgctcaatctatctccctaattcccgttcatcggcgaggttacgcagtggcatccgatgtatcggtaagagttggat

SEQ ID NO: 136537 - DNA, 234 bp, Glycine max
tgattattgtcttattattgatcttattattcttttattccactatttttgattttattggttacattgttgctattagggagattggaatggagctggagctcactcaaactacagcaccaagtccatgagagatgagggtggttatgaggtgattaagaaggccattgaaaagcttggattgaggcacaaggagcacattgcagcatatggagaaggcaacgagagacgtct

SEQ ID NO: 136538 - DNA, 232 bp, Glycine max
gatcttgtcaaacgaactggatctattgtggatgttcctgcgggaaaggctatgctagggcgtgtggtcgacgcgttgggagtacctattgatggaagaggggctctaagcgatcacgagcgaagacgtgtcgaagtgaaagcccctgggattattgaacgtaaatctgtgcacgagcctatgcaaacagggttaaaagcagtagatagcctggttcctataggccgtggtc

SEQ ID NO: 136539 - DNA, 227 bp, Glycine max
atttcattgtgatatcatttgtgtcactggatggactgccaccccaatgcaggatgttcaggttacaattgattggtttatttcctctcaggaatgtgttcccagaacctattgtgttttaaatccacaaaatccttttgtgttgaataggtggatggggaaactgactttcccccagggcacttcccgaagtgttaaaagaatgcctctttctatagggggaggag

SEQ ID NO: 136540 - DNA, 233 bp, Glycine max
cacaaacccgtccctcacactctccaaaccctagcggcactacacactagttctatcgctatctccccaagatgtcgagcgccgctcccgagcacagagaagaggaggaggcacccgccgttggcgacgacgaggacaccggagctcacgtcgctccaatcgtcaagctcgaggaggttgctgtcaccaccggcgaggaggacgaagatgcaatcctggatctcaaatcgaag

SEQ ID NO: 136541 - DNA, 232 bp, Glycine max
gtcatagggtactgttgtggttagggattcgaattttgattatcgaatcgcaaaattctgaatcaatcaatcagtaattagagccattaacgactgcaatggtctgcgagaagtgtgagaagaaattatcgcaggtgatagtaccagacaaatggaaagaaggggccagcaatactaccgagggtggtggccgcaagatcaacgagaacaagcttctctccaagaaaaacag

SEQ ID NO: 136542 - DNA, 243 bp, Glycine max
ccatcacacctctcctcgttcacgctacccctttctgctcttcttctacctttcaagttttaaaagtataaagatggcagagacattcctatttacctcagagtcggtgaacgagggacaccctgacaagctctgcgaccaaatctccgatgctgtcctcgacgcttgcctcgagcaggacccagacagcaaaggtgcctgcgaaacatgcaccaaaaccaacttggtcatggtcttcggaga

SEQ ID NO: 136543 - DNA, 235 bp, Glycine max
cttcttctctggttgattcggatctagagtcttcagtttctccacgttgttcttcgctttcctgttttcaatttcgattctttcgttaatttaataagatgtttgggagggcaccgaagaagagcgataatacgaggtactacgaaatcctcggcgtctccaagaacgcttcgcaggatgatctgaagaaggcttacaagaaagccgccattaagaatcaccccgacaagggcgg

SEQ ID NO: 136544 - DNA, 228 bp, Glycine max
ggaattttgggctagatgggctcatagggctctctggcatgcttcgctgtggcacatgcatgagtcccaccatcgaccaagagaaggacccttcgagcttaacgatgtatttgcaataatcaacgctgtccctgccatcgctctcctttcctatggtttctttaacaagggactggtccctggcctttgctttggtgcgggtcttggaattacggtctttgggatggc

SEQ ID NO: 136545 - DNA, 231 bp, Glycine max
caagtccaacctacccctttttcttctcccaccaacttcaccgtcgtcttcctcgatcatgtctcacttcaagggcaagtaccatgatgagcttattgccaatgctgcttacattggcactcctggaaagggtattcttgctgctgatgagtcaacagggacaattggcaagcgtttggccagcatcagtgtagagaatgttgaatccaacaggcgtgctcttagggagct

SEQ ID NO: 136546 - DNA, 161 bp, Glycine max
tccaaggactatgccggtgacactgctcagaaaaccaaggactatgccggtgacactgcacagacatcaaaggactatgccggtgatgctgctcagaaatcaaagggctatgtcggtgatgctgcacaaaagaccaaagaatatgttggtgatgctgctca

SEQ ID NO: 136547 - DNA, 249 bp, Glycine max
gaagacgttcttgcaatccacgccacacaagggtcgacccaacaacttggcccattggtcacagtcccacaattcctcttttcttgtgcaccttccttccttgttcaaaagggtcttcctagaaacactcaaggtgtggctgggttaggccatgcaccaatttctcttccaaaccaactcgcttcccactttggcctacaacgccaattcaccacttgcctttctcgctaccctacttcaaagggtgct

SEQ ID NO: 136548 - DNA, 247 bp, Glycine max
caagtacttccttacaatcaaaaccaacaacaactatggcaagttatcaaaagcactacgatgatcagggtcgcaaggttgacgagtatggcaacgttgagaagcaaaccgacgaatacggcaaccctgttcatgctgctagtgtcacctatgtagccaccagaactgctgctggtggttacagtgatgacattaataagcaacatgataccaccaatgcctacggcgtagacactggtagacagca

SEQ ID NO: 136549 - DNA, 248 bp, Glycine max
cgcaaagattcgctccaacattttaagaagccctgggctcatgagcatgaacctgttaaaaatcttctagatgctgttaataaaattaagccaacagtgttgattggaacatcgggacaaggaagaacttttactaaagaagtgattgaggcaatggcttctattaacaagagacctattattctttctctttccaaccctacgtcacagtcagaatgcactgctgaagaagcttacaagtggagcca

SEQ ID NO: 136550 - DNA, 246 bp, Glycine max
gcaacatgtcccccttttgttaggattaaggaagatgataaattgattcaagcagaaggtgtggattctctttcagaagatgaacttcgggaagattgtagagagcgaggcatgcttgggttgctttctgttgaagaaatgcgccaacagcttcgagattggctggacttatctctgaatcactctgttccatcatctcttttgatactttcaaggtcatttactgtgtctgggagattgaaacca

SEQ ID NO: 136551 - DNA, 246 bp, Glycine max
cttgtaacaacaactatggctagcgatggcagcgaagagttcaggctagtgtcaccggcgttcaaaaacggggggaagttaccgaggcactacaccgacgatggtcagggtacgaagaagaacatatcccctccattggagtggtataacctcccggaggggacgaagactcttgccctcgtggtggaggatattgatgcgaccgattctggtgggcccatggtgccatggactcactgggtcgtc

SEQ ID NO: 136552 - DNA, 244 bp, Glycine max
cacgaatatcttgttgtttggagcgatccgagaaaaactctgtaaacatgttggtttaccaggacctccttacaggtgatgagcttctctctgactccttccgttacaaggaaattgagaatggaatgctgtgggaagttgaggggaagtgggttgttaaaggagcagttgatgtagacattggtgcaaacccttctgctgagggtggaggagaagatgagggagttgatgatgcagctgttaa

SEQ ID NO: 136553 - DNA, 242 bp, Glycine max
aaagaacttccttataaccaaaaccaacaacaactatggcaagttatcagaagcactacgatgatcagggtcgcaaggtcgacgagtatggcaatgttgagaggcaaactgacgaatatggcaacccggttcatgccactagtgtcacttatgtagccaccaaaagtgttggtggctacaatgatgacgctaataagcaacatgatattactggtgtctatcccgagaaagacaccggtaga

SEQ ID NO: 136554 - DNA, 245 bp, Glycine max
caaaatgttcttccattattgcaatctgcttttgatttaaatttcacaccccgtgagatatatagacttgatgaagttcatggactctattcaggcggaattaagctgccaacagatataatcagcaagattagtccactacccgtgcttaacgaaatcttccgaactgatggtgaacaggcccttaagtttcctcctcctaaagtaattcaagtgagtaagtctgcatggatgactgatgaaga

SEQ ID NO: 136555 - DNA, 253 bp, Glycine max
cctaagtgagatacaaagaaaggaaataattgatctttgaaaatgcagggaggaaagaaagctggagagtccatcaaggaaacagctgcaaacattggtgcttctgccaaggctggcatggagaaaaccaaggccactgtccaggagaaggcagaaagaatgacggcacgtgatccgatgcaaaaggagttggcaacccagaagaaagaggcaaagatgagccaggcagagctggacaagcaggcggcgcgtc

SEQ ID NO: 136556 - DNA, 248 bp, Glycine max
tatgggccagttgaagttgcattcactgtttatgaggattttgctcactacaaatcaggagtttacaaacacatcacaggttatgaactaggtggtcatgcagtaaagctaattggatggggaacaactgaagatggggaggattattggcttcttgcaaatcagtggaacagagaatggggagatgatggttacttcaagatccgaagcgggacaaacgaatgtgggattgaagaggatgtaactgc

SEQ ID NO: 136557 - DNA, 246 bp, Glycine max
tgggtttggacagggtatgggtgctactccaccactgttgcatcctcagtccatgatgaatcagggttttgatcctgcatttggccccatgggtagaatgggtagttacggaggctttcccggtgctccgacaccatcattctctgggattttgccttcattccctggtgttggaggtgttggtttgcctggagtggcacctcatgttaatccagccttttttggaagagggatgcctgttaatgg

SEQ ID NO: 136558 - DNA, 243 bp, Glycine max
gacattgccttggcaattggagaaaactttgagaaatacctgttatatgcaatgcctatgcttcagagtgccgcagagctctctgctcatacatctggtgctgatgacgatatgacagaatacactaattctttgagaaatggaattctagaggcatactcagggatcttccaagggtttaaaggttccccaaagacccagcttctgatgccatatgctcctcatgtgctgcaattcttggat

SEQ ID NO: 136559 - DNA, 242 bp, Glycine max
ctcgaatttcctcgaatcgcttaatttgtatttgattagttaaaccgcaacgcgcaatctcttttctcgaactggctaactctcaggcaagtggttcggacgctgattccagcaacaagcggctggtgctcgcactgtatgacgccctaaactccggcgactccgacgccgtcgtcaagatcgtcgccgccgacctcgagtggtggttccatggtccgccctcacaccagtttttgatgcgc

SEQ ID NO: 136560 - DNA, 242 bp, Glycine max
agatcatacatagtagtgttggtgggttgcaaagatgcttgggggtcttctccataggggtcataagataaaagggacagtggtgttgatgcgcaagaatgtgttggacgtgaatagcgtaaccagcgttgggggaattattggtcaaggtctcgacttagttggctcaacactcgatactcttactgccttcttgggccgatccgtgtctctccagcttattagtgctaccaaagctgatg

SEQ ID NO: 136561 - DNA, 247 bp, Glycine max
gctgaagaaaacctaagcttagaattagaaacaaagaaaagaagaaaggaaagaattgatcgttgaaaatgcagggaggaaagaaagcgggagagtccattaaggaaacagctacaaacattggtgcttctgccaaggctggcatggagaagaccaaggccactgtccaagagaaggcagaaagaatgacagcacgtgatccggtgcaaaaggagttggcaacccaaaagaaagaggcaaagatgaa

SEQ ID NO: 136562 - DNA, 246 bp, Glycine max
ttctggttcttaagttgtgcgtcgtaaaagccacaccaattcccccatagaaatcagaaaacccaccgaacccttaccagcggatcgccgtgctgagtgtgaagcgaaggcatcatggggctgacgaatttcgtgctgacggtggcgggtgtaagcgccgtcgttcttctccttaggagtgacgtcagacaatctgcctccgtcttccggcgtaacgtcaagcacattcgcaactggctcgaagaa

SEQ ID NO: 136563 - DNA, 247 bp, Glycine max
ctagctagcaagcaagcacagagatggaggcaaagcgaggccatgccctcatgtgcttggcacgtgtttcactcttcctctgcgctctaaccctatccgctgctcacggaagcaccacggttcaagacatcgcgagatagttgaaactcggggacaacgagcttctgcgcacggagaagaagttcaaggttttcatggagaattacgggaggagctactccacagaggaggagtatttgcgccgttt

SEQ ID NO: 136564 - DNA, 245 bp, Glycine max
agataacctaagcttagaattagaaacaaagaaaagaagaaaggaaagaattgatcgttgaaaatgcagggaggaaagaaagcgggagagtccattaaggaaacagctacaaacattggtgcttctgccaaggctggcatggagaagaccaaggccactgtccaagagaaggcagaaagaatgacagcacgtgatccggtgcaaaaggagttggcaacccaaaagaaagaggcaaagatgaacca

SEQ ID NO: 136565 - DNA, 243 bp, Glycine max
ggcagtgttcttcatagttcagtgtgtcgtttaaaaatgtcgcagttgctggataaagccaagaacttcgtgtcggagaaggtaaatgatatggccaagccggaggcgagtgtcactgacgtggacttcaagcgcgtgagcaaagataatgtcgagtacttggccaaggtctctgttcgtaacccttattcaacttccatacccatttgtgagatcaactactctttcaaaagcgcatccagg

SEQ ID NO: 136566 - DNA, 243 bp, Glycine max
cgaacaactcaaccgagaaaaagaccgtgatttcagttttggtgttgcagaccaacaccaacaagaagaacatcagttagatcaacaaaagcgtggtgtaatcggatccatgttcaaggcggtgcaagacacctacgagaacgccaaggaagctgtcgttggcaagaaagaaccttcgacgacgactaactcgtacagtaccagagaggttattcacgacgttgacattcaacccgatgacgc

SEQ ID NO: 136567 - DNA, 244 bp, Glycine max
gaagaagaaccgcaaaacgccgaaagcgaacaagaggtagaggaagaggaagaggaagaagatgaacaacaagaggagcaggaaccagaaactcgagaagggcaaccgggaccagaaaccctagaagctgcaaaccaagccgaagcgaacggtagcaatgaaggaaacaacgaagaagaggaagaggaggatctcacactagaagaagagcccgtggagaagcttctggaaccgttcacgaagg

SEQ ID NO: 136568 - DNA, 241 bp, Glycine max
tcacaacttcattatgtttcgtgtaataatctggaaatgcaagaagcttatcttgtcaatctcgtaaatgtgttacgagaattgtatttgcacagtccagaggaagctcgccaattgagaaggaaagctctctctcgtattgaatggctgcaaaaagctgatgtgcctaccatagcacagattgaagagtttcattcgatgcagaggatgatgaatgctcctgattcaaatgataatattg

SEQ ID NO: 136569 - DNA, 239 bp, Glycine max
gtttggaaggatgaatgaggctagccacccagactccatcagagctgccttggctgaattcctctccacttgcatctttgtctttgctggagaaggctctgcccttgctttgcgacaaatttacaaggaaccagggtcatcagcgggtgagctagtggtaattgcactagctcatgcatttgctctatttgctgctatttctgctagcatgcatgtgtctggtggacacgtcaaccctg

SEQ ID NO: 136570 - DNA, 239 bp, Glycine max
ctcgagccgggaatataagaactaagatggattggatcggagcgtaccgcggaggccagagaagcagggactggtgcgacccttcatcaccattcactgatttgtgggaccctacgtcgtgtcggtgacgctgatgatatcacctcctctctcgcccatgctcacgttgactggcgtgagactgataaagctcatatcttccgtgctgatcttccaggggtgaagaaagaggatctgaa

SEQ ID NO: 136571 - DNA, 242 bp, Glycine max
accgcagtacagggaaggaattgacaacctgttagtgctcttgattggaggaattcccattgccatgccaactgtgttgtctgtcactatggctattggttcccacaggctttctcagcagggtgccatcacaaaaagaatgacagctattgaggaaatggcagggatggatgtcctatgcagtgacaaaactgggactctcaccttaaataagttgagtgttgacaggaacttgattgagg

SEQ ID NO: 136572 - DNA, 243 bp, Glycine max
ggcctatgaccttttcacctcagaagggtaccccacagtgacacagccacctgctccttggaacaaccctagaggccaattcagtgcagaacaaggggtcacggaatggaacaaaactttaggggtgcccttaaacaaactgaatctgggtttgcccttttatggttacaagtggagtttgtcagattctaataaaaatggactctttgcaccggccaagcagggacttggggcagtgaagta

SEQ ID NO: 136573 - DNA, 241 bp, Glycine max
tattcgttcttcttctttcaccaacaacaaagaaaacagagaaactttcatttcatatattttcatcatcgcagcaaaggaatcaatcaatcaaaccatggcaggcttcagtggcgacgaaaccgctcctttcttcggcttcctcggtgccgctgcggccctcgtcttctcctgtatgggagcggcgtacggaacggcaaagagtggggtgggggtggcgtcgatgggcgtgatgaggccg

SEQ ID NO: 136574 - DNA, 241 bp, Glycine max
gtttttctctgttcatgcaagggctgccacagaaaaaaccatttatgattttactgtcaaggatattgacagaaaggatgtttctcttagcaagtttaaggggaaggttctattgattgtcaatgttgcttcacgatgtggtttgacatcatcaaattactcggagctgtcacgcttgtatgaaaaatataagaatcaaggtttggagattttagctttcccctgcaatcaatttggtatg

SEQ ID NO: 136575 - DNA, 238 bp, Glycine max
caaagaatcaaagaaaggggtggtggctgcttcgaaagcttaataatttgtttatttccagaacatcatagttttcgcagcagcaaactaacaaattactcatatcatataataagatggcccgttctctctcgcaagccaaacgtattggtgtccttgttgctcaatctatctccctaattcccgttcatcggcgaggttacgcagtggcatccgatgtatcggtaagagttggatt

SEQ ID NO: 136576 - DNA, 243 bp, Glycine max
gcacccaccattactcagcactgccattcttcaatcacactaatggctgtcaccttctcagatcttcacaccgaagagggcatcaaatccctcgatcaattcctttctgggaaaacctatatctctggggatcaattgacaaaggatgatatcaaagtgtatgcagctgttgtggaaaagccaggagactcttttcctaatgctgctaagtggtacgatgccgtctcttctcaacttgctcca

SEQ ID NO: 136577 - DNA, 247 bp, Glycine max
attagtaacttgttgagagttgctgcttggaagaaaggctgtttaatggttaaaattgtgatgtctgggaatgcagcagtcaaaaggagtgattgggcctcattggtacaagtgtttttaacaaacagcaacagtacagagcatttcgatgcatgtaagtggacaaaatcggaaccacattcctgggaattgatcttcccaatagaggtatgtggtcctaataatggttttgaaatgtggagttctg

SEQ ID NO: 136578 - DNA, 247 bp, Glycine max
ctgagtaccccccacttggtcgctttgctgtcagggatatgcgtcaaactgttgctgtgggagtcatcaagaacgtggagaagaaggatcctactggagccaaggtcaccaaggctgcccagaagaagaagtgaatcgtgcggtttggttcatcaggggatgtcgtttcttatggttacaataaatgttggtttcttgcccttgtgtcttcgtttctaggtagcttgtttttcggacatagtttgaa

SEQ ID NO: 136579 - DNA, 246 bp, Glycine max
attacaatctccccagtttctaatctcagctaagaaaaaccaaaagatgtctctgattccaggtttcttcggtgcccgaaggagcaacgtcttcgatccattctcactcgacatttgggatcccttcaaggattttcatgttcccacttcttctgtttctgctgaaaattctgcattcgtgagcactcgtgtggattggtaggaaaccccagaggcacacgtgttcaaggctgatattccagggct

SEQ ID NO: 136580 - DNA, 242 bp, Glycine max
aacactcaagttaacttcaacacctttaattttctgaacgaaattcagccacagaatatcaaagggagcgaagatgagtcaggagcagccaaggcgcccccaaggccaagaccccatcaaatacggcgacgtttttgacgtctacggtgaccttgcacagatgcccattgcaccggaagatgctgccatgatgcaaagcgcggaagctcgagtactcggaaaaacccaacccggcggagttc

SEQ ID NO: 136581 - DNA, 241 bp, Glycine max
gcaccaccaggagtggagcctgcggcttaatttgactcaacacggggaaacttaccaggtccagacatagtaaggattgacagactgagagctctttcttgattctatgggtggtggtgcatggccgttcttagttggtggagcgatttgtctggttaattccgttaacgatcgagacctcagcctgctaaatagctatgtggaggtaaccctccacggccagcttcttagagggactatg

SEQ ID NO: 136582 - DNA, 240 bp, Glycine max
gcaccaccaggagtggtgcctgcggcttaatttgactcaacacggggaaacttaccaggtccagacatagtaaggattgacagactgagagctctttcttgattctatgggtggtggtgcatggccgttcttagttggtggagcgatttgtctggttaattccgttaacgatcgagacctcagcctgctaaatagctatgtggaggtaaccctaccacggccagcttcttagagggacta

SEQ ID NO: 136583 - DNA, 239 bp, Glycine max
actactacaagtacttccttacaatcaaaaccaacaacaactatggcaagttatcaaaagcactacgatgatcagggtcgcaaggttgacgagtatggcaacgttgagaagcaaaccgacgaatacggcaaccctgttcatgctgctagtgtcacctatgtagccaccagaactgctgctggtggttacagtgatgacattaataagcaacatgataccaccaatgcctacggcgtaga

SEQ ID NO: 136584 - DNA, 239 bp, Glycine max
atcacacacaactactacaagtacttccttacaatcaaaaccaacaacaactatggcaagttatcaaaagcactacgatgatcagggtcgcaaggttgacgagtatggcaacgttgagaagcaaaccgacgaatacggcaaccctgttcatgctgctagtgtcacctatgtagccaccagaactgctgctggtggttacagtgatgacattaataagcaacatgataccaccaatgcct

SEQ ID NO: 136585 - DNA, 238 bp, Glycine max
gtcgccctaagtcatggcaggacttgcacccgagggatcacagtttgatgctcgtcaatatgataccaagatgaatgagttgcttacatctgatggacaggattttttcacatcttatgatgcggtttatgacagttttgatgctatgggcttgcaggagaatctcctgagaggcatttatgcatatggttttgagaagccatcagctattcagcagagaggaatagttcctttctgc

SEQ ID NO: 136586 - DNA, 238 bp, Glycine max
cgcagtcgcagtgagtgaaaaggaaaaccctaattgcggtattctcagtgccttcgagagaaagaaaaaatggcagataatcttgttctccgtggcaccatgcgcgcccacaccgacgttgtgacggcgattgccactcccatcgacaactccgacatgatcgtcaccgcctcacgcgacaagtccatcatcctctggcatcttaccaaggaggacaagacttacggtgtcccccgcc

SEQ ID NO: 136587 - DNA, 240 bp, Glycine max
tacaagtacttccttacaatcaaaaccaacaacaactatggcaagttatcaaaagcactacgatgatcagggtcgcaaggttgacgagtatggcaacgttgagaagcaaaccgacgaatacggcaaccctgttcatgctgctagtgtcacctatgtagccaccagaactgctgctggtggttacagtgatgacattaataagcaacatgataccaccaatgcctacggcgtagacactgg

SEQ ID NO: 136588 - DNA, 244 bp, Glycine max
acaggttagagctatgactgaaatgcaaggggttctttgttcaacaaggcccatgcgaattggaccagcctctaataaaaaccctagcactcagtctcagccaaaagcatcatatcagaatcctcaaggggcacagaacgagcatgatccaaataatacaactatttttgtcggcaatttggatcctaacgtcacggatgaccatttgagacaagtttttgggcattatggagagttagttcat

SEQ ID NO: 136589 - DNA, 233 bp, Glycine max
ttaaaatgatccatgtcaagatggcaagggcatcattagggaaaacatttattgtttgctgggagatccactattagctccagtgtgtttgtgctggtttgatgaacactttggctcattttgtaatttgattgcctgcttggtctgcattttttttccaaaaaaaaaaaaaaaaaaaaaaaaaaaaaataaaaaaaaaaaaaataaaaaaaaaaaaaaaaacaagtaaagaa

SEQ ID NO: 136590 - DNA, 242 bp, Glycine max
  unsure (1)..(242): unsure at all n locations
gccaaatgtgccggctcttcatttaccaggaagcaatcttcaatctagtacgattgaggtcttccctaagtgctcgngacattccaccagaagacntgaanatgatgtctgancttgatggncagcagcagcaccatctgaatgacttganctgttacntacagcctcgccccggtgccagttcagtgagtagatcaggtcggtccaagaccctnactcnatcaaatctggnananntnttt

SEQ ID NO: 136591 - DNA, 240 bp, Glycine max
cacccaacggacgaggaactgattgtgtattacctttgtaaccaagccacctcaaagccatgccctgcatctatcatcccagaagtggatctctataagtttgatccttgggaattgccagataaaacagaatttggagaaaatgaatggtatttctttagtccaagagacaggaagtacccaaatggggtgaggcctaaccgagcaactgtgtctgggtattggaaggctactggcaca

SEQ ID NO: 136592 - DNA, 235 bp, Glycine max
gagaaacaaagaaaggaaataattgatctttgaaaatgcagggaggaaagaaagctggagagtccatcaaggaaacagctgcaaacattggtgcttctgccaaggctggcatggagaaaaccaaggccactgtccaggagaaggcagaaagaatgacggcacgtgatccgatgcaaaaggagttggcaacccagaagaaagaggcaaagatgagccaggcagagctggacaagca

SEQ ID NO: 136593 - DNA, 238 bp, Glycine max
aaaagtttccttgacaatctaattctgcaaaaatggcaagcaataaggagtctaagttcccagcacagagccagaaaactcagccaggaaaagaacatgtaatgaatccactcccacaagccacaaatcctgatcacaaggccgccaataaactccagggaaaggtggcgttggtgacaggaggtgactcaggaattggcagagcggtttgcctgtgtttcgcaaaagagggtgcaac

SEQ ID NO: 136594 - DNA, 234 bp, Glycine max
ctcgagccgcaaaaagtttacgttacaaatcgcataataaccgtcctaagtttattgagagaattttgcaagtgtgagaaacatggcatctcgtcaaaacaacaagcaagagcttgatgaaagagcaaggcaaggagagactgttgtcccgggtggaactggtggcaagagcctggaggctcagcaacaccttgctgaaggaaggagcaagggagggcaaacaaggaaggaaca

SEQ ID NO: 136595 - DNA, 232 bp, Glycine max
gtgattgttgtgactcgttcttcttcgtcgttatcttcttctgttgatgtttgtgtgaatgtctcttctctcagctgacaatgtcttgctgcggtggtaactgttgttgcggtagcgcctgcacgtgctgcaacggctgcggaggcttccatatgtactcagacttgagctataccgtgtcaaccaccaccgagtacttggtcatgggagtggcaccagttaaggctcaatt

SEQ ID NO: 136596 - DNA, 233 bp, Glycine max
tgatgatctactggctcctgttttgaaggctgtaattgagaaaaccaatgtgaacccaagtgaagttggggatattgttgtaggtagtgtattggctcctggagctcaaagagctagtgaatgccgaatggctgcattttatgctggttttcccgaaactgtgcctgttaggaccgttaataggcaatgttcatctgggctccaggctgtcgctgatgtagctgctgctataa

SEQ ID NO: 136597 - DNA, 236 bp, Glycine max
catggcttcctccaccgctttcttcacacccctccatgatttcactcaagccagaacaaccccatcaccccctttgcctttcatcaaatcctcctttgcttcctccaagtcaaccttttttcaccctgccctttccctacaaacctcttccaactttcccaggctttttggaaagcctaagtttttctctgttcatgcaagggctgccacagaaaaaaccatttatgattttactg

SEQ ID NO: 136598 - DNA, 247 bp, Glycine max
tcttcctcggtttctgattctgcactctgaagccaatcaatgaaaggttgaggaagaataatttttcctacattctccgttacttatgtttacttgattgtgtcatgttctttatttccataaaggttattgtaggccccatgtgttgttgaactactatactgtgcgaatggtgcatgcttgctggaccagtatgtatgcctcagtgcgttttgtgatgtgcggttctaatgtaattttgtttttg

SEQ ID NO: 136599 - DNA, 243 bp, Glycine max
gtgcagaagagcgtcgcagttgtaaccctaatcagaagaagcgcacttcaagcgagtgacagccaccagccatgggtcgtatgcacagccgcggtaagggtatatcctcttctgcttgccctacaaaaggacacctcctagctggctcaagatctcttcgcaagatgtcgaagaaaatatctgcaagtttgcgaagaaaggtttgaccccgtctcagattggtgtcattctcagagattctca

SEQ ID NO: 136600 - DNA, 241 bp, Glycine max
gtgaaggtgctgaatcgaatcgaatctccgaagatggccgcgagcgatcgtacagtgttgcaattctcttcatcatcttcttcttcgcagagcttgtccgcgaaggtccaccctctggtcatcttcaacatctgcgattgctacgttcgacgccctgaccaagccgatcgcgtcatcggaaccctactcggctccgtccttcccgatggaaccgtcgatatccgcaattcctatgctgttc

SEQ ID NO: 136601 - DNA, 238 bp, Glycine max
cacaaaattgaactgtaattgtagtagtagacagtagcaccatgagccaggaccagctcaagaaacctcaaggggagcaggaccccatcaaatacggcgacgttttcaaagtctcgacgaactcgctttcaaacccatcgcgccaagagacgcagctctcatgcaagccacggagaaccaagcattgggccaaactcaaaaaggaggtcccgcctcggtgatgcaatccgccgcaacc

SEQ ID NO: 136602 - DNA, 225 bp, Glycine max
tggatccctacaagcaccggccatccagcgccttcaattctcccttctggactacaaattctggtgctcctatttggaacaacaactcctctttaaccgttgggctagaggtccaattctgctggaggattatcatcttgtggagaagcttgcaaattttgatagggaacgtatcccagaacgtgttgtccatgccaggggcgctagtgcaaagggtttctttga

SEQ ID NO: 136603 - DNA, 225 bp, Glycine max
gtcattgataactgaagctcctaatgcaccagttactgcacagagaagggtcagaaatgacttagaaaattctctaccaaaaccatacttgccaagagcattgaagctcctgatacgggtcacccaaatggaacagcaggccacaggcaccacaacttatctgttcttcagcagcattgtgctttttttgatcaagatgacaatggaatcatttacccttgggaa

SEQ ID NO: 136604 - DNA, 128 bp, Glycine max
caaaaaaaactgaattgtgtgaatcgaaaactaaacattgctattgtaaaagttgcaaatgcttataaacaccctaatattattgcagaatttatagctggacattaaagaatagagtttcgtttcgt

SEQ ID NO: 136605 - DNA, 239 bp, Glycine max
gagaattttgcaagtgtgagaaacatggcatctcgtcaaaacaacaagcaagagcttgatgaaagagcaaggcaaggagagactgttgtcccgggtggaactggtggcaagagctggaggctcagcaacaccttgctgaaggaaggagcaagggagggcaaacaaggaaggaacagctgggtacagaagggtaccaggaaatgggacgcaaaggagggttgagcactgtggacaaatca

SEQ ID NO: 136606 - DNA, 240 bp, Glycine max
cggattctccctgccactacaaattcccaacttcgcaaaccctaggcagcagcagcagcagcaacaacaacagcaacgaagaattcgaagagaaatcaaatcgaatctcatttgactgtgtgtggttgcggcggcggcaatggcggagcacttggcatcgatattcgggacggagaaggacagggtgaactgcccgttctacttcaagatcggcgcgtgcaggcacggcgaccggtgctc

SEQ ID NO: 136607 - DNA, 238 bp, Glycine max
cacacaactactacaagtacttccttacaatcaaaaccaacaacaactatggcaagttatcaaaagcactacgatgatcagggtcgcaaggttgacgagtatggcaacgttgagaagcaaaccgacgaatacggcaaccctgttcatgctgctagtgtcacctatgtagccaccagaactgctgctggtggttacagtgatgacattaataagcaacatgataccaccaatgcctacg

SEQ ID NO: 136608 - DNA, 237 bp, Glycine max
  unsure (1)..(237): unsure at all n locations
aaaccctccattccatggctccgccgctcgaacacaacggcgtttccacgagcggtgactctnagagatccattcccacgccgtttctcaccaaaacctaccagctcgtcgacgtcacaccatcgacgatgtcatttcgtggaacgattctggatcgtccttcatcgtctggaacaccaccgctttcgccaaggatttgcttcctaaatatttcaagcacaacaacttctccagttc

SEQ ID NO: 136609 - DNA, 228 bp, Glycine max
ctagcgatactgataagagagataccaacaagaaaagaaaaaaagaagagttgagattccctttgaagaaaagatggcatcccataggcaaagctatgaagctggcaaactaagggccgaactgaggaaaagacgaaccagacgatgggcaatattggagagaaggctcaagctgcaaaggagaagacccaggaaatggcccaagctgcaaaggagaagacccaacaa

SEQ ID NO: 136610 - DNA, 226 bp, Glycine max
agctattatactctctagagtaattgcggaatctgctagaattttctaataatggcgaaagacgttgagcaggtcacagagcaaggtgaatactccgcgaaggacaccatgaccctcctccggcaccgttgatcgacccagatgagctcacaaagtggtccttgtacagagccgccatagctgagttcatagcaacactcctttttctttacatcaccgtgttgac

SEQ ID NO: 136611 - DNA, 238 bp, Glycine max
gagagaataaggtgaggtccggtggggtgggtgaaaccgcacaagaagcagctactttcaacagtcacgtcatgcgagtccaagacatgacgaaactttccgatatcttaacggatgcggcggagaagctccccgtggacaaggcggtgacaaaagaagatgctgaggctgtgtatactgcagaggtgcagtttccatggcagagagatgcggcggaagtggttgctgaacctggcgg

SEQ ID NO: 136612 - DNA, 240 bp, Glycine max
gtggtgtcatcatgtgagaagaagaagaaaagcgtggtgggtgcagaaaagaagaagagtgatagtgggcgagctcgtaaaaacgtgtacagaggaatcaggcaaaggccatggggcaagtgggccgcggagataagggacccacacaagggtgttcgtgtctggctcggcaccttccccaccgccgaagaagccgcccaagcctacgacgacgccgccatacgcatccgcggcgacaag

SEQ ID NO: 136613 - DNA, 236 bp, Glycine max
ccagaaggtatcattaaacacattctgggaaaacttgagtgtcgttgtaaatgcactggacaatgttaatgcaagactatatgttgatcagagatgcttgtatttccaaaagctcttcttgagtctggaactctgggagccaaatgcaatacgcagatggtaattccccacctgacagaaaactatggtgcatcaagagatccacctgagaagcaggcaccaatgtgtactgtaca

SEQ ID NO: 136614 - DNA, 231 bp, Glycine max
ctgtgaataagatgggagagtataaagattatacggcggagaaggctaaagaggggaaagatacgacgttggggaagcttggggagctgaaggactctgcggctgatgcgcgaagagggcagtgggttacttgagcggcaagacagaggaaaccaaagagaaagtctcggagacggcagaggcgacggctaataaggcggcggagatgaaggaggccaccagggagaaggc

SEQ ID NO: 136615 - DNA, 234 bp, Glycine max
gtcctattgtgactgaagctgacatacagcatattgtctcatcctggactggtattcctgttgagaaagtctcaacagatgaatctgatcgcctcctgaagatggaagagctttacataagcgagtgattggtcaggatgaagcagttaaagccattagtcgggctatccgtcgagctcgggttggacgaaaaaatcctaatcgtcccattgccagcttcatcttttctggtcc

SEQ ID NO: 136616 - DNA, 234 bp, Glycine max
gtgagaaacaaagaaaggaaataattgatctttgaaaatgcagggaggaaagaaagctggagagtccatcaaggaaacagctgcaaacattggtgcttctgccaaggctggatggagaaaaccaaggccactgtccaggagaaggcagaaagaatgacggcacgtgatccgatgcaaaaggagttggcaacccagaagaaagaggcaaagatgagccaggcagagctggacaag

SEQ ID NO: 136617 - DNA, 239 bp, Glycine max
cttttgttcccgattttctcaaattgctttcggttttcgttctgattctgcaaaatcatggagatggagcgcatcgttgaattccctcacacctacatggatcgacccccaagaaagagagcgcgtttgggctgggacatcgctgaggcccccaaggctcaggtaggattgttttgtggacaagaggttgagaatatttcaagctatgctccttcagaacatccccctagttctctgtt

SEQ ID NO: 136618 - DNA, 238 bp, Glycine max
cacacaactactacaagtacttccttacaatcaaaaccaacaacaactatggcaagttatcaaaagcactacgatgatcagggtcgcaaggttgacgagtatggcaacgttgagagcaaaccgacgaatacggcaaccctgttcatgctgctagtgtcacctatgtagccaccagaactgctgctggtggttacagtgatgacattaataagcaacatgataccaccaatgcctacgg

SEQ ID NO: 136619 - DNA, 239 bp, Glycine max
ctcgcgttttccaattccccccaaatctcacgcttagggtttctatcgcaaaccctccctacctccaaccaggtcgcgtgcaaagggatttcgaagcttcggaagaaaaaaatgaacctgttttctgtggaaacctggatttcgacgcgcgtcaatctgacgtggagaggctcttcagaagatacggcaaagttgatagagttgacatgaaatccgggtttgcttttgtctacatggaa

SEQ ID NO: 136620 - DNA, 241 bp, Glycine max
gcaaaggattctacccgccgctcgatgggaattgcgcttcaaggcgtctcgtagggctaatccgcctcacgagggtcaccaacggcacgtgcctttggggggccgaggccccctctgctggtcggcaaacggacggcgggcgcacgcgtcgcttctagcccggattctgacttagaggcgttcagtcataatccaacgcacggtagcttcgcgccactggcttttcaacacagcgcgatga

SEQ ID NO: 136621 - DNA, 242 bp, Glycine max
cacacaactactacaagtacttccttacaatcaaaaccaacaacaactatggcaagttatcaaaagcactacgatgatcagggtcgcaaggttgacgagtatggcaacgttgagaagcaaaccgacgaatacggcaaccctgttcatgctgctagtgtcacctatgtagccaccagaactgctgctggtggttacagtgatgacattaataagcaacatgataccaccaatgcctacgggta

SEQ ID NO: 136622 - DNA, 237 bp, Glycine max
gaagaagctctggcaccagctcactctcaagctcgagcagtttgtggctctcgccgtcttccaggctggtgatgctttaatacaattatatcacaatttcatcacagacttgagacgaaaatcaaccttctcaagcttgcacattttgctgttatagtttctcggcagtattctgaaaaagaagctgctgttggttatcttggaggggtcattcagaaacttcaagacactagggag

SEQ ID NO: 136623 - DNA, 235 bp, Glycine max
ctcctctctccgcatcgctgcgttttccgaatcgaaaggtacgtaagtaacaatggtggaggccaagggtaggaaagaggaggtcgtcactcgagagttcaccatcaaccccacaaacgcttgcatggctgcacattcaagaagaaggctcctaaagcaattaaggagataaggaagtttgctcagaaagcgatggggacgaatgatgtgagagtggatgtgaagctgaacaagg

SEQ ID NO: 136624 - DNA, 234 bp, Glycine max
tgcagaccgagctagctagctagcaagcaagcacagagatggaggcaaagcgaggccatgccctcatgtgcttggcacgtgtttcactcttcctctgcgctctaaccctatccgtgctcacggaagcaccacggttcaagacatcgcgagaaagttgaaactcggggacaacgagcttctgcgcacggagaagaagttcaaggttttcatggagaattacgggaggagctactc

SEQ ID NO: 136625 - DNA, 234 bp, Glycine max
gtcgctccgcaccagtttcaccgcacgaatatcttgttgtttggagcgatccgagaaaaactctgtaaacatgttggtttaccaggacctccttacaggtgatgagctctctctgactccttccgttacaaggaaattgagaatggaatgctgtgggaagttgaggggaagtgggttgttaaaggagcagttgatgtagacattggtgcaaacccttctgctgagggtggagga

SEQ ID NO: 136626 - DNA, 234 bp, Glycine max
gtgaatcgtactgattaccagctcattgatattgctgaggatggatttttgagtctgcttactgaaaatggtaacactaaggatgacctcaagcttcccactgatgagagtctgctcactcagataaaggatggatttgctgagggcaaggatcttgttgtgtctgtcatgtctgctatgggtgaggaacagatttgtgccctcaaggatattgggccaaagaactagcttttg

SEQ ID NO: 136627 - DNA, 232 bp, Glycine max
gtgaatcgtactgattaccagctcattgatattgctgaggatggatttttgagtctgcttactgaaaatggtaacactaaggatgacctcaagcttcccactgatgaagtctgctcactcagataaaggatggatttgctgagggcaaggatcttgttgtgtctgtcatgtctgctatgggtgaggaacagatttgtgccctcaaggatattgggccaaagaactagctttt

SEQ ID NO: 136628 - DNA, 232 bp, Glycine max
cagtagtcatatgcttgtctcaaagattaagccatgcatgtgtaagtatgaactaattcagactgtgaaactgcgaatggctcattaaatcagttatagtttgtttgatggtatctactactcggataaccgtagtaattctagagctaatacgtgcaacaaaccccgacttctggaagggatgcatttattagataaaaggtcaacacaggctctgcctgttgctttgatg

SEQ ID NO: 136629 - DNA, 224 bp, Glycine max
  unsure (1)..(224): unsure at all n locations
tacaattccttcacttgcagcactgttgcatcatcatcttcattgcaaaaccctaaacttcaccttcaaccatgaccacacaagtaccaccacacagtgtccaagtcacacaacataagacacatatnaagctggcgttgttcccccctgagcccgtttcgatccgccgcgttatgatgctggcgtcaaagcgccctccatttaccattccgagagaggtccaa

SEQ ID NO: 136630 - DNA, 234 bp, Glycine max
ggaagaccggccagccgcgtggtttcggcttcataacttacgctgatccctccgtggttgatacagtgattgaggacactcacattatcaatggcaagcaggtggagattagcggacgataccgaggggggctgctggctcgaactcaaaggacttccgaacgaagaagatttttgtgggtggaattccttcgactgttactgaagatgaatttagggacttctttacacgcta

SEQ ID NO: 136631 - DNA, 232 bp, Glycine max
gggcttcttgggcgttgtaattttaaagctgatatgcttgaccgaaaagtttcactattgagtggtggtgagaaggcacggctggccttttgcaaattcatggtaaagcatcaactatgcttgtgttggatgaaccaaccaatcacttggatataccttctaaagaaatgctcgaggaagcaataaatgaataccagggcactgttatcacagtatctcatgaccgatactt

SEQ ID NO: 136632 - DNA, 237 bp, Glycine max; identical to SEQ ID NO: 135644

SEQ ID NO: 136633 - DNA, 152 bp, Glycine max
gccatccagcgccttcaattctcccttctggactacaaattctggtgctcctatttggaacaacaactcctctttaaccgttggagctagaggtccaattctgctggaggattatcatcttgtggagaagcttgcaaattttgatagggaac

SEQ ID NO: 136634 - DNA, 150 bp, Glycine max
cttcttgggttgtaattgctctcttattggtttcagccattctaattattcgaaatctgcaaaccattcccgctttcggtcagaatttctttgaatatgttcttgattcattcgagacgtgagcaaaactcaaattggagaagaatatgg

SEQ ID NO: 136635 - DNA, 226 bp, Glycine max
atttgaggtccaaaaatgttggtgtagtattaatgtcgtgatagtttgatgatacaagatggaagttcagtaatagcaggaggaaccgttgctcatataggtgtagtgaggcttatttaggtcgtgttatagatgccctggctaaaccacttgatggtcgaggagttatttcagattcggaatctcgattaatcggatctcctgctcccggtattatttcgagacg

SEQ ID NO: 136636 - DNA, 230 bp, Glycine max
taaaattcttccaccaagttatgggtagacttgtgttgcttcttttctccctcttaggtctctcttctagtttcagcatatcaactcatcgttccatattggaccttgacctaaccaagtttaccacacagaaacaggtctcttcactgttccaactatggaagagtgagcatggacgtgtctaccataaccacgaagaagaggcaaagagacttgagattttcaagaat

SEQ ID NO: 136637 - DNA, 232 bp, Glycine max
gtacttccttacaatcaaaaccaacaacaactatggcaagttatcaaaagcactacgatgatcagggtcgcaaggttgacgagtatggcaacgttgagaagcaaaccgacgaatacggcaaccctgttcatgctgctagtgtcacctatgtagccaccagaactgctgctggtggttacagtgatgacattaataagcaacatgataccaccaatgcctacggcgtagacac

SEQ ID NO: 136638 - DNA, 249 bp, Glycine max
cacaactactacaagtacttccttacaatcaaaaccaacaacaactatggcaagttatcaaaagcactacgatgatcagggtcgcaaggttgacgagtatggcaacgttgagaagcaaaccgacgaatacggcaaccctgttcatgctgctagtgtcacctatgtagccaccagaactgctgctggtggttacagtgatgacattaataagcaacatgataccaccaatgcctacggcgtagacactgg

SEQ ID NO: 136639 - DNA, 247 bp, Glycine max
caattttgtaactttcaagactcagctaataaacatcaaaagatgtctctgattccaagtatttttggtggccgaagagcaacgtgttcgatcctttctcccttgacgtgtgggaccctttcaaggattttcattttcccacttctctttctgctgaaaattctgcatctgtgaacactcgtgtggattggaaagaaaccccagaagcacacgtgttcaaggctgatattccagggctgaagaagga

SEQ ID NO: 136640 - DNA, 243 bp, Glycine max
ctgatcctattgtgttggccttcgggatcggagtaatgattaacagggacagtcgggggcattcgtatttcatagtcagaggtgaaattcttggatttatgaaagacgaacaactgcgaaagcatttgccaaggatgttttcattaatcaagaacgaaagttgggggctcgaagacgatcagataccgtcctagtctcaaccataaacgatgccgaccagggatcagcggatgttgcttttag

SEQ ID NO: 136641 - DNA, 239 bp, Glycine max
cacaactacaagaaagaacttccttataaccaaaaccaacaacaactatggcaagttatcagaagcactacgatgatcagggtcgcaaggtcgacgagtatggcaatgttgagaggcaaactgacgaatatggcaacccggttcatgccactagtgtcacttatgtagccaccaaaagtgttggtggctacaatgatgacgctaataagcaacatgatattactggtgtctatcccgag

SEQ ID NO: 136642 - DNA, 261 bp, Glycine max
aagctcgccaattccactcgaggttttgagggagacaacatgattgagaggtccacaaaccttgactggtacaagggtccaactctgcttgatgcacttgaccagattagtgagcccaagaggccctctgacaagcccctcaggcttccccttcaggatgtgtacaagattggaggtattggaactgtgccagtgggacgtgttgagaccggtgtcttgaagcctggaatggtggtgacttttgcaccaactggactgaca

SEQ ID NO: 136643 - DNA, 238 bp, Glycine max
ctggaggatcgtggcggcgtggaaaacctgaagacacctgacgtccacactttcttgcagcacgttgttaccttcgggattgtcaagaacgatgactccgatttgtaccggaagcttgttattgcttccgcttggaggaaacagatgccgaagctcgcgctttcgcttggtctcgctcagcaaatgcctgatatgattgaagagttgatcagcaaagggcagcagcttgatgcggttc

SEQ ID NO: 136644 - DNA, 253 bp, Glycine max
tcggctcgaggtgatgcagcacagaagacaaaggattatgccactgacgcagcacagaagaccaaagattatgctactcagaagaccaaggactatgcaagtgatgcaactgatgctgcaaagaagactaaagattatgctgctcagaagactaaggagtatgcaagtgaagctagtgatgttgcacagaacacaaaagattatgctgctcagaagaccaaggactatgccagcggtggtgcgcagaagacca

SEQ ID NO: 136645 - DNA, 247 bp, Glycine max
attgcaaaaccctaaacttcaccttcaaccatgaccacacaagtaccaccacacagtgtccaagtccacacaacaacacacctctacgaagctggcgtcgtcccccccggagcccgtttcgaaccgccgcgttatgaagccggcgtcaaagcgccctccatttaccattccgagagaggtccaacgacttcccaggtcctcgccgtcctcgccggcctcccggtcggtggcatcctgctcctcctgg

SEQ ID NO: 136646 - DNA, 239 bp, Glycine max
gctgaagaaaacctaagcttagaattagaaacaaagaaaagaagaaaggaaagaattgatcgttgaaaatgcagggaggaaagaaagcgggagagtccattaaggaaacagctacaaacattggtgcttctgccaaggctggcatggagaagaccaaggccactgtccaagagaaggcagaaagaatgacagcacgtgatccggtgcaaaaggagttggcaacccaaaagaaagaggca

SEQ ID NO: 136647 - DNA, 233 bp, Glycine max
aaattttgtttctttgtgtgtgtatggtgatgataacttaattagtgttcatgaatatgtcaagcctactttagtggttctaaattgaaaagctttctagctggtcataatatcaccattactgatggtattgacaaaactagtgcaactttgcaatttagaaagttagcagattgtgattttctcaagagaaactttaagcagatgtctaatgttttgtgggtggctcctga

SEQ ID NO: 136648 - DNA, 234 bp, Glycine max
tctcgcttcgcttcgccaaagctaatgctccttcttcttcacatgtcattttcaattttgcacgtgtggacagatattggttttctactcaacccgccctagagcttcccgcgagcaagatcgtggacgtgccgttggcacaaactggtgaaggcatcgcagaatgtgagcttctcaaatggtatgtacaagagggggattatgttgaagactttcaaccactttgcgaagtcc

SEQ ID NO: 136649 - DNA, 228 bp, Glycine max
gctttcagcgtattggcttggtttcaagtcacctgaacagctttcacgtatccgaaacactggtgtgaaaccagagatcttgaaaaatgttggaaaagcaatcacaaccatccctgaaaatttcacacctcatagagcagtgaagaggatatatgaacaacgggcccaaatgattgaaactggggaagatattgactggggatttgcagaggcgcttgcttatgctac

SEQ ID NO: 136650 - DNA, 233 bp, Glycine max
gaggaattttagtggacaaaactggagattggatcacacttatacaaaattctccaattagtaacttgttgagagttgctgcttggaagaaaggctgtttaatggttaaaattgtgatgtctgggaatgcagcagtcaaaaggagtgattgggcctcattggtacaagtgtttttaacaaacagcaacagtacagagcatttcgatgcatgtaagtggacaaaatcggaacca

SEQ ID NO: 136651 - DNA, 232 bp, Glycine max
ggacacacctgctgttggcttgttgttcaaggatggcaatttgtaagaaagatgtttggagattgaatgtggaatcccttctggatttccgctcacagttatttgtaatagcatttttaatgagatgctcattagatatagctatgaaaaattactgcgccaggctaaagctccaagtatgtttttacaatccttcaaaaattttgtttctttgtgtgtgtatggtgatgat

SEQ ID NO: 136652 - DNA, 233 bp, Glycine max
  unsure (1)..(233): unsure at all n locations
ctctctctcttcttatatttccacattccacgtgaaccttctagaactataatagaaagaaaccctccattccatggctccgccgctcgaacacaacggcgtttccacgagcggtgactctcagagatccattcccacgccgtttctcaccaaaacctaccagctcgtcgacgatnacaccatcgacgatgtcatttcgtggaagattctggatcgtccttcatcgtctggaa

SEQ ID NO: 136653 - DNA, 236 bp, Glycine max
ctcactcactctgcactcaccactgccacacttcaatcgcactaatggctgtcaccttctcagatctacacaccgaagagggcatcaaatccctcgatcaattcctttttgggaaaacctatatttctggggatcagttgacaaaggatgatattaaagtgtatgcagctgttgttgaaaagccaggggacacttttcctaatgctgccaagtggtacgatgctgtctcttctcaa

SEQ ID NO: 136654 - DNA, 236 bp, Glycine max
gaggccttgtgtggcttccaatttgtgctgactcacttggatagccgtcagcttcttattaaatcaaatcccggggaagttgtgaagcctgattcatacaaggctataaatgatgagggaatgcccatgtatcagaggccattcatgaaggggaaactttacattcacttcactgtggagtttccagattctctaaaccctgatcaagttaaggccttggaggctgttctgccacc

SEQ ID NO: 136655 - DNA, 237 bp, Glycine max
aaatccgtcaacacgatccgcttcctcgccatcgacgccgtagagaaggcgaattcgggtcacccgggctccccatgggatgtgctccgatgggtcacgtgctatatgatgaaaccatgaagtataaccctaagaaccctttctggttcaaccgcgatcgcttcgttctctctgctgggcacgggtgcatgcttcagtacgcgcttctgcacctcgctgggttcgatagcgtcaagg

SEQ ID NO: 136656 - DNA, 234 bp, Glycine max
gtaactaccaggggtaggaggagggaataataataaggagcatgcacacacaacaactgctccaaccaccgccactaaccaccctgctgatcagcatgagaagaagggcataatggagaggatcaaagaaaaattgcctggccaccacacccactgaaaacctgcgttacattaccatatgtttgcgcctgtctgtcttatatatgtaacataaagtactatatatgtcatggg

SEQ ID NO: 136657 - DNA, 232 bp, Glycine max
ggcgagggcgacaagcggtggatcgtggaggaccgccccgacggcaccaacgtccacaactggcactggtccgagaccaactgcctcgactggtccaaaaccttcttcagcaacctcctctccaacctccctatcctccacggcgaggctaacctcttcctcaaaacgacgtcgctccgctccctcgacggcgaggcctacgtcaacgtccgcaaggggaaaatcatccccg

SEQ ID NO: 136658 - DNA, 228 bp, Glycine max
cttcacttgcagaacttagttctctgttgcatcatcatcatcttcattagtgttagccctaaacttcaccttcaaccatgaccacagtgccaccacacagtgtccaagtgcacacaacaacacaccgctacgaagccggcgtcgtcccgccggctcgttttgaggcgccgcgttacgaagccggcatcaaggcgccctcttccatttaccattccgagagaggtccga

SEQ ID NO: 136659 - DNA, 227 bp, Glycine max
cgcaacgttcagaaaccaaatcggtttgagtcctcattacccgcctctctctggaaaccagcaaaaccacctttctctactatctatcggttccttttgtactctgagtgggtagaagacatggtgaggctcactgctgacttgatctggaaaagccctcatttcttcaacgcgattaaagagcgtgagttagatcttcgaggcaacaagatagctgtaattgagaa

SEQ ID NO: 136660 - DNA, 219 bp, Glycine max
gaaagaataacattattgcaatgactagcctagaggtaattgaggaatgcaatgcattctacatagcaggacaagaaaccacatcggttttactagtttggacaatggtgttattgagtagatatcctcattggcaagaacgtgcaagggaggaagtattgcatgtttttggtaaccaaaagccagactataatgggctaagtcaccttaaaattgtga

SEQ ID NO: 136661 - DNA, 232 bp, Glycine max
cacacaactactacaagtacttccttacaatcaaaaccaacaacaactatggcaagttatcaaaagcactacgatgatcagggtcgcaaggttgacgagtatggcaacgttgagaagcaaaccgacgaatacggcaaccctgttcatgctgctagtgtcacctatgtagccaccagaactgctgctggtggttacagtgatgacattaataagcaacatgataccaccaatg

SEQ ID NO: 136662 - DNA, 230 bp, Glycine max
tgtaaatccaaacttgattcgttgtcttaaggatttccctccacgaagcaagccagatagccaagtctatggtgatcatactagtcaaataaccaaagaacacctagagcccaacttagaagggctcactgtagatgaggcaattcaaaacaagagattgttcctactagatcatcatgacccaatcatgccatatttgaggcgaataaatgcaacctccacaaaggctt

SEQ ID NO: 136663 - DNA, 227 bp, Glycine max
ctttcctggtagaggccttactgctactgttaacagcattgagtcaggaactggaggtgctaaactattgaaagcatcacttggatctatagatttcatcacctctttttgtcaatctgaagtcgagtcagaaaagatcaaggaagctgttaatacatcttcttatggaagtgaatatgttcatgctgccctttcagttaatcagaaggtaacattgattcatctag

SEQ ID NO: 136664 - DNA, 227 bp, Glycine max
gaagtaatgcctaaacctaatgattcaaagaaaagctaaaagatcatggaacaagtaaataccattttcaaattgtctcatcaattctattatcaaaaattataaaaaataaattataaagaaacgaaacacgggcaagaaaggggagtagagaccactcaataaatgaaatagctactaaaggctttgttctctttttagttatttgataattatccaatttgagt

SEQ ID NO: 136665 - DNA, 218 bp, Glycine max
ttcagatggaggtgattagaaatagaggcattcctgctgatgttcttgcaagcgagctcatgaatttgaaaaacatgttgctcatgaaagcctcaaggatcaaattcctgctgttgacaagttgtattctactaaggttaataagtttgcaaaaattatgaaccttagacaaagtgttgttggtgatcttaaacttcttactgatgggaagttgtatg

SEQ ID NO: 136666 - DNA, 219 bp, Glycine max
acaaaattgaactgtaattgtagtagtagacagtagcaccatgagccaggaacagctcaagaaacctcaaggggagcaggaccccatcaaatacggcgacgttttcaaagtctccgacgaactcgctttcaaacccatcgcgccaagagacgcagctctcatgcaagccacggagaaccaagcattgggccaaactcaaaaaggaggtcccgcctcggt

SEQ ID NO: 136667 - DNA, 219 bp, Glycine max
actagcgatactgataagagagataccaacaagataagaaaaatagaagagttgagattccctttgaagaaaagatggcatcccataggcacagctatgaagctggtcagactaagggccgaactgaggagaagacgaaccagacgatgggcaatattggagagaaggctcaagctgcaaaggagaagacccaggacatggcccaagctgcaaaggaga

SEQ ID NO: 136668 - DNA, 219 bp, Glycine max
aaaaaagaagaagaagaagaagagaggaaagtagtagaagaatacagggcagagctgcagccaacaccacccatggctgaatccgtttcagtggacatggagatgatctttctcggcggaaaggaacatcatattcaaactggctgtggttctgtatctgtaatagtctgtggggatcaagaaaaaccagctctgatcacttatccagatatagcgcta

SEQ ID NO: 136669 - DNA, 226 bp, Glycine max
aggttatgcaatattaattatttaggtacctaataaagtttgaagatggcacaagttgaactgcgagatgagcatgggaacccagttgaactcacagatgcatatgggaatccggtttggttaacggacgagaaaggcaaaccggtgcacctcaccggtgtggcaaccactgcacacaaatgtttgcaagagaatgacacaccacaagagcttcctcactccaaga

SEQ ID NO: 136670 - DNA, 216 bp, Glycine max
caagtacttccttacaatcaaaaccaacaacaactgatggcaagttatcaaaagcactacgatgatcagggtcgcaaggttgacgagtatggcaacgttgagaagcaaaccgacgaatacggcaaccctgttcatgctgctagtgtcacctatgtagccaccagaactgctgctggtggttacagtgatgacattaataagcaacatgataccacc

SEQ ID NO: 136671 - DNA, 216 bp, Glycine max
acaggaatctaatcctattgtggtggctttcgggatcggagtaatgaactacgaatacacccgactgtccctgttaatcattactccgatcccgaaggccaacacaataggatcagaataatgattaacagggacagtcggtggcattcgtatttcatagtcagaggtgaaattcttagatttatgaaagacgaacaactgcgaaacatttgccaa

SEQ ID NO: 136672 - DNA, 211 bp, Glycine max
gttggtgttagtcttggtgtagtgtagctagggagggatatatatctgagtaagatggcatcagagcttgaattgcccccaggcttcagattccatccaacggacgaggtgctggtgttgcactatctctgccgcaaatgcgcgtcgcagccaatcgccgttcccatcatcgccgaaatcgacctctacaaatacgacccctggggactta

SEQ ID NO: 136673 - DNA, 211 bp, Glycine max
ttataaccaaaaccaacaacaactatggcaagttatcagaagcactacgatgatcagggtcgcaaggtcgacgagtatggcaatgttgagaggcaaactgacgaatatggcaacccggttcatgccactagtgtcacttatgtagccaccaaaagtgttggtggctacaatgatgacgctaataagcaacatgatattactggtgtctatc

SEQ ID NO: 136674 - DNA, 213 bp, Glycine max
gcaatttgtaagaaagatgtttggagagttgaatgtggaatccttctggatttccgctcacagttatttgtaatagcatttttaatgagatgctcattagatatagctatgaaaaattactgcgccaggctaaagctccaagtatgtttttacaatccttcaaaaattttgtttctttgtgtgtgtatggtgatgataacttaattagtgttc

SEQ ID NO: 136675 - DNA, 214 bp, Glycine max
gcgtcacgcagttctccgatctcaccgaggacgagtttgagaagctctacactggcgtcaatggcggcttcccgtcatcgaataatgccgccggcggtattgcgccgccgttggaggtggacgggctgccggagaattttgattggagagagaatagagctgtcaccgaagttaagttacagggtagatgtggatcatgctgggctttcagcac

SEQ ID NO: 136676 - DNA, 218 bp, Glycine max
ctcaatggaaatcacttgtgggttaactgtgagcagcagtactcatccaaaacgtaccaagcacccttctgccactccacccaatgctctagagccaacacccaccaatgcctcagttgccccgcggcatcaaggccagggtgccacaaaaacacgtgtggcctcatgtccactaatcccatcacccaacaaaccggtttaggtgaactaggagaaga

SEQ ID NO: 136677 - DNA, 216 bp, Glycine max
ggcgtcgtttcttcaatcgtttctggatccgaagaagaatggttcgccgctcagcacatgaaatccctctccaaacgcctccgcaaatatgggctccgatacgacgatttgtacgatccttactacgatctggatgtgaaggaggcgctgaatcggcttccgaaagatgtggtggacgctcgccacgcgcgtcttaaacgcgccatcgatctttcc

SEQ ID NO: 136678 - DNA, 215 bp, Glycine max
aagaatattgatattggagagtttgctgcaagtcatcttctggaactggacccaaagattcagtaacctatgttctgctttcaaatatgtatgcagtaactgggaaatggggttgtagggatcagacaaggcaaatgatgaaagatagaggtgttaaaaaagagcctggtcttagctggatagaggttaataactcagttcatgcattttttggt

SEQ ID NO: 136679 - DNA, 215 bp, Glycine max
gagatttcgtaagagaagcaatgcccaaaagtacaagaaatgtctttcttggtcaacaaccaaccacaactcaatcgaatgaattcttcaagactcctacatgaagggactctctttctgttcggagggaatcattctttctcaatcaatcatgcctcaactggataaatatttctttttgatactcgtgattttttgactatttatatcgtata

SEQ ID NO: 136680 - DNA, 203 bp, Glycine max
acgatattggccaactgttatttgatcgtgttctgtgtgatgtcccatgcagtggagatggtacccttcgtaaggcacctgatctctggaggaaatggaacacagggatgggacatggtcttcacagcctacaagttttaattgctatgcgaggtttatctctacttaaaattggtggaagaatggtgtactcaacatgctca

SEQ ID NO: 136681 - DNA, 209 bp, Glycine max
aaagaaaggaaataattgatctttgaaaatgcagggaggaaagaaagctggagagtccatcaaggaaacagctgcaaacattggtgcttctgccaaggctggcatggagaaaaccaaggccactgtccaggagaaggcagaaagaatgacggcacgtgatccgatgcaaaaggagttggcaacccagaagaaagaggcaaagatgagcc

SEQ ID NO: 136682 - DNA, 207 bp, Glycine max
gtactcggaaaaacccaacccggcggagcttcttccgtcatgcaatccgccgccacaaggaatgaacaggctggtcttgtcggtcaccaggacgtcaccgacatcaccggcgaccatggcgtcacagtcacagaaactacattccatggaagacgcataataaccgaggctgttggtggccaggtagtggaacagtatgtggagcca

SEQ ID NO: 136683 - DNA, 210 bp, Glycine max
gggttttggtgtttgttgttgaatcgtgaaaatgttcagaaaccagtacgacacggacgtgaccacatggagccctgcggggaggctgttccaggtggagtacgctatggaggcggtgaagcagggctcggcggcgatagggctccgatcgaagacccacgtggtcctcgcatgcgtcaacaaggccaactccgaactctcctcgcacca

SEQ ID NO: 136684 - DNA, 211 bp, Glycine max
caaacacaagtacacaacacaacagcaacatatggcgtctgaacaattggctcgcagagagaacaccaccaccgagaaggagattcacgttgagaaacacagggttcccaagatggccacccacttcgagcaccttgcggagcagctaaagaatctgacatcaccgctgggaaggatactccgcaggtagcatagaagccttgcaagctgg

SEQ ID NO: 136685 - DNA, 190 bp, Glycine max
acttccaattccacgaagcagtggaatgggagtacaaatctaaagttgccggcaaaatgcatgcttgtgggcacgacgcacatgtggctatgcttatcggcgctgccaagattttgaaaactcgagagcatttattaaagggaactgtaattctgttattccagccagcagaggaagctggtaatggagc

SEQ ID NO: 136686 - DNA, 284 bp, Glycine max
agctcgtgaatccggctcgaggaagatattgaattttgattctagcaagcagagcttttgtcaattttctattgaccttctcggtggaggaattttagtggacaaaactggagattggatcacacttatacaaaattctccaattagtaacttgttgagagttgctgcttggaagaaaggctgtttaatggttaaaattgtgatgtctgggaatgcagcagtcaaaaggagtgattgggcctcattggtacaagtgtttttaacaaacagcaacagtacagagc

SEQ ID NO: 136687 - DNA, 216 bp, Glycine max
tgactttgcaaagaagttggcttctctagctgatctctatgtgaatgatgcatttggcactgcccacagagctcatgcttctacagaaggagttgccaaatacttgaagccctctgttgcaggattcctaatgcagaaggagcttgattatctagttggggctgtgtcaaaccccaagagacaatttgctgatattgtcggtggatcgaaggtgtc

SEQ ID NO: 136688 - DNA, 197 bp, Glycine max
aacacgagatgctgttggcttgacatcaagttacactccaactccattgttggaatctggtttgcaaaaagacagagggttaattgtggagtattttggaaggatgtcttacgttgctcataacattaatcagccccaagagaaagatttgttggagggaaatttttcctttgacattaaatctcgctctagattgg

SEQ ID NO: 136689 - DNA, 168 bp, Glycine max
ttcattgccaagggtaaagaagacgctcttgttaccaagaatcttgttcctggtgaagctgtttacaatgagaaaaggattaccgttcagaacgaagacggttccaaagatgagtacagagtttggaatcctttccgctcgaagttggctgctgccatccttggtgga

SEQ ID NO: 136690 - DNA, 232 bp, Glycine max
gaaaacctaagcttagaattagaaacaaagaaaagaagaaaggaaagaattgatcgttgaaaatgcagggaggaaagaaagcgggagagtccattaaggaaacagctacaaacattggtgcttctgccaaggctggcatggagaagaccaaggccactgtccaagagaaggcagaaagaatgacagcacgtgatccggtgacaaaggtattggcaccccaaaagaaagaggc

SEQ ID NO: 136691 - DNA, 222 bp, Glycine max
cggctagggttttagcgcagcttcttctagatttaaggaagatgggtaaggaaaaggttcacatcagtattgtggttattggccatgttgactctgggaagtccactaccactggccacctgatctacaagcttggaggcattgacaagcgcgttattgagagatttgagaaggaagctgctgagatgaccaagaggtctttcaggtaacgctgggtgcttg

SEQ ID NO: 136692 - DNA, 166 bp, Glycine max
cgagcgaatcggctcaggtaattctagagctaatacgagtaacaaaccccgacttctggaagggatgcatttattagataaaaggtcaacacaggctctgctgttgctttgatgattcatgataactcgtcggatcgcacggcctttgtgccggcgacgcatcatt

SEQ ID NO: 136693 - DNA, 218 bp, Glycine max
gtcagagagcaagatgtcagcattgaatatgatgcatgtacaattccaaatgattgtggttcattggttgttgccaaggttggaaatcacaaacaaattgttggtttccatgttgctggaagcaaaggaagactgggatatgcttcattgataccatatgttgagccagttgttcaagctcaaagtgctgaagtttactttgacttcttccctgtgga

SEQ ID NO: 136694 - DNA, 243 bp, Glycine max
acaaaattgaactgtaattgtagtagtagacagtagcaccatgagccaggaacagctcaagaaacctcaaggggagcaggaccccatcaaatacggcgacgttttcaaagtctccgacgaactcgctttcaaacccatcgcgccaagagacgcagctctcatgcaagccacggagaaccaagcattgggccaaactcaaaaaggaggtcccgctcggtgatgcaatcgccgaaacgaaaactc

SEQ ID NO: 136695 - DNA, 253 bp, Glycine max
gtttgccttgtgccgtttgtgttgttttcgggacgaagaagaagatggtgtcaggttctggacatctgcgcaaagcgggtggtggtggacgcgcgccaccacatgctgggtcgtctagcctccatcgtggcgaaggagcttctgaacggccagaaagtggtggtcgttcgctgtgaagagatttgcatctcgggcgggctggtgaggcagaagatgaaatacttgaggttccttcgcaaacgcatgaacacca

SEQ ID NO: 136696 - DNA, 254 bp, Glycine max
taggcactgtggcagaagtcctaggagtgtaaaacagagacgcaaaatgaagacgatcttgtcgtctgagaccatgaatattcccgacggcgtgagcatcaaggttcacgctaaggttatcgaggttgagggccctcgtggaaaactcgtgcgagacttccaccatctgaacttggacttccaacttattaccgacgatggcggtaaaaggaagctcaagattgattcttggtttggttctcgtaaaacctccg

SEQ ID NO: 136697 - DNA, 266 bp, Glycine max
ttcggctcgaggtgtctccaaacttattggttcacctcctggatatgttggttacactgaaggtggtcaattgaccgaggcagttcggcgtcgtccttacactgttgtactgtttgatgagattgagaaagcccatcctgatgtgttcaacatgatgcttcagatcctggaagatggaagactaacagacagtaagggcagaacagtggatttccagaacacacttcttataatgacatcaatgttggaagcatgtgattgagaag

SEQ ID NO: 136698 - DNA, 179 bp, Glycine max
gttattttagttggcttagttgtggctgctgcaggggcataccttgtgtacaaatacagaataaggtcatatatggattctgaaatcagagccatcatggcacagtatatgcgcttggacagccaaggagaagttgtaaatcacgtgcacgaagaaagagcgtgaattgtcagtctctt

SEQ ID NO: 136699 - DNA, 249 bp, Glycine max
tacacaactactacaagtacttccttacaatcaaaaccaacaacaactatggcaagttatcaaaagcactacgatgatcagggtcgcaaggttgacgagtatggcaacgttgagaagcaaaccgacgaatacggcaaccctgttcatgctgctagtgtcacctatgtagccaccagaactgctgctggtggttacagtgatgacattaataagcaacatgataccaccaatgcctacggcgtagacact

SEQ ID NO: 136700 - DNA, 240 bp, Glycine max
gtgacatcaccgctgggaaggatactccgcagggtagcatagaagccttgcaagctggagagagggtcaaagatcatgcaggaaaagccatgggagatattggtggacgtgggaaagccagagagactcacgagctgggtgcacactttgaatccctggctgacaaagtaactgaccatgcagcagccaatgtagttggaaacaaagagagtcaaagagacctcgtggtggtgtcggtga

SEQ ID NO: 136701 - DNA, 234 bp, Glycine max
attcgttcttttgctgaggcctctatggcaactgctttagagaaaaagtggccactttatcttagcaccaaaaatacaattctgaagaaatatgatggaagattcaaggacatatttcaagaagtttatgaggcaagctggaaatcaaagtttgaggctgctggtatatggtatgagcatcgactcattgatgatatggtggcgtatgcaacttaagagtgaaggaggttatgt

SEQ ID NO: 136702 - DNA, 233 bp, Glycine max
gacaggttcatcatcataaccttcaatgaaaagaaatggctgaggcaagcattggcagcaaaagcagcagatggtctttacagggaatgacagctctcgtcaccggtggatccaaaggaatcggatatgctatcgtggaggagttggcacagcttggagccactgtgcacacttgcgctcggaacgaagctgaactcaatgaatccttaaatgaatggaacacaaaaggatac

SEQ ID NO: 136703 - DNA, 190 bp, Glycine max
agagaaggccaaagactacactcttcaggctgcggagaaggccaagagtgcgggtggcacaacggcgagttacgtcggagagaaagcggtgcaggccaaggatgtcgccgtggagagtgggaagagtgcggctgggtatgctgccaaggtggctgctgatttgagggacaaggccaccgcggtggggtgg

SEQ ID NO: 136704 - DNA, 226 bp, Glycine max
ggagaggttggagcatttggtgaaggctgggttgaatgttgtagtgttggatagttctcaggggaactcaatttatcagttagagatggtgaagtatgtgaagagggtttaccctgagcttgatgtgattggggggaatgttgtgactatgtaccaggctgagaatctgattcaggctggggttgatgggttgagggttggaatggggtctgggtccatttgtact

SEQ ID NO: 136705 - DNA, 248 bp, Glycine max
gtcgaagcatctttctttctcttcctgcagaagctatccgtgttacttgttcccaagtctccaacaagcaaagtacatggttgatttggaaatccaggtccccagcgcattcgactcgtttgccgaggcgagagaatcagatgcccccggggcaaaggagtatgtgcacatacgaattcagcagaggaatggaaagaagagtctgacaacagtgcaagggctgaagaaggagttcagctacgagaaga

SEQ ID NO: 136706 - DNA, 190 bp, Glycine max
ttaacagtaaagctaacttcaacacctttaattttctaaaagtaattcagcggctgaataccaagcggagaagatgagtcaggagcagccacggcgtcccaaaggccaaaaccccatcaaatacggcgacgtttttgtcgtctccggcgaccttgcacagaagcccgtcgcaccggaagatgctgccatg

SEQ ID NO: 136707 - DNA, 181 bp, Glycine max
gtgcttggcacgtgtttcactcttcctctgcgctctaaccctatccgctgctcacggaagcaccacggttcaagacatcgcgagaaagttgaaactcggggacaacgagcttctgcgcacggagaagaagttcaaggttttcatggagaattacgggaggagctactccacagaggaggag

SEQ ID NO: 136708 - DNA, 154 bp, Glycine max
tgaaatgcgatacttggtgtgaattgcagaatcccgtgaaccatcgagtctttgaacgcaagttgcgcccgaagccattaggccgagggcacgcctgcctgggtgtcacacatcgtttaaaaaaaaaaaaaaaaaaataaaacccaaaaaataa

SEQ ID NO: 136709 - DNA, 168 bp, Glycine max
tggtacccaccatgccgtggattcacccaaatcctagttggaatctacgaggagctgaaaagcagagtccctcaattggagattgtgtatgtgtcctctgatgaaaacttggatgcctttaatagcttctatggaaacatgccgtggcttgcaattccgttctccgat

SEQ ID NO: 136710 - DNA, 233 bp, Glycine max
gtgagaaacaaagaaaggaaataattgatctttgaaaatgcagggaggaaagaaagctggagagtccatcaaggaaacagctgcaaacattggtgcttctgccaaggctggcatggagaaaaccaaggccactgtccaggagaaggcagaaagaatgacggcacgtgatccgatgcaaaaggagttggcaacccagaagaaagaggcaaagatgagccaggcagagctggaca

SEQ ID NO: 136711 - DNA, 235 bp, Glycine max
ttaccccaatccttttaccgattaacatcttagaagatttcacaaaacccttatctcttagttttcgacttttcggaaatatattagctgatgaattagtagttgttgttcttgtttctttagtacctttagtagttcctatacctgtcatgttccttggattattcacaagcggtattcaagctctcatttttgctactttagctgcggcttatataggtgaatccatggaagg

SEQ ID NO: 136712 - DNA, 237 bp, Glycine max
tgcatgtgtggaataaacactatggtttctgctgcaatggtgcctcaaccacaaacaacacctacaaagaattatgcttcttattagctatgcacttaaggaaatctaaataaatatttttcattctaggtgatgtatcatgtatgtaccaaaatattttggtacgtaagtcttttaaaaagtttgcatctcctctttggttttccttagttctgaaagttatctcctaagaagaca

SEQ ID NO: 136713 - DNA, 240 bp, Glycine max
gccttctcttcttcttctctctctcatggtcttgtagcggaaccgttctcgcttctcggagaacatggcctccatctcctccgctgaactcaattacctcgtttatcgctaccttcaagaatcaggtttcacgcatgctgcttttacttttggttatgaagctggtattaacaaatgctccattgatggaacatttggtgccgtcagtgctcttgttacatttgttcagaagggtctaca

SEQ ID NO: 136714 - DNA, 173 bp, Glycine max
tacggtcagcaaggctatgctgtgacaaaggacaccatttcaagtgcagcgaaaaccgcttcggagaaaactgcgccagtggcagagaaggccaaagactacactcttcaggctgcggagaaggccaagagtgcgggtggcacaacggcgagttacgtcgcggagaaagcggt

SEQ ID NO: 136715 - DNA, 228 bp, Glycine max
tctaatattgcgaagataaggaggcatgtccgccagtcaaaatgcttgcaggacaagatgacagcaaaggaaagtgcaatttggttgggggtattaagtcgagaagaagctctcattaggcagcctagtagtgataatggtacatctggaataactggagtgccacctggtgttcctgttgagaataagcaagcagctactagtagtgctagcaactatgatgttgat

SEQ ID NO: 136716 - DNA, 219 bp, Glycine max
tccctcttccgtgcacagcttgaacacaccgcgtttcggagagagacgtcgcaatggggaggaggcctgcaaggtgttatcggcagataaaaaacaagccataccccaaatcacgcttttgccgtggtgttcctgatcctaagatcagaatttatgatgttggtatgaagaagaaaggtgttgatgagtttccttctgtgttcatcggttagctgggaa

SEQ ID NO: 136717 - DNA, 138 bp, Glycine max
ggggtggtggctgcttcgcaagcttactaatttgtttatttccagaacatcatagttttcgcagcagcaaactaacaaattactcatatcatataataagatggcccgttctctctcgcaagccaaacgtattggtgt

SEQ ID NO: 136718 - DNA, 218 bp, Glycine max
cgagagaaagagagagagagagagaaaaatggctgatacaagtggaggagatgcagtgagaccggtggtaatatgtgataacaagtgtggctgcacagttccatgcactggtggttccacttgcaggtgcacaagtgtcggcatgacaactggaggcggtgatcacgtgacatgctcgtgcggagagtactgtgggtgcaatccatgctcatgtccca

SEQ ID NO: 136719 - DNA, 227 bp, Glycine max
ctcaccgaagatctcgccagaaagtacttccaacaactcatcagcgacgtcgacttctgtcacagccgcggcgtcacccaccgcgacctcaagccggagaatctcctcttagaccaaaacgaagacctcaaagtctccgacttcggactctccacgctgccggagcaggccgcgccgacggcatgctcgtaaccccgtgtgggaccctgcttacgttgcacccgagg

SEQ ID NO: 136720 - DNA, 231 bp, Glycine max
ctttgttcactcttcttctcttgcggctagggttttagcgcacttcttctagatttaaggaagatgggtaaggaaaaggttcacatcagtattgtggtcattggccatgtcgactctgggaaatccactaccactggtcacctgatttacaagcttggaggcattgacaagcgtgttattgagaggtttgagaaggaagctgctgagatgaacaagaggctttcaagtatg

SEQ ID NO: 136721 - DNA, 225 bp, Glycine max
gtgagagagattgtgaagtagaaatcggtgcaagaaattctccactttatctaaaaaaattcggtgagtttgtgaagacaaaaaatcactagctactcaaaaatggccacagtaggaaggaacgttgcagctcctttgctgtttcttaacttgatcatgtattttattgttcttggcttagctagttggtgcctcaacaggttcatcaatggccagacttaccac

SEQ ID NO: 136722 - DNA, 227 bp, Glycine max
ttttgaagaaaagatggcatcccataggcaaagctatgaagctggtcaaactaagggccgaactgaggaaaagacgaaccagacgatgggcaatattggagagaaggctcaagctgcaaaggagaagacccaggaaatggcccaagctgcaaaggagaagacccaacaaacagcccaagctgccaaggacaagacttgcgacacttcccaagcggcaaaggagaaga

SEQ ID NO: 136723 - DNA, 124 bp, Glycine max
atcaaatatgcagtatttacagacaacagtattcggttattggggaaaaatcaatatacttttaatgtcgaatcgggattaactaggacagaaatcaagcattgggtcgaactcttctttgatg

SEQ ID NO: 136724 - DNA, 144 bp, Glycine max
atagttacctgtttgcgatctcattacaatctccccagtttctaatctcagctaagaaaaaccaaaagatgtctctgattccaggtttcttcggtgcccgaaggagcaacgtcttcgatctattctcactcgacatttgggatc

SEQ ID NO: 136725 - DNA, 218 bp, Glycine max
ttcaaaccttgctctatactacacagtacacacactagaagaataatggcttccatcctccactactttttagccctctctctttcttgctcttttcttttcttcttatccgactcagtcacccctacaaaaccaataaaccttgttgttctacccgttcaaaatgatggttccacagggctccattgggccaacctccacaaaagaacccctctaat

SEQ ID NO: 136726 - DNA, 103 bp, Glycine max
cacaagctggtgcagtttggagagattcaggaaaaagttgtattgaacattttcacaagaggactttcttacagcttggtcaactcaggagcgtcctgcaaca

SEQ ID NO: 136727 - DNA, 223 bp, Glycine max
agataatcaacattttttttctatcaattcacacgacaaaatttagcagagttcaaaacaccaaccaagtaaagtaaagaagggaagatgtcactgataccaagtttcttcggtggtcgaaggagcaatgttttcgaccctttctcgctcgacgtatgggaccccttcaaggatttgtctttcccttctgctgaagattcagttttcttgaaaacacgagtgg

SEQ ID NO: 136728 - DNA, 229 bp, Glycine max
taaagaggcttctgaatatgctagtgatgcggctcagaggaccaaagagtatgctggtgatgccaccaagagaagcaaagaggcttctgatcatgccaatgacatggctcggaagaccaaagactacgccagtgacactgctcagagaaccaaggaaaaactccaagacattgcatctgaggctggtcaatacagtacagagaaggccagagaaatgaaggatgcagca

SEQ ID NO: 136729 - DNA, 230 bp, Glycine max
tactactacaagtacttccttacaatcaaaaccaacaacaactatggcaagttatcaaaagcactacgatgatcagggtcgcaaggttgacgagtatggcaacgttgagaagcaaaccgacgaatacggcaaccctgttcatgctgctagtgtcacctatgtagccaccagaactgctgctggtggttacagtgatgacattaataagcaacatgataccaccaatgcct

SEQ ID NO: 136730 - DNA, 234 bp, Glycine max
gaagcatttgttacatttatgtaaccaaaggaaaatcaaaagtacgcaggaggtgaagctcggtaggcgaaatttcaacatgcaacgcagtgagaagcatgcgactaaaggagaagaaggtgaaggatttgatggttgacaagaagaggctagtggaggtgccgtacatggcgtccctggcccacacaatgactacactggtggcgaacaaggttgtggcggtgccggtggctg

SEQ ID NO: 136731 - DNA, 230 bp, Glycine max
tcacacaactactacaagtacttccttacaatcaaaaccaacaacaactatggcaagttatcaaaagcactacgatgatcagggtcgcaaggttgacgagtatggcaacgttgagaagcaaaccgacgaatacggcaaccctgttcatgctgctagtgtcacctatgtagccaccagaactgctgctggtggttacagtgatgacattaataagcaacatgataccacca

SEQ ID NO: 136732 - DNA, 227 bp, Glycine max
atcatatcacaatgtgtggcatacttgctgtgcttggttgctctgattcatctcaagccaaaagggtccgcgtccttgagctttctcgcagattgaagcaccgtggtcctgactggagtgggctccaccaatatggtgataactatttggctcatcaacggttagccatagttgatccagcttctggtgatcaacccctcttcaatgaagacaaaactgttgttgtt

SEQ ID NO: 136733 - DNA, 226 bp, Glycine max
ctatgatagctcagtggccatggttcccttcggaccttactggaagttcgtgaggaagctcatcatgaacgaccttctcaacgccaccactgtaaacaagttgaggcctttgaggacccaacagatccgcaagttccttagggttatggcccaaggcgcagaggcacagaagccccttgacttgaccgaggagcttctgaaatggaccaacagcaccatctccatg

SEQ ID NO: 136734 - DNA, 223 bp, Glycine max
tagctccaagcatgtttttacaatccttcaaaaattttgtttctttgtgtgtgtatggtgatgataacttaattagtgttcatgaatatgtcaagccttactttagtggttctaaattgaaaagctttctagctggtcataatatcaccattactgatggtattgacaaaactagtgcaactttgcaatttagaaagttagcagattgtgattttctcaagag

SEQ ID NO: 136735 - DNA, 225 bp, Glycine max
aacgatgtgggacgcttcgatgaagaagagggtgtcgtcaatgtggagcgccgcaagaaataaaataaaacgtcgtctatgatacaaatatagacgcagtttatattatagtatattatcatgatgtatgttgtttactttttggtttgcttctttacaaaaaatgtgtatgtgtatggttttgaagattggttctagactcgtgggaaccatttcagcaataaa

SEQ ID NO: 136736 - DNA, 223 bp, Glycine max
ttcagattgagatttgccaggaagaaaataaaattttggacaaaatgcatagacagaaggtggcagaggttgaaaagctcacccaaactgttagagaactagaagaggctgtccttgcaggtggtgcagctgcaaatgcagtgagggattatcagcggaaagttcaagaaatgaatgaagaaagaaaaactctagacagggagttggcccgtgccaaggtaac

SEQ ID NO: 136737 - DNA, 226 bp, Glycine max
caaccagatagacacagtgaacgcgaagatggggcaaacatcaccgagcaagacctcttgcagataccaagaggagcccgcaccatcgaaggtctcagattgaacacaagggtgggaattcagtacgtggcggcgtggctcaccggaagcggttcggtgcctctatacaacctcatggaggatgatgccactgctgagatcagcagggtgcagaattggcagtggc

SEQ ID NO: 136738 - DNA, 231 bp, Glycine max
tgagaaacaaagaaaggaaataattgatctttgaaaagtaagaggagagaaagatggagaagcaacaacaacaagcaccatctaaggaaacaaaggcacagagtgatgaatcagttaaagaaagcagcactgaagggcttccaatggaggatagtccctatgtgaaatacaaggatttggaggattataagcgtcagggttatggtacacaaggtcatcaagaaccaaaga

SEQ ID NO: 136739 - DNA, 228 bp, Glycine max
ttaaaccaaaacagtaaagctaacttcaacacctttaattttctaaaagtaattcagcggctgaataccaagcggagaagatgagtcaggagcagccacggcgtcccaaaggccaaaaccccatcaaatacggcgacgtttttgtcgtctccggcgaccttgcacagaagcccgtcgcaccggaagatgctgccatgatgcaaagcgcggaaactcgagtgctcggac

SEQ ID NO: 136740 - DNA, 228 bp, Glycine max
gagaagaagaaaagaagaacaaagatgcaatcctcaaaggagaagatgaaaaacatggcaagtagctgccaaggaacaagtcgacatctataaagccaaaatagacgagaaggcagagaaagcaacggcaagaacagaagaggagagggtgatagcccatgagcacgcaaaggcaaaggaagctggagcaaagatggagctgcatgaagctaaagcaaggcatgcagc

SEQ ID NO: 136741 - DNA, 223 bp, Glycine max
gtttgcggcaggagaagagacatggaagattccgtctcggtgcggccttgcttcacccaaggcttccactacttcggcgtcttcgacggtcacggttgctctcatgttgcgactatgtgtaaggagcggctacacgagatcgtgaatgaagaaattgaaagcgcgcgcgagaatttggagtggaaactgacgatggagaacggattcgctcgcatggacgacg

SEQ ID NO: 136742 - DNA, 223 bp, Glycine max
ctaaaacagtaaagctaacttcaacacctttaattttctaaaagtaattcagcggctgaataccaagcggagaagatgagtcaggagcagccacggcgtcccaaaggccaaaaccccatcaaatacggcgacgtttttgtcgtctccggcgaccttgcacagaagcccgtcgcaccggaagatgctgccatgatgcaaagcgcggaaactcgagtgctcggac

SEQ ID NO: 136743 - DNA, 222 bp, Glycine max
tctacaagtacttccttacaatcaaaaccaacaacaactatggcaagttatcaaaagcactacgatgatcagggtcgcaaggttgacgagtatggcaacgttgagaagcaaaccgacgaatacggcaaccctgttcatgctgctagtgtcacctatgtagccaccagaactgctgctggtggttacagtgatgacattaataagcaacatgataccaccaat

SEQ ID NO: 136744 - DNA, 223 bp, Glycine max
ttagaagataacaaaaagtggaaaaagcatgtaaatgcttataagaaaattaacagactgctggatactggaaggtatcgcaacattatggatatgaatgctggattgggtagttttgctgctgctattcaatcatccaagttatgggtcatgaatgttgtgcctactatagctgagaaaagtacattgggtgtcatatatgagagaggacttattggcatct

SEQ ID NO: 136745 - DNA, 225 bp, Glycine max
tacacaactactacaagtacttccttacaatcaaaaccaacaacaactatggcaagttatcaaaagcactacgatgatcagggtcgcaaggttgacgagtatggcaacgttgagaagcaaaccgacgaatacggcaaccctgttcatgctgctagtgtcacctatgtagccaccagaactgctgctggtggttacagtgatgacattaataagcaacatgatacc

SEQ ID NO: 136746 - DNA, 230 bp, Glycine max
gcttagaattagaaacaaagaaaagaagaaaggaaagaattgatcgttgaaaatgcagggaggaaagaaagcgggagagtccattaaggaaacagctacaaacattggtgcttctgccaaggctggcatggagaagaccaaggccactgtccaagagaaggcagaaagaatgacagcacgtgatccggtgcaaaaggagttggcaacccaaaagaaagaggcaaagatga

SEQ ID NO: 136747 - DNA, 226 bp, Glycine max
ggagctgtctgtgcaaatttgcgttgttcttcgcggcacacctcactcactgaacggtaagtaaggcggacaaggctgttacaatccgaacccgaaagttcatgaccaacaggcttctttccaggaagcagtttgtcgttgatgtccttcatccagggagggcaaatgtttccaaggctgaacttaaggagaagctggctaggatgtatgaagtgatagaccctaa

SEQ ID NO: 136748 - DNA, 226 bp, Glycine max
gtgttgtgtatgttgtgcaagacctggaacttcacctttctacgtacgtgtgctgttaggatgcagtgtgctttgatgatgctttgatgaatatgcagtgtgcttttttaagtctattattttcttttattctcttttcataaggactttagttcttccaaaaaaaaaaaaaaaaaaaaaaaaaaaaaaaaaaaagggggggccccccacttagggccctcccccc

SEQ ID NO: 136749 - DNA, 226 bp, Glycine max
ggaaccatgattagcacctcaactcctcacatggttctccagcaatccgtgtaccaggctttcactcaggtgtttgctcagcagctaccaaagcaagcacaggtgaaatctgtggcaccatttgggttatgcttcaactccaacaagatcaatgcatatcctagcgtggaccttgtgatggacaagcccaatggtcctgtttggagaatctctggtgaggacttga

SEQ ID NO: 136750 - DNA, 224 bp, Glycine max
ggcaggtacatcagtaatttctacaggataaagacgaaattcttgagagtgaattctttgacactaggcaggcatttctgagtctctgccagggaaatcattatcagtatgatactctaaggcgggccaagcattcctctatgatgattttgtatcatcttcataatccaactgcccctgcatttgttacaacatgtaatatttgtcgtcttgacatagaaaca

SEQ ID NO: 136751 - DNA, 224 bp, Glycine max
gggccacactcacatggtcaaggagttccatcttcacctgctgctgggactccttcaagcgtagaatcaccaaccaaattctctggaaatactaatcagggtttagtgaagaaattgaaagggtttgatgagcttgcaatgtcaataggcaattgcaatgctgagagtgctgagcgaggagctgaaaacaggctgtcacagagtgtggatactgagggttccag

SEQ ID NO: 136752 - DNA, 225 bp, Glycine max
agatctcgtctttgaagtttctaagatgacttctccctacattaaatgtacagtctctttcttcatagcatttggaaatttggctgatgacaccatcaattttgaggcttttccccacaagctggtgcagtttggagagattcaggaaaaagttgtattgaaattttcacaagaggaatttcttacagcttggtcaactcaggtgcgtcctgcaacaactctgtt

SEQ ID NO: 136753 - DNA, 221 bp, Glycine max
caaaatggaaagaagctaccagatggcttgtgggaggaggtacttgaaggcttgcaatttgtagagaatgaaatgggagccattcttgggaatcctttaaaacatcttctcctctctgtgcgctctggtgctgcgatttccatgcctgggatgatggacacagttctcaacttaggattgaaagatgaagtggttgctgggttggcagcaaaaagtggaga

SEQ ID NO: 136754 - DNA, 223 bp, Glycine max
gggactgcggaggcggccaagaacaaggccgcagaggtaaaggacagagctgcagaaaccgcggaggcggccaagaacaagactgccgagactgctgaggcagcgaagcagaaaaccgcacaggcaaaggacaacgccaaggaaaatgtgagtggtgcagatgaaggagcaaggaggaaaatggaggacctaaggcttcgaggtaaagggtatggaagtcatg

SEQ ID NO: 136755 - DNA, 219 bp, Glycine max
gtgaagcgcaaacaattccagacggtggaggtgaaagtgaagatggactgcgaagggtgtgagagaaaggtgaagaaatcggtggagggaatgaaaggggtgacagaggtggaggtggatagaaaggccagcaaggtaactgtttccggctatgtggaaccctcaaaggtggtttctcgcatcgctcaccggactggtaagagagcggactatggccat

SEQ ID NO: 136756 - DNA, 226 bp, Glycine max
gttgcagaccgagctagctagctagcaagcaagcacagagatggaggcaaagcgaggccatgccctcatgtgcttggcacgtgtttcactcttcctctgcgctctaaccctatccgctgctcacggaagcaccacggttcaagacatcgcgagaaagttgaaactcggggacaacgagcttctgcgcacggagaagaagttcaaggttttcatggagaattacggg

SEQ ID NO: 136757 - DNA, 223 bp, Glycine max
ataatggtgttctcacagttaccgttcccaaagaagaggttaagaagcctgatgttaaggccattgaaatctctggttaaacttgttgttgcttaaaatcgtgagctttgctttgtgtaataactaataagtattctctgtcatgtgttcctgtggtgaattttgagaattgaaagattttacattgtgaaatgtaactgcttaagtggtaattgtgtgcttg

SEQ ID NO: 136758 - DNA, 222 bp, Glycine max
ggcaaccctgttcatgctgctagtgtcacctatgtagccaccagaactgctgctggtggttacagtgatgacattaataagcaacatgataccaccaatgcctacggcgtagacactggtagacagcattctagtggtggctacgatgttgacactaataaacatcatggaactactggtggctataatgatgacaccaatagacatcatggaactaccggt

SEQ ID NO: 136759 - DNA, 223 bp, Glycine max
caaaaccaaaacagtaaagctaacttcaacacctttaattttctaaaagtaattcagcggctgaataccaagcggagaagatgagtcaggagcagccacggcgtcccaaaggccaaaaccccatcaaatacggcgacgtttttgtcgtctccggcgaccttgcacagaagcccgtcgcaccggaagatgctgccatgatgcaaagcgcggaaactcgagtgct

SEQ ID NO: 136760 - DNA, 221 bp, Glycine max
gcatgcgactaaaggagaagaaggtgaaggatttgatggttgacaagaagaggctagtggaggtgccgtacatggcgtccctggcccacacaatgactacactggtggcgaacaaggttgtggcggtgccggtggctgcgccgccggggcaatggatcggagccggagggtccatgatcgttgagtctgataagcaaaccggaaccgtacggaagcactac

SEQ ID NO: 136761 - DNA, 220 bp, Glycine max
gggagtttatttctggacaaattgctaccagtatcggttttttgcattccaagaagtgcttgattggcgagttttcatccttggagattttcttcgggtttcctttgttaattgcacttagggttcttatccgctttaatgatcagcacagggtacgtgatgctacattcttctgatacaggtgctgcatcttaagtgcacttgtacaatgcattgctga

SEQ ID NO: 136762 - DNA, 223 bp, Glycine max
gttacacgtacacgtcatgggcatcctgcttttctatgttatatagatttgtatgttactattgaaagtggtgatattatacataatgtgactattccaccaaaaagttttctattagttcaaaacaatcaatatgtaaaatcagaacaagtaattgccgagattcgcgcaggaacatacacttttaatttaaaagaaaaagttcgaaaacatgtctattctg

SEQ ID NO: 136763 - DNA, 222 bp, Glycine max
tctgaagatatttgcagctgaaggtgttgaattccttttatcttgtgaaggaaaggtacccgtatcagaatgcaatgggaaaattatatgcctatttttcactgcaaactggtgtagaccttgcagagctttcattccccgtcttgttgaactttatgaaacactgagaaagaggggaataaatctagagatcatcttcatctcctttgaccgtgatgagga

SEQ ID NO: 136764 - DNA, 227 bp, Glycine max
gtaaatttgaagagtttgtttattgtgaaaaaaagaaaaatgcaggcagcaaagaaagccatagagacctttaaggaaaccgcagccaacattggcgcctctgccaagtctggcttggagaaaaccaaggccactatccaagagaagaatgagaagatgaatgcagaagatcaaactcaaatggatatggctaccaagaggaaagaagagaagatcaaccaggctga

SEQ ID NO: 136765 - DNA, 227 bp, Glycine max
ataaaattcttccaccaagttatgggtttccttgtgttgcttcttttctccctcttaggtctctcttctagttccagcatatcaactcatcgttccatattggaccttgacctaaccaagtttaccacacagaaacaggtgtcttcactgttccaactatggaagagtgagcatggacgtgtctaccataaccacgaagaagaggcaaagagacttgagattttcaa

SEQ ID NO: 136766 - DNA, 226 bp, Glycine max
tactcactcactcactcactcactcactcgcaagcaaaaagaaagaatcccaggcgaggagaaagatggaggggaaggagcaggatgtgtcgttgggagcgaacaagttccccgagagacagccgattgggacggcggcgcagagccaagacgacggcaaggactaccaggagccggcgccggcgccgctggttgacccgacggagtttacgtcatggtcgtttta

SEQ ID NO: 136767 - DNA, 224 bp, Glycine max
  unsure (1)..(224): unsure at all n locations
ggaaagaaagcgggagagtccattaaggaaacagctacaaacattggtgcttctgccaaggctggcatggagaagaccaaggccactgtccaagagaagaaagaatgacagcacgtgatccggtgcaaaaggagttggcaacccaaaagaaagaggcaaagatgaaccaggcggagctggacaagcaggcggcgcgtcagcantaacacggcggccaaacagtc

SEQ ID NO: 136768 - DNA, 222 bp, Glycine max
ggcggtgaactcttcgccaaagtcaacaaaggaaaactcaccgaagatctcgccagaaagtacttccaacaactcatcagcgccgtcgacttctgtcacagccgcggcgtcacccaccgcgacctcaagccggagaatctcctcttagaccaaaacgaagacctcaaagtctccgacttcggactctccacgctgccggagcagcgccgcgccgacggcatg

SEQ ID NO: 136769 - DNA, 219 bp, Glycine max
gtaattcaaccaagcgcgggtaaacggcgggagtaactatgactctcttaaggtagccaaatgcctcgtcatctaattagtgacgcgcatgaatggattaacgagattcccactgtccctgtctactatccagcgaaaccacagccaagggaacgggcttggcggaatcagcggggaaagaagaccctgttgagcttgactctagtccgactttgtgaa

SEQ ID NO: 136770 - DNA, 216 bp, Glycine max
tagacatcatggaactaccggtgtctatggtatagacaccgataggcaacaacatgggactactggtggctatgccggtgacactggtaggcaacatgggaacatcggtggcccattactatggaaccaacaccgcagacaccggtactggtcccagaagtggaaccacgggcggcaccggttatggaggcactggtggcactgattatggaacaa

SEQ ID NO: 136771 - DNA, 221 bp, Glycine max
ttcatgtgtggaataaacactatggtttctgctgcaatggtgcctcaaccacaaacaacacctacaaagaattatgcttcttattagctatgcacttaaggaaatctaaataaatatttttcattctaggtgatgtatcatgtatgtaccaaaatattttggtacgtaagtcttttaaaaagtttgcatctcctctttggttttccttagttctgaaagtt

SEQ ID NO: 136772 - DNA, 223 bp, Glycine max
gtatatgtatggcatgcactagctggttattggggtggagtgaagccagcagcaaccggcatggaacattatgacactgccttggcatatccagtgcagtcaccaggcgtgctaggaaaccaaccagacattgtcatggacagcttggctgtacatggccttggcctagtgcacccaaagaaggttttcaatttctacaacgagctccatgcttacttagctt

SEQ ID NO: 136773 - DNA, 225 bp, Glycine max
ttgggccaataccaagggtgaccctcacagatcctgagcaaatcaaagatgtactcaacaagatttatgactttggaaagcctgatatgaatccgcatgttaggttactagctcctggtcttgtaagccatgagggagaaaagtggagcaagcacagaaagataatcaaccccgcattcaatttagaaaagttgaagaatatgttaccactattcatcaaatgtt

SEQ ID NO: 136774 - DNA, 221 bp, Glycine max
ttgcgtttcaatatggaaatccagataaagtatgcaagcctcttgttgaagcaaagaaggctggagaggacttggtggatgcttatgccaaatatgtcaaagagtactacattggaacttttggtactgatgtgcagacatatgatcagaagtacttgaaaagaactgctatgaacgaggacaattctgctcgattatggtggtttcaagtttgcactgaa

SEQ ID NO: 136775 - DNA, 221 bp, Glycine max
gtcttcaagaccgatttgaggttccagagtcacgctgttcttgcgcttcaggaagctgcggaggcttacttggtgggtttgtttgaggacaccaacttgtgtgcgattcacgccaagagggtgaccatcatgccaaaggacattcaactcgcacgccgcatccgtggagaacgtgcttaggctaataataagagtaataacgtagttgctgctgctttttt

SEQ ID NO: 136776 - DNA, 220 bp, Glycine max
taacaactctgttggctgatgggtgtccatatttgtatgctatggtcatgatagttcagtgtctacaataccaggtgattttgtcattggtgttaagttgacaaccataaacaatatgtgtgcatatgggcttaatcctggtatttcaggttctcgtcttttgggcaccattcctcagtccatttcacagcaaactgtttggaatcaaatggcaacagtg

SEQ ID NO: 136777 - DNA, 220 bp, Glycine max
gtatatgtatggcatgcactagctggttattggggtggagtgaagccagcagcaaccggcatggaacattatgacactgccttggcatatccagtgcagtcaccaggcgtgctaggaaaccaaccagacattgtcatggacagcttggctgtacatggccttggcctagtgcacccaaagaaggttttcaatttctacaacgagctccatgcttacttag

SEQ ID NO: 136778 - DNA, 217 bp, Glycine max
cggcttatctgtcagtcgcgtcgggtctgccgctcagttgaaagctatgaaacaagtctgcggtagtttaaaacttgaattggcacaatatcgcgaagtcgccgcctttgctcaatttggctcagaccttgatgctgcgactcaggcattactcaatagaggtgcaaggcttacagaagtactgaaacaacctcaatatgcaccacttccaattgaa

SEQ ID NO: 136779 - DNA, 218 bp, Glycine max
aaacagtaaagctaacttcaacacctttaattttctaaaagtaattcagcggctgaataccaagcggagaagatgagtcaggagcagccacggcgtcccaaaggccaaaaccccatcaaatacggcgacgtttttgtcgtctccggcgaccttgcacagaagcccgtcgcaccggaagatgctgccatgatgcaaagcgcggaaactcgagtgctcgg

SEQ ID NO: 136780 - DNA, 219 bp, Glycine max
tacacacaactacaagaaagaacttccttataaccaaaaccaacaacaactatggcaagttatcagaagcactacgatgatcagggtcgcaaggtcgacgagtatggcaatgttgagaggcaaactgacgaatatggcaacccggttcatgccactagtgtcacttatgtagccaccaaaagtgttggtggctacaatgatgacgctaataagcaacat

SEQ ID NO: 136781 - DNA, 243 bp, Glycine max
gataacttaattagtgttcatgaatatgtcaagccttactttagtggttctacattgaaaagctttctagctggtcataatatcaccattactgatggtattgacaaaactagtgcaactttgcaatttagacagttagcagattgtgattttctcaagagaaactttcagcagctgtctaatgttttgtgggtggctcctgaggacaaggcgagtttatggtcacaacttcactatgtttcg

SEQ ID NO: 136782 - DNA, 240 bp, Glycine max
ttcaaaagaaattacagaacaatgagcagatgtcaggtctgaagcatctagtacatggagcaaagcagcatcacaatgtgaaaaatgtatatgtatggcatgcactagctggttattggggtggagtgaagccagcagcaaccggcatggaacattatgacactgccttggcatatccagtgcagtcaccaagcgtgctaggaaaccaaccagacattgtcatggacagcttggctgtac

SEQ ID NO: 136783 - DNA, 253 bp, Glycine max
gtataatcatattaaatattaaatagaaaaaatggcccgatcatttatcaaaggccaatcttcggtagaagagaaggttcctttggaacacttatttctatttcagtataccgggtctctttctttcatttcaaaaaatttatagaatttcgattttgaaatgaaagaaaagtgtggggataaatataaatgacaaaaagatattggaacataatcttggaagagatgatggaagcaggagttcattttggcc

SEQ ID NO: 136784 - DNA, 252 bp, Glycine max
gcctaaccaaacgggtttaaatgggtgctactttattccacaattctaaagcacggttccaacctcatgtgattagtttatccttgcagaccaatgataccacaagctactctgccaccagcatttccagtagttttgctaagctcatgaccaccttttccaaggtcatcagaatcagcatggacaacaacagcccttcctatgatggagtttggtccagtgagaggaatctgactgtcggtaatactgaag

SEQ ID NO: 136785 - DNA, 198 bp, Glycine max
cttaaagtgtcagataagaagatatttgatcctcaagacaagtttctgctcttatggaacaaactttttgttatctcatgcattttggccgtgtctatagatccactatttttttatctaccagtcattaatgattcatttcattgtcttggcatagaccgaaagttggcaacaatagttacaaccttaaggacaatg

SEQ ID NO: 136786 - DNA, 249 bp, Glycine max
tgtcaatctcgtaaatgtgttacgagaattgtatttgcacagtccagaggaagctcgccaattgagaaggaaagctctctctcgtattgagtggctgcaaaaagctgatgtgcctaccatagcacagattgaagagtttcattcgatgcagaggatgatgaatgctcctgattcaaatgataatattgatctactgttgagcattgatttgttgggtttacaaggagcaggtaaagcttttccaaacaa

SEQ ID NO: 136787 - DNA, 251 bp, Glycine max
cacaaaacttccacttgagagaaaagtagtgtattaagactacaaattttcaatttttcaatggcgtcgaggcaacaaaaagaggatcgagctgaggcagctgcgaaagttgctgcgaaagaactcgaacaactcaaccgagaaaaagaccgtgatttcagtgttggtgttgcagaccaacaccaacaagaagaacatcagttagatcaacaaaagcgtggtgtaatcggatccatgttcaaggcggtgca

SEQ ID NO: 136788 - DNA, 250 bp, Glycine max
tattgaattttgattctagcaagcagagcttttgtcaattttctattgaccttctcggtggaggaattttagtggacaaaactggagattggatcacacttatacaaaattctccaattagtaacttgttgagagttgctgcttggaagaaaggctgtttaatggttaagattgtgatgtctgggaatgcagcagtcaaaaggagtgattgggcctcattggtacaagtgtttttaacaaacagcaacag

SEQ ID NO: 136789 - DNA, 258 bp, Glycine max
cattgattccgaagccccacataccatttgttattcatataaaaactcgttttccttctccatttctcgtcgcaccttttcctcttctctctctttctctctttctagttcgtgttcttcgtcgcaaatccgaagtaggatctctcttgttttttctctaggtttttcgcgatggcgtcgaagcgaattttgaaggagcttaaggatttgcagaaggatcctccaacatcttgcagtgccggtcctgttcatgaagat

SEQ ID NO: 136790 - DNA, 260 bp, Glycine max
gtgattctcatgctaaactatttgaggaacaggaagccccagggtccagatcatttttcacagagattattgcttctatctcagacataaaatttgggaaggatggaagatacatactaagtcgtgattacatgactttaaagttgtgggacattaatatggattcaggccccgttgcaactttccaggttcatgagtatttgagacccaagctttgtgatttatatgaaaatgattcaatcttcgataagttcgaatgt

SEQ ID NO: 136791 - DNA, 248 bp, Glycine max
gctgtgcattcctacactggcttaaattggtgggcagccatagttctaacaaccctgttgattcgaaccgctacagttccactcttaataaatcaacttaaggccacttctaaacttacgttaatgaggcctcatttggaagagataaagcaacaaatggagggactgactatggatcccgtagctgttgctaaaggtcagcagcagatgaagaaactatttaaggaatatggtgtgagtcttttacg

SEQ ID NO: 136792 - DNA, 249 bp, Glycine max
gtaagatggagaagcaacaacaacaagcaccatctaaggaaacaaaggcacagagtgatgaatcagttaaagaaagcagcactgaagggcttccaatggaggatagtccctatgtgaaatacaaggatttggaggattataagcgtcagggttatggtacacaaggtcatcaagaaccaaagacaggtcgtggagctggagccactgaagcacccactctctctggtgctgcagtttcatctgatgcac

SEQ ID NO: 136793 - DNA, 248 bp, Glycine max
cgacgaactcgctttcaaacccatcgcgccaagagacgcagctctcatgcaagccacggagaaccaagcattgggccaaactcaaaaaggaggtcccgcctcggtgatgcaatccgccgcaaccgaaaacctccgcgccggcgtcgtgggccgccaagacatctccgacgtggcgaggaacgaaggcgtgagcgtgaccgaaaccaaagtgggctgccaccgcgtcatcacggagttcgtgggaagac

SEQ ID NO: 136794 - DNA, 248 bp, Glycine max
ttagttttcgcagcagcaaactaacaaattactcatatcatataataagatggcccgttctctctcgcaagccaaacgtattggtgtccttgttgctcaatctatctccctaattcccgttcatcggcgaggttacgcagtggcatccgatgtatcggtaagagttggattgggtaatattgggcgaaggaatggaatcgtgggaggtgtagaagagaagcctgatacaagagatggttcaaaagcct

SEQ ID NO: 136795 - DNA, 247 bp, Glycine max
cgaatatggcaacccggttcatgccactagtgtcacttatgttgccaccaaaagtgttggtggctacaatgatgacgctaataagcaacatgatattactggtgtctatcccgagaaagacaccggtagacatcattttggtcgtggttacgacggtgagtctaacaagcaacatgatgctactggtgtttatcccggaatagacattggtagagatcatgggactaccggtgtttatggcctaaac

SEQ ID NO: 136796 - DNA, 251 bp, Glycine max
gttgctagcaattttactgataacggatgcattgcgtgtatgtgtcacaacactgatggactttatagtgctaagcagactgctattgtgagagcttctgatgatttttaccctcgtgatcctgcttcccataccatccatatttcttctgttgcatacaactcactattccttggagaattcatgcaacctgactgggacatgtttcatagtttacacccagcagcagattatcatgctgcagctcgtgc

SEQ ID NO: 136797 - DNA, 257 bp, Glycine max
ggataaggcaaagttggctgaagacacgattccaggcttaactgacatagttggagatgaagataaagcaaaggagattgtggaagctgccaaagcctccatgggacaggatttgtccccagtggacttaatcaatgtccatcaatttgcacagagggtaatggacctatctgagtacagaaagaacttatatgattacctggttgctaaaatgaatgatattgcaccaaatttggccactttaattggtgaagttg

SEQ ID NO: 136798 - DNA, 252 bp, Glycine max
ctaagcgaggccatgccctcatgtgcttggcacgtgtttcactcttcctctgcgctctaaccctatccgctgctcacggaagcaccacggttcaagacatcgcgagaaagttgaaactcggggacaacgagcttctgcgcacggagaagaagttcaaggttttcatggagaattacgggaggagctactccacagaggaggagtatttgcgccgtttggggattttcgcccagaacatggtcagagcggcgg

SEQ ID NO: 136799 - DNA, 249 bp, Glycine max
tttttcacttcactttcccccaattttctttctcaacaatggacgcagcaacacaactccacttaccccctggattccgattccaccccaccgatgaagaactcgtcgttcactatctctgccgcaaatgcgcttcgcaagaaatcgcagttccaataatcgccgaaatcgatctctacaagtacgacccatgggaccttccaggaatggctttgtacggagcagaagagtggtattttttcacgccga

SEQ ID NO: 136800 - DNA, 246 bp, Glycine max
cttcgttcactcttcttctcttgcggctagggttttagcgcagttcttctagatttaaggaagatgggtaaggtaaaggttcacatcagtattgtggttattggccatgttgactctgggaagtccactaccactggccacctgatctacaagcttggaggcattgacaagcgtgttattgagagatttgagaaggaagctgctgagatgaacaagaggtctttcaagtatgcctgggtgcttgat

SEQ ID NO: 136801 - DNA, 221 bp, Glycine max
ataggcagattgggatatgcttcattgataccatatgttgagccagttgtgcaagctcacagtgctgaagtttactttgacttcttccctgtggaggttgatagtcaagagggagttgctcacattggtgaattgaaatctggtgtctatgttccactgcctacaaaaagcaatttggtggaaactcccaaggactggcaactggatctaccttgtgacaa

SEQ ID NO: 136802 - DNA, 250 bp, Glycine max
ttaactacaagaaagaacttccttataaccaaaaccaacaacaactatggcaagttatcagaagcactacgatgatcagggtcgcaaggtcgacgagtatggcaatgttgagaggcaaactgacgaatatggcaacccggttcatgccactagtgtcacttatgtagccaccaaaagtgttggtggctacaatgatgacgctaataagcaacatgatattactggtgtctatcccgagaaagacaccggt

SEQ ID NO: 136803 - DNA, 249 bp, Glycine max
gtataatagagacaacctttttgccctcaaagtattctgtggagatgtcttcggcggtttataagaattgggttttcactgatcaagcactacctgcagatcttatcaagagaggagtggcaattaaggatccatcaaccccacatggagttcgtcttctgatagaggactatccttatgccgctgatggactggagatatgggctgcaattaagacatgggttcaagaatatgtgcccttgtactatg

SEQ ID NO: 136804 - DNA, 247 bp, Glycine max
gtgaagggaatggtgccttgggaattagaatggctctccttggatcaaacataacaagcgaggttggactccgtttgctcctttgtcctcttggttccaacgttgtaattagaacagcatgctgtactgtgggagttgctttgcctgtgtactctacgttcaaggcaatagaaagtaaagatcaagatgctcagcataagtgtcttctctactgggcagcctatggttcattcagtctcgctgaagt

SEQ ID NO: 136805 - DNA, 250 bp, Glycine max
gttgtagcactgaataccaaagagtatgctggtgatgctaccaagagaagcaaagaggcttctaatgatcatgccaatgacatggctcagaagaccaaagactacgccagtgacactgctcagagaaccaaggaaaaactccaagacattgcatctgaagctggtcaatacagtgcagagaaagctagagaaatgaaggatgcagcagcagagaaggcaagtgacatagcaaaggctgcaaagcaaaaat

SEQ ID NO: 136806 - DNA, 115 bp, Glycine max
gttaaattctcaaaggcaccaatttcattgctcagagttcccaaattctccccaagagataaaatgtctctaatcccaaacttcttcggtggccggagaaacaatgtgttcgatc

SEQ ID NO: 136807 - DNA, 258 bp, Glycine max
atgaaactgcatgtaaattttgttgcttcatctcattttgcatttgaaagttgtcaactttctgacgggctttgcagaagcgggatcaatcggaataaactatggaagaattgcgaacgacctacctacaccggcgaaagtggtggagcttcttaagagtcaggggctgaaccgtgtgaagctctacgacaccgacgccaccgtcttaaccgcgtttgccaactcaggaatgaaggtggtggttgccatgccaaacga

SEQ ID NO: 136808 - DNA, 250 bp, Glycine max
gtaaaatcaaaagcacttcgccatctcccaaacccaccaagcccaaagcctcgtcttcccttcataggacaccttcatctcttaaaagacaaacttctccactacgcactcatcgacctctccaaaaaacatggtcccttattctctctctactttggctccatgccaaccgttgttgcctccacaccagaattgttcaagctcttcctccaaacgcacgtggcaacttccttcaacacaaggttccaaa

SEQ ID NO: 136809 - DNA, 245 bp, Glycine max
gttttgtgggtggctcctgaggataaggcgagtttatggtcacaacttcattatgtttcgtgtaataatctggaaatgcaagaagcttatcttgtcaatctcgtaaatgtgttacgagaattgtatttgcacagtccagaggaagctcgccaattgagaaggaaagctctctctcgtattgaatggctgcaaaaagctgatgtgcctaccatagcacagattgaagagttccattcgatgcagag

SEQ ID NO: 136810 - DNA, 245 bp, Glycine max
gtaggaagaaaaaaagagaaagaagatcaaggcagtgtcacatgaatggtccttggtgaacaagcagaagcctatttggatgaggaagcctgaggagatcacaaaagaggagtattctgctttctacaagagtcttaccaatgactgggaagagcatttggctgtcaagcacttctctgttgagggtcagttggagtttaaggctatactctttgttcccaagagggcaccttttgacctctttg

SEQ ID NO: 136811 - DNA, 247 bp, Glycine max
ttaggaaataattgatctttgaaaatgcagggaggaaagaaagctggagagtccatcaaggaaacagctgcaaacattggtgcttctgccaaggctggcatggagaaaaccaaggccactgtccaggagaaggcagaaagaatgacggcacgtgatccgatgcaaaaggagttggcaacccagaagaaagaggcaaagatgagccaggcagagctggacaagcaggcggcgcgtcagcataacacgg

SEQ ID NO: 136812 - DNA, 247 bp, Glycine max
gggtagcatgctggaccatatcaaacatcacagctgggaacaaaaagcagattcaggatgtaattgaggctagtataattgctcctttagtccatttgcttcaaaatgctgagtttgatatcaagaaagaggctgcttgggcaatctcaaatgctacttctggtggatctcatgaacaaatcaagttcctggtaagtcaagggtgtattaggcccttgtgtgatcttctcatatgtcctgatcctag

SEQ ID NO: 136813 - DNA, 251 bp, Glycine max
gtgagatacaaagaaaggtaataattgatctttgaaaatgcagggaggaaagaaagctggagagtccatcaaggaaacagctgcaaacattggtgcttctgccaaggctggcatggagaaaaccaaggccactgtccaggagaaggcagaaagaatgacggcacgtgatccgatgcaaaaggagttggcaacccagaagaaagaggcaaagatgagccaggcagagctggacaagcaggcggcgcgtcaca

SEQ ID NO: 136814 - DNA, 256 bp, Glycine max
cagaaattgtagtgaaagcgataattctagtactagtataataactagtacgaatgatacaaatgatagtgattccactataggagaaagttctaataatctcgatgaaagtcaaaaatataagcatttgtggcttgaatgcgaaaattgttatggattaaattataaaaaattttttaaattaaaaatgaatatttgtgaatactgtggatatcatttgaaaatgggcagttcagatagaatcgaacttttgatt

SEQ ID NO: 136815 - DNA, 109 bp, Glycine max
gtgaaacaaagaaaggaaataattgatctttgaaaatgcagggaggaaagaaagctggagagtccatcaaggaaacagctgcaaacattggtgcttctgccaaggctgg

SEQ ID NO: 136816 - DNA, 240 bp, Glycine max
cggcaccaagtttataatttatgatacacagcctccctataacaatgctcagctgtctcctccaggccgaagccgtaggttttattcaaaaaaggtttctccaaaggtccctagtggcagctacaatattgcccagatcacctatgagttgaatgtccttggtactaggggcccgcgcagaatgaactgcaccatgcactcaatccctatgtcagcccttgagcctggttgcactgtccc

SEQ ID NO: 136817 - DNA, 240 bp, Glycine max
gccaaatgcctcgtcatctaattagtgacgcgcatgaatggattatcgagattcccactgtccctgtctactttccagcgaaaccacagccaagggaacgggcttggcggaatcagcggggaaagaagaccctgttgagcttgactctagtccgactttgtgaaatgacttgagaggtgtaggataagtgggagctggaaacagcgaaagtgaaataccactacttttaacgttatttta

SEQ ID NO: 136818 - DNA, 246 bp, Glycine max
ggagcttgagggcaggtcttatagatgcaagttctgcagaactcacttggcccttgcagatgatctcatctccagggcctttcattgccggagggggaaagcatacctattcaataatgccgtgaacttcacatattggaacaccagaagaaaggatgatgctttcaggattacatactgacgcagatattttttgctgttgctgcggtcaaataattggctggaaatatgaatctgcacacgaga

SEQ ID NO: 136819 - DNA, 247 bp, Glycine max
ttgaagaaaacctaagcttagaattagaaacaaagaaaagaagaaaggaaagaattgatcgttgaaaatgcagggaggaaagaaagcgggagagtccattaaggaaacagctacaaacattggtgcttctgccaaggctggcatggagaagaccaaggccactgtccaagagaaggcagaaagaatgacagcacgtgatccggtgcaaaaggagttggcaacccaaaagaaagaggcaaagatgaac

SEQ ID NO: 136820 - DNA, 110 bp, Glycine max
ggaaataattgatctttgaaaatgcagggaggaaagaaagctggagagtccatcaaggaaacagctgcaaacattggtgcttctgccaaggctggcatggagaaaaccaa

SEQ ID NO: 136821 - DNA, 244 bp, Glycine max
tacgaatatcttgttgtttggagcgatccgagaaaaactctgtaaacatgttggtttaccaggacctccttacaggtgatgagcttctctctgactccttccgttacaaggaaattgagaatggaatgctgtgggaagttgaggggaagtgggttgttaaaggagcagttgatgtagacattggtgcaaacccttctgctgagggtggaggagacgatgagggagttgatgatgcagctgttaa

SEQ ID NO: 136822 - DNA, 245 bp, Glycine max
ttaaaagtttacgttacaaatcgcataataaccgtcctaagtttattgagagaattttgcaagtgtgagatacatggcatctcgtcaaaacaacaagcaagagcttgatgaaagagcaaggcaaggagagactgttgtcccgggtggaactggtggcaagagcctggaggctcagcaacaccttgctgaaggaaggagcaagggagggcaaacaaggaaggaacagctgggtacagaagggtacc

SEQ ID NO: 136823 - DNA, 246 bp, Glycine max
atcgacagagccggcggttcccgtggcggtttgagaatggccgacaagtacaacctgaagaaccccgccgtgaagcggatcctccaggaggttaaggagatgcagtccaacccttccgacgatttcatgagcctccctctcgaggaaaatatatttgagtggcaatttgcgattagagggcctcgtgatacggaatttgagggtggtatttatcatggaaggatccagttgccttcagagtatcca

SEQ ID NO: 136824 - DNA, 251 bp, Glycine max
tacagccaagtcgtaaaagggtttcaagggatggaaaacatgcagagcttctggcaattgggtgatgaactccgtgggcactcaaaagcatcggaggatcacaagtggttaatggttgcctcgaaactggccgaacagacaagattgaagggggagcgtgtgaacaaccttgatctttcaaagggacccattgaaacaaggtcaagggataaatttgggttccaggaagagaacaaatttgattctcttaa

SEQ ID NO: 136825 - DNA, 240 bp, Glycine max
gtagacccaccaacgcacgaaagccgggatctttcagaaaatggattcctattcgaagggtgcataaccgcatggataagctcacactaacccgtcaatttgggatccaattcggttccttaggaggtatcgggaaggaattttggaatgtaataatatcgattcatacagatacagaagaaagggttctctattgattcaaacgctctacctacgagatagggatagagaaagaggaaa

SEQ ID NO: 136826 - DNA, 244 bp, Glycine max
gataacttaattagtgttcatgaatatgtcaagccttactttagtggttctacattgaaaagctttctagctggtcataatatcaccattactgatggtattgacacaactagtgcaactttgcaatttagccagttagcagcttgtgattttctcacgagaaactttcagcagctgtctaatgttttgtgggtagctcctgaggcacaaggcgagtttatggtcacaacttcattatgtttcg

SEQ ID NO: 136827 - DNA, 245 bp, Glycine max
actacaagtacttccttacaatcaaaaccaacaacaactatggcaagttatcaaaagcactacgatgatcagggtcgcaaggttgacgagtatggcaacgttgagaagcaaaccgacgaatacggcaaccctgttcatgctgctagtgtcacctatgtagccaccagaactgctgctggtggttacagtgatgacattaataagcaacatgataccaccaatgcctacggcgtagacactggtag

SEQ ID NO: 136828 - DNA, 246 bp, Glycine max
tgaacctaagtgagatacaaagaaaggaaataattgatctttgaaaatgcagggaggaaagaaagctggagagtccatcaaggaaacagctgcaaacattggtgcttctgccaaggctggcatggagaaaaccaaggccactgtccaggagaaggcagaaagaatgacggcacgtgatccgatgcaaaaggagttggcaacccagaagaaagaggcaaagatgagccaggcagagctggacaagca

SEQ ID NO: 136829 - DNA, 245 bp, Glycine max
gttgaaggcggcgtgagaagcatgttggacatcaacctattcagagaggagaagggccacaaccctgaattcatccgcgaatcccagcgccgtcgtttcgccagcgtcgaagtcgtcgacgaggtcatcaatctcgacaaagaatggcgaaagcgtcaattcgagttggagaatctccgcaaagaatttaacaagatcaacaaggaagtctccaaactcaagcgtgctggcgaggatgcaactaa

SEQ ID NO: 136830 - DNA, 243 bp, Glycine max
ttaccaacaacaactatggcaagttatcaaaagcactacgatgatcaggtccgcaaggttgacgagtatggcaacgttgagaagcaaaccgacgaatacggcaaccctgttcatgctgctagtgtcacctatgtagccaccagaactgctgctggtggttacagtgatgacattaataagcaacatgataccaccaatgcctacggcgtagacactggtagacagcattctagtggtggctac

SEQ ID NO: 136831 - DNA, 238 bp, Glycine max
gtcttcttctcttgcggcgagggtttagcgcacttcttctagatttaaggaagatgggtaaggaaaaggttcacatcagtattgtggtcattggccatgtcgactctgggaaatccactaccactggtcacctgatttacaagcttggaggcattgacaagcgtgttattgagaggtttgagaaggaagctgctgagatgaacaagaggtctttcaagtatgcctgggtgctggacaa

SEQ ID NO: 136832 - DNA, 241 bp, Glycine max
ttcacaactactacaagtacttccttacaatcaaaaccaacaacaactatggcaagttatcaaaagcactacgatgatcagggtcgcaaggttgacgagtatggcaacgttgagaagcaaaccgacgaatacggcaaccctgttcatgctgctagtgtcacctatgtagccaccagaactgctgctggtggttacagtgatgacattaataagcaacatgataccaccaatgcctacggcg

SEQ ID NO: 136833 - DNA, 242 bp, Glycine max
gacgtcggcgggggccccggaaagagttatcttttctgtttaacagcctgcccaccctggaaacggctcagccggaggtagggtccagcggctggaagagcaccgcacgtcgcgtggtgtccggtgcgcccccggcggcccttgaaaatccggaggaccgagtgcctcccacgcccggtcgtactcataaccgcatcaggtctccaaggtgaacagcctctggtcgatggaacaatgtaggc

SEQ ID NO: 136834 - DNA, 263 bp, Glycine max
agtcgagcgaatcggctcacgaccgtgtcacacattgctcatttataagttttcttgctttcccaattcagttgaatacacatcacaaatcatggcaggagcactgacagatgatcagattgctgaattccatgaagcttttgcctcattgacaaggactctgatggattcattactgtggatgaattggcaaccattatccgatcattagaagggaatccaacgaaagaagaaatccaagacatgattagtgaggtcgatat

SEQ ID NO: 136835 - DNA, 259 bp, Glycine max
tctctatcgagtaaattaactatgaagcctaccctactattatccctttccttcctgcctctctttgctttcctggctctttcagaagatgttgaacaagttgtggacataagtggcaaccccattttcccaggtggcacatattacattatgccatcaacttggggcgctgccggtggtggattgaaactaggccggacaggaaactcaaactgcccagttactgttttgcaagattactcagaaatcttccgtggca

SEQ ID NO: 136836 - DNA, 261 bp, Glycine max
aaaaacatgaggaatatggcttccttaagctcctcattagtgctgctccttgcagctctaattctatcccctcaagttcttgctgactatgagaagcccccaatttacaagccacctgtttacacaccgccagtttataagcccccagttgagaaaccaccagtgtacaaacctccagtttacaagcctccagttgataaaccacctgtttataagcctccagtttataagccacccatttacaagcctccagtgtataaa

SEQ ID NO: 136837 - DNA, 267 bp, Glycine max
  unsure (1)..(267): unsure at all n locations
agcatccagcgcagagtccaccacgtccgcaaaaatcacacaccgcttccctgtcncctcccctctctcacatccatttcacatcactctacactaacagacaaacagtcctccgctgctcgccaatcctagggttccggtgacaatgctcccctatggttccattccggaggccgcggcggcgctgggccgcaacctcacctccgcggaaaccctctggttcaactactccgcctccaagtctgattacttcctctactgccacaa

SEQ ID NO: 136838 - DNA, 258 bp, Glycine max
ctttggggtttctctcgctaaccaagaaggaactagggttttacagaatacaagctctctctctctctcgtcggttttcgtcaatcaaatccaatccaatatcaaatatgagtcgtcatcccgaggttaagtgggctcagaggcttgacaaggtctatatcacggtgcaattggctgattcaaaaaatgcaaaagtggatcttacgccagatggtatttttaccttctccggtagtgctggtgctgaagaccatcagt

SEQ ID NO: 136839 - DNA, 260 bp, Glycine max
tctggctctctaagaaacatggctgaagagggtcaggttgtcggcgtccacaccgttgatgcgtggaaccagcaactgcagaatggaaaagactcccaaaaattgattgtggtggattttactgcttcctggtgtggtccatgccgttttattgccccagttctggcagagattgctaggcatatcctcaagtgatcttcctcaaggtggatgtggatgaagtgaggcctgttgctgaggaatattccattgaggccatg

SEQ ID NO: 136840 - DNA, 255 bp, Glycine max
tgctgttgggagcatgaaagcctctgatgatgagctcacttgcagtgtatgcttggagcaagttgatgttggtgacgtactgcgtacttaccttgcttgcatcagtttcacgctaactgcatcgatccctggctgcgccaacaagggacatgccctgtatgtaaatttcgagctggatctggttggagtgacaatggacataatgatatcatcgctgacatggtttgaatacctcatctaatttttatttatgga

SEQ ID NO: 136841 - DNA, 255 bp, Glycine max
ctattatcagcacgccttcgatccagaaaccatgactaagagaacgaagaaagcaggcattgtcggaaaatatggtacccgatatggtgctagtctgcggaagcagattaagaagatggaagttagtcagcatagcaaattcttttgtgaattctgtggaaagtatgctgtgaagaggaaggctgtgggaatatggggatgcaaggattgcggtaaagtaaaagctggcggtgcctacactttgaatactgcgag

SEQ ID NO: 136842 - DNA, 257 bp, Glycine max
ggaagaagaagacgccgcagccatggtgaagtactccagagaacccgacaatgccaccaagtcctgcaaggccagaggcgctgacctcagagtgcatttcaagaacactagggagactgcctttgccatcaggaagttgcccctggttaaagctaaaagatacctggaggatgttttggcccacaaacaggccatccctttccgacgcttctgtggtggtgttgggaggacagcccaggctaagagcagacactcca

SEQ ID NO: 136843 - DNA, 261 bp, Glycine max
cgcgagattgcgtgtttgctccttattttcctgctgatgaaccccagaagtttggtagtgttcacaaggttttcggggctagcaatgtaaacaaaatgttacaggaattacctgagcaccaaagaagtgatgcagttagttcaatggtatatgaagccaatgcaagggtgagggaccctgtgtatggatgtgtgggagccatatcctctcttcaacaacaagttgatgtgctccaaacccaattggcactagcacaagcag

SEQ ID NO: 136844 - DNA, 254 bp, Glycine max
tgcgcttttcgattctcttctctgcaactatgcctaaacctaaggtacttcttcgacatgaccatcggcggtcaacctgccggccgcatcgtgatggagctctacgccgacgtgactccgagcaccgccgagaacttccgcgcgatctgcaccggcgagaagggcgccgggcggagcggcaagcccctccactacaaaggctcgtacttccaccgcgtgatcccgaacttcatgtgccagggcggcgacttcac

SEQ ID NO: 136845 - DNA, 257 bp, Glycine max
gcaaatttgcgttgttcttcgcggcacacctcactcactgaacggtaagtatggcggacaaggctgttacaatccgaacccgaaagttcatgaccaacaggcttctttccaggaagcagtttgtcgttgatgtcttcatccagggagggcaaatgtttccaaggctgaacttaaggagaagctggctaggatgtatgaagtgaaagaccctaatactgtatttgtcttcaaattccgaacacattttggaggtggca

SEQ ID NO: 136846 - DNA, 257 bp, Glycine max
ggatgtcttggatcttaaaaaccttgagattttgattttggatgaggctgatagactcttagatatgggattccagaagcagataacttctattataactctcttgcctaagcttcggagaactggtctgttctctgctactcaaactgaggctattgaagagcttgctaaggcaggattgaggaacccagtgagggttgaagttcgagcagaaacaaaatcagaaaatggtcctgcatcatcaaaacaaccagaat

SEQ ID NO: 136847 - DNA, 253 bp, Glycine max
cctcgatcgtatcagaaaattagcagacaattgcactggtttgcaaggattcttggttttcaatgctgttggcggtggtactggttctggtttgggatcattgctgttggaacggttatctgtcgattacgggaagaagtctaaacttggttttaccatctatccttctcctcaggtatctactgcagttgttgagccttacaacagtgtcctttccactcattctcttcttgagcacactgatgtggttgtg

SEQ ID NO: 136848 - DNA, 254 bp, Glycine max
gcataacttctattctatatttctttctactcgcaagcaaatcagaagaagagaatggcagcagcagaggggctaaacagagagcagtacgtgtacttggcgaagtgtccggagcaggcggagcggtacgaggagatggtggagttcatgcagaaggtggtggtggggtcgacgccggcgtcggagctcacggtggaggagcgcaacctcctctcggtggcctacaagaacgtcatcggctcgctgcgtgccgc

SEQ ID NO: 136849 - DNA, 256 bp, Glycine max
gtaaccaattaccatgggagtcttcacctttgtcgttcgcaaatccggcgccgaatggagcgccaagcaacattccggcgacatcgaggcctccgccgactccacctacgatctccaaaggaagctcgtgcaagccgctctcgccgttgattcctccggtggagtccagtcctccttctctcccgtgtctcctacctccgctgtgttccaggtgatagtgggtggtgctgtattcgttggaggtggcggtggtgct

SEQ ID NO: 136850 - DNA, 258 bp, Glycine max
gtttccttgggtgctgcatgcactttcactcgaagaaccttgaagcgagtctgggccacagcaaccagcgacaacaactcaatcagctagggttgctttgcttgctatcttgttggaggattttctgttcaagagaagatggtaactagaattgtggatcttcgttcagacacagttacaaagccaactgaagcaatgagagctgctatggcaagtgctgaagttgatgacgatgttctaggctatgatccaactgct

SEQ ID NO: 136851 - DNA, 252 bp, Glycine max
gagagagaatggcagcacttggtgggaatcgtgatgtgacaggaagccagaacagcgttgagatcgatgctctagctcgctttgctgttgaagaacacaacaaaaaacagaatgcccttttggagtttgaaaaggtggtaactgcgaaacagcaagtggtttctggtaccttgtacaccatcactttggaggcaaaagatggtgggcaaaagaaggtttatgaagccaaagtttgggagaagtcatggttga

SEQ ID NO: 136852 - DNA, 254 bp, Glycine max
atcgccgcaagaaccgttctttggaaagtctgcaagctaatgtgcagaggctgaaaacatacaaggccaaattggttgtgttcccaagacgggcacagaaggttaaggctggtgattctactcccgaggagcttgcaaatgcaacgcaagtccagggttctttcttgcctattgtgagggagaagccaactgttgaacttgtaaaggttacagatgacatgaaggcttttaaagcttattacaagcttcgactt

SEQ ID NO: 136853 - DNA, 250 bp, Glycine max
gtcaagaaaaagggcgaaaaggtaaactcgctattgtgcggacttgtacgccgtgacgccgtcgtttttggtggtggaggttaagaaggacaacggtgacaccttggagtataaccagttctgtagcaaggagcttcgtccagctcttaaagatatcgtgtggaggacttctcctgcagagaatcctacactcgcttgaagaacaaccaagactcccatgctaattgtcgttcctttgtagttgtttttg

SEQ ID NO: 136854 - DNA, 210 bp, Glycine max
ctcataacacaaagcgccaagcaaagctcatccttgagttaaaaaatcgcagcagcttcctccatgggtctctcatccccatccttggctggcaaggccgtgaagctgggcccatcagccccagaagtgggtacggtgagcatgcggaagaccgtcaccaagcaggtctcctcaggtagcccatggtacggcccagaccgagtcaagtac

SEQ ID NO: 136855 - DNA, 254 bp, Glycine max
gttttattattatttctaattctctcttatcaggtccattgaatatgtctccgtcgttggatcttcctcccaagggtggcttcagttttgatctatgccgaagaaacgcaatgcttcaaaacaagggcctcaaagccccaacctttctcaaaactggcaccactattgtcggtttagttttccaggatggtgtcattcttggtgctgatactagggcaactgaaggacctatagtggctgataaaaactgtgag

SEQ ID NO: 136856 - DNA, 252 bp, Glycine max
cgttcgctctttctttctcccctacacaaaacatggctttgcccaatcagcaaaccgtcgattaccccagcttcaagcttgtcatcgtcggcgacggtggcacaggaaagacaaccttcgtgaagaggcatctcactggtgaattcgagaagaaatatgaaccgaccattggtgtggaggttcatccgttggattttttcacgaactgtggaaagattcgcttctattgttgggatactgctgggcaagaga

SEQ ID NO: 136857 - DNA, 247 bp, Glycine max
gtaccagggtgctggtacatctttgctatgatgggcttacaaatgctctccagctcctccatcttatcacagatgtagcagggtgctggtggtgatgcgggtggagccatggatgacgatggtgtgcagctggtagtggaagcggtgctggactcagaattgctgaagtccattacgcagaacattctcatgggttgttcttgattttgtcgaagagccttttgaggtttaggtatcagcgtgtcat

SEQ ID NO: 136858 - DNA, 248 bp, Glycine max
ctcgagccgcgaggcttgtgtggcttccaatttgtgctgactcacttggatagccgtcagcttcttattaaatcaaatcccggggaagttgtgaagcctgattcatacaaggctataaatgatgacggaatgcccatgtatcagaggccattcatgaaggggaaactttacattcacttcactgtggagtttccagattctctaaaccctgatcaagttaaggccttggaggctgttctgccaccaaa

SEQ ID NO: 136859 - DNA, 248 bp, Glycine max
cagaaaccaacaacagttcttgcactgaggtttcacgatgttgctggaacttgcacttggtttgtttgtgttagctttgtttctgcacttgcgtcccacaccaagtgcaaaatcaaaagcacttcgccacctcccaaaccctccaagcccaaagcctcgtcttcccttcattggccaccttcacctcttaaaagataaacttctccactatgcactcatcgatctctccaaaaagcatggccccttat

SEQ ID NO: 136860 - DNA, 248 bp, Glycine max
cgaaatcatttaagataagagtgcattactactaagaggagaactaatgaaagttgtatacttccttgttgctatcttggctttgacatccactgtggtctctgcctatgaccctagtcctctgcaaatttttgtgtggcggccaaagaaaaagatggtgtatttgtgaatggaaaattctgcaaagatcccaagcttgtgaaagctgaagatttcttcaaacatgtggaacctgcgaatactgcgaa

SEQ ID NO: 136861 - DNA, 250 bp, Glycine max
atgagcagcagtgcagggaagttggtgtgtgtcaccggtgctgccggttatattgcttcatggattgtcaagttcctacttgaacgtggttacactgtcagggccactgttcgaaacccaaatgatcacacgaaggtagaacatttgctaaaacttgaaggtgcaaaggagagactgcacctttttaaggcagatcttttgggtgaaaattcttttgactccattgttgagggctgtgatggcgtctttc

SEQ ID NO: 136862 - DNA, 254 bp, Glycine max
gttgttgaattttatagatgggatttggtctgcttgtggaggtgagaggatcattgttttcacgacgaattatgtggagaaacttgaccctgctttgattaggagagggaggatggataagcacatagagatgtcttattgttgctatgatgcattcaaggtgctggccaagaactacttggatgttgagtctcatcatttgtttggtgcaattgggggattgttggaagaaacagatatgtccccggctgatg

SEQ ID NO: 136863 - DNA, 260 bp, Glycine max
ggaggttatgtgggtccctccacttttatatacacaacaacaacaacacacatactagtcatttgttgttgtgttctcctttcattaaggttgtgttgtgtttgttgggcttcgttactgtactttggtttcattattatggcgccgtcttcttcagcttctgcttctcgtgagggacactacagaggggttaggaagcgaccatggggacgctacgccgcagaaataagagacccatggaagaagacacgtgtctggct

SEQ ID NO: 136864 - DNA, 265 bp, Glycine max
ccacgctcgtcttcgtcgactgcgcctcacgcgacctcgtcctcgaagccctatccctcttccctgaaaatcaaagtcaacgcccaaccctaattctcatcacagacgaaaccatcgagaaagcctcacccaccgtcgatttcctcgacacatacgactagcttgtaagcaagggcgatccgggattctagtgggttctaccgaactccgagtgggacccgatcgtacttaactacacttcaggaacgacgtgttctcccaaagg

SEQ ID NO: 136865 - DNA, 269 bp, Glycine max
gtacatagaggagaagcacaaggcggtgcttcctgcgaatttcaagaagatactaggtctgcaactgaagaaccaagctgcgagagggaaactcgtcaagatcaaggcttcgtacaagttagccgaagccgcgaagaaggtgaaggagagcaccgccaaagcgacgaaggaatcgcgtccgaaacgaaacaaaatcgcaaccgccgttgctccgaagaaaaccgaggcggttaaaaagcccgcgaagaaggtcgggccgaagaaaacga

SEQ ID NO: 136866 - DNA, 249 bp, Glycine max
cgcgtccagtgatgcagtcaatgatgaacagaataagactcttctagaccaagcagaagaagatgatgatgaagaagaaggacaacaaaagactaagacacagttgaagcctaagaagacaaatcagaagagacagagagaaccaagcattcgcattcatgacgacaagcgaggtcgatcatctggaagatggatacagatggagacagtacggtcaaaaggccgtgaaaaacagcccctttcccagga

SEQ ID NO: 136867 - DNA, 248 bp, Glycine max
cggcccgtcttgaaacacggaccaaggagtctgacatgtgtgcgagtcaacgggcgagtaaacccgtaaggcgcaaggaagctgattggtgggatccccctgtgggttgcaccgccgaccgaccctgatcttctgtgaagggttcgagtgagagcatacctgtcgggacccgaaagatggtgaactatgcctgagcggggcgaagcagaggaaactctggtggaggcccgcagcgatactgacgtgca

SEQ ID NO: 136868 - DNA, 247 bp, Glycine max
catcgcgctgatgggcaaaactgtggcaactttctcactgatcggccatctaccaaggttcatgctgccccgggtggtggatcttccttgcattacctctttggtggtcctccagggaactgattcatacctaccatgtgatgtatcatgtgtaaaatggatagtgttgcattgtgtttagaccagtggactttgtttcttgttcaattgaatctcttgacaatgttggtgtggcttgatggccaaa

SEQ ID NO: 136869 - DNA, 245 bp, Glycine max
  unsure (1)..(245): unsure at all n locations
ctcagaattctctaaaagagatctccttctgctctttgaagaaagaagggtttttgcttgattttggagatgtctctgctctcagatctcatcaaccttagcccttccgatactcancgagaaggtgatcctagagtacatatggatcggtggatcaggaatggacctgaggagcaaagcaaggactctcccaggaccagtttagcgacccttcagagcttcgcatttggaactatgatggttcc

SEQ ID NO: 136870 - DNA, 172 bp, Glycine max
gtcaagaaaaacggcgaaaaggtaaactcgctattgtgcggacttgtacgccgtgacgccgtcgttcttggtggtggacgttacgaaggacaacggtgacaccttggagtataaccagttctgtagcaaagagcttcgtccaactcttaaagatatcgtgtggaggacttct

SEQ ID NO: 136871 - DNA, 250 bp, Glycine max
cagaggttgggttgagactgctcctttcacccgttacttccaaccttcttctccgcacagcatgctgttcaatagggcttgcgcttcccgtgtattccacgtttaaagctattgagaccaatgacccatatgagcaacaaaggtgcctattgtattgggcagcttatggttcttttagtgctgcagaaatgtttgctgaaaaattattttcctggattccactctatcatcacatgaagtttgcatttct

SEQ ID NO: 136872 - DNA, 254 bp, Glycine max
ctgcgattttcgattctcttatctgcaactatgtctaaccccaaggtcttcttcgacatgaccatcggcggtcaacctgccggccgcatcgtgatggagctctacgccgacgtgactccgagcaccgccgagaacttccgcgcgctctgcaccggcgagaagggcgccgggcggagcggcaagcccctccactacaaaggctcgtccttccaccgcgtgatcccgaacttcatgtgccacggaggcgacttcac

SEQ ID NO: 136873 - DNA, 224 bp, Glycine max
ttctaccatgcatcatctccgctggtgacagctctaaatgagggtcgagatgtgatcatggatggtaccttatcatgggaaccatttgtggagcaaactattgctatcgcaagaaatgttcacaaacacaggtaccgaatgggggtatggtataaagtacctgaacatgggacagttactgagaattactgggagcaagtacatgatgcagaggatcatcaatc

SEQ ID NO: 136874 - DNA, 260 bp, Glycine max
ctcatctcacacagcacatgagcgaagcctcatcctagagttaagaaatcgcagcagcttcttccatgggtctctcaatccccatccttggctggcaatgccgtgaagctgggctcatcagccccagaagtccgaacggtgagcatgcggatgaccgtcaccgagcaggactcctcacgtaccccatggtacggcccacaccgagtcaagtacttgggctcattctctggcgagaccccgtcctacctgaacggtgagtt

SEQ ID NO: 136875 - DNA, 260 bp, Glycine max
cttgtagatccagaaagggcagcatttgaggaagaaatagacaaactttcccgtgagaaaacttctcttgaatccaatatttataacttcaaacaacatcagtcaacagcaaagcctaagctagaagattttctgcagcgattagatggtattgagcagaggagaaacaattgctgaacttctttgagaaggctcttcagaatcctacttttgttgaacatctttcacgcaaaatcgagcacgtggatttatctgcatat

SEQ ID NO: 136876 - DNA, 260 bp, Glycine max
ctcattctcattcgttcactgtcactttacccaatcctaacactttcttctctctgttttccttcttcctcgcatcaatggagttggacggcgttctcctcggcatgtgcaaccctctcctcgacatctctgccgtcgtcgacgacgctttcttgcaaaaatcggtatcaagttgaacgatgcgattctcgccgaggataaacacaaacctatgtatgaagaattggctaacaatcctaatgtggagtacattgctggag

SEQ ID NO: 136877 - DNA, 257 bp, Glycine max
agaatggctcccaagggtttaatctttttggctgtgttatgcttctcagcactgtcactgagtcgttgtcttgcggaggataatggacttgttatgaacttctacaaggaatcatgccctcaggctgaagacatcatcaaagaacaagtcaagcttctcacaagcgccacaagaacactgctttctcctggctcagaaacatcttccatgactgtgctgttcagagttgtgatgcttcactgttgctggactccaca

SEQ ID NO: 136878 - DNA, 258 bp, Glycine max
aaaaaacttgttacgatggtttcttccgacaaggatccacgagaggaagtccttcaagcatggtacatggatgatagtgatgaagatcaaagactcccccaccacaaagaacccaaggagtttgtctcgttggaccaacttgctgaacttggagtccttactggaaattagatgctgataaccatgaaaatgatccagagctgaaaaagattcgtgaagagcgtggctacacctacatggatgtttgtgaggtctgcc

SEQ ID NO: 136879 - DNA, 260 bp, Glycine max
tgatgttgaaggagaaggagaggaaggagcaggaattgagggcattggcgcagaaggcacggtctgaaagaattggaggggagagaattggggttgtaccagccgcgccaccagctgtggcggtggatgaggacgatatgagagttgattatgagcatgagaggagaatccgatggagagggatagggagaggagttttgtgaaggagagtagggaggagaaggaggagaggatgcagcgcgagaacattcgtgaggaga

SEQ ID NO: 136880 - DNA, 258 bp, Glycine max
ctcttcaggaagtgtatgtagcccgttgagaagtgtttgagggctgctaagatggacaagagcactgtccatgacgttgtccttgttggtggatccactagaattcctaaagtgcagcaattgttgcaggatttcttcaatggcaaggagctttgcaagacattaaccccgatgaggccgttgcttatggagcagctgtacaggctgctattttgagtggtgagggcaacgagaaggtgcaggatttgctgttgttgg

SEQ ID NO: 136881 - DNA, 257 bp, Glycine max
ggaatgtaagggctggtcaatttactgttgtaacctcaccattaccgattatttccagacctaccagttcgagaatctgttctccaagcggaactcgccggtggcgcacgcggtcggattttgggactaccactccttcatcgccgccgccgcgcttttgagccggaagggttcggcaccaccgggaacaagacgatgcagatgatggagatcgccgccttcttcggacacgtcggcagcaagacctcttgtggtta

SEQ ID NO: 136882 - DNA, 258 bp, Glycine max
aagcaaactagcacagcagagatgttggacttggctttagactacataaaagatcttcagaaacaattcaagactctgagcgataaacgggctaaatgcaaatgtataaacatgcagaagtcagaagcagatcgagttgcttgagtttcttttgtacaggtataaaaggaactatgcaaaacttgaataggacccgggttttatattttgacgtgctgaaaaatcaaatagatcaagaaagctaatataagatgcaga

SEQ ID NO: 136883 - DNA, 256 bp, Glycine max
tgaaaatggctacttcaagatggaattggggaagaacatgtgtggtgttgcaacttgtgcatcttatccaattgtggcataaattgcataacaatatggtccctggtgactaccaccttgtcatgcttcagagtttagagcgtattgctgatgccagattgatgaatgatgattaaagataagtgtaattgtatgatgaaaattgctcctagttgggttggcatgatgtataaaataagctagaagttgttgtaaa

SEQ ID NO: 136884 - DNA, 251 bp, Glycine max
ggctgagaacattcccgatatggaggagggtaccttggagattggaatcgaatacagaactgtatctggagttgctggaccattggtcattcttgacaaagttaagggacccaaatttcaagagattgttaatattcgtttaggagatggaactactcggcgtggacaagttctagaggttgatggtgaaaaagctgttgttcaggtatttgaaggtacatctggaatcgacaatagatttacgactgtgc

SEQ ID NO: 136885 - DNA, 254 bp, Glycine max
ctcttcttctcttgcggctagggttttagcgcagttcttctagatttaaggaagatgggtaaggaaaaggttcacatcagtattgtggttattggccatgttgactctgggaagtccactaccactggccacctgatctacaagcttggaggcattacaagcgtgttattgagagatttgagaaggaagctgctgagatgaacaagaggtctttcaagtatgcctgggtgcttgataagcttaaggctgagcgt

SEQ ID NO: 136886 - DNA, 255 bp, Glycine max
aatgatgctaaggctgcaaagaagggtggagatatacagttcaatggccttgttgatgtctacaggaagacattggcatctgatggtgttgctgggctctaccgtggtttcaacatctcatgtgttggaatcattgtgtatcgtggtctgtactttgattgtatgattccgtgaaaccagttgtcctcaccggatcattgcaggatagcttttcttgccagctttgccctcggatggctcatcaccaatggtgca

SEQ ID NO: 136887 - DNA, 256 bp, Glycine max
cttctattacaacatcgcccgcaaccatgaccatggctgcgatcgtgctcctgttcacggtctttgccgtttcctccgccctagacatgtcgataatctcgtacgacagcgcccacgcggacaaggccgccacgttgcgcaccgaggaggagctgatgccatgtacgagcagtggctcgtgaagcacgggaaggtgtacaacgcgctcggcgagaaggagaagcgcttccagatcttcaaggacaacctgcgattc

SEQ ID NO: 136888 - DNA, 257 bp, Glycine max
ctcgagccgtttacagagtgaagattttatttttctttctttctttggaagataaagaatgggttctaagtccgaaaccgtttgcgttactggggcttctggttacatcggatcatggcttgtcatgagactcatcgagcgtggctataccgttcgagcaccgtactcgacccagctgatatgagggaggtgaagcatttgctggatctgccaggtgcagagagcaagctgtctctgtggaaggcagaacttacaga

SEQ ID NO: 136889 - DNA, 255 bp, Glycine max
cctaaaccccgttttcggtgagatcgagatcgatcgaacatggatgaggagtacgatgtgatcgtgttgggcacgggtctcaaggagtgcattctcagcggtcttctctccgtcgatggcctcaaggttctgcatatggataggaacgactattacggagagaatccacttcgctcaatcttattcagctttggaagagattcaggggagatgacaagcctcctccacatttgggcgctacagggactacaacat

SEQ ID NO: 136890 - DNA, 251 bp, Glycine max
tgaaaatggctacttcaagatggacttggggaagcacatgtgtggtgttgcaccttgtgaatcttatccaattgtggcataaattgcataacaatatggtacctggtgactaccaccttgtcatgcttcagagtttagagcgtattgctgatgccagtttgatgaatgatgattaaagataagtgtaattgtatgatgaaaattgctcctagttgggttggcctgatgtataaaataagctagaagttgtt

SEQ ID NO: 136891 - DNA, 253 bp, Glycine max
cagcaacagatttctgaattgcaagaagagaagaggacattagagagggagctagcaagggtaaaagtttcaaccaacagaattgcaaatgccgtggctaatgagtggaaggacgaaaatcataaggtcatgcctgtcaggcaatggctggaagaaagaggattatgcaggcagagattcaacggttgaaagacaagcaagctatatcagagagaacagctaaggcagagtcccaattgaaggataaactgaa

SEQ ID NO: 136892 - DNA, 252 bp, Glycine max
gtaaccaatcatctttagttcttcagtaatttattgtgggattctattctaagattttgagaatgtctagctgtgggtgtggaagcagctgcaactgtggcagcaactgcggttgcaacaagtactcttttgacttgagttacgttgagaagacaacacagagactctagttttgggtgttgggcctgtgaaggccaattggagggtgctgaaatgggtgttgcatctgagaacggtggctgcaactgtgga

SEQ ID NO: 136893 - DNA, 255 bp, Glycine max
cttctgttcagcttagacactcatttttattagttttgttgctgagtgtgtgtgaaactgtgaaagagagttatggcaggaggtggtggagctccagcacctaagattgatgagccacaacctcatcccccgaaggatcagttaccgaatgtttcttctgcattacgagtcctcctccatggcctgaggccatacttcttggttttcaacattatcttgtgatgctcggtacaactgtgctaattcccactgctc

SEQ ID NO: 136894 - DNA, 254 bp, Glycine max
gatcctgccaccagtgacatcagagagcaggagtgggtgtgtgcacctgttccaccagctgctgctgataggaaagtggagatcactggccctgtggacagaaagatggtcatcaatgctctcaactctgcagctaaagtctttatggctgatttaaagatgcactgtcaccgacctgggaaaatcttattagtggtcaagtgaacttgaaggatgctgtggatgggaccataagcttccatgacaaagtaagg

SEQ ID NO: 136895 - DNA, 253 bp, Glycine max
ctctccgcagcagccacacttcttcgccgtttcagctgaagagccatccgcaggtaagcaatggttaagcataataatgttatccccaatgggcacttccggaaacactggcaaaactatgtgaagacttggtttaatcaaccagcccgaaagaccgaagacggttggctcggcagaagaaggctgtcaagattttccccaggcctactgctggatctctcaggcctattgttcatggccagactctgaaata

SEQ ID NO: 136896 - DNA, 266 bp, Glycine max
tcggctcgagtttgggtttctcttcctcccttggagaaaaagaagagccaccgctgcgacgccgttcgtgcatttttgaggtgccgctgtcatgtatgggcgtggtggaccaaggaggagtgataactccaaatattgatgatattctcgggatttccaaaaatgccatgaagatgaaatcaagaaggcctatagaaaggcggctatgaagaaccatccagataagggaggagatcctgagaagtttaaggagttaggtcaagcat

SEQ ID NO: 136897 - DNA, 254 bp, Glycine max
accgtttacggcttcaatgccaccatccccaacttcctcacctcaagttttcaggtcacgctttcctcgcgcaaccccaacgacaaaatcggaatctactacgaccgtctcaacacctacgtaacttaccggaaccagcaggtcacgtaccgaactcaatcccaccctcgtaccaaggtcacaaggaagaggatgtgtggtccccgtttgtctacggcactaatgtccccgtcgcaccctacaacttcgttggc

SEQ ID NO: 136898 - DNA, 252 bp, Glycine max
tgcatctgattcgttcgttcactttcactttaccaactcctaacaatttctctctgtttccttcttcaccgcatcaatggagttggacggcgttctcctcggcatgtgcaaccctctcctcgacatctctgccgtcgtcgacgacgctttcttgcaaaatacggtatcaagttgaacgatgcgattctcgctgaggataagcacaaacctatgtatgaagaattggctaacaatcctaatgtggagtacatt

SEQ ID NO: 136899 - DNA, 251 bp, Glycine max
aaaccctaaacgactctatctctcttcgttttgttcttccttgcgctcctcctcgttcgttcgttctccctcgcgtagatcggcaatggcggagaccgagacgtttgctttccaggctgagatcaaccagctcctcagtctcatcatcaacacctctactccaacaaggaaatcttccttcgtgaactcatcagcaacgcctctgatgctttggacaagattagatttgagagtttgacggacaagagcaa

SEQ ID NO: 136900 - DNA, 251 bp, Glycine max
atcgccgcaagaaccgttctttggaaagtctgcaagctaatgtgcagaggctgaaaacatacaaggccaaattggttgtgttcccaagacgggcacagaaggttaaggctggtgattctactcccgaggagcttgcaaatgcaacgcaagtccaggttctttcttgcctattgtgagggagaagccaactgttgaacttgtaaaggttacagatgacatgaaggcttttaaagcttattacaagcttcgac

SEQ ID NO: 136901 - DNA, 253 bp, Glycine max
cttgtgtgtggctggaggagagtttgaagaagtttgaacgtattctggttgtgatttcacactctcaggactttcttaatggtgtctgcacaaatattatccatatgcaaagcaaaaaactgaagatctacactggtaattatgatcaatatgttagacacgttctgagctagaagagaatcagatgaaacagtacaagtgggagcaggagcagattgcctcaatgaaggaatacattgcccggtttggccat

SEQ ID NO: 136902 - DNA, 249 bp, Glycine max
gaaagattttagagttataattgtgatgcccctcttgcctggtttccagggtggtctggatgatggtggtgctgctactgtaagagccttaacacactggcagtatcgaacaatttctagagaaaatcactccatattagacaatcttgaagtatacttggtcctaagacacaagattatatttctttctatggtctacgatctcatggcagactttatgaaaatggccctgtggctacaagtcaggta

SEQ ID NO: 136903 - DNA, 245 bp, Glycine max
caacatcatacaatggcttgaaatcgatggtaattgaagaactgaggtcatattttcgtccagaattgctcaacaggatagatgaagtggtagtatttcaaccccttgaaaagtcacaggttcgtgaagttttggttatgattaatagctcacggtaatattaatagtcacttggtaggctcttagtatatcatttcagtcgtgtttgttagcaataattttgattttctttacagaaactaaat

SEQ ID NO: 136904 - DNA, 249 bp, Glycine max
ctcattctgagctgcaggttgggtattacagctattcatgtagcatggctgagttcattgtgaaggatgaagtcagaaaaggtgttactaataatcctggaattgcagctgggctagtaagaatgcattttcatgattgctttattagaggggtgatgcatcagtgcttcttgattccactcccttaaacactgcagagaaagactctcccgcaaataaaccaagtctccgaggatatgaagtcattga

SEQ ID NO: 136905 - DNA, 266 bp, Glycine max
attcggctcgaggtgatgtatgatgctactggtgtaagattgcaagcaggacgccaagcagagcttttgaaccaaatcgtatacgaacttcctgctgaacatcctctggctgaaagcagaccactccgggaacttcttgggcatactccgcctcaggtcattgctggggcatacttggacttataactgcagctattggctatctaataaccatggctagtagttgaaattgaggattccttgttggcatccccagaggaaccttg

SEQ ID NO: 136906 - DNA, 248 bp, Glycine max
gtcgattaatatttacagagtgaagattttatttttctttctttctttggaagataaagaatgggttctaagtccgaaaccgtttgcgttactggggcttctggttacatcggatcatggcttgtcatgagactcatcgagcgtggctatacgttcgagccaccgtactcgacccagctgatatgagggaggtgaagcatttgctggatctgccaggtgcagagagcaagctgtctctgtggaaggca

SEQ ID NO: 136907 - DNA, 253 bp, Glycine max
ctagtaacaaagatccaacaagcagatcaatctctctctctgtctcccaatcaaaacagacatgggtttgaaggaggattttgagcagtatgctgagaaagcaaagactttgccaccgactcaatcaaacgaagacttgcttatcctttatggatgtacaagcaggccaccgttggacctgtcaacaccagccgtccgggaatgttcaacatgagggacagagctaaatgggatgcatggaaggctgttgaag

SEQ ID NO: 136908 - DNA, 251 bp, Glycine max
gtctaagggacttgtcttctcccggaaaaagtggcagcattttctatctttctaaagatgatagatttgtgataaagactgtgaataaatctgaactaaaggagatcatgaaaatactcttataacaaaattcttcgggctccatcggataaattaagaggtggaaaaaaggtgcgttttgtggtcatggggaatgtgttttgcacagaactacaaatccaccgccgatatgatctgtaagggtctaaaca

SEQ ID NO: 136909 - DNA, 244 bp, Glycine max
agataagatcaccttagaaactgcaaagcttttgagagaggattatcttgctcaaaatgcctttacaccatatgataaattttgccccttctacaagtctgtttggatgatgcgcaacattatccatttctacaatttggcaaatcaggcatagagaggggagctggttcagatggtcagaagatatcttacacccttatcaagcatcgtatgggagatctgttctaccgattagtgtctcaga

SEQ ID NO: 136910 - DNA, 247 bp, Glycine max
aacagatgcacaatccggggtatgttatggaagacttggcaacaacttaccaacccctcaagaagttgtggccctctacaatcaagccaacattcgcaggatgcgaatctacggtccaagcccagaagtcctcgaagcactaagaggttccacattgagcttttgctagacattccaaatgacaacctcagaaacctagcatctagccaagacaatgcaaacaaatgggtgcaagacaacatcaaaa

SEQ ID NO: 136911 - DNA, 246 bp, Glycine max
aagacgatgcaccactctcagatgcagtgcgtgatgaaacaaaggccaggggtgctggaattttcaaggccattgagggctacgttttggcaaatcctgctcaatgattatccttcaaaccacttgcatgcatgcaataataattatatagcttatgatctggttgttggagttaatttgtatcatgtggctttgtttggtttaattaatttcctttgtgagcaagtgtcggttttatttatgtaa

SEQ ID NO: 136912 - DNA, 247 bp, Glycine max
agacgggaaagttgtcggggtctttctggaaggtggaactcctgaagaaaaccaggctattgctaaagttgctaaggtccagcctccggttgcggatgtaaatcaacttgctaaggaaggcctttcctttgctagtaaaatataatggtttatttgggaaggataaaaatgcttggtggtttgcatagattgtatctgacaggctttattttactctggtttatgcattactgtgttttttcgtttg

SEQ ID NO: 136913 - DNA, 246 bp, Glycine max
cagggttaagcggtgagatttgcgaatctgagaaatggcggattcttctcgggaggagaacgtttacatggcgaaattggcggacaggccgagcgttacgaggagatggttgagttcatggagaaggttgcaaagactgtggaggttgagagttgacggtggaggagaggaatctcctctctgtggcttacaagaacgtgattggtgcgaggacggcttcgtggaggatcatatcctccattgagc

SEQ ID NO: 136914 - DNA, 249 bp, Glycine max
gtcaagaaggagaagctcgacaagaagaggaagactgtctctaaggaggaagcgtctgccatcaaggctgctgggaaagcatggtatcacactatggtgtcagattctgattatacagaattcgacaacttttctaagtggttgggtgtttcacagtaaacttcatgatttattttttcgtattagaattttgttttttatgctcatcagaactaaatatccttatctttggtttttttgttttgcggg

SEQ ID NO: 136915 - DNA, 249 bp, Glycine max
accggtcccaacaaccccatgtgatgggcgtgggccgtgtgtggttggaagtggctatgttctcatagcaaggtcatccaaccacacttgccctcttagtgttgcggtggtggagggtttccgtggcctagcagtcacattcaaactagttaccctaaaaaaggggtcattagggtttctactgacttgaacatcaaaacctccctaactaacacaagttgtagtgagtccacggtctggaagctagat

SEQ ID NO: 136916 - DNA, 244 bp, Glycine max
atttaaaaccacttcgattatccccttcttgccaggttcgaagtggcttccttgcaacgagtccgttcccgaccccacctcctgggaggtcgacaaaggtggcacgcgacgcgtcgtttcggaaacagaatcgaattttgccaagattagtggctttcgcggttgatgaacgtgtgttccgaagacgcgaaggctgcgttcactgctcttaccgttagtttactctttaaatcgtccttggctg

SEQ ID NO: 136917 - DNA, 244 bp, Glycine max
ggaacctgattcaatcgattcgctgttgccttcgaatttcgttccttggaagattagggagcaatggcaattgcagccccagggcatctgaacgtgaatgaatcacccatttggggatctagaagtgttgattgcttcgagaaattgagcaaattggcgagggcacatatggtcaggtttacatggctaaagagatcaaaactggtgaaattgttgctctgaagaaaatacgaatggacaatga

SEQ ID NO: 136918 - DNA, 245 bp, Glycine max
agttgcttgggttggctgggaatccctctgctgattcagtcttcaagaatcaggatcttaacatggatgttctttatcgtactggtgagacacagcagggtatcccttcatatactcctcgcctactttcaataaacttaagaggatccttggatctatgagttcacgtggtacgttgtatacggaggttgcttccacaacaccagatgttctcacctggactggtagagtttccacccaagcct

SEQ ID NO: 136919 - DNA, 250 bp, Glycine max
cttgaaaggtttgaaacttgttactgtggaccgtccttttgctgagaagcactatgctgatttgtctgccaagcctttctttagtggtttggtggattacattatctctggccctgttgttgccatgatctgggagggcaagaatgttgttacaactggccgaaagattatcggagccacaaacccagctcaatctgagcctggaactatccgtggtgactttgccattgacattggaaggaatgttatc

SEQ ID NO: 136920 - DNA, 244 bp, Glycine max
accattcgtattgtcgcagagagagagaaccctagctcaccgtgtcaagatgcaagtcgtcgggaagagtctcacgggtaagaccatcactctcgaagtcgagagttcagataccatagagcttgtaaaggccaaaattcaagacaaggaagggatcccaccagatcagcaacggctcatttttgctggcaagcagcttgaggatggacgtacccttgctgattataacatccaaaaggagtcc

SEQ ID NO: 136921 - DNA, 242 bp, Glycine max
ctccaccataactatttcaacaagtttgtctccgtagcagatgttttagtcgtttccgtcgagtataggttggctccagagacccttcttcctgcagcttatgatgactgctgggatgctcttaaatgggtcgccaccaacaccgaaccatggcttgtcaaacacggtgatttcaacagagtcttcattggaggtgacagcgctggtgctaatatagttcataacattgccatgcgtgctgg

SEQ ID NO: 136922 - DNA, 241 bp, Glycine max
gtgttattccaccgggtgaaaatccaaagaaacctggggctcctcataatgttcgactatattcaattgcttctacaaggtatggagacttttttgatggaaaaactgccagcttgtgtgtgcgtcgtgctgtttattatgatcctgagacaggaaaggaagatccttccaagaatggcatatgtagcaattttttgtgtaattcaaagcctggagacaaaattcagatcacaggcccttc

SEQ ID NO: 136923 - DNA, 244 bp, Glycine max
cagatattgttcggccaagaggtcaagctcatccaattggcagctctactccctactttggcccttcattaaagctagactttgagttggaaatggctactattgttggacctggaaatgaattgggaaaacctgttgatattaacaatgctgaagatcacatctttggacttgttgtaatgaacgattggagtgctcgagatattcaggcatgggaatatattcctcttggtccttttcttgg

SEQ ID NO: 136924 - DNA, 247 bp, Glycine max
ctctgcgctctcgaccacctccattccatgggcatcgcctaccgcgacctaaaacccgaaaatgtcctcgtccaaaacaccggccacgtcaccctcaccgatttcgacctctcccgaaagctcaatcccaaacctaaacctaatcctaaccctgtcatcgttccttcaatccccttgccaaattccaacgttccccaacctcgccgcaagcaccgccggaatttatcccggtggatctccttcttcc

SEQ ID NO: 136925 - DNA, 247 bp, Glycine max
atgactttatgaagtatgctcaagatgaggaagctgctgatgatcaagaggagacaggatggaaatacattcatggtgatgttttccggtttccaaagcacaagtctttcttttcagcagcccttggttctggtactcagttattcacacttacaatcttcatttttatgcttgcactggttggtgtgttttatccatataaccgaggtgctttatttactgcactggtggtcatatatgctctcac

SEQ ID NO: 136926 - DNA, 247 bp, Glycine max
ctcgaagcctctttctctctcttctagaagctatctgtgtttggtgttactaagtctccaacaagcaaagtacatggttgatttggaaatccaggtccccaccccattcgacccgtttgccgaggcgagagaatcggatgcccccggagcaaaggagtatgtgcatattcgaattcagcagaggaatgggaagaagagtctgaccacagtgcaagggctgaagaaggagttcagctacgagaagatc

SEQ ID NO: 136927 - DNA, 246 bp, Glycine max
ttcatcattcatcgctttccaccaggcacgcagattctctccttccttctctctatccaaattttgattctttcgatcaaacccgcaacacccacctcaccaaaaccctacgcaacccatccatgacgcttggcttaggaggatccagtgtcgtggttcctaggaacttcagattgctggaggagcttgaacgcggagaaaaaggaattggagatggcacagttagctatggaatggatgatggtg

SEQ ID NO: 136928 - DNA, 243 bp, Glycine max
agaggctccaattttccaacagtgttcaccatacatggactctggcctgactataatgatggaacctggccgtcctgttgctctggatctagtgtcgatccaaaagagatattgacattgactaatagtttagagcaatattggccatcattgagctgtagcaagccatcattatgccatggtgggaaaggaacattttgggctcatgagtgggagaaacatggcacatgctcttatcctgtg

SEQ ID NO: 136929 - DNA, 241 bp, Glycine max
ggctggacttggggcagttggcctcacttgcttccgtgattcagtttatatggaggtacgagtcaatgctaggaaagctgtgattgcacttattgataaagaacgtgagggtgaacaaattgatagatcgttgttgaaaaatgtgcttgatatatttgttgagattggtatgggcgaaatggatcaatatgaacaggattttgaggtacatatgcttgaggatactgccgattactacaaa

SEQ ID NO: 136930 - DNA, 239 bp, Glycine max
ctatggctcgtcactccttgctcttagccctcctcctcttcgccgccgtggccaccgccgcgatggcgtggcgcgtccgacgccgacgacatcctgatccgtcaggtggtgccagatgttggcgaagccgaagaggaggacaacctgctgaacgccgagcaccacttcgcgaacttcaaggccaagttcgccaagacctacgccaccaaggaggagcacgatcatcgcttcggcgtact

SEQ ID NO: 136931 - DNA, 243 bp, Glycine max
attcgtgattttttccgaaaaccctcgtcttcgaaatcagcaacaaaaacgcgaagtgtactaagcgaagcattgcagcgtgagaatggggaagaaggcaaaagggtcaaggaagggtaagaaggcatggagagctaacatcagcaccgaagagatcgaagatttcttcgagaaatcaacgaaggacgctctttctggtggctctctacaagccgtttcttccgattctctcttctatgaaga

SEQ ID NO: 136932 - DNA, 246 bp, Glycine max
agagattcaaaacgctgcccccagcagagtctcttcctaggaatgaaaccattggaggctacatctttgtttgcaacaatgataccatggctgagaatctcaagagacaactctttggtctgcctccacgatacagagattctgttcgggccattactccggggttgccccttttcctttacaactattccactcaccaactccatggaatctttgaggctgcaagttttggagggtcaaatattg

SEQ ID NO: 136933 - DNA, 245 bp, Glycine max
gctgttcctcctgtcaaagaccaaggaggctgtgggagctgttgggcattctcagcaatcggtgcagtagaaggaataaataagatagtaacaggcgaactgatttcgttatcagaacaagaattggtggattgtgatactggatataaccaaggatgcaatggaggacttatggactatgcatttgagttcataatcaacaatggcggcattgattctgatgaggattacccataccgtggtgt

SEQ ID NO: 136934 - DNA, 247 bp, Glycine max
atcgatcgatcgatcgatggctctggtcggagttgaagtgaagcatgcggcggagggcgcaccggaggagaattgcaccgccaagcccaccaagcagggcgagggcctccgccactactattctcacaacatccacgagcatcagctccttctccgtcaaaagacgcataacctcaaccgtcttgaggctcagagaaacgagctcaattccagggtgaggatgctgcgcgaagaattacagcttttg

SEQ ID NO: 136935 - DNA, 247 bp, Glycine max
tgtaacttcaaaacatacacctcttctctctgtttctcttcactctctctctccctccctcttcaactaacatggcaattgaaaaccaagacaccgctgtcagagaaatcaagcccaagaacaggagaatcatgggtgctggagggcctgatgatgaggtcaataggtggccaccgtggttgaagccactgctgaaagagagcttctttgttcaatgcaagttgcatgctgattctcacaagagcga

SEQ ID NO: 136936 - DNA, 246 bp, Glycine max
ctatggtttagttacatatcgggagactgctttgctatatgatgaccagcattctgctgctgcaaataaacagagggttgcaactgtagtagctcatgaactagcacaccagtggtttggcaaccttgttacaatggagtggtggacacatttgtggctgaatgaggggtttgcaacatgggtgagctatttagccactgatagctgttttcctgagtggaaaatatggtctcaatttcttcatga

SEQ ID NO: 136937 - DNA, 245 bp, Glycine max
ctcgagccgaatcggctctaggggataaatttgggttccaggaggagaacaaatttgattctcttaacttaagcatgttgaacctggactctaaatttactgagaatgtgagcaaaagctcgcttcgaaatggtgtttatggtatgaatgcagtgtatcagaaaaacaatgcaaacttggtgagtaatgtgatcagtaacaagtacaatggtaatattcttcataacaaagagatcaacaacaac

SEQ ID NO: 136938 - DNA, 87 bp, Glycine max
tggactttgaaccattcaatgcagccttccctcgcccaactcttaacaagtcaattggaaatggtgtgcagttcctcaaccgccacc

SEQ ID NO: 136939 - DNA, 240 bp, Glycine max
ggcgccttcgcgtgcgccagggaggccgcgaaccgcctcaagcgcggcggcggagggcggatcattctactgacgacatcgcaggtggtggcgctgacgccggggtacggggcgtacgcggcgtcgaaggcggcggtggaggcaatggtgaagatcctggcgaaggaactgaaagggacgcagataacggcgaattgcgttgcgccgggaccgattgcgacggagatgttcttcgagggt

SEQ ID NO: 136940 - DNA, 242 bp, Glycine max
aacgccactggtatatccagagcacttgtgcaacttctggagagggtctctatgagggtttggactggctttctaacaacattgccagcaaagcatgagacatttgaaaaattttggtcttgtctggtgatttcatgcgagtctggcggttcttggagaaagatgcttatcttttctagcgaatgttgtaatagcagaatgcttgctagaagtattctcttttgtgtaacttgggtttgtat

SEQ ID NO: 136941 - DNA, 239 bp, Glycine max
tgactacttctgcttcgtcggtatcctcttctgttgttgtttgtgtgtttgttggtgcgcgcacctgagaatgtcttgctgcggtggtaactgtggttgcggaagcgcctgcaagtgcggcaacggctgcggaggctgcaagatgtacccagtcttgagctacaccgagtcaaccaccaccgagaccttggtcatgggagtggcaccatttaaggcgcaattcgagagtgctgagatgg

SEQ ID NO: 136942 - DNA, 245 bp, Glycine max
caagattctaagagagattttgctgctctttgaagaagggtgtttgcttgattttggagatgtcgctgctctcagatctcatcaaccttaacctctcagacactactgagaaggtgatcgcagagtacatatggatcggtggatcaggaatggacctgaggagcaaagcaaggactctcccaggaccagttagcgacccttcaaagcttcccaagtggaactatgatggttccagcacaggccaa

SEQ ID NO: 136943 - DNA, 243 bp, Glycine max
ctaaggcttatgagcttggcttggccactcgccttcctcaacctaaagatttggtgaagtttgcagagagctgtatgtataccccatcctaccgaagctaccggtgaagcgataataaatagcctatttttctttttccttttcgttttatcattttattgtcaattatttaatttttttaccttctttatgttgctgttctgttcttgtaagttatttgttgggttagtaggttaggacggt

SEQ ID NO: 136944 - DNA, 252 bp, Glycine max
gaaaatggtgtgacaaaggttccacggatgttctattgtgaacactctaatctcagtgatggattaaccacagaatcaaattcaaacttcactatcccctccatagacctcactggcatcaatgatgaccctattttgagagatgctgttgtgggaaaagttagatatgcatgtgaaaagtagggcttctttcaggttacaaaccatggaattccaactcaagttttggatgagatgatcaaaggaactggc

SEQ ID NO: 136945 - DNA, 242 bp, Glycine max
gaatcaaaccatggcagtgaaagtatacggtccccactgtgcttccaccaagcgggtgctggtttgtctggttgagaaggaagtcgaatttgaggttgtccctgttgatgtcactaagggggagcagaaggatcctgagtacctcaaactacagccatttggagttgttcctgtcatcaaagatggagattataccttatatgaatctcgtgctataatgaggtattatgcagaaaaataca

SEQ ID NO: 136946 - DNA, 241 bp, Glycine max
aactattgctgtgacaaagctagtagctgaagttcttgagaggaacaaattacctggtgcaatattcacctctttctgtggaggtgctgacattggtcaggcaatagcaaaagacactcgcattcccctggtttcatttactggaagttcaaaggttggcttgatggtccagcaaacagttaatgagagatttggcaaatgcttgcttgagttaagtggtaacaatgcaataattgtcatg

SEQ ID NO: 136947 - DNA, 242 bp, Glycine max
tgcacagtatgaagccattgccaatgatgacaccgtgtttacatttttaactaataaagatgctccaaaatataaaatagtccgagtagatttgaaagaaccaactgcttgggctgatgttctccaagagtctgaaaaagatgtactggagtcagcatgtgctgtaaatggcaaccaactgatagtaagttacttgagtgatgtgaagtatcttctacaagtaagagacttaaaaacaggat

SEQ ID NO: 136948 - DNA, 244 bp, Glycine max
ctcagaacctgattaaggagagtatggcacagtttagtggcaaaactttggtgcagtggttggtagcaacactgctgattgccttgttgggtggtgcacaagctgttgtgttatgtaacatcgactcaagtcaactaaacttgtgtcgtgctgcagttactggtcaaaaccctccaccaccagatgagaaatgttgtgcagttattcgccaagccaatttaccttgcctctgcagatacaagtc

SEQ ID NO: 136949 - DNA, 244 bp, Glycine max
gtaaccaatcatctttagttcttcagtaatttattgtgggattctattctaagattttgagaatgtctagctgtgggtgtggaagcagctgcaactgtggcagcaactgcggttgcaacaagtactcttttgacttgagttacgttgagaagacaaccacagagactctagttttgggtgttgggcctgtgaaggcccaattggagggtgctgaaatgggtgttgcatctgagaacggtggctg

SEQ ID NO: 136950 - DNA, 244 bp, Glycine max
ccttatgtgaagaggtacatgatgtaccaacaaggttgctttgcaggtggcacggttcttcggttggccaaggatttggctgagaacaacaagggtgcacgtgtgcttgttgtctgctctgagatcactgcagtcacattccgtgggccaagtgacactcaccttgatagtcttgtgggccaagcattgcttagagatggagctgctgcagtcattgttggttctgacccaattccacaagttg

SEQ ID NO: 136951 - DNA, 238 bp, Glycine max
tagagcttcttggggggaaagcaggggtttcatgtggtaggtttcattacggcagtgcttttggggagagaagtggtcatgctgacaaggttgaaaccataagtgaaactcttgtgagtaaaggcttcaactacagtgggaaagatttcatttattcaggtgcttgataagatgcatgctcgtggtagtggccctcgtgtcatgttaactagacagcctacagaagggagagctagaa

SEQ ID NO: 136952 - DNA, 237 bp, Glycine max
  unsure (1)..(237): unsure at all n locations
aattgggtttacagaaacagaagcaagctttggcgaanagttgaatcttaggccacgacaagttgaggtgtggttccagaacaggagagccagaacaaagctgaagcagacagaggtggactgcgagttcctaaaganatgttgtgagacattaacagacgaaaacagacggttacagaaggagcttcaagagcttaaagcactgaaactggctcagcctctgtacatgcctatgcc

SEQ ID NO: 136953 - DNA, 238 bp, Glycine max
gctagtgagtgtgttgccaggagctgtgcattgcagtgtgcaattctcagcccaacttttaaagtacgggagtttcaggtcaatgaaagctttcctttctcaatttctctctcgtggaaaggtccaagttctgatgcacaggaaagtggaccaaataatacgcagagaacccttgttttccccaagggaaatcccataccaagtgtcaaggcactaaccatctacaggtcaggaacct

SEQ ID NO: 136954 - DNA, 242 bp, Glycine max
gaaacagagaaaagtaaggtgcgaaaagagtgaggcggagaaaaatgaagtgcccgtattgttcggcggcgcaggggcgttgcgccaccacgagcggcgggcgttcgatcacggaatgcacgtcttgcgggcgcgtggtggaagagcgacagtcgcatccccaccacgtgttccacgtgcgcgcccaggacaaccctctgtgtctcgtcacatcggatctcgctctccccgcgctcaatcaa

SEQ ID NO: 136955 - DNA, 247 bp, Glycine max
gttttccagactaaattagcaaaaattggagttgctatttgctgggactagtggtttcctgaggcagcccgagcaatggtgcttcaaggtgctgagattctattttatcccactgctattgggtctgaacctcaagatggaagcattgactctcgtgaccactggaaacgagtaatgcaaggacatgctggggctaatttggtacctcttgtggcatcaaataggataggaaaggagataattgaga

SEQ ID NO: 136956 - DNA, 236 bp, Glycine max
atcgagccgaatcggctcgaggtggttgcggcggcgcggaggagccggccggagcagggttgaagcacaaactggagcgaaaatggacgttttggtgcgacaaccaatccaaacccaagcaaggcgctgcttggggaacctctcttcgcaaggtctacaccttcgacaccgttgaagagttctggtgtttgtatgatcaggtattcaagcccagcaagttgcaaatcaatgccgat

SEQ ID NO: 136957 - DNA, 257 bp, Glycine max
gctcggcggttcggagtcgcgccataactatttcaacaagtttgtctccgtagcagatgtcttagtcgtttccgtcgagtataggttggctccagagacccttcttcctgcagcttatgatgactgctgggatgctcttaaatgggtcgccaccaacaccgaaccatggcttgtcaaacacggtgatttcaacagagtcttcattggaggtgacagcgctggtgctaatatagttcataacattgccatgcgtgctg

SEQ ID NO: 136958 - DNA, 229 bp, Glycine max
gcaggaattaatggtggcatggctttgagggatggaactgatgcatctggcaggaaaggaaagggaaagggtgtttaccagtttgtagacaaatacggtgctaatgtcgatggttacagtcctatctacgacaccaaggactggtctccaaccggtgatgtctacgctggcggtacgactggcttggctatctgggctgtgactctacttggtcttttagctggtggtg

SEQ ID NO: 136959 - DNA, 239 bp, Glycine max
ggccaacctcgccccggtggtctcagagctactttgtgtatttcttctcaggttggatgcaaaatgggttgcaatttctgtgccactggatccatgggattcaaaaacaacctatcatccggtgaaattgtggaacagctcgttcatgcctctaccttctcacaaatccgtaatgttgtcttcatgggcatgggagagcctctcaacaactattctgctgtggtagaagccgttcgcat

SEQ ID NO: 136960 - DNA, 241 bp, Glycine max
gaacaaatggtttgctcttcaagcaatgtctgacattcctggtaatgttgagaatgtgcggaaactgttaagccacccagcattcgatctgcgcaatcccaacaaagtgtactctctcattggaggtttctgtgggtctccggtgaactttcatgcaaaggatgggttaggctacaagtttttgggagagattgtgctgcaacttgacaagctaaatcctcaggttgcctcgagaatggtg

SEQ ID NO: 136961 - DNA, 244 bp, Glycine max
gcaccggccgccggccatgacattcaagcgcaggaacggaggtcgcaacaaacacggccgtggccatgtcaaattcatccgatgctccaactgcggcaaatgctgccccaaggacaaggccatcaagaggtttcttgtgaggaacattgttgaacaggctgcagtcagagatgtgcaggaagcctgtgtctatgaacaatacacgcttccgaaactatatgtgaagatgcagtactgtgtttcc

SEQ ID NO: 136962 - DNA, 243 bp, Glycine max
gagaaagttctctctctttgactcacaaccctattgcgtgctttgcaatcgaccccgcttatggccaacagtaacctccctcgaagaatcatcaaggaaacgcagcgtttgctcagtgagccagcgcctggaattagtgcgtccccttcggaggacaatatgcggtatttcaatgtgatgatccttggcccgactcagtcgccatatgaagggggagttttcaagttggaattatttttgcca

SEQ ID NO: 136963 - DNA, 239 bp, Glycine max
cagaggttgggttgagactgctcctttcacccgttacttccaaccttcttctccgcacagcatgctgttcaatagggcttgcgcttcccgtgtactccacgtttaaagctattgagaacaatgacccatatgagcaacaaaggtgcctattgtattgggcagcttatggttcttttagtgctgcagaaatgtttgctgaaaaattattttcctggattccactctatcatcacatgaag

SEQ ID NO: 136964 - DNA, 246 bp, Glycine max
ctaatttgatgaagctccgttctgattataaggatgcttttgttgaaaagcatggagtcaaattggggcttatgtctggctttgtgaaagctgctgttaatgcactccaacatcagccgattgtcaatgcagtcattgatggtgatgatattatatacagagattatatagatatcagcatagctgttggtacttcgaagggccttgttgtaccggttatccgcaatgctgataccatgaactttg

SEQ ID NO: 136965 - DNA, 251 bp, Glycine max
gcaaatggcttcctcaatgatctcttccccagctgttaccactgtcaaccgtgccggtgccggcatggttgctccaataacctggcctcaagtccatggctggcttccccaccagaaagaccaacaatgacattacctccattgctagcaacggtggaagagtgcaatgcatgcaggtgtagccaccagttggcaagaagaagtttgagactctttcctacctgccagaccttgatgatgcacaattggca

SEQ ID NO: 136966 - DNA, 241 bp, Glycine max
ggggtatactcaccttgaagtatcctatagagcatggcatagtcagcaactgggacgatatggagaagatttggcatcacacattttacaatgagctacgtgttgcccctgaagaacaccccgtacttcttaccgaggcaccactcaatcccaaggccaacagagagaagatgacccaaattatgtttgagactttcaatgtgcctgccatgtatgttgcaattcaggctgtcttgtctct

SEQ ID NO: 136967 - DNA, 239 bp, Glycine max
gcaatttgcagtacgtaacatcaactagcttccttctcttgacatacgccaaatatctgaacacaaacggcggtaatgtagttcgatgtgggacttcagcagtcacgggcgaaaacctagtaacactagctaaagcacaagtggactacattctgggcaacaatccaacaaagatgtcttatatggtgggttttggagagaggtatccaaagcatatccaccacaggggttcctctctg

SEQ ID NO: 136968 - DNA, 239 bp, Glycine max
ctttctccgagaacaaaaaaaaaaacgtgattcgctcttctcttagaataaaccacaaaaccaacaaacgagaagaggagtgagagaagatggggttgtcgttcacgaagctgttcagcaggttgtttgcgaagaaggaaatgaggattctgatggtaggtctcgatgctgctggtaagacaaccatcttgtacaagctcaagcttggagaaatcgtcaccaccatccccaccatcgga

SEQ ID NO: 136969 - DNA, 239 bp, Glycine max
tttaagctctagcagttaactaacaatattagcatttgctagtgattaggaatataaagatacgccaaccacaaacagtttaagatggcctccaaaacatgttcatcccttgctcttttcctcacactcaacctcctcttcttttcacttgtctctgcatgcggtagttattcatgccctagtccaaagccaaagccaaagcccaagccaaagcccaaccctaaccctagtccttctgg

SEQ ID NO: 136970 - DNA, 238 bp, Glycine max
ggcttctctctcttgctccgccaacgaccttgccccactcttcaacgacaccgccgccgccaactacctctgcgcccaattcgattccatttctagaaagctcgccgaaacaacctacgccgtcgacaacacctaccttctgttttcagcgtatcttgtcttcgccatgcagctcggcttcgccatgctctgcgccggctccgtcagagccaaaaacaccatgaacatcatgctcacc

SEQ ID NO: 136971 - DNA, 239 bp, Glycine max
tttacatatccagaattatcttctgctctagaaaagatgttcagctgttttactatgagtaaatgtggatctcatggaattctgggcagggagatgctgaatgaaaccaagctgaaggaccttcttcatggatcagaatatgttcttacatatgaggacagagagggcgattggatgcttgtgggtgatgttccctgggagatgtttattgaaacatgcaagaggctgaggatcatgaa

SEQ ID NO: 136972 - DNA, 241 bp, Glycine max
tgctctgctcgtgcctctagggttatcatatctccatttccatttcctctctctcagtttccaagaatcttaagctatgggaaagtcttacccaaccgtgagcgctgattaccagaaggccgttgagaaggcgaagaagaagctcagaggcttcatcgctgagaagagatgcgctcctctaatgctccgtttggcatggcactctgctggaacttacgacgtgagctcgaagaccggtggt

SEQ ID NO: 136973 - DNA, 241 bp, Glycine max
cttattacaaatcccctccacctccatctccatctccaccacctccttactactatcaaagtcctcctccaccatctcccacttctcatcctccctattactacaaatcccctccaccaccaacgtcatatcctccacctccttaccactacgtgagccctccaccaccttctccatctcctcccccaccataccattacacatcaccacctcctccttccccagctcctgctcccaagta

SEQ ID NO: 136974 - DNA, 242 bp, Glycine max
tgtgactgaaaaaaggttttagatcgtaaaaactaatcactacgaaaacaagagctatcgaagatggctctgcccaaagctaaggagatcgtgtcgtccaattccgtcgtcgttttcagcaaaacctattgccctttctgcgtcgatgtgaagaagctcttcggtgacctcggtgccaattacaaggccatcgaactcgacactgaatccgatggaaaagagctccaagcagcattagttga

SEQ ID NO: 136975 - DNA, 236 bp, Glycine max
ggcaaatgttgtggtatgggatggtcaatatgggtaccaaaatttgtttgatgctatgttggattcagtacatgcagccattgataacactaagattggttatgtggaggttgttgtatccgagagtgggtggccatcagatggaggatttgctgccacttatgacaacgcacgcgtgtacttagacaatttggttcgtcgtgctaatagaggaagcccaagaaggccttcgaagc

SEQ ID NO: 136976 - DNA, 236 bp, Glycine max
ggctcgagccgattcggctcgagcgaggctgcgaagaagaagagaggcgagagccgcaaactagtctacaacagagctaagcagtacgctaaggagtacgatcaccaggagaaggaattgattcggttgaaacgcgaggccaagctgaaaggtggattctatgtcgatccagaggctaagctcttgtttattgttcgcattcgtggtattaatgccatggatcccaaatcaaggaa

SEQ ID NO: 136977 - DNA, 232 bp, Glycine max
cgttgttgttggaagccaaaaccctagcagccggcgagaatggcagacgttgaggttgatgtggcggcggcggcggcggcggcggctgcagggcagccaaagaagagaacgttcaagaagttcagcttcaggggggtggatctggacgcgcttctggacatgtccactgacgaactcgtgaagatgttcagtgctcgcgcacgcagaaggttccagagaggtctcaccagaa

SEQ ID NO: 136978 - DNA, 239 bp, Glycine max
tgagaaggcgaagaagaagctcagaggcttcatcgctgagaagagatgcgctcctctaatgctccgtttggcatggcactctgctggaacctttgacaagggcacgaagaccggtggacccttcggaaccatcaagcaccctgccgaactggctcacagcgctaacaacggtcttgacatcgctgttaggcttttggagccactcaaggcggagttccctattttgagctacgccgatt

SEQ ID NO: 136979 - DNA, 240 bp, Glycine max
gggaaaaagaaaaataaaatgggttccgataataccaacttggagttcttgaaggagatcggtttgggctcctccaacattggttcttacattaatggccaatggaaagccactggttcttctgtcacttctgttaatccttctaacaatcagagcatagctcaagtgactgaagcgactttgcaagattatgaggagggattgcaagcttgcagtgaagcagccaagacatggatgact

SEQ ID NO: 136980 - DNA, 243 bp, Glycine max
cgagttcccaagttggagtttatggaaagccagcccctcaagatttcactgctgattatgaacactggaaacgtgtagtatccaagtcttatctagacgggatgggaattaaatggtcaaatgtacgcaatgtcatggatatgagatctatctatggaggatttgctgcagctttgagagatttgaatgtttgggtcatgaatgtggttacaatagactccccagatactcttcctattattt

SEQ ID NO: 136981 - DNA, 240 bp, Glycine max
cgaaccctacccttttgagtcttccaagtgttcaccatcgtaatgggttccgaaggatccagcgtcgtggttcctaggaatttcagattattggaagagcttgagagaggtgagaagggaattggggatggcctgttagctatggaatggatgatgctgatgacatatacatgcaatcttggcctgggactatcatcggtccccctagtactgttcatgaagggcgtatctaccagttga

SEQ ID NO: 136982 - DNA, 237 bp, Glycine max
ggtaaatggagaaattgtaaaaattcaacgggtgtcagcccctgttgggcagatgcaactgaagagcctgattgaagctcatgttgcaaaaaccggtagtacaaaaggtgcggctattctgaaggactgggagaagtatttatcactattttggcagctggttccacctagtgacgaggatacccctgaggcaaatgccaagtacgacacaactacggcagatcaggtcacttatca

SEQ ID NO: 136983 - DNA, 236 bp, Glycine max
gggacgaccacggcttcggttcttgctcgcgagataattaagctggggcttcttagtgtgacttctggggctaatcctgtgtctcttaagagagggattgataaaactgtgcagggtttggtggaggagttggagaagaaggccaggcctgtgaaaggtggagatgatatcaaagctgttgcttccatttctgctgggaatgatgagttgattgggcaaatgattgcggaagcaat

SEQ ID NO: 136984 - DNA, 235 bp, Glycine max
gtcctgactgcagaggatctggtgaggtcattaacgagagagataaatgtcctctgtgcaaaggaaacaaggtttcccaggaaaagaaggtgctggaagtgcatgttgagaagggcatgcagcagggtcagaagattgtttttgaaggacaagctgatgaagctcctgacacaatcacaggagacattgtttttgtattgcaagtaaaggatcacccaaagttcagaagggagca

SEQ ID NO: 136985 - DNA, 238 bp, Glycine max
acaggggtacgcctcaaattgaagtgaccttcgaagttgatgccaacggcattctaaatgtgaaggcagaagacaagggcactggtaaatcagaaaagatcaccattacaaacgaaaagggacgtcttagccaggaagaaattgagaccatggttcgcgaacaaacggagtttgcagaggaagacaagaaggtgaaggagaggatcgatgctcgcaacagtcttgaaacctatgtata

SEQ ID NO: 136986 - DNA, 236 bp, Glycine max
ctactagtaatattattcttcgaatccattttattattcataatgggtattttcacatttgaggatgaaaccacctcccctgtggctcctgctaccctttacaaagctctagttacagatgccgacaacgtcatcccaaaggctgtcgaagccttcaggagtgttgaaaaccttgaggggaacggtggccctggaaccatcaagaagatcactttcgttgaggatggagaaagcaa

SEQ ID NO: 136987 - DNA, 230 bp, Glycine max
cttcttcatcgtcgtcgccgcaatgggacgtgtgatccgtgcgcaccgtaagggagcaggctcggtcttcaagtcccacacgcaccaccgcactggccctgcccgcttccggagcctggatttcggagagcgcaacggctacctgaagggtgtcgtcactgacgtcatccacgatcctggccgtgccgcgcctctcgctaaggtcgccttccgccacccgttccgctaca

SEQ ID NO: 136988 - DNA, 238 bp, Glycine max
gttcagcaaaactgtatagagttgtggatgtttgtatgggccaagtattccggtggaccaggcaaccttttggatgatgataaatcaaagcagcagtaccattgcagtggctgtggaatttgcagaactggaggaagcgaaaatttcttccattgctacaagtgtggttgttgctactcaactcttctgaaaaacagtcacccttgtgtagacggagcaatgcatcatgattgcccgg

SEQ ID NO: 136989 - DNA, 237 bp, Glycine max
cggatatctcaaaggtttatccttcagtgaagagaaatggcagctgaggcaaattttgatagcaaaagcagcaggtggtctttgcaggggatgacagctctcgttaccggtggttccaaaggaatcggatatgctatcgtggaggagttggcacaacttggagccactgtacacacttgcgctcgcaacgaagctgaactcaataaatccttaaatgaatggaacacaaaaggatac

SEQ ID NO: 136990 - DNA, 219 bp, Glycine max
tggagacaatggggtctctaatggcctctcttactctcactcttgtattggcaatagtttctctaagcttgtgctctcaagcctcagctgacaagtacgactattcatctccaccaccaccagtttaccagtacaagtccccaccaccaccctacaagtattcatctcctccaccacctcctaagaagccttacaaatagccatcaccaccaccaccag

SEQ ID NO: 136991 - DNA, 236 bp, Glycine max
ctggtagccaaatgcctcgtcatctaattagtgacgcgcatgaatggattaacgagattcccactgtccctgtctactatccagcgaaaccacagccaagggaacgggcttggcggaatcagcggggaaagaagaccctgttgagcttgactctagtccgactttgtgaaatgacttgagaggtgtaggataagtgggagctggaaacagcgaaagtgaaataccactacttttaa

SEQ ID NO: 136992 - DNA, 234 bp, Glycine max
gtgctgtggtatttactttcaaagactttggctgaagatgctgcctggaaatttgccaaagaaaacgaccttgacttggttgttgttaacccagcaatgttgtagggcctcttttgcaagcagagcttaacactagtgctgctattcttttaaacctaataaatggttcagaaactttttcaaatgatacatatggatggatcaatgtgaaagatgttgcaaacgcccatattc

SEQ ID NO: 136993 - DNA, 238 bp, Glycine max
ccttatgtgaagaggtacatgatgtaccaacaaggttgctttgcaggtggcacggttcttcgtttggccaaggatttggctgagaacaacaagggtgcacgtgtgcttgttgtctgctctgagatcactgcagtcacattccgtgggccaagtgacactcaccttgatagtcttgtgggccaagcattgtttggagatggcgctgctgcagtcattgttggttctgacccaattccac

SEQ ID NO: 136994 - DNA, 239 bp, Glycine max
ctaatagtttggttttgtagtaagtgaggtgaggtgccaaaatggtgaagataactcttggtactttcgatgactcttttggtgttgcctctcttaaggcttatttggcagagttccatgcaactctgattttcgtgttcgctggtgttggttcagccatcgcttacaacgagcttacaaaagatgcagccttggatccaacggggctggtggcagtagctgtggcccatgcatttgca

SEQ ID NO: 136995 - DNA, 240 bp, Glycine max
ctcgagccgttgatattgaaaagcatactttgacaacaagttctggaaaacttctgaagtatggttcgcttgttattgctacaggatgtacggcatcaaggtttccagagaaaattgggggaaacctacctggtgttcactatattcgggatgttagagatgccgatgcactaattttatcgttggagaaagcaaaaaaggttgtagttgttggaagtggttatataggaatggaggttg

SEQ ID NO: 136996 - DNA, 222 bp, Glycine max
tcgagcgattcggtcagtcagcggtgagcgatgtagtgcgacgagcgcgggagagttttgggatgaaggacttcaagtacgtaaacaccatcaaagcagcggttgagaaagaatgccccttgacggtttcatgcgctgacattgttgctctttctgctagagatggcattgccttgttgggaggaccaagcattgaaatgaagacagggcgaaaggatagca

SEQ ID NO: 136997 - DNA, 232 bp, Glycine max
caaagattaagccatgcatgtgtaagtatgaactaattcagactgtgaaactgcgaatggctcattaaatcagttatagtttgtttgatggtatctactactcggataaccgtagtaattctagagctaatacgtgcaacaaaccccgacttctggaagggatgcatttattagataaaaggtcaacacaggctctgcctgttgctttgatgattcatgataactcgtcgga

SEQ ID NO: 136998 - DNA, 232 bp, Glycine max
ctctgattttgtaattgagttcgatcaaatagctcccagtactttaattgatttctgaatatcatcacttaatttgaaggcaagatggtgagcgtactgagatccgccaggcacaaagggcagaaggcccagcaaccatccttgccattggaactgcaaacccaccaaactgtgttgatcagagcacctatcctgactactacttcagaatcaccaacagtgagcacatgac

SEQ ID NO: 136999 - DNA, 235 bp, Glycine max
cgaggccattaaggcgtatcctgatttggtgagacagcatttgggaagagttgtcccctccgacgacaactactacgccgcgttgaacgccgccgtcttcagcgaccggtccttttgctacattacggaggacaccaagtgtcctatgcagatttcgacttacttcagaatcaacgcgttggagacagggcagtttgagaggactttgattgtcgccgatgatcggagctctgtg

SEQ ID NO: 137000 - DNA, 234 bp, Glycine max
cccaaattcattttaatcctaattttgcacttcttgatcattcgatttttctcctcaagatgcagatattcgtaaaaactttgaccggcaagaccatcacccttgaggtggaatcctccgacaccattgacaacgtaaaagctaagattcaagacaaggaagggatcccacctgaccagcagagacttatctttgcgggtaaacaacttgaggatggtcgcacccttgccgatt

SEQ ID NO: 137001 - DNA, 234 bp, Glycine max
ctcgagccgattcggctcgagttcttcctcttcctcagtagtgcgactttcgattctcttcactgcaactatgcctaacccacaggtcttcttcgacatgaccatcggcggtcaacctgccggccgcatcgtgatggagctctacgccgacgtgactccgagcaccgccgagaacttccgcgcgctctgcaccggcgagaagggcgccgggcggagcggcaagcccctccacta

SEQ ID NO: 137002 - DNA, 237 bp, Glycine max
gatccggcaagatggagctgccagagtggactgatattgtgaaaactgcaagatttaaggagttggctccttatgatcctgactggtactatgtcagagctgcttccatggcaagaaagatctacttgagaggaggacttggtgttggtgcctttcagaggatttatggtgggagcaagaggaatggtagtcgccctcctcatttttgcaagagcagtggtgccattgctcgtcaca

SEQ ID NO: 137003 - DNA, 232 bp, Glycine max
gtcaagcgtccgtacttcctttcccaaacttatccgcgcattgctgtgaacaagccctccatgaacctgttgaacagactcgggtttggcagcgcaagagcaacagagaacatggattcatccattcctcagggtccagatgatgacataccagcaccaggccagcagtttgccgagtttggtgctggctgtttttggggtgttgagttggccttccagagggtgcctgggg

SEQ ID NO: 137004 - DNA, 232 bp, Glycine max
gttgtgactcgttcttcttcgtcgttatcttcttcttttgttgtttgtgtgtttgttttttctctcacctgaaaatgtcttgctgcggtggtaactgtggttgcggaagcgcctgcaagtgcggcaacggctgcggaggctgcaagatgtacccagacttgagctacaccgagtcaaccaccaccgagaccttggtcatgggagtggcaccagttaaggctcaattcgagag

SEQ ID NO: 137005 - DNA, 233 bp, Glycine max
ctgtggccaaggtcctttggttttgctttgttagtttcttttccttcatgtactttacatattatgggatgatgactgtttccattacaccaaaccaccaaattgcatcaatccttggagcagcatttatgggatcttcaatctcttttctggtttttttatcccaagaccaaaaattcctaaatggtgggtttggtattattggatttgcccagtagcatggactgtatatg

SEQ ID NO: 137006 - DNA, 224 bp, Glycine max
gaaccataaccatgtcagacgaggagcaccacttcgagtcacaggctgctgctggagcatcaaagacatttccccagcacgctggaaccatccgcaaaaacggttacattgtcatcaagaacacgtcatgcaaggttgtcgaggtttcaacttccaaaactggcaagcatggacacgcaaagtgtcactttgttgcaactgacagcttcactgggcgaaagctt

SEQ ID NO: 137007 - DNA, 237 bp, Glycine max
caggaagaacgttctatgatcaaaattgaaagttgtgctaagggtgatcttaatatagtctcctctctggaagatacttcaactaacaataacatgtcaaagtgtcgtgctctagtggcagttcctgccattaacatggaggcattggcggtggttccattctggcgcaaatgtggaaatcctgactttgcacaacgccgaatcaggaggccattctctgttctagaagtagaagca

SEQ ID NO: 137008 - DNA, 263 bp, Glycine max
atcaaaacctccctaactaacacaagttgtagtgagtccacggtctggaagctagatgcctttgatgattcaactggacagtggtttgtgaccactggtggtgtgttgggaaaccctggcaaggataccatcgacaactggttcaagattgaggagtatgatgatgattacaagctcgtgttttgccccacagtgtgcaacttctgcaagcctttgtgtaggaatgttggggtgtttagggatagtaatgggaaccagcgcgt

SEQ ID NO: 137009 - DNA, 261 bp, Glycine max
ggacttttccgcagtgtaactgtgatgccatcaaagaggttaaaagggaagaagaaccgtaagattaatgttaatcatgagagcaaaattctatctcttggttccttggaagaattgtgtaaggctcgacgatcagttttggatcctccttgggaaggcccaaacttgattcctggtgatgttttgtggtctgatccatccaaaaatcctggtcttgctccaaacaaagaaagaggcatggcttgatgtggggtcccgatt

SEQ ID NO: 137010 - DNA, 257 bp, Glycine max
atgaaatctttggagggtatctatatttccacaaggcacccaacaaagaagagtttcaccaagaaacatgccgcaagattaaagcactccacaaatatgattgcttgcgagccaataaatcgacctttgcctggggtctagaagccagagtaccatttttggacaaagagtttatcagagttgcaatgaacattgatcctgagtgtaaaatgataaaaaaggaagaagggcgaatgagaaatgggcactgaggaggg

SEQ ID NO: 137011 - DNA, 255 bp, Glycine max
gaacatcagcgtgacgaacggcacaacaagaggacgcatctggggtcgaacaaactgcaccttcgacaacgcgggaccgggaagtgcctcaccggcgactgcgagggtgttctggagtgcaacaaaacaggtacacccccgaacacggtcgttgatttcgcgttgaaccagtataacaacctcgacttctacgacatctccctcgtcgacggtttcaacgttcccctacactgaccccgacctacaactgcagtt

SEQ ID NO: 137012 - DNA, 251 bp, Glycine max
agcagcaattcacactggtctttgcttctcgttactcatttctcacctaactttctattcttctcagtctcagatcagaaccttagccatggcagcgttccagaagatcaaggtcgccaaccccatcgtcgagatggacggagatgaaatgactagggttatctggaagtcaatcaaggacaagctcattttgcccttcttggagttggacatcaagtattatgacttaggccttccttaccgtgatgaga

SEQ ID NO: 137013 - DNA, 252 bp, Glycine max
ccaaaaccaattgcatcactctcgtccgttaccgccgctgccctagaccaccgcaagcgacgtcgcacaccgccgtcatccgttagggcaaaaatgagtcgaggaagtggaggtggatacgatcgtcacatcactattttctcccctgaaggacgtctctttcaagtggagtatgctttcaaggctgtgaaggctgcaggaatcacctcgattggtgtccgaggaaagattcaatttgtgtcgttactcaga

SEQ ID NO: 137014 - DNA, 230 bp, Glycine max
tacgagacgacgcagatttaattcggattattcgattgcgatggctaggatgatgcttatcgatggtgaagctgaattggctcaaggtggtggagaacaagtgtcgaattttgacttcgacttgttcattatttgggctggaagtggtagcgttcgtgccgctagattttcatccaattttggagctaaggtggggctttgtgagcttccatttcatccaattagttcag

SEQ ID NO: 137015 - DNA, 257 bp, Glycine max
caggcctcaaccctgaaagaagaattcaacattgatttgcgtgtaatgggcatacttggttcaaacgtcaatgcttcttagtgatgtgggcattgacttagctagatggagagaacttcgagaggaaagaggagaagtggctaatgtggaaaaatttgttcaacatgtacatggaaatcattttataccaaacacagcattagtggactgcacagctgactctgccattgctgctattactatgactggttgcgcaa

SEQ ID NO: 137016 - DNA, 251 bp, Glycine max
gctactcacataggagaggttgtgatcaacaaatgcttctgcacccgcaggaatccgattagcatctcagctgctgctatatatttggcttgccaacttgaagacaaacgcaaaacccaggcagaaatttgtaaggtaactggtcttactgaggtcactctccgtaaagtgtacaaggaactattggagaattgggatgatttacttccctctaattacaccccagtgttcctccagagagggcatttccc

SEQ ID NO: 137017 - DNA, 250 bp, Glycine max
gtggaagctaaggtattattatggcttatcaagtgttggtgatttgtgtggtctccagcatagtgtttgcatacatagtatggagaaaagaaaggaagaaaaagcttccaccgagtccaaagggccttcccatcattgggcacctccaccttgtgtccccaataccccaccaagatttttacaagctctcactccgccatggacccatcatgcaacttttcctcggctcagtcccttgtgtggtggcttc

SEQ ID NO: 137018 - DNA, 248 bp, Glycine max
atccgatcctctgtcctctcgaagctttcatcgttcaacatattctcaccatctcagtcatgggcctgctatcttgttttaggtctaccgtcctgagaaaatgttccaaaggaagctctggcatgtcaagattcctgtatacgaacaattttcaacgaaacttgatttcgtctggtggcaatgaatcgtattatgggtattttaacaggagatcatacacttcatttatatgggaactggaactgtgg

SEQ ID NO: 137019 - DNA, 256 bp, Glycine max
agatcttttagctccttatcgtcgtggaggaaaaataggacttttcggtggagctggagtgggtaaaacggtactgattatggaattgatcaataacattgccaaagctcatggaggtgtatctgtatttggcggagtaggtgaacgtactcgtgagggaaatgatctttatatggaaatgaaagaatctggagtaattaatgaacaaaatattgcagaatcaaaagtagctctagtatatggtcaaatgaatgaa

SEQ ID NO: 137020 - DNA, 258 bp, Glycine max
gagaaggcaagatgtcgaagagaggacgcggtggttcggcggggaacaagttccggatgtcgctgggtctgccggtggcggcgacggtgaactgcgccgacaatacgggggcgaagaacctctacatcatatcggtgaaagggatcaaagggcgtttgaaccgtctcccctcggcttgcgttggcgacatggtgatggccaccgtgaagaaggggaaacccgatctgaggaaaaggttttgccagctgtcattgttcg

SEQ ID NO: 137021 - DNA, 256 bp, Glycine max
ctctcttacccatctcttcgacctcttgacactctcatggcccatacagctggttgttattgcattgcaattgatccagtaggaagatattttgctgttggaagtgctgattcccttgtaagtctgtgggatatatcagagatgctctgcgtgcgtaccttcacaaagctggaatggcctgtccggacaattggcttcaattattctggagattttattgcttctgcaagtgagacttgttcattgatatttcaaa

SEQ ID NO: 137022 - DNA, 257 bp, Glycine max
ctttcagaaacatcaagacaattgctgaatgcttggctgatgaaattattaatgcagctaaaggttcatccaacagttatgctatcaagaaaaaggatgaaattgagagagttgccaaggctaatcgttaaaccaacaaaggatacagtattggtgaccagaaagattttgtttcgacctttgaacttcattttcaaatattgtgtactagttttgatggctttagctatttttagttcgcacaaggatttacatga

SEQ ID NO: 137023 - DNA, 257 bp, Glycine max
gtggagagcaaggtgggcgccatagggtgcatgctggtgtccctcttcttcctcgggacatggcctgctgtcatgactctgctagaaaggcgcggtcgtcttcctcaacacacctaccttgattacaccctcaccaacctcatggctgctgttatcattgctttcacctttggtcagattggcaacgctcaacccaacttcttgtcttcagtttcttaggataactggccttcggtctgtttgccatggggggtgga

SEQ ID NO: 137024 - DNA, 253 bp, Glycine max
atcatcactatgataaagagggaactaaagatgcacagaagcctaaaaattgggccaaaaagatccaggaggaatggaaaattttagaggaaaatctgccagagacaatctttgtgagagtgtgtgaatcaaggatggagcttctaagggctgttatcattggacctcaaggcaccccataccatgatggtctgttctttgtcgattgcctctgtccttctagctaccctgcagggccaccgaaagttcacta

SEQ ID NO: 137025 - DNA, 252 bp, Glycine max
cgaatttcattgcagagtgttattttgagtatcagcatcaatggctccaattgcagtgggaaacgtgattccagacggcattttggcttacttggatgaagaaaacaaaccccaaactgtctccattcactctctcgccaccggcaagaaagtcatcatctttggggttcccggtgccttcactcctacttgcagcttgaagcacgttcctggcttcattgagagagagaagagctgaaagggaagggtgtg

SEQ ID NO: 137026 - DNA, 252 bp, Glycine max
gaaaaaacgaaacgatggagggaggagtctcctacgcgcgcatgcctcgtgtcaaaatccgcgagctgaaggacgactacgccaagttcgagctccgcgacaccgacgcgagtatagccaacgcgctgcggcgcgtgatgatcgcggaggtgccgacggtcgccatcgacctcgtggagatcgaggtcaactcgtcggtgctcaacgacgagttcatcgcgcacaggctcggcctcattcccctcacgagcg

SEQ ID NO: 137027 - DNA, 247 bp, Glycine max
atccaaagtctcttctgtcgttgggggttgtaaacaggaagatatcagttcagcaaggagtgacattttggattcagatagtccacattacaccgatggagttcactctgcgctgctagagcatggtgattcttcttatgtgtttgagcctgatcaatcagatatgtcacaagatgaagaagataacctcagcaagagtctctacccttcgtacctctttccaaacttgaagaagatgtggattact

SEQ ID NO: 137028 - DNA, 246 bp, Glycine max
gctgttggagattatagctctgagcttaggccttgaggcaaagaggtttgaagagtttttcatcaaagatcaaactagctttattcgactcaaccactatcctccatgcccttcccctcatctagctcttggtgttggtcgacacaaggacattggagccttaaccattcttgcacaagatgatgttggaggacttgaagtcaaacgcaaagcagatcaagatggataagagtgaaacctacacca

SEQ ID NO: 137029 - DNA, 259 bp, Glycine max
ctctttgtgggagaaaaaaattgggaaaactcttgagaaaatttatgtttcagaagaagaagttcttaagcaaattaaggagacttctttcccaaataattatcttctggcactataccactcacagcagataaagggagatgcagtgtatgagattgaccctgccaaagaccttgaggcttctgaggcttatcctcacgtggaatacagcactgtttctgaatatttggatcagtttgtctgatttccgaaatcttag

SEQ ID NO: 137030 - DNA, 255 bp, Glycine max
tacgagatgacgcaggtttagttcggattgttcgattgcgatggctatgaagatgcttatcgatggtgaagctgaattggctcaaggtggtggagaacaagtgtcgaattttgactttgacttgttcattattagggctggaagtcgtggcgtccgtgtcgctagatcgtcatccacttttggagctaaagttgggacgtgtgagcttccatttcatgcaattaggtcagagcaactggtagagtcggtggaacg

SEQ ID NO: 137031 - DNA, 256 bp, Glycine max
aagaagctaaggagcagataggagagagcacaaagggagaggaggaacaatctggctctggcttggattttcaagttttctacaccggaccgtggaagatgccatcgagtctcgcggattccatatcccttcagcattgcgccacaacagaggcagggatgatgatcttgatgaagctcaagatagggaaattgaacttccaaatgggggctatgtaaagaataggtctttgcccctttcaaccctgattgatata

SEQ ID NO: 137032 - DNA, 256 bp, Glycine max
gttctgtgctttttgtggaccgaattgcccctactcaggtaaagagaatgattctcacaaagcagtatcgatgcgtacattcagctagctgtcaatgcaccaagggtcatttaagtgaagatgtgatattcttggtgtttcagcatttgaattggaacccgaagctaattgctgctctgtcatgtgtgtgcaaatggtttgacgatctttcaaagcaagttctatggaaagattttgtaaaacgagagctccgaag

SEQ ID NO: 137033 - DNA, 245 bp, Glycine max
cgctcgagccgaatcggctcgagcggctcgagtgagaatgtctagcagtgggtgtggaagcagctgcaactgtggcagcaactgcggttgcaacaagtactcttttgacttgagttacgttgagaagacaaccacagagactctagttttgggtgttgggcctgtgaaggcccaattggagggtgctgaaatgggtgttgcatctgagaacggtggctgcactgtggatcaagctgcacctgtga

SEQ ID NO: 137034 - DNA, 251 bp, Glycine max
acaccgttgctttcacttcacaaaaatgacaaacatgaaattgtgttcggtgatgctatgcttatcactagcgttccttcttggggccacagcagaacaatgtggcacacaagctggtggagcgttatgcccaaatagattatgttgcagcaaatttgggtggtgtggtgacacagattcctactgtggagaaggttgccagagccaatgcaaatctgcaacaccctcacaccaactccaacaacacctag

SEQ ID NO: 137035 - DNA, 256 bp, Glycine max
ccaacctctaacctacctctttttcttctctctcaacaacttcaccttcttcctcctcgatcatgtctcacttcaagggcaagtaccatgatgagcttatcgccaatgctgcgtacattggcactcctggaaagggtattcttgctgctgatgagtcaacagggacaattggcaagcgtttggccagcatcagtgtagagaacattgaatccaacaggcgagctcttagggagctgcttttcactgctcctggtgt

SEQ ID NO: 137036 - DNA, 254 bp, Glycine max
atggtgggttgccatcacaagcctttgagtacatcaaatacaatggaggacttgagacagaggaagcatacccctacactggaaaagatggtgtatgcaaattctcagctgaaaatgttgccgttcaagtcattgactcggtcaatatcaccttgggtgctgagaatgaattaaaacatgcagttgcatttgttcggccggttagtgtggcctttcaggtggtgaatggttccatttctacgagaatggagttt

SEQ ID NO: 137037 - DNA, 249 bp, Glycine max
cttttctctctgccctccgccatgactgaggataaggagatgtcttcctctgtcaccaatggcgatgattccctcactggtcacatcatatctacaactattggaggcaaaaatggggaacccaaacagactattagttacatggcagaacgggttgtaggaactggatcatttggaattgttttccaggcaaaatgcttggaaactggggaagcagtggctattaaaaggttttacaggacagaagat

SEQ ID NO: 137038 - DNA, 245 bp, Glycine max
aaacattcctaaagaattggagggccttcatgagaaatactcgtcaacttgccgattgtttgagtaccaagaacttgtatcggccacatcgaatttcttgcatgaaaacttgatcgggaaaggaggaagcagtcaggtttatagaggctgccttcctgatggcaaggaacttgccgtcaagatcctaaatccttctgatgatgtgttgtcggaatttcttctggaaatagaaattatcaccacct

SEQ ID NO: 137039 - DNA, 243 bp, Glycine max
gtttatgcagcaagtaaagctgcaattaatcagcttacaaaaaacctggcttgtgaatgggccaaagacaacataaggagcaactgtgttgtaccatgggcaaccagaaccccacttgtagaacatttgttgagagaccaaaagtttgtggatgatattatgtctcgaactccgattaaacgtatagcagaacccgaagaagtgtcatcgttggtgacttcctttgcttgcctgctgcttctt

SEQ ID NO: 137040 - DNA, 251 bp, Glycine max
atccttcaggtgcattctagaggaaaagcgcttgcaaaggatgttgattttgaaaaaattgctaggagaacccctggattcactggggctgatctgcagaatttgatgaatgaggcggctattcttgcagccaggcgtgacctcaaggaaataagtaaagatgagatatctgatgcgcttgaaaggatcatagctggacccgagaagaaaaatgctgtagtctcagtgagaagaagaaattagtagcctat

SEQ ID NO: 137041 - DNA, 253 bp, Glycine max
gttggattcaaatcaagagttgttcggtcttggtgtttccaatgttcttggttcatttttttcagcataccccacaacaggatccttttcaaggtcagctgtaaatcatgaaagtggtgcaaaatctggtgtatctgggattgtttcaggaattataatgacctgtgcacttttgtttctaacaccattatttgagtacatacctcagtgtacccttgctgccattgtgatctctgctgtgataggtctggta

SEQ ID NO: 137042 - DNA, 253 bp, Glycine max
tttaagtcctgcatatatatgcgtagttttttttatagttttagtgagtgagaatagccatgtctacttcaaagagcgtcagcagttctagtgaagatgacaatgaacttagaagagggccttggactcttgaagaggataatttgctctcccaatatatttctagtcatggagaagggcgatggaatttgctagctaaacgttcaggattaaagcgaactgggaaaattgcagattaaggtggctaaattat

SEQ ID NO: 137043 - DNA, 246 bp, Glycine max
ggactggaggggtggaagagctgcttccttcaatataattcccagcagcactggagctgctaaggctgtaggaaaagttcttccagcactgaatggtaaattgactggcatgtccttccgagtccccactgtagatgtttcagttgttgacctcactgtcatgctagagaagccagcaacctatgagcaaatcaaatctgctatcaaggaggaatcagagggcaattgaagggtatttgggttaca

SEQ ID NO: 137044 - DNA, 253 bp, Glycine max
ccatgatgatgctcggcgaggctgaggagatcagagacatcgctcgcgaggttcttaagatctttggcgaatacagcctcactgacttcatctggccattgaagcatctcaaggttggaaagtatgagaagaggatcgacgacatcttgaacaagttcgaccctgtcgttgaaagggtcatcaagaagcgccgtgagatcgtgaggaagagaaagcacggagaagttgttgagggtgaagtcagcggggtttt

SEQ ID NO: 137045 - DNA, 212 bp, Glycine max
ggtttctgcaatctacaaaattcactatgggaatcacaacctttacacaggaatactcctcctctgttgccccatcacgcatgttcaaggccttgattgtagactccagaaatttgcttccaaagctcttacctcagtttgtaaaagatgtgaatgtaatccagggtgatggtgaagctggaagcattgaacaagttaacttcaatgaagat

SEQ ID NO: 137046 - DNA, 243 bp, Glycine max
gaaagattgggttgtttggtggtgctggtgtaggaaaaactgtgcttattatggaacttattaacaatgttgcaaaagctcatggtggtttctctgtgtttgctggtgttggagaacgaacccgagagggtaatgacttgtacagagaaatgattgagagtggtgtcattaagcttgatgataagcagagtgaaagcaagtgtgctcttgtgtatggtcaaatgatgagcccctggtgccgtg

SEQ ID NO: 137047 - DNA, 242 bp, Glycine max
tgcctttccttttccagggagctcattgacaatggctgaaacaaagtgggtcatgaaggacaaaagatggtctctccatggaatgacagctctagtcacaggaggcacccgaggcatagggcatgccattgttgaagagttagctgagtttggagcaactgttcatatatgtgcacgtaatcaagatgatattgataaatgtttagaagagtggaaaacaagggacttaatgtgactggttc

SEQ ID NO: 137048 - DNA, 242 bp, Glycine max
tcttcaaattcatactaacaaaatgaaagagaattcttttctagctgctgatgtgaaccttcaagagcttgctgctcgaacgaaaaactacagtggtgcagaacttgaaggtgttgtgaaaagtgctgtctcatatgctttaaatagacaattgagtctagaggatctcactaagccagtggaggaagagaacattaaggttacaatggatgacttttgaatgcactccatgaagttacttc

SEQ ID NO: 137049 - DNA, 251 bp, Glycine max
ctttggttcatttgtaaaattccttgatgagttcaaggctgctgctgcgacacaatttggttcagggtgggcttggctagcatatagagcaagaaaatttgatggggaaaatgtagcaaatcgtccttcacccgatgaggacaacaagctagtggtgctcaagagtcccaatgctgtgaacccccttgtttggggaggttactacccacttcttaccattggtgtttgggagcatgcttactaccttgatt

SEQ ID NO: 137050 - DNA, 253 bp, Glycine max
gattgctttgagcatgattgaagatgctgagaaaaaaggccttattacacctggaaagactgttctggttgagtatacaagtggtaacaccggcataggattggcattcatagcagcatttaggggttataaacttcaggtgactatgccgtcttacgtgagtcttgagagaaaaattatactgcgagcctttggagctgaggtatatcttacagaccctgccaaaggaattgatggggttattcagaaggca

SEQ ID NO: 137051 - DNA, 251 bp, Glycine max
gtcttgttttccagtacccgccaaaccatgatgtggttgaagttacaaaggcagattatgactcttgccagccaactaacccagttcagtcttacaatgatggcgccacaaccatccctctcactttaccggggaaaagatacttcatctgtgggacaataggacattgcagccaaggaatgaaggttgaaatagacactcttgccagtgcaacaaattctgtcacaccagcagcatctcctgaagattct

SEQ ID NO: 137052 - DNA, 248 bp, Glycine max
attaatacaacctcaaaaagagttctttcaaaatgcaaacagccttaaccttcgctgcccccaacgttgtgccattggcacccacaaagagtgtctcccatattaccatctttcctaccaaattgaaagccccgcgctcctcacctcgttactctccgattagggttgcaaccgtggagcccgacacttcaactgtcgactacaactctgcgttctcagtgtttctgcagaagcatgcgacactgtag

SEQ ID NO: 137053 - DNA, 250 bp, Glycine max
tgaagaagcattccaatgcatagcaaagaatgccctgaaaagtggagaagaagaagaattatacctgccagacacaattgatgttggaaacagcagtcagccacgggcaacatgatgtgagtgctgaatatataggttttcttttcaatacaataaagtacattacttcaaaatgatagtcattgctgtgtgtgagggagacatcattgtacattagtgtttgctcaagaaacaaattggtccaatgcta

SEQ ID NO: 137054 - DNA, 246 bp, Glycine max
attaatacaacctcagaaagagttctttcaaaatgcaaacagccttaaccttcgctgcccccaacgttgtgcgattggcacccacaaagagtgtctcccatattaccatctttcctaccaaattgaaagccccgcgctcctcacctcgttactctccgattagggttgcaaccgtggagcccgacacttcaactgtcgactacaactctgcgttctcagtgtttcctgcagaagcatgcgaaactg

SEQ ID NO: 137055 - DNA, 248 bp, Glycine max
ggaaagaatatctatctctcattctctcgtgcctcaacgcttttttaactcctttcgcttttccattccaacctctttcacacttcagatctgtttcttcatcggttgttccaagtaaatggcctttgtcaccactgctgaagtgtgtgatgcgaacccacagttaattttgagtggggagcttcgtgcccttcagccagtttttcagatttatggccgtcgacaggttttctctggacctatagtta

SEQ ID NO: 137056 - DNA, 242 bp, Glycine max
cttcaacaaacgccacaatggccgtcacgaaaagcctctccatcttcctcttcatcgccataagctgcgtggccgtagctcaggcagcgaacttcaacatcacaaacaattgcacctacacggtgtgggccgccgccgtgcccggcggcggttcaaggcttaaccctggcgaatcgtggaacatcagcgtgacgaacggcacgacaggaggacgcatctgggggcgaacaaactgcaccttc

SEQ ID NO: 137057 - DNA, 235 bp, Glycine max
gctgttggagattatagctctgagcttaggccttgaggcaaagaggtttgaagagtttttcatcaaagatcaaactagctttattcgactcaaccactatcctccatgcccttcccctcatctagctcttggtgttggtcgacacaaggacattggagccttaaccattcttgcacaagatgatgttggaggacttgaagtcaaacgcaaagcagatcaagagtggataagagtg

SEQ ID NO: 137058 - DNA, 238 bp, Glycine max
acacaagccaagtgaaagtgagaaataatagaaatcacagagcataatgtcagggatcattcacaagattggggagacccttcatgtgggagggcacaagaaggaggaggagcataagggtgagcaccatgctggagaatacaaaggggagcaccatggtgaacacagtagtgagtacaaaggagagcatcatggtgaacacaaagctggagagtaccatggtgagcacaagccagag

SEQ ID NO: 137059 - DNA, 255 bp, Glycine max
tgtaaccaatcatctttagttcttcagtaatttattggtgggattctattctaagatttgtgagaatgtctagctgtgggtgtggaagcagctgcaactgtggcagcaactgcggttgcaacaagtactcttttgacttgagttacgttgagaagacaaccacagagactctagttttcggtgttgggcctgtgaaggccaaattgcgagggtgctgaaatgggtgttgcatctgagaacggtggctgcaactgt

SEQ ID NO: 137060 - DNA, 244 bp, Glycine max
aaatgattctcctgacaaaaactgttaaacttagtgagtactgagtagggagttgccagccatgtccgttgaactcaagctctctcgttccaatcgtatctatcgcccttcggaagctctggaaggcaaaatcattgtcaaaactcagtcttcaatttcccactatggaattcgccttactgtcaaaggatccgttaacttgcaggttcgtggaggatcagctggggttgttgagtcattctat

SEQ ID NO: 137061 - DNA, 201 bp, Glycine max
gtttttggctcgcaaggtgtctttgatccgagccatcatgtacatggtggctcagtgcttgggtgctatctgtggagttggtttagttaaggctttccaaaagtcttacttcaacaagtatggtggtggggctaattccctcgctgatgggtacagcacaggtactggattgggtgctgagatcattggcacctttgtttt

SEQ ID NO: 137062 - DNA, 241 bp, Glycine max
gagacattacagtttgtattattgtagaggagagagggagagagatggagttgagcatgaaagtgttggtgaaagttgcttcgttgcttttcctattgggattcactgcaacagttgttgatgctcgcttcgatccaagttcattcatcactcagtttctccccaatgctgaagccaacaattactatgttaaatccacaacaaaagcgtgctgtaacagctgtccttgcacaaaatcaat

SEQ ID NO: 137063 - DNA, 243 bp, Glycine max
cctatttgaatcctgcaaatcaatttcagttattgatctagatagcaatagcttatctggaaccatcccaaacggtgtttccaaatgtcaagctcttgagaaaatcaacctatccaacaataatctgacaggtcatatacctgatgagcttgactctattcctgttcttggtgtagtggacctatcaaacaacaagttcaatggccccataccagccaagtttggtagttcttcaaatttaca

SEQ ID NO: 137064 - DNA, 244 bp, Glycine max
actgatcataaatcacatagctagttgtttaaagtgagagattaagaaagaagaaaatggcaaactttccagttgttgacatggggaaacttaacaccgaagagagagcagcagccatggagattataaaagatgcctgtgagaactggggtttctttgagttggtgaaccatgggatatccattgagttgatggacactgtggagaggctcacaaaagagcactacaagaagactatggagca

SEQ ID NO: 137065 - DNA, 242 bp, Glycine max
ggtttctgcaatctacaaaattcactatgggaatcacaacctttacacaggaatactcctcctctgttgccccatcacgcatgttcaaggccttgattgtagactccagaaatttgcttccaaagctcttacctcagtttgtaaaagatgtgaatgtaatccagggtgatggtgaagctggaagcatttgaacaagttaacttcaatgaagataaccccttcaaatatctgaaacccaggga

SEQ ID NO: 137066 - DNA, 241 bp, Glycine max
aatccctctttcttcctcttcctcagtagtgcgattttcgattctcttctctgcaactatgcctaaccctaaggtcttcttcgacatgaccatcggcggtcaacctgccggccgcatcgtgatggagctctacgccgacgtgactccgagcaccgccgagaacttccgcgcgctctgcaccggcgagaagggcgccgggcggagcggcaagcccctccactacaaaggctcgtccttccac

SEQ ID NO: 137067 - DNA, 241 bp, Glycine max
aagctgtcaaggctgtggaaaaacacatgcaaacttttcttcatcgtgagaagaaaaggttgccatcttgtcttgactggtttggatggtgcacatgggatgctttctatactgatgtcacagctgagggtgttgaggaaggcctgaaaagtctatcacagggaggtacacctccacgattcctcatcatagatgatggttggcaacagattgaaaataaagcaaaggatgctactgaatg

SEQ ID NO: 137068 - DNA, 241 bp, Glycine max
cgcaaggtcaccaacaactttgcttcagaaaatgagctaggccatggtgggtttggaactgtttacaaaggtgagctagagaatggcataaaaatagcagtgaagagaatggagtgtggagctgttagcagtagagcactggaggagtttcatgctgaaatagctgttctttccaaggtccggcaccggcatttggtatccctgctaggctattccattgaaggaaatgaaagacttttgg

SEQ ID NO: 137069 - DNA, 241 bp, Glycine max
gtactatgcaaatcagcaattgactgaaaagagtgacgtgtacagttttggagttgttctgctggaattgatatcaggaaaaaagcctgtatcatcagaagactatggtcctgaaatgaatattgttcactgggcaagatctttaattcgtaaaggagatgtgataagcatcatggatccttctcttgtggggaatgtgaaaaccgagtcagtttggagggttgctgaaattgccatgcaa

SEQ ID NO: 137070 - DNA, 248 bp, Glycine max
aaggcttgcagctgaagttacatttggtgcacttaatgaaggtctagatatggatatgtattgggatgctttgagaaattcatggatttgggaagaattgcataaatctcggaactaccgaccagcctttgaatacgggcttattccaggactggccttaagtggtctggaacattacatattcaaggggaggcacccagttactttgaagcatggtaaacctgatcatgaggctatgaatgctgcca

SEQ ID NO: 137071 - DNA, 245 bp, Glycine max
caagggtgcacgtgtgcttgttgtctgttctgagatcactgcagtcacattccgtggaccaagtgacactcaccttgatagtcttgtgggccaagcattgtttggagatggagctgctgctgtcattgttggttctgacccaattccacaagttgagaagcctttgtatgagcttgtttggactgcacaaacaattgctccagacagtgaaggtgctattgatggacacttcgtgaggttggact

SEQ ID NO: 137072 - DNA, 245 bp, Glycine max
attacttcttggacaggccttgtttcctggagagagtggagttgatcagctagttgaaatcatcaaggttttgggaactccaaccagggaggagataaagtgcatgaacccaaattatactgaatttaagtttccacagataaaacctcatccgtggcacaaggtctttcagaaacgtttacccccagaagcagttgaccttgtctgtaggttctttcagtactcccccaatttggagatgcact

SEQ ID NO: 137073 - DNA, 244 bp, Glycine max
gtttggtccaagacatggctctgatcctgcatgctaccaaaacaaacaagaatgccttcaagactctgattgcggcagagtacagtggcgtccaagtggaattggcccctaatttcgagatgggtgtctctaacaaaactcctgaatttctcaagatgaatcctattggaaaggttcctgttttggaaacgcccgatggtccagtctttgagagcaatgcaatcgctcgttacgttgctcgact

SEQ ID NO: 137074 - DNA, 240 bp, Glycine max
gcagggcttttggagttcgctaaggggtgtcctagtcttcagaaacttgaaatgagagggtgtttatttttcagtgaacgtgcacttgctgtggctgcaacacaattgacttctcttaggtacttgtgggtgcaaggttatggtgtatctccatctggacgtgatcttttggtaatggctcgacccttttggaacattgagttgattccctctagaaagggtgctacgaataacaatcca

SEQ ID NO: 137075 - DNA, 241 bp, Glycine max
gcagtcactgctctgtttcaccgagtttgggcgtttagatcagaaccaaatcgtgttctcttccattggcaaacatggcaactcaaatgagcaagaagagaaagtttgttgcggacggagtgttctttgccgaactgaacgaggttctgacacgtgaattggcggaggacggttactccggcgtcgaagttagggttacgccgatgcgcaccgagatcatcatcagagccaccagaaccca

SEQ ID NO: 137076 - DNA, 241 bp, Glycine max
gggaggaaaccatcaaagcaaaaatttcaagagtttatgtcaggactgaatcatctgatactagccttattgtgaaagatggataccaatggaggaaatatggacaaaaggtgaccagagataacccttaccctagagcatatttcaagtgctcttttgctccaagctgccctgtcaaaaagaaggtgcaaagaagtgtggatgatcattctgttctgcttgctacttatgaaggggagca

SEQ ID NO: 137077 - DNA, 241 bp, Glycine max
atctcagcaaggcacctacctggccaagtgctttaatcggatggaagagtgtgagaaaaacccagagggtcccatcaggttcaggggagaagggcgccatcgcttcaaaccctttaggtacaagcatttaggtcaatttgctcctctaggaggagagcaaacagctgcacagcttcctgtggattgggtttcaattggacacagctctcaatggctgtggtattctgtctatgcaagtaaa

SEQ ID NO: 137078 - DNA, 245 bp, Glycine max
ctgctcctcataagattaatacaacctcaaaaagagttctttcaaaatgcaaacagccttaaccttcgctgcccccaacgttgtgccattggcacccacaaagagtgtctcccatattaccatctttcctaccaaattgaaagccccgcgctcctcacctcgttactctccgattagggttgcaaccgtggagcccgacacttcaactgtcgactacaactctgcgttctcagtgtttcctgcag

SEQ ID NO: 137079 - DNA, 243 bp, Glycine max
ctttattccttttgtaatttcattcattcttaatctttgtgaaaaataatgttcatcgataattgtaaggttgagtgtcctagtgtgaagtacaccgagactgagattcagtccgtgtacaactacgaaaccaccgaacttgttcacgagaacaggaatggcacctatcagtggattgtcaaacccaaatctgtcaaatacgaatttaaaaccaacatccatgttcctaaattaggggtaatg

SEQ ID NO: 137080 - DNA, 156 bp, Glycine max
cgccttcggctccaccgtcatcgtcgagggctgcgacaccgcccgcaacattgcctgggtccacgcctgcaccgtcacggatgggataattactcagatcagagagtacttcatacaccggccctcatccgtcacccggcatgccagcgattgccg

SEQ ID NO: 137081 - DNA, 241 bp, Glycine max
ccattctctctgtgtatttccctacctctcccttcaagatgcagatcttcgtcaagaccctcaccggcaagaccatcacccttgaggtggaaagctctgacaccatcgacaacgtcaaggccaagatccaggacaaggaaggaatccccccggaccagcaacgtctcattttcgccggaaagcaacttgaggacggccgtacccttgctgactacaacattcagaaggagagtactcttca

SEQ ID NO: 137082 - DNA, 240 bp, Glycine max
tcaatgggttcttcttctattacaacatcgcccccaaccatgaccatggctgcgatcgtgctcctgttcacggtctttgccgtttcctccgccctagacatgtcgataatctcgtacgacagcgcccacgcggacaaggccgctacgttgcgcaccgaggaggagctgatgtccatgtacgagcagtggctcgtgaagcacgggaaggtgtacaacgcgctcggcgagaaggagaagcgc

SEQ ID NO: 137083 - DNA, 232 bp, Glycine max
agtgagaacacctctgagattacctgtcaaaccaaaacatgttcttgttaagataatttttgctggtgtcaatgctagtgatgtaaattttagctcaggccgctattttggtggcaacaacaatgatgttgtttctcgtcttccatttgatgcaggatttgaggctgtagggataattgcagcagttggggattctgtcactgacttgaaagttggtatgccctgtgcaatc

SEQ ID NO: 137084 - DNA, 239 bp, Glycine max
taacaatatcttggttatctgtgatgcctacactcctgctggagaacctattcccactaacaagaggcacgctgctgccaaggttttcagccatcctgatgttgttgctgaagtgccatggtacggtattgaacaagaatacaccttgttgcagaaagatatccaatggcctcttgggtggcctgttggtggtttccctggacctcagggtccatactactgtggtgttggcgctgaca

SEQ ID NO: 137085 - DNA, 245 bp, Glycine max
acttggagtccttagctggaaattagatgctgataaccatgaaaatgatccagagctgaaaaagattcgtgaagagcgtggctacacctacatggatgtttgtgaggtctgcccagaaaagttgccagattatgagcagaaaatcaaaagcttctttgaagaacatcttcacactgatgaggagatccgcttttgtgctgctggaagtgggtattttgatgttagggattgcaatgatgcttgga

SEQ ID NO: 137086 - DNA, 230 bp, Glycine max
ggaacaaggtaataagcaagctggaaaggcggactgctgcctaccatgaagcaggccatgctgtttcaggttggttcttggaacatggtgagcccttgttgaaagtaactattgttccacgtggcaccgctggtgcttggaatttgacccaatcatgttacccaattgtagaacctctttcatggacaacaggacgcagctctttctgataatcagcttgtcatgacact

SEQ ID NO: 137087 - DNA, 268 bp, Glycine max
gcttccgctatcctcatatggattgcttcagcccttcatgctgctgttaactttggacagtatccatatggaggtttaatcctaaacaggccaactattagcaggagattcatgcctgaaaaggggtctcctgaatatgatgcgttggctagaaccctgagaaggagtttttgaagactattactggcaagaaggagaccctcattgaccttacagttatagaaatcttgtcaaggcacgcatctgatgagttctaccttgggcagag

SEQ ID NO: 137088 - DNA, 256 bp, Glycine max
ggcgttttagagtggaaaatggcaggaagcagcattaacagaggagaaagatggtctctcaatggaatgactgctcttgtcaccggcggcactcgtgggatcgggacctccatagtgagtgacttggctgcgtttggcgctgcatgcacacctgttccaggacccaaacagagctcaacaaatgctgccaagagtggcagagtcaggggtttcaggtaactgggtcgctctgtgacgtgtcctcaccaccccagag

SEQ ID NO: 137089 - DNA, 257 bp, Glycine max
atcgattaaagacttgcttccaagatggttctgctagagaagctctgggatgacgttgttgctggccctcaacctgagcgtggccttggcaagctcagaaaactcaccaccctcaaaactattgatgaaggagacagtagcaagtgcagaagacgttgtcgatgccgtcgacaccgacaatcccgatgactcccacgactccaacgacaccgggatccgcgcgtaaagctgacaacgtttggaggagcgtcttccat

SEQ ID NO: 137090 - DNA, 257 bp, Glycine max
tttctcttcctcgttcgtttcatttcgtttcgttgaagagcaacttttctctctctgtctctgtacaattctcccttttcttccctcgtagatcgaaagggaatattcttccatggcctccaagcggattctgaaggagctcaagacctacagaaagaccctccaacctcttgcagtgccggtcccgtagcagaagatatgtttcattggcaagcaactataatgggtccccctgatagcccttatgctgggggtgt

SEQ ID NO: 137091 - DNA, 262 bp, Glycine max
acccaacaaatctcctccattagtcaaagaaattcctatgaagaatttgattggactgcaaggagaaaaaacattatctgaaataggagttgcaaggcaacttgtgtcaatgggtcaccaagcttgtggggcattagagctttggaactcccagagtggctcagagacctcgtaccacaattcatagatggcacagataggcctgatcatgtggatctagctgctcttgaaatttatagagatagagagaggagtgtggcta

SEQ ID NO: 137092 - DNA, 257 bp, Glycine max
cccgcactctgcttcagatcattgtccacggtcacgtctatgattgcacccgcttcctcaaagatcaccccggtggtactgacagcatcctcatcaatgctggcaccgactgcaccgaagagtttgacgccatccattctgcaaagcaaaaaaattgcttgaagattaccgaatcggggagctcatcaccactggctacacctcagactcatcgcccaacaactccgtgcatggcaattccgaattcactcatttgg

SEQ ID NO: 137093 - DNA, 251 bp, Glycine max
gagtgcggcggtccaaacactcttctctgcaacttttgcctacaactccctttcaccagtggctgtaaacaaatccgcgctacgcttgtacttaagcatccgtaagtgtttctcagcacaaaggagactgggaccggaagagacctggaataagtgacaaccgcttttggaagtccattgggcttggatttaagactcccagggaaacactcgaaagaacctatattgacgagatgtgccccttcactggc

SEQ ID NO: 137094 - DNA, 252 bp, Glycine max
ggaaaaggtgatgaaattgacagagaatgagagtaacaagtatggtttgttcaccaaggaatttgcgaaacgccatggcctgcatttgttgggaaccaccaccacttggttcttgttggacatagcattctacagccaaatcttttccaaaaggacattttcagtgcaattgggtggatccctccagcaaaggaaatgaatgcaatccacgaggtgtataagattgcaagagcacaaacacttatagcactg

SEQ ID NO: 137095 - DNA, 249 bp, Glycine max
cgtgattccatgcacaagaggcgcgccaccggggcaagaagaaagcttggaggaagaagagaaagtatgagcttgggaggcagccagcaaacacaaagctatcaagcaacaagacggttaggaggattagggttcgcggtggaacgtgaagtggcgcgctttgaggcttgatactgggaactactcttgggggagtgaggctgcaacccgcaagacaaggattcttgatgtggtgtacaatgcatccaa

SEQ ID NO: 137096 - DNA, 253 bp, Glycine max
cgcaacaaaaagaaagaatcccaggcgaggagaaagatggaggggaaggagcaggatgtgtcgttgggagcgaacaagttccccgagagacagccaattgggacggcggcgcagagccaagacgacggcaaggactaccagagccggcgccggcgcgctggttgacccgacggagtttacgtcatggtcgttttacagagcagggatagcagagtttgtggccacttttctgtttctctacatcactgtctta

SEQ ID NO: 137097 - DNA, 262 bp, Glycine max
gcagattctacaatcaggatgtcattgctgctgtgattcttggtactgggacaaatgcagcatatgtagaacgagcacatgctattccaaaatggcatgggcttataccaaaatcaggagatatggttataaacatggagtggggtatttccgatcatcacatcttcctctaacagaatatgatctagctccggatgctcagagcttaaaccctggagaacagatttttgagaaattgatttctggcatgtatttgggggaa

SEQ ID NO: 137098 - DNA, 260 bp, Glycine max
gaagcaacaaaagggtatgctgtggtcactggagcaaataagggaattggatttgcaatatgcaagcaattggcttctaatgggatcactgtggtgttgacagccagagatgagaagaggggtcttcaagctgtcgagaaactcaagagcttggtctttctggccatgtgggttttcatcaacttgatgttacagaccctgcaggaataagatcacttgcagatttcatcaggaacaaatttggaaaactagatatcttg

SEQ ID NO: 137099 - DNA, 254 bp, Glycine max
cagtggacctcacaagaagggtattgcacttggtaggtcagtggacctcacaaaattcagtgattatggggaattaattactgaattggatcaactattcgaatttggaggtgaattaacttctccacaaaaggattggctattgtctacactgataatgagggagatatgatgcttgttggtgatgatccgtggcaggaatttgttgcaatggttcgcaaaatttatatctaccccaaagaggagattcagaa

SEQ ID NO: 137100 - DNA, 248 bp, Glycine max
ggctcgagcgattcggctcactagtatcttccatggctccgaacgatagaatcctggtgttgggacccacaggagccactggaagacacatagtttgggcaagtgtaaaggcagggaatcccacttttatattggttgggacacccctgcctctgttaacaagccaaggcttgtcactgctgctaatcctgagaccagggaagagctcattcagagcttccaaaattctggagttactctaatccagg

SEQ ID NO: 137101 - DNA, 250 bp, Glycine max
atcaactcttcaaaagggagaagaaaaggaaagataactctcaaaaaactattatagcaatggcagaacaaaaccaaaaccaaacaactgaagctggaaggcaccaagaggttggtcacaagagccttctccagagtgtgctctttaccagtatattctggagacaagtgtctacccaagagaacctgaatccatgaaagaactgagagagttgacagcaagtcacccatggaacatcatgacaacctct

SEQ ID NO: 137102 - DNA, 246 bp, Glycine max
gtaacacactcatcactcatcatattcattcacacttcccactttccaatatggaatgctgcataatcgccaggctcaagacccaacctttatggttcgcgctgctcttcgttgtcggattgttaacgattctcaaatggctttcgttgttttcagatgggtctacgtcaatttcctccgaccaccgaagaatctcaaaaagtacggatcttgggcagtggttactggacccactgacggcattgg

SEQ ID NO: 137103 - DNA, 248 bp, Glycine max
gagagggctgatccccacattatccaccgggacatcaagtcaagcaatgtactaatctttgatgacgatgttgctaaaattgcggattttgatttgtcaaatcaggctcctgacatggcagcacgtctccattccaccgtgtccttggaacctttggttatcatgcaccagaatatgcaatgactggccaattgaatgccaagagtgatgtatacagctttggtgttgtccttctggaacttttgact

SEQ ID NO: 137104 - DNA, 251 bp, Glycine max
gtaattgcatcatattctttcctttagacaagtgcaacataggaagagataacaaacatgggttcttcggaaactatcaatatgccccatgccgtgtgcataccgtacccagcacaaggccacataaacccaatgctaaactagcaaaactccttcacttcaaaggctttcacatcacttttgttaacactgagtataaccacaaacggattctcaaagctagaggtccttattcccttaatggtctccct

SEQ ID NO: 137105 - DNA, 248 bp, Glycine max
attgtttccaccattgaagaggagtccaggaggcaggaatggttggagtttgaagaagaagatgagaacgctttggcggaaagaaggaggctgattaaagagaagttgcttcaaagagagcaggaagaggcgcttcctaggaagaggaagaggaggaagaagaagaggaggaggaggaggaatctgagtacgagactgactccgatgaggaatatactggagtggctatggtgaagcctgtgtttgtt

SEQ ID NO: 137106 - DNA, 257 bp, Glycine max
gaacaacgacgatggcgatggctgcagctctgcgtcgcgaaggaaggcgtttgacccaaccaatcaacgccctccactcttctctcaattcctccctcatctctcaagaccaagcccctcatggcgcgcgctccatttccaccaagttgtgaggaaccgaatgaagagtgtgaggaatatccagaagatcaccaaggccatgaagatggttgccgcgtccaagctgcgggccgttcagaccagaactgaaaattccc

SEQ ID NO: 137107 - DNA, 257 bp, Glycine max
gacattttcacaccacccaaggttcaaaaactgtcagtgatgttggagtgatgagtttagcatatggctgccctgatcttagaacacttgacttatgtggttgtgtccttataacagatgacagtgtaattgtcttggcaaaagatgtcctcatctgaggtcccttgggctgtactactgccaaagcctgacagacaaggcaatgtactctttggcacaaagcaaattgaacaacaggatgtgggggtctgtgaaag

SEQ ID NO: 137108 - DNA, 251 bp, Glycine max
cttcaaaccctagctaggatttcaaggtacacttaacgatggcttcaaaacgcattactaaggagttgaaggatctgcagcaggaccctcctgtttcctgcagtgctggccctgttggtgatgacatgtgtcattggaagctacaattatgggtccaactgacagtccttatgctggtggtgtattcctggtgaccattcacttcccaccagattatccatttaagccaccaaaggtgtccttccgaacca

SEQ ID NO: 137109 - DNA, 242 bp, Glycine max
gtctgatcggcgaaaggatcgagtggaaaccaaccctgaacagttggctgctgcttctgccttggctgatagaatgaccacatccactggaagcacaaccagagttattggttggtaccgttcacaccctcaattacagttctcccttcccatgttgatgtgcggactcaggcaatgtattaacttcttgattctggatttattgggttgattttttcctgttacagtgaagatgtaaacaa

SEQ ID NO: 137110 - DNA, 246 bp, Glycine max
gagtgcggcggtccaaacactcttctctgcagcttttgcctacaactcccttcaccatggctgaacaaaccgagaaagcttttctgaagcaaccaaaagtgtttctcagcacaaagaagactgggaacggaagagacctggaaaaggtgggaaccgcttttggaagtccattgggcttggatttaagactcccagggaagccatcgaaggaacctatattgacaagaagtgccccttcactggcaa

SEQ ID NO: 137111 - DNA, 238 bp, Glycine max
cgaagatagaatgtgcacagccctaaagacgaattaccagcttagcgaggagatcggtcgcggtcgtttcggcaccatcttccgctgcttccacccactctccaacgcaccctacgcctgcaaactcacgacaaatccctcctccatgactccaccgaccgcgactgcctccagaacgaacccaaattcatgaccctcctttcacctcacccaaacatccttcaaatcttccatgttt

SEQ ID NO: 137112 - DNA, 241 bp, Glycine max
caactatggccctcaaggctgcctcaggttctataccaagtgcagacacaagtagtgccgataaggaggaagaaaagtctgagacatatagtcataacatgacagaagccatgggtgctggcatgaattggaatgaactataatttcatccgtccagacttgattgtgggatcatgcctacagactcctgaagatgtagacaagttgcgtagaattggagtgaaaactatattttgcttac

SEQ ID NO: 137113 - DNA, 243 bp, Glycine max
tacagtttgtattattgtagaggagagagggagagagatggagttgagcatgaaagtgttggtgaaagttgcttcgttgcttttcctattgggattcactgcaacagttgttgatgctcgcttcgatccagttcattcatcactcagtttctccccaatgctgaagccaacaattactatgttaaatccacaacaaaagcgtgctgtaacagctgtccttgcacaaaatcaatccctccacag

SEQ ID NO: 137114 - DNA, 244 bp, Glycine max
ccggcgccgaccaggaggttgtgaagaaggggtgcgaggctctgcatagatgcgaggacatggtcaataatctaggtttgttctctcccaacgagaccaaagaagatatcagcaccacgaatctcaaataattctggtgccattttatcttgcggagttgacagaaaaaatagcacaggatgacaggatacagattctaaagtcttcccaggcaaaacttaaggagtttatctcattttgtgaa

SEQ ID NO: 137115 - DNA, 245 bp, Glycine max
caagcttgttgaaggtcttaagcggttggccaagtcagatcctatggttgtttgtaccattgaggagtctggtgaacacattgttgctggtgcaggagagcttcatcttgagatctgtttgaaggacttgcagatgatttcatgggtggagctgagatcattaaatctgaccctgttgtgtcattcagggagactgtcctggagagatcatgccgcactgtgatgagcaaatcacccaacaagca

SEQ ID NO: 137116 - DNA, 241 bp, Glycine max
cgttctagatcgcgagcggccgcccgcgatctagaactagcccagctcctcggctccatcgtcgcctccctcctcctggccttcgtcaccgcctccagcgttccagcattcggactctccgctgggttggagttggcaacgccttggtgttggagatcgtgatgaccttcggtactggtgtacacggtctacgtcaactgtaccattgaccccaagaagggtaattttgggaattgattgc

SEQ ID NO: 137117 - DNA, 263 bp, Glycine max
ttcttctctggttgattcggatctagagtcttcagtttctcctcgttgttcttcgctttcctgttttcaatttcgattctttcgttaatttaataagatgtttgggagggcaccgaagaagagcgataatacgaggtactacgaaatcctcggcgtctccaagaacgcttcgcaggatgatctgaagacggcttacaagaaagccgccattaagaatcaccccgacaagggcggtgatcccgagaagtttaaagagctggcgc

SEQ ID NO: 137118 - DNA, 254 bp, Glycine max
agggtttcgaaggtggccagatgccgctttatcgccgaatccccaaactcagaggaattgcaggaggtatgcatgcgggattgcccaaatatgtccatgtaaatctgagagacatagaagatgctaaatttaaggaaggggaagaagtgtctctagagtcactgaaggcgaaaggtgtgattaatccatcaggaagagaaaggagacttcctttgaagatcttgggtgaaggagaactgagcaagaagttgaca

SEQ ID NO: 137119 - DNA, 266 bp, Glycine max
  unsure (1)..(266): unsure at all n locations
ttcggctcgagtgttttttacaataattattacaaactcatgcgacatgcttcgttcaagatggacaaagtttaccattaaatttaaacaaaaattcctaatcatgatttttattcttccttttcagattcttaaacgctggaatatttggaaatggaactgaatcaagccataccctgccacacaatataagaagcggcgncatgttagtgagaatcaacactcttcttcaggggtactcaggcattagatttgaaatcttagaa

SEQ ID NO: 137120 - DNA, 255 bp, Glycine max
gaattctacaaggaagacaaaacatacgatttgaacttcaaggaagataacaatgatggctcccagaggatctctggagatgctttgaaagatctgtacaagtcatttgtgtcagagtacccaattgtttcaattgaggatccatttgaccaggatgactgggagcactatgctaagctaactgctgaggttggagccaatgtacaaattgttggtgatgatctcttggttaccaaccccaagagggttcagaag

SEQ ID NO: 137121 - DNA, 252 bp, Glycine max
gtgggattcatatacttctcgacgtgaccatgacacaattcttcaaatattacttcatggaaaggactcgagtgccacagatgtagatggaaatgttatgcccatattggtgtatttggctcgcgagaagagaccccaagttgcacataacttcaaagcgggagcaatgaattcattgttaagggtgtcatcaatgattagcaatggggaaattatccttaatgtagattgtgacatgtactcaaacaattc

SEQ ID NO: 137122 - DNA, 258 bp, Glycine max
gtggaagatgataaaaagagatgaaggacgaattgagaagtggattctgaggagagcctttgatgatgaagagcatccttatctgccaaagcacattttatacaggcagaaagaacaattcagtgatggagttggctatagttggattgatggccttaaggcccatgctgcaaaacatgtgactgacaaaatgatgcttaatgctggtaacatttacccccacaacaccccaaaaaccaaggcagcatattactacag

SEQ ID NO: 137123 - DNA, 258 bp, Glycine max
aactgcagcaatggctcccaaacgaggtggaaaggctccggctcttgccgctaagaagacgcctgagtaggtgtcgaatccgttgttcgagaagcgtcgaaagcagttcggaatcggaggggcgttgcctccgaagagcgccttgactcggttcgtgaagtggccaaagaatgttcaaattcagaggaacaagaggattctgaagcagcggttgcaggttcctccagctttgaatcagttcaccacaactcttgacaa

SEQ ID NO: 137124 - DNA, 243 bp, Glycine max
gggcggacggtcgtcggtgcagatcttggtggtagtagcacatattcaaatgagaactttgaaggccgaagaggggaaaggttccatgtgaacggcacttgcacatgggttagtcgatcctaagggacgggggaagcccgtctgatagcgctctgtgcgcgtactccgaaagggaatcgggttaaaattcctgaaccgggacgtggcggctgacggcaacgttagggagtccggagacgtcgg

SEQ ID NO: 137125 - DNA, 251 bp, Glycine max
atcttccccggctttggtcttgggttggtaatctcaggagcaatcagagtgcatgacgatatgcttctagcagcttcggaagccttggctaaactggtgaccgaggagaactacgaaaagggcttgatttatccaccattctctaacatcagaaaaatttcagctaacatagctgcaagtagctgccaaggcatatgagctaggcttggctacacgtctccctcgtcctcagaatcttgtgaagtatgctg

SEQ ID NO: 137126 - DNA, 252 bp, Glycine max
ccctcttggaaataaaataccagaatttaatgagttagtataccaaaataggtggcgtgaagcattagagaggcttcttgagacaaataacttcccagagtttactggtagggtatgcccagcaccttgtgaaggttcttgtgtccttggtattattgagaatccagtatctattaacagcatagaatgtgctatcatagacaaagcttttgaggaggggtggatggtgccacgacctccagcttaggagaa

SEQ ID NO: 137127 - DNA, 251 bp, Glycine max
cacatgtcttgatgggcatccagcatagtactacttttgcttcattatctccacttggtgaagcatgctcaagaaaagacttgactgccatacaagaagttctggaaagtattggctataaagatgacgaaggagtggcaaatgagttatcatttcacatgtggactgatcaaatgcaggacacattaaattgcaagacaaagggagatgttgctttccggcagaaagattttagactggcaattgagtgc

SEQ ID NO: 137128 - DNA, 251 bp, Glycine max
caaaaaatccataatccaagataaggagaaactgcgaaaatggcatcggagtcaggtcaaagtcccaatccttcttggtttacgcccaaaaggcttcttatgatattttgtctcattaacatgctaaactatgtggatccaggagctatagccagtaacggtgtcaatggaagtcttgcaacttgcactgactctggaatttgtacaggtggcagtggaattcagggggattttaacttgaacaattttca

SEQ ID NO: 137129 - DNA, 254 bp, Glycine max
tgataagcttctttgggttcctcctatttggcgaaggaactcttgatgatgtgctggccaatttcgataccaatcttggaattcctttcggttctgtgctcaatgatgctgttcgtataagctaggccgcacacctgatgcttgtatttccagttgtcttctttccattgcgtctcaacatagatggcctcctcttctctaaatcaaggcctctggtttctggataacttcagatttgcatcactcactattgc

SEQ ID NO: 137130 - DNA, 241 bp, Glycine max
agcaacatcaatatcatcgacagacaacaatttcgggaatccgctggctatgactgcagttgtggtcgtcccattgggccttctcttcttcgcttccggcctcatcgttaacctcattcaggcaatatgctacgtggttgtgcggccggtgtcaaagaatttgtaccggcggatgaacagggtggtggctgaactgctgtggctggagctcgtttggattattgattggtgggctagtgtt

SEQ ID NO: 137131 - DNA, 248 bp, Glycine max
aaaggcaatgaaaaaggtcacgtggaaccatctaaaccaaaagcacaagaagttcctgcgaaaattccttctcagcaagtgcctagcttcacatcctcttgggcagttgatgacttgttggaattaacagactttgaatcaccagacaaagttcagaagcaatcccttgagtttggagaacttgaatggctagcagatgtaggcctttttggtgaacagtttcctcatgaagctttagcggcggctga

SEQ ID NO: 137132 - DNA, 246 bp, Glycine max
cagcatcatatcagaatcctcaaggggcacagaacgagcatgatccaaataataccactatttttgttgggaatttggatcctaacgtcacggatgatcatctgagacaagtttttgggcagtatggggagttagttcatgtgaagattccagctggcaagagatgtggatttgtccaatttgcggacaggagctgtgcagaagaggcactgcgggttttgaatggcacacttttaggcggacaaa

SEQ ID NO: 137133 - DNA, 245 bp, Glycine max
ctggaatcatgactgacaaggacattgctactagagttatagcggagggtttgcggcccgagcagacgatggtgtcaaaagtaatgactcggagtcctatatttgtgacatctgacatgctagctttagaagctcttcagaagatggtccaaggtaaattcaggcacctccctgttgtggaaaatggtgaagtgattgccatactggatatcaccagatgtctttatgatgccataactaggatg

SEQ ID NO: 137134 - DNA, 246 bp, Glycine max
atctcttgtttcttgctttctttcttcaccatgtcacttgctgggaaaatcaccactgaaatcggggttcatgcaaccgctacaaagtggttcaacctcttcgcaacacaactccatcatgttcaaaacctaactgatagagtgcatggaaccaagctgcatcaaggtgaagactggcatcacaacgagacagtcaagcactggacttataccatagatggtaaggttacaacatgtctggagagt

SEQ ID NO: 137135 - DNA, 245 bp, Glycine max
aaaaaatcgtgctggtgttgccaagtttgttgataacaccactttatttttggtaccaccttctgatttcttgaccaaggttttgaaagtcacaggacctgaacgcttatatggtgtggttcttaaatttccattagttccaagtagcacatctatgcaacaaccaatgcatttgccttctccctctactcagtatatgcaacggattcctccttcacaagctgaatatggttcaatattggtaa

SEQ ID NO: 137136 - DNA, 249 bp, Glycine max
ctcgagccgagtctgtaccgaagaacaagatcaagtatagctgtaaaggtggatggaaatagagggacacttctaagccaaacccaaatacaattgttggtgccatggttgccggtcctgacaagcatgatggcttccatgatgttcgtacaaactacaattacacagagccaacacttgctggaaatgccggtttagttgctgcactagtggcattgtcaggcgacaaaggcacatctattgacaaaa

SEQ ID NO: 137137 - DNA, 250 bp, Glycine max
cccatcaaagatgctcctctttctgtctttattcctttttatgtctcaggcttgcaggccagccatgttcaagaaatccatgaagaggttaaacgttacatggtgggcgtattcattccctttaaccttccttggactagcttgtgctgaatatgctcaagaggtgaaaagtggcatggcctcttggttaatgctggttatatgtatggtctccgtgctggtttttattgctttgatgatcatcactgta

SEQ ID NO: 137138 - DNA, 246 bp, Glycine max
gaagaaaatgaaagtccttgttttctttgttgctatagttctagcagcatggcattgccatggctcagaccatgaccatgacgctggccacacctaccaaattttccctctgagaatgaaaactggccatggtggccactacattccggaggtatcatgccaaagttggaggcttggtgtggaagcacacaacgtcattgactggaaaaccgttcctcaagattgcgagggatatattgggaacta

SEQ ID NO: 137139 - DNA, 244 bp, Glycine max
attgaattgacaatgaggcctgctcttgctttgcttcctcttctatttgctttcttgttagctgccactacggaatcaagaaaagatccaggggaatattggaaaatgatcatgaaagatcaggaaatgccagaaggacttcaaggtcttgtttcatttcaatctgaaaataaccctaagactcaagagcagcttggtaaaggttccaaaaaccattgtgaagagtctctagttacaaatacac

SEQ ID NO: 137140 - DNA, 243 bp, Glycine max
ccagattgagaatctcaattccaaatatggaagcaatgttcctttgcttctgatgaattcattcaacactcatgatgacactcaaaagattgttgaaaaataccaaaactccaatattgagattcatacttttaaccagagccagtatcctcgattggttgctgaggactttttgccattgccttccaaagggcatactgacaaggatggatggtaccctcctggccatggagatgtctttcc

SEQ ID NO: 137141 - DNA, 243 bp, Glycine max
attcttcagccgcatcaaccagacggacccacccatcgaccctaccttgaacaacaacctcatcaaaacttgtccctcttcccagtcccccaacacggccgtgcttgacgtgagaacccccaacgtgttcgacaacaagtactacgttaacctcgccaaccgacagggtctgtttacctcggaccaggacctgttcggtgatgcccggactaagggaatagttaactcctttgctgaaaacca

SEQ ID NO: 137142 - DNA, 245 bp, Glycine max
ggcaagccccactcaaccaccacacctctcctcgttcacgctacccctttctgctcttcttctacctttcaagttttaaaagtataaagatggcagagacattcctatttacctcagaatcggtgaacgagggacaccctgacaagctctgcgaccaaatctccgatgctgtcctcgacgcttgcctcgaacaggacccagacagcaaagttgcctacgaaacatgcaccaaaaccaacttggtc

SEQ ID NO: 137143 - DNA, 241 bp, Glycine max
ctaattcaatactacaacttctgaatcacttagttgaattgaattatcttcaaaatgagagaactccttcatgttcaagctggtcaatgtggcaaccaaattggaggcaagttttgggaggtgatgtgtgatgaacatgggattgatgccactggaaattacgtaggcaattcccatcttcaacttgagagggttaacgtgtactacaatgaagcaagtggaggacgctatgttcctcgag

SEQ ID NO: 137144 - DNA, 248 bp, Glycine max
attgcccccactcttctccacttctcaatcctctgtaacttcaaaacatacacctcttctctctgtttctcttcactctctctctccctccctcttcaactaacatggcaattgaaaaccaagacaccgctgtcagagaaatcaagcccaagaacaggagaatcatgggtgctggagggcctgatgatgaggacaataggtggccacgtggttgaagccactgctgaaagagagcttctttgttcaat

SEQ ID NO: 137145 - DNA, 241 bp, Glycine max
ttctctctttgcgctttctgcaaaccgaacatttcatctccaaagggatcaacaggtcgaaggagaaatggggctgacattcacgaagcttttcagccggcttttcgcgaagaaggaaatgcgaattctgatggttggtcttgatgctgctggtaagaccactatcctctacaagctcaagctcggagagatcgttactacaattcctaccattgggttcaatgttgagactgtggaatac

SEQ ID NO: 137146 - DNA, 239 bp, Glycine max
tggaggagaagcacaaggcggtgctccctgcgaatttcaagaagattctaggtctgcaactaaagaaccaagctgcgagagggaaactcgtgaagatcaaggcttcgtacaagttaaccgaagccgcgaagaaggagaacaccgccaaagtgacgaaggccaacgctgagaaaaaggaatcgcgtccaaaacgaagcaaaaccgcaaccgccgctgctccgaagaaaaccgaggcggtt

SEQ ID NO: 137147 - DNA, 238 bp, Glycine max
gttgttccagatcccacccagatcgatgtcaagctctttaaccgctggagcttcgaggatattgaggttactgacatttcactggctgattacattggagttgcggcatccaagcacgccacatatgttcctcacaccgccggaaggtactccgtgaagcggttcaggaaggcgcagtgccccattgttgagaggctcaccaactctctcatgatgcacggtagaaacaatggcaaga

SEQ ID NO: 137148 - DNA, 238 bp, Glycine max
tagatatatagaagagccttccatatatagcctcccaaaaaaatgaagagtactacctctttggctctctttctactttgtgccctaacttcatcatatcagccttcagccaccgctgatattgtattcgacaccgaaggcaatcctattcgaaacggcggcacatactatgtgttgccagttataagaggaaagggcggcggaatagaatttgccaaaaccgaaacagaaacatgcc

SEQ ID NO: 137149 - DNA, 241 bp, Glycine max
cctaagggcatgcaacttccttccatttacgcagaccctaaatcacccctttatgacactctccgcaatgccaatcatcaacccccaacactcgtagacctcgacttcaatctcgaggatcctatttccaatggcaaaatttccaacaacctcaccataatgtataggcaagttgtgtctaacgggaagactcctacattgttccttggaaatccgtaccgtgctggggatgagcctgacc

SEQ ID NO: 137150 - DNA, 243 bp, Glycine max
ctcattcagagcttccaaaattctggagttactctaatccagggagatatgaacgatcatgaaagtctggttaatgcaatcaagcaagttgatgtagtaatctgctcatttggtagactactaatagaagaccaagtcaagatcgttgcagcaataaaagaagctggaaacgtcaagagatttttcccatctgaatttgggctggatgtggaccgtcacgatgcggctgagcctgtaagagaa

SEQ ID NO: 137151 - DNA, 233 bp, Glycine max
taattattgttttctttttaagtgtggagtgctgtgcaggtcaaggcccttttacttgttcgtccggttgttcccatcttctctctcgtaccaatcaaatcacacttttgtgttgtgttgggaaaccctaaaccccgttttcggtgagatcgagatcgatcgaacatggatgaggagtacgatgtgatcgtgttgggcacgggtctcaaggagtgcattctcagcggtcttct

SEQ ID NO: 137152 - DNA, 233 bp, Glycine max
cttaaatcatttccttctttctctctttctttatcttctcattttcctcattacactcttttctttctctcaacttttctcttattaaccatagttcacatattatatcatcacatatcatagtgatatattatatcatatcacaatgtgtggcatacttgctgtgcttggttgctctgattcatctcaagccaaaagggttcgcgtccttgagctttctcgcagattgaagc

SEQ ID NO: 137153 - DNA, 232 bp, Glycine max
attacttgaaggcagtgattaaagaaacttttcgattacatcccccaattaccatattggccccaagggaatccacgcaaaatactaaggtgatgggctatgacattgcagctggcacgcaagtaatggttaatgcttgggcaattgcaagagatccttcatattgggaccagcctgaagagtttcagccagaaaggttcctaaatagttcaattgatgtcaaaggacatga

SEQ ID NO: 137154 - DNA, 234 bp, Glycine max
ctcttcttctcttgcggcgagggtctagcgagctcttctagatttaaggaagatgggtaaggaaaaggttcacatcagtattgtggtcattggccatgtcgactctgggaaatccactaccactggtcacctgatttacaagcttggaggcattgacaagcgtgttattgagaggtttgagaaggaagctgctgagatgaacaagaggtctttcaagtatgcctgggtgctgga

SEQ ID NO: 137155 - DNA, 251 bp, Glycine max
ttttgacttagatacttcttatgcaactatagtgaggctaagagttggtgcataattaatcaaaatgttggccatattccacaaagcttttgctcatccacctgaagagctgaacagtcctgcatcttacaaaggttccaagaagcctaaggttcctgaggaaactctcaaagatttcctttcccaccatcctcacaacacttgctccatgagctttggtgaagctgctgtgctagcttatgttcgtcctg

SEQ ID NO: 137156 - DNA, 248 bp, Glycine max
gcgccgtcaaaatgccattcagctagaggagaaggagaaaagggaaaaagaaatgagattgaagattattgaagaagctgaggagtataaggtggctttctatgagaagaggaagcttaatgttgagactaacaaggttcagaatagagaaagggagaagttattcgtggccaatcaagagaagtttcacaaagaggcagacaaagcttattggaaaaccattgcagagctcattcctcgtgaggttc

SEQ ID NO: 137157 - DNA, 242 bp, Glycine max
gtttgttttttctctcacctgaaaatgtcttgctgcggtggtaactgtggttgcggaagctcctgcaagtgcggcaacggctgcggaggctgcaagatgtacccagacttgagctacactgagtcaaccaccaccgagaccttggtcatgggagtggcacctgttaaggctcaatttgagggtgctgaaatgggtgtgcccgctgagaacgatggctgcaaatgtggaccaaactgctcctg

SEQ ID NO: 137158 - DNA, 241 bp, Glycine max
gccggatctgctaaaatacgcttgatccatatgggcctcctcgaccacttgtgggacgacaccgtcgccggcccaaggccggaaaacggtctcggcaagctccgaaaacaccacaccttcactttccgacctagctccggcaaggaaacggagggcgggagcgtgagatcgtacatagacgaatcgtcggaggaagcgacgagagtgacgcgtagtatcatgatcgtgaaaccgcccgggt

SEQ ID NO: 137159 - DNA, 240 bp, Glycine max
gaaaagagttcagggccaaggttgaggagaaagatacttccggaggaaaagtgaaagggcagggaactgggacagtccttgctgtaactcttgttgccgtggatgctgaaatcagcgttaatgctgccatgctacaggaagggcttgctaggacagaaaaaagaaacaggtgggacagaaaagacagacagacagctcttgataatttggagaatttccaggaagaagcaaagaccagca

SEQ ID NO: 137160 - DNA, 241 bp, Glycine max
ctttgttcaagaccccagcatctgtggtatatatatcttttggagagtattgtgtatctgcctcaagaacaggtaactgaaatagcgcatggatttacgaattcgcatgcctcgtttttgtgggtgttgaagccacctcctaagaatttcggggttccacctcatgttctgccagatgggttctttgaggagacaagagataaaggcaaagttgtgcagtggagtccacaagaggaagtgt

SEQ ID NO: 137161 - DNA, 241 bp, Glycine max
aatttctctctgattttctccctcacttttatttctctctttctggattattctctctgtgtagattgtggcgtgttctcgatgatgatgatgatgagccgcagcggcgccaaccgggtagcgaacaccgcaatgtttgtggcgaagggtttaagcggcgaagttggtggtttaagagcattatatggcggtggtgtgaggagtgagagcactttggctttgtcagagaaggaaaagattg

SEQ ID NO: 137162 - DNA, 244 bp, Glycine max
cgtagagaaataagggaaaaatggtgtcgctgaaactgcagaagcgcctctccgcaagcgtgctcaagtgcggcagaggaaaggtttggcttgaccccaatgaagtcaacgaaatctccatggccaattctcggcaaaacatcaggaagttggttaaggatgggtttatcatcaggaagccaaccaagattcactcccgctcacgtgctcgtaggatgaaggaggcaaagaggaagggccgcca

SEQ ID NO: 137163 - DNA, 239 bp, Glycine max
ctattgcgaaaaaggaagcctctgattcaggtttattcggaagaggaagctacaaattctgggcactagctgccatgctgctcttggcattctggtccatgttcaccggcacagtctctctccgctggtccggcaccctcaacactttctcccacgcgtcccttcacgaccacctcgacgtcctcgaaatcgaggagcgggagaagctggtgaggcacatgtgggacgtgtacacgaat

SEQ ID NO: 137164 - DNA, 240 bp, Glycine max
tcagcatctgctgaggttattgctgatattgctctttgcccatttgaggctgtgaaggtccgtgtccaaactcagccaggttttgcaaggggtttgtctgatgggctcccaaaatttgtcagatccgaaggaaccttagggctgtacaagggattagtgcctctatggggacgacagattccatacacaatgatgaagtttgcttcgtttgagaccattgtagagctgatctataagcac

SEQ ID NO: 137165 - DNA, 241 bp, Glycine max
cgcctcagtagaccatggcctcattgggtgggttacaaaatctaagcggcatcaattttcttatcaaaaaagagggtccaaaagtcaatgcgaagttcgagctgaagccgccaccatatccactgaatggtttggagccggtgatgagccagcagacacttgagtttcattgggggaaacaccacaagacatatgtggaaaatctgaaaaaacaaattgttgggacagagcttgatgggaa

SEQ ID NO: 137166 - DNA, 240 bp, Glycine max
ctcgagccgctcttcaccactccacctcctgccttctaagaggcaatttagcttcactgatagggccatccaatcagaaaagccaacctatcaagtgattcaaccaatcaacggtgatcccttcattggaagccttgaaaccccagttacatccagccccttgattgcatggtacttatcgaacctccccgcatacaggaccgcagtgagcccactactaagagggatcgaggtgggcct

SEQ ID NO: 137167 - DNA, 240 bp, Glycine max
ctcaacttctgctacccactctcttcttccaagtccaaccacgcttttctctacagtcatgggcaaggtcaagatcggaatcaacggatttggaagaattggccgtttggttgccagagtcgctctgcaaagagacgatgtggagctcgttgccgttaacgaccctttcattaccaccgattacatgacatacatgtttaaatacgacagtgttcacggacactggaagcatcacgatgt

SEQ ID NO: 137168 - DNA, 242 bp, Glycine max
ctcttcattccttaatttaaaacctccactcattccataaatctctgtgtcctctcctcgattttaccgcaacatgacaccacaaggaaatggcaacaccaacttctgtatgagcgttaacaacaacggctacattagcgctaatgacccgttgaactggggcgcggcggcggaggcgatggccgggagccacctcgacgaggtcaagcgcatggtggaggagtaccggaggccggtcgtga

SEQ ID NO: 137169 - DNA, 241 bp, Glycine max
gtttgcatcacagggagaaactgagacacagaagatgagagagataattagtattcatattggacaagctggaattcaggtggggaattcatgctgggagttgtattgccttgagcatggaattaaccctgatggcaccatgcctagtgatacctcagttggtgtagcacatgatgctttcaacaccttcttcagcgagacgggatccggcaagcatgtgccaagggctttatttgttgat

SEQ ID NO: 137170 - DNA, 237 bp, Glycine max
atcttgctcatgttcctggtgttgtggaactggtgaccaagtttgtcagtttgggaaaacaaattgctagcatttgtcatggacagttgattctggctgctgctggagtggttaaaggccgcacgtgcacggcttttcctcctgttaaacccgtgctagttgctgctggtgctcattgggttgaacctgacactgaggcagcaacagtggtagatggtgatctcattactgcagcta

SEQ ID NO: 137171 - DNA, 239 bp, Glycine max
ggcgtgctgattctgtgcttttcccccaaaagaagcaaaaccactgtcactcgaacaagaacaagaagatgaagattaacgtcaagactctcaaggggactcactttgtccttcaagtgaaccctcaagacacggttgctgttgtgaagaagaatatagagacagcgcaaggtgctgatgtttaccctgctgcgcaacaaatgcttattcatcaggggaaggtgcttaacgatgccaca

SEQ ID NO: 137172 - DNA, 237 bp, Glycine max
ggcaagatgtcgaagagaggacgcggtggttcggcggggaacaagttccggatgtcgctgggtctgccggtggcggcgacggtgaactgcgccgacaatacgggggcgaagaacctctacatcatatctgtgaaagggatcaaagggcgtttgaaccgtctcccctcggcttgcgttggcgacatggtgatggccaccgtgaagaaggggaaacccgatctgaggaagaaggttttg

SEQ ID NO: 137173 - DNA, 238 bp, Glycine max
gagcagaagaaggcaaagatagtggcagagctccaagctgtgaagcacaacagtggcaagtcctacaatcagttagcggaggagactggactcaccaacgtctatgttgctcagcttctcaggagacaggctcagctcaatccccaaactgcccctctacttcgggcagcgctgcccgacctgccccaagaccttgtttctgagatgatgagaccccctttgaggtcttatgacccta

SEQ ID NO: 137174 - DNA, 237 bp, Glycine max
atcgttgtcaatttcgcctctttctttctcaactcccttagattctctccatcgggtcttcaaaaatgcggatgagctgcaatggatgtcgagttctcagaaaaggttgcagtgaaaattgcagcatcagaccctgtttacaatggatcaaaagcccagaatctcaagccaatgctactgtgtttcttgccaagttctacggccgtgctggtctaatgaacctggttaacgcaggcc

SEQ ID NO: 137175 - DNA, 236 bp, Glycine max
tccaaatgcactccaaattgcattgttcatggataacatgcagcacgtgagggaggtgttcacctcttgtaatgatgtgctgcggaagaagcaattctgttacatgcttgcacgtcatggaattacttttgagcttgatgagaagatggtttcagacgatgaggacagagaattgttgcaggaaatcataaacaattctaagttaagtgaaggatatctcacccttgctcgtgata

SEQ ID NO: 137176 - DNA, 238 bp, Glycine max
atcgttgtcaatttcgcctctttctttctcaactcccttagattctctccatcgggtcttcaaaaatgcggatgagctgcaatggatgtcgagttctcagaaaaggttgcagtgaaaattgcagcatcagaccctgtttacaatggatcaaaagcccagaatctcaagccaatgctactgtgtttcttgccaagttctacggccgtgctggtctaatgaacctggttaacgcaggccc

SEQ ID NO: 137177 - DNA, 237 bp, Glycine max
ataggattgcaagagcacaaacactgatagcattgtgcagcaccgtgccagggtactggtttacagtggcctttatcgatatcatgggccgtttcgccatccaattgatgggtttcttcttcatgacagtcttcatgtttgctcttgctataccttacaatcattggaagaaccacaacaatattggctttgttgttatgtactcattcacattcttcttctccaactttggtccaa

SEQ ID NO: 137178 - DNA, 236 bp, Glycine max
gagagagcgagcagtttcagacacagagagaggggtttgggattggagggattgacgctgcgtctcttcctcttctctttcgatccatccctcattcctaatcctccaatccaaccacctcagcctcacactcacatatacacatatctgaacgcgtatcgtccctcctatggcttcaaagcgcatcctcaaggagctcaaggacttgcagaaagacccaccaacttcttgcagcg

SEQ ID NO: 137179 - DNA, 234 bp, Glycine max
cgaagaagaagatggctttaggtgttcctgctcttccgttgacatacgtggctcacgttctggcagttgttgccagcgtcttggtcgtggtctgggtcgtcaatttcaggggtggcttggcttgggattctgataacaagtccctcatcttcaacattcatccagttcttattgttattggcttactagttcatgggggtgaagctattataagttacaaagcttttcccctaa

SEQ ID NO: 137180 - DNA, 236 bp, Glycine max
gaaacagatagaagctttgggttgagaaatttcaggtacattgagaccatcaaagaagctttggaaagagaatgccctggagttgtttcatgtgctgatatcctcgttctctctgccagagatggcattgtttcgctaggaggtccccatatccctcttaagactggaagaagggatggtagaaggagcagagctgatgtggttgagcagttcctcccagaccacaatgagtccat

SEQ ID NO: 137181 - DNA, 240 bp, Glycine max
tgttcatcccgcagccattgatcttgttgataaaatgctgacagttgatcccaccaaaagaattacagttgaagaagcactagcccatccataccttgaaaaactgcatgatgtagctgatgaaccaatctgcatggagccattctcatttgattttgagcaacagcaattggatgaagagcaaataaaagagatgatctacagggaagcattagcactgaatcctgagtatgcttaaag

SEQ ID NO: 137182 - DNA, 240 bp, Glycine max
agatgctcctttcctttgctactgaatgtgcaaattctgttattcctgcttatttacctatcatagagaaaaggaaggatttgcccttcaatgatcatcagaaagcatggcaacaattgcgaaggggacgatatgttgaattcaatttggtatatgataggggtacaacatttggactgaaaactggagggagaatagagagtatacttgtttctctcccactgactgctcggtgggaat

SEQ ID NO: 137183 - DNA, 231 bp, Glycine max
gcaagccggcagactttcttaaatactgctaagtggattgaagaggtgcgaacagaaagaggcagtgatgtcattattgttcttgttgggaacaaaactgatcttgttgagaaaagacaagtctctatagaggaaggagaagcaaaagcacgtgagctcaatgtcatgtttattgaaactagtgctaaggctgggtttaatataaaggccctatttcgaaaaattgctgca

SEQ ID NO: 137184 - DNA, 233 bp, Glycine max
aatgcctcgtcatctaattagtgacgcgcatgaatggattaacgagattcccactgtccctgtctactatccagcgaaaccacagccaagggaacgggcttggcggaatcagcggggaaagaagaccctgttgagcttgactctagtccgactttgtgaaatgacttgagaggtgtaggataagtgggagctggaaacagcgaaagtgaaataccactacttttaacgttatt

SEQ ID NO: 137185 - DNA, 235 bp, Glycine max
ctgaacgaacgctcagctcagtcaggtgccggcgttcctctttcacgttctcatggaaaacgacgacgtcgacatgcacgctgccgacaccagcgaagaattggatgacatgaagaagcgcttgaaggagatggaagatgaagctgctgctttgcgagagatgcaggccaaggtcgagaaggaaatgggatctgcgcaagatcctgcaaatgcttctgcaagtcaggccaataaa

SEQ ID NO: 137186 - DNA, 236 bp, Glycine max
ctttctttccccaatttgtgagtgttactattgaatcgattggactgacatggcgagcgcgatggttgaggacgccaacttcgaagatgaccagctcgccaatatgaccaccgacgacgtcgtcagagcttctcgtcttctcgacaacgagattcgcatcctcaaagaagagttgcagaggaccaatttggagttggaatcgtacaaggacaagatcaaggagaatcaggagaaga

SEQ ID NO: 137187 - DNA, 230 bp, Glycine max
ctcggagagatcgttactacaattcctaccattgggttcaatgttgagactgtggaatacaagaacattagcttcactgtttgggatgttggtggccaggacaagattcgtcccttgtggaggcactacttccagaacactcagggtcttatttttgttgtagacagcaatgatagggacagagttgttgaggccagagatgagttacataggatgttgaatgaggatga

SEQ ID NO: 137188 - DNA, 226 bp, Glycine max
caaaaagaaggcacttaatgcatcctccaaattcaaacacactcttagaacgaagagtagcaagaagacaagcgatggccgtgttagctccgtttcaattgaggacgttcgcgatttcgaggagatccaggctgtcgacgcctttcggcaatccttgatcatggacgaattgctccccgaagacctttgatgattaccatatgatgttaagatttttgcaagcgag

SEQ ID NO: 137189 - DNA, 226 bp, Glycine max
gcaaaggcttctacccgccgctcgatgggaattgcgcttcaaggcgtctcgtatggctaatccgcctcacgatggtcaccaacggcacgtgcctttggggggccgaggctcctgactgctggtcggcaaacggtcggcgggcgcacgcgtcgcttctagcccggattctgacttagaggcgttcagtcataatccaacgcacggtagcttcgcgccactggctttt

SEQ ID NO: 137190 - DNA, 230 bp, Glycine max
ggaactttcacgctttccaatttgggtatgtttggagttgacaggtttgatgccatacttccaccaggccagggtgctatcatggctgttggcgcatcaaagcctactgttctggctgataaagatggattcttcagcgtgaagaataaaatgctggtgaatgtaacagctgatcatcgaattatttatggggctgacttggccgctttcctccagacattctcaaaaat

SEQ ID NO: 137191 - DNA, 230 bp, Glycine max
cttgtttgtgaacatggcgaccattattctagaaaatgaccctcttaactggagccatgcagcagattcactcaagggtagccactttgaagaagtaaaacgcatggtggcagaataccggaagccacttatctctctgggtggcggggagacactaactatatcacaggtggctgctgttgctgttgccaatgccaaccataacttgcaggctaaggttgatctctcag

SEQ ID NO: 137192 - DNA, 232 bp, Glycine max
tgcaaccatagttttattaggattttttcttctttgttttcaattaggtttttttgttgctctccttcaaactccatctttccaaatcctctctttgcgattgtgttttgatctgcttcctactgcgatagtttctctactgttacatggccatggcggtttccgcaattggttttgaacgtttcgagaaaaggttggaaatatcctttttccagccgggactttttgctga

SEQ ID NO: 137193 - DNA, 260 bp, Glycine max
tgtttgggtttctcttcctcccttggagaaaaagaagagccaccgctgcgacgccgttcgtgcatttttgaggtgccgctgtcatgtttgggcgtggtggaccaaggaggagtgataactccaaatattatgatattccgggatttccaaaaatgccagtgaagatgaaatcaagaaggcctatagaaaggcggctatgaagaaccatccagataagggaggagatcctgaaaagtttaaggagttaggtcaagcatatg

SEQ ID NO: 137194 - DNA, 258 bp, Glycine max
gtcatcgttgggatctccatacgccggatctgctaaaatacgcttgatccatatgggcctcctcgaccacttgtgggacgacaccgtcgccggcccaaggccggaaaacggtctcggcaagctccgaaaacacgacacttcactttccgacctagctccggcaaggaaacggagggcgggagcgtgagatcgtacggagacgaatcgtcggaggaagcgacgagagtgacgcgtagtatcatgatcgtgaaaccgccc

SEQ ID NO: 137195 - DNA, 256 bp, Glycine max
aattgaaggctatctctttggtgagctgctacgggatcaaagatctgaacttggtgttgccaacagtatctccatgtgaatcacttcggtctttatctatcagtaattgccctggatttggcaatgcctccctctctgtattgggaaagctgtgccctcagcttcagcatgttgaattgagtggactcgagggagtgacagatgcagggcttcttccactccttgagagttccgaggctggtttggttaaagtgaa

SEQ ID NO: 137196 - DNA, 257 bp, Glycine max
cttctgtccgctgcgactctctttccttccctctttttccgaatctgaatcgaaatggcttcggagactgagacgtttgcttttcaggccgagatcaaccagctcctcagtctaatcatcaacaccttctacagcacaaggacctctttcttcgtgagctcatcagcaatgcctctgatgctttgctcaagattcgatttgagagtcttacagacaagagcaagcttgatgctcagccagagttgttcattcacatt

SEQ ID NO: 137197 - DNA, 256 bp, Glycine max
gagaatactaaatttcaaaagaaattacagaacaatgagcagatgtcaggtctgaagcatctagtacatggagcaaagcagcatcacaatgtgaaaaatgtatatgtatggcatgcactagctggttattggggtgggtgaagccagcagcaaccggcatggaacattatgacactgccttggcatatccagtgcagtcaccaggcgtgctaggaaaccaaccagacattgtcatggacagcttggctgtacatgg

SEQ ID NO: 137198 - DNA, 251 bp, Glycine max
gcgtttcggaagcagacacagatggctcgtacgaagcaaaccgctcgtaagtccacaggaggaaaggctcctaggaagcagcttgcaaccaaggctgcacgtaagtctgcaccaactactggtggtgtgaagaagcccaccgttatcgtcctggtaccgttgctcttcgtgaaattaggaaataccagaagagtaccgagcttttgatccggaagctccccttccagaggctggttcgtgaaattgctcag

SEQ ID NO: 137199 - DNA, 254 bp, Glycine max
gtcaatgagtatgactacagccctgatgaacccatcatcagcaatgcctcttgcaccactaactgccttgcaccctttgtcaaggtccttgatcagaaattcggtatcatcaagggtaccatgaccaccactcactcctacaccggtgaccaaaggcttcttgatgcgagccaccgtgacctgaggcgtgcaagggcagcagcactcaacattgtccccacttcaacaggagcagcaaaggcagtggcccttgt

SEQ ID NO: 137200 - DNA, 255 bp, Glycine max
cacagaagcagaaggaggagaagcagaaagaggagacgaagcaatggcgccgaagaagccccgaaccacgtcgaggaaccctgatttggtcaggggaattggcaaatattcgaggtcgcagatgtaccacaagagggcatctgggccatcaaggccaaaaacggcggtgttttgcccctccacgatcccaagcccaaacccgaggccccggcccagaagccgcccaagttctacccggccgatgacgtgaagaag

SEQ ID NO: 137201 - DNA, 259 bp, Glycine max
gagaattccaaagacagagatgactgtcattaaggaagagcaacaaccaaaccaaatagctggccacaaagaacttggtcacaaaagtctccttcagagcgatgcactctatcagtatatacttgaaaccagtgtgtacccaagagagcatgagagcttgaaggagctacgagagttgacggaaaaacacccttggaacctgatggctacaccacctgacgaaggacatcttctaggcatgctccttaagcttatcaat

SEQ ID NO: 137202 - DNA, 256 bp, Glycine max
ctcgcaagcaaaaagaaagaatcccaggcgaggagaaagatggaggggaaggagcaggatgtgtcgttgggagcgaacaagttccccgagagacagccaattgggacggcggcgcagagccaagacgacggcaagactaccaggagccggcgccggcgccgctggttgacccgacggagtttacgtcatggtcgttttacagagcagggatagcagagtttgtggccacttttctgtttctctacatcactgtctt

SEQ ID NO: 137203 - DNA, 252 bp, Glycine max
cttgggaagccaccaaagaccccatgctgcaacctaattcagggtcttgctgatcttgaagctgcagtgtgcctttgcactgctctcaaggctaatgtgttgggcatcaacctcaatgttccagtgaacttgagttgcttctaaactactgtggaaagggtgttcccaagggattcgtctgctattaaatcaaacacttataatgtgtagcttcctattgctatattcgtcattcatcattattctgtgtat

SEQ ID NO: 137204 - DNA, 255 bp, Glycine max
actacattatagcaattcacacaacacaacacagattaatggggaggttgtttgtggtgaatctggaagggaagatctatagctgcaaacactgccatacccatcttgcgctttacgatgacatctactccaggcattccattgcagacatgggaaagcttatctcttcaataaggttgtgaatacatctattggcgaaatggaggacagaccgatgatgactgggttacataccgtggctgacattttctgtgt

SEQ ID NO: 137205 - DNA, 257 bp, Glycine max
gagaaaccctagcaaaaatgccggctggtcacggtttgagatcccgcaccagagattccttctctcgtcccttcaggaagaagggtaccatcgccctcaccacatacctcagaacctagcacgtcggcgattatgtcgacgtcaaggctaacggcgccgtccacaagggaatgccacacaagttctaccatggccgcaccggtcgcgtctggaatgtcaccaaacgtgctgttggggtcgaagtcaacaagcaggtc

SEQ ID NO: 137206 - DNA, 252 bp, Glycine max
ccaaagaatccgacatgaatattgtcgaaagtaccataacattgaagcttccacaaggttccaatgatgtcttgctcaaaaatttgtatttgtcttgtgatccgtatatgaggaatctcatgaacaggcccgaggccctcccaatagtcgtgcttacactcctggctctccattaataggatatggtgtgtctaaagtcctggaatctgggcacccagattataaggaaggtgatttagtgtggggctttac

SEQ ID NO: 137207 - DNA, 251 bp, Glycine max
ttgaatacttcttatgcaactatagtgaggctaagagattggtccataattaatcaaaatgttggctatattccacaaagcttttgctcatccacctgaagagctcaacagccctgcatcttacaaaggttcaagaagcctaaggttcccgaggaaactctcaaagatttcctttcccaccatcctcacaacacttgctctatgagctttggtgatgctgctgttctagcttatgtccgtcctgatcaatc

SEQ ID NO: 137208 - DNA, 251 bp, Glycine max
atccctctaatcactctagctgttgcaaatttctactatttttcaatggcttctgcagatgttgagttccgttgctttgttggtgggcttgcttgggtcaccggcaacgatgccctcgagaaagccttttcaactacggcgacatcgttgaatcgaaggttatcaacgaccgtgagactggaaggtccagaggattcggatttgtgaccttcgcctcagagcagtcaatgaaagatgcgatcgcaggaatg

SEQ ID NO: 137209 - DNA, 287 bp, Glycine max
gcttcttcaatccctaatgcgccttctgctgttcaatgtctcgagagctcacgttcgggtctccagcagcgaccacttgcaggacgcttgcagacgttttgcttagctcctacgaagcttggcgcaaatattgcctgcgctacccatacgccttttacgtcgtcagagcctccgattcggagttcgaagccgccgttgtcgccggtaaggttccgccggcgcctcccgtgccgcccagaccggcggctccggttggaacaccggtggttccttcacttccacttcac

SEQ ID NO: 137210 - DNA, 249 bp, Glycine max
ctcaattaatcccttaattgcaagcatcatggctgaggagaagcaccaccaccacttccaccaccacaagggcgatgatgtgcctggcgaggttgattataagaaggaggagaagcaccacaagcatcttgagaccttggggaacttggtgctgcggctgccggtgcttatgccttgcatgagaagcatgaggccaagaaagacccagagcatgctcacaggcacaaggtagaagaggagattgcggca

SEQ ID NO: 137211 - DNA, 254 bp, Glycine max
gacagagagcattggactcacaaatttaaaagctactccacttgaagttctcctaactccacgtttagatacaaagctttatgagaactaaaattatatattatgctagtttttttcctcaaaattaggggaagcctcaaatcggggccttccatcatgtaataaatgttcaacggggttgcgctgctgttacactcatagttatcacatttaaatcagtcatcgacttgatcaaagtattgagtcattgggtt

SEQ ID NO: 137212 - DNA, 253 bp, Glycine max
atcgttgtcaatttcgcctctttctttctcaactcccttagattctctccatcgggtcttcaaaaatgcggatgagctgcaatggatgtcgagttctcagaaaaggttgcagtgaaaattgcagcatcagacctgtttacaatggatcaaaagcccagaatctcaagccaatgctactgtgtttcttgccaagttctacggccgtgctggtctaatgaacctggttaacgcaggccccgaacatcttcgtcca

SEQ ID NO: 137213 - DNA, 250 bp, Glycine max
cctctctgattttgtaattgagttcgatcaaatagctcccagtactttaattgatttctgaatatcatcacttaatttgaaggaaagatggtgagcgtagctgagatccgccaggcacaaagggcagaaggccagcaaccatccttgccattggaactgcaaacccaccaaactgtgttgatcagagcacctatcctgactactacttcagaatcaccaacagtgagcacatgaccgagctcaaagagaa

SEQ ID NO: 137214 - DNA, 253 bp, Glycine max
gaacaattactttagtgttttctcttgtcacataaaagtcatctaagaagaattacaagatcatcatcacaataacaagatgagttcaggaattagagcatggagtgtggcagcaagtgttggaattgtggaggccttgaaagaccaaggcatatgcaggtggaatcatgccttaagatcagctcaacaccatctcaaaaaccatgttggctcattctctcaggctaacaagctttcttcttctgctatgata

SEQ ID NO: 137215 - DNA, 250 bp, Glycine max
gacgaatcatgcaacaacaggggtacagtgatggggatccactggctgctgaagatcaactttttgtacttgagaatgtctttgagcaccacccagataaagaaaccaaaatgggtgctggaattgattatgtcatggttaacaaacacagtagcttccaggaaagtagatgctttctcgtggtttgtaaagatggtcaaagcaaagacttttcctaccggaagtgtttggccaactatataagcaagaa

SEQ ID NO: 137216 - DNA, 252 bp, Glycine max
gctcgatgcatgcttggagcaggaccctgacagcaaggttgcctgtgaaacctgcaccaagaccaacatggtgatggttttcggagagatcacaaccaaggccaacgtggactatgagaagattgtgcgtgcacatgcaggaacattggccacgtctctgatgatgttggtcttgatgctgacaactgcaaggtcctcgtcaacattgagcaacagagtcctgatattgctcaaggtgtgcacggccacctc

SEQ ID NO: 137217 - DNA, 250 bp, Glycine max
tctcgagcgaatcggctcgagggccttcaatttcacccttcacacgtggtggtggtgtacttcttcttctcttcccctttctgtttcttcttctgagcttgtttaagctctttctatttgattccattaaatatattactacaatgtgtggtattcttgctgttcttggttgttctgatgactctcgagccaaaagggtccgcgtgcttgagctctctcgcagattgaagcaccgtggccctgactggag

SEQ ID NO: 137218 - DNA, 248 bp, Glycine max
cgccaaaccaccatgttgctgccattgtggctgctgcattttatgcaatttggaatctcttctcaggatttatcgtcgtaagacctaaaatgcccgtgtggtggagatggtactattgggcatgtcctgtgcttggaccttgtatggattgattgcatctcagtttggagatataactgaaagaatgccgggtgaagataacaagatggtgaaagaattcatagaagactattttggtttcaaacatg

SEQ ID NO: 137219 - DNA, 251 bp, Glycine max
gttcgcacgccttgttcggtgaagtgagtagtgagtgctgaatcgaatcgaatcgattctccgaacatggcggcgagcgatcgcacagtgttgcaattctcttcatcatcttcttcttcttcgcagatcttgtccgcgaaggtccaccctctggtcatcttcaacatctgcgattgctatgttcgacgccctgaccaagccgaccgcgtcatcggaaccctactcggctccgtccttcccgacggaaccgt

SEQ ID NO: 137220 - DNA, 251 bp, Glycine max
ctccatgcataccttatggagtgttaggagggaacgtgtcatccttgtgctgccaaggtgtttactctctcaatgctgcatataagagtgctgaggatcctagaggtgcatgccaatgcattaaggataggcggcatgcattcctggcattgactacacgcgtgtcaatcaagttggtccaagatgtggctctaagtgtcccttcaaagtgtacccttccactaactgctcagcggtgccgtaagcattca

SEQ ID NO: 137221 - DNA, 252 bp, Glycine max
aagacaggttcaaaccggagcaaaaaaacttgttacgatggtttcttccgacaaggatccacgagaggaagtccttcaagcatggtacatggatgatagtgatgaagatcaaagactccctcaccacaaagaacccaaggagtttgtctcgttggaccaacttgctgaacttggagtccttagctggaaattagatgctgataaccatgaaaatgatccagagctgaaaaagattcgtgaagagcgtggcta

SEQ ID NO: 137222 - DNA, 249 bp, Glycine max
gatgtttctcacaaggactgagtatgaccgaggagtcaacaccttttcccccgaaggacgtttgtttcaggttgagtatgcaatcgaagccatcaagctgggatcaactgcgattgggttgaagaccaagagggtgttgtcctcgcagttgaaaagcgcatcacttcgccgctcctggagcctagtagtgttgagaaaattatggaaattgatgagcacataggttgtgcaatgagtgggttgattgca

SEQ ID NO: 137223 - DNA, 253 bp, Glycine max
attcaggtcaaggttgaatcactacctctatagcggtgacaagaaacatgtcttcgttggtttaactctcatcaccgctgtctttaccatcccatggtactttatgagcagagggaccaaacaccagtctcatcaagattacttggaaaaagctgataaagccaggagccaaagactctcatccagttctgcttctgccaaatgatcttcatcaacattctgttgaagagcatactttttccagtaacactta

SEQ ID NO: 137224 - DNA, 251 bp, Glycine max
ctcgagccgttctctttctctctttttttgtgtgtccaaaatggctcctagttctgctcacaacaatgggttctatgtgcttatgctagttgggatagtggttagcactatggttgctacctgtgctggtacttctaccaagactttgatctaacatggggtggtgaccgtgctaagatattcaatggtggccagcttctatcactttccctagacaaagtctctggctctggcttcaaatcaaagaaaga

SEQ ID NO: 137225 - DNA, 254 bp, Glycine max
gccaaggcccaaccccaaccttaaccctaaccccagaccaagtggctcgtgcccccgtgacgcactcaaactaggtgtatgtgccaatgtgctaaacttggtgaacgccactttgggtcaaccaccagttaccccgtgctgcacccttctcgatggtctcgttgaccttgaagctgcagtgtgcctttgcactgccctcaaagcaaacattttgggcatcaacctcaaccttccaatctcccttagcttgcttc

SEQ ID NO: 137226 - DNA, 250 bp, Glycine max
aatctccatctaatagtgttaatttgtctttctctatctctatcggtcatgggtgcttttgcttttgatgaggaaaactcctccaccgtggctccggcaacactctacaaagctctgacaaaagatgctgacactatcatcccaaagattattggggccatccaaactattgaaatcgttgaaggaaatggaggacccggaaccgtcaagaagataacagctagtgaaggtgaccaaaccagtttcgtgc

SEQ ID NO: 137227 - DNA, 249 bp, Glycine max
gatgaaccataaccatgtcagacgaggagcaccacttcgagtcaaaggctgatgctggagcatcaaagacatttccccagcaagctggaaccatccgcaaaaacggttacattgtcatcaagaacaggcatgcaaggttgtggaggtttcaacttccaaaactggcaagcatggacacgcaaagtgtcactttgttgcaattgacatcttcactgggaaaaagcttgaggatattgtcccatcttccca

SEQ ID NO: 137228 - DNA, 249 bp, Glycine max
ctcactcacaaacacacactgaactaaaaaacatcaaaagagacatggctgagcaaaccttcatcatgatcaagcctgatggcgtccaaagaggccttattggcgagatcattagcagatttgagaagaaggtttctacttgaaaggtttgaaacttgttactgtggaccgtccttttgctgagaagcactatgctgatttgtctgccaagcctttctttagtggtttggtggattacattatctctgg

SEQ ID NO: 137229 - DNA, 249 bp, Glycine max
gacatttccccagcaagctggaaccatccgcaaaaacggttacattgtcatcaagaacaggccatgcaaggttgtggaggtttcaacttccaaaactggcaagcatggacacgcaaagtgtcactttgtcgcaattgacatcttcactgggaaaaagcttgaggatattgtcccatcttcccataactgtgatgttccccatgttaatcgcattgactaccagctcattgacatctcagaggatggatt

SEQ ID NO: 137230 - DNA, 245 bp, Glycine max
cactcctcctttctctctctttcattattgagacttctttccagatttctcaatctatggctctgcattttcttctcctgctgctttttgcagtgtctgttgttgcagctgatgaagaaccatttataggagtgaatattggaacggatctctcagatatgccacaccctactcaagtagtagctctactaaaagcccagcaaattcggcatgttcgattatatgatgcagaccaagctatgctc

SEQ ID NO: 137231 - DNA, 246 bp, Glycine max
ctcgagccgctcgagccgtgcgtactacttacagtacaagaatgttagaccagactttcataagaacaattggaaagttattaattggaaatatgccagtgaagtgtatgagaaagagagctcttagtctgaaggagctacttgatatagcaattgagatgacagatttgcagcacggtaagagatgtggaataaaatgatatgatgtaatagatagcactattttatgtagttgtactgaagaac

SEQ ID NO: 137232 - DNA, 245 bp, Glycine max
cagaaatatactcggagaaagaaactgaatcgcttacgcacgcgttaacattaccactttcttacttacagcacagcacttttgctaacctttcgtcttcaatttccctttggatttcattcattagatggattcgagttcggggctccaagaattcgattatttgtttaagttgttgatgattggagactctggggttggcaagagtagtcttcttctcagtttcacctccgatgcttttgaag

SEQ ID NO: 137233 - DNA, 246 bp, Glycine max
ggcgttctatatattattgaattgacaatgaggcctgctcttgctttgcttcctcttctatttgctttcttgttagctgccactacggaatcaagaaaagatccaggggaatattggaaaatgatcatgaaagatcaggaaatgccagaaggacttcaaggtcttgtttcatttcaatctgaaaataaccctaagactcaagagcagcttggtaaaggttccaaaaaccattgtgaagagtctcta

SEQ ID NO: 137234 - DNA, 249 bp, Glycine max
gacagttggattgtagtggaaaagatgaaatgagagaattattatgtgtctataataatagttattgcaagttgtgaggacaggaggaggatggtgtccccgatgtcaacggttctggtgacgggagggcatgcttcatcggatcccacacggtgcttcagcttctgaagcagggcttcagggtttccatcatcgacaaccttgacaattccctcatcgaagccgttcaacaggttcgccgcctggtcg

SEQ ID NO: 137235 - DNA, 285 bp, Glycine max
tcgcatgtacgcgtcggtcagttcggcttcggatacgtgatagtggtgtggttcttcttctcttcccctttcttggtcttcttctgagcttgtttaagctctttctatttgattccattaacatatattattacaatgtgtggtattcttgctgttcttggttgttctgatgactctcgagccaaaagggtccgcgtgcttgagctctctcgcagattgaagcaccgtggccctgactggagtgggctccatcaacatggtgactgctttttagcacatcaacgg

SEQ ID NO: 137236 - DNA, 267 bp, Glycine max
caacttctttggaatggtattcaccttgttagtaccagaatcaaagggaaaatcactggaagagttgagtggggagaatgaagatgatggtgctgaggctatagagatggcagggtctgctaggacggttccagtttaaccaaagtctctgatcaacaaagtacttagttcataattctagtgatgctattattgtgtgacaattttacttcgggttttctacagctagatgctcaataatgatgtagatatatgtttctcggtgct

SEQ ID NO: 137237 - DNA, 267 bp, Glycine max
cttatttttctcctctcttcactttcactctctctctctctctcagccatcatcatgggagcagtgattctcccagatctcggcaccgagattttgattccggtctgcgccatcattggaatagggttcgccctcttccagtgggtcctcgtctccaaggttaagctctccgctgccagagacgcttcccctaacgccgccggcaaaaatggctacaacgattacctcatcgaagaagaggaaggcctcaacgatcacaacgttgtc

SEQ ID NO: 137238 - DNA, 266 bp, Glycine max
aagagagagagaaagagagagagagaaagacccttacccttctctatcgctcgctttcctttgacgcttctgacccttgctttgtctgcgtcttccttctttctttctttctttctctgtgtgtcgtaatggctctcccagactcttcttcccgtcgcaactccctgatcccctccttcatctactcctcttcctccaaaacgctccctctccaccacatgctcaacaccgcctccgctgccgccgccgccgctccctccccgccg

SEQ ID NO: 137239 - DNA, 269 bp, Glycine max
ggaataggggtcgtgttggagtgatcaagaacagagagaagcataagggaagctttgagactatccatgttcaggatgctactgggcatgaatttgcaactcgaatgggcaatgtgttcaccattggcaagggaacaaaaccgtggatatctcttcccaagggtaaaggtattaagctatcaatcattgaggaagctaggaaaaggattgccgcccaacaagcaactgctgcttaaatctttaggatatgaatagactttgagtgcttg

SEQ ID NO: 137240 - DNA, 260 bp, Glycine max
aacaatgtgaagtccagcgtgtgtgatatcccacctaagggtcttaaaatggcatccacttttattggtaactcgacctcaatccaggagatgttcaggagagtcagtgagcagttcacggccatgttcaggcgcaaggctttcttgcactggtacaccggggaaggaatggacgaaatggaattcaccgaggctgagagtaacatgaacgatcttgttgctgagtatcagcaataccaggatgctactgctgatgagga

SEQ ID NO: 137241 - DNA, 262 bp, Glycine max
ccagaatattcaacctgcttgggtgatctgtacagtgttgcttggatggaagacagtgacagacacaatttacgaacagaaactctgcatcaacaatataaattggttaaagagaggactatatctggagattcatactatggctctcacgtgatgcagtatggtgatgtacggcttagcagtgatgttctcttccattatttgggtacagatcctgctaatgataatttcacttttgtggacgaaaactccttatggtcac

SEQ ID NO: 137242 - DNA, 276 bp, Glycine max
attcggctcgagccttgtgtgtctccaatcaagacctttcaagctggcgttcgaaaaccaagacaaccctgtccgagaaatcaagcccaagaataggagaatcatgggtgctggaggccctgatgatgaggacaacaacaggtggccaccgtggctgaagcctctgctaaaagaaagtttctttgttcaatgcaagcttcacgctgattcgcacaagagcgagtgcaacatgtactgcttggattgtatgaacggtgctctctgctctctctgcct

SEQ ID NO: 137243 - DNA, 224 bp, Glycine max
atctacgtgcacaatgttggaatacaacattagaagagccaaccattgagtacactgctgaagaatattcacagattatgacagttaatttagactcctcattccatctgtgccagcttgcatatcctcttctgaaagcatctgaaaagggaagcattgtgttcatttcatctgttgctggtgtagtgagtttaggtactggagctgtctttgcagcaagtaaa

SEQ ID NO: 137244 - DNA, 264 bp, Glycine max
gtagactgtacactgagactggttttaaagcaacgccacttgttccagccatgcctcctcaagagacccaacaacctctgttatcggaggagcaagaagagacagcctacgattcctcggagaaggttgtggtggtcggaatcgacgagcacgacggcgacttggaggcgccgccgttctcatggcggaagctgtggctcttcaccgggcccgggtttctgatgagcatcgcttttctggatcccgggaacctcgagggggatc

SEQ ID NO: 137245 - DNA, 265 bp, Glycine max
caacaagtcacttttggctgggggtttgtctgcatcactgctgtattttgtttatactgagctaccaggaaggcctgtttttgcttcatctgttggccttggcatatctgctgcacttcttggggtgatgggttctcgtttcaagaaatccgggaaggtctttccagcaggtgttgtgtcacttgtgtccctcataatgactggtggttacttgcatggaattatgcgtagtgcgcactaagtaacgaaggtggattgtaggata

SEQ ID NO: 137246 - DNA, 258 bp, Glycine max
gttcttcgtcttttgttgttctgtgtttgtcttttctctcacctgaaaatgtcttgctgccgtggtaactgtggttgcggaagctcctgcaagtgcggcaacggctgcggaggctgcaagatgtacccagacttgagctacactgagtcaaccaccaccgagaccttggtcatgggagtggcactgttaaggctcaatttgagggtgctgaaatgggtgtgcccgctgagaacgatggctgcaaatgtggaccaaact

SEQ ID NO: 137247 - DNA, 258 bp, Glycine max
gttcttcagtaatttattgtgggattctattctaagattttgagaatgtctagctgtgggtgtggaagcagctgcaactgtggcagcaactgcggttgcaacaagtactcttttgacttgagttacgttgagaagacaaccacagagactctagttttgggtgttgggcctgtgaaggccaattggaaagcagtgaaatgggtgttgcatctgagaacggtggctgcaactgtggatcaagctgcacctgtgacccat

SEQ ID NO: 137248 - DNA, 260 bp, Glycine max
gttcttcttcttttgttgttctgtgtttgttttttctctcacctgaaaatgtcttgctgcggtggtaactgtggttgcggaagctcctgcaagtgcggcaacggctgcggaggctgcaagatgtacccagacttgagctacactgagtcaaccaccaccgagaccttggtcatgggagtggcacctgttaaggctcaatttgagggtgctgaaatgggtgtgcccgctgagaacgatggctgcaaatgtggaccaaactg

SEQ ID NO: 137249 - DNA, 260 bp, Glycine max
cattatcaacagcgcgagggttgttttcttgaatgagaggccgcagccaaggcctggtaaaggtgtcaccaacacttgtgaagtctgcgaacgtagcttcttgattcctaccgattctgttctctaggttgtaagattgttgggacttcaaggaacttcctgaagaaaaagtcagcggcaatggtatcagactcagaggattcttacagcagcaacagcagccatgggaagaagaacagcttcacaccttccacaccgcc

SEQ ID NO: 137250 - DNA, 259 bp, Glycine max
atggctcccaagggtttaacctttctggctgtgttaatatgcgtttcagcactgtcactgagtccttctgttgcgggggaagggcaaaataatggccttgttatgaacttctacaaggaatcatgccctcaggctgaagacatcatcacagaacaagtcaagcttctctacaagcgccacaagaacactgctttctcctggctcaggaacatcttccatgactgtgctgttcagagttgtgatgcttcactgttgctgg

SEQ ID NO: 137251 - DNA, 259 bp, Glycine max
ataaaagaggcgctactgagatcaagcaacaccccttttttgaaggtgtgaattgggcattgatcagatgtgctaccccacccgagatccccaaggctgtagagtttgagaagataccctcaccagcttcatcaagtggtggtgaaaaggctgttaaccatatgtcaatagctaatcagaaaggttctgataattatctggagtttgatttcttctagagagagggtagagacaatatattgattgcaaatggtttctg

SEQ ID NO: 137252 - DNA, 261 bp, Glycine max
agcagcagcggcaagcaactccatccgcaatgggaatcgatttgaaggcaggaggtaagtccaagaagaccaaacgtacagcccccaaatccaatgatatttacctcaagctcctcgtcaagctgtaccgttttcttgttcggaggactggtagtaacttcaatgccgtcatcctcaaacgccttttcatgagcaaggtcaacaagcccccgctatccctctctagattgattcgttacaccaagggaaaggaggataaga

SEQ ID NO: 137253 - DNA, 254 bp, Glycine max
ttcagtcaaaggcgccgaagacatcctcaacaagcccaacgccttcgagctctccacgcgctccgacaccatgtacttcatcgccgattccgagaaggagaaggaggattggatcaactctattggccgctccatcgtccagcactccagatccgtcaccgattccgagatcgtcgattacgatagcaacaacaactccgccaagcgctgacaaccacgcgctctcaatccacgcgcctcgttcggtgatttct

SEQ ID NO: 137254 - DNA, 257 bp, Glycine max
aacaagctcaaaaaaatggcccttataattattgcagagagcttatctgaagaagaaatagctggcttaaaagaaatgttcaagatgatagatgcagataacagtggtcaaatcacttttgaagaacttaaagctggtttgaaaagagtcggcgctaatcttaaggagtctgaaatttatgatttactcaaagcagctgatgttgataacagtgggacaattgattacggcgagttccttgctgcaacgttgcaccg

SEQ ID NO: 137255 - DNA, 256 bp, Glycine max
ggttgatgtggatcagcagggtcaaatggtgtctgagctcaatggtgcaataatgaaatgtgtacgtgatcaaaatggaaaccatgttattcagaagtgtatagagtgtgtccctcaagataaaattcagtttattgtttcatccttttatgggcaagttgttgcactttctactcatccttatgggtgcagagttatccagagggttctagaacattgtgatgatcaaaatacacaacaaattatcatggaggaa

SEQ ID NO: 137256 - DNA, 256 bp, Glycine max
aatggcttctgtgcctcaaccaaaaatctcccttctaaccttattcttcttctcttccttcaccatcattgcgcatgcaattgttcctcaaaacgaaaccttcaaatttgagaactcaggtgaacttggaccctacatcgttgagtacggtgcagattacagaatgataagcatcttcaactctccattccaagttggtttctacaacaccaccccaaatgccttcactctagctttgcgtgtagggctccaacgc

SEQ ID NO: 137257 - DNA, 254 bp, Glycine max
agtaattaacctcactcaaactcgggatcacagaaaccaacaacagttcttgcactgaggtttcacgatgttgctggaacttgcacttggtttgtttgtgttagctttgtttctgcacttgcgtcccacaccaagtgcaaaaccaaaagcacttcgccacctcccaaaccctccaagcccaaagcctcgtcttcccttcattggccaccttcacctcttaaaagataaactttccgagtatgcactcatcgatc

SEQ ID NO: 137258 - DNA, 256 bp, Glycine max
gcaaaaccgctagttgttgatggcactgcaaagtcacatgaactatttcttgcttatgatgaattctctctttcagcggttgaacctccactggttctacaggagtttgtcaatcatggtggtcttctctttaagatttacattgttggggaaaccataaaggttgtgaggcgtttctctcttcctaacatcagtaagcgtgaactatcaaaagttgctggtgtattccgttttccaagagtttcatgtgcagccg

SEQ ID NO: 137259 - DNA, 255 bp, Glycine max
cttcccagtagttaatgaggcatgccgtgttctagaagatggagttgttattcgagcatcagaccttgacattgcatctgttcttggaatgagcttcccaaattaccggggtggcattgttttctgggcagacttggttggggccaatcatatatataccagcctaaaaaaatgggcacaattatatggtaacttctataaaccctcaaggtatttggaagaaagagcactcaaaggcattcccttgagtgcact

SEQ ID NO: 137260 - DNA, 254 bp, Glycine max
ctcgagccgaatcggctcgagtggaaccaaaactcaggcacttgctgtttgccactcagagccttctggaatgaatcatcacatgcttcatgaactcatgggagttgatcctggaactaaccctgtttgccatttccttggaagcaaggccattttatgggtacccaatttatctatggacactgcctatcagactaacgttgttgtttaattagtccatgcatctgcatcttgggcaccataagattgtatat

SEQ ID NO: 137261 - DNA, 253 bp, Glycine max
tgaatctcagaattctctaaaagagatctttttctgctctttgaagaaagaagggtctttgcttgattttggagatgtctctgctctcagatctcatcaaccttaacctctccgataccaccgagaaggtgatcgcagagtacatatggatcggtggatcaggaatggacctgaggagcaaagtaaggactctcccaggaccagttagcgacccttcagagcttcccaagtggaactatgatggttccagcac

SEQ ID NO: 137262 - DNA, 279 bp, Glycine max
taaattcgctcgcaatcctgctcgatgccatggctcaaccccaaccctaaccctaaccccagcccaagtggctcgtgcccccgtgacgcactcaaactaggtgtatgtgccaatgtgctaaacttggtgaacgccactttgggtcaaccaccagttaccccttgctgcacccttctcgatggtctcgttgaccttgaagctgcagtgtgcctttgcactgccctcaaagcaaacattttgggcatcaacctcaaccttccaatctcccttagcttgctt

SEQ ID NO: 137263 - DNA, 266 bp, Glycine max
cgcattcaggccgttccatccatcttcaatggcaagcttcctctctacgtccctcaatgtgcaagcttcatcgctgaggagcagcaacagcaccacttccaccaccactagggcgatgatgtgcctggcgaggttgattatacgaaggaggagaagcaccacaagcatcttgagcaccttggggcacttggtgctgcggctgccggtgcttatgccttgcatgagaagcatgaggccaagactgacccagagcatgctcacaggca

SEQ ID NO: 137264 - DNA, 255 bp, Glycine max
accagaagcaggccagagaaagaaagaaagaaaagacaaaaaaatctgttttatccaattttgcttcatcaactaccaaaaatgccttctcctgtacccaccttgctctccaaatgcaccgtcttcccagaccaaaagtccactctcggaaacctcaaactctccgtttcggaccttcccatgttgtcctgccactacatccaaaagggatgcctcttcacccaccccaatctcccactccactctttgatccct

SEQ ID NO: 137265 - DNA, 254 bp, Glycine max
agagaaaaatgaagtctttccatctcacagtgacagctttgtgctgtgtagtggttgtgcttggagtgcttccactctccctagatgcacaactagatccctccttttacagagacacttgtcccagggttcactccattgttcgtgaagtcgtcaggaacgtttcaaagaaagatccccgtatgcttgctagtctcattagacttcactttcatgactgctttgttcaaggatgtgatgcatcagttttgttg

SEQ ID NO: 137266 - DNA, 252 bp, Glycine max
ctgcatctgatgatagacgatttgtgagacacatcattactttttcaaagatctggagcagcgaacaagaatacaacggtcgatgctcgttatgcagcagaaaacagatctcgcaagatggcagaatatgtagcatttggaggcctgtgtgtcctgttggatatatatatattggggatattgctcgtgttggtatccatcctccaaatgttgctgctgtctaccgcaagattgatggattttttgctctcc

SEQ ID NO: 137267 - DNA, 255 bp, Glycine max
gatcaccaaagtttggtgagtgctataaagcaggtcgatgtggtaatttctactgtaggacacctgcagctagctgatcaagataagatcatttctgcaattaaagaagcaggaaatgttaagaagtactatccatctgagtttggaaatgatgtggaccggactcatgcagttgaaccagccaagtctgcatttgcaacaaaggccaaagttcgccgagctattgaggctgaaggaattcccttcacttatgtg

SEQ ID NO: 137268 - DNA, 255 bp, Glycine max
ctcgagccgaatcggctcgagcggatattaaagacacctctaaagcaggatatagttttgaacgagatatgcatcaagaaagaagcgtttgagggagaagagaagttttgtgcaaaatccttgggaacagtaattggttttgccatttcaaagctgggaaagaacattcaagtactttcaagttcctttgtcaataagcaagagcaatacactgtggaaggagtgcagaatcttggagacaaagcagtgatgtgt

SEQ ID NO: 137269 - DNA, 250 bp, Glycine max
cgtcgctccgcaccagtttcaccgcacgaatatcttgttgtttggagcgatccgagaaaaactctgtaaacatgttggtttaccaggacctccttacaggtgatgagcttctctctgactccttccgttacaaggaaattgagaatggaatgctgtgggaagttgaggggaagtgggttgttaaaggagcagttgatgtagacattggtgcaaacccttctgctgagggtggaggagaagatgagggagt

SEQ ID NO: 137270 - DNA, 249 bp, Glycine max
ctaaaactaaaactaaaaccccactcagtcttccagtgaaaaaagaaaggcagcgatggaagaagacttcgacatccccggcggcgaggaaatggatctcggcgaagacaaggtcggcgaggagcgggagatcggctcccgcggcctcaagaagaagctcctcaaagaaggtcaaggctgggaaacccccgaagtcggcgacgagtccaagttcattacacggggactttgctcgacggaactaagttt

SEQ ID NO: 137271 - DNA, 251 bp, Glycine max
tgtatttccagttgtcttctttccattgcgtctcaacatagatggcctcctcttctctaaatcaaggcctctggttctggataacttcagatttgcatcactcactattgcccttattggtgttatcttcctgggagcaaatttcatacctagcatttgggatgctttccagtttactggagcaactgccgcagtctgtataggattcatttttccagctgccatcactcttagggaccgctacaacattg

SEQ ID NO: 137272 - DNA, 247 bp, Glycine max
gggatattaactaccagtttccacagcttgccggtgtgcatctttctgctttgattccgtctgctagtgatgatgcaatcagccttattacatcactttgctcctgggatccctgcaagaggccaacagcttcagaggctcttcaacatcctttcttccagagttgcttttacattcctccatcccttcgcaacagagcagtagcaagatgatctccacctgctggaaccagaggagcactggatca

SEQ ID NO: 137273 - DNA, 242 bp, Glycine max
tatggcttccttaagctcctcattagtgctgctccttgcagctctaattctatcccctcaagttcttgctgactatgagaagcccccaatttacaagccacctgtttacacaccgccagtttataagccacctgttgaaaagccaccagtaggcaaaccttgagtttacacgcctgcagttgaataacgacctgggtagaagcctgcagttgataagtcagccgtgtatacgcctaccagtg

SEQ ID NO: 137274 - DNA, 250 bp, Glycine max
cgtatcatattcctctctcattctcactatacacacaaaacccttcccatcctaattaaggtgaaaatgaaggcatcacccattgcttggttcactttggtggttgtgtttcttgtggctgaagttcaagtttcaatggcagtgacatgcagcccagtgcagctgagtgcatgtgtaagtgcaataacctcttcaacccctccatcaaacctatgctgctccaagatcaaagaacagaaaccatgcctct

SEQ ID NO: 137275 - DNA, 245 bp, Glycine max
gaagaaagttcatccaatctccgaagcccttcaccgcattgcaaccatgtcgagaagaaaggttagagagccaaaagaagaaaacgtgactctgggcccagctgttagagatggcgaacatgtctttggcgtcgctcgcatctttgcctccttcaatgataccttcattcatgtcactgatctgtccgggagggaaacacttgtacgcatcacaggtggaatgaaggttaaggctgacagggatg

SEQ ID NO: 137276 - DNA, 246 bp, Glycine max
cttactccaacgctaaccctaaccccagcatgattggactgtacccccgtgaaccccatcaccccctttgcctttcatcaaatcctcctttgcttcctccaagtcaaccttttttcaccctgccctttccctacaaacctcttccaactttcccaggctttttggaaagcctaagtttttctcagttcatgcaagggctgccacagaaaaaaccatttatgattttactgtcaaggatattgacag

SEQ ID NO: 137277 - DNA, 229 bp, Glycine max
aagatttactatggtgatgactggggtggtctttttgaggccatcactggttatggtcttggtgggtcttctatggctttgtttggaagagttggtggaggtatctatactaaggctgctgatgttggtgctgatcttgtcggaaaggttgaaagaaacatccccgaagatgatccaagaaatccagctgtgattgctgataatgttggtgataatgttggggatatcg

SEQ ID NO: 137278 - DNA, 226 bp, Glycine max
cttttcatccttcgatcatacacttagttgcttccaattaagatggttctgctagagaagctctgggatgatgttgtggctggccctcaacctgagcgtggccttggcaagctcagaaaactcaccaccctcaaaactattgatgaaggagaaagtagcaagctgcagaagacgttgtcgatgccgtcgacaccaacaaccccgatgactccgacgactccaacga

SEQ ID NO: 137279 - DNA, 228 bp, Glycine max
aaaaatggggtgtttccatctcacagtgactagtctcccctttgtagtggttgtggttggagtgcttccactctccttagatgcacaactagatccctcgttttacagagacacgtgtcccaaggttcactccattgttcgcgaagtggtgaggaacgtttccaagaaagatccccgcatgcttgccagtctcattagacttcactttcatgactgttttgttcaagg

SEQ ID NO: 137280 - DNA, 142 bp, Glycine max
ggcaaaccataaaattatggttaggtggctttctcgtttctttcactacttggaccgctactttattgcccggaggtcacttccgccacttaatgaagttgggttgacttgcttccgtgatttggtttacaagaattaaacg

SEQ ID NO: 137281 - DNA, 224 bp, Glycine max
atttgtttgagcgttcgcgaaggatcatggtggggttcagaaacagatacatggttatggaggtttttctgaaccctaatagggacaaaggtggggatgattctgttatagttacacagtttaatgtctcaaagctgtaagagacagcatattggtgaattatggggagtgtggtttggcttcgtcattgggatcgtttcaggggcttcaagggaacagtatca

SEQ ID NO: 137282 - DNA, 224 bp, Glycine max
gctcaaacaagtgcgttcttagaagagctcaatcctcctaacataattcttgttcatggagaagctaatgagaagagcaggctcaagcagaagctcataagtcaatttgctgatcgcaacactaaaattctactccaaaaaactgtcaatctgttgaaatgtatttcaattcgcagaaaatggcaaaaaccatagggaagctggctgaaaaaacaccagaagtt

SEQ ID NO: 137283 - DNA, 223 bp, Glycine max
gttttggattcaagtgtgagtgctcttgtgaagaggccaaagaagggaaggagtgagaaggaaaaggaagaggaggaagaggttttggtgatagaagggattgagtttgagagggatttgggtgtgaatttgatgtgtatattaacgatgaagatgatgtgccaggtgggccaagtaagactgagtttgcgggaagctttgtgagtgtgcctcataagcacaa

SEQ ID NO: 137284 - DNA, 223 bp, Glycine max
ggggctagctgaggacccagagaacttgaggtggtacgttcaagccgagcttgtgaatggacgttgggccatgttgggtgttgcaggaatgttgcttcctgaggttttcaccaagtttggaatcatcatgcccctcaatggtatgatgctgggaaatcagagtactttgcatcttcctcaaccctcttcgtgatcgagttcatcttgttccactacgtcgaga

SEQ ID NO: 137285 - DNA, 224 bp, Glycine max
attttgctttgtgtgggttgattggtattatcactgcttacatatttgtctggattgccaagtattataccgactacaagcatgagcctgtgcgcatattagccctttccagctctactggccatgggccaacataattgcaggagtcagtttgggtctggaatctactgctcttcccgtccttgtcatcagtgtgtcaattatctcagctttctggctgggcc

SEQ ID NO: 137286 - DNA, 224 bp, Glycine max
ggaaatcccgaaatttaaccatgcttctccgaaccgccgcctccgccgcttctgcttcgtccctctccctcttcagccctacctccgaacctctccgttcggttcccgctcgtggattggtggttcgcgcgcgaaaggatccacgaaccaccgcgccctaaccggcgtgatctttgaaccgttcgaagaggtgaagaaggagctcgatctcgttcccaccgttc

SEQ ID NO: 137287 - DNA, 227 bp, Glycine max
ggcgagccgtacttgggttggtgagtgaaagtgaaacagaaaaaatcacccttgaacctggggacatgatacacataccagctggcaccccactgtacatcgttaacagagatgagaatgataagctcttccttgccatgctccatatacctgtctctgtctctactcctggaaaatttgaggaatttttcgggcctggaggacgagacccagaatcggtcctctca

SEQ ID NO: 137288 - DNA, 226 bp, Glycine max
ccttattcccttccctcgcctccacttcttcatggctggatttgctcctttgacatctcgtggctctcagcaatacagggccttgagtgttccagagctgacacagcaaatgtgggattcaaagaacatgatgtgtgctgctgaccctcgacatggccgctacctcactgcctcagccatgtttagaggcaagatgagcaccaaggaagtcgacgaacagatgatc

SEQ ID NO: 137289 - DNA, 223 bp, Glycine max
ctggttgctcggacatatatgtacacaatgtgaattgtggacctggtcatggaatcagcattggaagtcttggcagagagaacactaaagcctgtgttagaaatgtcaccgtccgagatgttactatcaaaataccctcactggtgtcagaattaaaacatggcagggtggctctggttcggtccaaaatatcatgttctcgaacgttcaagtttctggggtt

SEQ ID NO: 137290 - DNA, 222 bp, Glycine max
atgcctttttgggcacccagatttccaccattctgagtaacttcacacactatataacagaaaatgagggggggcttatggcaactcgggcaatcaatcactcgccgtcttgcccagggtgataagaggctgttgctcgtaggtattttgcctcagatgctgagctgaaaaagacagtcgtttatgacttccatgttgctaatggagggaagatggtgccat

SEQ ID NO: 137291 - DNA, 223 bp, Glycine max
tagagcttgcacctattggtatcttctacaatatcctaaagtgttccgctgcttcttcatcaccatgactttactttcagagctcagcaacctcaatctctcagaatccacagaaaagatcactgctgagtacatatgggttggtggatctggtatggacctcagaagcaaagacaggactcttcctgggccagtgagtgaccctgcaaaacttccgcagtgg

SEQ ID NO: 137292 - DNA, 222 bp, Glycine max
ctcgagccgtcttaactcaacttctgctacccactctcttcttccaagtccaaccacgctattctctacagtcatgggcaaggtcaagatcggaatcaacggatttggaagaattggccgtttggttgccagagtcgctctgcaaagagacgatgtggagctcgttgccgttaacgaccctttcattaccaccgattacatgacatacatgtttatatacga

SEQ ID NO: 137293 - DNA, 223 bp, Glycine max
cggaggcgcagagtagagcagcagagaagagagaaaacggcactgcagccgtagaaggaaaaccgaccatgctgcacgtctccttttacaggaactatggtaagacgtttaagaagccccgccgtccgtacgagaaggagcgtctagacgcggagctgaagctggtgggggagtacgggctgcggtgcaagagggagctgtggagggtgcagtacgcgctcag

SEQ ID NO: 137294 - DNA, 219 bp, Glycine max
tccatttccatttcctctctctcagtttccaagaatcttaagctatgggaaagtcttacccaaccgtgagcgctgattaccagaaggccgttgagaaggcgaagaagaagctcagaggcttcatcgctgagaagagatgcgctcctctaatgctccgtttggcatggcactctgctggaacttacgacgtgagctcgaagaccggtggtcccttcggaa

SEQ ID NO: 137295 - DNA, 222 bp, Glycine max
attgaaggagagacaccaacaactgcaaatgcaatttcagcccaagctattgctgccaatattagttggggatcggatgatgatgaggtaggagatgaggaggatgagttggacaataccaaactgttactgccaatttacacccaaactatctcattccataagaggcaggctctagtgacatacttggagaacaatagagcaggaatcacagtgtttggg

SEQ ID NO: 137296 - DNA, 221 bp, Glycine max
aaatgacttgagaggtgtaggataagtgggagctggaaacagcgaaagtgaaataccactacttttaacgttattttacttattccgtgaatcggaagcggggcactccccctctttttggacccaggtcggcttcggccggtcgatccgggcggaagacattgtcaggtggggagtttggctggggcggcacatctgttaaaagataacgcaggtgtcct

SEQ ID NO: 137297 - DNA, 217 bp, Glycine max
cggttgacgcttctctcaccatccccatttcgcgttggtgcaaagcatccttcgtttcaatttctctctctcagcgctttctgcaatcgaacctttcatctccaaagggatccacaggccgaaggagaaatggggctgacattcacaaagcttttcagtcggcttttcgcgaagaaggaaatgcgaattctgatggttggtcttgatgctgctggta

SEQ ID NO: 137298 - DNA, 222 bp, Glycine max
agcgcttctcctctttgtgttctggctatgcttcttggcaagagttagatcggacgaggattgcgtgtacacggtgtacgttcggacgggttcgatcatcaagggaggcaccgattcagtaattggtctgaagctatacgacaagtccggctacggcatatacatcaccaacctcgaggcatggggcgggttaatggatccgggtcacaactactacgagcg

SEQ ID NO: 137299 - DNA, 222 bp, Glycine max
aaagccaatgtggtactgttattcaatagagaaacaaaggatgagagatttattgaagagtatgaaacaataacctcgttttctttatcaaatgataacaaattcttgttggttaatcttttgaacaagaaattcatctatggaacattgaaggtgatcctaagcttgttggcaagtacaaaggtcataaacgcgcccggtttattatcaggtcttgctttg

SEQ ID NO: 137300 - DNA, 219 bp, Glycine max
ctcagcagcttaggctagggttcagaaacgaaaaagggttcggtgttcagttcgcgatgagagccaagtggaagaagaagcgtatgaggaggttgaagaggaagcgccgaaagatgagacagagtccaagtagtgcgttaatccaagtagttgatttccgttgcttttataattatgttgtcaaattgggcacccagttgttagaggcactggtttctc

SEQ ID NO: 137301 - DNA, 221 bp, Glycine max
ggattatactcccactatacctgatgaattggtggagcattacttggccaagagcggtttccaatgtcccgatgttcgattgactagattggtagctgttgccactcagaagtttgttgctgaagttgcaggagatgcacttcagcactgcaaagcaagacaagcaacaattccaaaagacaaaagggacaagcagcagaaggataagcgcctagttttga

SEQ ID NO: 137302 - DNA, 221 bp, Glycine max
cggctcgagatcaccttattcctctttcctcttcattctcttcccaaataaaactataatcagtcttcagtgatcgtcaacacttaagacccaagtgtaaatgaagaaagtggtggtgaagttgatttgcacgatgacaaagcaaagcaaaaggccatgaagtcggtttctagcctagcagcatcgattctatctccatggacatgaaggagaagaaactg

SEQ ID NO: 137303 - DNA, 220 bp, Glycine max
caaatccaaaccaaatggtttaagcctatcctctcagactctcctatctcacttgtattaggcccaaacaactggctatggcttggtgctataatctcgtcatcctttctcatgttcctcctcttttggggattatcactcgttactacatatatccaattgaaaataactcagatgaagtttatcattggacctttaaggttttgtggttcatgtttct

SEQ ID NO: 137304 - DNA, 219 bp, Glycine max
ggaaattaattttcaaggagaaggatccgttctgcattatggccagatagttcagtacagcacactagccccactgtggaatgaacttaagttatcctgtgactttgcgaaggcacgtgaagagttgaccaattcaatagtcacaaccgctggaggaagcgtggcattgctatgattcctaataagtttggtatatcctttacaacaaagcttatgaac

SEQ ID NO: 137305 - DNA, 212 bp, Glycine max
ctcagaaccttctgaggttaccgcaaaaaacaaagagagagagagagagaaaatgatgaagccatcgatgctcagatctctccactccgccgccacccgcggcgcctctcatctctccgccgtgggtacgcctccgagccggtgccggagcgcaaggtagccgttctcggcgccgccggcgggatcgggcagcctctctcccttctcatgaa

SEQ ID NO: 137306 - DNA, 216 bp, Glycine max
caaaaattctatccgtggttacacttgcaatggtgcaaaccatagctgccaaagttacctcaccttcagatctcaacccatctacaactctgtcaagacaatatcaactttgttgggttctgacccatcccagcttgctaaaataaactcagtttccatgaatgacacctttgaaacaaacaagttggttattgttccggtcaactgttcctgtgc

SEQ ID NO: 137307 - DNA, 218 bp, Glycine max
ctgaagtgtctgcttcttccgattccggcacgcccccatcaccatggtgaacgttccgaaaacaaagaagacatactgcaagagtaaggagtgcaggaagcacaccctgcacaaggttacccatacaagaagggtaaagatagcattgctgcccaaggaaaacgccgttacgatcgcaaactatctggttatggcggacaaactaagcccgtcttcca

SEQ ID NO: 137308 - DNA, 216 bp, Glycine max
agaagactgccttcaactgttggtagaaagcaatcgaattccagaggcagctttaatggctcgatcttatctcccaagtaaggtctcagagatagtggcaatttggagaaaagacctcaataaggtcaatccaaaagctgctgaatcattggctaatcctgaagaatatccaaatttgtttgaagattggcaagttgcactagctgtcgaatctaa

SEQ ID NO: 137309 - DNA, 219 bp, Glycine max
gtgaataagagatatcaatatattatgataatggagggatacaataagaaggttatgattgtggggatggtgttgggcatggccatgattgggatggccaatggccaatactcgttttgtcgcatgcccagcgatgggttggcggcatgcaagccgagtgtgagtggggactatcctgctgatccctccactgcttgttgctcagccattgccaaggct

SEQ ID NO: 137310 - DNA, 217 bp, Glycine max
cgatcatcaagcctaatagagggctaatccttcacttgtttgttttgtggtgtattattacattttgcaccatgccttctctcttcgctagaaaccagaggttctcattggctactctcctgcttcttctggaactattgacaggaaaccttcgcatggcagatgctcaaattggtgtgtgttatggcatgctgggcaacaatctaccgtcagcaaa

SEQ ID NO: 137311 - DNA, 219 bp, Glycine max
caagaaaggcttcacttcaacacttcaagcagccttgggctcatgagcatgagcctgttggcagtctcctagaagctgttaaggtaatcaagcctacagttttgattggatcatcaggagtggaaaaacatttacaaaggaagtaattgaggctgtgacttctatcaatgaaaaacctcttgttttggccctctccaatccaacttcacagtctgagtg

SEQ ID NO: 137312 - DNA, 219 bp, Glycine max
cgcaagagaaagaaagaatcccaggcgaggagaaagatggaggggaaggagcaggatgtgtcgttgggagcgaacaagttccccgagagacagccaattgggacggcggcgcagagccaagacgacggcaaggactaccaggagccggcgccggcgccgctgcgttgacccgacggagtttacgtcatggtcgttttacagagcagggatagcagagtt

SEQ ID NO: 137313 - DNA, 218 bp, Glycine max
cttgacaagctcaaggctgagcgcgaaagaggaattaccattgatattgctttgtggaagtttgaaaccaccaagtactactgcacagtcatcgatgcccccggacatcgtgactttatcaaaacatgattactggtacctcccaggctgattgtgctgtccttatcattgactccaccactggtggttttgaagctggtatttctaaggatggacag

SEQ ID NO: 137314 - DNA, 216 bp, Glycine max
catttacaagtcccaggcttctgcccttgaaaagcatgctgctgccaactgcaaggttcttgttgttgctaacccagcaaacaccaatgcattgatcttgaaagaatttgctccatctattcccgagaaaaacatttcttgtttgactagattggaccacaatagggcactgggccaaatttctgagagactgaacattcaggtttctgatgtaaa

SEQ ID NO: 137315 - DNA, 216 bp, Glycine max
gttttctttgaaacgcacagcttcaatcaccgaccacaccacccatcaacgacatgcttcctctttcccttctcaagactgcccaaggccaccctatgttggtggaactgaaaaatggggaacatataacgggcatttggttaattgcgacacatggatgaacatccatctgcgagaagtcatttgtacatctaaagacggagatagattttggag

SEQ ID NO: 137316 - DNA, 214 bp, Glycine max
ctcgagccgtgagtatgcatagatctggagctacgatggcgtggaacgtgttcaagttctgcactgctctgcgtggattgggctcgatcatgatcctgttggttcttggcgttgttggtccacttactatgctgttgttttgaccaattatggccctgctttgtatgctggaggacttgattctcttgttgccttggcagtgttgatcttgttt

SEQ ID NO: 137317 - DNA, 227 bp, Glycine max
gtggaggtgaatactctggagctgaaaatcgatgaggaggtggagattgagattgaagagagtgcgtcggcggagtcgccgaacatagggtggggacgatggtatagtctcaaggagcttgagaatgcgactgaagggtttgcggaagtgaatgtgatcggagaaggaggctatgggattgtctacaaaggaattctcatggatggatctgtcgtcgctgtcaaaaa

SEQ ID NO: 137318 - DNA, 226 bp, Glycine max
tttctttctgatgacattcctgaactgattcaaagtcttgaagatcttggagcacctgagtataacccaatatttttgaagaagcttatcactcttgctatggaccgaaagaacagagaaaaggaaatggcatctgtactgctatctgctcttcatatagagatcttctcaacagaggatatagttaatggttttgtcatgcttctggaaagtgctgaagatacag

SEQ ID NO: 137319 - DNA, 221 bp, Glycine max
cttttatagtgattggcataaacacagctttcagtagcaggaagaggcgtgattccgttagagagacttggatgcctcaaggtgaacaacttctccaattggagcgggagaagggaattgttatcagattcatgattggtcacagtgcaacttccaacagcattctagatcgagctattgattcagaagaagctcagcacaaagacttccttcgcctagaa

SEQ ID NO: 137320 - DNA, 223 bp, Glycine max
tgggaaggttatggctttttgcccaattttttgttgcggaaatagttcggatcgcaaaggacgagggaagaaacaacctccatggcgggtgttttctttgaaggaattacactccgctacaaataatttcaactatgataacaagctcggcgaagggggattcggcagtgtgtactggggccagctctgggatggatcgcaaattgcagtgaaaagattgaaa

SEQ ID NO: 137321 - DNA, 225 bp, Glycine max
ctagctcgcacattaagttatataacacatatttgcttgcttagaaatactattattgaagatatggggagtgtagattatgagtaccctttgggcatgaacaactttgagagagtgcaccaagtcgaggttccaccgccacagccgtctttcaagtctctaaagtactctttgaaggagactttcttccctgatgaccctttgaggcagttcaagaacaagcca

SEQ ID NO: 137322 - DNA, 229 bp, Glycine max
gattctgcaggctcttttacgcaatgcaactgatgccatgagggagtcaagggttcttgagatcataaatacgatggagccacttgcctatagaaagatggactttgaagaattttgtgcagctacgatcagcacacatcaattggaagcacatgagtggtgggaagatattgcctcaactgcttttgaacattttgagagagaaggcaaccgtctgatatcagttgaa

SEQ ID NO: 137323 - DNA, 226 bp, Glycine max
aattgacttttctcccctcataaaaaaaacctaccaatggctcccgcaaaggcagagaagaagcccgcggagaagaagccggcagagaaggccccagcggagaagaagccgaagggaagaagaagatatcgaaggaaggaggaagcgagaagaagaagaagagaacaaagaagagcgttgagacctacaagatctacatcttcaaggtgtcaaagcaagtgcaccc

SEQ ID NO: 137324 - DNA, 222 bp, Glycine max
ggctcttcgtccaggtggagttgtgtgcactcaggcagaaagcatatggcttcatatggatataattgaggacattgtggctaattgtcgccagatttttaaaggctctgtcaactatgcttggactactgttcctacatacccaagtgggatgattggttttatgctttgctcaactgagggaccacctgttgatttcaagcatccagtgaatcccataga

SEQ ID NO: 137325 - DNA, 225 bp, Glycine max
gttcttcgtgttctccattccctctgtcactccttcatctacttcacatattatatcatcacatatcatagtgatatcatatcacaatgtgtggcatacttgctgtgcttggttgctctgattcatctcaagccaaaagggtccgcgtccttgagctttctcgcagattgaagcaccgtggtcctgactggagtgggctccaccaatatggtgataactatttgg

SEQ ID NO: 137326 - DNA, 227 bp, Glycine max
gaagcagagaaaactaaccagcaagagaaatcaaaggaaaaccaggaggctgagatcaagcaattgaggaagaccatgactttcaaagccactccaatgccaagtttctacaaggaacctcctccaaaagttgaattgaagaagatacctataacgcgcccaaaatctccaaagcttggaaggcacaaaggatctgctgtgaacaattcagaagataaatcttcttc

SEQ ID NO: 137327 - DNA, 228 bp, Glycine max
ggagagtgagagaaaagagaagagaagatgacaacacgcttcaagaagaacaggaagaagaggggacacgtcagcgctggccacggtcgaatcggaaagcacaggaagcaccctggaggacgcggtaacgccggaggcatgcaccaccacaggatcctcttcgacaaataccaccctgggttcttcggcaaggtaggaatgcgctattttcacaatcttcgcaacaaa

SEQ ID NO: 137328 - DNA, 200 bp, Glycine max
gagagagcagagcgtaccgccctgccatagtcgcgagtctgtttatagtcgcgactgttgtcatagtcaacaaggttgaaacttccaggaaaaaacttcgaattgggagggcgatcctcccggtgaactgaccgtaccccaaaccgacacaggtgaacaagtagagtatactagggcgtttgagagaaccatgtcgaggg

SEQ ID NO: 137329 - DNA, 229 bp, Glycine max
gaaggctgacagtgtcttttatatgcactgtggctaactatgagtatggatttttctggcacttttatcaggatggaaaaatagaagcagagatcaagctcacaggaattctcagcttaggatcacttcaaccaggtgaaactcgaaaatatggcacaaccattgcacctggactatatgcgcctgtccaccaacatttttttgttgctcgtatggacatggcagtaga

SEQ ID NO: 137330 - DNA, 214 bp, Glycine max
  unsure (1)..(214): unsure at all n locations
ggctcgagctacatttcaagtttgcatttcgcattacgcgtttcacgttggcgcttntgtttctttactggaagcttcgttcagcgcatcaatggcgtccttcgatgaagctcctcccggaaactccaagaacggcgagaagatcttcaaaaccaagtgcgctcagtgccacaccgtcgacaaaggtgccggccacaaacaaggacccaatctg

SEQ ID NO: 137331 - DNA, 227 bp, Glycine max
gtcactgctctgtttcaccgagtttgggcgtttagatcagaaccaaatcgtgttctcttccattggcaaacatggcaactcaaatgagcaagaagagaaagtttgttgcggacggagtgttctttgccgaactgaacgaggttctgacacgtgaattggcggaggacggttactccggcgtcgaagttagggttacgccgatgcgcaccgagatcatcatcagagcc

SEQ ID NO: 137332 - DNA, 225 bp, Glycine max
taccaggtccagacatagtaaggattgacagactgagagctctttcttgactctatgggtggtggtgcatggccgttcttagttcgtggagcgattcgtctggttaattccgttaacgaacgagacctcagcctgctaaatagctatgtggaggtaaccctccacggccagcttcttagagggactatggccgcttaggcaacggaagtttgaggcaatagcagg

SEQ ID NO: 137333 - DNA, 221 bp, Glycine max
ttctttctctcttctctctctgtccgaagatggcttcacgcaggttcgtatcttctctgattcgatcctcccttcgtagatctcaatcgaaaccctcgatttccgcatccgcatcgaccttcacgtcatccaaccgtgcctctccgcacggttacttgctgaaccgcgtcgccgaatacgctaccgcggcggcggctgctaccgctcctccctctgctccg

SEQ ID NO: 137334 - DNA, 224 bp, Glycine max
cgaaggtaaggtggtgcaaacaaacaaaaaaccctaattctcgaatatcagatcggcgatcggaggaagaatctgaagttgggcgaagatggttctcgcggagttaggagggagcatttcgcgtgctcttcagcagatgagcaatgcgacgatcatcgacgagaaagtcctcaacgattgcctcaacgacatcacgcgcgcgcttctccaatccgatgttcagt

SEQ ID NO: 137335 - DNA, 222 bp, Glycine max
gaatattccaacagaagtgatctctctgcagtgaaagatagaaagagtcttcatcgccaccaaatccaggaacaggtaaaggtggtaataccaactggcaatcatggtttgccaaatgctgaaagccatggtccctcgtcattacttgatcgactgaggcacggtggaggttgtgactgtggtggctgggacatggcctgtccccttattcttttaggcaat

SEQ ID NO: 137336 - DNA, 222 bp, Glycine max
ggatttccaagtgagcattgggaagtcaatctgccagctgaggaggtgccccctgagcttccagagccagcattgggcattaactttgccagagatgggatgcaagaaaaggactggctgtctttggttgctgtgcacagtgatgcttggttgcttgctgtggctttttattttggtgctaggtttggatttgacaaggctgacaggaagcgactatttaat

SEQ ID NO: 137337 - DNA, 222 bp, Glycine max
gtttctgatttagaattgttgatcagaaaggttgagggtgaagaaagagaggagtgaaaagcaagtattgggatggactactatgggattgtggaggttgacaggaatgcctcagatgaagagttgaagagagcctacagaaagcttgcaatgaaatggcaccctgataagaaccgaagtaataagaaagaggctgagattcaattcaaacagatatctgaa

SEQ ID NO: 137338 - DNA, 223 bp, Glycine max
tttctttcttactttctctcactcaccaaatagttttctcacaaaggaggaagaatggcatctttcatttcactctctttgttgcttctctttctcaattaccccttcctttccctctcaaccaaccctgaagggaacgctctgcatgctttgagaagcaggatttctgatcccaacaatgtgttgcagagttgggacccaacactggttaatccctgtactt

SEQ ID NO: 137339 - DNA, 226 bp, Glycine max
tgtttgcttctcaagtctctcgaagcctctttctctctcttctagaagctatctgtgtttggtgttactaagtctccaacaagcaaagtacatggttgatttggaaatccaggtccccaccccattcgacccgtttgccgaggcgagagaatcggatgcccccggagcaaaggagtatgtgcatattcgaattcagcagaggaatgggaagaagagtctgaccaca

SEQ ID NO: 137340 - DNA, 225 bp, Glycine max
taccaggtccagacatagtaacgattgatagactgagagctctttcttgattctatgggtggtggtgcatggacgttcttagttggtggagcgatttgtctggttaattccgttaacgaacgagacctcagcctgctaaatagctatgtggaggtaaccctccacggccagcttcttagagggactatggccgcttaggcaacggaagtttgaggcaataacagg

SEQ ID NO: 137341 - DNA, 222 bp, Glycine max
tgaatttcttgaaagagtttgagacaaagcttggtatcaaaatcacttgttctcaagaaactgaaccgctaggtactgcaggccccttggctcttgcgagggataagctaataagtgactctggagagccattttttgttctcaacagtgatgttatcagtgagtacccacttaaagaaatgattcaattccacaaaacacacgaatcagaggctaccataa

SEQ ID NO: 137342 - DNA, 220 bp, Glycine max
caattttccatgaaacagatgatgcagatttatttgcctcttggggtgtagattatttgaagtatgacaattgttacaatctgggcatccctccaaaagaacgatatccgcctatgcgtgatgctctcaatgcgactgggcagaagattttctattcactctgtgaatggggcgttgaggaccctgctttgtgggcagacaaggttggtaacagttggcg

SEQ ID NO: 137343 - DNA, 221 bp, Glycine max
cacttttcatccttcgatcatacacttagttgcttccaattaagatggttctgctagagaagctctgggatgatgttgtggctggccctcaacctgagcgtggccttggcaagctcagaaaactcaccaccctcaaaactattgatgaaggagaaagtagcaagctgcagaagacgttgtcgatgccgtcgacaccaacaaccccgatgactccgacgact

SEQ ID NO: 137344 - DNA, 221 bp, Glycine max
gagaaagaaaaatggagggaaaagaggaagatgtttccttgggagctaacaaattctcagagaggcaaccgattggaactgcggctcagagccaagacgatggaaaggactacacagagccacccccggctccacttttcgagccctccgaactcacttcttggtccttctaccgagccggaatagccgagtttgtagccacttttctctttctctacata

SEQ ID NO: 137345 - DNA, 221 bp, Glycine max
aaatttgtttgctattatggcttcttcattaaacaatggccgtaaagcaagtgagatttttcaaggtcaagctctcttgtacaaacatttgcttggcttcatagattctaagtgtctaaaatggatggttgagcttgacatacccgacataatccacagccatagccatggccaacccattactttttcagagttggtgtcaattctacaagtcccaccaa

SEQ ID NO: 137346 - DNA, 224 bp, Glycine max
caccacttgcacatttcctggaaggaagaaagttggtgttgtagggcgtaccgggagtggaaaatcaactctcatacaggccattttcaggattgttgaaccaagagaaggaagcattataattgacaatgtggacatatgcaagataggtctccatgacttaaggtcaaggcttagcattattccacaagaccctgccttgtttgaaggcatgttagaggaaa

SEQ ID NO: 137347 - DNA, 221 bp, Glycine max
caagttacacaggtacagcttgaccgagccaaaaaatccacaaagtctgcagttctaatgaatctggaatctagaatgattgcatcagaagatataggaaggcagattttgacttatggagaaaggaagcctgtggaacagttcttgaaggccgtagatgaaatcacgttgaatgatatcactaaaattgctcagaagattatttcctcacctttgacgat

SEQ ID NO: 137348 - DNA, 221 bp, Glycine max
ccctgcggatgttgacgcaaggtgatttctgcccagtgctctgaatgtcaaagtgaagaaattcaaccaagcgcgggtaaacggcgggagtaactatgactctcttaaggtagccaaatgcctcgtcatctaattagtgacgcgcatgaatggattaacgagattcccactgtccctgtctactatccagcgaaaccacagccaagggaacgggcttggcg

SEQ ID NO: 137349 - DNA, 221 bp, Glycine max
atggcacaagcagattctccacagttcatgggagacccattttccatttcttgaacacttcgactttctcggagtacacggtggtggattcggcctgtgtggtgaagtttgtgagcacagaccacagtctcagcatcaagaacctcaccttgctcagttgtggtgtctccacaggggttggagctgcttggaatacagctaatgtgcattcgggttcaact

SEQ ID NO: 137350 - DNA, 208 bp, Glycine max
attacaaattacactctttgccctcgcaccttcaacttaaccttttctactcataatcttaacaacttgctagaagaagataaagaaagagaaaaagtgtgtgtgtgagagagagagcaatggctggctcgtgggcacgccgttctctgattgtttggtatcattcttcggatgttattgcaatttccatgtaggagagcccaattgg

SEQ ID NO: 137351 - DNA, 227 bp, Glycine max
caaagcacctgcattgtttttggcgaagaatgctgttctgacttcttttgcatcagggcgtgctacgtcattagttgttgatggtggtggaggatcaattacagttgcaccagtacatgatggttatgttcttcaaaaggctgtggctacctctccaattggaggagaatttcttacagactgcttgatgaaaagcttggaaagcaagggtattacgataaaaccaa

SEQ ID NO: 137352 - DNA, 247 bp, Glycine max
gatatatagaagagccttccatatatagcctcccaaaaaaatgaagagtactacctctttggctctctttctactttgtgccctaacttcatcatatcagccttcagccaccgctgatattgtattcgacaccgaagcaatcctattcgaaacggcggcacatactatgtgttgccagttataagaggaaagggcggcggaatagaatttgccaaaaccgaaacagaaacatgccctctcactgttg

SEQ ID NO: 137353 - DNA, 230 bp, Glycine max
ggaagagaccactgactgccacggccacatcacctccctcgccgtcctccgcacccaccgcaagctaggcctcgccactaagctcatgaccgccgcccagaacgccatggaacaggtgtttggtgccgagtacgtgtccctgcacgtgcgcaagagcaaccgcgcggccttcaatttgtacacggagactctagggtacaagattcatgatgtggaggccaagtattatg

SEQ ID NO: 137354 - DNA, 229 bp, Glycine max
agaagctgttcgcaaccaagactttgaaaaggctggagagctacgtgatagagagatggatcttaaggcacagatctcaacacttgtagagaaaggcaaggagatgagcaaggcagagactgaggcaggggatgaaggtcctattgtgactgaagctgacatacagcatattgtctcatcctggactggtattcctgttgagaaagtctcaacagatgaatctgatcgc

SEQ ID NO: 137355 - DNA, 228 bp, Glycine max
ctagggttatcatttctccatttccattttctctctcacttttcaagaatcgtaagctatgggaaagtcttacccaactgtgagtgctgattaccagaaggccgttgagaaggcgaagaagaagctcagaggcttcatcgctgagaagagatgcgctcctctaatgctccgtttggcatggcactctgctggaacctttgacaagggcacgaagaccggtggaccctt

SEQ ID NO: 137356 - DNA, 226 bp, Glycine max
gtggttgtcttgggaaaagtgggtagaaatgtagctgctggtatgactggagggttggcttacattcttgatgaggacgatactttcatacccaaggtaaacagagaaattgtaaaaatccaacgggtgtcagcccctgttggacagatgcaactgaagagcctgattgaagctcacttgaaaaaaccggtagtaccaaaggtgcggctattctgaaggactggga

SEQ ID NO: 137357 - DNA, 234 bp, Glycine max
gatagatatatcgatgagccttccatatatagcctcgcacaactatgacgagtactacctctatggctctcttactactttgtgccctaacttcatcatatcagccttcagccaccgctgatattgtattcgacaccgaaggcaatcctattcgaaacggcggcacatactatgcgctgccagttatcagaggctagggcggcggaatagaatttgccaaaaccgacacagaaa

SEQ ID NO: 137358 - DNA, 236 bp, Glycine max
ggcttttccaacctctacgccatggaggtggatcctactgttgagcatgaggacatgggtggcgctgatgggatggactccttgttctccgagctcgccggcgcgattcccgggattgatgaggccatgagctttgctgagatgttgaaattggtgcagacaatggattattctgttattgtatttgatactgctcccactggccatacactcagactattgcaattcccatcggt

SEQ ID NO: 137359 - DNA, 236 bp, Glycine max
tgagccttctaagcgcggaaagtactgtgtttgctttgacccattggatggctcgtccaacattgattgtggggtttccattggcacaatttttggggtttatgcgttgaaagatgtccatgaaccaaccatagaagatgtcctgcttcctgggaagaacatggtggcagctggttactgtatgtatggaagctcttgcacgcttgtgttaagcactggagcaggtgttaatggtt

SEQ ID NO: 137360 - DNA, 228 bp, Glycine max
  unsure (1)..(228): unsure at all n locations
acgcgttctctctccaatttggacctccctttccttcgttcctcactccctgcgatacagnnggagatcagncgntctcctcctcnancancaccgcgatgcgcgccaattccatgctcgccgagttctctcacgatctcgacgaccagatctcccagctcatgcagtgcaagccactcttgagcaacaggtccgatgtttatgtgtgaaggctaaggagattttaac

SEQ ID NO: 137361 - DNA, 234 bp, Glycine max
ccggtggaaaggctcctaggaagcaactcgccaccaacgctgcaaggaaatctgcaccgacaatcggtggagtcaagaagcctcatcgctatcgacctggagctgttgctcttcgtgagatacgaaaataccactcgagcacagagcttctgatccgcaagctccccttccagcgtcttgttcgtgagattgcgcaagacttcaagaccgattcgaggttccagagtcacgctg

SEQ ID NO: 137362 - DNA, 231 bp, Glycine max
tgaggtctgagatcgatgacgtcggggacgaggctacccacgtcgaaggagagagaaaacaacaagaggagagagagaaggagaagagccatagcggcgaagatcttcgcgggtctgaggatgtatgggaacttcaaactccccaaacactgcgacaacaatgaagttctcaaagctctctgcaacgaagctgggtggaccgttgaacccgatggaaccacttaccgcaag

SEQ ID NO: 137363 - DNA, 226 bp, Glycine max
gattcagcttttattatctttacaacaacgtccttaatttgatgattctttaatcgtagatttgctctaattagagctttttcatgtcagatccctttacaacaagccttaattgttgattcattaatcgtagattagggcttttttcattgattacttcagatccgttaaacgtaaccaagatcagggctttttcatgaattacttcagatccgttaaacaacag

SEQ ID NO: 137364 - DNA, 232 bp, Glycine max
cgttgttaaggacgaaggaggggtgagtctccgggcgttggatcagatgactttgaccaaatcagtggtgtatgaggtcctgaggatagagcccgcggtgccgttccagtacgcgaaggccagggaggatctggtggtggagagccacgatgcggcgtacgagatcaagaagggagagatgatctcggatatcagccgttcgctaccaaggatccgaagatcttcgagaacg

SEQ ID NO: 137365 - DNA, 231 bp, Glycine max
cattctctctgtgtatttccctacctctcccttcaagatgcagatcttcgtcaagaccctcaccggcaagaccatcacccttgaggtggaaagctctgacaccatcgacaacgtcaaggccaagatccaggacaaggaaggaatccccccggaccagcaacgtctcattttcgccggaaagcacttgaggacggccgtacccttgctgactacaacattcagaaggagagt

SEQ ID NO: 137366 - DNA, 234 bp, Glycine max
tctcgagccgattcggctgagatggttccagatactacaccaacagtttcaaaggatcggtagatgctttccatgtcaatacagttgatacaactggtgccggtgattcctttgttggtgctttattggccaagattgtcgatgatcagtccatacttgaagatgaaccaaggttaagagaagtataaagtttgcaaatgcatgtggagctattacaactacccaaaagggagc

SEQ ID NO: 137367 - DNA, 240 bp, Glycine max
gcggatgctgtgtttgccttccagctccggaatcctgttcacaatggccatgctttgctaatgactgacacccgaaagcgccttcttgagatgggctataagaatcctgtcctcttgcttcatccacttggaggctacaccaaagctgatgatgtcccacttgattggcgaatgaagcaacatgagaagtacttgaggatggtgttcttgatccagagacaactgtggtatccatattcc

SEQ ID NO: 137368 - DNA, 237 bp, Glycine max
cgctggcagctacagctatgatcatcaacagcaccccttttcctctatgatcgattcgattccgtagagtgagaaatcagatcagaataatcatcgatgggtaatttgttcgtgaagaagcccaaggtaacagacgtcgataaagcaattctcgctctcaagacccagagacgcaaactcgcccaatatcaacagaagctagatgctgttattgaagcagaaaagcaagctgcacga

SEQ ID NO: 137369 - DNA, 234 bp, Glycine max
ccggtggaaaggctcctaggaagcaactcgccaccaacgctgcaaggaaatctgcaccgacaaccggtggagtcaagaagcctcatcgctatcgccctggaactgttgctcttcgtgagatccgaaaataccactcgagcacagagcttctgatccgcaagctccccttccagcgtcttgttcgtgaattgcgcaagacttcaagaccgagccgaggttccagagtcacgctgt

SEQ ID NO: 137370 - DNA, 237 bp, Glycine max
ggtttcttcatgcaacatttttgttgttaagggtaacgttatttcaactccagctattaaagggacaatcctacctggcattactcgcaaaagtataattgatgttgctcgaagccaagggttccaggttgaggagcgattagtgtcagtggatgaattgctagatgctgacgaggtcttctgcacgggacagctgtggttgtatcacctgttggcagtattacttatcttgacaag

SEQ ID NO: 137371 - DNA, 237 bp, Glycine max
gccagtagtcatatgcttgtctcaaagattaagccatgcatgtgtaagtatgaactaattcagactgtgaaactgcgaatggctcattaaatcagttatagtttgtttgatggtatctactactcggataaccgtagtaattctagagctaatacgtgcaacaaaccccgacttctggaagggatgcatttattagataaaaggtcaacacaggctctgcctgttgctttgatgatt

SEQ ID NO: 137372 - DNA, 232 bp, Glycine max
gccctagccaatgtcctcttggtccttctcttgaacttgagcactttgctcaatgttcttgcttgtccctattgcccttacccatctcccaagcctcctccaaaaaaagcctcccattgtgaaaccaccagttcacaaacaaccaaaaccatgtccaccacccaagtcatctccaaaaccacccatgtacacccaccctatgtcccaaaacctcctcactaccctaaaccac

SEQ ID NO: 137373 - DNA, 229 bp, Glycine max
ctcgagccggtaagcttcgcgagtcaaagtcttactgtgagaatgctcttaggatttactcaaagcctgttccggggaccaccgcagaggagattgccggtggcttgacagagatttcagcagtttttgaatctgtcgatgagccggaggaggcgctgaagctgttgaacagggcaatgaattgttggaggataagccagggcagcagagcactattgcggggattgag

SEQ ID NO: 137374 - DNA, 236 bp, Glycine max
taacatagcatagagtgagaagtgagaagagaaaaatggcaatctccatacccagtagacaacttttcatagatggagagtggaaagtccctcttctcaacaatcggtttccgatcatcaaccccgctactgaagacatcatagggcatattccagccgctactaaggaagatgttgaccttgcggtggatgctgctaaaagagccttttcccataacaaaggcaaagattggtct

SEQ ID NO: 137375 - DNA, 234 bp, Glycine max
ccccacttggaagcaaaattcgacaccgacaagttcgtgttacctgggttacccgataacttggagatgacgcgcttgcagttgccggattggcttaggtctccgaatcagtacactgaactgatgaggacgattaagcagtcagagaaaaagagttacggttcactttttaatagtttttatgacctcgagagtgcttactacgagcattacaagagcatcatgggaactaag

SEQ ID NO: 137376 - DNA, 228 bp, Glycine max
ctcaatgggttcttcttctattccaccttcgacacaaaccatgaccatggctgcgatcgtgctcctgttcacggtctttgccgtttcctccgccctagacatgtcgctaatctcgtacgacagcgcccacgcggacaaggccgccacgttgcgcaccgaggaggagctgatgtccatgtacgagagtggctcgtgaagcacgggtaggtgtacaacgcgctcggcgag

SEQ ID NO: 137377 - DNA, 236 bp, Glycine max
accagtggttcttttccttctgagaagatcgaattgtgttttgcaaaaatgggagttccagagaaagaccctctttcccaattgagtttgcctcctggttttcggttttaccccaccgacgaggagcttctcgttcagtatctgtgccgcaaggtcgctggccaccatttctctcttccaatcattgccgaaattgacttgtacaagttcgacccatgggttcttccaagtaaagc

SEQ ID NO: 137378 - DNA, 232 bp, Glycine max
aaatgtcttgctgcggtggtaactgtggttgcggaagctcctgcaagtgcggcaacggctgcggaggctgcaagatgtacccagacttgagctacactgagtcaaccaccaccgagaccttggtcatgggagtggcacctgttaaggctcaatttgagggtgctgaaatgggtgtgcccgctgagaacgatggctgcaaatgtggaccaaactgctcctgcaacccctgcac

SEQ ID NO: 137379 - DNA, 232 bp, Glycine max
catccttcgatcatacacttagttgcttccaattaagatggttctgctagagaagctctgggatgatgttgtggctggccctcaacctgagcgtggccttggcaagctcagaaaactcaccaccctcaaaactattgatgaaggagaaagtagcaagctgcagaagacgttgtcgatgccgtcgacaccaacaaccccgatgactccgacgactccaacgacaccgggatcg

SEQ ID NO: 137380 - DNA, 231 bp, Glycine max
aaaatgggtgagaacgttcaagacttcatgaacgtgttgctttccttgcttgaaggaaaaactattgagggcatgaatgttgatatcgtcatcaaatcctttgtatagacaataattcaagcagcaaccgaggcaagcattacgactcttgtatgggcaacaagtttgatattgaataatcaagtgtactagaaaaacttaaagccgaactagacatccaagttggaaaag

SEQ ID NO: 137381 - DNA, 234 bp, Glycine max
ccggtggaaaggctcctaggaagcaactcgccaccaaggctgcaaggaaatctgcaccgacaaccggtggagtcaagaagcctcatcgctatcgccctggaactgttgctcttcgtgagatccgaaaataccacacgagcacagagcttctgatccgcaagctccccttccagcgtcttgttcgtgaattgcgcaagacttcaagatcgattcgaggttccagagtcacgctgt

SEQ ID NO: 137382 - DNA, 235 bp, Glycine max
ggaagatggcaacaaccttcaagtactttacttccatcctcttcctcaccctcgtcatcaaagggtcatgtgatgactgttccttgaacaacatcaatattggcacatcaagaactgggagagaaatccagggccagcctgagtggaacgtgaccgtgatcaacaattgcaactgtgaacagagtcagataaagttgtcttgcaaaggttttcaaagtgcagaaagtgttgaccc

SEQ ID NO: 137383 - DNA, 225 bp, Glycine max
gcaaaatgataggaaagaaattcttatgcgttgttgtagcggtggcctttgttatgataacaaaggtgccccaaaatgtgagtgctcaaaactgtggttgtgctgaagggttatgttgcagccaacatgggtattgtggtaacggtgaggagtactgcggcacagggtgcaagcagggtcttgttattcgagcacaccaagtactaacaatgttaatgtggctga

SEQ ID NO: 137384 - DNA, 231 bp, Glycine max
caacaaacatcttcacaaactagtaatattattcttcgaatccattttattattcataatgggtattttcacatttgaggatgaaaccacctcccctgtggctcctgctaccctttacaaagctctagttacagatgccgacaacgtcatcccaaaggctgtcgaagccttcaggagtgttgaaaaccttgaggggaacggtggccctggaaccatcaagaagatcacttt

SEQ ID NO: 137385 - DNA, 231 bp, Glycine max
gcaaaaagaaagaatcccaggcgaggagaaagatggaggggaatgagcaggatgtgtcgttgggagcgaacaagttccccgagagacagccaattgggacggcggcgcagagccaagacgacggcaaggactaccaggagccggcgccggcgccgctggtgtgacccgacggagtttacgtcatggtcgttttacagagcagggatagcagagtttgtggccacttttctg

SEQ ID NO: 137386 - DNA, 233 bp, Glycine max
aaagggcgaacgcccgtttgaagtggcgaaggcctatgattgatatagtaagaaagaaagtacgttaaggttacgaagtaaggtcagctggttaaggaaagctcaggttatgaaatcgcttagccattaattaaattcagtagtagtgaggcgtcggtacggagccttccactgtggaccgagactacgcaaaggtagaacaccatagaaacttcgctgactttctaataaac

SEQ ID NO: 137387 - DNA, 233 bp, Glycine max
ttaagaattcatggggcgagagctggggagagaatggatattacaagatctgcagaggtcgaaatgtgtgtggagtagattccatggtctcaactgtagctgctatatatccatccagccattaaatacaaagatatgcctgattgtggttgtgatgtgatactggactaaggggagtttgtataaatatttatgttgtgaactttatcatttggtactggtaaaattatctc

SEQ ID NO: 137388 - DNA, 231 bp, Glycine max
ttccttttctcttctctgtctaaggggtgccctgagatcacattgaacaatggtgaaggctgtggccgttcttggcagcagtgagggtgtcactggaactattcacttcgttcaggagggaagtggtccaaccaccgtaactggatctcttgctggtcttaagcctggtctccatggtttccagtccatgccttgggggacactaccaatggttgcctctcaactggatca

SEQ ID NO: 137389 - DNA, 226 bp, Glycine max
gctcccatatagtagatgattttcaagactatgcggatctttgctttaaggaatttggagatagggtgaagttttggactactttgaatgaaccatggttgttcagccagggtggctatgcaaccggagcgacggcaccaggaagatgtaccggtccacaatgcctcggtggtgatgtggcactgaaccttacatagttacacacaatcaaattcttgctcatgca

SEQ ID NO: 137390 - DNA, 130 bp, Glycine max
atggcttccttaagctccttagtgctgctccttgcagctctaattctatcccctcaagttcttgcaaactatgagaatcccccagtgtacaagcctcccactgagaaaccaccagtttatgatagccccc

SEQ ID NO: 137391 - DNA, 224 bp, Glycine max
tcttcacataccaacatttaaaaagggttgctgaaattgctaggaaacttggaatctttgtcatttctgatgaagtttatgcccatgtaacttatggaagcaatccatttgttcccatgggggtgttttcttcaatagttccggtcattacaattggatctttatcaaagagatggttagttcctggttggagaactggttggatagccacatgtgaccctcat

SEQ ID NO: 137392 - DNA, 225 bp, Glycine max
gccctatatgcacgaatcacgccatctccatgcaatgcggcgaccaagaggatgtgggggtcgcttcttgaacactaagaattctgttgacggaaatggtaaaattggaaatgaagtgcataaaactgttggtgaacaattgcagtctagtggctctcagagttctgaattccttcatctgaggttggaacttttaattcatcaaaagagactaatggaagcagt

SEQ ID NO: 137393 - DNA, 228 bp, Glycine max
ccgttcatttcctctgttttttcttcaaatccattgtttcgtggaaatcccgaaatttaaccatgcttctccgaaccgccgcctccgccgcttctgcttcgtccctctccctcttcagccctacctccgaacctctccgttcggttcccgctcgtggattggtggttcgcgccgcaaaggatccacgaaccaccgcgccctaaccggcgtgatctttgaaccgttcga

SEQ ID NO: 137394 - DNA, 227 bp, Glycine max
gcttagcgcacacgaggttatgaactcgaatcctgggcactatgttgcgcttgtcgtgtcctcgcccacgctcaaggccgagaatggcgctccgatgaagcagcttaagcttctccgacccgacgatactttgcatattggccaggtttatcggttgatcagcttcgaagatgtgttgaaggagtttgcttccaagaaatgtggtaaacttgggaaattgctcaagg

SEQ ID NO: 137395 - DNA, 225 bp, Glycine max
atttcgttcttcttctccaattagggttctatcaagccttttcctctactctcccactttgcattttcccatggctaccgagcatcttcaaatcgaacccgccgagctccgattcgtctttgaattgaagaaacaaagttcatgtttggttcaacttgccaacaccaccgatcactttattgcttttaaggtaaaaacaacttcacccaaaaaatattgcgtcag

SEQ ID NO: 137396 - DNA, 222 bp, Glycine max
cgtcaacttactcaaagaggcatgtttggattccggttttttctacgttgtcaatcatggaataagccaggaattcatggacgaggtttttgcgcagagcaagaagttcttctctcttcctcacaacgagcagcaccagactctcaggaatgaacaacacaggggatacacccctgttcttgatgagttgcttgatcctgaaaaccaagtacatgtaggaga

SEQ ID NO: 137397 - DNA, 229 bp, Glycine max
tttcctagcagaacaaagcacagcttgttgtgattgctcacgatgtggacccaattgaattggttgtctggcttcctgcattgtgcaggaagatggaaattccgtactgcattgtgaagggaaaggcccgcttgggaacggttgtccataagaaaactgcatctgttttgtgcttgacaactgttaagaatgaagataaattggagttcagcagagttttggaggctat

SEQ ID NO: 137398 - DNA, 140 bp, Glycine max
cccaattgaaaaaccacccgtttataagccaccagtttacaagccaccagtgtacaagcctccagtgtataagccaccagtttacaagccaccagtgtacaaggccaccagttggagaacgccaccagtgatacagaacc

SEQ ID NO: 137399 - DNA, 234 bp, Glycine max
cttgatcactgtgatgatttgatccaactgccctcaagcatactgtggaatgaagtcactccaaaacttgagtctcaccaactgccacaatttgactcaattgcctgttgaattaggcaaactaagatctctagagatcctacgattatatgcttgtcctgatctgaaaacacttcctaatagcattagtcacatgataaggttgaagtatatggacatttctcaatgtgttaa

SEQ ID NO: 137400 - DNA, 234 bp, Glycine max
catcactatggctcttctgagtcgagcctcttcacgcttccctcagctggtttcccctcaaagggtagtttcactccacacaacgctcccatcactgaacgcatccccatccacagccacgcctacaccatatgccccgccaccgcctccgtccgcttcctctcccgccggcgtttcgaaggcggcggagttcgtgatctcgaaggtggacgatctgatgaactgggcccgccg

SEQ ID NO: 137401 - DNA, 232 bp, Glycine max
atgatcttcacattttacaaggcacaaggtctttcagtgggttcatcccttgtagaagaagataagttggatcttgctacatcactacttgcaaaagccaaggaaaagggggtgtctctcttgttaccaagtgatgtggtgattgcagacaaatttgcccccgatgcaaacagcaaggtcgtgccagcatctgccatccctgatggctggatgggattggatattggtccag

SEQ ID NO: 137402 - DNA, 231 bp, Glycine max
cactcgcaagcaaaaagaaagaatcccaggcgaggagaaagatggaggggaaggagcaggatgtgtcgttgggagcgaacaagttccccgagagacagccaattgggacggcggcgcagagccaagacgacggcaaggactaccaggagccggcgccggcgccgctggttgacccgacggagttcgagtcatggtcgttttacagagcagggatagcagagtttgtggcca

SEQ ID NO: 137403 - DNA, 233 bp, Glycine max
gacacacctttgagcaggcagtcataaaaagattgatgactgatgtgccttttggtgttctactctctggaggtttggactcttcattggttgcatccgtcacttctcgctacttggccaacacaaaggctgctgagcagtggggatcaaagttacattcattctgtgtaggccttgagggctcaccagatttgaaggctgcaaaagaagttgctgactatctaggcactgtc

SEQ ID NO: 137404 - DNA, 236 bp, Glycine max
ctcgcactgctagaagaacaaatttcatgcctattgttccaaatagtgatgaagcttcagctttggatactgcatctgatgtggctggtaatgatcttgggttaggatttgccagacgcttggctggcagttctcctcagcaaattaaacaaaaaggtgatccttcatcttcagctgccttgtctgaaagtgaagagtcaggggtagctgatgttaaaccaaaagaagagggtagg

SEQ ID NO: 137405 - DNA, 221 bp, Glycine max
aaaaaaaaaaaaaatccgcgattcgctcttctcttggaaaagtgaaaaccagaagtacgaacgaaagagaagagcgatttagaagtgagagaagatggggttgtcgttcacgaagctgttcagcaggttgtttgcgaagaaggaaatgaggattctgatggtaggtctcgatgctgctggtaagacaaccatcttgtacaagctcaagcttggagaaatcg

SEQ ID NO: 137406 - DNA, 223 bp, Glycine max
ggaaatggtgaagaataagacactgatattctcatttgattcaaccaagaaagctcgttttggtgtgctacctcggtatgctaaggatgaaaagcttattagatggtttgagttacccaactgcttcatattccacaatgccaatgcttgggaggaggaagatgaagttgttctgatcacatgccgccttcagaatccaaatttggatttggtcggtgggact

SEQ ID NO: 137407 - DNA, 232 bp, Glycine max
gcggatgctgtgtttgccttccagctccggaatcctgttcacaatggccatgctttgctaatgactgacacccgaaagcgccttcttgagatgggctataagaatcctgtcctcttgcttcatccacttggaggctacaccaaagctgatgatgtcccacttgattggcgaatgaagcaacatgagaaggtacttgaggatggtgttcttgatccagagacaactgtggtat

SEQ ID NO: 137408 - DNA, 230 bp, Glycine max
ggcacatggtcttcagcaccgagggagagattccttacagagaaggacaatcaattggggtaattccagatggtattgacaagaatggcaaacctcataaactgagattgtattctattgctagcagtgccattggtgattttggagattccaaaactgtttctctatgcgtgaaacggctggtgtacacaaatgaaaatggagaaattgtcaagggagtctgctcaaat

SEQ ID NO: 137409 - DNA, 246 bp, Glycine max
gtttctctctctagcttggacgagtgaattagattcatcatcaagatgtcgtctctgatagcagaagatgtgaagagcagatcagaggtgtaccacggggacgacatgtgccaagtgaagtccaaggagcttctcaaggaaatcgccctccccaacggccttcttcccctcaaggacatggaggagtgcggctacgacagacaaaccgccttcgtctggctcaaacaaaagaagagttacacccac

SEQ ID NO: 137410 - DNA, 215 bp, Glycine max
atcgccactgcacttttgcgccacttcatagaactcaacaagctaggatttcctgttctgttgcaccaaatgaagtgcaggtgccaactgtgaaaacccaggatcccaagagtaagcctgagtgctatggtgtcttctgccttacctatgatttgagggctgaagaagagacaagatcctggaagaaattaattaacattgcagtctcaggtgct

SEQ ID NO: 137411 - DNA, 221 bp, Glycine max
tcttggaagcctatgcaatttaacaacaccccagttgaaagagcttggtttagccttggaagcatcaaaaagacccttcatttgggttatcagggaaggaggtcattccgaagaattagaaaagtggattaaggaatatggatttgaggaaaggaccaatgctagaagccttctcattcggggatgggcgcctcaaatattaatattatctcaccctgcta

SEQ ID NO: 137412 - DNA, 222 bp, Glycine max
ggcgaattgagaaatgggtactgaggagggcctttgatgatgaagaacatccttatctgccaaagcacattttatacaggcagaaagaacaattcagtgatggagttggctatggttggattgatggccttaaagctcatgctgagaaacatgtgactgacagaatgatgctcaatgctgctaacattttccccttcaacacaccaaccaccaaagaagcat

SEQ ID NO: 137413 - DNA, 224 bp, Glycine max
ctggcttgcttgataaccctcaactctctcttgattctatctcagtttgcatggcaataacagggttgacgatgcatattggaattggatttaatgcagctgcaagcgtgagggtgagtaacgagttgggagctgagcatccaaagtctgcagcattctcagtgattgtagtgaatatgatatctttcataattgcggtgatagaagcagtggtggtccttgca

SEQ ID NO: 137414 - DNA, 230 bp, Glycine max
gcgccgtttctgtgcttttactctgctaccttgtgacaatggtgagggttagtgtgttgaatgatgctcttaagagcatgtacaatgctgagaaacgggggaagcgccaggtcatgattaggccatcctcaaaagtgattataaaattccttttggtgatgcaaaagcatgggtacattggagagtttgagtacgttgatgatcacagagctggaaaaattgttgttgaa

SEQ ID NO: 137415 - DNA, 229 bp, Glycine max
ctatggagcagatgcatatcctttcaccgaggagagaataaaagaaatagagacagaacaagaagagactgcaaaggggtggccggagaagctgaagcatgaattacatgagcatgagcttgtgttgacgcgccgcagggtgtattactgtgatgcttgcaatgaagagggacatatatggtcctactactgtggagattgtgactttgatctccatccaaaatgtgca

SEQ ID NO: 137416 - DNA, 234 bp, Glycine max
catcttacactcaccggcgagtccatctcgcgccaccgtcgactcagctccggccatcgccgttgattccctcactttctcactcttcttattcttcttctcagcggaaatatgccttctcagaaggttgaaacgggtcatcaagacacggtccatgatgttgcaatggattactatggtaagaggctggccacggcttcatcagatcacacaatcaagataattggggtgagc

SEQ ID NO: 137417 - DNA, 245 bp, Glycine max
gtggattctgaggagagcctttgatgatgaagagcatccttatctgccaaagtacattttatacaggcagaaagagcaattcagtgatggagttggctatagctggattgatggccttaaggcccatgctgcaaaacatgtgactgacaaaatgatgcttaatgctggtaacatctaccctcacaacaccccaacaaccaaggaagcatattactacagaatgatctttgagaggttcttccctc

SEQ ID NO: 137418 - DNA, 229 bp, Glycine max
ctcagaattctctaaaagagatctttttctgctctttgaagaaagaagggtctttgcttgattttggagatgtctctgctctcagatctcatcaaccttaacctctccgataccaccgagaaggtgatcgcagagtacatatggatcggtggatcaggaatggacctgaggagcaaagcaaggactctcccaggaccagttagcgacccttcagagcttcccaagtgga

SEQ ID NO: 137419 - DNA, 225 bp, Glycine max
gtgatggtccaaatagctatcagatttggcttggaggaaaccataaacaaacatcattagctcgaagtttcatggacagggtgaagattctagaccttgaaaaagttttggagcctttgttttattattggaagcaaaagcgtcaatctaaagaatcatttggtgacttcacaaaccgaatgggatttgagaagcttaaagaatatattgagaaatgggagggtc

SEQ ID NO: 137420 - DNA, 220 bp, Glycine max
gggcctattacacacactgggcctagtgatccaaaaagtgggtgtgaatgtttattgtggttggataaacaaccacctaattcagttctttatgtgtcatttggaagtggtggcacactctgccaagagcagatcaatgaacttgctttagggttggaattgagtaggcacaagtttttgtgggttaatttgagggcaccaaatgatagagcaagtgcca

SEQ ID NO: 137421 - DNA, 220 bp, Glycine max
ctcgagccgattcggctcgaggtgacaggtgtcatgaccaacacgtgctgcgaaacgacgtcgcgtgaggcgttcgtgagagggtttagggttttcttctccgcggacgccactgccacctctgacgtggagcttcacgaggccgctttgaagaacttggcttatggttttgcttacttggttgattgccagaggcttcaacatgccctctctggtgcca

SEQ ID NO: 137422 - DNA, 232 bp, Glycine max
aagccaccagtttacaagccaccagtgtacaagccaccagttgagaagccaccagtatacaaaccacccgtttataagccaccagtttacaagccaccagtgtacaagccaccagttgagaagccaccagtgtacaagcctccagtgtacaagccaccagtatacaaaccaccagtttataagcctccagttgagaaacctcctatttacaagccaccagtttacaagccgc

SEQ ID NO: 137423 - DNA, 235 bp, Glycine max
tgactttacttttacaagaccaacttggtggtcttcaagttcttcatcagaatcaatgggtcaatgttcctcctgtacatggagctctggttgtaaacataggagatcttctacagcttatcacaaatgacaagtttgttagtgtgtatcaccgtgtcttatcacaaaacacaggcccaagaatatctgtagcaagcttctttgtaaattcacatgacccagttgagggtacatc

SEQ ID NO: 137424 - DNA, 242 bp, Glycine max
ctccctctaacttcaagtccaaggttctgaattcaaatggagatgttctttatgaattctttgctccatggtgtggacactgtcaggctctgactcctatatgggagaaggcagctactgtgttgaagggtgttgttactgtggcagcaattgatgctgatgctcacccgtctttggctcaggaatatggaattagaggatttccaactataaaagtgtttgcacctggaaagccacctgtt

SEQ ID NO: 137425 - DNA, 224 bp, Glycine max
aacctctctaatttttgaagcttattatacccaatctcgatatgcagatcttcgtgaaaaccctaactggcaagacgatcaccttggaggtggagtcctctgacaccatcgacaacgtgaaggccaaaatccaagacaaggagggcattcctccggatcaacagcgtttaatcttcgccggaaaacagctcgaagacggcagaaccctcgccgactacaacatc

SEQ ID NO: 137426 - DNA, 221 bp, Glycine max
gggaaaccagtatcaaacttcagcattcatggattgtggcctaatttcagcaatggatcatttccatccaattgcaatattgctgaaaatccatttaaccaatctaagatcactgacctgattccaagagctgaaaaaggctgggcatcactctcttgtgcaggcagcaaaaagacagagaacaacaaaacaagcagtgataatacaaggttctggaaaca

SEQ ID NO: 137427 - DNA, 219 bp, Glycine max
cacacacactgtgtttgtgaaactctcacacagacaagtcacaacaacaagtttctgttggtccaatggcatcagcaacaccccttttgaaagatgagctggacatcgtgatcccaacgatcaggaacctggatttcttggagatgtggaggccattctttgagccttaccatctcattattgtgcaagatggagacccttcaaagatcatcaaggtcc

SEQ ID NO: 137428 - DNA, 215 bp, Glycine max
gctaatgttatcagatatttccctactcaggctctgaactttgcctttaaggattactttaagaggcttttcaactttaaaaaggataaagatggctactggaagtggtttgctgggaatttggcatctggtggggctgctggggcttcttccctcttatttgtctattctttggattatgcccgtactcgtttagcaaacgatgcaaaggctgc

SEQ ID NO: 137429 - DNA, 244 bp, Glycine max
cgtagtaactcggaattcgctcgacaaccttcatcttcgtgttcggcggctcatgctccggcatcgcctacaacaagctcaccgacaacggcgctgccacccctgccggcctcatctccgcctccatcgcccatgcattcgccctcttcgtcgccgtctccgtcggcgccaacatctccggcggccacgtcaaccccgccgtcaccttcgggcgccttcgtcggcgtgaaacatcacctttcct

SEQ ID NO: 137430 - DNA, 226 bp, Glycine max
caatattttgataaagacaacagtgggtttattacaagagatgaattggaatcagccatgaaagaatatggtatgggtgatgatgcaacaatcaaggaaatcatatctgaagttgatacaattatatctgaagtggatacagatcatgatggtagaatcaactatgaagaattctctgcgatgatgaagagtgggaaccaacaacaaggcaagctattctaaatca

SEQ ID NO: 137431 - DNA, 255 bp, Glycine max
cgacaggggccgcggccggcgtagaggtccccgccgcgaggaggaggagaagtgggtcccggtgactaagctgggacgcctggtgaaggaaggaagaatccgaagcctggagcagatctacctccactcgctgcccatcaaagagcaccagatcatcgacacgctggtgggccccaccctgaaggacgaggtgatgaagatcacgccggttcagaagcagacccgggccgggcagagaacccgtttcaaggcctt

SEQ ID NO: 137432 - DNA, 251 bp, Glycine max
ccactcttaactcaaaacacaatgacacaacaaacaacaacctcttcctcctcacattcgggcgcaagggcccaggcccagaaacagagcaagaggcccagggactgcagcaagcacccggtgtaccacggcgtgcggaagcggaactggggcaaatgggtgtccgaaatccgggagccacgcaagaagtcccgaatctggctcggaacattctccactcccgaaatggcggcgcgacccacgacgtggcg

SEQ ID NO: 137433 - DNA, 253 bp, Glycine max
gcttctgcgggaaaataagaggatgctggacaaatcaatcagagaaattgagcgcgagtggcaaggcttgcaaacgcaagagaagaaattgattgcggagataaagaaaagtgccaaacagggccagatgggagctgttagagttatggcaaaagatcttgttagaacaaggcatcaggttgagaaattttataagctaaaatctcagctccaaggtgtatcactcagaattcagactttgaaatcaacacaa

SEQ ID NO: 137434 - DNA, 253 bp, Glycine max
tcacaaggaagtttatgaacaaacctgtgaggattctagtaaaacgtgatgagcttaccttggaggggatcaagcaattttttgtcaatgtagacaaggaggactggaagctcgagacactatgtgatctttatgaaactttggcaatcacccagagtgttatctttgtgaacaccagacgcaaggtagattggctgacagacaaaatgcggagtcgtgatcacacagtttcagccactcatggagatatgga

SEQ ID NO: 137435 - DNA, 252 bp, Glycine max
cacaaactagtaatattattcttcgaatccattttattattcataatgggtattttcacatttgaggatgaaaccacctcccctgtggctcctgctaccctttacaaagctctagttacagatgccgacaacgtcatcccaaggctgtcgaagccttcaggagtgttgaaaaccttgaggggaacggtggccctggaaccatcaagaagatcactttcgttgaggatggagaaagcaagtttgtgttgcaca

SEQ ID NO: 137436 - DNA, 252 bp, Glycine max
ctgggttcttcttctattacaacatcgcccgcaaccatgaccatggctgcgatcgtgctcctgttcacggtctttgccgtttcctccgccctagacatgtcgataatctcgtacgacagcgcccacgcggacaaggcacgccagttgcgcaccgaggaggagctgatgtccatgtacgagcagtggctcgtgaagcacgggaaggtgtacaacgcgctcggcgagaaggagaagcgcttccagatcttcaag

SEQ ID NO: 137437 - DNA, 256 bp, Glycine max
caattcttcatgatgctgtgaaagagaagaagggtagctatgaagagaccattagggtcttgaccacaaggagcaggacccaacttgttgcaactttcaagtgctacagagagatccatggcacttccatctctaagaaactggtggatgaaggatctgatgagtttcaaagggcattgtacactgccattcgtggcatcaaggatcctattaagtactacgaaaaggtggtgcggaatgcaatcaaaaaggttgg

SEQ ID NO: 137438 - DNA, 247 bp, Glycine max
ggagtcgttaattccggtcgtcgtcgaccccgtcatcggaaaatcgaggttgttggttacccctaccgtgaaggagcatgccacggagatcgcggagacttggaagagcagcctggaggatcgtggcggcgtggaaaactgaagacacctgacgtccacactttcttgcagcacgttgttaccttcgggattgtcaagaacgatgactccgatttgtaccggaagcttgttattgcttccgcttgga

SEQ ID NO: 137439 - DNA, 247 bp, Glycine max
tgcctgtaaaccagcaaaagtggtaggaagagtcttgaacatcttgaagacagacagaaaatgggtgcttctcaatcaatctcagaaaaatcctttcatgaattcactgtcaaggatgccaggggcaaagatgtgaactcaacgcctacagggggaaagttcttcttgtaattaatgtcgcttcaaaatgtggatttgcggatgccaattacacccagttaactcagctttactccacgtacaagag

SEQ ID NO: 137440 - DNA, 247 bp, Glycine max
ggcagaggagagagtaacgaaggttgcttctaactgttcagaatcatgtcttggtgcaccattgagtccgatcccggtgtgtttacagaacttattcagcaaatgcaagtgaaaggagtacaggttgaggaactttattcattggatcttgactctctcaacagccttaggcctgtttatgggttgatttttcttttcaaatggcgtccaggagaaaaggatgaccgagtggttatcaaagatccca

SEQ ID NO: 137441 - DNA, 248 bp, Glycine max
gtaacaacagatcaccatggctctatcacgtttgtcccaccgcagcatcggctccactctcacaaaacccttctccgccgccgccgcctccgccgcctcctcccgttcgatctccacctcggacacccccttaacaatcgagaccgctgtccccttcaccgcgcacaactgcgaccccccgtcacgcgcggtcgcgacctcctcctcggagctcctcaccttcttccgcgacatggccctgatgcggc

SEQ ID NO: 137442 - DNA, 248 bp, Glycine max
tgggttcttcttctattacaacatcgccctcaaccatgaccatggctgcgatcgtgctcctgttcacggtctttgccgtttccaccgccctagacatgtcgataatctcgtacgacagcgcccacgcggacaaggacgcacgttgcgcaccgaggaggagctgatgtccatgtacgagcagtggctcgtgaagcacgggaaggtgtacaacgcgctcggcgagaaggagaagcgcttccagatcttca

SEQ ID NO: 137443 - DNA, 249 bp, Glycine max
ctcgagccggctctgctcgtgcctctagggttatcatatctccatttccatttcctctctctcagtttccaagaatcttaagctatgggaaagtcttacccaaccgtgagcgctgattaccagaaggccgttgagaagggaagaagaagctcagaggcttcatcgctgagaagagatgcgctcctctaatgctccgtttggcatggcactctgctggaacttacgacgtgagctcgaagaccggtggtc

SEQ ID NO: 137444 - DNA, 249 bp, Glycine max
cctgtttctctattgccagcaagcgtggctggggagccagttccttatgagaaaagcttttggggtgctatggaggatccagtgcgatatttagttaccttcattgcattctcacaaattggtgttatggtggctccaaaactataacctcacaatatcttgctcccgtttggaggggtgcagtgattgtttcatttgtatggtttttgcatagatggaaaacaaatgtttttgcacggtcattgtcta

SEQ ID NO: 137445 - DNA, 246 bp, Glycine max
ctttgcttgtcagcttatcatcttcctttatctacttgacaatgccacctcttggatgattcttgcaagctctggaattggttgtgttattgagttttggaaaattggtaaagccatgcgcatagagattgataggacaggaaggatacctatgttgaagctccgcgatcgagaatcatacgtacggaataagacacaggaatatgatgatattgctatgaagtatttgttctatgttttatttct

SEQ ID NO: 137446 - DNA, 230 bp, Glycine max
gagagtagagacatggttctgagagggaaagtggagactgaagtagagattcaagcacctgcagctaagttctaccacgtctttagaaagcaaattcatcatgttcctaacatgtctacagaagagtacatggagctaaagtgcatgaaggtgactgggaaaatattggttcagtcaaacactgggactttaccatagaaggtagaaaaacaagtgctaaggagaaaatt

SEQ ID NO: 137447 - DNA, 256 bp, Glycine max
accaaaccaaagcaagaatagtgttctaagagtgagcaacaacttcaaacaccattgtgagaaatggcttccaagggtgcacttctcttgtgtctcaacattctcttcttcactgtggtaagctccacatatgtcccatgcaaccaccccctaaaactcctaaacacacacctgtcccaaagccaccttccccaaagcaaccaagttgccccaaagacaccattaagtttggtgtgtgtgctgatgtgttaggttt

SEQ ID NO: 137448 - DNA, 243 bp, Glycine max
caaaccacccgtttataagccaccagtttacaagccaccagtgtacaagccaccagttgagaagccaccagtgtacaagcctccagtgtacaagccaccagtatacaaaccaccagtttataagcctccagttgagaaacctcctatttacaagccaccagtttacaagcctcctatagagaagccaccagtgtacaagccaccagtgtacaaaccaccagtgtacaaaccaccggtgtacaa

SEQ ID NO: 137449 - DNA, 243 bp, Glycine max
gcagatcttcgtcaagaccctcaccggaaagaccatcacccttgaggtggaaagctctgacaccatcgacaacgtcaaggccaagatccaggacaaggaaggaattcccccggatcagcaacgtctcatcttcgcggaaagcagctcgaggacggccgtaccctcgccgactacaacatccagaaggagtcaacccttcaccttgtccttcgtctccgtggtggcatgcagatcttcgtcaag

SEQ ID NO: 137450 - DNA, 246 bp, Glycine max
cgagaatggggtctctaatggcctctcttactctcactcttgtattggcaatagtttctctaagcttgtgctctcaagcctcagctgacaagtacgactattcatctccaccaccaccagtttacaagtacaagtccccaccaccaccctacaagtattcatctcctccaccacctcctaagaagccttacaaatacccatcaccaccaccaccagtgtacaaatacaagtcaccaccaccaccct

SEQ ID NO: 137451 - DNA, 242 bp, Glycine max
ggtttggacagggtatgggtgctactccaccactgttgcatcctcagtccatgatgaatcagggttttgatcctgcatttggccccatgggtagaatgggtagttacggaggctttcctggtgctccgacaccacattctctgggattttgccttcattccctggtgttggaggtgttggtttgcctggagtggcacctcatgttaatccagccttttttggaagagggatgcctgttaatg

SEQ ID NO: 137452 - DNA, 246 bp, Glycine max
gtgaaacgaagaagccctaactacgcacgcactcattcttgagaaagctcaatattcattcgtccatggcactctcttctcgtctcttttccaaatccaaattgatctatggctgtcaaatacttctgcaaaaggagcatgctattccagttcgtcactttgctaaagagtctgcccctcctgcccttaagggagatcagatgctgaagaacatttttgtggaggtgaagaacaaatttgagactg

SEQ ID NO: 137453 - DNA, 246 bp, Glycine max
gaaaatggtgtgacaaaggttccacggatgttctattgtgaacactctaatctcagtgatggattaaccacagaatcaaattcaaacttcactatcccctccatagacctcactggcatcaatgatgaccctattttgagagatgctgttgtgggaaaagttagatatgcatgtgaaaagtggggcttctttcaggttacaaaccatggaattccaactcaagttttggatgagatgatcaaagga

SEQ ID NO: 137454 - DNA, 247 bp, Glycine max
cataattacttgccttgaggaacgttccagaccacatacagaggtttctctagtgatcttcgttcttctgtggagatcttgttttttcatctcacttttcttctaattaaggaacaagctttccgcagttgaaaacctagctagctagcttccaccaatttgaatcaccaatggctcgctctttctctaacgtcaaggttctctctgctcttgtggccgacggattctccaacactctcaccaggcg

SEQ ID NO: 137455 - DNA, 246 bp, Glycine max
gtttgacaggcagcagtatttctaccctgaccttccgaaagggtatcagatttctcagtttgatgtgccaattgccactgctggttttcttgatgtggatattcctgttgagtttggtgggggccacaagaggtttggcattacaagggttcacatggaagaggatgcagggaagctcctacatgcagagaatggaaattactcacaggttgatctaaatagggcaggggtacctttgcttgagat

SEQ ID NO: 137456 - DNA, 249 bp, Glycine max
cggctcgagcggctcgaggggagaggtacgagatattctcgcaaaacctcaggttcatccgctcccacaacacgaaccgcttgccctacactctctctgttaatcattttgctgattggacttgggaggagttcaaaagacacagactaggcgctgcccaaaattgctctgccactcttaacggcaaccacaagctcactgatgctgttcttcctcccacgaaagactggaggcaagaaggaatagtga

SEQ ID NO: 137457 - DNA, 241 bp, Glycine max
gatcgtgaagtacttcaggtacaatcccacccgaaaaatcaccttcaccgatgtccgcaaaacgctcgtgggagacgtcggttccatccgaagagtcttcgatttcctcgaaacttgggggcttatcaattacatccctcttcgtcgctcaccaaacccttgaagtgggacgacaaagagaccaaatccgattctgcctccaacaccaccgaatcttcttccgctcccgccaaagaaaaca

SEQ ID NO: 137458 - DNA, 241 bp, Glycine max
gcggcaacagaggagagaagatgaagttcaatccacgagtgtcgagcagccgccgcaagagccgaaaggctcacttcacggcgccgtcgagcgtgcggagggtgctgatgagcgcccctctgtcggcggagctccggtcgaagtacaacgtgcggtcgatcccagtccgcaaggaggacgaggtgcaggtggtgcgcggaacatacaagggtcgcgaggggaaggtgacgcaggtgtaccg

SEQ ID NO: 137459 - DNA, 239 bp, Glycine max
cggctcgagatcactctagctgttgcaaatttctactatttttcaatggcttctgcagatgttgcgttccgttgctttgttggtgggcttgcttgggtcaccggcaacgatgccctcgagaaagccttttcaatctacggcgacatcgttgaatcgaaggttatcaacgaccgtgagactggaaggtccagaggattcggatttgtgaccttcgcctcagagcagtcaatgaaagatgc

SEQ ID NO: 137460 - DNA, 240 bp, Glycine max
ctggatcgccacgggcgtcatgggccagtccatgtgcccccacctcatccgtgccggctacaccctcaccgtcttcaaccgctccccctccaaggcccagcccctcctcgacctcggggcctacttcgccccctccccccacgccgtcgcagcccgctccgacgtcgtcttctccatcgtcggctacccctcggacgtccgctcagtcctcctccacccctcctccggcgccctctccgc

SEQ ID NO: 137461 - DNA, 242 bp, Glycine max
ctggcactgcctgaaaaccatggtgaggacttttgagacacattatggatccttgtctcaatacgggatgaaacacatgaggtcctttgcaaacatctgcaatgtagggataaagaatgaacaaatggctgaggcttcagcacaagcttgtgtcagtattccttccaatccctggagttctctgcaaaggggtttcagtgcataataactccctgtaatgtgcactagtaaagaccaaagta

SEQ ID NO: 137462 - DNA, 242 bp, Glycine max
tctcaagccaccgaagcctcactttttgaaattacttgcatagatagataatcatggctatgatgaaacgtgctgcttcctctgcgcttcgctctcttattgcctcatcctccaccttcaccagaaaccttcatgcctcaggtgaaaagaagaagattgtgggggtgttctacaaagggaatgaatatgctaaattgaatccaaattttgttggatgtgttgaaggtgcattgggaatacgt

SEQ ID NO: 137463 - DNA, 242 bp, Glycine max
gttgtgactcgttcttcttcgtcgttatcttcttcttttgttgtttgtgtgtttgtgttttctctcacctgaaaatgtcttgctgcggtggtaactgtggttgcggaagcgcctgcaagtgcggcaacggctgcggaggctgcaagatgtacccagacttgagctacaccgagtcaaccattaccgagaccttggtcatgggagtggcaccagttaaggctcaattcgagagtgctgaaatg

SEQ ID NO: 137464 - DNA, 241 bp, Glycine max
taaaacccttctctctgtgattaagagaatggcttcagatcggaaacttcacacttttgaggaggtggcaaagcacaaccagaccaaggattgctggctcatcatttctggcaaggtgtatgatgtcaccctttcatggaggatcatcccggaggtgatgaggttttgttatctgcaacagggaaagatgcaaccaatgactttgaagatgtggggcacagtgattctgctagagatatga

SEQ ID NO: 137465 - DNA, 236 bp, Glycine max
aatttatatagcaagctagctaggttgaaaatagtttggttttgtagtaagtgaggtgaggtgccaaaatggtgaagataactcttggtactttcgatgactcttttggtgttgcctctcttaaggctatttggcagagttccatgcaactctgattttcgtgttcgctggtgttggttcagccatcgcttacaacgagctgacaaaagatgcagccttggatccaacggggctgg

SEQ ID NO: 137466 - DNA, 235 bp, Glycine max
cgccgagttccgccgccagttcctcggcctcaagccgctccgcttcccggcgcacgcccagaaggcgcccatcctccccaccaaggatctccccaaggatttcgattggcgagacaaaggagccgtcctaacgtcaaggaccaaggggcgtgtggttcgtgttggtctttcagtacgacgggagcgttggaaggagctcattatctggccactggtgagctcgtgagccttagcg

SEQ ID NO: 137467 - DNA, 233 bp, Glycine max
cgttgctctgtctgggggtcacactattggagctgcgcacaaggagcgttctggattcgagggtccctggacctctaatcctcttattttcgacaactcatacttcaaggagttgttgagtggtgagaagaaggcctccttcagctaccttctgacaaggcacttttgtctgaccctgtgttccgccctcttgttgagaaatatgcatcggacgaagatgccttcttcgctga

SEQ ID NO: 137468 - DNA, 238 bp, Glycine max
atccaatgttctctttgctgcgcatactgtaggtgtcttcatctattggggcatcacacaccaaatggaagagacactagagtggagcaagacatatgtatcaaatgtagctggggtgattgcaattttaattgcattagtgatgtgggtgaccagctttccagggttcaggcgaaaaatgtatgaggttttcttctacactcaccatctctgcactctctacatcttattttatgcc

SEQ ID NO: 137469 - DNA, 241 bp, Glycine max
ttctcgagccgaatcggctcgagcggctcgaggtttcgagcaaatcatatgcttcgagactatacacccgaaccttccctattcaacccgacacgacgaattccccatcctccttaaaccttcgctcgacgccttcaagatcgcgcttgacgctgccaacgtggatcctcgtcgtacgttgtttctggatgacagcgttcgcaatattgccgcgggaaaagaaatgggtctccacactgtt

SEQ ID NO: 137470 - DNA, 239 bp, Glycine max
gagggtttgggtttctcttcctcccttggagaaaaagaagagccaccgctgcgacgccgttcgtgcatttttgaggtgccgctgtcatgtttgggcgtggtggaccaaggaggagtgataactccaaatattatgatattctcgggatttccaaaaatgccagtgaagatgaaatcaagaaggcctatagaaaggcggctatgaagaaccatccagataagggaggagatcctgaaaag

SEQ ID NO: 137471 - DNA, 239 bp, Glycine max
cgtcgctccgcaccagtttcaccgcacgaatatcttgttgtttggagcgatccgagaaaaactctgtaaacatgttggtttaccaggacctccttacaggtgatgagcttctctctgactccttccgttacaaggaaattgagaatggaatgctgtgggaagttgaggggaagtgggttgttaaaggagcagttgatgtagacattggtgcaaacccttctgctgagggtggaggagaa

SEQ ID NO: 137472 - DNA, 241 bp, Glycine max
caattttccatgaaacagatgatcgcgatttatttgcctcttggggtgtagattatttgaagtatgacacttgttacaatctgggcatccctccaaaagaacgatatccgcctatgcgtgatgctctcaatgcgactgggcagaagattttctattcactctgtgaatggggcgttgaggaccctgctttgtgggcagacaaggttggtaacagttggcgcacaactggagacatcaatga

SEQ ID NO: 137473 - DNA, 242 bp, Glycine max
gcgaattctctgcctcaaagaaggaggagaaaaatgtgcttccccaagaaaagaaagatgaccaaaaaaccgtggacactgctttgttaaaggccattgagagtgttccagagctcaagtcttacttgggtgctaggttttccttgaaggcaggagtgaagccccatgagctagttttctagagtgctaaaattattttcctcattctgttttgtcgagcttgttcccaatagttgtactgt

SEQ ID NO: 137474 - DNA, 234 bp, Glycine max
gctggctgcagggataaagatctggctcatattgaggaacacatgaaagcattcaaggccaaaggtggtgatgtgtcttggcacatccacgatgagagatccctacttgctctgcagggtcctcttgctgcccccgttcttcaacacctgacaaaagaggatttgagcaagctctactttggggagttccgtgtgttggacatcaatggctcagagtgttttcttaccaggaca

SEQ ID NO: 137475 - DNA, 231 bp, Glycine max
ctcgagccgaatcggctcgaggtttggttgacagtagcaaagatgtctcctttcgggcaaaagggtcaaaagataaaggggactatggtggttatgcagaagaatgtgttggatatcaacagcataccagtgttggagggatcgttgaccaaggcttaggcttcataggcagtgcagtcgatgcacttacttttgcagccaccaaaatctccatccagttgattagtgcta

SEQ ID NO: 137476 - DNA, 234 bp, Glycine max
ttcttaaattggataatgcagttccttttgaggctgaattacttgtttgtgttttaacttttttcttcgttttttttttcaaatgatacaggttgtattaccaccaaggaacttgggaccgtgatcggtcacttggccagaacccaactgaggcagagctgcaggacatgataaatgaggttgatgctgatgggaatggtaccattgatttcccagaattcctgaatctcatgg

SEQ ID NO: 137477 - DNA, 235 bp, Glycine max
gcccgatccagcaatatcgcgtgagtgaagaagggcaatgccgcttgtaaagctctttcgtcgagtgcgcgatcatgacaggactcgaggaagaagccccggctaactccgtgccagcagccgcggtaagacggggggggcaagtgttcttcggaatgactgggcgtaaagggcacgtaggcggtgaatcgggttgaaagtgaaagtcgccaaaaactggtggaatgctctcgaa

SEQ ID NO: 137478 - DNA, 241 bp, Glycine max
agacaactctgcaaagaataaaacaagaggcggaaatgcaacttacttgttgatataaacttcagacagagcgagttgttgtaaagctagccttggtgcagccatggccacccacgcggctctagcgtctacaaggatccccactaacaccaagttcccagccactgctgcacactctttcgcaagccaatgcgcctcaaagagacttgaggtgacagaattctctgggctcagatccact

SEQ ID NO: 137479 - DNA, 269 bp, Glycine max
acctcggcactcggttcgacacaattctctaacagagatctttttctgctccttgaagaaagaagggcctttgcttgattttggagatgtctcctgctctcagatctcatcaacctcaacctctccgataccaccgacaaggtgatcgcagcgtacatatggatcggcggatcacgaatggacccgaggagctaagcaaggactctcccaggaccagttagcgacccttcagagcttcccaagtggaactatgatggttccagcacagg

SEQ ID NO: 137480 - DNA, 251 bp, Glycine max
acgggaaagtgagagatgcagtgatttcccttattgatcaagaacgtgaaggagagcagattgaccgagctttattgaagaatgtattagatatatttgttgaaattggaatggggcaaatggatcactatgagaatgattttgaagctgcgatgctcaaagacacttctgcttattattctcgaaaggcttcaaactggatcctagaagattcttgtcctgactatatgctcaaggctgaggaatgctta

SEQ ID NO: 137481 - DNA, 251 bp, Glycine max
atctggtcatcgttgggatctccatacgccggatctgctaaaatacgcttgatccatatgggcctcctcgaccacttgtgggacgacaccgtcgccggcccaaggccggaaaacggtctcggcaagctccgaaaacaccacaccttcactttccgacctagctccggcaaggaaacggagggcgggagcgtgagatcgtacggagacgaatcgtcggaggaagcgacgagagtgacgcgtagtatcatgat

SEQ ID NO: 137482 - DNA, 251 bp, Glycine max
tgttcctctcgcccagaatccgagatcaaccctgacccctaaggccaggggtttttctcggcttcttcagattcctgaaatggcgtctgtttcagctttagccaagtacaagctcgtcttcttgggtgaccaatccgtgggcaaaaccagcatcatcactcgcttcatgtacgataaattcgataacacctatcaggctacaattggtattgattttctatcaaaaactatgtatctcgaagatcgaactg

SEQ ID NO: 137483 - DNA, 248 bp, Glycine max
ctcctttgattattcttgttgagaatgaagctgattgctactggtgctttgaccgtgcaatgcgaaggatgagagagaacttcaggagcagtgcaagttcaatgggggtccaatctcagctggctacactctcacagataatgaaaacagttgatccaaagcttcatcatcaccttgaggatttagatggaggagaatatctctttgcatttcgcatgcttatggttcttttccgaagagaattttct

SEQ ID NO: 137484 - DNA, 247 bp, Glycine max
tgatcttacaccagatgaagtaaataaatttgctaggcttgatattgaccccaattctatcacatggaggagagtaatggacatcaatgaccgattcttgagaaaaattactattggccagggacctgacgagaaaggaatggtgagagaaacaggctttgatatttcagttgctagtgagataatggctgttttggcactgacaacatccttagctgatatgcgagagaggcttgggaaaatggtt

SEQ ID NO: 137485 - DNA, 246 bp, Glycine max
tggtggtttgtacactggtggcttgtacactggtggcttctctataggaggcttgtaaactggtggcttgtaaataggaggtttctcaactggaggcttataaatttagtttaatttacaaattatggcaagggttacacctggctagcttccgcgtttagatcatttgtttatagtgctaatggccacgacaagagtgttatgggtgcatgaatgtaaaacgaaaaaaaaaaaaattgtgttttt

SEQ ID NO: 137486 - DNA, 246 bp, Glycine max
gtgaaactctatacataccagatctttagggcattatcttatattcatcgttgtattggagtctgccatcgggatatcaagcctcaaaatctattggtcaatccacacactcaccaggttaaattatgtgactttggaagtgcaaaggttttggtaaaaggtgaaccaaatatatcatacatatgttctagatactatagagcacctgagctcatatttggcgcaactgaatatactacagccatt

SEQ ID NO: 137487 - DNA, 254 bp, Glycine max
ccgagtttcaactcggtgtagcaatggcgatgatgcaaggtgtgcagaagaacacactgtacgtgggagggttagcggaggaagtgaacgagtcgatcctccacgcggcgttcattcccttcggcgacatcaaggacgtgaagacgccgctggaccaggccacgcagaagcaccgctccttcggcttcgtcaccttcctcgaacgcgaagacgcctccgccgccatggacaacatggacggcgccgagctctac

SEQ ID NO: 137488 - DNA, 251 bp, Glycine max
cgagtgcatggtgcttgacaatgaagctttgtatgacatttgcttccgtaccctcaagctaaccaccccaagctttggtgacttgaaccatctgatctcagctacaatgtctggtgtcacttgttgtttgaggttccctggtcaacttaactctgatctgcgaaagcttgcagtgaaccttattcccttccctcgcctccacttcttcatggttggactcgctcctttgacatctcgtggctctcagcaat

SEQ ID NO: 137489 - DNA, 250 bp, Glycine max
aacaatttctctggtttggttcccggcactgggcaattcggctactttaactacacttctttcttagggaaccctgaactctgtggcccttatttgggtccttgtaaggatggtgttgccaatggccctcgacaacctcatgttaaaggtccattctcttcttctctgaagcttttgttggttattgacttgcttgtgtgctccatactattcgcagttgcggcaatattcaaagcccgggctttgaaga

SEQ ID NO: 137490 - DNA, 239 bp, Glycine max
ggagatactcaaggagttgggcgctgctgttgtgttggagtgatgattctgaattttttttctttgtgttctagagttttgtgttagttgtagaataattggaacttgtttgtgggtaataatgatgaatgatgaatgatagatggtaagttatatattattattaaaaaaaaaaaaaaaaaaaaaaaaaaaaaaaaaaaaaaaaaaaaaaaaagaaaaaaaaaaaaaaatacaaacac

SEQ ID NO: 137491 - DNA, 244 bp, Glycine max
tgtgactcgttcttcttcgtcgttatcttcttcttttgttgtttgtgtgtttgttttttctctcacctgaaaatgtcttgctgcggtggtaactgtggttgcggaagcgcctgcaagtgcggcaacggctgcggaggctgcaagatgtacccagacttgagctacaccgagtcaaccaccaccgagaccttggtcatgggagtggcaccagttaaggctcaattcgagagtgctgaaatgggtg

SEQ ID NO: 137492 - DNA, 246 bp, Glycine max
gacgaaatcaaattcatagacaaagcattggagaagggcgtcgtctatatgctagcagaagcagaggtagttgctcacccatcttcctccatcttgaataagattgttgtcaactatgtttatagcttcttcagaaagaactttagacaaggccagaattccatggcaatccaacgcaacagacttctcaaggttggaatgacttatgaaatatgacctcgatttccagtagtttcactgtccata

SEQ ID NO: 137493 - DNA, 248 bp, Glycine max
ttgggcgaaaacctcttgatgtaagcaatggggaggtagagttcaagggtagcttggtggattgggtgaatatgcattctagttctggccgaatcaaggattgcattgataaagccatatccggaaggggacacgatgaggagattctgcagtttctgaaaactgcaatgaattgtgtggtttctcgccccaaggatagatggtctatgtaccaggtttatcattccataaagagcatatccaaagaa

SEQ ID NO: 137494 - DNA, 250 bp, Glycine max
  unsure (1)..(250): unsure at all n locations
agcgaagaggcgcacgtnagcagtaactcgtggaattgctagcaatggcgaggatcaaggtttacgagctgaggcagaagacgaaggctgatctgttgaatcagctgaaggacctcaaggccgagcttgccttgcttcgtgttgctaaggtcaccggcggtgcacctaacaagctctctaagatcaaggtggtgaggttgaacattgcccaggttttgacggtgatttctcagaagcagaaggccgcgtt

SEQ ID NO: 137495 - DNA, 249 bp, Glycine max
tctacttccactggtctctcccttatgggtgtcatgattgtgtgttgcactcttcctgtgactcttgttcacttccctcagtggggtagcatgttcctccctccttcaaaggatgtcaacaagtccactgaggaatactattacaccgctgagtggaacgaggaagagaagcaaaaagggttgcaccagaatagtctcaagtttgctgagaatagccgttcagagagaggtaagcgtgtggcctcagca

SEQ ID NO: 137496 - DNA, 244 bp, Glycine max
ctgtgtttggtggacctttcccttttctcttttgaaacagagaatggctggtggaggagtagagattggaggaccaggaaaaagggctcatctttacgagcacaagttcagttggtatttcgtctatacatgcttcgttggggcccttggcggttctctctttggctatgatctcggtgtttcaggtggggtgacttcaatggatgatttcctgaaggaattcttcccaaaggtttacagaagg

SEQ ID NO: 137497 - DNA, 240 bp, Glycine max
cgatttggtacagataaagtggggttcgcattcgctccaataattttggtgtggtttttattcattggtggaattggcctttacaatttatttaaatatgacattggcgtattacgtgcttttaatccaaaatatatatatgattacttcaaacggaacggcaaggaaggatggatatcacttggtggagtctttttgtgcataacaggatccgaggccatgtttgctgacttgggtcac

SEQ ID NO: 137498 - DNA, 244 bp, Glycine max
ggcggacggcaagcccctccactacaaaggctcgtccttccaccgcgtgatcccgaacttcatgtgccagggcggcgacttcaccgccggaaacggcaccggaggcgagtcgatctacggcgccaagttcgccgacgagaacttcgtgaagaagcacactggtcccggcatcctctccatggcgaacgccggtcccggaaccaacggatctcagttcttcatctgcacgacgaagacggagtgg

SEQ ID NO: 137499 - DNA, 225 bp, Glycine max
atattggcactgaaaagtagagagccaacagaatccataaaccttaacaaagaaacagaaggatcctgcagcaatagaagtgagaacagctcagacatcaagttggatatctcaaggacaccagctattgacagtgcctgcattctacacatcagcaacagccaagcagacccttctttcctccttcttctgttaggcctgcaggagttgctcagcttttcccaa

SEQ ID NO: 137500 - DNA, 249 bp, Glycine max
ttaggcccaagatgacagttcggatattttcagaaattatggcagtggcttttgtcgagataatacttgatcaatgcttcacgttccttggtatgaagtacacatcagcatcatttgcgtctgctgtgatgaattctgtaccctccattacctttgtactcgcaatcatttttcgattggagagcatgaacttgaaggagctaggatgtttagccaaagtgattggcactgcagttagtcttggaggtg

SEQ ID NO: 137501 - DNA, 248 bp, Glycine max
gcacttactcgtctcactgtcttgctatatttgggtgagaacacagaggatagtggagttcaacgagatggagcaaataaagcacagaacagttgaagtgaatggcataaaaatgcatgttgcagagaaaggagagggtccagtggtgttgttcctccacggcttccctgagctctggtactcatggcgccatcagattctctctctcagctccctcggctaccgcgccgtcgctcccgatctccgtg

SEQ ID NO: 137502 - DNA, 243 bp, Glycine max
gagctccagaacttatatttggggcaactgaatacacaactgctattgatatgtggtctgttggttgtgttttagctgagcttctcctaggacagccattgtttcctggagagagtgggattgatcagttagtagagatcattaagattttgggaacacccaccagagaagaaataaggtgcatgaatccaaactacaatgaatttaagtttcctcagatcaaagctcacccatggcacaagg

SEQ ID NO: 137503 - DNA, 243 bp, Glycine max
gtcaacttagcgatcacgggacaagccatatgtgcattgtcgatgctgatagaaatgctgtatcactaacaacaactgttaactatcattttggagccgggtttcgttctacttctactggtatcttggtcaacaatgagatggatgacttctctactcccactgatatatccccggataaactacctcccgctccagcaaattttattgaaccaaacaaaagaccattgtcttccatgactc

SEQ ID NO: 137504 - DNA, 238 bp, Glycine max
gtctggaagctagatgcctttgatgattcaactggacagtggtttgtgaccactggtggtgtgttgggaaaccctggcaaggataccatcgacaactggttcaagattgaggagtatgatgatgattacaagctcgtgttttgccccacagtgtgcaacttctgcaagcctttgtgtaggaatgttggggtgtttagggatagtaatgggaaccagcgcgtggctctcactgatgagc

SEQ ID NO: 137505 - DNA, 240 bp, Glycine max
ataaaactataatcagtcttcagtgatcgtcaacacttaagacccaagtgtaaatgaagaaagtggtggtgaagttgaatttgcacgatgacaaagcaaagcaaaaggccatgaagtcggtttctagcctagcaggcatcgattctatctccatggacatgaaggagaagaaactgactgtcgtgggtgaaatagaccctgtcgatgtggtgagcaaattgagaaaaactggcacccaga

SEQ ID NO: 137506 - DNA, 248 bp, Glycine max
aatagcttcctctgcggtacgggcagccatcaaggttaaggcttctgttattatttgctttacttcatctggcagggctgcaaggttgattgctaagtaccgtccaaccatgcctgtgatatccgttgtcattcctcaactaaagacaaatcaacttcgatggactttcactggagcttttgaggcaaggcaatcacttattgtgagaggtcttttccctatgcttgcagatccacgacatccagctg

SEQ ID NO: 137507 - DNA, 245 bp, Glycine max
gcaactgatagaacactaagcagttgctaccatggtcaccttcaggtttcaccagtaccaggttgttggaagggctcttcccactgaaactgatgtgcatcctaagatctacaggatgaagcttgggccaccaatgaggtccgtgccaaatccaagttctggtatttcttgagaaagctaaagaaggtcaagaaaagcaatggccaaatgctagccatcaatgagatttttgagaaaatcctacc

SEQ ID NO: 137508 - DNA, 249 bp, Glycine max
ggctcgctctttggtttgctcaaccgatctccgcagcaatggtgaacgttccgaagacaaagaagacctactgcaagagcaaggagtgcaggaagcacacgctccacaaggtcacccaatacaagaagggcaaggacagcatcgccgctcagggaaaacgccgttatgaccgcaaacagtccggttacggtggccagaccaagcccgttttccacaaaaaggcgaaaaccaccaagaaaattgtgttga

SEQ ID NO: 137509 - DNA, 244 bp, Glycine max
gtcagacttaccccttgctaccaacactgagcttaaccgagcttcgcaaagatgaatcgggaaaagttaatgaagatggccggttcggttagaactggaggaaagggtactgtgagaagaaagaagaaggctgtccacaagacaacaaccacagatgacaaaaggcttcagagcaccctgaagagaataggggtgaatgccatccctgctattgaagaggtcaatatctttaaggatgactatt

SEQ ID NO: 137510 - DNA, 244 bp, Glycine max
atagaagagccttccatatatagcctcccaaaaaaatgaagagtactacctctttggctctctttctactttgtgccctaacttcatcatatcagccttcagccaccgctgatattgtattcgacaccgaaggcaatcctattcgaaacggcggcacatactatgtgttgccagttataagaggaaagggcggcggaatagaatttgccaaaaccgaaacagaaacatgccctctcactgttgt

SEQ ID NO: 137511 - DNA, 240 bp, Glycine max
atctggctctctaagaaacatggctgaagagggtcaggttgtcggcgtccacaccgttgatgcgtggaaccagcaactgcagaatggaaaagactcccaaaaattgattgtggtggattttactgcttcctggtgtggtccatgccgttttattgccccagttctggcagagattgctaggcatactcctcaagtgatcttcctcaaggtggatgtggatgaagtgaggcctgttgctga

SEQ ID NO: 137512 - DNA, 244 bp, Glycine max
gtttgggtttctcttcctcccttggagaaaaagaagagccaccgctgcgacgccgttcgtgcatttttgaggtgccgctgtcatgtttgggcgtggtggaccaaggaggagtgataactccaaatattatgatattctcgggatttccaaaaatgccagtgcagatgaaatcaagaaggcctatagaaaggcggctatgaagaaccatccagataagggaggagatcctgaaaagtttaaggag

SEQ ID NO: 137513 - DNA, 247 bp, Glycine max
ctttgcatctttgcacaaacctccatggcgacgaacacgttcaccggagcttcactctccgaacgctttctccgtctcaagctgaatcagagattggcatttaattcaattgctggccaaaggtatagctcaatttcaagctatgggagaaggaatgtttcttttagctcacagccacggtcaattcgccttacagtttcctgtgctgctaaaccagagacagtagagaaggtgtgcaaaattgtaa

SEQ ID NO: 137514 - DNA, 248 bp, Glycine max
gtttgtagtgcagcaggaagaagcaataatggcgccgaagataacacgtaaggttagcagaaaccccgaattgataaggggaatcggaaagtactcgaggtctcaaatgtaccacaagaggggcatttgggctatcaaggccaaaaacggtggcgttttacctcgccacggccctaaacccaaacctgaaactcccgctgaaaaaccacccaactcttaccctgctgacgatgtcaagaaacccctgt

SEQ ID NO: 137515 - DNA, 249 bp, Glycine max
tgttgcagcagctgcaacaagcgagttggtttgacagggtttaattgtcgatgtggggaccttttttgtgctgtacatcgctactcagacaagcataattgcccatttgattaccgcactgccgctcaagatgctatagctaaagcaaacccagttgtcaaggctgaaaagcttgataagatctaagatttgaagttgaagttccatgccctgagatgaagttatgcacaatttcatcatgaaatgatc

SEQ ID NO: 137516 - DNA, 249 bp, Glycine max
ggggaagcacattgcgagcgacgtgttcacggtgggagggttccactgggcgatctacttctaccccgatggcaagaatcccgaggacaattccgcctacgtctccgtcttcatcgcgttggcgagcgaaggcaccgacgtcagggccctcttcgagctcacgctcctcgaccagagcggccaggggaaacacaaggtccacagccattttgatcgctccctcgagaccggtccctacacgctcaagta

SEQ ID NO: 137517 - DNA, 211 bp, Glycine max
tattgatacggcaccttctgagcatgctacggatgcttcaaaaggcgtttccttcattgaacttggttctatacgcataagcaacagcagagttgtttgctggcatttctcttcagatgggaaattattagctagtgctggacatgacgagcaggttgttctgtggaatattgaggcattggaaacaggaagcaatccggaggaacaccgt

SEQ ID NO: 137518 - DNA, 246 bp, Glycine max
ctcatagtgtcgacatggtttgcgaggaagagttgttgattgaaaaagtgtgctcgatctatgaacaaatctcaagcctcgagagtctcaaaccttgcaagaatgtcgacatgcttttcaccaaactagtcctgacatgcatacccccaagcccaatcgaagtcacaaagctaaacaaaaccgttcaagacattcgatcccaccttaatattttcccctattattccaactacctcaaacttggtc

SEQ ID NO: 137519 - DNA, 240 bp, Glycine max
aaaaagtggatgtatatagctttgggattgttctatgggaactcatcactggtatgcttccatttcagaacatgacagcagtacaggccgcatttgcagttgtcaacagaaatgttcgcccaatcatacctaacgattgcctagcggttctccgtgacatcatgacaagatgctgggatcccaaccctgatgtcaggccaccatttgctgaaattgtaggaatgcttgagaatgcagaga

SEQ ID NO: 137520 - DNA, 242 bp, Glycine max
gtggcttcctgaccgccatgaaccacctggcaaagactactccctccagaaggtcatcttgggcacccacacttctgaaaatgagcccaattacctcatgctggcgcaggtccaactccctcttgatgatgctgagaatgatgcccgccactatgatgatgaccgccctgacattggtggctttggctgtgccaatggcaaggtccagatcatccagcagatcaaccatgagggtgaggtta

SEQ ID NO: 137521 - DNA, 237 bp, Glycine max
ataaagtggatgtatatagctttgggattgttctatgggaactcatcactggtatgcttccatttcagaacatgacagcagtacaggccgcatttgcagttgtcaacagaaatgttcgcccaatcatacctaacgattgcctagcggttctccgtgacatcatgacaagatgctgggatcccaaccctgatgtcaggccaccatttgctgaaattgtaggaatgcttgagaatgcag

SEQ ID NO: 137522 - DNA, 240 bp, Glycine max
gttgttgattgaaaaagtgtgctcgatctatgaacaaatctcaagcctcgagagtctcaaaccttgcaagaatgtcgacatgcttttcaccaaactagtcctgacatgcatacccccaagcccaatcgaagtcacaaagctaaacaaaaccgttcaagacattcgatcccaccttataaaactatgtggtgaagccgagggacatttagagagccactactcaaccatcctaggctcata

SEQ ID NO: 137523 - DNA, 245 bp, Glycine max
tacccattttcttcgtagccaaacactctcaaattctcagttatgtcgtggcaagcgtatgtggatgatcacctactgtgtgaaatcgaaggtaaccacctcactcacgccgctatcatcggccaagacggaagcgtttgggctcagagcaccaacttccctcagttcaaacctgaggaaataactgccatcaataatgactttaatgagcctggatcacttgctccaactggattgtatatcgg

SEQ ID NO: 137524 - DNA, 245 bp, Glycine max
tgaaccataaccatgtcagacgaggagcaccacttcgagtcaaaggctgatgctggagcatcaaagacatttccccagcaagctggaaccatccgcaaaaacggttacattgtcatcaagaacaggccatgcaaggttgtggaggtttcaacttccaaaactggcaagcatggacacgcaaagtgtcactttgttgcaattgacatcttcactgggaaaaagcttgaggatattgtcccatcttc

SEQ ID NO: 137525 - DNA, 238 bp, Glycine max
ctcaaagattaagccatgcatgtgtaagtatgaactaattcagactgtgaaactgcgaatggctcattaaatcagttatagtttgtttgatggtatcttctactcggataaccgtagtaattctagagctaatacgtgcaacaaaccccgacttctggaagggatgcatttattagataaaaggtcaacacaggctctgcctgttgctttgatgattcatgataactcgtcggatcgc

SEQ ID NO: 137526 - DNA, 238 bp, Glycine max
cgcgttttccaattccccccaaatctcacgcctagggtttctatcgcaaaccctccctccctccaaccaggtcgcgtgcaaagggatttcgaagcttcggaagaaaaaaatgaaacctgttttctgtggaaacctggatttcgacgcgcgtcaatctgacgtggagaggctcttcagaagatacggcaaagttgatagagttgacatgaaatccgggtttgcttttgtctacatggaa

SEQ ID NO: 137527 - DNA, 241 bp, Glycine max
aagctccatctatctccctgattaaaggttatctctaaggtcctaaacaatcctctttcaaaaacataccgagacaagtgtggaaatgacgacaccatcattggtagagtctctagttcttcaactccatgagatctcagctgtcaaatttggcaacttcaagctcaaatctggcatcttctcaccaatctacatagacctccgcctcatcatatcttacccttctctcctccaacagatc

SEQ ID NO: 137528 - DNA, 242 bp, Glycine max
tgaatactaagttcccgtaggttgtcgtgattcatcacagcatattgtctctgaaattcagaaatgacatctgcaatgccaaggtgttggtggtgatgcattgccatcttacatgcgtggagctgtgtattgggaacccaacaagcctctcaccatcgaggaatttaacatgcctcgccccaaggccggtgaagttctcatcaaaaccaaagcctgtggagtatgccactctgatctacatg

SEQ ID NO: 137529 - DNA, 243 bp, Glycine max
aagaagatatggaagcaaagaaaatcccagaagtgatactaaactcagggaaaaagatgccagtgataggcctaggaaccgcatcaattcctcttccatcacatgaagctctcacctccatccttattgatgcctttgaggttggctacagacactttgatactgcttctctgtatgaaagtgaggagtctctaggcaaagctgtggcaaaggccttagagctaggcctcataaatagcagag

SEQ ID NO: 137530 - DNA, 238 bp, Glycine max
aaacgtcttttctttcttatacattttactttagtttgtgaaattctatccaaagattttgagaatgtctagctgtgggtgtggaagcagctgcaactgtggcagcaactgcagttgcaacaagtactcttttgactacgttgagaagatcacaaatgagactctagttttgggtgttgggccggtgaaggcccaattcgagggtgctgaaatgggtgttgcagctgagaacggtggc

SEQ ID NO: 137531 - DNA, 241 bp, Glycine max
cattagtcagggtttatcctctaagaaaataaacatactatagcaatgagtgcgtccaggttcatcaagtgtgtcactgtgggtgacggtgccgttggcaagacttgcatgctcatctcctacaccagcaacacttttcctacggactacgtgccaactgtctttgacaatttcagtgcaaatgtcgttgtggatggaagcactgtgaatcttgggttgtgggatactgctggccaagaag

SEQ ID NO: 137532 - DNA, 240 bp, Glycine max
gttgctctaactggagcacattcacttacgaacaccaggaaaccacagggcccttgtcgccccttctctttcccttatttaggagccctgaactcccccagagtctatccattcatgcctcttgtatgttgatgccacttcttggaagaagatgagggcaatgagttagggctccttttccccttccctcccaccagattgctctcccacctttcatttcttcctccaggctttactccc

SEQ ID NO: 137533 - DNA, 241 bp, Glycine max
gaagactttgtggacatgctggatggtatcttctcatttgttctactggacacccgtgacaacagttttatagtggctcgggatgctattggggtcacttccttgtacattggatggggattagatggctctgtttggatttcatcagaaatgaaaggcctgaatgatgattgtgaacactttgagtgttttccacctggtcacttgtactctagcaaagaaagagggtttcgcagatggt

SEQ ID NO: 137534 - DNA, 242 bp, Glycine max
caacaacacaaggccatcatcatggcagctgcttctcctatggcaagccaactcaagtccaccttcactaaaactcttgtagctcccaagggcctctctgcctcttcaccactccacctcctgccttctaagaggcaatttagcttcactgttagggccatccaatcagaaaagccaacctatcaagtgattcaatcaatcaacggtgatcccttcattggaagccttgaaaccccagttac

SEQ ID NO: 137535 - DNA, 238 bp, Glycine max
gcgtgaataaggttaaataaattctcgtagcagcgttttgttttcccaccaccgcgacccctttcgctctccctctgcgcaaacatgttgttcttctcgtacttcaaggatttggtggggagggaagtaatcgtggagctgaagaacgatttggccatcaaagggacgttgcattctgttgatcagtacctcaacatcaagctcgaaaacactagcgtcgtcaatcatgaaaagtacc

SEQ ID NO: 137536 - DNA, 239 bp, Glycine max
atctcctcttctcttccagccatggcctccttgctccgctctctccgccgccgcgatgtcgcctccgcctccctctctgcttatcgctcgttaacgggcagcaccaagccagcatatgtagctcacaactggtctagtttgtctcgaccattcagttcaaggcctgctggaaacgatgtcattggtattgatttgggtacaaccaattcatgtgtttccgttatggaaggaaagaaccc

SEQ ID NO: 137537 - DNA, 238 bp, Glycine max
gcagaaatggcctcttcagtgatggcatctgtggccctcaaacctgcccctttcactgttgagaagtcctcagttagaggccttccctccctctcaaggaactcctcttcattcagagttgtggccagtggtggcaagaagatcaagactgacaagccttatggaattaatggtggcatggctttgagggaaggagttgatgcatctggcaggaaaggaaagggaaagggcgtttacc

SEQ ID NO: 137538 - DNA, 237 bp, Glycine max
cttgatgcaattaagccaataactcataagcgtcttatcgaaaaagagctagagggatttggtataaggttaaacaaagagccaccaaatctgacttttaggaagaaagacaaaggtggactcaatctcacctcaactgtcaccacaacacatctagatcttgagactgtgaaggctatatgtagtgagtacagaattcacaatgcagatattactctcaggtatgatgccactgct

SEQ ID NO: 137539 - DNA, 239 bp, Glycine max
ccgatggctaatccctcactcttgttcttcagtctcctcctattatccgccaccgtagccgccgccgaacggatcgacgatgaagacgaccttctgatccgtcaagtggtgccggatgcggaggaccaccacctgctcaacgcggagcaccacttctccgccttcaagacaaagttcggcaagacctacgccacgcaggaggagcacgaccaccgcttccgtatcttcaagaacaactt

SEQ ID NO: 137540 - DNA, 241 bp, Glycine max
gcacttcgctttttccaaaaccaatcacatcagcatcactctcgtcgccgccgtcgtcgaccaccgcaagagccatcgcactccgccgtcatccgttagggcaaaaatgagtcgaggaagtggaggtggatacgatcgtcacatcactattttctcccctgaaggacgtctcttccaagtcgagtatgctttcaaggctgttaaggccgcaggaatcacctcaattggtgtccgaggaaag

SEQ ID NO: 137541 - DNA, 242 bp, Glycine max
caaggctccgtatgccatcatatatagaaacatggcaattcttggtgtggaaggcttttctgcccttccacatcattgcttgcagctttgttacggatttttcacatttgccatagcggccaacttggtcagagatcttggccccaaaaagattgggaaatggattccacttccaatggcaatggctgtccccttcctagttggtggttactttgccattgacatgtgcatgggtagtttgg

SEQ ID NO: 137542 - DNA, 240 bp, Glycine max
ggatggttcatatcctcaactgctacatcttgcttccctatccggaatactaaaaggtatatgcaggcattttaagcactccttgagttctttgcccattcttcaacttccagtggcttcaatacctttgggtacatggatgcctagagttggggaaccaaatggtcggccactagcaatgttgatgccaagtgcttctctcggtgctgctttgtctatgtttgttcaagccaaagttag

SEQ ID NO: 137543 - DNA, 236 bp, Glycine max
gcttcctacacgcagggtttcccgaagatttaacacctatggctcctaaagctgatagtttaaagaaggctgatccaaaggcacaagccttgaaaactgctaaggctgttaagtcaggtgctactttaaagaaaaagaccaagaagatccgaacatctgttaccttccatcgaccaaagaccttgaaaaaggataggaaccctaaatacccacgcattagtgctccacccaggaac

SEQ ID NO: 137544 - DNA, 236 bp, Glycine max
tgtgaaggcccaattggagggtgctgaaatgggtgttgcatctgagaacggtggctgcaactgtggatcaagctgcacctgtgacccatgcaactgcaagtaaggtcaagatgtataaccttgaagcagagatagctgtaatatatgtatcaacaaataataagaagtagaagttgcgtttggagctttagaataaagtgtttgctatgtgttttgttggtcttttataaatatgt

SEQ ID NO: 137545 - DNA, 240 bp, Glycine max
tcgagctcgagccgctcgagccgcaattttctagggtttatacaatttacgatggcttcttcagatgttgagtaccgttgctttgtcggtgggctcgcttgggccactgacgaccaagctctcgagagagccttctctcagtacggcgaaatcgttgaaacgaagattatcaacgatcgtgagactggaagatccaggggttttggatttgtgaccttcgcctcggagcagtccatgaaa

SEQ ID NO: 137546 - DNA, 233 bp, Glycine max
gaagaaggcgatcgagaaaggcaacatggacggagcgcggatctacgcggagaacgcgatccgtaagcgcacggagcagatgaactacctccggcttgcctcgcgcctggacgccgtcccggcccgcctcgacacgcaggcgaagatgacgacgatcagcaagtcgatgggcaacatcgtcaaatcgctggagtcgtcgctggccacggggaacctccagaagatgtcggaga

SEQ ID NO: 137547 - DNA, 240 bp, Glycine max
actctttctaagttttttctatctctttctctctctctctgtctgccatggttctctccaaaaccacctccgaatccgacgtctctgtccactcaaccttcgcttctcgatatgtcagaacttcgcttcccaggtttaagatgccggaggagtcgataccaaaggaggcagcgtatcaaataataaacgatgagttgatgttggatgggaacccaaggttgaacttggcatcatttgtga

SEQ ID NO: 137548 - DNA, 238 bp, Glycine max
  unsure (1)..(238): unsure at all n locations
gnaaaatccaagaagtccgtgagcatcactgagtttctgaagcccgctgagggggaagcatactataacccagggcgtggtaggggtcgtggccgtggttcacgaggcggaggcggaggtgtttaccgtggaagttccacgaacaatgcacctgctccatccattgaagatcctgggcatttcccaaacttgggtgccaagtgaggccttgctagaaccctttgtcatatccctgtcc

SEQ ID NO: 137549 - DNA, 236 bp, Glycine max
attggtttatgagagatagaagcagctcaacaaattaagggtgaaagccgagaaggttgctgaagacaagctcggttcccaacttgatattcttgctccagtcaagtactgagtagtctatgtttttaaatttttttatgcaacttatacccaattgaaactacctttcagttttgcttgttattggctatgaagtattgacaccgatacggacaccggacacggacacgttgaca

SEQ ID NO: 137550 - DNA, 238 bp, Glycine max
tctagactcttctttttctctaagtctaaggggtgccctgagatcactttgagcaatggtgaaggctgtggcagttcttggcagcagcgagggtgtcactggaactattttcttcactcaggagggaaatggtccaaccaccgtaactggatctcttgctggttttaagcctggtctccatggcttccatgtccatgccttgggggacactaccaatggttgcctgtcaactggagcg

SEQ ID NO: 137551 - DNA, 238 bp, Glycine max
cacttttcatccttcgatcatacacttagttgcttccaattaagatggttctgctagagaagctctgggatgatgttgtggctggccctcaacctgagcgtggccttggcaagctcagaaaactcaccaccctcaaaactattgatgaaggagaaagtagcaagctgcagaagacgttgtcgatgccgtcgacaccaacaaccccgatgactccgacgactccaacgacaccgggatc

SEQ ID NO: 137552 - DNA, 220 bp, Glycine max
ggctcgagccggcaacctctcttccggcgccgcgctatctcggccacgcaccagttattcttctctacatatcttcaatttgattacttgggtcaacgatttctgtcattctcaatcatggcaactagacttcagtttgaaaataattgtgaagttggagtcttctctaaacttaccaatgcctactgtttggttgccattggtggttctgaaagcttct

SEQ ID NO: 137553 - DNA, 233 bp, Glycine max
cactcatcaatctcgtttgttctcactaactattacttcatcatgtcgtcgagcacagttggtcaagtcatcaaatgcaaagctgcggtttcatgggaggcagggaagccacttgtgattgaagaagtagaggtggcaccaccacaagctggtgaagtgcgtttgaagatcctctacacctctctttgccacactgatgtttacttctgggaagccaagggccaaactccatt

SEQ ID NO: 137554 - DNA, 236 bp, Glycine max
cttggatagtaattaacctcactcaaactcgggatcacagataccaacaacagttcttgcactgacgtttcacgatgttgctggaacttgcacttgcgtctgtttgtgtcagctttgtttctgcacttgcgtcccacaccaagtgcaaaatcaaaagcacttcgccacctcccaaaccctccaagcccaaagcctcgtcttcccttcattggccaccttcctcgacactttgcttg

SEQ ID NO: 137555 - DNA, 239 bp, Glycine max
ctttttcatttcacagatcagagaggagcaggagcgagttgagcagaggaagaacaaaggagaagagaaaaaatggtgggtaatgaaatagtagtaccaatggacgacaaagcgaagaggatgcgagatctgctatccagtttctactccctagacccttccatctccaacaccacctccaaacacgcttctctcgacgacatcaattccacctccttcgatcccgatcagtacatgaa

SEQ ID NO: 137556 - DNA, 237 bp, Glycine max
ttcgttcttcgtgttctccattccctctctcactccttcatctacgtaatttccttccttcctttctttctttctttctttctttatcttctcatttttctcaatacaatttttttctttctttctcaagttttgctacttttctcttcttaaccatagttcacatattatatcatcacatatcatagtgatatcatatcacaatgtgtggcatacttgctgtgcttggttgctctg

SEQ ID NO: 137557 - DNA, 238 bp, Glycine max
ctcgagccgctcttttgctgcatcagaggagttgtaaattaagagcatggctgcacaagctcttgtatcatcatcttctcttaccttctcagcggaggctgcaagacaaagtcttggaccaagatcactccaatctccatttggcttctccagaaaagcctcctttcttgttaaggcagctgctaccccccctgtcaagcaaggatcagacaggcctttgtggtttgcatcaaagcaa

SEQ ID NO: 137558 - DNA, 237 bp, Glycine max
aaaacccgggtcagaggaggcccagatcatgaagaatactctcagtgagtgtgaagagggtggcatcaaaggagaggaaaagtactgtgccacttcgcttgaatccatgattgatttcagcacttccaagcttggaaaaaatgttgaggttgtgtccacggaagtagtggaggacaaggaaacgggattgcagaaatacaccgtagcaccgggagtgaacaagttatcaggggacaa

SEQ ID NO: 137559 - DNA, 234 bp, Glycine max
tgataatcctccactcaagataacatacatggacaacacggatcctgctggaattgatcatcagattgcacaacttgggcctgagctagcttcaacacttgtgattgtgatatcaaagagtggaggtactcctgagaccagaaatggtttattggaagtgcagaaggcctttcgtgaagcaggcttggattttcctaaacagggtgttgctataacacaagaaaattctttgtt

SEQ ID NO: 137560 - DNA, 233 bp, Glycine max
ttagacacctctaaagaaggatatagttttgaagagatatgcatcaagaaagaagcgtttgagggagaagagaagttttgtgcaaaatccttgggaacagtaattggttttgccatttcaaagctgggaaagaacattcaagtactttcaagttcctttgtcaataagcaagagcaatacactgtggaaggagtgcagaatcttggagacaaagcagtgatgtgtcatgggct

SEQ ID NO: 137561 - DNA, 233 bp, Glycine max
ctctcagactcctctttaggaaggaaaggctctctcacagtggtttgtgccctaaacaccatcttcggctgcttaacagccctgtccccaaactactggatctacgtcctcctccgcctcctcaccggcttcagcagcggtggcgtcggcctcactgccttcgtccttgccaccgaaccaatcggcccaaccaaacgtggtgcagcgggtatgtccaccttctacttcttctc

SEQ ID NO: 137562 - DNA, 233 bp, Glycine max
tgaacttgttgcatttggatctcatggcagaagaagcactactgcaaaacaagcaggttctattcaaagggtacatagatggtgttcctaaagaaaccgatatggaactcaaggtcgactcacatattgcgctcaagcctcccccacaaggctcatcagctattctcgttaagaacctttatctctcttgcgatccatacatgcgcggtcgcatgcgtgatttccacggatct

SEQ ID NO: 137563 - DNA, 233 bp, Glycine max
gttcatattgtcatggagctttgttccgggggtgagttgtttgatcgcatcatccagaggggccactataccgagaggaaggccgcggagttgaccaaaattattgttggggttgttgaggcttgccattcccttggggtcatgcatagagatctcaagcctgaaaactttctcttggtcaacaaagatgatgatttctctcttaaagcaattgactttggcctctctgtatt

SEQ ID NO: 137564 - DNA, 233 bp, Glycine max
gaaagctacctagagcttgcacctattggtatcttctacaatatcctctcatagtgctcttcttcttcttcattttcattatcaagatgtctttgctttcggatctcatcaacctcaatctctcagaatccacagaaaagatcgttgctgagtacatatgggttggtggatctggtatggacctcagaagcaaagccaggactcttcctgggccagtgagtgaccctgcaaag

SEQ ID NO: 137565 - DNA, 235 bp, Glycine max
ctcagaattctctaaaagagttctttttctgctctttgaagaaagcagggtctttgcttgattttggagatgtctctgctctcagatctcatcaaccttaacctctccgataccaccgagaaggtgatcgcagagtacatatggatcggtggatcaggaatggacctgaggagcaaagcaaggactctcccaggaccagttagcgacccttcagagcttcccaagtggaactatg

SEQ ID NO: 137566 - DNA, 232 bp, Glycine max
ttgtggcgctggcgtggtgaagggtttcgaggggaaaacaaaatacggtgcgttgaatggtggtgccaactttgttgcccctggttacaccaagggtgatggtcttggtgctgagattgttggcactttcatccttgtttacaccgttttctccgccaccgatgccaaacgtagcgccagagactcccacgtccccattttggcacccttgccaattgggttcgctgtgttc

SEQ ID NO: 137567 - DNA, 231 bp, Glycine max
atagggagttaggtgcagttgatggtggcgatgttgttgtgcatgatttgcgaaagaagttattagcagatttggagaagttgtttcctcctccgatttcggtgcctgaaggaaggctggagcatttggtagaaaatactgttatgtcttgggttgattcgtgtatgtatcatagttcgtcgagtccaatttcactttatgaggatcatcattgcagcagggatcagattc

SEQ ID NO: 137568 - DNA, 231 bp, Glycine max
gagtggtttcagtgagtgatcggtgttcacttgatccttcataagtcgtcatcatcatcatcatcatcaccgttgattgaagaagatgccgatcagaaacatcgccatcggaaggcctgaagaggctactcaccccgacacgttgaaggcggggttggctgagttcatctccaccttgatcttcgtgttcgccggttcaggttccggcatcgcctacaacaagctcaccga

SEQ ID NO: 137569 - DNA, 283 bp, Glycine max
tcggctcgcgagatgctggggttccattcttctcctgcagtggaagtgaatttgaagagatgtatgttggtgttggtgcacgaagggtgagggatcttttttctgctgcaaggaagcgagcacctgctataatattcattgatgagatagatgctattggaggaaaacgaaatgcaaaggaccaaatgtacatgaagatgacattaaatcagttactggttgagctagatggattcaagcaaaatgagggcataattgtgattggcgctactaattttccaca

SEQ ID NO: 137570 - DNA, 272 bp, Glycine max
gaaagttcatccaatctccgaagcccttcaccgcattgcaaccatgtcgagaagaaaggttagagagccaaaagaagaaaacgtgactctgggcccagctgttagagatggcgaacatgtctttggcgtcgctcgcatctttgcctccttcaatgataccttcattcatgtcactgatctgtccgggagggaaacacttgtacgcatcacaggtggaatgaaggttaaggctgacagggatgaatcgtctccctatgctgctatgcttgctg

SEQ ID NO: 137571 - DNA, 270 bp, Glycine max
aaaagaaggtatggagaggaaggatgtgatgactaagaacgtctccatttacaagtcccaggcttctgcccttgaaaagcatgctgctgccaactgcaaggttcttgttgttgctaacccagcaaacaccaatgcattgatcttgaaagaatttgctccatctattcccgagaaaaacatttcttgtttgactagattggaccacaatagggcactgggccaaatttctgagagactgaacattcaggtttctgatgtaaagaatgtcat

SEQ ID NO: 137572 - DNA, 267 bp, Glycine max
ctcgagccggacttttggtaccaaccacgtcacaataccatgattagcacatcatggggcgctcctagtgcttttacaaaaggttttaacttacagcatctctctgatggattatacgggaggcatctccatgtatatagctggcctaggggcgaactgagacaaacaatggaccttggtgattcagggcttatacccttagaggtaagttgttaacataatccggggtagatgtttaagatgccattattttaaccctttaacttc

SEQ ID NO: 137573 - DNA, 271 bp, Glycine max
tgaagaccttaaggaattctccaaaagtcagggagcattggaagctggtgatttgactcattgggacattaccttttggagtgagaggctacgtgagtcaaaatatgatattaatgaggaagaactgcgtccctttttctctctgccaaaggttatggatggactctttaaccttgcaaaatcactttttggcattgaaattgagccagctgatggtctagctccggtctggaataatgatgttaggttcttctgtgttaaggattcttct

SEQ ID NO: 137574 - DNA, 98 bp, Glycine max
caagtagttgagaactaagaaggagaagcaaatggcttcctcaatgatctcttccccagctgttaccactgctcaacgtgccggtgccggcatagttg

SEQ ID NO: 137575 - DNA, 273 bp, Glycine max
ctcatcttcgccggaaagcagctcgaggacggccgtaccctcgccgactacaacatccagaaggagtcaactctccacttggtgttgcgtcttcgtggtggtatgcagatcttcgtcaagactcttacgggtaagactattaccctcgaggtggagagctccgacaccattgacaatgtgaaggcgaagatccaggactaggaaggaatcccaccggaccagcagaggcttatgtttgctggcaaacagctagaggatggaaggaccctcgct

SEQ ID NO: 137576 - DNA, 273 bp, Glycine max
cgttcaaaagacacagactaggcgctgcccaaaattgctctgccactcttaacggcaaccacaagctcactgatgctgttcttcctcccacgaaagactggaggaaagaaggaatagtgagtgatgttaaagatcaaggcagctgcggatcatgctggacattcagtacaactggggctttagaagcagcctatgcacaagcatttgggaagagtatctctctttctgagcaacagctagtggattgtgctggccgtttcaacaactttggct

SEQ ID NO: 137577 - DNA, 272 bp, Glycine max
tgctccttcgccacaactctctgccaacatgggtatctccagagattctatgcacaagaggcgtgccactggtggcaagaagaaggcctggaggaaaaagagaaagtatgagcttggtcgccagcctgctaacactaagctgtcaagcaacaagacagtcaggaggatccgtgttagaggtggaaatgtgaaatggagggcattgagattggatactggaaattactcctggggaattgaagctgtaactcgcaagactcgtgtactagatg

SEQ ID NO: 137578 - DNA, 287 bp, Glycine max
ttctgctcattcaggagacacaccttcagcagcagcagccatggttctcaaaaccgaactatgccgattcagcggtgccaagatctacccagggaaaggcatcagatttgttcgtggtgattctcaggttttcctgtttgctaactcgaaatgtaagaggtatttccacaacaggttgaagccatcaaagctcacctggactgcaatgtacagaaagcaacacaagaaggacattgctcaagaagctgtgaagaaaagaagacgtgccgccaaaaagccttactcca

SEQ ID NO: 137579 - DNA, 271 bp, Glycine max
cagcagttggtgttgatcctgccatcatgggtgttggccctgctgctgcaattcctgttgctgttaaggctgcaggtctagagcttgatgatattgatctttttgaaataaatgaggcatttgcctcccagttcgtgtattgccgtaacaagctagggcttgatccagaaaagatcaatgttaatggaggtgcaatggcaattgggcatcctctgggttcaacaggtgctcgatgtgttgcaactctgttgcatgaaatgaagaaacgtgg

SEQ ID NO: 137580 - DNA, 270 bp, Glycine max
gagtcgttgcagagctgcgcgttgatctagaaaaatggcgaggataaaggtgtacgagttgaggaataagacgaaggcggagctactgaaccagctcaaggatctcaaggcggagctagccctgctccgcgtcgccaaggttaccggcggcgccccaaacaagctctccaaaattaaggtggtgaggctatcgatagcgcaggttttgacggttatttcccagaagcagaaagcggcgctgagagaggcttacaagaagaagaagtattt

SEQ ID NO: 137581 - DNA, 271 bp, Glycine max
ctcgagccgctttcgtcagtttcgggggaagagatccagcagcaatggtgtacgtcaagagctcagaaatcaaaagcctacttcaagagatatcaagtcgagttcaagagaagaagagagggaaaaaccgattaccgtgccaggattcggttgattaatcaggacaagaacaaatataacactccgaaataccgatttgtggttcgctttagcaacaaggacattgttgcacaaataatatctgctagcattgccggcgatttagttcttg

SEQ ID NO: 137582 - DNA, 269 bp, Glycine max
ctaacgcgtgcatagcagagtcagagacagagacgcagccatggggcggagacctgcgaggtgttataggcaaattaagaacaagccataccccaagtcacgtttctgccgtggtgttcctgatcccaagatcaggatttatgatgttggtatgaagaagaagggtgttgatgagtttcctttctgtgtccatctggttagttgggagaaggaaaatgtttcaagtgaggccctggaagctgctcgcattgcttgcaacaagtacatgg

SEQ ID NO: 137583 - DNA, 269 bp, Glycine max
gggagaatcttgctatgagcactggtgacctaagtggcacagatgcagtgaaattgtgggttgatgagaagtctaactatgactacaattctaattcctgtgttggtggagagtgtctgcattacactcaggttgtttggagagactctgtgcgtcttggatgtgccaaagtagcatgtgataatggaggcactttcatcacttgcaactatgctcctcctggcaactatgttggccaaagaccctactaggttgttacatttgtagca

SEQ ID NO: 137584 - DNA, 272 bp, Glycine max
gccaaagcacattttatacaggcagaaagagcaattcagtgatggagttggctatagctggattgatggccttaaggcccatgctgcaaaacatgtgactgacaaaatgatgcttaatgctggtaacatctaccctcacaacaccccaacaaccaaggaagcatattactacagaatgatctttgagaggttcttccctcagaactcagctaggctcaccgttcctggaggagcaagtgttgcatgtagcacagccaaagctgttgagtggg

SEQ ID NO: 137585 - DNA, 272 bp, Glycine max
actttggtggccacagcaacaataacaatggcagcctcactacaagctgcagctaccttcatgcaacccaccaaggtgggcatggccactcgcaacctcaaatctacacaatgcatttctaaggcttttggcttggaacccgctgcagctaaactcatttgctcccttaagcccgatctcaaagattttgctcaaaaatgtgtcgacgccaccaaaattgcaggattcgcccttgccacctcagctctcgttgtttctggagcgagtgcaga

SEQ ID NO: 137586 - DNA, 271 bp, Glycine max
gcagtggggatcaaagttacattcattctgtgtaggccttgagggctcaccagatttgaaggctgcaaaagaagttgctgactatctaggcactgtccaccatgagtttaccttcactgttcaggatggaatagatgccattgaagatgttatctaccatgttgaaacatatgatgtgactacaattagagctagcacacccatgtttctcatgtctcggaagattaaatcacttggtgtcaaatgggttatctccggagaaggatctgat

SEQ ID NO: 137587 - DNA, 269 bp, Glycine max
aaaggattctacccgccgctcgatgggaattgcgcttcaaggcgtctcgtagggctaatccgcctcacgagggtcaccaacggcacgtgcctttggggggccgaggcccctactgctggtcggcaaacggacggcgggcgcacgcgtcgcttctagcccggattctgacttagaggcgttcagtcataatccaacgcacggtagcttcgcgccactggcttatcaaccaagcgcgatgaccaattgtgcgaatcaacggttcctctcgt

SEQ ID NO: 137588 - DNA, 270 bp, Glycine max
aaagacttgcttccaagatggttctgctagagaagctctgggatgacgttgttgctggccctcaacctgagcgtggccttggcaagctcagaaaactcaccaccctcaaaactattgatgaaggagacagtagcaagctgcagaagacgttgtcgatgccgtcgacaccgacaatcccgatgactcccacgactccaacgacaccgggatccgcgcgtaaagctgacaacgtttggaggagcgtcttccatcctgggagcaactccgcca

SEQ ID NO: 137589 - DNA, 266 bp, Glycine max
agtgatttcagtgagtgatcggtgttcacttgatctcatcataatcgtcagcgtcaattgaagaagatgccgatcagaaacatcgccgtcggaaggcctgaagaggcgactcaccccgacacgttgaaggcggctttggctgagttcatctcaaccttcatcttcgtgttcgccggctcaggctccggcatcgcctacaacaagctcaccgacaacggcgctgccacccctgccggcctcatctccgcctccatcgcccatgcatt

SEQ ID NO: 137590 - DNA, 266 bp, Glycine max
  unsure (1)..(266): unsure at all n locations
caccaacaaccgcaaacacaaacacagacccttcccttccttnctccctccctcattcccttcttcaatttcatcaacacaaccatcaattncatcaancatcgcataataatagtattatcatgatagccgtggcccgaaaggacatggaccggatcaagggcccgtggagcccggaggaggacgaggcccttcagaagcttgtggagcggcagggcccagaaactggtcgctcatcagcaggtccattccgggccggtctggga

SEQ ID NO: 137591 - DNA, 264 bp, Glycine max
attgtttgttgttgtaactcgttcttcttcttttgttgttctgtgtttgtattttctctcacctgaaaatgtcttgctgcggtggtaactgtggttgcggaagctcctgcaagtgcggcaacggctgcggaggctgcaagatgtacccagacttgagctacactgagtcaaccaccaccgagaccttggtcatgggagtggcacctgttaaggctcaatttgagggtgctgaaatgggtgtgcccgctgagaacgatggctgca

SEQ ID NO: 137592 - DNA, 268 bp, Glycine max
caccagcaggtgagaagccagaaccagtgcgcacccatctccgcaacatgattattgtgcctgagatgattggtagcatcattggagtctacaacggcaagactttcaatcaggttgaaatcaaacccgagatgattggccattatctcgctgagttctctatttcatataaacccgtcaagcatggtaggcctggtattggtgccactcactcttccaggttcattcctctcaagtgaaagccttaccgaaactcttgtcagatttt

SEQ ID NO: 137593 - DNA, 270 bp, Glycine max
tggaaaagacactgtctcgcgagtgaacacaggttacagcaatggctttctttggtagaattgggaatttattaagacagacagcaagcaggcaggttagttcagaattgcgatcatccccttcgttttttcaggctatacgcagtatgtcatctgctccaagcacaaagctgtttatcggaggtgtttcatattctactgacgagcaaagtttgagggaagctttttcaaaatatggtgaagttgttgatgctaggataattatggatc

SEQ ID NO: 137594 - DNA, 267 bp, Glycine max
gaattctctatcactcttcaccttcctctgcgcaatttgtgcgcactccgtcgccgtcacctccgcggcatatccttccatccccggcacggaaaccggagagtgctccctccgcggcgtcggcgtcggcgacggtgttctggtccctccgcggcgagaagtgtacgaggaggggcgaatcttcgacatcacccacaggtatgtccccgagatgccggtgtgggactcgacggcggggctcgggcagtcattcctgtggctcgaaaa

SEQ ID NO: 137595 - DNA, 262 bp, Glycine max
ggtttctgcatcggtcgccgccgcagagaagccgtcaacgtcgccggagatcgtgctggaacccatcaaagacttctcgggtaccatcacattgccagggtccaagtctctgtccaatcgaattttgcttcttgctgctctctctgagggaacaactgttgtagacaacttgttgtatagtgaggatattcattacatgcttggtgcattaaggacccttggactgcgtgtggaagatgacaaaacaaccaaacaagcaatt

SEQ ID NO: 137596 - DNA, 263 bp, Glycine max
atcgattaaagacttgcttccaagatggttctgctagagaagctctgggatgacgttgttgctggccctcaacctgagcgtggccttggcaagctcagaaaactcaccaccctcaaaactattgatgaaggagacagtagcaagctgcagaagacgttgtcgatgccgtcgacaccgacaatcccgatgactcccacgactccaacgacaccgggatccgcgcgtaaagctgacaacgtttggaggagcgtcttccatcctgg

SEQ ID NO: 137597 - DNA, 279 bp, Glycine max
ggcttcagctcgagtcttcctcctccgcatcgggcagcgcaacctcgtcgtggtttcttcccctgagctctccaaagaggttctccacacgcagggcgtggagttcggctcccgcacccgcaacgtcgtcttcgacatcttcaccggttatggccaagacatggtcttcaccgtctacggcgagcactggcgcaaaatgcgccgcatcatgaccgtccccttcttcaccaacaaggttgtgcaacaataccgccatggatgcgaatcggaggctgccgc

SEQ ID NO: 137598 - DNA, 266 bp, Glycine max
agcatacgattctagccgccgttcgataggacatacgcaagaaagcgtctcgtagggctaatccgcctcacgagggtcaccaacggcacgtgcctttggggggccgaggcccctactgctggtcggcaaacggacggcgggcgcacgcgtcgcttctagcccggattctgacttagaggcgttcagtcataatccaacgcacggtagcttcgcgccactggcttttcacccaagcgcgatgaccaattgtgcgaatcaacggttcc

SEQ ID NO: 137599 - DNA, 266 bp, Glycine max
cgcctggttgttgagcatggtctaggtcatctgcctttcaccgaaaagcaagtggttactcccacaggatctgtttatactggagttgatttctgcaaaaaattgtgtggtgtttcaattgttcgaagtggtgagagcatggaaaatgcacttcgtgcatgttgcaaaggcattaaaattggtaaaattctgattcaccgggatggagacaatggaaaacagcttatatatgagaagctccccaaggatatttcagaacggcatgt

SEQ ID NO: 137600 - DNA, 265 bp, Glycine max
tctttttactctctctctgtctctctctacgctttctcgttcgagatccctcaagggatccactaactgaaggagaaatggggttgacattcaccaagcttttcagccggcttttcgccaagaaggaaatgcgaattctgatggtgggtctcgatgcagctggtaagaccaccatcctgtacaagctcaaacttggagagatcgttaccacaattcccaccattgggttcaatgtggagactgtggaatacaagaacattagttt

SEQ ID NO: 137601 - DNA, 265 bp, Glycine max
cgagttacagccgcaccttgattcagagcagagcgaccttgaagagctatggctgtcggaaagaataagaggatttccaagggaaagaagggtggcaagaagaaagccgctgatccctttgccaagaaggactggtacgatatcaaggccccttccgtctttcaggtcaagaatgttggcaaaaccctcgtctctcgtacccagggaaccaagattgcttctgaaggactcaaacatagagtgtttgaggtctcattggctgatc

SEQ ID NO: 137602 - DNA, 147 bp, Glycine max
cgaatatgaagatgccttcgtattttaatttgccagcacttgatgtttctgtggcttttccacaagccactccagcctctaattttcctccttgtgcttcggattattttcatttcaatgacttgttgaaaccggaggagcaggccg

SEQ ID NO: 137603 - DNA, 264 bp, Glycine max
gggattcaaggagtagaagttggcaccaagttgtatgtttccaatttggaccatggagtgaccaatgaagacataagggtatatactatgttgtatcatcatatggttcttttagtcactgtttctacccaatctatctggaagttctcttgaaacttgatttgcaactcaggaacttttctctgagcttggagagttgaagcgttttgctgttcattatgacaaaaatggacatccaagtggttcagctgaagtcgtttatac

SEQ ID NO: 137604 - DNA, 265 bp, Glycine max
gtaaaagctcgtttgattctgatttccagtacgaatacgaaccgtgaaagcgtggcctatcgatcctttagtccttcggaatttgaagctagaggtgtcagaaaagttaccacagggataactggcttgtggcagccaagcgttcatagcgacgttgctttttgatccttcgatgtcggctcttcctatcattgtgaagcagaattcaccaagtgttggattgttcacccaccaatagggaacgtgagctgggtttagaccgtcg

SEQ ID NO: 137605 - DNA, 263 bp, Glycine max
atcatcactatgataaagagggaactaaagatgcacagaagcctaaaaattgggccaaaaagatccaggaggaatggaaaattttagaggaaaatctgccagagacaatctttgtgagagtttgtgaatcaaggatggagcttctaagggctgttatcattggacctcaaggcaccccataccatgatggtcttttctttttcgattgcctctttccttctacctaccctgcaggtccaccgaaagttcactaccactcaggt

SEQ ID NO: 137606 - DNA, 263 bp, Glycine max
ctgcaagcaaaccttatcttttcacctgaaacttgcttttgttcccgattttctcaaattgctttcggttttcgttctgattctgcaaaatcatggagatggagcgcatcgttgaattccctcacacctacatggatcgacccccaagatagagagcgcgtttgggctgggacatcgctgaggcccccaagatatgatccatagtaaaatgggcgatggaacttttgggcaggtcttggagtgctgggacagagaaaggaagg

SEQ ID NO: 137607 - DNA, 260 bp, Glycine max
ggctgtgggagtgacgccaaaccaccatgttgctgccattgtggctgctgcattttatgcaatttggaatctcttctcaggatttatcgtcgtaagacctaaaatgcccgtgtggtggagatggtactattgggcatgtcctgtggcttggaccttgtatggattgattgcatctcagtttggagatataactgaaagaatgccgggtgaagataacaagatggtgaaagaattcatagaagactattttggtttcaaac

SEQ ID NO: 137608 - DNA, 261 bp, Glycine max
ttctcttcgagggtttgggtttctcttcctcccttggagaaaaagaagagtcaccgctgcgacgccgttcgtgcatttttgaggtgccgctgtcatgtctaggcgtggtggaccaaggaggagtgataactccaaatattatgatattctcgggatctccaaaaatgccagtgaagctgaaatcatgacggcctatagaaaggcggctatgacgaaccatccagataagggaggagatccgtaacagtgtaaggagttagg

SEQ ID NO: 137609 - DNA, 262 bp, Glycine max
taattgcaagaatggcacttcgttgcttggtgatatccctttctgttctcttcactcttggtcttgcgagagaaagccatgccagagacgaagatttttggcatgctgtttggccaaacactcccattccaagttcattgcgagatcttctaaagcctggccctgcaagtgttgaaatcgatgatcaccctatgcaaattgaagaaacacagtacccgaaaaccttcttctataaagaagaccttcatccaggcaaaacaat

SEQ ID NO: 137610 - DNA, 259 bp, Glycine max
gctctctggaacatcttcaagtggagatcatcactatggtatccttgaaggatggtttggtgtgcactggtggacggggcgaacatttgttgtcctttttacaacacttgccatatttgcaccccttgcaagctttaagcgaattgattcattgagattcacatcagccctttcagtcgcacttgcagttgtttttctagtcattgccgtgggaattgcagttgtcaagatattcagtggaggcattgcgatgcccaga

SEQ ID NO: 137611 - DNA, 142 bp, Glycine max
caaccaaggaagcatattactacagaatgatctttgagaggttcttccctcagaactcagctaggctcaccgttcctggaggagcaagtgttgcatgtagcacagccaaagctgttgagtgggatgctgcttggtctaacaa

SEQ ID NO: 137612 - DNA, 273 bp, Glycine max
cttaatttctctctgccttgctcatttacacacctctccaacactttcactttcagctttatttgaatccctctctctcctttccaaatggccagcgttgaggttgcacatcaaacaccaacaacagttccagaaaatgaaacaaccgaggtaatcaagacccaggaaacaaccccggaaccagtaccagccactgaggctcctgcaacagaacaagcagcagctgaggttcctgcccaagaagaacaacaagcaactgaggttcctgcccag

SEQ ID NO: 137613 - DNA, 273 bp, Glycine max
ctcgctagacacttccttccgcaaatggcttctcacgacagcatctccgcttctccaacctccgcttcttattccttcttcaatcacctcgttcgtgctcccgaagatcctatcctcggggtaactgtcgcttataacaaagatccaagtccagttaagctcaacttgggagttggtgcttaccgaactgaggaaggaaaacctcttgttttgaatgtagtgaggcgagttgaacagcaactcataaatgacgtgtcacgcaacaaggaatat

SEQ ID NO: 137614 - DNA, 270 bp, Glycine max
gagaaaccctagggtttggaagaagctgatcggagaagatggtgcagcgtctcacctaccgcaagcgccacagctatgccaccaaatccaaccagcacagagtcgtcaagactcccggtggcaagcttgtttatcagaccacgaagaagagggccagcggacccaagtgccctgtcactggaaagaggattcaagggattccacatttaaggccaacagaatataagagatcaaggttacccaacaaccgaaggactgtgaaccgtgcat

SEQ ID NO: 137615 - DNA, 271 bp, Glycine max
tgagacatggaatgttcaattatttagatccattgatggtggagctgcttttgggttcccagagactcctgaagatgctgccagagtggggcttgtcagtgggaaggataatataatagatcgtagtattcaagatgcttatgttaatgccattcgacgtgcgaaaaatttcatctatattgagaatcagtatttccttggaagcagttatgattggagtgctgatggcattaagcctgaagccatcgatgctttgcatattatcccgaag

SEQ ID NO: 137616 - DNA, 269 bp, Glycine max
ccaaaagaagatatggaagcaaagaaaatcccagaagtgatactaaactcagggaaaaagatgccagtgataggcctaggaaccgcatcaattcctcttccatcacatgaagctctcacctccatccttattgatgcctttgaggttggctacagacactttgatactgcttctctgtatgaaagtgaggagtctctaggcaaagctgtggcaaaggccttagagctaggcctcataaatagcagagaggaattattcatcacatcaaa

SEQ ID NO: 137617 - DNA, 253 bp, Glycine max
gctcgtcactccttgctcttagccctcctcctcttcgccgccgtggccaccgccgcgatggcggggcgcgtccgacgccgacgacatcctgatccgtcaggtggtgccagatgatgccgaaccgaagaggaggacaacctgctgaacgccgagcaccacgccgcgagcttcaaggccaagttcgccaagacctacgccaccaaggaggagcacgatcatcgcttcggcgtcttcaagtccaacctccgcagag

SEQ ID NO: 137618 - DNA, 265 bp, Glycine max
gtgaatggcataaaaatgcatgttgcagagaaaggagagggtccagtggtgttgttcctccacggcttccctgagctctggtactcatggcgccatcagattctctctctcagctccctcggctaccgcgccgtcgctcccgatctccgtggctacggtgacaccgaagcaccaccttcaatcagcagctacaactgcttccacatagtgggtgatctcgttgcgcttattgactctctgggtgtccaacaagtgttccttgtgg

SEQ ID NO: 137619 - DNA, 272 bp, Glycine max
gcgataagcaatagaattcagagagagagagaaagagagtctcttgctctgtatctttgatttgatcattccaatcttcaatttttctatatatccatcaatccgctgagtgcaaagttctaatctttcgcctattgggttctactcctttctctcttcgtttccgatcgatccaattttcttcccatggctacgatcggacacaacaatctcaatgccaaattggttcttctcggggacatgggtgctgggaaatccagcctcgttttgcg

SEQ ID NO: 137620 - DNA, 273 bp, Glycine max
gattaactctttcttctcataactctgccgccgcaacagccccaaatccaatggcttcagagaagaaactttcgaacccaatgagggagataaaggtgcagaagctcgtcctcaatatctccgttggcgagagtggagatcgtctcaccagagccgctaaggttttggaacagcttagtggccaaacccctgtgttttccaaagcaaggtacacggttcgttcctttgggattagaagaaatgagaagattgcatgctatgtcactgtcagag

SEQ ID NO: 137621 - DNA, 269 bp, Glycine max
cggtacccttgctctccaagaagatcgtgaagaagcgcgtcaagaagtttatacgcccccagagtgatcgcaagatctccgtcaagccaagctggcgcagacccaagggtattgattctcgtgtcaggagaaagttcaaaggatgcactttgatgcccaacattggttatggctcagacaagaaaacccgccattatctaccaaatggtttcaagaaatttgtcgtgcacaatgtgaaagacctggaacttctcatgatgcataacagg

SEQ ID NO: 137622 - DNA, 268 bp, Glycine max
ggcttcacttcaacacttcaagcagccttgggctcatgagcatgagcctgtaggcagtctcttagaagctgttaaggtaatcaagcctacagttttgattgggtcatcaggagtgggaaaaacatttacaaaggaagtaattgaggctgtgacttctataaatgaaaaacctcttgtcctggctctctccaatccaacttcacagtctgagtgtacagctgaagaggcttatcaatggagtgagggtcgtgcaatttttgctagtgga

SEQ ID NO: 137623 - DNA, 268 bp, Glycine max
gaagcgccgtgagatcgtgaggaggagaaagaacggagaggttgttgagggtgaggtcagcggggttttccttgacactttgcttgaattcgctgaggatgagaccatggagatcaaaatcaccaaggaccacatcaagggtcttgttgtcgactttttctcggcaggaacagactccacagcggtggcaacagagtgggcattggcagaactcatcaacaatcctaaggtgttggaaaaggctcgtgaggaggtctacagtgttgtg

SEQ ID NO: 137624 - DNA, 258 bp, Glycine max
tgatgaccttagggaattctccaaaagtcagggatcattggaagctggtgatttgactcattgggacattaccttttggagtgagaggctacgtgagtcaaaatatgatattaattaggaagaactgcgtccctttttctctctgccataggttatggatggactctttaaccttgtaaaatcactgtttggcattgaaattgagccagctgatggtctagctctggtatggaatgatgatgttaggttcttctgtgt

SEQ ID NO: 137625 - DNA, 266 bp, Glycine max
gatttttacaggaaagattggccctcaaagaggatgccgttcaacttggtcctgcattactcttctttggatgtaggaatcgacaaatggattttatttatgaggatgagctaaagaattttatggaacaaggtgctctgtcagagttgatagtcacattctcgagagagggacctgaaaaggagtatgttcaacacaagatgatggataaagctgcaaatctgtggaatttgatttctcagggaggttatctttatgtttgtggt

SEQ ID NO: 137626 - DNA, 268 bp, Glycine max
agcaagcaaaaacctcgaagatttagggtttcgcattgctacttcgcgttcgttcatctctctctcacgcctcaagattttcaagaacacattccaatctggatttctttccattttgtacagccttggataggagtaaacctttgcagatatgggacaaagaaggctgtcactcgggtaaagccctacattgcactatgccactgagaatgatgaggggtggaatcaaatccagtttaacctggctgatttcaccaagagagcatat

SEQ ID NO: 137627 - DNA, 270 bp, Glycine max
cttcataaacgcctttattctccgtttccgtttccttcccggacttcgatttttcatctctgaaaatgagagagtgcatctcgatccacattggtcaggccggtatccaggtcggaaatgcttgctgggagctctactgtcttgagcacggcatcgggcccgatgggcaaatgccaagtgacaaaacagttggcggaggtgatgatgctttcaacactttcttcagtgagactggtgctggaaagcacgtgccacgtgccgtctttgtag

SEQ ID NO: 137628 - DNA, 272 bp, Glycine max
ctcaaaacctttgcttttgcgttggctatatatatatatcactaacttccccaaaacccaatcatatatcatttcatttcttttttctcgtccatccgtaaccatgtctcagactgttgtcctcaaagttggtatgtcatgtgaaggatgtgttggagcagtgaagagagttttaggaaaattggatggtgtggaatcatatgacattgatttgaaggaacagaaggtggtagtgaagggaaatgtccagccagacacagttcttgcgaccg

SEQ ID NO: 137629 - DNA, 277 bp, Glycine max
caggttaatggtggtactattgcacagaaggtggactttgcatacagtttctttgagaaacaggttcctattgatgccgtgttccagaaggatgagatgattgacatcattggtgtgaccaagggtaagggttatgagggtgttgtcactcgttggggtgttacccgccttccccgtaagactcacagaggcttgaggaaggttgcttgtattggtgcctggcatcctgcaagagtttcattcactgttgccagggctggtcagaatggatacaacc

SEQ ID NO: 137630 - DNA, 274 bp, Glycine max
caagccgttactaataagttccaacaaacctttgtcaccgtcccagccacccttcgcctattctttcacgattgctttgtccagggttgtgatgcttccgttttgattgcatccaccggaaataaccaggcagagaaggatcaccaagacaacctgtctttggcgggtgatgggtttgacacagtgatcaaagcaaaggctgcagtagatgccgtccctcagtgcagaaacaaagtctcgtgtgcagatattctggccttggccacccgtgatg

SEQ ID NO: 137631 - DNA, 266 bp, Glycine max
aaaccacccattgtttatccacctgtagtaccaacaccaccaattgtgacaccacctattgtgtatccacctgtagtccctgtgccaccattaccacccattgtgactccaccaaaccctccaagtgaaacaccatgtccaccaccaccaccaccaccagtggtgccatatccaccaccagcacaaccaacatgccccattgacagcctaaaactgggggcatgtgtggatgtgctccggtggctcatacacattggcataggcag

SEQ ID NO: 137632 - DNA, 265 bp, Glycine max
tgttatttggtgagtcaatcggagttgttggagcagctgggcttgtacttggtgtcataggacttgtactactcgagttaccagccctatcatttgatgaaagcaacttctcactatggggaagtggtgagtggtggatgcttcttgcagctcagagtatggcagttggcacggtcatggtccggtgggtctccaagtactctgatcctgtcatggcgactggatggcatatggttattggtggtctcccacttgtgctattcgc

SEQ ID NO: 137633 - DNA, 263 bp, Glycine max
gcagccaaagaactaatagcaattgcttcccctggacaagttacacaggtacagcttgaccgagccaaaaaatccacaaagtctgcagttctaatgaatctggaatctagaatgattgcatcagaagatatagggaggcagattttgacttatggagaaaggaagcctgtggaacagttcttgaaggctgtagatgaaatcacgttgaatgatatcactaaaattgctcaaaagattatttcctcacctttgaccatggcatc

SEQ ID NO: 137634 - DNA, 262 bp, Glycine max
tgttgcatcaccgcaagtccacaacatggctgccactgccgctgcaggcatagcttccttgttttcttcttctattaacagtgtcaaatgtcttcgttcctccaagaactgctccattatagacccccttataaccacagtgccctcaaaccgtggcatgtttgtgtcacacttggtggaacctttgtccattgggggtgccattaattcgcacaagttgtgggggcctagaatttctgctgctgttgcacaagaagaggct

SEQ ID NO: 137635 - DNA, 260 bp, Glycine max
atcaccatagaatgttcagagacatgctacgtgggaacgggaccttcatgtatgagaaggttggtagtgttcctgcttctgtggattggaggaagaaaggtgctgtaactgatgtaaaagatcaaggccattgtggtagttgttgggcgttttcaactgttgtagctgttgaaggcattaaccaaatcaagacgaataagctagtctccttgtctgaacaagagctggtggactgtgacaccgaagaaaatgcaggatgc

SEQ ID NO: 137636 - DNA, 261 bp, Glycine max
aagagagagagaagacgaacactatcatggcttcttcactcagaatctcaagacttatctctcgctccttttcttctacttctttcttttcacgaggtgggaatggtttccttggttcaagacaaagtaaattcagcacttctgctgccattgaggaagaacccattaaaccatcaatacaagtagaacacacccaactcttaattgatggaaaatttgtagatgctgcttctggtaaaacttttcaaactttagatccta

SEQ ID NO: 137637 - DNA, 258 bp, Glycine max
ttttacttcccctatggctcgtcactccttgctcttagccctcctcctcttcgccgccgtggccaccgccgcgatggcggtggccgcgatccgacgccgacgacatcctgatccgtcaggtggtgccagatgttggcgaagcgatagaggaggacaacctgctgaacgccgagcaccacttcgcgagcttcaaggccaagttcgccaagacctacgccaccaaggaggagcacgatcatcgcttcggcgtcttcaagt

SEQ ID NO: 137638 - DNA, 267 bp, Glycine max
cttagatcgcgatctagaactgaggacactcacattatcaatggctagcaggtggagattaagcggacgataccgaggggggctgctggctcgaactcaaaggacttccgaacgaagaagatttttgtgggtggaattccttcgactgttactgaagatgaatttagggacttctttacacgctatggagaagtcaaagatcaccaaataatgcgggaccactctactaatcgttcacgtggatttggctttatcacttatgactct

SEQ ID NO: 137639 - DNA, 263 bp, Glycine max
tgagaatgctgatgatgctgctagggctgttgaggctctcaatggcaaaaattttgatgacaaagaatggtatgttggaaaagctcagaagaaatctgaaagggagaatgaattgaaacaacgatttgagcagagcatgaaagaagctgctgataaatatcaaggcgcaaacttgtatgtaaaaaatttagatgatagcattggtgatgataaacttaaggagctgttctccccttttggtaccattacctcttgcaaggtta

SEQ ID NO: 137640 - DNA, 263 bp, Glycine max
aagaaacataccgaatgagagcatcaaactcttcttcttcgatttccattgcgaacgttactttttcttcttctttctcttcattttcttcgctcttcgatcttcgtccggggactgctccgaataccaccaccaccactcgccgatggccacgatcggaggcttacacgactcccaaggctctcaaaacagcgtcgaaaccgaagccctcgctcgattcgccgtagacgaacacaacaagaagcagaattcgcttctggagt

SEQ ID NO: 137641 - DNA, 263 bp, Glycine max
ccaattttctagggttttattcattttccgatggcttctgcagatgttgagtaccgttgctttgtcggtgggctcgcttgggccactgacgaccatgccctcgagagagccttctctcagtacggcgaaatcgttgaaacgaagattatcaacgatcgtgagactggcagatccaggggttttggatttgtgaccttcgcctcggagcagtccatgaaagatgcgatcggagcgatgaatggacagaacttggacggccgtaa

SEQ ID NO: 137642 - DNA, 264 bp, Glycine max
gaaggattcttctacgatcaatgaggttgggctctggtatggccggcaaaacggatcaaagcaatttgttcttgagcacagaacccctttgatggttgctgccacttatggtagcattgatgttatgaagatggtacttttgtgccccgaggcagatgtgaatttcgcgtgtggggcgaacaaaaccactgccctccactgtgctgcttctggtgggtctaccaaggctgttgatgccgtcaagcttcttttatcggccggggc

SEQ ID NO: 137643 - DNA, 265 bp, Glycine max
gtcttcttgcgtttgtgttcattatatatcttatttttctttattatttttgtatttttgctgaatctttccacgaatcgtatgagatcacggtgatgactccataaaattcaagctcaacagaccggaatgcagagctttctctctttcgggagattgccttgcgtgtcgataaccccgctgaactgagtgatctcttctgttttttgtttctgttttgtttttattattattgtgttcgttgaaatttttgtttctctgtttc

SEQ ID NO: 137644 - DNA, 258 bp, Glycine max
gagctctgaacaacctttttctcctgtctgggctttttctgatgctgaagatgagaggcaaatcaggattgcagcttcaggtaatacatatacaacaactgaaaatccaattgaaaatgatgacaacaaaaaaaactgtgccaccccttgtagccatgacagcttcagaaaatccagatggttattgtctgatcaaggaaagaatgacacaagcgcttcgccacttcaaagagttgactgaacagaatgttcttgctc

SEQ ID NO: 137645 - DNA, 267 bp, Glycine max
agcaactgcgattttggatcggaacctcttctgcggcgtacaactgggacactccaacgtttggaattctcacccaaaaaactacggtcctggttctcgcacttgccgagtgtgtgggaatccacatggattgatcaggaagtatggccttatgtgctgcaggcagtgcttccgtagcaatgccaaggaaattggcttcatcaagtatcgctaaaagagctgttgtcacctacggaccaatattatgttctggcactaggatgtttt

SEQ ID NO: 137646 - DNA, 262 bp, Glycine max
attgggatggtggctgatagcggtaggcacgcttcgattagcttccgtgtggttcggtttcttcgacatttgggctcttcgtctcgccgtcttctccaacactacaatgactgaagttcatgggcgcacatttggaacttggacactgttgacctgcaccctttgttatatctgcgcattcaaccttgaaaataagcctctctacctggctacttttttgtcattcatctatgcattcggtcatttcttgaccgaatatcta

SEQ ID NO: 137647 - DNA, 269 bp, Glycine max
tccaaagtttgtatagtgtaggatttgttggtattcgtgataaaaacacctcatcctattcattttgccatgacgggcgaactccagataaaggttttgaaagtaatgagaaattattaattcatccatgttactggcttggtttgaatctaaatcgtaatgcacttgctccagaggaagcagaggagataaatgacgaatatgatattaatattatttcagataattcagccattagaaataaaacaataggtcaaataactactcat

SEQ ID NO: 137648 - DNA, 263 bp, Glycine max
ctttcctctccgaaccctcgatcactctcacgcgctcctatattcgctcctccaccgtcgctctctcgaacaaccacaacaccatcttcatcacatggcaaacgcagcatctggtatggcagtccatgatgactgcaagttgaggtttttggagctgaaggcaaaaaggacacaccgtttcatagtttttaagattgaggagcagcagaagcaggtcattgtggagaagcttggtgagcctgcccagggctatgaagatttca

SEQ ID NO: 137649 - DNA, 262 bp, Glycine max
gaagaactgagtgggaaggatttgatactggtaccagagctgctgctgctggtggcgtaaccacagtggttgacatgcctctgaacaattatcctacaaccgtgtcaaaggaaaaactaaaacttaagcttgatgctgcagaggataaaatctatgttgatgttggattttggggaggcctaatccctgaaaatgcacttaatacaagtattcttgaggggctcttaagtgctggtgttcttggtatgaagtcttttatgtg

SEQ ID NO: 137650 - DNA, 263 bp, Glycine max
attgggatggtggctgatagcggtaggcacgcttcgattagcttccgtgtggttcggtttcttcgacatttgggctcttcgtctcgccgtcttctccaacactacaatgactgaagttcatgggcgcacatttggaacttggacactgttgacctgcaccctttgttatatctgcgcattcaaccttgaaaataagcctctctacctggctacttttttgtcattcatctatgcattcggtcatttcttgaccgaatatctaa

SEQ ID NO: 137651 - DNA, 259 bp, Glycine max
aatgactcaagcccagattcaaccagttaaacttggaacccaaggctttgaggtactattaactacattacttgctcttattttgataattgatacaattaatctcattctaggtttcaaaattgggattcggatgtatgggccttactggagcgtacaatgaccctctccaagaacaggatggcatatctgttatcaagtatgcgttcagtaagggaatcacattttttgatactgcggatgtttatggagccaatgc

SEQ ID NO: 137652 - DNA, 253 bp, Glycine max
  unsure (1)..(253): unsure at all n locations
ttcaattaggatgtctggccattatcctggagagacggacatagaacccccttctactcttatgtggactttgtctttattggctcagcattatgacaggcgaggccaatatgaaattgctctttctaaaatcgatgaagctatagaacatacgcctacagtcattgatctatatactgtcaagagtcggatactgaagcatgctggtgatttggttgctgctgctgcatttgcagatgaagctangtgtatg

SEQ ID NO: 137653 - DNA, 259 bp, Glycine max
gaaaacccatcacacaaaacacacatacataattcacatggacaagttcaacatgccagagagttttaacgaccatctcctctggtttgattcatcactaaaatcagtatcagactcagcagagatgctctacacatataaaaaagtagctcatggcttctctacaaggctaactacgcaagaagcagagttgctctcaaagcaacctggtgttctctccgtcatcccggaagttagatatgatcttcacacaactcga

SEQ ID NO: 137654 - DNA, 261 bp, Glycine max
cgaaaatcaattttctgtcttctctgcgtcttcttcctctctcaatcgttttccatggctcgtaccaagcaaaccgctcgcaaatccaccggtggaaaggctcctaggaagcaactcgccaccaaggctgcaaggaaatctgcaccgacaaccggtggagtcaagaagcctcatcgctatcgccctggaactgttgctcttcgtgagatccgaaaataccaaaagagcacagagcttctgatccgcaagctccccttccag

SEQ ID NO: 137655 - DNA, 261 bp, Glycine max
caatcttcaggttaagaagggtttgcttcagagtgatcaagagttgttctcaacacctggtgctgataccatcagcattgtcaacaaattcagtagtgaccaaatagctttctttaagagcttttcggcttccatgattaaaatgggaaatattggtgtgctaactgggaagaaaggagaaatcagaaaacactgtaactttgttaacaagaaatctgcggaacttgatataggtagtgtggcatccgaatcagaagaggg

SEQ ID NO: 137656 - DNA, 261 bp, Glycine max
ctattattctcgttttcaatatgcagatcttcgtcaaaaccctaaccggtaaaacgattacgctagaggtcgagtcctctgacaccatcgataacgtgaaagctaagatccaggacaaggaaggcattccaccagaccagcagcgcttgatcttcgccggaaaacagctcgaagacggcagaaccctcgccgattacaatattcagaaagaatcgacgcttcatctggtgcttcgactccgcggagggatgcagatcttcg

SEQ ID NO: 137657 - DNA, 256 bp, Glycine max
catcaccgttgattgaagaagatgccgatcagaaacatcgccatcggaaggcctgaagaggctactcaccccgacacgttgaaggcggggttggctgagttcatctccaccttgatcttcgtgttcgccggttcaggttccggcatcgcctacaacaagctcaccgacaacggcgccgccactcccgccggcctcatctccgcttccatcgcccatgctttcgccctcttcgtcgccgtctccgtcggcgccaaca

SEQ ID NO: 137658 - DNA, 257 bp, Glycine max
ctcgagccgaatcggctcgagatcacattcgaatgcaaattggcacctggcgccaacggaacggtctgctgggaagctaaatgtcaaataccaaaccaaaggagatgctcagcccaacccagacgacctcaaaattggcaaagtcaagtctgatgctcttttcaaggccgttgaggcctaccttttggccaatcctcattacaactgatccaattcgatcttcagtattcagtgatctgcaaagaccttgttttata

SEQ ID NO: 137659 - DNA, 256 bp, Glycine max
gttgagtatgctaaaagatttagagatgaagagaacccttcttggccagaagcacgagattttgtttccatcacaggacatggagtaaaggcctctgttcataataaggaaataattgtgggtaataagagcttgtttgctgaccataacattgcaattcctgatgatgctgaatatatacttgctgaagccgaaaagatggctcaaacaggaattgtagtatctataaatgggaaagtagctggggttttagcag

SEQ ID NO: 137660 - DNA, 261 bp, Glycine max
agcaaacacggccttgttggagttgttcgcaagaaaccggagcgttgattttcttctatttctcgatcgtcttcacgaggaagaatggcaaagagttacttcaaacaagagcatgatcttgagaagagaagagctgaggctgctaggattagagagaaatacccagaccgtatcccggtgattgtggagaaggcagaaagaagtgatatcccaagtattgacaagaagaagtaccttgtccctgctgatctgacagttgga

SEQ ID NO: 137661 - DNA, 265 bp, Glycine max
caaaatcagcctctaatatttttctcactgtctctccagagaacttgatagagagatggcagctgcaacatctggtgctgtgttaaatgggttgggatcttccttcttgagtggaggaaacaggagccaaacccttctggccactgctattggaggcaaagttggtgctgctgttactgttaatcccagaagactcattgtggtagctgctgctgcaccaaagaagtcatggctccctggtgttagaggtggtggcgatctcgtc

SEQ ID NO: 137662 - DNA, 271 bp, Glycine max
gtttcatccaattatgaactgtgaagtgtaccagctcaaggaactggaactggagcattttgagatacgcgaggtcttgcgatgcatattgcacacgatcgtctttcaccgtgccttggtctcgtgcgccctaaagacgttgacttggagctatttgacgtcacttatatgcaatgtggagaggcagagcttgaaaagaaaatagatgagaagattgagcagtttgtttgttgggtggagaagcacccaaacaagaagagtcagatatgtt

SEQ ID NO: 137663 - DNA, 264 bp, Glycine max
atcatcatcgtcatcaccgttgattgaagaagatgccgatcagaaacatcgccatcggaaggcctgaagaggctactcaccccgacacgttgaaggcggggttggctgagttcactccaccttgatcttcgtgttcgccggttcaggttccggcatcgcctacaacaagctcaccgacaacggcgccgccactcccgccggcctcatctccgcttccatcgcccatgctttcgccctcttcgtcgccgtctccgtcggcgccaa

SEQ ID NO: 137664 - DNA, 260 bp, Glycine max
attcgtataggaacacaaaaaatggcagatattcctcgggtgaagcttggaagccaaggcctgaaggtttccaagttaggatttggttgtatgggcctaagtggagtgtacacgatcctgttcccgaagaggttggcatctctttgatcaaacacgcattcaccaaaggggtcactttctttgattctgcagatttttatggagcacgtgccaatgaagttttggtcggaaaggctctcagggactttcctcgagatcaa

SEQ ID NO: 137665 - DNA, 257 bp, Glycine max
gtggtagcagcagctgagcttgttcccgtcgccgcttcacccaccgtagcaaccatgatcattcccgagaagaaccgtaaagagatctgcaaatacctcttccaagagggatttgctttgcgaagaaggacttcaatctggcaaagcacccagagattgatgtgccgaatctgcaggtgataaagctgatgcagagcttcaaatccagagagtatgtgagggagacatttgcgtggatgcactattactggttcctc

SEQ ID NO: 137666 - DNA, 255 bp, Glycine max
gccatttgggagttaggttctgcacgctctgcttccagcgagtgttctttcttcgtttcaacaccttaatttgcacacgctgcttcttcagcttgagaaatggcacaaaaacctttctattcacatctgaatctgtaaacgagggtcaccccgacaagctgtgcgaccagatctctgatgcagtgctcgatgcgtgccttgaacaggaccctgacagcaaggttgcctgtgagacatgcaccaagaccaacatgg

SEQ ID NO: 137667 - DNA, 253 bp, Glycine max
  unsure (1)..(253): unsure at all n locations
ggtttacaccgagcagcgacacctccctcccgcagtagccatggttctcaaaactgaactatgccgattcagtggtgccaagatctaccacggatagggcatcatatntttcgttgtgattctcaggttttactgtttgccaactcaaaatgcaagcagtatttccacaaccgcctgaagccctcaatcctcacctggactgctatgtacagatagcaacaccaaaaggacattgctcaagaagctgtgaaga

SEQ ID NO: 137668 - DNA, 256 bp, Glycine max
gtgcagaagagcgtcgcagtcgaaccctaatcagaagaagcgcacttcaagcgagtgacagccaccagccatgggtcgtatgcacagccgcggtaagggtatatcctctctgctttgccctacaaaaggacacctcctagctggctcaagatctcttcgcaagatgtcgaagaaaatatctgcaagtttgcgaagaaaggtttgaccccgtctcagattggtgtcattctcagagattctcacggtattgctcagg

SEQ ID NO: 137669 - DNA, 264 bp, Glycine max
tagcaatgacactgttggacagtatgagtctgacacagcctttacccttcctggactctaccgtgttgtgcacggcattgatgtctttgatccaaaattcaacattgtctccccggagctgatcaaaccatttacttcccccccaccgaaactagccgtaggttgacctccttccaccccgaaatcgaagaacttctttacagctctgtggagaatgaagaacacatatgcgtgctgaaggaccgcagcaagccgattatcttc

SEQ ID NO: 137670 - DNA, 257 bp, Glycine max
agttagtccatagcaatggcatcgcaagacaaggtgatcctacacgggatgtgggccagcccttatgccaagagggtggaattagcccttaattttaagggcatacccttgagtatgttgaagaagacttgagaaataagagtgatttgcttctaaagtacaaccctgttcacaagaaggttcctgtacttgttcataatggaaaggccattgctgaatccatggtgatacttgagtatattgatgaaacatggaaa

SEQ ID NO: 137671 - DNA, 253 bp, Glycine max
tctcaatgggttcttcttctattacaacatcgccctcaaccatgaccatggctgcgatcgtgctcctgttcacggtctttgccgtttcctccgccctagacatgtcgaaatctcgtgcgacagcgcccacgcggacaacgccgccacgttgcgcaccgaggaggagctgatgtccatgtactagcagtggctcgtgaagcacgggaaggtgtaaaacgcgctcggcgagaagcagaagcgcttccagatcttc

SEQ ID NO: 137672 - DNA, 255 bp, Glycine max
agcaggtacagataccactgcagccacatcagtttgggctatgacagccctagtaaaaaaccctagagtaatgaagaaagttcaagaagaagttagaaatgtggggggacaaaagatttcttagatgaagatgatattcaaaaacttccctatttcaaggcaatgataaaagagacgttgagattgcacctaccaggtccactacttgtaccaagagaatcaactgaagagtgcattgtagatggctaccgaatt

SEQ ID NO: 137673 - DNA, 161 bp, Glycine max
aatcacttggtgtcagatgggttatctccggagaaggatctgatgagtctttggagggtatcggtacttccacaaggcatccatcaaggacgagtttcacagatatcatgccgcaagatcatagcattccaccagtaagcattactagcgagccagtaaat

SEQ ID NO: 137674 - DNA, 255 bp, Glycine max
gctcagaaaactcaccaccctcaaaactattgatgaaggagacagtagcaagctgcagaagacgttgtcgatgccgtcgacaccgacaatcccgatgactcccacgactcaacgacaccgggatccgcgcgtaaagctgacaacgtttggaggagcgtcttccatcctgggagcaactccgccacaaagaccatcggtgctcagatgtttgacaaaccacttcccaacactcccactgtctacgactggctgtac

SEQ ID NO: 137675 - DNA, 268 bp, Glycine max
atgtatcagagtcattagagatgcgttgtattgctaagaagaaaaaatatgaaggttgtctacttgcttgttgccgctcttggctttgacatcaactgttgtcactgcctatgccctagtcgctgctgcaagatttttgtgtggcagccaaagaaaaagatggtgtatttgtgaacgggaaattctgcaaggaccccaagcttgtcaaagcagaggatttcttcagacatgtggaacctgggaaaactgacaacccactaggttcaaa

SEQ ID NO: 137676 - DNA, 254 bp, Glycine max
gtcgaatttcctgagcaatctaatccgaaccctaataagtccttcgaggtgaatcagcctcccactgattccgtgtccagtcttagcttcagtcccaaagccaactcctcgtcgccacttcttgggacaatcaggttcgttgttgggaggtagcacggaatggagtaaatgttgccactgttcccaaggcttctataacgcacgatcatccggttttgtgctctacatggaaggatgatggcacgactgtattc

SEQ ID NO: 137677 - DNA, 254 bp, Glycine max
  unsure (1)..(254): unsure at all n locations
gaaagaagaaggctgtccacaagacaacaaccacagatgacaaaaggcttcagagcaccctgaaganaataggggtgaatgccatcccggctattgaggaggtcaaatctttaaggatgacgtagttatccagtttctaaatcccaaagttcaagcatccattgctgctaatacttgggttgtcagtggttctccacaaacaaagaagttgcaggatatactccctagcattatccaccaattaggaccagatg

SEQ ID NO: 137678 - DNA, 251 bp, Glycine max
tgcaagttaagccaatcagtttccctgaatgcagcttggactatcaagactacactccatgcacagatccaaggagatggagaaagtacggcatgtaccggcttacttgttagaacgccattgtccttcagtttttgaaaggaaagaatgcttggttcctcccccagatggttacaagcctccaatcagatggccaaagagtagagatgaatgttggtacaggaatgtgccgtatgactggatcaacaacc

SEQ ID NO: 137679 - DNA, 254 bp, Glycine max
ctcgagcgaaaaaaaaacatgtcggatgctttgatcaatggattggccggagctggaggagggatcattgctcagctcatcacatacccacttcaaactgtaaacactcgccaacaaaccgagcgtgatccgaagaaagacacgaggagtcaaggggccctcgaacgaatgtgccaggttgtaaaagaagaggggtgggaacggttgtatggaggcttgatgccatcggtagtgggtacagctgcgtctcaggg

SEQ ID NO: 137680 - DNA, 251 bp, Glycine max
atcatgaaccaccctggtcagattggaaatggctatgcccctgtcctcgactgccacacttctcacattgctgtcaagtttgctgaactcatgaccaagattgaaggcgatccggcaaagagcttgagaaggagcccaagtttttgaagaacggtgatgctggttttgttaagatgattccaacaaaacccatggttgttgaaactttctccgagtatcctccacttggtaggtttgctgttagggacatg

SEQ ID NO: 137681 - DNA, 253 bp, Glycine max
gttcaggctttaatattgtcaccaacgagggaactggcctcacaaactgagaaggttatattggctattggggatttcatcaatatacaagctcatgcatgcgttgaggtaaaagtgtgggagaagacataaggaaacttgagtatggagttcatgtggtgtctggaactcctggccgagtttgtgacatgatcaaaaggagaacattacgcacaagggctatcaagatgctagttcttgatgaatctgatga

SEQ ID NO: 137682 - DNA, 258 bp, Glycine max
atcgttgtgatgttaattcttctgggtcggaaaatagtagttcctaatataagtgcttgttgttcaatttagtcccaaaatggttcgcgtccttgagctttctcgcagatgaagcaccgtggtcctgactggagtgggctccaccaatatggtgataactatttggctcatcaaaggttagccatagttgatccagcgtctggtgatcaacccctcttcaatgaagacaaaactgtagtggttacggtgaatggagag

SEQ ID NO: 137683 - DNA, 252 bp, Glycine max
agctgaggatgttcaagggaaaaatgttctgacaaacttttggggaatggatttcacaactgataagttgaggtccttggtgcggaaatggcaaactttaattgaactcatgtggatgtcaagaccactgataattatacgttgaggatgttctgcattggctttaccaagaggcgtagtaatcaggtgaagaggacctgttatgcacaatcaagccaagtcagacagattcgcaggaagatgagagagata

SEQ ID NO: 137684 - DNA, 254 bp, Glycine max
atctggtcatcgttgggactccatacgccggatctgctaaaatacgcttgatccatatgggcctcctcgaccacttgtgggacgacaccgtcgccggcccaaggccggaaaacggtctcggcaagctccgaaaacaccacaccttcactttccgacctagctccggcaaggaaacggagggcgggagcgtgagatcgtacggagacgaatcgtcggaggaagcaacgagagtgacgcgtagtatcatgatcgtg

SEQ ID NO: 137685 - DNA, 251 bp, Glycine max
aaggtagccgtgagaaacatgggggatcacaggtgaaattgaatgtgaaatgggcctctgatgtgtatgatcctatacctacattattatcacacactgttagagcaacaagaagcagcagaaatccaggaagaagaagcctgaaaagaagaatggaaagaagggtcaaaagggaaattcatctcgagggggcagcaacaaagataagcaggttcgcaagctaggtgggacttctggtttgtgctacaagt

SEQ ID NO: 137686 - DNA, 253 bp, Glycine max
cagatggtgtgagtttggcaagaaatacatccaacaacgcccgtcgagggttgccaatgatccaaacaaacatgaagccaacggattcggaattccaagtgtgcacgacgacagcaccccgccggtcagagcccaaaccattcacgagctccattctctgcagaagaaaaagtcaaccccttccactcccctctcagcaacgcaaggccccttcgccactgtttccgatgaggaacgccagatacagcaactc

SEQ ID NO: 137687 - DNA, 248 bp, Glycine max
gcctgcaggttctgaagatggatatgctaaggttgagatcctaaatgaacagcatcaagatttaagtgcagccaaagtatcactcggtgtgctgggagttattcacagattactctaaaactagaacccctcttcaagcgatccatcacttatgtggaaaaagatgattcagatttgggagaccaagctgctgcttttggagatgcacatgagtttggagatatactgtggtacccaagtcaacgcaa

SEQ ID NO: 137688 - DNA, 251 bp, Glycine max
ggtagggtccagcggctggaagagcaccgcacgtcgcgtggtgtccggtgcgcccccggcggcccttgaaaatccggaggaccgagtgcctcccacgcccggtctactcataaccgcatcaggtctccacggtgaacagcctctggtcgatggaacaatgtaggcaagggaagtcggcaaaatggatccgtaacctcgggaaaaggattggctctgagggctgggcacgggggtcccagtcccgaacccgt

SEQ ID NO: 137689 - DNA, 220 bp, Glycine max
accctatacagcaacaattgtttctgttgataggctagtggggccaaaggctcctggggaaacttgtcatattgtgattgatcacggtggaaatgttccctactgggaggacagagttatggtgttattccaccaggtgaaaatcctaagaaacctggggctcctcataatgttcgactatattcaattgcttccacaaggtatggggacttttttgatg

SEQ ID NO: 137690 - DNA, 251 bp, Glycine max
ccaagttatcttggagtggttctcagacttatcttagtttcctaatcggcaaggcacgtccaaagagcttttctacttcaccggcttccattttaagcccataagaatctccatttcttcttttgataaccctcttaagaaattttcctcgtcttcttgaaacattttgaacccttctgccaacttctgaaataaggtcgcctccgttttccccaccttctccacctcttcttctatctgttcaacttccc

SEQ ID NO: 137691 - DNA, 248 bp, Glycine max
cttccacagggatctcaagcttgagagtgtactagtggataacaaagggaacatcaaaataactgattttggtcttagtgctttaccccagcatcttagggagatggattgctgcatacaacttgtggaagtcccaattatgttgcaccagaggtacttgctaataagggctatgacggtgcagcatcagatacatggtcatgtggtgttatattgtatgtgatcctaacaggacacttaccttttga

SEQ ID NO: 137692 - DNA, 250 bp, Glycine max
caaacactcttctctgcagcttttgcctacaactcccttcaccatggctgaacaaaccgagaaagcttttctgaagcaaccaaaagtgtttctcagcacaaaaagactgggaagggaaagagacctggaaaaggtgggaaccgcttttggaagtccattgggcttggatttaagactcccagggaagccatcgaaggaacctatattgacaagaagtgccccttcactggcaatgtttccatccgtggcc

SEQ ID NO: 137693 - DNA, 248 bp, Glycine max
ctgaactgaattgagtctcaacaacccagttgagtaactaagatggcgcaagtgaggaacaagcaagtgcttctaaaggactatgttaccggttttcccaaaaatccgacatgaatattgtcgaaagtaccataacattgaagcttccacaaggttccaatgatgtcttgctcaaaaatttgtatttgtcttgtgatccgtatatgaggaatctcatgaacaggcccgaagccctcccaatagtcgtg

SEQ ID NO: 137694 - DNA, 250 bp, Glycine max
aatcacttggtgtcaatgggttatctccggagaaggatctgatgagatctttggagggtatctgtacttccacaaggcacccaacaaggaggagtttcacaggaaacatgccgcaagatcaaagcactccaccaatatgattgcttgcgagccaataaatcaacatttgcttggggtctagaagcccgtgtaccatttttggacaaggcatttatcaatactgcaatgagtattgaccctgagtcgaaaa

SEQ ID NO: 137695 - DNA, 251 bp, Glycine max
tgtgatatattatatcatatcacagtgtgtcggatacatcgccatcggaatgcctgaagaggctactcaccccgacacgttgaaggcggggttggctgagttcactccaccttgatcttcgtgttcgccggttcaggttccggcatcgcctacaacaagctcaccgacaacggcgccgccactcccgccggcctcatctccgcttccatcgcccatgctttcgccctcttcgtcgccgtctccgtcggcgc

SEQ ID NO: 137696 - DNA, 250 bp, Glycine max
ctttgtttgcttctcaagtctctcgaagcctctttctctctcttgtagaagctatctgtgtttggtgttactaagtctccaacaagcaaagtacatggttgattggaaatccaggtccccaccccattcgacccgtttgccgaggcgagagaatcggatgcccccggagcaaaggagtatgtgcatattcgaattcagcagaggaatgggaagaagagtctgaccacagtgcaagggctgaagaaggagt

SEQ ID NO: 137697 - DNA, 243 bp, Glycine max
aagggcatgcacgtacggcctcggaggggaaccagaaaattatgttaacaaaataatctggaaccctaatgtatcagtgtcatcatcagtgtgtagtttagctagctttgctatggttacgttctttgagatgagagtcttgatgaacagtaccattctgatgtattgctttccttgaaagttaatgcatgcttcttatcttctgtctagctaaaaaaaaagaacgctaatcccgcatctaaa

SEQ ID NO: 137698 - DNA, 248 bp, Glycine max
ctccctttcctctccgaaccctcgatcactctcacgcgctcctatattcgctcctccaccgtcgctctctcgaacaaccacaacaccatcttcatcacatgcaaacgcagcatctggtatggcagtccatgatgactgcaagttgaggtttttggagctgaaggcaaaaaggacacaccgtttcatagtttttaagattgaggagcagcagaagcaggtcattgtggagaagcttggtgagcctgccc

SEQ ID NO: 137699 - DNA, 248 bp, Glycine max
gcagagacttggaggaccagcctcgaggagcgcggtggcgtggaaaacgtgaagacccctgacgtccacactttcttgcagcacgtcgttaccttcgggatgtcaagaacgaggactccgatttgtaccggaagcttgttattgcttccgcttggaggaaacagatgccgaagctcgcgctttcgcttggtctcgctcagcaaatgcctgatatgattgaagagttgatcagcaaagggcagcagctt

SEQ ID NO: 137700 - DNA, 245 bp, Glycine max
cctccgctcaacaactataataacatctttctctctccgaacagatcacactatggccacctcaagcgccaaatcagtccatgatttcaccgttaaagatgcaagggaaatgatattaatcttggtgactacaaaggaaaggtccttatcattgtcaatgttgcctcacaatgtggcttgactaattcaaattacactgagctcagtcagttgtatgagaaatacaaacagaaaggtctggaaat

SEQ ID NO: 137701 - DNA, 242 bp, Glycine max
acaaaatccatatgaacaagctatatctatcattgggaaaacattgtcttcctttgatgaggataacttaattccctgttctggttttggagatgcatcacacatgaccaggaagtttttagtttctatccggatgagagattttgtcgtggatttgaagaagtgttggaacggtacagggagttggtccctcaattaaagcttgcaggaccaacatcatttgccccagtcattgagatggc

SEQ ID NO: 137702 - DNA, 247 bp, Glycine max
cttagcttcttctttcaagctaagatttacccttgcactaattactgatctataactacattttgagcacctcttatttagttaatcgattacaaattatgcaagggttgctcttagcttcttcatttcaagcttttgcttacactttgcagtgctatggcaaagataagagtatcatggatggaataagggggggaaaaatactgtgtttgtactccaaattatgaataatagaactttatattgt

SEQ ID NO: 137703 - DNA, 251 bp, Glycine max
gaacaaacaaatatgcaagtggcggcagaactccaacgcgcccatcaccaccaccaaaggcacaaacaagacactcccatgtgccgccaaatccagctcacttctccgatcacaccaccgccggagacgacgacggcgaggatctcttcattccgcccctcaacttcgccatggttgataatggcattttccgctccggcttccccgaacccgccaacttctccttcctccaaaccctcggcctccgttcc

SEQ ID NO: 137704 - DNA, 239 bp, Glycine max
aaaagaaaaaagagaaacaaatggcagcactgggtggctttaccgacatcaccggagcacagaacagcatcgatatcgaaaatctcgctcgctttgctgttgataacacaacaaaaaagagaatgcagttctggagtttgtgagggtgattagtgcaaagaaacaagtggtttctggcaccttgtactatatcactttggaggcaaatgatggtgtgacgaaaaaggtttatgaaacta

SEQ ID NO: 137705 - DNA, 245 bp, Glycine max
ctcgagcgaatcggctcgaggtgagagagaaaaatggagggagaagaggaagatgtttccttgggagctaacaaatactcagagaggcaaccgattggaactgcggctcagagccaagacgatggaaaggactacacagagccacccccggctccacttttcgagccctccgaactcacttcttggtccttctaccgagccggaatagccgagtttgtagccattttctctttctctacataacc

SEQ ID NO: 137706 - DNA, 240 bp, Glycine max
tgcagaaggtagagagagagagagatggagagcatagagcacagaacggtggaagtgaacggcataaagatgcatgttgcagagaaaggagaaggagcagtggtgttgttcttgcacggcttcccagaactctggtactcatggcgccaccagattctagctctgagctccctcggttaccgtgcggtggcacctgatctccgtgagctacggtgacaagaggccccttctacggtgaac

SEQ ID NO: 137707 - DNA, 251 bp, Glycine max
gaaagagtggtttgtgcggtggtgaagaagcgttcggaatagaagaagaagatgtcgtcggtttacgttctagagcctccgacgaaggggaaggtggtggtgaacactacgcgcggtcctttggacattgcgctgtggccgaaagaggctccgaaggccgcgaggaacttcgttcagctctgcctcgaaaactattacgacaacaccatcttccaccgcatcatcaaggccttcctcgtccaaagcggcga

SEQ ID NO: 137708 - DNA, 248 bp, Glycine max
cagggagtcaagcgtggctaagatcaccgatacgccactttctcacatatctgatgctgtatataaaacatcaatcgactggattaaccaccgttctcctgaggcacttagtacctttctgatttggtctttagatagcattcttgctgacttgggtagccagcaaaatgtggccaagggttccaaaaaggctgtgcaacaagtgtcctcaaaatctcaggttgcaatgttcgttgttttagcatggt

SEQ ID NO: 137709 - DNA, 248 bp, Glycine max
ggatatgacccccccctctctctctctcacaaacaaaagatagaagaaaaaaaaatctcaaaataaaacaaccaaaccacacacttcacaccctcttcaacatcctcagcaagtacaagaacaagaagaaacaatgtcttgctccaatctcacaatgttggtgtcctcaaaaccttccctttccgatccctccaatctctccttccgctctgtcctcaaccttttcagctccttcacaaaaccaattc

SEQ ID NO: 137710 - DNA, 238 bp, Glycine max
gttaccatggccatgctgatccttttcttgttaaggcaggtagtggagttgccaccttgggacttcctgattctcccggtgtccccaaagctgccacttttgaaacccttacagccccctacaatgacactgccgccgttgagaagctctttgaggctaacaaaggagaaatcgctgctgttttcctcgaacctgttgttggaaacgctggtttcattgttcctaaaccgattttcat

SEQ ID NO: 137711 - DNA, 247 bp, Glycine max
atagttggtgttagtcttggtgtagtgtagctagggagggatatatatctgagtaagatggcatcagagcttgaattgcccccaggcttcagattccatccaacggacgagccgctggtgttgcactatctctgccgcaaatgcgcgtcgcagccaatcgccgttcccatcatcgccgaaatcgacctctacaaatacgacccctgggacttacccggattggctacttatggagagaaagagtggt

SEQ ID NO: 137712 - DNA, 240 bp, Glycine max
cctaacaccaaaaccagaagcgaaatcgcaatcgcaatccagcgaatatgaaggtcgtcgctgcatacttgctcgcagtgttgggagggaatccttccccttctgccgatgacatcaaacacatcctcggcgcagttggagctgaggctgagaatgagttgattgagttgctcttgactgaagtcaagggaaaagacttcaatgagctaattgctagtggaagtgaaaaatgtctgcatg

SEQ ID NO: 137713 - DNA, 241 bp, Glycine max
gattaagaaagcccaaagaaagaagaagatggcgtccgagtgcaaaggtaagagctcatggcctgagttggttggagtggaaggaacggtggcggtggctacaattgagagggagaatcctttggtggatgctaacactgtgcttaaaggatccatcgtcaccgctgattttcgatgtgatagggttcgggtttgggtcaccaaacatggattgtttatcaggctccaagaatggataaga

SEQ ID NO: 137714 - DNA, 241 bp, Glycine max
ggaaaagttagggttttgcattttggatcagtcagactcagacatgggaggaggcaatgcccagaagtcaaagatggctcgcgagaagaatctcgagaagcagaaagcagcggctaaggggagccagttggattcaaacaagaaagctatgtctattcagtgtaaggtgtgcatgcaaacatttatatgcaccacatcagaagtgaagtgtaaggagcatgctgaagccaaacaccccaaa

SEQ ID NO: 137715 - DNA, 245 bp, Glycine max
ctctttctagaatcttccaattccaaccttattttttcttcaatcacaccattaacttactgagtagcgagaacgagtcatggaatccaaacccggtcaaactatcaagctcctctgcagctacggcggcaagattctccctcgcgccaccgacggcgaactccgttacgctggcggccacaccagagtcctcactgtcgcccgttccatttccttttcagaattgatggtgaagctaagcgagt

SEQ ID NO: 137716 - DNA, 247 bp, Glycine max
ggctgtcttatgcaagaatggcgtggccaaacaactatcagtggatcatgaaccaagcatagaaagtgaagatataagaaacagaggtggttttgtgtcaaacttcccaggggatgttccacgtgtcgatggtcagttggcggtgtcaagggcatttggtgacaaaagcctgaagatacatttgagctcagaaccatatgtaactttggagatgatagaagatgatgcagagtttcttatactagcc

SEQ ID NO: 137717 - DNA, 240 bp, Glycine max
gttcgaatccattttattattcataatgggtattttcacatttacggatgaaaccacctcccctgtggctcctgctaccctttacaaagctctagttacagatgccgacaacgtcatcccaaaggctgtcgaagccttcaggagtgttgaaaaccttgaggggaacggtggccctggaaccatcaagaagatcactttcgttgaggatggagaaagcaatttgtgttgcacaaatagaat

SEQ ID NO: 137718 - DNA, 248 bp, Glycine max
ctttgtttgcttctcaagtctctcgaagcctctttctctctcttctagaagctatctgtgtttggtgttactaagtctccaacaagcaaagtacatggttgatttggaaatccaggtccccaccccattcgacccgtttgccgaggcgagagaatcggatgcccccggagcaaaggagtatgtgcatattcgaattcagcagaggaatgggaagaagagtctgaccacagtgcaagggctgaagaagg

SEQ ID NO: 137719 - DNA, 244 bp, Glycine max
gttgctactggtggcatgccctgataatgagtggttgtgtgttgggcttgtgcgtgggcataggaggttgtgtatgtgtggtggagaacgagaatggaagaatcatcattgatattagtcacaggtaccatcctgatatgcctgcctgggaatccaaggatagccttgggcagtttttgtggcttacaagaagcatggccaatggttctctggctaacttctcccaattcaagctccccgctca

SEQ ID NO: 137720 - DNA, 241 bp, Glycine max
gtctaatcactctagctgttgcaaatttctactatttttcaatgggctctgcagatgttgagttccgttgctttgttggtgggcttgcttgggtcaccggcaacgatgccctcgagaaagccttttcaatctacggcgacatcgttgaatcgaaggttatcaacgaccgtgagactggaaggtccagaggattcggatttgtgaccttcgcctcagagcagtcaatgaaagatgcgatcgc

SEQ ID NO: 137721 - DNA, 242 bp, Glycine max
gtccgtgtttgacctgttatagtaaacagtgatggctgaaagggacttgaggcttttgggtgcttggttcagtccatttgccctgagggtgcagattgcccttaacctcaagggtttggattatgaggttgttgaagagactttgaatcccaaaagtgaattgcttcttaagtccaaccctgtgcacaagaaaatcccagttttcttccatggagataaagtcatatgtgaatctgcaatca

SEQ ID NO: 137722 - DNA, 230 bp, Glycine max
ctttagccgaggtcaggaggagcactagctaagttcacaatttcaaaatggctaggggactaaagaagcatttgaaaaggctcaatgctcctaagcattggatgcttgacaaactgggtggtgcatttgcgcctaaaccctcatctggaccacacaaatcgagggagtgcctccccctcattcttattctgcgaaaccggctgaagtatgctctgacatacgtgaagtca

SEQ ID NO: 137723 - DNA, 244 bp, Glycine max
agattacactttctatctcatttccaatctcattttcgttcggttcaacactctcatggcatcagacaagaagattaggatcggcatcaacggatttggaaggattagccgtttggtggccagggttgctcttcagaggaatgacgttgaacttgttgctgtcaacgatcctttcatcaccactgattacatgacatacatgttcaagtacgacaccgttcatgggacgtaggaacttttgatg

SEQ ID NO: 137724 - DNA, 245 bp, Glycine max
ggcaacaaaaagaaagaatcccaggcgaggagaaagatggaggggaaggagcaggatgtgtcgttgggagcgaacaagttccccgagagacagccaattgggacggcggcgcagagccaagacgacggcaaggactaccaggagccggcgccggcgccgctgcgttgacccgacggaatttcacgtcatggtcgttttacagagcagggatagcagattactggccacttttctgtttctcaaca

SEQ ID NO: 137725 - DNA, 108 bp, Glycine max
ggacgcctcagtagaccatggcctcattgggtgggttacaaaatctaagcggcatcaattctccttcaaaaaagagggtccaaaagtcaatgcgcagttcgagctgac

SEQ ID NO: 137726 - DNA, 240 bp, Glycine max
tgctgtggctttctgtgtggatctggctgtgatggaggatatcccttatatgcatggcgatacttagcccaccatggtgttgtcactgaagagtgtgacccatattttgatcaaattggctgttctcatcctggttgtgagccagcttatcggactcccaagtgtgttaaaaagtgtgtaagtggaaaccaagtttggaagaagtcaaagcactatagtgttagtgcatacagagtcaac

SEQ ID NO: 137727 - DNA, 240 bp, Glycine max
ggaaaataaagattcattagaatattataaaataacaaataatagaacaaaacaagattctttagttatatatgtaaaaaaaaaatggtttatttataagaatacatattccatacaatatcaaaacaaaatataaaaatttggaatagattctatgaaatctcaaaaaaatcccgctattcaattattcattaaacatatgaatattagtgcatattattttatcgattagattaaata

SEQ ID NO: 137728 - DNA, 235 bp, Glycine max
gaattgttatgggatctcttggtatctggggtacgacccgatgatgtatgctcacaggttggcttatgtttcaaaaggactaaatcagagagcaatggaattgagatggtgaccgaaaaggaacagagagagttgtcaactaaagatactgctttgtgcacttcctgtcagatgctcgtggtttggattcagaatcaacaagaacaaaagaagaccaaggagatagtcattcaac

SEQ ID NO: 137729 - DNA, 237 bp, Glycine max
gttagatctgtacccgcctagcaattgatttggaaaagtccaagcttcaaagatgagtaagctttagagtgatgcttttagagaagctatctcaggaatcatgactgattccaaggaaaagaacaggaaatttgtggagaccattgaactccaaattaggctgaaaaactatgatcctcagaaggacaagcgttttagtggctctgattagttgcgtcacattcctgccccaagatg

SEQ ID NO: 137730 - DNA, 235 bp, Glycine max
gttgggactgtgtaccatggaaaatggagaggatcagatgttgcaattaaaagaataaagaaaagctgcttcgctggtcgatcttcagaacaagaaagattgaccatagagttctggcgggaagctgacatactttccaagcttcaccatccaaatgtggtggcattttatggtgtagttcaggatggaccaggagcaacattagcgactgttaccgagttcatggtggatggtt

SEQ ID NO: 137731 - DNA, 237 bp, Glycine max
cggctcgagcagcactcaaaaacctagagcgaagagcgtgaaggcaccggccgccggccatgacattcaagcgcaggaacggaggtcgcaacaaacacggccgtggccatgtcaaattcatccgatgctccaactgcggcaaatgctgccccaaggacaaggccatcaagaggtttcttgtgaggaacttgttgaacaggctgcagtcagagatgtgcagaagctgtgtctatgaac

SEQ ID NO: 137732 - DNA, 248 bp, Glycine max
ggtttcgcagatggtacaatcctccttgggtctctgatgctactccagccatgcacttatgatcctctcgtatgtaaggcacacctttgagcaggcagtcataaacagattgatgactgatgtgccttttggtgttctactctctggaggtttggactcttcattggttgcatccgtcacttcttcgctacttggccaacacaaaggctgctgagcagtggggcatcatagttacattcattctgtgt

SEQ ID NO: 137733 - DNA, 229 bp, Glycine max
tacagtttgtagtagtgtacaggagagatggtgatagatggagttgagcatgatagtgttggtgaaagttgcttcgttgcttttcctattgggattcactgcaacagttgttgatgctcgcttcgatccaagttcattcatcactcagtttctcgccaatgctgaagccaacaattactatgctaaatccacaacaatagcgtgctgtaacagctgtccttgcacaaat

SEQ ID NO: 137734 - DNA, 239 bp, Glycine max
aattagttcattctctttgcgcagttccctacctctcctttcaagatgcagatcttcgtcaagaccctcaccggaaagaccatcatccttgaggtgtaaagctctgacaccatcgacaacgtcaaggccaagatccaggataatgatggaattcccccggatcagcaacgtctcatcttcgccggaaagcagctcgatgactgtcgtaccctcgccgactacaacatccagaaggagtc

SEQ ID NO: 137735 - DNA, 240 bp, Glycine max
cgttcttcttcttttgttgttctgtgtttgtattttctctcacctgaaaatgtcttgctgcggtggtaactgtggttgcggaagctcctgcaagtgcggcaacggctgcggaggctgcaagatgtacccagacttgagctacactgagtcaaccaccaccgagaccttggtcatgggagtggcacctgttaaggctcaatttgagggtgctgaaatgggtgtgcccgctgagaacgaggc

SEQ ID NO: 137736 - DNA, 138 bp, Glycine max
agatcgcagagtggtttttgaacagaaagaagggttacaaggatggcaggtactgtgcgggttgtgtgtagtgctcttgatatgaagctcagcgagatgttgagagactcaggaagatcagaaaccagcgtggtttga

SEQ ID NO: 137737 - DNA, 278 bp, Glycine max
tcggctcgaggttggtgatcaatgattgcagcgagtatgatgttgatggggccgaagaagagctgaactttgatgtggaggaccggaagcctgaccatcttcttccatcaaacctcgggatggagagaatgaggggaaggatgccaattcagcaaccttctcatccaatgaagggagatgttgtcacaaacctagatttcatccggaagaggaagatttctagtgacttcaacatgatgatggatcagaaaatatacacatgtgagcatccccaatgc

SEQ ID NO: 137738 - DNA, 262 bp, Glycine max
ggaattgtcttcacgacagatcggccctatcaaccaggtgagcaggtattatttcatatggaaaaaaatcaaatggggagcttttgttatcttatggatttgttccaaaggaaggcgctaatcctagtgattcagttgagttgtcactgtcactgaagaaatctgatgcgtcctataaggagaagttagagctgttgaagaattatggattatcagcatctcagtgttttcctatacagattactggttggcctttggaatt

SEQ ID NO: 137739 - DNA, 263 bp, Glycine max
gtttagaagcagcctatgcacaagcatttgggaagagtatctctctttctgagcagcagctagtggattgtgctggccgtttcaacaactttggctgtaatggtgggttgccatcacaagcctttgagtacatcaaatacaatggaggacttgagacagaggaagcatacccctacactggaaaagatggtgtatgcaaattctcagctgaaaatgttgccgttcaagtcattgactcggtcaatatcacctgggtgctgaga

SEQ ID NO: 137740 - DNA, 261 bp, Glycine max
ctcttctctcttgctcttgcaggagagagccatgtccatgcatcagtacctgaggaagattattgggaagctgtttggccaaacactcccagtcccactgcactgcgagagcttctaaagcctctccctgcaggtgttgaaatcgatgaactccctaagcaaattgatgatacacagtacccaaaaacattcttctataaagaagaccttcatccaggcaaaacaatgaaagtacaattcaccaagcgtccctatgcacaa

SEQ ID NO: 137741 - DNA, 263 bp, Glycine max
cggctcgagcggctcgagagctagctaggttgaaaatagtttggttttgtagtaagtgaggtgaggtgccaaaatggtgaagataactcttggtactttcgatgactcttttggtgttgcctctcttaaggcttatttggcagagttccatgcaactctgattttcgtgttcgctggtgttggttcagccatcgcttacaacgagcttacaaaagatgcagccttggatccaacggggctggtggcagtagctgtggcccatg

SEQ ID NO: 137742 - DNA, 265 bp, Glycine max
atataactttatggacatgcttgatggtatattttcatttgttctgctggatactcgtgacaacagttttatagtggcacgggatgcaattggggtcacttccttgtacattggttggggtttagatggctctgtctggatttcctctgaattgaaggggttgaatgatgattgcgaacattttgagtcttttccacctggtcacttgtattctagcaaagagagagcgttccgcagatggtacaatcctccatggttctctgag

SEQ ID NO: 137743 - DNA, 261 bp, Glycine max
gggaagagtatattggtggaacctactagtgggaacacaggaattggtcttgcctttatagcagcttcaagaggatataagctaattttgacaatgcctgcttcaatgagtttagaaagacgggttcttttgaaagcatttggggccgagcttgttttgactgatgcagcaaagggcatgaatggagcagtacaaaaagctgaagaaattttaaaaagtacccccaattcatacatgcttcaacaatttgataatccttca

SEQ ID NO: 137744 - DNA, 264 bp, Glycine max
gtccggtgcgcccccggcggcccttgaaaatccggaggaccgagtgcctcccacgcccggtcgtactcataaccgcatcaggtctccaaggtgaacagcctctggtcgatggaacaatgtaggcaagggaagtcggcaaaatggatccgtaacctcgggaaaaggattggctctgagggctgggcacgggggtcccagtcccgaacccgtcggctgtcggtggactgctcgagctgcttccgcggcgagagcgggtcgtcgcgt

SEQ ID NO: 137745 - DNA, 264 bp, Glycine max
acaaggagtacctaccccacaagaatgttttctctataataccgtctgcattgaccaaggatttgcgggcaagtgaattaatgttcatggtgtcacgatagtgaggaaacaaaagtttgtaaatagggtgaaccacgctcagatgcctgtttgttgctatgacgaatggctcaacaaccgcatgagtgtttagccagtggctgacgagttgatggtagcacgaatcattcacaacaacataagcctttgccagtaaccaaatgt

SEQ ID NO: 137746 - DNA, 265 bp, Glycine max
gtccttaacgctaaggatattattactcagcaaaaaatcatggaaactccaatcaagtatccgggcaatctcacccttagggtggttctcacttgcatcatggcagccagtggggggttgatttttggttatgaccatggagtttcaggtggagtgacctctatggattccttcctgaagcaattctttccgtctgtgtatgaaaaggagtctaacatgaagccttcttcaaacaagtactgcaaattcaacagtcagatactga

SEQ ID NO: 137747 - DNA, 264 bp, Glycine max
  unsure (1)..(264): unsure at all n locations
ctaaatattttcttctatctcatcctttcttttagttttatttttatttttttatcttgggtaaaaaaaatcatgggtgttttcacttctgaaagcgaacacgtttcccccgtctctgctgcaaaattatacaaagctattgtcctagatgccagcaatgtcttcccaaaagcattggtanatttcattaagagcgtagaaaccattgaaggagatggagggccaggaaccattaagaagcttactctgcctgaaggtttaggt

SEQ ID NO: 137748 - DNA, 258 bp, Glycine max
ttcaaaaattggggctggcttgtttttattgattcaagtgataattttacttgactttactcacacttggaatgatgcgtgggttgagaaagatgaacaaaaatggtatattgctttacttgctgtatcagtcggatgctacattgcagcatttacagtgtcaggaatccttttcatttggttcaaccttccggatatgattgtagcctcaatatcttcttccttgtcatgaccatgattcttgcttttgtgtttgca

SEQ ID NO: 137749 - DNA, 260 bp, Glycine max
gtagaataatcaaatttctcagatctatccgacgtcgtcgcagatccaccaaccgttatggctgccttcagcggtgatgaaacggctccgtttttcggcttccttggagccgcagctgccctcgtcttctcctgtatgggagctgcctatggcacagcaaagagtggtgtgggcgtggcttccatgggtgtgatgagacctgagctggtgatgaagtctattgtccctgttgtcatggctggagttttgggtatttatgg

SEQ ID NO: 137750 - DNA, 255 bp, Glycine max
gttgtaacttctctcttcaaccctagcttagggtttatgctctaaaaccctcccttttcaggtttattgggagagaaaaatgctcgtattgtttgaaacacccgcgggttttgccctgtttaaagtgctggatgaaggcaagctttctaaagttgaggacttgtggaagaacttttccagtgcagatactgctagacaggtggtcaagttgaaagcattttctaaatttgagaacacttcagaagctctagaggc

SEQ ID NO: 137751 - DNA, 259 bp, Glycine max
gtcgagccgattcggctcgaggttgcatcatgatgcgcaagtgtcggaagaatacctgccctgttggcattgctacccaagatccagtactaagagaaaagtttgctggagaacctgagcatgtcattaacttttttttcatgatagcagaagaaatgagagaaattatgtcccagcttgggtttcgtactgtcaatgagatggttggtcgttcagatatgctcgaagttgataaggaagtaattaaaagtaatgagaa

SEQ ID NO: 137752 - DNA, 259 bp, Glycine max
gaaggaaggagaaaggtgagtggaagatcactaaaggctcagagagaagatagcattagaagaacagtatatgtttctgagattgatcagcatgttactgaggagcggcttgctgctttattcagcagctgtggacaagtaattgattgccgaatttgtggtgatccacattctgttctccgttttgcttttgttgagtttgcagatgagtatggtgcaaggaccgctctaaatcttggtggtactgtgcttggatact

SEQ ID NO: 137753 - DNA, 268 bp, Glycine max
  unsure (1)..(268): unsure at all n locations
attcggctcgagctttgttattgcggggaaagacacgacggctgccacactttctaggttcatgtacatgctgtgtaagtatcctgaagttcaagaaaaagcagcagaagaagtgaaagaagcaacaaacacaaaaagaattagtagctataatgagtttgtgtacagtgtcacagatgaagctcttgaaaggatgaactatctccatgcagcaattactgaaactctcagactttatcctgcagttncgtggatgcaagatttgttt

SEQ ID NO: 137754 - DNA, 261 bp, Glycine max
gtgagcagcagctagtggattgtgctggccgtttcaacaactttggctgtaatggtgggttgccatcacaagcctttgagtacatcaaatacaatggaggacttgagacagaggaagcatacccctacactggaaaagatggtgtatgcaaattctcagctgaaaatgttgccgttcaagtcattgactcggtcaatatcaccttgggtgctgagaatgaattaaaacatgcagttgcatttgttcggccggttagtgtgg

SEQ ID NO: 137755 - DNA, 261 bp, Glycine max
  unsure (1)..(261): unsure at all n locations
gtagaagctaagattaacacaccaacccactagaaacatgaaaacccctaacaaagcctcattactcttattccctctcttgtccctttccttatttatcaaccattcccatgcagcaggaatcgctgtgtactggggccaaaacggtggagaaggcaccttagcagaagcttgcaacacaggacgctancaatatgtgaacatagccttcttgtccacttttggaaatggccaaaccccacaactcaaccttgctggtca

SEQ ID NO: 137756 - DNA, 259 bp, Glycine max
gtcacgggtaacaaggacatcatcatggttgaccacatgaagaaaatgaagaacaatgccattgtttgcaacattggtcactttgacaatgagatcgacatgctggggctggagaactaccccggcgtgaagcgcatcaccatcaagccccaaaccgacagatgggtcttccccgagaccaatgtcggcatcattgtcttggccgagggtcgtttgatgaacttgggatgcgccacaggacaccctagttttgtgatgt

SEQ ID NO: 137757 - DNA, 256 bp, Glycine max
gtccctttcagtattattaatttctatagagctgaagaaattaatattaatcaatcaatcaaaatggggttgtgcaaggtttcatttcctgtattatgtgtgttggggttggtcatgatcgtgagtcacgttgccaatgctcaagactcaccagcagattacgtcaatgcacacaacgctgcaagatcagaggtgggtgttcaaaacttggcttgggatgacacggttgctgcttttgcacagaactatgctaatc

SEQ ID NO: 137758 - DNA, 247 bp, Glycine max
atacatatctattgttttcagtaatggtggtggtttcacttttagcataactttgagaatatgacacgctgattagcattgtgcacatatatatgagttgcagaagcgaatatgctctatttggaaacgccaattggagttggattctcttactcaactgatacttcctcttatgagggtgtgaatgacaaaattacgggcaagtttttaatgttcacccgtctctacttgacatcaccaactttct

SEQ ID NO: 137759 - DNA, 264 bp, Glycine max
  unsure (1)..(264): unsure at all n locations
gntgatcccaaacgttcaaatccctacctgggacgcggacggaggaggagcactctccccgtcgatctcttccaatgctgacacgtgctcattattctcctcccgaccatttccgaatgttccagttcaaggtgcggaactgtnccacgtgtcaggtcccacgactggaccgagtgtccctacgcccaccccgccgagaaggctcgccgccgtgacccccgcangnaccactactacaggcacctcctgccccgattaccggaa

SEQ ID NO: 137760 - DNA, 258 bp, Glycine max
ggagaacgagaggaggggttcgggtgtgagagcgagaatcagaagatgaagaaggaagacacagtgaagctgatcagtgccgaaggttttgaatttgtggtcgacaaagaagctgcaatggtttcacagaccatacataacatgcttacttctccagggagtttcgctgagaggcagcacggcgaagttacctttcctgagatcagcaccaccattctcgagaagatttgccagtacttttattggcatctccaattc

SEQ ID NO: 137761 - DNA, 258 bp, Glycine max
ttcaaccctatccttcttagttacatatttcaattttaaaattccaattacaatgattcttccaaacatcaaagttcgttttttcttactcttttgccttattgggatagtgtcagcacagttatcctctaccttttatggcaaaacgtgtcctaatgcactttcaaccattaaatcagaagtagtgtctgctgtgaacaacgagcgtcgtatgggagcctcgttgctccgtcttcatttccatgattgctttgttca

SEQ ID NO: 137762 - DNA, 255 bp, Glycine max
gtctggggtgatgatgcaaaagagttcaatcctgagagattttcagaaggggtttcaaaagcgacaaatggcagagtttcattttttccatttggatggggtcctagaatatgcatcggacaaaacttttccttgttggaggcaaagatggctttgtcgatgatcttacagcatttctcatttgaactttctccagcttatactcatgctccgtttacagtgattactcttcagccccaatatggcgctcatgtc

SEQ ID NO: 137763 - DNA, 249 bp, Glycine max
gcgatgggtgcctacaagtatgtttcagagctatggcgcaagaagcagtctgatgtcatgcgcttcttgcagcgggtgaggtgctgggagtataggcagcaaccttccattgttcgtttgacaaggtctacccgccctgacaaggctcgtcgcttgggcttcaaggctaagcagggctatgtgatttaccgtgttcgtgttaggaggggtggccgaaagagaccagttcccaaaggtattgtttatggg

SEQ ID NO: 137764 - DNA, 241 bp, Glycine max
gtaataccgcccctttatgcgcgaagacagtgagaagaacatcaaatggagatatggtgctcctccaaattatgacgttgtcaacaaattatttgatgaaggcagaaccaaggtatggcctccgggttcacttgaagaaaaggtgcagactttagtgaagaattgggagatggacatgttccacaaggaggatttcaaggataacagcatcagtggacccatagatatacactttcagcct

SEQ ID NO: 137765 - DNA, 261 bp, Glycine max
gtagctattatactctctagagtaattgcggaatctgctagaattttctaataatggcgaaagacgttgagcaggtcacagagcaaggtgaatactccgcgaaggactaccatgaccctcctccggcaccgttgatcgacccagatgagctcacaaagtggtccttgtacagagccgccatagctgagttcatagcaacactcctttttctttacatcaccgtgttgaccattattggctacaagagacagagtgacacca

SEQ ID NO: 137766 - DNA, 255 bp, Glycine max
  unsure (1)..(255): unsure at all n locations
tacccattcatacgtggtgttgttactgctgctcttttctcttttcttttctctttagttctctcttcccctttctttttctttttcttcttcttctgagcttgtttaagcttttcttccattaacatattatcacaatgtgtggtattcttgctgttcttggttgttctgatgactctcgagccaanagggtccgcgtgcttgagctctctcgcagattgaagcaccgtggccctgactggtatgggctccatc

SEQ ID NO: 137767 - DNA, 256 bp, Glycine max
ggcgctaccaagcaacagatgatagattgctacgttcaaaccctcgccaaggttcttggcagtgaagaggaagctaagaaaaagatttacaatgtttcctgtgagaggtacttcgcatttggatgtgacattgatgaggagacatcgaataagctggaaggtttgcctggagttttgtttgttctcccagattcatatgtagatcctgaacacaaagactatggaggtgaattatttgtgaatggagagattgtgc

SEQ ID NO: 137768 - DNA, 242 bp, Glycine max
gtagcacttaagtaatcttgcttggggtgttgacaatgtagcacttaagtcattgtttcgtgaacaagggaatgtcttggaagctagggtaatctatgacagggaaagtggacgatcaagatgctttggatttgtgactttcagtagccctgatgaggtcaacagtgcaattcagtccttaaatggcgtggacttgaatggcagagctatacgagtctcattagcaaattccaagcccaagc

SEQ ID NO: 137769 - DNA, 231 bp, Glycine max
attctctttgcgcagttccctacctctcctttcaagatgcagatcttcgtcaagaccctcaccggaaagaccatcacccttgaggtggaaagctctgacaccatcgacaacgtcaaggccaagatccaggacaaggaaggaattcccccggatcagcaccgtctcatcttcgccggaaagcagctcgaggaaggacgtaccctcgccgactacaacatccagaaggagtca

SEQ ID NO: 137770 - DNA, 253 bp, Glycine max
gtccttcttacatagtatagacattctcaagccatgatttgtagacttttcaccatctacttcactttcttcttatgtttgctttttaccttcttcgttccttatgttcatagcaataaccagcttgataccaatttctatgatggatcatgccccaatttggccacgattgttagatatggtgtttggtcagccattaaaaatgacaacagaatggctgcgtccctccttcggttgcactttcacgattgca

SEQ ID NO: 137771 - DNA, 123 bp, Glycine max
gtaccaccggtttacaagcctccagtttataaaccacctgtttacaagcctccagtgtataaacccccaattgagaaaccacccgtttataagccaccagtttacacgccaccagtgtacaag

SEQ ID NO: 137772 - DNA, 255 bp, Glycine max
gttaattgcaagaatggcacttcgttgcttggtgatgtccctttctgttctcttcactcttggtcttgcgagagaaagccatgccagagacgaagatttttggcatgctgtttggccaaacactcccattccaagttcattgcgagatcttctaaagcctggccctgcaagtgttgaaatcgatgatcgccctatgcaaattgaagaaacacagtacccgaaaacctacttctatagagaagaccttcatccagg

SEQ ID NO: 137773 - DNA, 252 bp, Glycine max
caatttcagagcaggcttgaaaccctagattccacaaatccatgccagcttgatctcgcggtgcttccgtcaatggcgatcatcggcgatgcgcttcgccaggcgttcatgccgaagcgcgagtacgagagcctcagagaagaagacaaggcgtggggtaagcttcagagacccgtaacggtggcttccgtggccgtaatcgtgctcgcaatcgccgtgatcatcgttatcagtttgaaaatcgtgtttccg

SEQ ID NO: 137774 - DNA, 241 bp, Glycine max
gatgctgaattcacaaacactggattggaaaggtctgcaagtttggtagaagatttggattcgttcaaggagcacgttatacattcctgaaccttcatctcctggtcctacctatgcacaatatcttaacgagttatctgtgaaggatcctcaagcattcatttgtcacttttacaacatctactttgctcattcagctggtggtcgaatgattgggaaaaaggttaccaaacacatgcat

SEQ ID NO: 137775 - DNA, 248 bp, Glycine max
ttcctcaaccttctttcttcttatatatcgaacatggctaagtatcattcaagtgggaaaagctcttccatgactgctatagccttcctgtttatccttctaatcacttatacaggcacaacagatgcacaatccggggtatgttatggaagacttggcaacaacttaccaacccctcaagaagttgtggccctctacaatcaagccaacattcgcaggatgcgaatctacggtccaagcccagaagt

SEQ ID NO: 137776 - DNA, 276 bp, Glycine max
gtaattaaaaaagaccatgaactccaagcatggtggaaagaagttgttgagaagggacatggtgacttgaaagacaagccttggtggcctaaaatgcagactcttcgagagcttattcaatcatgttctactatcatatggattgcttcagctctccatgcagctgttaattttggacaatacccttatggtggttttatcctaaaccgtccaactcttagcaggagatggattccagaagaaggaactccagaatatgacgagatgacaaagaat

SEQ ID NO: 137777 - DNA, 279 bp, Glycine max
ttagaattaaagtagcaacaaatactcttcactacacttggcagaaacaaaatggttcaacaagaaatccgaaggggtccctggacagaacaggaggactacaaattagtgtattttgttaacatgtttggagatcgtagatgggactttatagcaaaggtatcaggtttgaaggtggagggagactgtaaataggtatgaatatttggacatgctaagttatacatgaagcacccctttaaccacctcactttgttgtaggtttgaatagaacaggta

SEQ ID NO: 137778 - DNA, 275 bp, Glycine max
tattcccctttgttgaaaataaaacaattgatcttctccaattttggatgtactagcttcatgttcaattcttgcggttggatttttcacctggatataaggataggtatttgcagcagcattgtcaccaataagcatagaatcacactgtgacgagtttgcgggcattgtcagccttggacagaacctgaacaagccctctataacagttcctggaatgcccaaccgatattcctttggatataatcctgatcctcgtgttcttccctttgtgt

SEQ ID NO: 137779 - DNA, 277 bp, Glycine max
gagagagagagcgagcagtttcagacacagagagaggggtttgggattggagggattgacgctgcgtctcttcctcttctctttcgatccatccctcattcctaatcctccaatccaaccacctcagcctcacactcacatatacacatatctgaacgcgtatcgtccctcctatggcttcaaagcgcatcctcaaggagctcaaggacttgcagaaagacccagcaacttcttgcagcgctggtccagtagctgaggacatgttccattggcaagc

SEQ ID NO: 137780 - DNA, 253 bp, Glycine max
gttcctttttctttctttgaccttttaccggttgttgcgttggcgcaaatggcattcttcagaagcgtttctgcactttctcgacttcgctctcgcgtgggccaacaatctaatctggcgaattcagttagatggctccaaactccgagctccagtaacactgatctttattctgagttgaaggaactggttccagagtatcaggaacgtgttaagaagctgaagacagatcatggaagtgttgaattaggaa

SEQ ID NO: 137781 - DNA, 275 bp, Glycine max
cagttaaagcatacggcatcgatactttagcgatacgtttgggtcaaaaatgggtattttggatttgcattatcctttttgaaatggcttttggtgttgccctcttggcaggagcaacatcttcttacctttggattaaaattgtcacgggtctgggacatgctattcttgcttcaattctcttgtaccaagccaaatctatatacttgagcaacaaagtttccactatatcgttttatatgttgatctggaagttgttgtacgcagcatacttt

SEQ ID NO: 137782 - DNA, 259 bp, Glycine max
tggaagaggaaccctagctagggtttggaagaagctgatccgagatgatggtgcagcgtctcacctaccgcaaacgccacagctatgctaccgtatccaaccagcacagagtcgtcaagactcccggtggcaagcttgtttatcagaccacgaagaagagggccagcggacccaagtgccctgtcactgggaagaggattcaagggattccacatttaaggccagcacagtatagtagatcaaggttacgcagaaaccg

SEQ ID NO: 137783 - DNA, 248 bp, Glycine max
ttcgcagcttaggctagggttcagaaacgaaaaagggttcggtgttcagttcgcgatgagagccaagtggaagaagaagcgtatgaggaggttgaagaggaagcgccgaaagatgagacagagatccaagtagtgcgttaatccaagtagttgatttccgttgcttttataattatgttgtcaaattgggcacccgttgttagaggcacggtttctccttttgagttttgatacattttgtttggttt

SEQ ID NO: 137784 - DNA, 269 bp, Glycine max
gacgcagcgaggtagcgtcttcttcttccgtttctctgcatcggtgtgaacaatggctacatacgctgcgatgaagcccacaaagcccgggttggaggagtcccaagaacagatccacaagataaggatcaccctttcctccaagcacgtcaaaaacctcgagaaggtttgtgcggatttggttcgcggtgcaacggataagagactcagggtgaagggacctgttaggatgcccactaaggttcttcacatcactaccaggaaatcac

SEQ ID NO: 137785 - DNA, 255 bp, Glycine max
gcgaacacttgattcagctagtgtattttggagaagagatggttaagattcctgcgctggttttgctctcatacactgcaatgcacgtgccggatagcgaggaacttgctcaggctgaggtgctgggagtcattgattgggcatccaagcaatcttccattgccaacgacccagcaatcgaggcgttgttgttggagtccaagagcaggttggagctttaccagtctagaggtccaagaggattccataaattgc

SEQ ID NO: 137786 - DNA, 221 bp, Glycine max
tggctcgagctcgagccgaatcggctcgagctcccattaacagcaaccatggtgaggaggctcacgtatagtaagcggcatagttatgctaccaaatactaccagcaccgggttgttaagacccctggagggaagttggtgtaccagaccactaagaagagagcaagtggacctaagtgccctgtcactggcaagaggatccaagggattccacactgaga

SEQ ID NO: 137787 - DNA, 258 bp, Glycine max
cgaattcctctgcaacgaatgcctgtgtttgaagctggcctcatatatcaataatggatttgatctgattctggctcaacgttcatgccgctcaccaacccctactccacttcgtcccgctctgggtatctggacatatacccagtgaggaaagtctctgcctttcaaaacccttacattatggagctcactgctgtcgctagcattggtggattgctctttggctacgcacactggtgttatctctggagcccttct

SEQ ID NO: 137788 - DNA, 272 bp, Glycine max
gtaccaggcaaggcggaagctgagtttgccaacaatagcattgaacaagtaatcaagaacatactaacaagtcggagacctggaccaccaatcctgcgcaaagaaggagcaggttccaattccgatccttcaaggcctcttcccacttggctctcacaagaagatgtcacttattacgcttctaaatttactaagacaggcttaactgggggcctcaactactatagaaatctcaacctaaattgggaactcacagcaccatggactggagt

SEQ ID NO: 137789 - DNA, 265 bp, Glycine max
gggatttcattaagaatatgattactgggacatcccaagctgactgtgctgttcttatcattgattcgaccactggtggttttgaagctggtatttccaaggatggacagactcgtgaacatgctctgctttcattcacccttggtgtgaaacagatgatttgctgctgtaacaaaatggatgctactacacccaagtattccaaggccaggtatgatgaaattgtgaaggaagtctcttcctacttgaagaaagtaggatacaa

SEQ ID NO: 137790 - DNA, 272 bp, Glycine max
cggctcgagcggctcgaggagaaacagcatcggcggtggatgggttgcctccgaggtttctggaaccgttaataatgaacgctcttaaggtcgatctcatcgaaactggtcgcgttgtctgctccatgaagatacctccgcgtttactcaatgctgggaattcgttacacggtggcgccatcgctgctctggtcgacgtggtggggtccgctgcgattcccaccgttggatattcggctcccaatactggggtttctgttgagattaatgtt

SEQ ID NO: 137791 - DNA, 273 bp, Glycine max
gtcttccactctttcacactcatctatgctcccaatctcaaaactcattcctttcctattcttaacaacccttttagtttccctccaagttaatgccagagacagccaattcttcagcaaagtcacccctctcaacaacaacatcaaagagactgagactcccaaaaatgaaggccaagtaaacaagccagaacaacaaccaacattcattcctgaaactgaaaacagttatggcctatatggtcatgagactggtctgcaccctcccaccac

SEQ ID NO: 137792 - DNA, 272 bp, Glycine max
gtttctgcaatcgaacctttcatctccaaagggatccacaggccacatggagaaatggggctgacattcacaaagcttttcagtcggcttttcgcgaagaaggaaatgcgaattctgatggttggtcttgatgctgctggtaagaccactatcctgtacaagctcaagctcggagagatcgttaccacaattcctaccatcgggttcaatgttgagactgtggaatacaagaacattagcttcactgtttgggatgttggtggccaggacaa

SEQ ID NO: 137793 - DNA, 269 bp, Glycine max
gtaactcgttcttcttcttttgttgttctgtgtttgttttttctctcacctgaaaatgtcttgctgcggtggtaactgtggttgcggaagctcctgcaagtgcggcaacggctgcggaggctgcaagatgtacccagacttgagctacactgagtcaaccaccaccgagaccttggtcatgggagtggcacctgttaaggctcaatttgagggtgctgaaatgggtgtgcccgctgagaacgatggctgcaaatgtggaccaaactgct

SEQ ID NO: 137794 - DNA, 268 bp, Glycine max
gtactcttcaagtctggtccaacagggatcgtccaattgagaataaagacattgttttgtggtacacaatagggttccatcatataccctgtcaagaggactatcctgtcatgcctactgtatcatcaagttttgatttgaagcctgctaatttctttgagagaaatccaatccttggagtccctcccaatttcgaagatgatttacctgtttgcaaggctcgtgattcagcttgagatcccatcagttggtttttagtctaattaga

SEQ ID NO: 137795 - DNA, 268 bp, Glycine max
ccagattgatccacagaacacagaacacagcaaggtaaaaaaaattcgagctttatttgtctcaaatggcaaaagaagaggagcaacaacaacaacaacaacacccaccttacgcatacaccttaattctgaacatcttcagcaagaggagaacatgggcatgtctatttctggttgtttacggtacccttttggcatcttcatggaacttactcaaatccacgctttcatggtacaatctgcaagttgaatcctccaccacctcggc

SEQ ID NO: 137796 - DNA, 266 bp, Glycine max
gtaattacttgccttgaggaacgttccagaccacatacagaggtttctctagtgatcttcgttcttctgtggagatcttgttttttcatctcacttttcttctaattaaggaacaagctttccgcagttgaaaaccctagctagctagcttccaccaatttgaatcaccaatggctcgctctttctctaacgtcaaggttctctctgctcttgtggccgacggattctccaacactctcaccaggcgtgggtacgcagcagcgaca

SEQ ID NO: 137797 - DNA, 265 bp, Glycine max
tagttgcttccaattaagatggttctgctagagaagctctgggatgatgttgtggctggccctcaacctgagcgtggccttggcaagctcagaaaactcaccaccctcaaaactattgatgaaggagaaagtagcaagctgcagaagacgttgtcgatgccgtcgacaccaacaaccccgatgactccgacgactccaacgacaccgggatcggcccgtaaagctgacaacgtttggaggagcgtcttccatcctgggagcaact

SEQ ID NO: 137798 - DNA, 268 bp, Glycine max
gtatcatggaaattcaggttaatggtggtagtattgcacaaaaggtggactttgcatacagtttctttgagaaacaggttcctattgatgcagtgttccagaaggatgagatgattgacatcattggtgtgaccaagggtaaaggttatgagggtgttgtcactcgttggggtgttacccgccttccccgtaagactcacagaggtttgaggaaggttgcttgtattggtgcctggcatcctgcaagagtttcattcactgttgccag

SEQ ID NO: 137799 - DNA, 256 bp, Glycine max
ggatcacccaaagttcagaagggagcaggatgacctctatattgatcacaatctcagcttaaccgaggcactctgtggcttccagtttgctgtgcaaacatcttgatggtaggcaactattgatcaaatcaaaccctggggaagtcatcaaaccaggtcaatataaagcaatagatgatgagggaatgccacaacacaataggccattcatgaagggtcgcctttacatccagtttaatgttgatttcccagactc

SEQ ID NO: 137800 - DNA, 260 bp, Glycine max
gtaccgacagtctgtgttgggagccattacttctgctcagcagaggttgaaactatataacaaggtccctccaaatggtttggttctttacactggaaccatcgtcactgaagatggcaaggaaaagaaggtggcaattgattttgagcctttcaaacctatcaatgcatcactgtacctctgtgataacaagtttcacacagaagcactgaatgaacttttagaatctgatgacaatttggtttcatgtgatggatgga

SEQ ID NO: 137801 - DNA, 264 bp, Glycine max
  unsure (1)..(264): unsure at all n locations
gtgacaacctgggaagtacttttctgagattgctgccaggttttatgtagcagaagttctccttgctttggaatacttgcacatgcttggggtcatctacagagaccgtaagccggaaaatgtgttggtgagggaagatggtcatataatgctatcagatttcgatctctctctaaggtgtgctgtcagtccaactctcgtgaagtcatcaaactctagcttggagacaanaagctcaggatactgcattcagcctgcttgcat

SEQ ID NO: 137802 - DNA, 265 bp, Glycine max
tcaaaatgcattcattcggctacagagccaacgcgttgctaacctttgccgtaaccattctggcgcttatgtgcgctatggcttctgtatccgacaacttcaacacccccactccctctgcacaagtccaggttctgaacatcaactggtttcagaaacaacccaatggcaacgacgaggtcagcatgacgatgaatatttccgcagacttgcagtcccttttcacatggaacacaaaacaggtttttgtttttctagctgctga

SEQ ID NO: 137803 - DNA, 255 bp, Glycine max
tggtcatgctgtagtaggtactgcagttgcaaagcttcttcctggacagccacgtgttgagaaactaagtatattgccaaggtcaggaggggctttgggctttacttatattcctccaacaactgaggatagatacttgctatttgtcgatgagttgcatggtcgcctggtgacccttcttggaggacgtgcagctgaagaagttgttttttctggtcgagtgtcaacatgtgcacttgatgacatacgacgagc

SEQ ID NO: 137804 - DNA, 261 bp, Glycine max
gttttcctcttctgaatccaccgccactgcagcgtggacggaatcggagtgcagccatatcagcagcagcagaagtccttgaagtgctgctctagtttgaggcacaatgagattggagaaatgctggttttgctcttcaaccatataccctggacatggaatccagtttgttcgtaatgatgcaaagatttttcggttttgtagatctaaatgccacaagaactttaaaatgaagagaaatcctcgtaaggtaaaatggac

SEQ ID NO: 137805 - DNA, 268 bp, Glycine max
ccttcacattgcagaagagatggctcttgtgaaaccaatttccaatgtcactcccaaatttggcagcagccccagaatgggatcacactccaaattcagcaccataataagaatgtctgccactgccaccccaccaccaccaccctccacctccacaaagccagctgcaagcaacaagaagggcaacatcaaggtgaccctcttgactccaaggttctacaccactgactttgatgagatggagacctcttcaacactgagatcaaca

SEQ ID NO: 137806 - DNA, 267 bp, Glycine max
gtctttcgaatttcgatactttgatcagatccacaacacttcttcatccatgacgcttggttcttcaggatccagtgtcgtggttccaaggaacttcagattgctggaggagcttgagaagggagaaaaaggaataggagatggcacagttagttatggaatggatgatggtgatgacatttacatgcgctcttggactggaaccattattggtccctataatactgtacatgaaggaagaatttatcaattgaagctgttttgtga

SEQ ID NO: 137807 - DNA, 210 bp, Glycine max
gtccaatcatctttagtccgtcagtaatttattgtgggattctattctaagattttgagaatgtctagctgtgggtgtggaagcagctgcaactgtggtcgcaactgcggttgcaacaagtactcttttgacttgagttacgttgagaagacaaccacagagactctagttttgggtgttcggcctgtgaaggccaattggagggtgctg

SEQ ID NO: 137808 - DNA, 264 bp, Glycine max
atacgagtactactacaagggaagaaaaacttagctactaaggaaggatcaaagagaatggctcaagcaatggcatcaatggctggcttgcgtggttcctctcaggctgtgttggaaggtagccttcaggtgagtggctccacacgcttgaatgtggggagtggaagcagggtggcctcagtcacacgtgcagggttcacagttagagcacaacaacaacaagtgagtggtgaggtacaaagcagccgtaggcagtgctttcac

SEQ ID NO: 137809 - DNA, 263 bp, Glycine max
gaaagagaagaaaagagtggaatcgaagacgaagacgaagatggaggacgcatcagcatcaaagttcatcccacaccaaatcggaggggtccaaaacgacgtgcttcgatttggtctccatggagtcaagagcgacatcgttggttcccaccctcttcaatcttcactccaatctacaaggagaatggatgaagcgatgaagaagcaatgcaaagttaacctgtacggaactgcttttcccactgaagaggagcttgacaggc

SEQ ID NO: 137810 - DNA, 241 bp, Glycine max
gtccaggtctttgaaggtgaaagagcaaggactaaagataacaatttgttgggcacatttgaactttctggcattcctcctgcccccaggggtgttcctcagattactgtgtgctttgacattgatgccaatggtattttgaacgtctctgccgaagataagaccactggccagaaaaattagatcactatcaccaatgatcagggtacactgtcataggaagatatcgagaagatggttc

SEQ ID NO: 137811 - DNA, 265 bp, Glycine max
gttgctagttgccacactacaccgatatgtccaccaaacccgtttaggatgttgtttgcgaataaatggcgactaagaggagcgtgggaacgagttaggagggtgatttgaaggggaagagggtattcgtgagggtcgatctgaacgtgcctttggatgacaaccttaacatcaccgatgacactagagtccgtgctgctgttcccaccatcaagtacttgactggttatggtgctaaagtgatcctttctagccatttgggacg

SEQ ID NO: 137812 - DNA, 262 bp, Glycine max
gcaccacattgatcatcataggaggatccacagcaaggacattttaccaagtggtgtgtggtgaaacatgcactgccaaacctatgaccactgtggaatggtacttggtgttcacctgtgtagctgtggtgctatcacagttgccaaacttgaattccattgctggggtgtcactcattggagctgtcactgctgtagggtattgtactgccatttgggtaacctctgtggcacggggtgccctaccggatgtgagctataa

SEQ ID NO: 137813 - DNA, 263 bp, Glycine max
gtccaagcagcctccaattcgtgccactctcttcaaaatggccgttaccttctcaaatctccacacagaatcaggtctcaagtccctcgacgacttcctctctgggaaggtctacgtttctggggatcagttcacaaaggacgacatcaaagtgtatggtgctgttttggagaagccaggtgactcttttcccaatgctgccaagtggtacgaggttgtctcatctcagcttgctgcaagcttccccggcaatgctcaagggg

SEQ ID NO: 137814 - DNA, 258 bp, Glycine max
gcctacgccaccaaggaggagcacgatcatcgcttcggcgtcttcaagtccaacctccgcagagccaggctgcacgccaagctcgacccctccgccgtccacggcgtcaccaaattctccgatctaactccggccgagttccgccgccagttcctcggcctcaagccgctccgcttcccggcgcacgcccagaaggcgcccatcctccccaccaaggatctccccaaggatttcgattggcgagacaaaggagccgtc

SEQ ID NO: 137815 - DNA, 260 bp, Glycine max
gtgcgggtgaggctaccgagaatgacttgttaggtatacttttggagtcaaatcacaaggaaactgaagaacatggaaacagtaagaatgttggaatgagtcttgaagatgtaatcgaggaatgcaagctattctacttcgcagggcaagagaccacttcagctttacttgtttggaccatggtgttgttaagtaggtaccctgattggcaagcacgtgcgagggaggaagttttacaagtatttggcaaacaaaaacca

SEQ ID NO: 137816 - DNA, 254 bp, Glycine max
cttcgacctgctaggtattgtcgaacatcagacaatatggtctatgttgcctctgaggtgggtgttgtgccagtggatgagtcaaaggttgtcttgaaaggccgtttaggtccaggcatgatgataacggttgatttacctggcggtcaggtctatgagaatacagaggttaaaaaacgagtagccttatcaagcccatatgggaactggatcaaggaaaatttgcggtctttgaagctgggaacttccttcag

SEQ ID NO: 137817 - DNA, 263 bp, Glycine max
tttcattttgtcgcgctccttcttctcttctccgtcgacgacgtttgtttgctcctcctactcctcgaagccacagatctgctgcggagtaccgtatcctgtatttattcttcttcttctgtaagcttcttcgtcggagaatttggaatttgatacactggatcggatatgccggtggctgcttccgctatatacttcttgaacctccgcggagacgttctcatcaatcgcctctaccgggacgatgtcgggggaaatatggt

SEQ ID NO: 137818 - DNA, 260 bp, Glycine max
tctctctctgcgatctgtttcgtgttgtagctagctcctcgaaaatgctggcacgcctcgccgcgagttcgttcaacgagatccgtcagattttccgtcagccttctagggctttctcaaccgctctgaactaccaccttgacacaccggacaacaaccctaaacttccatgggaattcaccgaggccaatcaagcaaaggttaaggagattttgtctcactatccatccaactataagcaatctgctacaattcctctt

SEQ ID NO: 137819 - DNA, 253 bp, Glycine max
agaagataagcgagccaaaaccaccgagcttgcacagttgcaagtggagcttcaacgcatgaacgctgagaacaagaagctgaaagagatgctcagccatgtcaccggtaactacaccgccttgcagatgcatcttgtgacactaatgcaacagaaccagcagcgaacagaaagcacggaaaatggggttgctcagggaaaggttgaggataaaaaccatggtgttggtggaggaaaggtaccaaggcaattc

SEQ ID NO: 137820 - DNA, 253 bp, Glycine max
gtctgctgctgaagatcttttgaacaattctggtttaccagtcattgaattactggcaaaggctcttgcaaaggctgttggttatactgaagtaaagcaaagatcacttctaacttccatggagaactatgttacattacttcttgagactggcaaacgaatctacacccaatcgtttgcctatggagtcttgaggagattgttgcctgaagagaaggttgaggccgtgaaaggtctttcaatcactgctgat

SEQ ID NO: 137821 - DNA, 254 bp, Glycine max
tgtcgagccgaatcggctcgagataaaattgattctaggtccagatttgattctgagttgaggcaagtgtggataacttttgcattggatcagaagaattatactggattttactcctaactcctgagggcgagccctagtgcagcggtaaagttgtgccttggtgacttgttggtcatgggttcgaatccggaaacagcctctttgcatatgcaagggtaaggctgcgtacaacatccttcccccataccttc

SEQ ID NO: 137822 - DNA, 255 bp, Glycine max
tgaagacaaaactgtcgtggttacggtgaatggagagatctacaatcatgaagaactcaggaaacagttgcctaatcacaccttccgtacaggaagtgactgtgatgttattgctcacctgtatgaggagcacggagaaaactttgtggacatgcttgatggtatattttcgtttgttctgctagatactcgtgacaacagttttatagtggcacgagatgcaattggggtcacttccttgtacattggttgggg

SEQ ID NO: 137823 - DNA, 258 bp, Glycine max
ttaacattcccaataacaataatatacacatcttcaattaagctccatctcctatagccatggctctttctaagcttataattgcttcacttattgcgtcgcttctccttcttcatttcgttgatgctgatcaatcggcacatgcacatacgcaagggtctcttcttcagcagatagactgtaacggagcatgtgctgcgaggtgccgtttatcatctcgtccacgcctctgccaaagagcttgtggaacttgttgta

SEQ ID NO: 137824 - DNA, 253 bp, Glycine max
gttctacgtgttctccattccctctctcactcctccatctacgtttcttaaatcatttccttctttctctctttctttatcttctcattttcctcattacactcttttttttctctcaacttttctcttattaaccatagttcacatattatatcatcacatatcatagtgatatattatatcatatcacaatgtgtggcatacttgctgtgcttggttgctctgattcatctcaagccaaaagggttcgcgt

SEQ ID NO: 137825 - DNA, 251 bp, Glycine max
gagagagagatccatcgatcaattaatttccaatggccgatcagctcaccgacgaacagatctctgagttcaaggaagcctttagcctcttcgacaaggacggcgatggttgtattaccaccaaggaacttgggactgtgatgcggtcgcttgggcagaacccaactgaggctgagctgcaggacatgataaatgaggttgatgctgatgggaatggtaccattgatttcccagaattcctcaatctcatg

SEQ ID NO: 137826 - DNA, 256 bp, Glycine max
ttggtttggcacaagatagattgaatgggttaggccaagggggaccaaggcaaagggcagaagctttagccgctttaaactctgcatttaattcatcatctgggacgaagacttttactcctaggccatctggaagaggtcaaggatcacaaagagctgcagcagtagctgctctttcacaagttcttatggctgacaagataaaatcaccggatggttctcctgttgctagcaggagtcctatcactgaaggtag

SEQ ID NO: 137827 - DNA, 256 bp, Glycine max
atatcgatgacgacctgaagcttcgagcattttgggacaagaggatctcccaggaggttcttggtgatgctctgggtgaggagtttaaaggatatgttttcaaaatcaccggtgggtgtgacaaacaaggattccctatgaagcagggagtgctgacccctggtcgtgttcgacttttgctccatagaggaactccttgtttccgtggatatggaaggcgcaatggagagcgtagaaggaagtctgttcgtggttg

SEQ ID NO: 137828 - DNA, 254 bp, Glycine max
atcagtattaagattatgcctgttgggattcacatgcgtcgaattgagtcagttatgagaatggcagatgaggaatgcaaggtaagggagctcaaacagaaatttgaaggaaaaaccatcttgcttggtattgatgatatggacatttttaaaggcataaatttgaagattttggctatggagcagatgctcagacagcatcccaaatggcaaggaagagctgttctggtccagatagttaatcctgctagagg

SEQ ID NO: 137829 - DNA, 249 bp, Glycine max
gctaagctaactgctgaggttggagccaatgtacaaattgttggtgatgatctcttggttaccaaccccaagagggttcagaaggcaattgatactaaagcatgcaatgctcttctcctcaaggtcaaccaaattggttctgtgactgagagtattgaagctgtcaggatgtccaaaagagctggatggggtgtcatggccagtcacagaagtggagagactgaggataccttcattgctgacctttct

SEQ ID NO: 137830 - DNA, 253 bp, Glycine max
ggaagcccgtctgatagcgctctgtgcgcgtactccgaaagggaatcgggttaaaattcctgaaccgggacgtggcggctgacggcaacgttagggagtccggagacgtcggcgggggccccggaaagagttatcttttctgtttaacagcctgcccaccctggaaacggctcagccggaggtagggtccagcggctggaagagcaccgcacgtcgcgtggtgtccggtgcgccccggtcggccttgaaaatc

SEQ ID NO: 137831 - DNA, 260 bp, Glycine max
ttaacatgcacgtggcatccattgggtcaggcccagttgtactgttcctccacggcttcccggagctttggtacacgtggcgccaccagcttctgtccctctccgccgtgggctaccgggccatcgcccccgacctccgcggctacggcgacaccgacgccccgcccgacgcttcctcgtactccgccctccacatcgtcgccgacctcgtcgggcttctcgacgctttgggaatcgagcgagtttttctggtgggccac

SEQ ID NO: 137832 - DNA, 256 bp, Glycine max
ggcagatcgacgagaaactgcaagacaagaagccgcctcaaaaagagttcatccaacattgcatttacctgcaaattcacaaccctcaactcaagttgctgggttgttttccagttcagggactcaagcagcattgactgccccacagacatctgcagcaacttcatctttgtcatcaggaagtggattctctctttttagcacaccatcttctgctccatcgtcttctatgttgtcatctttgtttacaacacca

SEQ ID NO: 137833 - DNA, 253 bp, Glycine max
ttcacctaatcacttccccacttcccctgtaaatcacgtttagttcgcacaaggttttaaaaaatggctgatgctgaggacattcaacctcttgttgttgataatggaactggaatggtcaaggcgggttttgcaggtgatgacgctcctagggccgtgttccccagtattattgggcgaccacgccataccggtgtaatggttgggatgggtcagaaggatgcttatcgtgggtgatgaagctcaatcaaaa

SEQ ID NO: 137834 - DNA, 252 bp, Glycine max
gtgctcgtgagccttagcgagcaacagcttgtggattgcgatcacgtgtgtgatccagaagaatacggagcgtgtgactcaggctgtaatggtgggttgatgaacaacgcatttgagtacatacttcagtctgggggagtacagaaagaaaaggactatccatacaccgggagagatggcacctgcaaatttgacaaaaccaaagttgcggctactgtatctaattacagtgtggtttcccttgatgaagaa

SEQ ID NO: 137835 - DNA, 255 bp, Glycine max
ggagtgggagagaaagatgccgaagaggacaacgcacacatactcaagcgaggatgcagctccggagggtcctcactccgatctctttgtatattactgcaaacattgcggatcccatgtcctcataacagatacccaattgcagaaaatgcctaaaaggaaaaccgacaaagcttatgtactggacaagagcaaacatctggccagattgaacatgaaggaaggcgggaaagtagtgttaaaacgaggggaggg

SEQ ID NO: 137836 - DNA, 252 bp, Glycine max
aaaaggatgctgttgctacaaatcggaccctggatttgacatctggttttgaagttggtcctgcaacaactgctggtgcagatgcatcatcaagtcaaaacactcgatcggtgttgactattgccttccagttcccttttgacagcagtctgcaagacaacgtcgcggtcatggcacgccaatatgtccgcagtgtgatttcctccgtgcagagggttgccatggctatatctccatctggtataaacccat

SEQ ID NO: 137837 - DNA, 252 bp, Glycine max
gcttcgtccctttggtcttcatcttctgttctgatccaggtatggcttctaaacgcatcttgaaggagctcaaggatttgcagaaggaccctcctacctcatgcagtgcaggccctgtggctgaggacatgtttcactggcaagccacaatcatgggacctgctgatagcccatatgcaggtggtgttttcctagtttcaattcattttcctcctgactatcccttcaagccaccaaaggttgcttttcgga

SEQ ID NO: 137838 - DNA, 254 bp, Glycine max
tgtatcggagcattgcttcacagggaaacacaaaacctgacatggagattgtaacaagggttatgggacctgaagttggatatctgaccacaccaataattcttattcagtgtgctcttgttcttctctgccaacgtgacaaccttccaaaaggaggagtttaccctcctgggatcatctttggtccaactgatctccaggaaagacttcaacaaaatggaatatcctttgatgtcatctcaaaaagcaccatt

SEQ ID NO: 137839 - DNA, 248 bp, Glycine max
tttccttgtctctttctcttctcaacaacatgcagatcttcgtcttgactttgactggcaagaccatcaccctcgaggtcgagagtagcgacaccatcgacaacgtcaaggccaagatccaggacaaggaaggtatccctcctgaccagcagaggttgatttttgctggtaagcagctggaagatggtcgcactcttgttgattataacatacaaaaggaatcaacacttcacttggtcttgaggctc

SEQ ID NO: 137840 - DNA, 238 bp, Glycine max
gttcttctttcctcaaccttctttcttcttatatatcgaacatggctaagtatcattcaagtgggaaaagctcttccatgactgctattgccttcctgtttatccttctaatcacttatacaggcacaacagatgctcaatccggtggtatgttatggaagacttggcaataacttaccaaccccttaagatattgtgtgtctctataattaagccaatattcgcaggatgcgcatct

SEQ ID NO: 137841 - DNA, 249 bp, Glycine max
agatattggtgctggtgaccagggtcacatgtttggctatgccactgatgaaacccctgaattgatgccattgagccatgttcttgcaacaaaactcggtgctcgtctcaccgaggttcgcaagaacggtacctgcccttggctgaggcctgatgggaagacccaagtgaccgttgagtattacaatgacaatggtgccagggttcctattcgtgtacacaccgtgctaatctccacccaacacgacga

SEQ ID NO: 137842 - DNA, 255 bp, Glycine max
gtaaggtaccctaatacacctggcatttggacaagagaacaggtggaagcttggaaaccaattgtgagcactgttcatgagaagggaggtattttcttttgtcaactttggcatgctgggtaagtctccaactatgatgaattccaaccacatggtgaagccccaatatcaagcacaaacaagcgacctcgtaaggaaatccccaagcatgtcaatgaattcgtacttgcgcgcaaaaatgccatggccgcgggt

SEQ ID NO: 137843 - DNA, 257 bp, Glycine max
tagagtacctatcctgactattatttccgcatcaccaacagcgagcacatgaccgagctcaaagaaaaattcaaacgcatgtgtgataagtcgatgattaagaagcgatacatgtacttaaacgaagagatcctgaaggagaatcccagtgtttgtgcatatatggcaccttcgttggatgcaaggcaagacatggtggttatggaggtaccaaagttgggaaaagaggctgcaactaaggcaatcaaggaatgggg

SEQ ID NO: 137844 - DNA, 250 bp, Glycine max
catcggaaccgaaacccttcgccgcaaaaaatgcctcccaaatctgccaaatccaaggaagctccagctgagcgacccatcctcggtcgattctcttctcacctcaaaattggcattgttggcttgccaaatgttggaaagtctactctctttaatactctcaccaagttggcaatacctgctgagaacttccccttttgcaccattgagcctaatgaggcacgggtcaatgtacccgatgaacggtttg

SEQ ID NO: 137845 - DNA, 250 bp, Glycine max
agaggtttctgaagcattatcactgggtcgtgctgttgttgctcttgaatctaccattatttcgcatgggatgccatatccccaaaatttggaaactgcaaaagaggtggaacgtattgtaagagagaacggtgcagttcctgcaaccattgcaattttagatggcacgccttgtgtaggcctaagtgtagaagaacttgaaaggctagctattttgggaaccagagctcagaagacagctcgaagggac

SEQ ID NO: 137846 - DNA, 250 bp, Glycine max
gtcattgtcttagccctgctggtgaatacaatcttcggttaggaattataaaagagctgcacccggacatggttgcaacttattcaggcagtgctcaagtttttgaaggtcacccattcattgtggaagctggagtcagtgtaggtggaaaaaatgtcaaacaaggtctgaatatatttcgatttgccaatagaattccactactttttgagcaaggtgctgatgttgtcaccagaactgcacataaaag

SEQ ID NO: 137847 - DNA, 250 bp, Glycine max
gtatacgagatatcagaggatcctatctatgttctagagaacaacataccaatagatcctcagtactatcttgagaatcaaattagcaagccaattatgagaatttttgagccaattctgaagaatgctagcaaagaacttctccatggaagtcatacaagatctatttctatttctactccggcaaacagtggcatattgaaatttgctaagaaacagcttacctgcattggttgtaaagctttacttg

SEQ ID NO: 137848 - DNA, 248 bp, Glycine max
tgggaaaaggggcaaagggattgataacaggtaaaacctcagcttcagccaaagacaaagacaaagacaagaagaaacccgtttctcgttcttctagagctggtcttcagtttcctgttggacgaattcaccgtcttttgaagtcaagggtgagtgccaatggaagagttggggccacagctgctgtgtattctgctgctatactggagtatctaactgcagaggtgttggagttggctggtaatgca

SEQ ID NO: 137849 - DNA, 246 bp, Glycine max
atcgtttacggcttcaatgccaccatccccaacttcctcacctcaagttttcaggtcacgctttcctcgcgcaaccccaacgacaaaatcggaatctactacgaccgtctcaacacctacgtaacttaccggaaccagcaggtcacgtaccgaacctcaatcccaccctcgtaccaaggtcacaaggaagaggatgtgtggtccccgtttgtctacggcactaatcgtcccgtcgcaccctacaac

SEQ ID NO: 137850 - DNA, 245 bp, Glycine max
ttagaatccacacctaatgcaatggaagcggagtccttgaatgaaaagagtatcaggagaatccacaaggcattggactctgatgatgttgagctactgaagcttcttctaaatgagtctagtgtcactctagatgatgcatatgccctgcactatgcttgtgcctatagcgattctaaggttattcaagaagttcttagtctaggcatggctgatattcttcgtagaaattcccgaggatacac

SEQ ID NO: 137851 - DNA, 250 bp, Glycine max
ggcatgctgatttttacggagacctgaaatgtttcctttttcaactaaatccagtggcatctatattcaggccaactggagcaaacaataatctgcaatggtgcgctatcaacttcagttcagaggacattccaaatggcattggctttgggggacgagtgaatcacttgggtttgtttatatcaggaaactttgatcaaggacatacattttcgtgtaccacgtttggtagcccttgtctctccaagac

SEQ ID NO: 137852 - DNA, 232 bp, Glycine max
cgaggaagaagccccggctaactccgtgccagcagccgcggtaagacggggggggcaagtgttcttcggaatgactgggcgtaaagggcacgtaggcggtgaatcgggttgaaagtgaaagtcgccaaaaactggtggaatgctctcgaaaccaattcacttgagtgagacagaggagagtggaatttcgtgtgtaggggtgaaatccgcagatctacgaaggaacgccaaa

SEQ ID NO: 137853 - DNA, 257 bp, Glycine max
  unsure (1)..(257): unsure at all n locations
ttaacattcccaataacaataatatacacatcttcaattaagctccttctcctatagccatggctctttctaagcttataattgcttcccttcttgcgtcgcttctccttcttcatttcgttgatgctgatcaatcggcacatgcacaaacgcaggggtctcttcttcagcagatagattgtaacggagcatgtgctgcgaggtgccgtttatcatctcgtccacgcctctgccaaagagcttgtggancttgttgt

SEQ ID NO: 137854 - DNA, 257 bp, Glycine max
tttctacgtgttctccattccctctctcactcctccatctacgtttcttaaatcatttccttctttctctctttctttatcttctcattttcctcattacactcttttttttctctcaacttttctcttattaaccatagttcacatattatatcatcacatatcatagtgatatattatatcatatcacaatgtgtggcatacttgctgtgcttggttgctctgattcatctcaagccaaaagggttcgcgtcctt

SEQ ID NO: 137855 - DNA, 256 bp, Glycine max
caaacactctcaaattctcagttatgtcgtggcaagcgtatgtggatgatcacctactgtgtgaaatcgaaggtaaccacctcactcacgccgctatcatcggccaagacggaagcgtttgggctcagagcaccaacttccctcagttcaaacctgaggaaataactgccatcaataatgactttaatgagcctggatcacttgctccaactggattgtatatcggtggcaccaaatacatggtcatccagggtga

SEQ ID NO: 137856 - DNA, 255 bp, Glycine max
ctcgagccggaagcgcaattcccatcgagcggcgggtagggctaatccgcctcacgagggtcaccaacggcacgtgcctttggggggccgaggcccctactgctggtcggcaaacggacggcgggcgcacgcgtcgcttctagcccggattctgacttagaggcgttcagtcataatccaacgcacggtagcttcgtgccactggcttttcaaccaagcgcgatgaccaattgtgcgaatcaacggttcctctcg

SEQ ID NO: 137857 - DNA, 228 bp, Glycine max
aaaattctctatcgaccatagatcttcaacaaaccggttaagtttgtgtagtttggtaagatgggtggtggatttagagtgcttcacttagttagaccatttctctcgtttcttcctgaagttcagactgctgacaggaaagtgccatttagagagaaggtcatatatactgtgatctctctgttcattttccttgtttgcagtcagcttcctctgtatggcatacac

SEQ ID NO: 137858 - DNA, 249 bp, Glycine max
ccgaatccgagatcaaccccgacgaaggcaaggggtttttctcggcttcttcagactgtctgaaatggcgcctgtttcagctttagccaagtacaagctcgtcttcctgggtgaccaatccgtgggcaaaaccagcatcatcactcgcttcatgtatgataaattcgataacacctatcaggctacaattggtattgattttctatcaaaaactatgtatcttgaagatcgaatgttcgactgcgttgt

SEQ ID NO: 137859 - DNA, 248 bp, Glycine max
taacagtagcgaggttgatcaaagatgactgtagggtcaggcatatctgttgcagatgggaacttgatggtgttggggtacaaagtgctgagccatgtccatgacaaggttcttcttacccctgcacgtggtggtgctttgctcaatggggcattcatcggggttcaatcccatcacaagggtagccgcacagtcttcccaattggcaagcttcaggggctgagatttatgtgtgtcttccggttcaa

SEQ ID NO: 137860 - DNA, 251 bp, Glycine max
tagatatatagaagagccttccatatatagcctcccaaaaaaatgaagagtactacctctttggctctctttctactttgtgccctaacttcatcatatcagccttcagccaccgctgatattgtattcgacaccgaaggcaatcctattcgaaacggcggcacatactatgtgttgccagttataagaggaaagggcggcggaatagaatttgccaaaaccgaaacagaaacatgccctctcactgttgt

SEQ ID NO: 137861 - DNA, 246 bp, Glycine max
cagaaacaaaatcaccaccttcaaagtcttctctctcgagaatcatcgaataaaactagggtttccgatcgtcgtcgaggagaatgccgaagaacaagggaaagggaggaaagaaccggaagcgcgggaagaacgaggcggacgacgagaagcgggagcttgtgttcaaggaggacggccaggagtacgcgcaggtgctccggatgctggggaacggccgctgcgaggcgatgtgcatcgacggca

SEQ ID NO: 137862 - DNA, 250 bp, Glycine max
ggagagttcatccgagcaaggaactcactcattcactcactagtcactaccaatgccgaaacaaaggttggagggtaaggtggctcttatcactggagcagcaagtgggattggagaagagacagtgagattgttcgctgaacatggagcacttattgttgcagcagatattcaagatgaacaaggccaccaagttgcagcttcaatagggtcagagagagtgacctaccaccattgtgatgtgagagat

SEQ ID NO: 137863 - DNA, 251 bp, Glycine max
gactacttttaacgttattttacttattccgtgaatcggaagcggggcactgcccctctttttggacccaaggtcggcttcggccggtcgatccgggcggaagacattgtcaggtggggagtttggctggggcggcacatctgttaaaagataacgcaggtgtcctaagatgagctcaacgagaacagaaatctcgtgtggaacaaaagggtaaaagctcgtttgattctgcagttccatacgaatacgaa

SEQ ID NO: 137864 - DNA, 252 bp, Glycine max
cattgaacaactcttcacacaacaaaacttttttctggcattgtagcatcatgactggcagagaaatcctccatatgatgaaggtgaaagcagggtttggaacaccagacacagggaatggaaaaggcaaaatatcaaaacacattacacatggctttcacttgatgaagggcaaatcagcgcatcctatggaagattatttagtttcagaatttaagcaagaaaaggacagagaattaggcttgtttgcaa

SEQ ID NO: 137865 - DNA, 249 bp, Glycine max
cagcattggatgcatggaaacattctcactgctcagatcttgaacaggcaccacactaaaataaagatcgttaagtttgatattagaacaggtcaaaggaaaaatatattggtggaagaaaacagcagttggatcaatatacatgactgtttcacacctcttgataaaggagttaccaaattttcgggtggatttatctgggctagtgagaaaacaggatttagacaccttatcttcatgatgcaaagg

SEQ ID NO: 137866 - DNA, 250 bp, Glycine max
gacaggttcatcatcataaccttcaatgaaaagaaatggctgaggcaagcattggcagcaaaagcagcagatggtctttacagggaatgacagctctcgtcaccggtggatccaaaggaatcggatatgctatcgtggaggagttggcacagcttggagccactgtgcacacttgcgctcggaacgaagctgaactcaatgaatccttaaatgaatggaacacaaaaggatacagagtaactggttccgt

SEQ ID NO: 137867 - DNA, 246 bp, Glycine max
tatcaatatattatgataatggagggatacaataagaaggttatgattgtggggatggtgttgggcatggccatgattgggatggccaatggccaatactcgttttgtcgcatgcccagcgatgggttggcggcatgcaagccgagtgtgagtggggactatcctgctgatccctccactgcttgttgctcagccattgccaaggctgatcttaaatgcttctgccgcttcaaggattcgggcctt

SEQ ID NO: 137868 - DNA, 248 bp, Glycine max
ctgattagttcattgtcagtgattatggggatgcagaagcatgttcttcttggactacataaagaatcgcttcaagctttacgtgtgaactattaccctccttgcagcacacctgagcaagtgctgggtttgagtccacactctgacgcgagcaccatcaccttgcttatgcaagatgatgatgtaactggcttagaaattcaacaccaaggaggatgggtgccggtgaccccaataccagatgctct

SEQ ID NO: 137869 - DNA, 250 bp, Glycine max
cttgtaacttcaaaacatactcctctgttctctctgtttctcttcaatcttcctgaaaaaacaaaaacacgaaaaatcatccaccctctcacattctctctctctctcctttcaactaatatggcaattgaaaaccaagacaacactgtcagagaaatcaagccaaagaacaggagaatcatgggtgctggaggccctgatgatgacgacaataggtggccaccgtggttgaagccactgctgaaagaga

SEQ ID NO: 137870 - DNA, 246 bp, Glycine max
gttctcccatttcctctcagaaccctcgatcactcccacgcgctcctatatcctctccttcaccgtcgctctctccaacgatcacaacaacatcgtcatcccatggcaaacgccgcatctggtatggcagtccatgatgactgcaagttaaggtttttggagctgaagacaaagaggacacaccgtttcatagtttttaagattgaggagcagcagaagcaggtcattgtggagaagcttggtgag

SEQ ID NO: 137871 - DNA, 249 bp, Glycine max
caatcttcaatttttctatatatccatcaatccgctgagtgcaaagttctaatctttcgcctattgggttctactcctttctctcttcgtttccgatcgatccaattttcttcccatggctacgatcggacacaacaatctcaatgccaaattggttcttctcggggacatgggtgctgggaaatccagcctcgttttgcgctttgtcaagggtcaatttctcgaatttcaggaatcaacaataggggc

SEQ ID NO: 137872 - DNA, 251 bp, Glycine max
ccatgaccctcctccggcaccgttgatcgacccagatgagctcacaaagtggtccttgtacagagccgccatagctgagttcatagcaacactcctttttctttacatcaccgtgttgaccattattggctacaagagacagagtgacaccaaaatccccggtaacaccgaatgtgacggcgttggcattttgggcatcgcttgggccttcggtggcatgatcttcatccttgtttactgcactgccggaa

SEQ ID NO: 137873 - DNA, 252 bp, Glycine max
ggaagatgttaagacaaagatacaaatgaggcaagaaggagctttcaaaagggaaagagcaatggcttactctcttgctcacaagcaatgcagatcaactccaagctctaattcacgaacaaatgcctctttttcctctctcaagagtcatgagatgaacaaagctaacggtgggtggagttggttggagcgttggatggcagccaagccttgggagagtagattgatggaacaatcacaatctcaggctga

SEQ ID NO: 137874 - DNA, 246 bp, Glycine max
gtcttctttctttttttcaatttccaaatcacgaaactcaagaagatggagaaagcgatcaacagacagaagattttgcttcatcatctcaacccttcatcatccacccaccccaacgaatcatcctccctccatgcttcagcatgtgtggcgggggatagcgctgcttatcaaaggacatcgacattcggggacgatgttgtgatcgtggctgcttatcggactgctcattgcaaagctaaacga

SEQ ID NO: 137875 - DNA, 247 bp, Glycine max
ggaaaaggaaaaacagagaaaaaggaagggacacatttgacatttcacgaccgcgttcttttctacggagcctcgaccaagaagaatcgcagagagaagagggtcagagtgagaaagagagagagagagagagaaactgagagaaattcgcaaaccctaatttcggaaagatcggcgatggctgcctccaaggatcgcgagatattcgtctacatcgccaagctcgccgaacaggccgagcgatacg

SEQ ID NO: 137876 - DNA, 244 bp, Glycine max
gtatcttgagactcttcttcttctatttctcattaccgttccgtttcgcgagtgattgaagctagttactagttacagaagaagatgttgcagctactctacactgcgattttcttcgaaatgattctcattctcacccttgtcttcaagaccccactgagaaaactcgtcatcgtttccctcgatcgtgtgaagcgcggtcgcggccccgtggtggtttccaccgtgggcgccacttggtggt

SEQ ID NO: 137877 - DNA, 246 bp, Glycine max
tgaatctcagaattctctaaaagagatctttttctgctctttgaagaaagaagggtctttgcttgattttggagatgtctctgctctcagatctcatcaaccttaacctctccgataccaccgagaaggtgatcgcagagtacatatggatcggtggatcaggaatggacctgaggagcaaagcaaggactctcccaggaccagttagcgacccttcagagcttcccaagtggaactatgatggtt

SEQ ID NO: 137878 - DNA, 238 bp, Glycine max
gctctctcactcacaaacacacactgaactaaaaaacatcaaaagagacatggctgagcaaaccttcatcatgatcaagcctgatggcgtccaaagaggccttattggcgagatcattagcagatttgagaagaaaggtttctacttgaaaggtttgaaacttgttactgtggaccgtccttttgctgagaagcactatgctgatttgtctgccaagcctttcttagtggtttggtgg

SEQ ID NO: 137879 - DNA, 109 bp, Glycine max
  unsure (1)..(109): unsure at all n locations
cggcgttttcgagtgctggctccacccggcgcgctatcggactcagccttgcaaggacggcacgagttaccggnngacnngtgtgcttcttgcgcgcacacgccggagc

SEQ ID NO: 137880 - DNA, 249 bp, Glycine max
gttcttcgccgtttcagctgaagagccatccgcaggtaagcaatggttaagcataataatgttatccccaatgggcacttccggaaacactggcaaaactatgtgaagacttggtttaatcaaccagcccgaaagaccagaagacggttggctcggcagaagaaggctgtcaagattttccccaggcctactgctggatctctcaggcctattgttcatggccagactctgaaatacaacatgaaagtc

SEQ ID NO: 137881 - DNA, 244 bp, Glycine max
ctttgcgttttctgcgtcatctccgattccccgacaatggccacacaaatgagcaagaagagaaagttcgtagctgatggagtgttcttcgctgaactgaacgaggttctgacaagggagttagccgaggacggatactccggcgtggaagttagggttacgccgatgcgcaccgaaatcatcatcagagccaccagaacccaagccgttctcggtgagaagggaaggagaatcagggaactta

SEQ ID NO: 137882 - DNA, 230 bp, Glycine max
tgcactatgcgcatcttgtggcgccgcagagcaccgtggaggggattgcggaggagtttggtaccactcagcagatactgctcaaccttaatggaatttctgaccccaaaaatcttcaggcagggcagattctcgatgttcccctccaagcttgttcctcgaatgtgaaaaatgattcattggactatcccttgcttgtcccaaatgcgacttacgcctatactgcacat

SEQ ID NO: 137883 - DNA, 255 bp, Glycine max
aaggtatgcatccgagtatgaagcatctacctgctgaggcttctagatgttgtactctattgagaagctgccatatcaagattgcatagcaacactgcgttaattctttacatcagcgtgttgatcattattggctacaagagacagagtgacacctaaatccccgtgtaaaaccgaatgtgacggcgttggcattttgggcatcgcttgggccttcggtggcatgatcttcatccttgtttactgcactgccgg

SEQ ID NO: 137884 - DNA, 249 bp, Glycine max
gtccccatatggtgcaggtacctatgctggggatggttccagacaacctactgagttagaattagctcaagcttttcatcaggggaagtactttgcaggcattgccaagaagctcaacggaccatctcagtgagatctttatacatctaccatttgatgtttctatatacttaagcaaaagagttatgtgcatcatatatccagtttccagttcctataatgtccagcagaataagatgttaattagag

SEQ ID NO: 137885 - DNA, 240 bp, Glycine max
atcgtgaatgcgtataaaaggaaaataaagaaattagcgtcaaaatgttgggtgtgttcagcagctccatagtgtcgccgccggacgagctcgtggccgccggcaaccgtactccgtcgccgaagatgacggcggcggcgctgcggaagctgttcgaggagaagaacccctccgccgtgtcggtggaggtcggagagcatgtccagctcgcttatacccaccacaacgagtcgccgtttc

SEQ ID NO: 137886 - DNA, 244 bp, Glycine max
cgctcttcgttatcttttctcagactccgcggcgtagatccgaggagttcgggaaatcctaactcatcatctcaactcaagtcatggctggacttgcacctgagggatcacagttcgatgctcgtcaatatgattctaaaatgagtgacttactttcatctgatggacaggacttcttcacatcctatgacgaggtttatgatagttttgacgctatgggtttgcaggaaaatctctcagggga

SEQ ID NO: 137887 - DNA, 241 bp, Glycine max
tcttcatgaaaattgccacagctcttggtaccgatattttgccagagttgcgatgatttgatcagcaaatgggagagtttgttatcttcgtctaatgggtcttgtgagttagatgtgtggccttttgtccaaaacgtgtcaagcgacgttcttgctcgtgcaggctttggaagtagctatcaagaagggaaaaaaatattcgaacttcaaagggaaatgattcagcttacaatgacgctct

SEQ ID NO: 137888 - DNA, 237 bp, Glycine max
gtggaactgcttccaattgtgtatactcctgttgttggtgaggcttgccagaaatatgggagcatcttcaagcgtcctcagggacttttcataagtttgaaagagaaggggaaggttcttgaagtattgaaaaactggcctgagaggagtattcaagttattgttgtaacagatggcgaacgaattttgggaattggggatcttggatgtcaggggataggaattcctgttggtaaa

SEQ ID NO: 137889 - DNA, 279 bp, Glycine max
tcgcaatcacgcttacggaatctggccactgacgaccaagctctcgagagagcctactctcagtacggcgaaatcgttgaaacgaagattatcaacgatcgagagactggaagatccaggggttttggatttgtgaccttcgcctcggagcagtccatgatagacgccatcgaagggatgaacggccaaaaccttgaacgccgtaacatcactgttaacgaagctcagtcccgtggtggcggtggcggcggaagcggtggaggtggtggatatggtggt

SEQ ID NO: 137890 - DNA, 264 bp, Glycine max
gaaagagagagagagagagagaaactgagagaaattcgcaaaccctaatttcggaaagatcggcgatggctgcctccaaggatcgcgagaacttcgtctacatcgccaagctcgccgaacaggccgagcgatacgaagagatggtggaatcaatgaagaacgttgcgaatctcgacgttgaactgactgtggaggagcggaatttactttctgttgggtacaagaatgtgattggtgctcggagacatcgtggaggatcctgtc

SEQ ID NO: 137891 - DNA, 262 bp, Glycine max
ggaggctccgattttgacttcgagaatggcagagtgaaaccctgggagggtgagagaatacacgaggttggaatggatgatttggagcttactctaggagttggaaaggcttgatttgatgatgctattgaaatcatcccttgcttggatctgctactaccctcagggcaattggttcttgttatgcttaatttctctatatttttccttttatgtgtacagtttttcatttatatagcagttgttaggtgttacattactt

SEQ ID NO: 137892 - DNA, 262 bp, Glycine max
gtgccttttggtgttctactctctggaggtttggactcttcattggttgcatccgtcacttctcgctacttggccaacacaaaggctgctgagcagtggggatcaaagttacattcattctgtgtaggccttgagggctcaccagatttgaaggctgcaaaagaagttgctgactatctaggcactgtccaccatgagtttaccttcactgttcaggatggaatagatgccattgaagatgttatctaccatgttgaaacat

SEQ ID NO: 137893 - DNA, 262 bp, Glycine max
gaataaatggcgactaagaggagcgtgggaacgttgaaggagggtgatttgaaggggaagagggtattcgtgagggtcgatctgaacgtgcctttggatgacaaccttaacatcaccgatgacactagagtccgtgctgctgttcccaccatcaagtacttgactggttatggtgctaaagtgatcctttctagccatttgggacgtccaaaaggtgtaacacctaaatacagtttgaagcctcttgtgccaaggctgtctc

SEQ ID NO: 137894 - DNA, 265 bp, Glycine max
gcttcgcgcattgaagctccttccgctcctgttgttgttgaaggcaaccaggttcccaaggaaagtactcaaactaaggtgaagagaagaggtggcccaggaggtctcaccaaaatctgtggtgtttcgcctgaacttcaggtcattgttggccagccagcattgtcgaggactgagattgtgaagcaactgtgggcttacataaggaagaacaatctccaagatcccagcaacaaaaggaaaataatttgcaatgatgaactgc

SEQ ID NO: 137895 - DNA, 261 bp, Glycine max
caacggattctgtttgcacattgcaggtgctaaatcaggatgagacacctttgctgtacagtcttgtatttggggagggtgttgtgaatgatgctacatcagtggtgcttttcaatgcaatccaaagctttgacctcaaccaaatcgacccttcaattgctgggcactttttgggaaatttcttgtatctatttattgcaagcacaatgcttggagtgttgacaggtctacttagtgcttacattattaaaaagctgtaca

SEQ ID NO: 137896 - DNA, 269 bp, Glycine max
  unsure (1)..(269): unsure at all n locations
gttcacaaacttatttttccttggaccattctctatcaattttgggatccgtctcctaatgatagtaaggtatggtgtccaacttgagaaaggaccatttgatcgacggactgctgatttcttgtggatgatgatatttggtgcctttgcactattggttttgtctgctatccccatattttggtccccatttttggcagtaccacttgtttttatgctcctttatgtttggagtagagaatttccaaatgcccanatgcacatatacg

SEQ ID NO: 137897 - DNA, 270 bp, Glycine max
atagaagagccttccatatatagcctcccaaaaaaatgaagagtactacctctttggctctctttctactttgtgccctaacttcatcatatcagccttcagccaccgctgatattgtattcgacaccgaaggcaatcctattcgaaacggcggcacatactatgtgttgccagttataagaggaaagggcggcggaatagaatttgccaaaaccgaaacagaaacatgccctctcactgttgtgcaatctccctttgaggtctcaaagg

SEQ ID NO: 137898 - DNA, 270 bp, Glycine max
gttacaaaatgtgagcggcatcaattttcttatcaaagagggtccaaaagtcaatgcaaagttcgagctgaagccgccaccatatccactgaatggtttggagccggtgatgagccagcagacacttgagtttcactgggggaagcaccacaagacttatgtggaaaatctgaaaaaacaagttgttgggacagagcttgatgggaagtcactagaagagattattgtcacatcatacaataagggtgacattcttccagctttcaacaa

SEQ ID NO: 137899 - DNA, 259 bp, Glycine max
ctcttcttctcttgcggccagggttttagcgcacttcttctagatttaaggaagatgggtaaggaaaaggttcacatcagtattgtggtcattggccatgtcgactctgggaaatccactaccactggtcacctgatttacaagcttggaggcattgacaagcgtgtaatagagaggtttgagaaggaagctgctgagatgaacaagaggtctttcaagtatgcctgggtgctggacaaacttaaggctgagcgtgaaa

SEQ ID NO: 137900 - DNA, 261 bp, Glycine max
cgttgctctgcttcaaccttgcggaagaagaagacgccgcagccatggtgaagtactccagagaacccgacaatcccaccaagtcctgcaaggccagaggcgctgacctcagagtgcatttcaagaacactagggagactgcctttgccatcaggaagttgcccctggttaaagctaaaagatacctggaggatgttttggcccacaaacaggccatccctttccgacgcttctgtggtggtgttgggaggacagcccagg

SEQ ID NO: 137901 - DNA, 261 bp, Glycine max
ctcgaccgttcctcaccgattgctagaatggaatttcgatgctcagtcatctcttttaccattctcttctctcttgctcttgcaggagagagccatgtccatgcatcgctacctgaggaagattattgggaagctgtttggccaaacactcccattcccactgcactgcgagagcttctaaagcctctccctgcaggtgttgaaatcgatgaactccctaagcaaattgatgatacacagtacccaaaaacattcttctat

SEQ ID NO: 137902 - DNA, 266 bp, Glycine max
ataaatattccgttttgcgtttctctgcctaaaaggattgaaagatgggtcaagcactaggttgctatcaagttgatcagtcaaatgtggctatcaaggagcattttggaaaatttgatgatgtcctagaacctggatgtcattgcctgccttggtgtcttgggtaccagattgctggtagtttgtcactgcgtgtgcagcaacttgatgttcgatgtgagacgaaaaccaaggacaatgtctttgtcactgtggttgcatctgtg

SEQ ID NO: 137903 - DNA, 268 bp, Glycine max
ctcataaactaaagcaccaccctggtcagattgaagctgctgctattatggaacacaatttggaaggaagctcttacgtgaaagctgctaagaagttgcatgagattgatcctttacaaaagcctaaacaggaccgttatgctcttaggacttcaccacaatggcttggtcctctaattgaagtgattagattctctaccaagtcaattgagagggagattaactcagtcaatgacaaccctttgattgatgtgtcaaggaacaaggc

SEQ ID NO: 137904 - DNA, 259 bp, Glycine max
caacgcgcactctctcttttctctcttaacacaaaaaccctatcgttcttcgcggtttcgccgattctcgccatgccgaaagccaaatccgacgccaaagccgccgatagccggttgaagcgcaagggcgctggtgctggaaggaagcaatcgaagaaagctgctaaagatcctaacaagccaaagagacctccaagcgctttcttcgttttcatgtccgagttcagagagcagtttaagaaggagcatcctaacaaca

SEQ ID NO: 137905 - DNA, 259 bp, Glycine max
tagagcttgcacctattggtatcttctacaatatcctaaagtgtttttcttcttcttcatcaccatgtctttactttcagacctcatcaacctcaatctctcagaatccacagaaaagatcattgctgagtacatatgggttggtggatctggtatggacctcagaagcaaagccaggactcttcctgggccagtgagtgaccctgcaaaacttccgaagtggaactatgatgggtctagcacagatcaagctccaggg

SEQ ID NO: 137906 - DNA, 255 bp, Glycine max
ttttacttcccctatggctcgtcactccttgctcttagccctcctcctcttcgccgccgtggccaccgccgcgatggcgtggcgcgtccgacgccgacgacatcctgatccgtcaggtggtgccagatgttggcgaagcgaagaggaggacaacctgctgaacgccgagcaccacttcgcgagcttcaaggccaagttcgccaagacctacgccaccaaggaggagcacgatcatcgcttcggcgtcttcaagtc

SEQ ID NO: 137907 - DNA, 267 bp, Glycine max
ctggaatcacaatcctgaaacaaaaacatcttagcatttaacatcactactagacaacatgaccaccacattggaaagaggtttctcggaagagcaagaagctctggtggtgaagtcatggaatgtcatgaagaagaattctggagagttgggtctcaagtttttcttgaaaatatttgagattgctccatcagctcagaaattgttctcattcttgagagattcaacggttcctttggagcaaaatcccaagctcaagccccatgc

SEQ ID NO: 137908 - DNA, 261 bp, Glycine max
cttcaacctctctgattttgtaattgagttcgatcaaatagctcccagtactttaattgatttctgaatatcatcacttaattttaaggaaagatggtgagcgtagctgagatccgccaggcacaaagggcagaaggcccagcaaccatccttgccattggaactgcaaacccaccaaactgtgttgatcagagcacctatcctgactactacttcagaatcaccaacagtgagcacatgaccgagctcaaagagaaattc

SEQ ID NO: 137909 - DNA, 256 bp, Glycine max
gcaagcgcaattgtctgagcttgagttgcaggttgaaaaactcaaagtggaaaatgcaaccctatacaagcagttcacggatgctagtcaacattttcgtgaggctgatacgaataatcgagtgctaaaatcagatgtagaagctttgagagccaaggtgaagttagcggaggatatggtcactaggagctcttttactacgttaaactatcagcttcttcagacacaacaacatcaaatgagcacacccccgcaa

SEQ ID NO: 137910 - DNA, 253 bp, Glycine max
caaacacaacaacactctctcttctcgctcttggcttttcgctcttcactcactctcattcattcatttccaccgttcatggatcatataagcgtgtggggtaacacgcccttggcgacggtggatcccgagatccatgacctcatcgagaaggagaagcgccgtcaatgccgcggaatcgagctcatcgcctccgagaacttcacctccttcgccgtcatcgaggccctcggcagcgctctcacgaacaaat

SEQ ID NO: 137911 - DNA, 256 bp, Glycine max
cgttcctttcttcgttccttccccaacccaatcttcgccttcgcccacaacaactcctccttcaggatcgctgccaacgttactttccatttttacccttcatcctcgagaaaaaaatggcgaacgcagcatctggtatggccgtccatgatgagtgcaagctaaagtttctggagctcaaggcgaagaggacgtaccggtatatcgtttttaagattgaggagaaatcgaagcaagttattgtggagaagctggg

SEQ ID NO: 137912 - DNA, 262 bp, Glycine max
ggagaaaccaacttggcttattgcaatggctaacttgtttgttgttattcatgtaattggaagctatcagatttatgcaatgccagtgtttgacatgattgaaacggtgatggtcaagaaattgaatttcgaaccaagcagaatgcttcgttttgttgtacgtaatgtatatgtggcattcactatgttcattgctattaccttcccatttttcgatggtctcctaggattttttggagggtttgcttttgctccaacaaca

SEQ ID NO: 137913 - DNA, 262 bp, Glycine max
cgcaaaatgataggaaagaaattcttatgcgttgttgtagcggtggcctttgttatgataacaaaggtgccccaaaatgtgagtgctcaaaactgtggttgtgctgaagggttatgttgcagccaacatgggtattgtggtaacggtgaggagtactgcggcacagggtgcaagcagggtccttgttattcgagcacaccaagtactaacaatgttaatgtggctgacattgtcacaccacaattcttcagtggcataattg

SEQ ID NO: 137914 - DNA, 254 bp, Glycine max
ctcaggttgacaaggaacaatttgaaaaagttctttcatatattgagcatggaaagaaagaaggagctacccttttgaccgggggtaaaacagtggggaacaagggctactttattgagccgacaattttctccaatataagagaggatatgcttatagcacaggatgaaatatttggcccagtgatggcactgaagaagtttaagaccactgaggaagcaattaagagtgctaacaataccaagtatggccta

SEQ ID NO: 137915 - DNA, 254 bp, Glycine max
agacactactgaccagcattgcactatcttctatgataaggaaaaggtcgagcttctagaaggtggaaccttttggttgtctgagtctccctctgtacctggaagcatgtcatggggttctgaagttccttgcattgcaacatgggctatttcaactgaaaggtgttgagcctcctggattctcatttcagatagtaaacacaaatatggatgagtttagtcctcgtgcccgtagcgaagtgctttacttacat

SEQ ID NO: 137916 - DNA, 254 bp, Glycine max
gaagaaacaaagcatgagtatgttgatcttgttgctgaacatcttttgacaaacgccatccgtcctcaaattaattcctttctagaaggttttaatgaattggtaccacgagaacttatatccatatttaatgacaaagagcttgagcttctcataagtggtcttccagaaattgatttggatgacttgaaggccaacaccgagtataccggctatacagtggcatcaaatgttgttcaatggttctgggaggt

SEQ ID NO: 137917 - DNA, 252 bp, Glycine max
gtaaccaatcatctttagttcttcagtaatttattgtgggattctattctaagattttgagaatgtctagctgtgggtgtggaagcagctgcaactgtggcagcaactgcggttgcaacaagtactcttttgacttgagttacgttgagaagacaaccacagagactctagttttgggtgttgggcctgtgaaggcccaattggagggtgctgaaatgggtgttgcatctgagaacggtggctgcaactgtg

SEQ ID NO: 137918 - DNA, 255 bp, Glycine max
caaggtgattcaactatacccaattaactagccatggaaatgtttcccttgttgccttactttctcttatcatcccttgtttttcttctcacattcaagctattattttcccaaagaagaaaacacaaaaaccttccaccaggtccacctcctcttcccataatcggcaacctcaacctcctcgaacgccccctccaccgtttcttaacccgcacttcaaaaacatacggcgacatcttttctctctggttcggc

SEQ ID NO: 137919 - DNA, 261 bp, Glycine max
atgactttatgaagtatgctcaagatgaggaagctgctgatgatcaagaggagacaggatggaaatacattcatggtgatgttttccggtttccaaagcacaagtctttcttttcagcagcccttggttctggtactcagttattcacacttacaatcttcatttttatgcttgcactggttggtgtgttttatccatataaccgaggtgctttatttactgcactggtggtcatatatgctctcacatctggcattgctg

SEQ ID NO: 137920 - DNA, 252 bp, Glycine max
gaaccgaaaatggttgcgactttgagtcttccgatcatagacctctcttctccccatcgtctttccacagccaattccattcgtcaggcatgcgtggaatatggtttcttttaccttgtgaaccatggggtggacaccgattttgtgagcaaagtcttcgaccaaagttgcaagttcttctcgcttccggtccaacgcaaaatggacctggcccgcaaggaatatagaggctacactcctctctatgctgag

SEQ ID NO: 137921 - DNA, 253 bp, Glycine max
gggagttgttgaatcgggaagcaaaaaaaatgagaatccatcacatagcatgcctccaagacaattattcctatctgatcgtagacgagagcacgaaggaagccgcggcggtggacccggtcgaaccggagaaggttcttgaagttgccagctcgcacggcctcactctcaaattcgtcctcaccacccaccatcactgggatcatgctggtggaaacgacaagataaagcagctggtgccaggaatcaaagt

SEQ ID NO: 137922 - DNA, 250 bp, Glycine max
tgaattggaatcccaagctaattgcaactctatcatgtgtgtgcaaatggtttgatgatcttgccaagcgagttctatggagagagttttgtcgaacaagagctccgaaaatgttgtgtgatctgcaatctaatgggagccacattgttgatgggaactggagggccctagggaagcttcttatatactgttcaggatgcacgaaaggtggcttgttcaatagcattcagattgctggtcactttgttta

SEQ ID NO: 137923 - DNA, 251 bp, Glycine max
gtctcttcagaccgcgactccgagacaatccgcgttttgtctaacgttcagtccagtgtgaagcaatgtgtggataacagggggcttggactcactgcacatattattgatcattgcaagttaattcttaaataccctgaaggtaccaacagcacttggtacaatgcacagtttaagaaatttgagcctttggagtacaattatgatttgtgtgagacaatcctattgtgggaacagtatcggaacatgac

SEQ ID NO: 137924 - DNA, 254 bp, Glycine max
caactcagcgtgggccaatatttacccgccaactacggcgattgggttcccaaccccgacccggagcttcgcagaagatgcggcattctgctccatccgacgtcgtttcgcggcccctacggaattggcgatcttggcgacgaggccttccgtttcatcgactggctccaccactcgggttgctccgtttggcaggttcttcccctcgtgccacctggcagaaaggccaacgaagaaggatccccttactctgg

SEQ ID NO: 137925 - DNA, 253 bp, Glycine max
gctggtcctaataccaatggttcacaatttttcattacaactgtgacaactagctggttggacggaaggcatgttgtttttggtaaagttctttctggaatggatgttgtttacaagattgaagctgaaggaacacaaagtggcactcccaagagcaaggttgtgattgttgacagtggtgaactccctctataattgtacttcttgattctcaatcaggacttgttgaaggtgttcccagttttcatttcaa

SEQ ID NO: 137926 - DNA, 251 bp, Glycine max
gaagctactaggttatattgacaaaggaaatgaacgccttcttattacagagtttgtgccaaatggtacccttagagaacatttggatggtatgcgtggaaaaatcctagacttcaatcaacgcctcgaaattgcaattgatgttgctcatggcttgacctatctgcatctgtatgcagaaaagcaaattatccatcgagatgtgaaatcatccaacattcttctgacagaaagcatgcgagctaaagttg

SEQ ID NO: 137927 - DNA, 251 bp, Glycine max
gcaattcagttagatttaatagcaaaagttcgtggactttctagtgcagaagcattctttctgagtctggaagataagttaaaagataagaagacttatggtgccctgttgaatgtatatgtgcattctagatcgaaggaaaaggcagaatctttatttgatacaatgaggagtaaagggtatgtaatacatgcactaccatttaatgtaatgatgactctgtacatgaaccttaatgaatatgctaaagt

SEQ ID NO: 137928 - DNA, 253 bp, Glycine max
ctcagtgaaccacaccacacaacacagacgatttctcagtctcaatctcagtgttggagacttgatcttaagagaaatcatagtttgtttaatttcaattctgagcaaaggccaacatgcaagtttttcccagtgaaggcgaaagtgctttgtcagttgttggtccaaggccaatggaatggtctactgttccatacaatgcccctcaagctcctgggccaaatggaaagcagcggacctcaagtttagaatc

SEQ ID NO: 137929 - DNA, 254 bp, Glycine max
gctgtgatgaccactacagttgctgccctgcagactatcccatctgcaacacttacgctggaacttgtctcaggagcaagaacaacccctttggagtgaaggcattaaggcgtactccagcgaaaccccattggaccttcggacgtaagaacaaggtcagcagtgcttaagcagtttaaggaaatgtgaacgtgcagaaggagccaatgatgaagtaaaagggaagacgaaggactaaagcatcagctggatgc

SEQ ID NO: 137930 - DNA, 264 bp, Glycine max
gcaaaagcctctagagaaggatgctggtcagagaacaattgcatggctggacaaattgagaaattcaaatggttcattgccaacttcgcaaattcggttgaatatgcaacgagtaatgcaaaccaatgctgctgtgttccgtacacaagaaacattagaagaaggttgtcaattaattgataaaacatgggagagcttccatgatgtccaggtgaaggaccgcagtttaatctggaactctgacttgattgagactattgaatt

SEQ ID NO: 137931 - DNA, 249 bp, Glycine max
tgccgatgttgttggaaacccagttctctttaatgaatggaaagcagagatggaaatgatggctggaaggataaagaatgttagacagcagctatatgatagtattacttcaaaagacaaaagtggaaaggattggtcattcatacttaagcagataggcatgttctcattcactggcttgaacaagaaccagagtgacaacacgacaaacaagtggcacgtatacatgacaaaggatggaaggatttc

SEQ ID NO: 137932 - DNA, 260 bp, Glycine max
gtgaatgtgacgctgatattctctcttgcaagatatgaagctgtaattgatgcatacttggatggtcttgaggcatctgagttaaatgacctctctagagttacaagtgttgcctctttcttcgtcagtagagtggacaccctcattgacaaggcccttgagaaaattggcaccccagtggcccttaatctacgcgggaaggcagcggtagcccaagcagcattggcttaccagctctaccaaaggaaattttctggtcc

SEQ ID NO: 137933 - DNA, 263 bp, Glycine max
gtcatgaagcgtacaacactagtggctaacacttcaaacatgccagtggctgctcgtgaagcttcaatttatacaggaatcacattagctgagtatttcagagatatgggttataatgtcagtatgatggcagattctacatctagatgggcagaagcattgcgtgaaatctctggacgactggcagaaatgcctgcagatagtggatatcctgcataccttgctgcacgtttagcctcgttctatgaacgtgctgggaaggt

SEQ ID NO: 137934 - DNA, 267 bp, Glycine max
tggagaagaagaagggtgagctaaagtcaattttccttcctttcctttccactagtcacataatcccgctagtggacatggccagactcttcgccttgcacgacgtcgacgtcaccatcatcaccaccgcacataacgccaccgttttccaaaagtccatcgatttagatgcgagtcgcggtcgccccatcagaacgcacgttgtcaacttccccgccgcacaagtgggtctccccgttgggatcgaagccttcaacgtcgatacgc

SEQ ID NO: 137935 - DNA, 267 bp, Glycine max
atactttgagaatgttgggggcaagacacttgatgcagtactcccaaatatgagagttcttggtcgcatacctgtttgtggaatggtctcacagtacaatctgacacaacctgaaggtgtaacaaatttggcaaatcttatatttaagcggattcgaatgcaaggttttattgttggtgaattctatcacctatatccaaaattcttggagtttgtcctgcctcatattagagaagggaaggttgtgtatgtggaagatattgctga

SEQ ID NO: 137936 - DNA, 268 bp, Glycine max
attaggtttttttgttgctctccttcaaactccatctttccaaatcctctctttgcgattgtgttttgatctgcttcctactgcgatagtttctctactgttacatggccatggcggtttccgcaattggttttgaaggtttcgagaaaaggttggaaatatcctttttccagccgggactttttgctgaccctgaaggaaggggtctaagggctcttacaaaatcccagttgggtgagattctaacaccagctgcttgcaccattgt

SEQ ID NO: 137937 - DNA, 263 bp, Glycine max
attcacccaccctccatacacactctctctgagtcggtcgagttgaatcggtgagtcagtgaccgagtcgaaccatgtcggacgaagaacaccatttcgaatccaaggccgatgctggagcctccaagacctatcctcaacaagccggaaccatccgcaaaaacggttacatcgtcatcaagggtcgtccctgcaaggttgttgaagtttctacttccaagactggtaagcacggtcatgccaagtgtcactttgttgggatt

SEQ ID NO: 137938 - DNA, 263 bp, Glycine max
atcagattcgacgctgtcttggacagaatcatcaagcagcgtgaagaggaaagaaggaacaacaaggaaatcggtggaacgcgtcagtttaaggatatacttgatgttttgttggacataggcgaagatgacagttctgaaatcaaattaaccaaagagaacattaaggccttcatcatggatatatttgttgccgggactgacacgtcagctgcaaccatggaatgggctatggcagagttaatcaacaatccatgtgtgtt

SEQ ID NO: 137939 - DNA, 264 bp, Glycine max
gtgaaaaaaagttagggttttgcattttggatcagtcagactcagacatgggaggaggcaatgcccagaagtcaaagatggctcgcgagaagaatctcgagaagcagaaagcagcggctaaggggagccagttggattcaaacaagaaagctatgtctattcagtgtaaggtgtgcatgcaaacatttatatgcaccacatcagaagtgcagtgtaaggagcatgctgcagccaaacaccccaaatctgatctctatgtttgtt

SEQ ID NO: 137940 - DNA, 265 bp, Glycine max
gcagtcgcagaggaaaaccctagctagtagtctcagttcgtttgagagagaaaaaatggcagagggtctcgttctccgcggaaccatgcgcgcccacaccgacgtcgtgacggcgattgccactcccatcgacaactccgacatgatcgtgacggcgtcgcgcgacaaatccatcattctctggcacctcaccaaggaggacaagacctacggtgtcccccgccgccgcctcaccggacattctcacttcgtccaggacgtcgtc

SEQ ID NO: 137941 - DNA, 265 bp, Glycine max
tccattttccctctgtcttccccccctcctctacacaaaaatatattattagcatggagaaggtgaattttgtgaagaatggagagcttagattgcctccggggttccgtttccacccgactgatgaggagctggttctgcaatacttgaagcgcaaggtcttctgcctgccctttgccagcctctatcattcctgagcttcatgtttgcaagtctgatccttgggatttgccaggtgatttggagcaagagagatacttcttta

SEQ ID NO: 137942 - DNA, 261 bp, Glycine max
agttggtgttagtcttggtgtagtgtagctagggagggatatatatctgagtaagatggcatcagagcttgaattgcccccatgcttcagattccatccaacggacgaggtgctggtgttgcactatctctgccgcaaatgcgcgtcgcagccaatcgccgttcccatcatcgccgaaatcgacctctacaaatacgacccctgggacttacccggattggctacttatggagagaaagagtggtacttttttcaccaggg

SEQ ID NO: 137943 - DNA, 268 bp, Glycine max
cttcccatggtctcttctctgcaccctcgccgtaccttctagaaccttccctcagatctcaattccccttccgctttctcctttcatggaaatggcttccactccccgcaccgtcgcagagatcttcaaggactacaccgcccgcagaaccgccatcgttcgcgctctctctcaagatgtggatgaattctacggactctgcgatccagataaggagaacttgtgcctctatggacatccgaatgatacatgggaggtgacttgccgg

SEQ ID NO: 137944 - DNA, 267 bp, Glycine max
ctcgagccgctcacactggtcttcgcttctcattcatcatttctcacctaaccttctcttcgtctcagtctcagatcagaaacctcagccagccatggcagcgttccagaagatcaaggtcgtcaaccccatcgtcgagatggacggagatgaaatgactagggttatctggaagtcaatcaaggacaagctcattttgcccttcttggagttggacatcgagtattatgacttaggccttccttaccgtgatgagaccgatgataa

SEQ ID NO: 137945 - DNA, 262 bp, Glycine max
gtttccttcccttccctaacgatctgaggaagacaccaagcttctctccacgcccttcttgggtaatctgaagtgcagcgatggcggatggattgcactcgcggcatccatcagtagttcagaagttatctggacagtcttatttgttgtctaggcttgcccctactcactcaagaaactattccacaactggtagttacttcaatggaggcttgcagtcttcgggtttggttccagtcatggcacatgcaccggctgagaa

SEQ ID NO: 137946 - DNA, 262 bp, Glycine max
ggaaattgatagatatataaaagcttcacttacagacatgattaagaagagagagaaagcaccaaagacaggtgaagctactagggatgacttgttaggtatacttctggagtcaaatcacaaggaaatacaagaacacagaaacaatgagaatgttggaatgaatctcaatgatgtaatcgaggaatgcaagttattctactttgcagggcaagagaccacttcagttttacttgtttggacaatggtgttgttaagtagg

SEQ ID NO: 137947 - DNA, 260 bp, Glycine max
atcgatggcagagacgaaagaaggttcaggttcggagatgtctctgaaggatcagggcaacgagtttttcaagtcaggaaagtatctcaaagctgctgcactctacactcaagccatcaagctagacccttctaaccctaccctctatagtaatcgtgctgcagcactactgcaattggataagcttaataaagctctagatgatgcagagatgacaatcaaattaaaaccccaatgggaaaagggatatttcaggaagg

SEQ ID NO: 137948 - DNA, 258 bp, Glycine max
tagatatatagaagagccttccatatatagcctcccaaaaaatgaagagtactacctctttggctctctttctactttgtgccctaacttcatcatatcagccttcagccaccgctgatattgtattcgacaccgaaggcaatcctattcgaaacggcggcacatactatgtgttgccagttataagaggaaagggcggcggaatagaatttgccaaaaccgaaacagaaacatgccctctcactgttgtgcaatctc

SEQ ID NO: 137949 - DNA, 261 bp, Glycine max
atagaatatctatctctcattctctcgtgcctcaacgcttttttaactcctttcgcttttccattccaacctctttcacacttcagatctgtttcttcatcggttgtccaagtaaatggcctttgtcaccactgctgaagtgtgtgatgcgaacccacagttaattttgagtggggagcttcgtgcccttcagccagtttttcagatttatggccgtcgacaggttttctctggacctatagttaccttgaacgtgtatga

SEQ ID NO: 137950 - DNA, 262 bp, Glycine max
ttttagtctcccacaggagatgaagcatacaatgaaaatggtttagtgcctcgaacaatacgtttactcaaggataagtacccagaccttgttatctatacagatgttgcattagatccttattcatcagatgggcatgatggcatagttagagaagatggagttattatgaatgatgagacagttcatcagctatgtaaacaagctgtagcccaggtcatatgactgtcttctataaacattttcaactgtaggcagttac

SEQ ID NO: 137951 - DNA, 262 bp, Glycine max
ggctaatccttcacttgtttgttttgtggtgtattattacattttgcaccatgccttctctcttcgctagaaaccagaggttctcattggctactctcctgcttcttctggaactattgacaggaaaccttcgcatggcagatgctcaaattggtgtgtgttatggcatgctgggcaacaatctaccgtcagcaaacgatgttataggtctttatagatcaaaaaaacataaagagaatgagactctatgatcctaatcaag

SEQ ID NO: 137952 - DNA, 257 bp, Glycine max
attgtttgttgttgtaactcgttcttcttcttttgttgttctgtgtttgttttttctctcacctgaaaatgtcttgctgcggtggtaactgtggttgcggaagctcctgctcgtgctgcaacggctgcggaggctgcaagatgtacccagacttgagctacactgagtcaaccaccaccgagaccttggtcatgggagtggcacttgttaaggctcaatttgagggtgctgaaatgggtgtgcccgctgagaacgat

SEQ ID NO: 137953 - DNA, 262 bp, Glycine max
cttcgaatccctggctgaacttgagacttgggagtgaactgaaactgcataaagtatggcttcgacggcagcgtaccttgctcggtgcgcggcgcagaaggagagggttcggatcctctaccgccgcgccctcaaagacactctcaactgggccgtacatcgccacctcttctacgacgacgcttcaaacctccgcgaaaggttcgaggagaacagacacgtggaagaccctgataccattgacaggctcataacggatgct

SEQ ID NO: 137954 - DNA, 96 bp, Glycine max
gatggcttccttaagctccttagtgctgctccttgcagctctaattctatcccctcaagttcttgcaaactatgagaatcccgcagtgtacaagca

SEQ ID NO: 137955 - DNA, 262 bp, Glycine max
tattcttcaagattcaggtactgcgtttcggaagcagacacagatggctcgtacgaagcaaaccgctcgtaagtccacaggaggaaaggctcctaggaagcagcttgcaaccaaggctgcacgtaagtctgcaccaactactggtggtgtgaagaagcgccaccgttatcgtcctgataccgttgctcttcgtgaaattaggaaataccagaagagtaccgagcttttgatccggaagctctccttccagaggctggttcgt

SEQ ID NO: 137956 - DNA, 258 bp, Glycine max
gtcaatcttgttttaggagatctatacgatcaccaaagtttggtgagtgctataaagcaggtcgatgtggtaatttctactgtaggacacctgcagctagctgatcaagataagatcatttctgcaattaaagaagcaggaaatgttaagaagttctatccatctgagtttggaaatgatgtggaccggactcatgcagttgaaccagccaagtctgcatttgcaacaaaggccaaagttcgccgagctattgaggct

SEQ ID NO: 137957 - DNA, 260 bp, Glycine max
tagctttcctcggttataaccttcaaggtggaaagaaaaacccacccactatcccaattccaataaataccttcctctctatattttcgcacaataccctctcacccttcaacgatgagttactacaatcagcagcaaccacccgtcggtgttcctcctccccaaggttacccaccgccggattcttacggaaaggacgcgtaccctccgccagggtacccgccgcaaggaggataccctccgcaggcgtatccagcaca

SEQ ID NO: 137958 - DNA, 258 bp, Glycine max
ttgatatcaagacaaatgctaccattgctattgatgttcgggtgaaacaccttagtcctaaaggcaaccttaggaggcttgaaaggataatccggagggaagtgaatattgaaatggattgcatctatgaaaacttttgtgggtttgcttttcacttcctgttttctgggtaagattatgtttctgttatgaggggctagggaagggaggtgtcttaatttgataaaaaaaaataactgtgttcaacaaccactgtga

SEQ ID NO: 137959 - DNA, 253 bp, Glycine max
tggagaagaagatcttgttgatgttcttttgagactcaaagaaagtggcagcctcgaggttccaatgacgatggagaacatcaaagctgtgatatggaacatatttgctgctggaactgatacctcagcatcaacattggagtgggcaatgtcagaaatgatgaaaaatccaaaagagaaggagaaggcacaagctgaattaagacaaatattcaaaggaaaggaaataatacgtgaaactgatctagaagaa

SEQ ID NO: 137960 - DNA, 260 bp, Glycine max
gagagagagagagaggagagagtattggcgcttcatcaagatgggtatttctagggattccatgcacaagaggcgtgccactggtggcaagaaaaaggcttggagaaagaagagaaagtatgagcttgggcgtcaggcagcaaacaccaagttatcaagcaacaagacaatcaggaggattcgtgttagaggtggcaatgttaaatggagggcattgaggctggatactggcaattactcatggggtagtgaagcagtta

SEQ ID NO: 137961 - DNA, 264 bp, Glycine max
gtcattctatcatttcttgtcagccagtattctctctatggctatgatgctgcagcacatttaactgaagaaaccaaaggtgcagacaagaacgggcctattgcaatactaggtagtattgggatcattacagtatttggatgggcttacatcttggcacttacattcagcattcaggattttggttacctttatgatccaaacaatgagactgctggagcatttgttccagcacaaatactctatgatgcattccatgggaga

SEQ ID NO: 137962 - DNA, 263 bp, Glycine max
gaatttgctagagaattagaagaataaacataataccccagatggcttcaaaaacttgttcctcccttgcccttttcctcacactcaacctcgttttcttctcacttgtctctgcatgcggttatacaccatgccctggtccaaacccaaagccaaggcccaaccccaaccctaaccctaaccccagcccaagtggctcgtgcccccgtgacgcactcaaactaggtgtatgcgccaatgtgctaaacttggtgaacgccatt

SEQ ID NO: 137963 - DNA, 255 bp, Glycine max
gtggtggatatggtggtggtggaggttatggtggtggtggaggtcatggtggcggtggaggttatggtggcggtgggagagaccgtggatatggtggtgacggcgggtcccgctactcgagaggaggcggtgcttcggatggaggaagctggaggaattagggttaggttttttagtgggtgaaaaaatggggggaggttctgttggagtaatatcatccccttgatattaattgtggtaattttaggtttggaa

SEQ ID NO: 137964 - DNA, 256 bp, Glycine max
ttaaagtccgctaaaggaaaggttttgatgcaagctatgtatggagtaaaggtgcagacagtatttgtatgcagtgtgtttgctgcggctttttcgggctctacaaagaatatgtcagatttgaatgtggctgatgtatattcttgggctccaacctttaaaagtttgcaagatcttgtaaatgaggaaattagagtaagattttcaagtgggagatttactatattgaatgagttggacatagttgaatcctctg

SEQ ID NO: 137965 - DNA, 256 bp, Glycine max
ttattccattctcttctatgctccagtgctgtttcaaagcatgggatttggaggagatgcatcactcatctcttcagctttaaccggtggagttcttgctagttcaacgttcatttccatagcaacagtagataggttgggcaggagagttcttcttgtcagtggtggactacaaatgatcacatgccaaatcatagtggccattattctaggggtcaagtttggagcagaccaagaattgtcaaaagggttttca

SEQ ID NO: 137966 - DNA, 256 bp, Glycine max
gttttctggatgtaggtggcaatgcctctgaaaaccaggttgttgaggcatttaaaatattgactgctgatgacaaagtgaaggcaattttggttaacatttttggtggtataatgaagtgtgatgttatagcaagtggaatagtgaatgctgcaaaagaggttgcactgaaagtaccagttgtagttcgtctggaaggcaccaatgttgatcaaggaaaaagaatattgaaggaaagtggtatggcattaataac

SEQ ID NO: 137967 - DNA, 249 bp, Glycine max
gtgttgttgaggttttttgtagcagaattcagtgcggtgtgttgtagcagcgattagaaggaaggaggaaagatgaacacagacatcactgcatcgacgaagccagagtacccagtcattgatcgcaaccctcctttcaccaaagtcgtcggcaacttcaacaccctcgactataaccgattcgtcacaatcaccggcgtttccgtcaccgtcggctacctctccgggattaagcctggaattaggggt

SEQ ID NO: 137968 - DNA, 259 bp, Glycine max
tttaagggtccctttccattctctcagacagtggaagcatttgcatacttgaagactactagagccattgggaaagtagttctacatcccatcccataaacatatttaattaagcatataaggagagagcacagccttttaattatgtaatatgaatattgttagtcacgaatgtttagatttagaaacagagtgtccttataaggttgtattggtagattatgtcatatcgagttcaaatgaaggtagtgctatcgtt

SEQ ID NO: 137969 - DNA, 259 bp, Glycine max
atccccatgaagcacgcgggcatgcctccgaagcccacgaagctttacagaggggtgagacagaggcactggggaaagtgggtggctgagatcagacttcccaagaaccggaccaggctgtggcttggaaccttcgacaccgccgaggaagccgctctggcatacgacaaggccgcgtacaagctccgaggtgacttcgccaggctcaacttcccaaacctgcgacaccagggttcctccgtcggtggtgatttcgggg

SEQ ID NO: 137970 - DNA, 201 bp, Glycine max
ggacgccttgggtgattgcattgttgcatgcaccttggtataatactaatgaggcacatcaaggtgaaggtgaagacatgagacaggccatggaagagttgctttatgaagctcgtgttgacttggtctttgctggccatgttcatgcatatgaacgctttactcgaatttatgacaataaggctgattcatgtggtccgc

SEQ ID NO: 137971 - DNA, 250 bp, Glycine max
tggaaattggttgattgggggtgacctagaggtcattgaaccaatccagtacaatgatggacttgatcattttcggctgtctccagcagaactccgtgcagagttcacaaggcgcaatgcagatgctgtgtttgccttccagctccggaatcctgttcacaatggccacgctttgctaatgactgacacccgtaggcggcttcttgagatgggttataagaatcctgtcctcttgcttcatccactggga

SEQ ID NO: 137972 - DNA, 254 bp, Glycine max
gccggatctgctaaaatacgcttgatccatatgggcctcctcgaccacttgtgggacgacaccgtcgccggcccaaggccggaaaacggtctcggcaagctccggaaacaccacaccttcactttccgacctagctccggcaaggaagcggagggcgggagcgtgagatcgtacggtactgaatcgtcggaggaagcgactagagtgacgcgtagtatcatgatcgtgaaaccgccagggtaccagagtggatc

SEQ ID NO: 137973 - DNA, 254 bp, Glycine max
ggagtttaccccgtgaaatgcaaccaggaccggttcgtggtggaggatattgttaaattcggttcgtccttccggttcggtctggaggccggctccaagccggagctccttctggccatgagctgtctttgcaaaggcaaccccgacgcgcttttgatttgcaacggcttcaaggatgcggagtacatttctcttgccctggttgccaacaagcttgcgctcaacaccgtgattgttctggagcaggaagagga

SEQ ID NO: 137974 - DNA, 252 bp, Glycine max
caacaagttcacttacaactgcgatggccacaccttcaactacctcgttgataacggattcacttactgtgtggttgctgttgagtctgctggacggcagattccaattgctttcctcgaacgaatcaaggaggattttaccaagaagtatgctggaggaaaagctgcaacagcggctgctcatagcctcaacagagagtttggacctaagttgaaggaggagatgcagtactgtgttgatcacccagagga

SEQ ID NO: 137975 - DNA, 254 bp, Glycine max
accatccaaacgaagcagaaagagctcatagaagttctcgtcctcttctctctatcttgaatcttcttctcttatcagaaacgcgcgttgctcggataaggttgtgctgcgccgactcactggtactttgcttaatatggcggctgagaagtcaaacattgcaaaagatgtgactgaattaattggcaaaactccattggtatatctcaaccacatcgtggatggttgtgttgccaaagttgctgccaacttga

SEQ ID NO: 137976 - DNA, 256 bp, Glycine max
gaaaaatttcatctatattgagaatcagtatttccttggaagcagttatgattggagtgctgatggcattaagcctgaagccatcgatgctttgcatattatcccgaaggagctttcacttaagattgttagtaagattgaagctggggaaaggttcagtgtgtatgttgtggttccaatgtggccagagggtgtcccagaaagtgcatcagttcaggcaatattggattggcagaggagaacaatggatatgatg

SEQ ID NO: 137977 - DNA, 257 bp, Glycine max
gcatcactgaactaacaaagcaaccctatgtcgaaggtggtttgtgtcaccggagccagcggcgccatcggatcatgggtggtcctactcctcctccagcgtggttacaccgtccatgccaccgtccaagatatcaaggatgaaaatgagacgaaacatttggaggaaatggaaggagcaaagagtcatctccatttttttgaaatggatcttcttgacatcgactccattgccgctgccataaagggttgttccgg

SEQ ID NO: 137978 - DNA, 263 bp, Glycine max
gcgtgcagagcagagagagacgcagccatggggcgaagacccgcgaggtgttataggcaaattaagaacaaaccataccccaagtcacggttttgccgtggtgttcctgatcccaagatcaggatttacgatgttggtatgaagaagaagggtgttgatgaatttcctttctgtgtccatctggttagttgggagaaggaaaacgtttctagtgaggccctggaagctgctcgtattgcttgcaacaagtacatggccaattt

SEQ ID NO: 137979 - DNA, 241 bp, Glycine max
agtgccacgtgtccccgttgataacaaacttcacgtgttcgacctagagactttgacttggtccgtggctgatgcatcaggggatgccccaccgccacgtgtcggtgtcacaatggccgtagtgggagaaaccatatatgtctttggtggaagagatggtgaacacaaagagctcaatgagctctattcttttgacacaagggccagcaattggggccttgatttcaagtggcgatattgg

SEQ ID NO: 137980 - DNA, 259 bp, Glycine max
ctccgccacttctgaatctattgaatcaacaatcatgtcggacgaagagcaccatttcgagtccaaggccgacgccggagcctccaaaacctaccctcagcaagccggtaccatccgcaagaacggctacatcgtcatcaaaggccgcccctgcaaggttgtggaagtttcgacttccaaaactggaaagcacggtcacgctaagtgtcactttgttggaattgatattttcactgccaagaaacttgaggatattgtg

SEQ ID NO: 137981 - DNA, 257 bp, Glycine max
cccttttgtagtaattattagaatttgtagtaattattataagtattagaagcagcaattcttatttatttcagattaatacttgataacctaaacaatatatctatatatagaatatagatagatatatatataatagaacgtaaaaaaaaaaaagaataataaatagaaaaaggagcatgttgattattaagaaagtaaagggcaacaatcatttttgtttaccatgggtaaggacaccatcgctgacataataa

SEQ ID NO: 137982 - DNA, 262 bp, Glycine max
ctcgagccgcgcgcgactactgcgacagctggatgctggcggtggagacgaacaacgccggagacgtggaaccgcgtgccggcgagttgcgtggacttcgtggcggaatacatcaccggagatcggtaccggcgggactgcgacgtgatccggaatttgtcggcggcgttcgcgaagagcgtgggattgaccggagacggaagagacgcgtgggtgttcgacgtcgacgagacgcttctctccaatgtgccttactaccaag

SEQ ID NO: 137983 - DNA, 258 bp, Glycine max
ctaactcaatctctctctctctctctctctgaattttctcctctctccgattccttttattaattggagtttactcgctccttttcctttccctgaaaacatttcctcgtcgtattgatgtcggaaaagggccggccacttccaaaatttggtgaatgggatgtcaatgatccaacctcagctgaggggttcacagtgatttttaataaggccagggatgagaaagagacaggtggtaacccagattcaccaggaaag

SEQ ID NO: 137984 - DNA, 261 bp, Glycine max
agatcccaagattatttcatcatccacctgatgaatttgtcagggcttcaaagttaggcaacacagaatacactatacctgttatagaccttgaagaagttggcaaagatccaagttcacgccaagaaattataggcagaataagggaagcatctgagagatggggtttctttcaggtggtcaaccatggcatccctgtgactgttctagaggacttgaaagatggggtgcaaaggtttcatgaacaagatattgaggaga

SEQ ID NO: 137985 - DNA, 257 bp, Glycine max
ccgaacatgaatcgggttaaaattcctgatgcgggacgtggcggctgacggcaacgttagggactccggagacgtcggcggaggccccggaaagagttatcttatctgtttaacagcctgcccaccctgggaacggctcagccggaggtcatggtccagcggctggaagagcaccgcacgtcgcgtggtgtccggtgcgcccccggtggccctggcaaatccgtagttccgagtgcctctcacgcccggtcgtactc

SEQ ID NO: 137986 - DNA, 253 bp, Glycine max
ctatgagaggggttagcacacatgacacggttagcgtgaactacgatggctttgtgaatgatgtggagttcggagatgtgttgctggttgatggaggaatgatgtctcttgctgttaagtcaaagacaaaagacttggttaaatgtgaagttattgatggtggtgaactgaaatctaggcgtcatttaaatgtccgtggaaaaagtgcaacacttccttccataactgacaaggactgggaagatatcaagtt

SEQ ID NO: 137987 - DNA, 258 bp, Glycine max
ggcgttctatatattattgaattgacaatgaggcctgctcttgctttgcttcctcttctatttgctttcttgttagctgccactacggaatcaagaaaagatccaggggaatattggaaaatgatcatgaaagatcaggaaatgccagaaggacttcaaggtcttgtttcatttcaatctgaaaataaccctaagactcaagagcagcttggtaaaggttccaaaaaccattgtgaagagtctctagttacaaataca

SEQ ID NO: 137988 - DNA, 258 bp, Glycine max
ctttcttcctcttcctcagtagtgcgattttcgattctcttctctgcaactatgcctaaccctaaggtcttcttcgacatgaccatcggcggtcaacctgccggccgcatcgtgatggagctctacgccgacgtgactccgagcaccgccgagaacttccgcgcgctctgcaccggcgagaagggcgccgggcggagcggcaagcccctccactacaaaggctcgtccttccaccgcgtgatcccgaacttcatgtgc

SEQ ID NO: 137989 - DNA, 256 bp, Glycine max
atgaaggtttcatgaatttcattcacagggatgaggaggttaattacttcccttcaaggtatgatcctgttcgtcatgcagaaacgttccccatacctcctgctatctgcagtggaaggcgtgaaaagtgtggaattgagaaggagaacaactttaagcagcccggagagagataccgatcttgggcacctgacaggcaagatagatttaatcgccgatgggttgatgctttatctgacccacgggtcacccatga

SEQ ID NO: 137990 - DNA, 259 bp, Glycine max
gttgaaaaaagcaagagatgaattggatactttcgtaggtcaagatcgcttggtaaatgaatcagaccttccaaacctattttaccttaagaagatcatccttgagacacttaggttgcatcctcctgctccactagcaataccacacgtgtcttcagaagacatcaacataggagaattcaatgttccacgagacactatagtgatgattaatatttgggctatgcagagagaccctttggtgtggaatgaagccaca

SEQ ID NO: 137991 - DNA, 259 bp, Glycine max
aagctcgagccggttcggctgtagcttgctgctaagatggttctgctaggtgagctctgggatgacgttgttgctggccctcaacctgagcgtggccttggcaagctcagatgactcaccaccctcaaaactattgatcaaggacacattagcaagctgcagaagacgttgtcgatgccgtcgacaccgacaatcccgatgactccgatgagtccaacgagaccgggatgcgcgcgtaaagctgtcaacgtttggagga

SEQ ID NO: 137992 - DNA, 257 bp, Glycine max
caagttgggaacaacaacaacaacaaaaatcaagccaatgtttgtgggttttggtttcatttcattaagatgatctgtttatctcttttcttctttttaaaatttaaagtctttgtattttgtatgtaaagatgtaaaattatgattattaggtggtgcatgtgtcgcgtcatgggccaatgttatcctctgcttttaagttggaagaggcccaactcatgtgtgatgtacggctgtgattgtgtaatttaatttgc

SEQ ID NO: 137993 - DNA, 254 bp, Glycine max
gatctggtcatcgttgggatctccatacgccggatctgctaaaatacgctagatccatatgggcctcctcgaccacttgtgggacgacaccgtcgccggcccaaggccggaaaacggtctcggcaagctccgaaaacaccacaccttcactttccgacctagctccggcaaggaaacggagggcgggagcgtgagatcgtacggagacgaatcgtcggaggaagcgacgacagtgacgcgtagtatcatgatcg

SEQ ID NO: 137994 - DNA, 254 bp, Glycine max
cagaattctctaaaagagatctttttctgatctttgaagaaagaagggtctttgcatgattttggagatgtctctgctctcagatctcatcaaccttaacctctccgataccaccgagaaggtgatcgcagagtacatatggatcggtggatcaggaatggacctgaggagcaaagcaaggactctcccaggaccagttagcgacccttcagagcttcccaagtggaactatgatggttccagcacaggtcaag

SEQ ID NO: 137995 - DNA, 254 bp, Glycine max
ctctggttgattcggatctagagtcttcagtttctcctcgttgttcttcgctttcctgttttcaatttcgattctttcgttaatttaataagatgtttgggagggcaccgaagaagagcgataatacgaggtactacgaaatcctcggcgtctccaagaacgcttcgcaggatgatctgaagaaggcttacaagaaagccgccattaagaatcaccccgacaagggcggtgatcccgagaagtttaaagagctg

SEQ ID NO: 137996 - DNA, 254 bp, Glycine max
cgcctcagtagaccatggcctcattgggtgggttacaaaatctaagcggcatcaattttcttatcaaaaaagagggtccaaaagtcaatgcgaagttcgagctgaagccgccaccatatccactgaatggtttggagccggtgatgagccagcagacacttgagtttcattgggggaaacaccacaagacatatgtggaaaatctgataaaacaaattgttgggacagagcttgatgggaaatcactagaagag

SEQ ID NO: 137997 - DNA, 255 bp, Glycine max
gttcaatggtttggcatggctcttcttgggtgtccccacaagcagctcactactttataaggaggaatttgaaaagatgaaggagaaagcacctgacaacttcaggcttgactttgctgtgagcagagagcaaacaaacgaaaaaggagagaaaatgtacatccaaacacgaatggctcaatatgcagaagagttatgggaattactgaagaaagataacacttttgtctatatgtgtggactgaagggaatgga

SEQ ID NO: 137998 - DNA, 250 bp, Glycine max
gtctatgacagcaaggttggcagtgtctttgcagcactgggttctgatggaggagtgaagttgtattggggtattgcagctgatggatctgtggtgatctctgatgatctagaagtcataaaagagggttgtgccaaatcctttgctccctttccaacagggtgtatgtttcacagtgaaggaggtctgatgagttttgagcatccaatgaacaagttgaaggcaatgccaagggtggacagtgaagggg

SEQ ID NO: 137999 - DNA, 254 bp, Glycine max
aaacaaggatgcatccactgcaatgactcgagcactttaagcatcttctggcaaatccctcagtatgcatttataggagcttccgaggtttttatgtacgtaggccagttggagttcttcaatgctcagacaccagacggcttgaagagctttggaagtgctctttgcatgacatccatttcccttgggaactatgtgagtagcttacttgttagtgtggttatgaagatatccaccgaagatcacatgccggg

SEQ ID NO: 138000 - DNA, 256 bp, Glycine max
caacctctctctcttcttttcttcagttcggtggagggagggagccgtagcagcggaagctctagcttgggtagcgaatcacaatggcgagaggattaaagaagcatctgaagaggcttaatgccccaaagcattggatgcttgacaaactgggtggtgcatttgctcctaagccctcatctggaccacacaaatcgagggaatgcctgccactcatactcattttgcgaaaccggctgaagtatgctctaacata

SEQ ID NO: 138001 - DNA, 240 bp, Glycine max
caaactcactctttctaagttttttctatctctttctctctctctctgtctgccatggttctctccaaaaccacctccgaatccgacgtctctgtccactcaaccttcgcttctcgatatgtcagaacttcgcttcccaggtttaagatgccggaggagtcgataccaaaggaggcagcgtatcaaataataaacgatgagttgatgttggatgggaacccaaggttgaacttggcatca

SEQ ID NO: 138002 - DNA, 257 bp, Glycine max
tatattccattctctctgtgtatttccctacctctcccttcaagatgcagatcttcgtcaagaccctcaccggcaagaccatcacccttgaggtggaaagctctgacaccatcgacaacgtcaaggccaagatccaggacaaggaaggaatccccccggaccagcaacgtctcattttcgccggaaagcaacttgaggacggccgtacccttgctgactacaacattcagaaggagagtactcttcacctcgtcctc

SEQ ID NO: 138003 - DNA, 255 bp, Glycine max
cttccttaatttgccaccctaacctactgcattattattctcttccccttaatttctatctccaatccctcagcaaaacgcagcaaatgggtcggcttaatctcctacttgtgtggtcactctcattaacactgtccctttattatctacacccaatctctgctcagctcagtccaaaccactatgctaaaacatgccccaatcttgaaagcatcgttagacaggccgttgccaagaagttccaacaaacctttg

SEQ ID NO: 138004 - DNA, 253 bp, Glycine max
ggcttccttaagctcctcattagtgctgctccttgcagctctaattctatcccctcaagttcttgctgactatgagaagcccccaatttacaagccacctgtttacacaccgccagtttataagcccccagttgaaaaaccaccagtgtacaaacctccagtttacaagcctccagttgaaaaaccacctgtttataagcctccagtttataagccacccatttacaagcctccagtgtataaacctccagtt

SEQ ID NO: 138005 - DNA, 251 bp, Glycine max
catgcacctgacaggtatactggtggatcttcttcaggtccggctgcaattgtggcttctggactatgttctgctgcattgggaactgatggtggaggttcagtccgtattccttcttccctttgtggtgtggtgggatttaagacaacttacgggcggacaagcatggaggggtcattatgtgattctgggactgtggaaattattggacccattgcttcaacggtggaggatgtcttgctagtgtattc

SEQ ID NO: 138006 - DNA, 253 bp, Glycine max
atcagagggagagagagagtgtgaaagttggaatggcgaaaaaggcagtgttgatcggaataaactacccaggaacaaaggcggagctgagaggatgcataaacgacgtgtggagaatgcatcgctgcctgatcgagcgatacggtttctccgaagacgacatcaccgttttgatcgacacggacgagtcctacacggagcccaccgggaagaacatccggtcagcgctgaccaggctggtccgatcggcgga

SEQ ID NO: 138007 - DNA, 251 bp, Glycine max
actctctctgctcttcttctacctttcaagtttttaaagtattaagatggcagagacattcctatttacctcagagtcagtgaacgagggacaccctgacaagctctgcgaccaaatctccgatgctgtcctcgacgcttgccttgaacaggacccagacagcaaggttgcctgcgaaacatgcaccaagaccaacttggtcatggtcttcggagagatcaccaccaaggccaacgttgactacgagaaga

SEQ ID NO: 138008 - DNA, 255 bp, Glycine max
acacatcccagccatgagcctcttcggtataggcagaaaccagagaacattccacccgaaaaaaagtactccttctggaagtaagggagctcaacttcgaaaacatattgatgccacgttaggtagtggaaatctgagggaagcagtaaagctacctcctggggaggatttaaatgagtggctagctgtcaacactgttgatttcttcaatcaggtgaatctgctttatggtacccttacagagttctgtactcc

SEQ ID NO: 138009 - DNA, 254 bp, Glycine max
ggagagaagaaaattaagttaacaaattggagagaaggaattcccataatagagcataagctcaagcaaaaaaaggttcttttgattctagatgatgttgatgaacataaacacttacaagcaattattggcagccctgattggtttggttgtggtagtagagtcatcatcaccactcgaaacgaacatttgttagcgctacacaatgttaaaataacatataaggtgagagagttgaatgagaaacatgctct

SEQ ID NO: 138010 - DNA, 249 bp, Glycine max
gctctgctcgtgcctctagggttatcatatctccatttccatttcctctctctcagtttccaagaatcttaagctatgggaaagtcttacccaaccgtgagcgctgattaccagaaggccgttgagaaggcgaagaagaagctcagaggcttcatcgctgagaagagatgcgctcctctaatgctccgtttggcatggcactctgctggaacttacgacgtgagctcgaagaccggtggtcccttcgga

SEQ ID NO: 138011 - DNA, 249 bp, Glycine max
attgccagataaaacagaatttggagaaaatgaatggtatttctttagtccaagagacaggaagtacccaaatggggtgaggcctaaccgagcaactgtgtctgggtattggaaggctactggcacagacaaggcaatctatagtggatctaagaatgttggggtgaagaaatctttagtcttttacaagggtaggccaccaaagggtgccaagactgattggatcatgcatgagtatcgattggctga

SEQ ID NO: 138012 - DNA, 250 bp, Glycine max
acgtatcttcatcaataatcgcagaagcagtttccggtgcatctcatcgtcttccaaaatgaacgacgcagatgtctcgaagcaaatccagcagatggtgcgtttcatccgccaggaagctgaggagaaagccaacgagatctctgtatctgccgaagaggaattcaatatcgagaagctgcagttggttgaagccgaaaagaagaagatcaggcaagaatacgaacgcaaagagcgccaagtcgaaatt

SEQ ID NO: 138013 - DNA, 248 bp, Glycine max
ttttacttcccctatggctcgtcactccttgctcttagccctcctcctcttcgccgccgtgaccaccgccgcgatggcggtggccgcgtccgacgccgacgacatcctgatccgtcaggtggtgccagatgttggcgaaccgaagaggaggacaacctgctgaacgccgagcaccacttcgcgagcttcaaggccaagtacgccaagacctacgccaccaaggaggagcacgatcatcgcttcggcgt

SEQ ID NO: 138014 - DNA, 250 bp, Glycine max
gaccaggcacttgcaattaaaatggctttggaagcaaagggcatctcttcaaatgtctacgttgggatgcgatactggtacccatttaccgaagaagcaattcagcaaattaagagggacagaataacaaggcttgtggtactacccctttatccccagttttctatatccacaactggatcaagcatccgtgttcttgagcatatattcagggaagatgcctacttgtctaagctccctgtttccatta

SEQ ID NO: 138015 - DNA, 251 bp, Glycine max
aaggcttatggtggatacctaggcacccagagacgaggaagggcgtagtaagcgacgaaatgcttcggggagttgaaaataagcgtagatccggggattcccgatataggtcaacctttcgaactgctgctgaatccacgggcaggcaagagacaacctggtgaactgaaacatcttagtagccagaggaaaagaaagcaaaagcgattcccgtagtagcggcgagcgaaatgggagcagcctaaaccgtg

SEQ ID NO: 138016 - DNA, 246 bp, Glycine max
ggcttgtgcagctctcaatcccatttctgaacggccatggccatggctccagccttctctggaaacccagttcggcggtgactcagacccactgggccccgccgagtttgctgcctcaaatcaatgcgatgaagacgatgcagggaaaagtggtgtgctccacgaacgacaagacggtggcagtggaggtggtgcggctggcccctcacccaaagtacaagaggcgcgtgaggaagaagaagaagt

SEQ ID NO: 138017 - DNA, 248 bp, Glycine max
cttaaaacgagcaataatggcgtttgctcacgacttggagtttgaatcctgcttcttcgcctctggtgttctcagtacgtaggagtgagccggagctcgtggcaccggccaatcccactccccgcgaaattaagatcctatctgagatagattctcaggcgggtcttcgtacgcgaattccgatcatacagttctaacgtaacgatccatcagttgcaggcaatgacccaggtcaagccattcgaaac

SEQ ID NO: 138018 - DNA, 250 bp, Glycine max
gggtgggagaacatagaacttatcagtgataggccacttgaaattatgttgaaagaattcaagcaattaaaagaagagtatccggacagaattctcattgcttcaatcatggaggagtacaataaggctgcttgggaggagcttattgatagagtcgagcaaactggagttgatgcatttgaaataaatttctcatgtcctcacggtatgccagaacgcaaaatgggtgctgctgttgggcaagattgtg

SEQ ID NO: 138019 - DNA, 251 bp, Glycine max
ggatcatcaatggggctataagtgctgcaagcagacaatacgcaatagctattgcactggtgctgctggtattgaggctgctgaggctgcaagtgatcttatgaaagctaatattgcccgtaaggaggctgctacagatgatcctgcacctgtggaggagaaaaagcttgctacatggggtactgatgtccccgatgatctagttctagatgaaaaattgcttgctgaatcactcaagaaggaggaacaaa

SEQ ID NO: 138020 - DNA, 245 bp, Glycine max
gttcctgtgtttgtgactgcatatatctgccactacaatgttcacagcatagacaatgaacttgaggactcctcacagatgcgaggggtagtacaaaccgcccttgttctatgctcttcagtgtacgtaatgataagcttctttgggttcctcctatttggcgaaggaactcttgatgatgtgctggccaatttcgataccaatcttggaattcctttcggttctgtgctcaatgatgctgttcg

SEQ ID NO: 138021 - DNA, 245 bp, Glycine max
aagatgtacccagacttgagctacactgagtcaaccaccaccgagaccttggtcatgggagtggcacctgttaaggctcaatttgagggtgctgaaatgggtgtgcccgctgagaacgatggctgcaaatgtggaccaaactgctcctgcaacccctgcacttgcaagtgaggtgttgggagagcaagcttcaagcagagatagcccttaattaggaataatgataaactattaatgtgtagcta

SEQ ID NO: 138022 - DNA, 239 bp, Glycine max
attaacctcactcaaactcgggatcacagaaaccaacaacagttcttgcactgaggtttcacgatgttgctggaacttgcacttggtttgtttgtgttagctttgtttctgcacttgcgtcccacaccaagtgcaagattagaagcacttcgccacctcccaaaccctccaagcccaaagcctcgtcttcccttcattggccaccgtcacctcttaaaagatgaacttctccactatgc

SEQ ID NO: 138023 - DNA, 248 bp, Glycine max
aaaagctgaagagatcatcaaggaacaagtcacacaactatataacaagcatggaaacactgccgtttcgtgggtcagaaatctcttccacgattgcgtggttaagtcatgcgatgcatcattactgttagcgacggtgagcgatgtagtgtcggagcagacatcggatagaagttttgggatgagaaacttcaagtacgtaaacactatcaaagcagcggttgagaaagaatgccccttcacagtgt

SEQ ID NO: 138024 - DNA, 248 bp, Glycine max
ccttaagctgattgatgttgatgtccccgttgttggtgggcatgccgggattaccattcttcctctgttgtcaaagacaagaccctcagcgagtttcactgatgaagaaattgaggagttgactgtcaggattcaaaatgctggaactgaagttgttgaagcaaaggcaggtgcagggtctgctaccttgtcaatggcgtatgcagcagctagatttgttgaatcgtctcttcgtgcccttgatggag

SEQ ID NO: 138025 - DNA, 253 bp, Glycine max
tctcgagccgaatcggctcgagtttttttttaaaaaaaaaaattcctttaaaaaatgaagagtactatcttcttcgctctatttcttgtttgtgccttcacctcatacctaccttcagccaccgctgatactatcttcgacataaatggtgattttgtccgaaacggtggcacatactacatcttgccagttataagaggagacggaggtggaatagaattcgccgcaacaggaaacgaaacatgccctctca

SEQ ID NO: 138026 - DNA, 250 bp, Glycine max
atccatctcttgtttcttgctttctttcttcaccatgtcacttgctgggaaaatcaccactgaaatcggggttcatgcaaccgctacaaagtggttcaacctcttcgcaacacaactccatcatgttcaaaacctaactgatagagtgcatggaaccaagctgcatcaaggtgaagactggcatcacaacgagacagtcaagcactggacttataccatagatggtaaggttacaacatgtctggagagt

SEQ ID NO: 138027 - DNA, 251 bp, Glycine max
tagtgaccctattattaaggataggaattctgtgtctgtgcaaaagcgtgaaaagcagcttaaaagcatcaatatacacaaacgtaagaagccatcttcaccttacatggataatgcagtcaaagctgcacgcagtaaaccgtctaaaccacaattggacacaactgtgattgatattggacctcctgctgattgggtaaaagtgaatgtacaaaaaactaaagattgttttgaggtatatgctttagttc

SEQ ID NO: 138028 - DNA, 252 bp, Glycine max
ctcagcttgctgcaagcttccccggcaatgctcaaggggtgagattcagtggcaaagcttctgctccagcggaggctgcacctgcgaaaccggatgcttctgctgctgaagatgatgatgaccttgatctctttggcgatgagactgaggaagacaaaaaggcagcagaggaaagggaggctgctaagaagtctaccaagaagaaagagagtggcaaatcttctgttctgcttgacgttaagccttgggatg

SEQ ID NO: 138029 - DNA, 250 bp, Glycine max
gactgaccaggttttcctttacataggaatgtatgctgagaaacttgaaatgctgtctattgcatttgctggggatggtgacaagggaatgctgtatgtgttgaatggatgcaagaagcttaggaagcttgagataagagactgcccttttggcgacatggcacttctgacggacgtagggaagtatgaaacaatgcgatccctttggatgtcgtcctgtgaagtgactgtcggagcctgcaagttgcta

SEQ ID NO: 138030 - DNA, 252 bp, Glycine max
ctctttttcttctctctcaacaacttcaccttcttcctcctcgatcatgtctcacttcaagggcaagtaccatgatgagcttatcgccaatgctgcgtacattggcactcctggaaagggtattcttgctgctgatgagtcaacagggacaattggcaagcgtttggccagcatcagtgtagagaacattgaatccaacaggcgagctcttagggagctgcttttcactgctcctggtgttcttcaatatct

SEQ ID NO: 138031 - DNA, 241 bp, Glycine max
attcggctcgagggattggcattaggttgatctgacatacgcaattgacatggcgagcgcgatggtagaggacgcgaacttcgaagatgaccaactagccaatatgaccagcgacgacatcgtcagagattcacgtcttctcgacaacgagattcgcatcctccaggaagagttgcagaggaccaatttggaattggtatcgtacacgcgacaagatcacggagaatcaggagaagattaa

SEQ ID NO: 138032 - DNA, 247 bp, Glycine max
gcagattctgtaactcaatgtgacaatgtttacactcttgagatgtgcatgactggcctggatagagagaaagcacaggttttctacaaagaacaatctgcttcagctgccatgatgactgttaattccggcattagaaaaattcttccagattccgagatttgtgactttgactttgaaccatgtggttattcaatgaactctgttgaaggcgctgctgtttctacgattcatgttactccagaag

SEQ ID NO: 138033 - DNA, 242 bp, Glycine max
gtaaccaatcatctttagttcttcagtaatttattgtgggattctattctaagattttgagaatgtctagctgtgggtgtggaagcagctgcaactgtggcagcaactgcggttgcaacaagtactcttttgacttgagttacgttgagaagacaaccacagagactctagttttgggtgttgggcctgtgaaggccaattggagggtgctgaaatgggtgttgcatctgagaacggtggct

SEQ ID NO: 138034 - DNA, 247 bp, Glycine max
ccgggttatgttttgtcttctgatattgcacactacattgtatctgaatttgagatgaataaattaaggttgtttaagatggaagatgtgagtatgggaatgtgggtagagcagtttaaccggacgaaaccggtaaactatttgcatagcttcaagttctgccaatacggttgtgtagaaggctattacacagcccattaccaatcgcctaggcagatgatgtgcctgtgggacaaattgcagatgc

SEQ ID NO: 138035 - DNA, 249 bp, Glycine max
aacatagtcctcctcctttgtttttccacatcacatcgaagagaaaaagagagatccatcgatcaattaatttccaatggccgatcagctcaccgacgaacagatctctgagttcaaggaagcctttagcctcttcgacaaggacggcgatggttgtattaccaccaaggaacttgggactgtgatgcggtcgcttgggcagaacccaactgaggctgagctgcaggacatgataaatgaggttgatgc

SEQ ID NO: 138036 - DNA, 250 bp, Glycine max
ggcttccttaagctcctcattagtgctgctccttgcagctctaattctatcccctcaagttcttgctgactatgagaagcccccaatttacaagccacctgtttacacaccgccagtttaacagcccccagttgaaaaaccaccagtgtacaaacctccagtttacaagcctccagttgaaaaaccacctgtttataagcctccagtttataagccacccatttacaagcctccagtgtataaacctcca

SEQ ID NO: 138037 - DNA, 251 bp, Glycine max
ccctagcccctcttctcttcattcttcactcaggaaacaagcatactcggccttctgtaataaggttggaaatgtcttgaggcagggtgctgctcgcagcacacaagcacctgtttcatccatgcttaattacattcgctgcatgtcttcaagcaagctttttattggaggcctttcatatggagttgacgatcagtctcttaaggatgcattttctggctttggagatgtgattgatgcaaaagttataa

SEQ ID NO: 138038 - DNA, 249 bp, Glycine max
gactgaggttgggtttggaaggcaagggcttgtgttgtcacaatccaagagagaagtaatggcgaacatagacatcgaagggatcttgaagcagcagcagccttatgatgggcgcgttccgaagacgaagatagtgtgtactttgggccctgcttctcgatccgtagaaatgaccgagaagcttctgagggcagggatgaacgttgctcgtttcaatttctctcatggcacccacgactatcaccagga

SEQ ID NO: 138039 - DNA, 251 bp, Glycine max
caatatttatgcaaccactgcttccaatgcagaagaaagtagttggggaacatattgccccggggagtatcctagtcctcccccagaatatacaacctgtttgggtgacttgtacagtgttgcttggatggaagacagtgacagacacaatttgcgaacagaaactctgcaccaacaatatacattggttaaagagaggactatatctggagattcatactatggctctcacgtgatgcagtatggtgatg

SEQ ID NO: 138040 - DNA, 253 bp, Glycine max
gcttccttaagctcctcattagtgctgctccttgcagctctaattctatcccctcaagttcttgctgactatgagaagcccccaatttacaagccacctgtttacacaccgccagtttataagcccccagttgaaaaaccaccagtgtacaaacctccagtttacaagcctccagttgaaaaaccacctgtttataagcctccagtttataagccacccatttacaagcctccagtgtataaacctccagttg

SEQ ID NO: 138041 - DNA, 246 bp, Glycine max
atgattgtagatgatgagatcaatgccgcacttgttagacctattcctcatggagctaagctacatgcactaattgatgcctgccatagtggcactgttctagatttgccatttctttgcagaatgaacaggagtgggcaatatgtatgggaggaccatcgccctagatccggtgtatggaagggatctagtggtggagaagttatctgcttcagtggatgcgacgatcatcaaacttcagctgat

SEQ ID NO: 138042 - DNA, 247 bp, Glycine max
gctgcctatgtttggttgcactgatgcttctcaggtgttgaaggagcttcaagaggctaagactgcataccccaacggcttcatccgtatcatcggattcgacaacgttcgccaagtgcagtgcatcagcttcatcgcctacaagcccccaggcttctaagtgtgaaaaatttgcaaagcatttgtagccgccaccccactttgtttgtttgtacttaaactacattcccatttgtttttgcttttt

SEQ ID NO: 138043 - DNA, 247 bp, Glycine max
ggaaaagaaagcatagtgttaaaaagaaaaggaagggcgaaggccaaaaaccaaaacccttggcgagtgaagccctactcactagactacacacttcgcaatgccggttgttgctcaaacccctgacatcgccggcgagcggcagtccggccaagacgttcgcacccaaaacgttgtggcatgccaagccgttgccaacatcgtcaaaagctctttaggccccgttggcctcgacaagatgctcgtc

SEQ ID NO: 138044 - DNA, 248 bp, Glycine max
cacttggcatcgcttctcctctctcccaagaaagaatcatcaatggcgattgaacacgaagacgatctcaaagacgagaagaaccctcgacctctcgacgaggatgacatcgccctcctcaagacctacggtttgggaccttactccacaagcataaaaaaggcggagaaggaaatcaaagatatggccaagaaagtgaatgacttatgtggtataaaggagtctgatactggtttagctgcaccaag

SEQ ID NO: 138045 - DNA, 247 bp, Glycine max
ctttgtggtggcccaaatattgtcaagcttcttgatattgtcagcgatcagcactctaaaactcctagcttaatatttgagtatgtcaacagtacagattttaaagttttgtatccaaccttgactgatgatgacatacgctattacatatatgagcttcttaaggccatagattactgccattctcaaggcataatgcatagagatgtcaagcctcataatgttatgatagatcatgaattacgga

SEQ ID NO: 138046 - DNA, 248 bp, Glycine max
tcgccatctcccaaacccaccaagcccaaagcctcgtcttcccttcataggacaccttcatctcttaaaagacaaacttctccactacgcactcatcgacctctccaaaaaacatggtcccttattctctctctactttggctccatgccaaccgttgttgcctccacaccagaattgttcaagctcttcctccaaacgcacgaggcaacttccttcaacacaaggttccaaacctcagccataagac

SEQ ID NO: 138047 - DNA, 251 bp, Glycine max
ctcgagcctttcaacctctctgattttgtaattgagttcgatcaaatagctcccagtactttaattgatttctgaatatcatcacttaatttgaaggaaagatggtgagcgtactgagatccgccaggcacaaagggcagaaggcccagcaaccatccttgccattggaactgcaaacccaccaaactgtgttgatcagagcacctatcctgactactacttcagaatcaccaacagtgagcacatgaccg

SEQ ID NO: 138048 - DNA, 244 bp, Glycine max
ggcatcaacatcagtggaattaatggagaagtgatgcccggtcagtgggaattccaagttggaccttcagttggaatctcagctggtgatgagatttgggcagctcgttacatcttggagaggatcactgagattgctggtgtggtggtttcctttgaccccaagccaattaagggtgattggaatggtgctggtgctcacacaaactacagcaccaagtccatgagagaagatggtggctatg

SEQ ID NO: 138049 - DNA, 242 bp, Glycine max
tccgaagcaggaactaaatatggctgacttgttggaatggtcaaagcaagataagaaacgaatgcttcatgtcgtctaccgtgttggtgaccttgatcgcaccatcaaattttacacagaatgtttaggaatgaagcttttgaggcaaagagatatcccagaggagaaatatgctaatgcttttcttggatttggccctgaagaatcccattttgttgttgaattaacatataattatgggg

SEQ ID NO: 138050 - DNA, 243 bp, Glycine max
ggcttccttaagctcctcattagtgctgctccttgcagctctaattctatcccctcaagttcttgctgactatgagatgcccccaatttacaagccacctgtttacacaccgccagtttatacgcccccagttgaaaaaccaccagtgtacaaacctccagtttacaagcctccagttgagaagccacctgtttataagcctccagtttataagccacccatttacaagcctccagtgtataa

SEQ ID NO: 138051 - DNA, 245 bp, Glycine max
tgcttattcttttttccacaaccttgaatgtttaccgccccgccggataaggagaaggagaaggaggatctgcgtcgcaggcactgttcatcgccatgtctcgggttgataacagaaattcctcagccaccaagcgtgctaggactgatggtagtcgtagggaagatgattggacatgccccagctgtggcaatgtcaatttctctttcaggacaacttgtaacatgcgtaattgcactcaacca

SEQ ID NO: 138052 - DNA, 243 bp, Glycine max
ccgaggcgaagagccgcgaacaattacgatggcggggacggagcaggatgtgtcgctgggagcgaacaagttcccggagagacagccgattgggacggcggcgcagagccaagacgacggcaaggactaccaggagccggcgccggcgccactggttgacccgacggagtttacgtcatggtccttttacagagcagggatagcagagtttgtggccccttttctgtttctatacatcactgt

SEQ ID NO: 138053 - DNA, 244 bp, Glycine max
ctcccgcaaaatgataggaaagaaattcttatgcgttgttgtagcggtggcctttgttatgataacaaaggtcccccaaaatgtgagtgctcaaaactgtggttgtgctgaagggttatgttgcagccaacatgggtattgtggtaacggtgaggagtactgcggcacagggtgcaagcagggtccttgttattcgagcacaccaagtactaacaatgttaatgtggctgacattgtcacacca

SEQ ID NO: 138054 - DNA, 241 bp, Glycine max
gcttccttaagctccttagtgctgctccttgcagctctaattctatcccctcaagttcttgcaaactatgagaatcccccagtgtacaagcctcccactgagaaaccaccagtctataagcccccagttgagaagcctcctgtttacaaacctccagttgaaaagcctccaatttataagcctccagtagagaagccaccagtgtacaagcccccagttgagaaacctccagtgtacaagc

SEQ ID NO: 138055 - DNA, 246 bp, Glycine max
gttccatctcttgcttcttgcttctattacttgcttctttcttcaccatgtcacttgctgggaaaatcaccactgaaattggggttcatgcaaccgctgcaaagtggttcaacctctttgcaacacaacttcatcatgttcaaaaccttactgatagagtacatggaaccaagctgcatcaaggtgaagactggcatcacaacgagacagtcaaacactggacttataccatagatggtaaggcta

SEQ ID NO: 138056 - DNA, 242 bp, Glycine max
ggctcccaagggtttaacctttctggctgtgttaatatgcgtttcagcactgtcactgagtccttctgttgcgggggaagggcaaaataatggccttgttatgaacttctacaaggaatcatgccctcaggctgaagacatcatcacagaacaagtcaagcttctctacaagcgccacaagaacactgctttctcctggctcaggaacatcttccatgactgtgctgttcagagttgtgatg

SEQ ID NO: 138057 - DNA, 95 bp, Glycine max
gtgtgctgttaggatgcagtgtgctttgatgatgctttgatgaatatgcagtgtgcttttttaagtctaaagaaaaaaaaaaattaaaaacaaaa

SEQ ID NO: 138058 - DNA, 239 bp, Glycine max
aaaaaaataaacaatcagcaggatttgttcaacgtacttggatcaatgtatattgctgtaatattcttgggtctaaattactgttcaacaattctaccatatgtggctactgagcgtgctgtcttgtatcgagaaaaattcgctggaatgtactcttccacagcttattcatttgcacaggtggtcattgaaataccatatatcttggtgcaatcaattttatatgtggctatcacata

SEQ ID NO: 138059 - DNA, 243 bp, Glycine max
caaagaaacactacacatccatggcaactgctggcgtgcaagaagttcgtgttccccctctaacttccacctctgagccaccttctctctttgacggaaccaccaggttgtacatcagttatatttgtccctatgcgcagcgtgtttggatcactcggaactataagggactacaagacaagatcaaactggttcctattgacctacaaaacaggcctgcttggtataaggagaaagtctacc

SEQ ID NO: 138060 - DNA, 243 bp, Glycine max
gtgtcaccaatatcgaaagctagtgcacatcagagatcaggacgtgctggaagaactcaaccagggaaatgctttagacattacactgagaaaagtttcaataatgatcttcagccacagacctatcctgaaatattgagatcaaatcttgccaacacagttcttactttgaagaaactgggtatagacgatctagtgcattttgatttcatggaccctcctgctcccgagaccttaatgcgt

SEQ ID NO: 138061 - DNA, 238 bp, Glycine max
catttctccatttccattttctctctcacttttcaagaatcgtaagctatgggaaagtcttacccaactgtgagtgctgattaccagaaggccgttgagaaggcgaagaagaagctcagaggcttcatcgctgagaagagatgcgctcctctaatgctccgtttggcatggcactctgctggaacctttgacaagggcacgaagaccggtggacccttcggaaccatcaagcaccctg

SEQ ID NO: 138062 - DNA, 240 bp, Glycine max
gttgttgtattgtaattaagcaagaatattaggcaatggagtcttctagaacttcaactactcttgctctttttttaaccatcaatttgcttttctttgtcatggcaagtggctgctacacttgcacacagcctaagcccaaaccctatcccattccctaccctaaacctagtcctgccgcgaagagctgccccaaggacgcacttaagctcggagtgtgcgcaaacgtgcttaatggac

SEQ ID NO: 138063 - DNA, 241 bp, Glycine max
  unsure (1)..(241): unsure at all n locations
caaaaactacgtcaaaacgcgaactccgacgcaggttgccagccatgctcagaagtactttctccgacgacgccgctcctcagaactccgggcgccaccgcgagcgcgagcgaanagcgaggagttccgtggacggaggaagaacacaagttgtttttggttggattgcagaaagtagggaaaggtgattggagaggaatctccaaaaactacgtcaaaacgcgaatccgacgcagttgcc

SEQ ID NO: 138064 - DNA, 241 bp, Glycine max
ggaagttcttcttctggatgcaggaatcaaatgctgatgatgattcacaactgtgtagctcagtgaatgattacattaatagaccattagagttgcttggtgaagaggagcctgatggatcccttccacttcaagtttctgaagatatggctgaggatgacatctcgtctagagctgcaaacttaggtatcccaaacttgggcgtggaagcaacgagtgatgtaacatcttctggtccagt

SEQ ID NO: 138065 - DNA, 260 bp, Glycine max
caaattagttcattctctttgcgcagttccctacctctcctttcaagatgcagatcttcgtcaagaccctcaccggaaagaccatcacccttgaggtggaaagctctgacaccatcgacaacgtcaaggccaagatccaggacaaggaaggaattcccccggatcagcaacgtctcatcttcgccggaaagcagctcgaggacggccgtaccctcgccgactacaacatccagaaggagtcaaccctcaccttgtccttc

SEQ ID NO: 138066 - DNA, 256 bp, Glycine max
ttagcctctttctatgaacgtgctgggaaggtaaaatgtctaggaggccctgaacgtacaggtagtgtaacaattgttggtgctgtttcgccacctggaggagatttctcagaccctgtgacatctgcaaccctcagcatagttcaggttttctgggggttggacaaaaagcttgcccagaggaagcactttccttctgtaaactggcttatttcttattcaaaatactcaacggcacttgaaaccttttatgagc

SEQ ID NO: 138067 - DNA, 260 bp, Glycine max
tgagctcgagcgcgcggtgtgagtgagacggagagtgctaagcaatcgtcttctcttctcggagcttggctttgcttatcgattctctctcctctcgtttctctaattccaaggtttgtaaaagatggcagatgccgaggatattcaaacccttgtttgcgacaatggaactggaatggtcaaggcaggatttgctggtgacgatgctcctagggctgtctttcccagtattgttggccgacctcgacatactggtgtta

SEQ ID NO: 138068 - DNA, 258 bp, Glycine max
gaagactttggctatgcatgaagaatcatcgtctaggcgcaagactgatgataatgttcaggatggagctgttcctgcatatcttcttgatcgtgataacacgaccagagcaaaggttcttagcaacaccattaagcaaaagaggaaggagaaggcagggaaatgggatgttcctctacctaaggtacgtcccgtggctgaagatgaaatgttcaaagtggtccgaactggtaaaagaaagaccagcaatggaagagg

SEQ ID NO: 138069 - DNA, 261 bp, Glycine max
caagaaaataggaagagacacagtaaaggacgggaagaaatcagtagtagcactggatggaggattgtttgaacactatactaaattcagaagttccttggagagtacactaaaggagttgttgggagatgaggcagctgagacaattggcattgagcagtctaatgatggctctggaattggagcagccctcctggcagcttctcactcccagtatttggaagtgcaggagtcctgaagatgtggttaatgtcaaggtaa

SEQ ID NO: 138070 - DNA, 250 bp, Glycine max
  unsure (1)..(250): unsure at all n locations
gccggcgcgcgctgaagtttgctaggttcatgagcaggttcgggaagagttaccgaagcgaggaagagatgagggagaggtacgagatattctcgcaaaacctcaggttcatccgctcccacaacaagaaccttctgncctacactctctctgttaatcattttgctgattggacttgggaggagttcaaaagacacagactaggcgctgcccaaaattgctctgccactcttaacggcaccacaagctc

SEQ ID NO: 138071 - DNA, 249 bp, Glycine max
agaatatagtatggcacaatctagtggcaaaaaattggttgagtggctggttgcagcattattgttcattgccttgttgagtggtagtgcacatgctgttgcaatatgtaacattgactcaagtcaactgaacttgtgtcgtgctgcagttactggtcaaaaccctccaccacctgatgagaaatgctgtgcagttattcgccaggccaatttgcgttgcctctgcagttacaagtcatcctaccttca

SEQ ID NO: 138072 - DNA, 251 bp, Glycine max
tctcgagccgaatcggctcgagggctgtgaaggccatcaaggcagactgaggaaggaagaaacgttgaggagtatgattaccttccatacttctattcccgttcatttgatctgtcttggcaattctatggcgacaatgtcggcgacacagtactattcggagacaacaatcctgcgtcgtcaaagcctaagtttgggacatactggattaaagatgggaaagttgttggggtctttctggaggtggaact

SEQ ID NO: 138073 - DNA, 251 bp, Glycine max
ctcgagcgaatcggctcactagttctagatcgcgagcggcagtcggatctagaacatgtctttcaaaatgcaaacatccttaacctttgctgcccccaacgttatgcctttggcacaaacaaagagtttctcacatgttgccatcttccctaccaatttgaaagccccacgctcttcacctcgttactctccgatcagggttgcaatcgtggagcctgacacttcaactgtggactcaactctgcgttctc

SEQ ID NO: 138074 - DNA, 256 bp, Glycine max
gattttgagcacaatggcctcgacacaatgctttttgcaccaccacgccctcaccactccagctagagcttcaacacagcgcctagttgtgagcaccaaaccaaaccacattgtttgcaaggcagcacagaagcaggttactgtccaagagggtgaggacactactactggccttgtctctcgcaggttggccctcactgtgctcattggtgctgctgctgttggctctaaggtggcacctgtgatgcagcctatg

SEQ ID NO: 138075 - DNA, 257 bp, Glycine max
cggtacctctgctctcgaagaagatcgtgaagaagagggtgaagaagttcaagaggcctcagagtgacaggaaaatttccgtcaagacaaactggcgtagaccaaagggtatagattcccgtgttaggagaaagttcaagggatgcactttgatgccaaacatcggttatggttctgacaagaagacccgccactatctccctaatggttttaagaaatttgttgttcacaatgtgaaggactggaactgctcatga

SEQ ID NO: 138076 - DNA, 261 bp, Glycine max
ctgaagtcactctcccctcctcctccggccagcggaagatgccgctgatgggcctcggcaccgcgccggaagcaaccagcgcggttaccacaaaagatgctgttcttgaggccatcaagcagggctacaggcactttgatgctgcttctgcttatggtgtggaacagtctgtgggagaagccatagctgaagcacttaagcaaggactaattgcatccagagatcaactcttcatcactaccaaatgtgggtcactgataa

SEQ ID NO: 138077 - DNA, 255 bp, Glycine max
  unsure (1)..(255): unsure at all n locations
ctcatcgaatcgaagcgccgcaccgtgtttcttctctgcctgaataacgcaaagaaaattgaagcatcctaagggttgtttctaagggataccgggttgggagagaagattaatcatgcggtaggtagtgccagatgttggcgaaccanagaggaggacaacctgctgaacgccgagcaccacttcgcgagcttcaaggccatgttcgccaagacctacgccaccaaggaggagcacgatcatcgctcggcgtct

SEQ ID NO: 138078 - DNA, 253 bp, Glycine max
ggcctttgtgccggcgacgcatcattcaaatttctgccctatcaactttcgatggtaggatagtggcctaccatggtggtgacgggtgacggagaattagggttcgattccggagagggagcctgagaaacggctaccacatccaaggaaggcagcaggcgcgcaaattacccaatagctgacacggggaggtagtgacaataaataacaataccgggctcattgagtctggtaattggatgagtacaatcta

SEQ ID NO: 138079 - DNA, 250 bp, Glycine max
aggagggcaatttagcttgcacatactcaagcattccaccattgtggcaaagccaaggtcattttagactccaccacatgatcatgatcatatgatcaatccccttaattttttcttttttcttttcccttttctttactctgtattgtatcaatgcttgaaaatggggttgttccaaaaatgtcatatatatttggcctgctaatgggtattgtaaatctctgaacttgaagtgagcacggttttgaga

SEQ ID NO: 138080 - DNA, 244 bp, Glycine max
gaagaagatggctttaggtgttcctgctcttccgttgacatacgtggctcacgttctggcagttgttgccagcgtcttggtcgtggtctgggttctcaatttcaggggtggcttggcttgggattctgacttcaagtccctcatcttcaacattcatccagttcttattgttattggcttactagttcatgggggtgaagctattataagttacaaagcttttcccctaaagaggaagtgaaga

SEQ ID NO: 138081 - DNA, 247 bp, Glycine max
gtgagtccgatggatgatggaatcttccataggattcgatgcatgcgtttgggaatgaaacatgagggccgattacttatctgtgtattagctagagctagggattctattgtttcctctttgtttcctgttggattgcccaatacttcccgataggggaaagagatactccatttgtgctatatttatggtatgtttttatttgtgtggtgtctggaaatggcctatttcattcccaatccgtttc

SEQ ID NO: 138082 - DNA, 251 bp, Glycine max
cgcaaattctgctccatgggactcttcatgccactatctatgaagtcgataagctcaaaattggtggaggcaactttttaaccaagatcgtacaaaacatcgaggagactgttggtattggaaaaggtgtcactaaactatatgcaaccattgatctagagaaggcacgagtggggaggaccagaattattgaaaaagagattaaaaatccaagatggtacgagtcctttcatattattgtgcccatatgg

SEQ ID NO: 138083 - DNA, 251 bp, Glycine max
gctgcctatgtttggttgcactgatgcttctcaggtgttgaaggagcttcaagaggctaagactgcataccccaacggcttcatccgtatcatcggattcgacaacgttcgccaagtgcagtgcatcagcttcatcgcctacaagcccccaggcttctaagtgtgaaaaatttgcaaagcatttgtagccgccaccccactttgtttgtttgtacttaaactacattcccatttgttttgctttttgagat

SEQ ID NO: 138084 - DNA, 253 bp, Glycine max
ctggttcgtggaagagtgggagtggttcttcgatgggtctggagaggatgagcgtggagcagctgaaggcggtgaaagagcaagccgatctggaagttaatcttctccaagacagcctctccaacattcgcaccgcgaccacccgcctcgagatcgcctcctccgccctcaacgatctctccctccgcccccagggcaaccacatcctcgtccccctcaccgcctccgtctacgtccccgcaccctccacgat

SEQ ID NO: 138085 - DNA, 255 bp, Glycine max
tccccccggaccagcaacgtctcatcttcgccggaaagcagctcgaggacggccgcaccctcgccgactacaacatccagaaggaatcaacccttcacctcgtcctccgtctccgtggtggcatgcagatcttcgttaagaccctcaccggcaagactattaccctagaagtcgaaagctccgacaccatcgacaacgtcaaggctaagattcaggacaaggagggaatccccccagaccacagaggctgatctt

SEQ ID NO: 138086 - DNA, 255 bp, Glycine max
caaactccaaatttgcaatctagacgcgcactaaaacggtatgattttattcgggttgattgaaacagaaaacggcacaaagttgtggacataatggaatgattaagcactgatgagaatcagaacttcttaatgaagtcgtagatgtgattgctcacgtcctctgctgcttcttggttgttgaagtgtgcaaccccttcctgcaccaccacttcctctaaagttggcacatctttcttgaaaccaccgttgtgg

SEQ ID NO: 138087 - DNA, 254 bp, Glycine max
  unsure (1)..(254): unsure at all n locations
cttgctgccactggggtgattcgtcttcatccttcattggcattgcgcttcacaaattctcagtctacgacttggtggatttcattaaattgtgataaacatggggataaaatcagagactttagagactatanngtgttcgtgagggtcgatctgaacgtgcctttggatgacaaccttaacatcaccgatgacactagagtccgtgctgctgttcccaccatcaagtacttaactggtcatgggccatagtg

SEQ ID NO: 138088 - DNA, 247 bp, Glycine max
tcaaaactcaaaacttctcttttctttcattctctctcttttattcttatcatcacaatgccttcaattcccgaagagcccctcctggctccgaacccggatcgcttctgcatgttcccaatccaatacccgcaaatctgggaaatgtacaagaaagccgaagcctcgttctggacggcggaggaggtggacctctcccaggacctccgccactgggactccctcaccgacgggagcgccacttcgt

SEQ ID NO: 138089 - DNA, 246 bp, Glycine max
tcttcttcgtctttactctttaattcaccgaagcgaaaaagaaaaggcttgacttgagagaaatagagcttcgaatcgaaactcagaattagaaaaaaacacaaatcacaatcacaatggcaaggtacgaccgagcaatcaccgttttctcccccgacggccacctcttccaggtcgagtatgccctcgaagccgtccgcaagggcaacgccgccgtcggcgtccgcggcacgacaacgtcgtcct

SEQ ID NO: 138090 - DNA, 243 bp, Glycine max
caagtacatggcttgctgcttgatgtaccgtggtgatgttgttcctaaggacgtgaatgctgctgttgccaccatcaagactaagaggactgttcagtttgttgattggtgtccaactggattcaagtgtggtatcaactaccagcctccttctgttgttcctggtggtgaccttgccaaggtgcagcgggctgtatgcatgatcagcaacaacactgcagttgctgagggttctctcgcatt

SEQ ID NO: 138091 - DNA, 246 bp, Glycine max
ccgattcgggatggagaaatacgagctcgtgaaggatataggatctgggaatttcggtgtggccaggctcatgcgacacaaagacaccaaggagcttgttgccatgaaatacattgaacggggtcacaagattgatgagaatgttgcgagggaaatcataaaccatagaagtcttcggcaccccaatattattcggttcaaggaggtggttctgactccaacccatctgggtattgttatggagta

SEQ ID NO: 138092 - DNA, 249 bp, Glycine max
ctagttctagatcgcgagcgatctagaactagtctcccatttccactcagaaccctcgatcactcccacgcgctcctatatcctctccttcaccgtcgctctctccaacgatcacaacaacatcgtcatcccatggcaaacgccgcatctggtatggcagtccatgatgactgcaagttaaggtttttggagctgaagacaaagaggacacaccgtttcatagtttttaagattgggagcagcagaagc

SEQ ID NO: 138093 - DNA, 248 bp, Glycine max
agaagatggagatgtatcagatctggagcaggagaatagcgttgggagcgttcgcgtttgttctgcttttcctatcggcctcagcagacgacgtcgttgtgctctctgaagataacttcgagaaggaagttggtcaggacagaggagctctcgttgagttctatgctccttggtgtggacactgcaaaaagcttgctccagaatatgaaaagcttggtagcagcttcaagaaagcaaatctgttttaa

SEQ ID NO: 138094 - DNA, 254 bp, Glycine max
aaaaaaatctcaaaataaaacaaccaaaccacacacttcacaccctcttcaacatcctcagcaagtacaagaacaagaagaaacaatgtcttgctccaatctcacaatgttggtgtcctcaaaaccttccctttccgatccctccaatctctccttccgctctgtcctcaacccttttcagctcccttcacaaaacccaacttcatgcactccttcacgctcctcaaccacccaaattcagtgtggtctgagag

SEQ ID NO: 138095 - DNA, 248 bp, Glycine max
  unsure (1)..(248): unsure at all n locations
cagtcaccacctctgaactctctctctcatctataagtcaacatggctcatcatgaagattcaagtgcatggaattcgagtaaacctcaccctaagctcaatgaaagaattctgtcttctctgtcacggagaactgttgctgctcacccctggcacgacttagagattgggccaggagctccagcagttttcaactgtgtggttgaaattggcaaaggaagtaaggttaagtatgagnctgacaagac

SEQ ID NO: 138096 - DNA, 253 bp, Glycine max
gtactggtcagaacagccgagtttcaaaactcattactctgaagggcaagcaagcaaatgctctgttttggtcacctgccggtcgctacattgtactggctgggttgaaaggcttcaatggacagttggaattttacaacgttgatgaacttgaaaccatggctactgctgaacattttatggcaacagatattgaatgggatccaactggaagatatgttgcaactgcggtgacttcattcatgaaatggag

SEQ ID NO: 138097 - DNA, 264 bp, Glycine max
attcagttcaggattcagctcgcgctttcgcttccacgtaacacaacctcgttgtccgtgtttggcgaggacaccgttttacacttcctcttctcggcacagaatctagcaggttgttgaaaatatggccaagcatcatcctgatttgattatgtgccggaagcagccagggattgccattggacgactgtgcgagaaatgtgatggcaagtgtgtgatatgtgactcttatgtgcgtccttgtacactttccgagtttgtgat

SEQ ID NO: 138098 - DNA, 243 bp, Glycine max
caaatctgcaattgatatttgtgatggactgacatatctggatttgatcattaaccagattgagaccctcaattccaagtatggaagcagggttccattgcttcttttcaataaagatgacattcatgatagttctctaaaggttttggagaagtattctaaatcaagtgttgaagtgcacacttttaaacagggtgaagatcgagagttgaaatcattgggtgaatatatagcaaggaggaa

SEQ ID NO: 138099 - DNA, 246 bp, Glycine max
tgaatactgaagcggaaaggaaattgggtcagctagtctcagagaaatatggcacagagttctatatccttcaccggtaccctttggctgtaaggccattctatacaatgccttgctacgacaatcctgcatacagcaactcgtttgatgtctttattcgaggtgaggagataatttcaggagctcagcgtgttcatgtgccagaatttttggaacaacgtgcagcagcttgtggcatcgatgtca

SEQ ID NO: 138100 - DNA, 244 bp, Glycine max
aactaagagacattacagtttgtattattgtagaggagagagggagagagatggagttgagcatgaaagtgttggtgaaagttgcttcgttgcttttcctattgggattcactgcaacagttgttgatgctcgcttcgatccaagttcattcatcactcagtttctccccaatgctgaagccaacaattactatgttaaatccacaacaaaagcgtgctgtaacagctgtcctgcacaaaatca

SEQ ID NO: 138101 - DNA, 247 bp, Glycine max
cgacgatccaagtgatagacactcgtcgcgatggaacgtgtagctgaatccgagcgaactctgtacccatacgtgactggatcctctgtagtcgctatcaaatacaaagatgggattctaatggccgctgacatgggaggttcgtatggatctaccctgcggtacaagagtgttgagcgtatcaagcctattggaaagcattctcttcttggtgctagcggggagataagtgactttcaggagattc

SEQ ID NO: 138102 - DNA, 236 bp, Glycine max
cgcagggtttctcttcgagtaactttctcggagaaggaggtttcggacccgtgcataagggcttcattgatgacaagcttaggcctggtctcgaggctcaaccggttgccgtcaagcttttggacttggacggttctcagggccataaagagtggttgactgaagttgtgtttctgggtcaactaaggcatccacatctcgtgaagctgattggatattgctgtgaagaagaacac

SEQ ID NO: 138103 - DNA, 241 bp, Glycine max
agaaaaagttagaagagaaatcaaaattttaagattgtttatgcatcatcacattataagactatatgaggttgtagaaaccccaacagacatatatgttgttatggagtatgtgaaatctggagagctctttgattacatagtagagaagggtcggctgcaagaggatgaagcccgtcatttttttcagcagataatttctggtgtggagtactgtcacaggaataggtggttcatagag

SEQ ID NO: 138104 - DNA, 244 bp, Glycine max
ctcgagccgttcaatgcttcatcatggaagtgatagtacattcaaacatgacgacagtaaatggaaaaagcaggctgcgtactacaagaagttgatccctgagcttgggactgacaaaataagaaacataatggacatgaatacagtatatggaggtttcgctgcagccttgattgatgatcctgtatgggtcatgaatgtagtctcatcttatgctaccaatacactcctatggtttatgatc

SEQ ID NO: 138105 - DNA, 262 bp, Glycine max
atagaagagccttccatatatagcctcccaaaaaaatgaagagtactacctctttggctctctttctactttgtgccctaacttcatcatatcagccttcagccaccgctgatattgtattcgacaccgaaggcaatctattcgaaacggcggcacatactatgtgttgccagttataagaggaaagggcggcggaatagaatttgccaaaaccgaaacagaaacatgccctctcactgttgtgcaatctccctttgaggtc

SEQ ID NO: 138106 - DNA, 259 bp, Glycine max
ctcgagccgttcctccctccttcaaaggatgtcaacaagtccactgaggaatactattaaaccgctgagtggaacgcggaagagacgcaaaaagggttgcaccagaatagtctcaagtttgctgagaatagccgttcgagagaggtaagcgtgtggcctcagcaccaacaccaccaaacacaactccaactcatgcctagcttctccactttgcactctcattcatgcgccttcagcgtatttttaaccattggatgaa

SEQ ID NO: 138107 - DNA, 259 bp, Glycine max
gagaatggctcccaagggtttaacctttctggctgtgttaatatgcgtttcagcactgtcactgagtccttctgttgcgggggaagggcaaaataatggccttgttatgaacttctacaaggaatcatgccctcagctgaagacatcatcacagaacaagtcaagcttctctacaagcgccacaagaacactgctttctcctggctcaggaacatcttccatgactgtgctgttcagagttgtgatgcttcactgttgc

SEQ ID NO: 138108 - DNA, 260 bp, Glycine max
cgctctctcactcacaaacgcacactgaattcaaaaacatcgaaagagagaggcatggccgagcaaaccttcatcatgatcaagccagatggcgttcaaagaggccttattggcgagattattagcagatttgagagaagggtttttacttgaaagggttgaaactcgttactgtggaccgtccttttgctgagaagcactatgctgatttgtctgcaaagcctttctttagtggtttggtggattacattgtctctggc

SEQ ID NO: 138109 - DNA, 260 bp, Glycine max
cacgaaataccaattctgtctcacatagttctataacaccacaaactgtccaattccaatggttgttttctcttgtgttaaaacaatggttgtgcttgtccttgcgtttctaatctctgtgccttctatggttgctctgctgtcagcttgtaccaagatgttgatgtcacgtggggagatggcagaggtaagattctgaacaatggtcagcttcttactctgtctctcgacagagcctctggctctggctttcagtccaa

SEQ ID NO: 138110 - DNA, 259 bp, Glycine max
ggcagaaccgtttggccctcgaaatcaagatccgctccgagcgcgccctcgccaccgataaggacatcggccaggtacacgttcctctcatggaactcctcaagcaacctggcgacggtaaatccttccagcacgtagttaccaggtcagaaaaccctccggcaaacccaagggagccctcaatttctcctacaaatttggcgatgaattcacagccccagccaaggtatcagcacccgcacctacctcgccttctcac

SEQ ID NO: 138111 - DNA, 257 bp, Glycine max
attcgcagagcaactcaacacaacgaaccaaaccaacaatgtcgcagccgcagcctcagtcgcagccgcaacacgggcaagcggcgctggagcaggtgcagtgcttcggtcgcaagaagacggcggtggccgtgactactgcaagcgcgggcgcggcctcatcaagatcaacggctgccccatcgagctcgtcgagccggagatcctccgctttaaggccttcgagcccatcctcctgttgggaaagagccgcttcg

SEQ ID NO: 138112 - DNA, 258 bp, Glycine max
tttgtactgtcccatctccctgacttcaactccattactggtgtatccttggcagcagcagtcatgtccttaagttactctacaattgcttgggtagcttctgtacataagggtgttcaagaaaatgtacaataggttacaaagctaagagtacttcagggacagtgtttaacttctttaatgcccttggcactgtggcttttgcctatgctgggcacaatgtggtgctagaaattcaagcaacaatcccatccacac

SEQ ID NO: 138113 - DNA, 256 bp, Glycine max
tcagggttaagcggtgagatttgcgaatctgagaaatggcggattcttctcgggaggagaacgtttacatggcgaaattggcggacaggccgagcgttacgaggagatggttgagttcatggagaaggttgcaagactgtggaggttgaggagttgacggtggaggagaggaatctcctctctgtggcttacaagaacgtgattggtgcgaggagggcttcgtggaggatcatatcctccattgagcagaaggagg

SEQ ID NO: 138114 - DNA, 256 bp, Glycine max
gcagaaggcaagagatgagttggacgctcaagtaggaccagatcggctgttaaatgagtcagaccttccaaaacttccttatctcaggaagatagttcttgaaacacttaggttgtaccctccggctccaattcaataccacacgtggcttcagaagacatcaatatcgaaggattcaatgttccacgagacacaattgtgattattaatggttgggccatgcaaagagatcctaagatatggaaagatgcgacaa

SEQ ID NO: 138115 - DNA, 258 bp, Glycine max
atctggtcatcgttgggatctccatacgccggatctgctaaaatacgcttgatccatatgggcctcctcgaccacttgtgggacgacaccgtcgccggcccaaggcggaaaacggtctcggcaagctccgaaaaaccacaccttcactttccgacctagctccggcaaggaaacggagggcgggagcgtgagatcgtacggagacgaatcgtcggaggaagcgactagagtgacgcgtagtatcatgatcgtgaaacc

SEQ ID NO: 138116 - DNA, 259 bp, Glycine max
gaaccaaatcatcacacacacatactaagaagcaacaattcttctacaatggatctcctccttctggaaaagaccctcataggtctcttcctcgctgcggtggtcgccatcgccgtctccaccctccgcggccggaattcaagctcccaccgggcccactccccgtcccaatcttcggcaactggctccaagtcggcgacgacctcaaccaccgcaacctcaccgatttggccaaaaaattcggtgacatctcccccct

SEQ ID NO: 138117 - DNA, 259 bp, Glycine max
tctcgagccgattcggctcgagccagccacacgcttcagaagacatggcctcattgggtgagttacaaaatgtgagcggcatcaattttcttatcaaagagggtccaaaagtcaatgcaaagttcgagctgaagcgccaccatatccactgaatggtttggagccggtgatgagccagcagacacttgagtttcactgggggaagcaccacaagacttatgtggaaaatctgaaaaaacaagttgttgggacagagctt

SEQ ID NO: 138118 - DNA, 260 bp, Glycine max
agataccatagacaatgtgaaagctaagattcaggacaaggaaggtatcccaccagaccaacagaggcttatctttgccgggaaacagcttgaagatggaagaacccttgctgactataacatccagaaggaatctaccctgcacttggtgttgcggcttcgtggtggcatgcaaatctttgttaagactttgactggaaaaaccataactttggaggttgaaagttctgataccattgataatgtgaaggcaaagattc

SEQ ID NO: 138119 - DNA, 258 bp, Glycine max
gctagaatggaatttcgatgctcagtcatctcttttaccattctcttctctcttgctcttgcaggagagagccatgtccatgcatcgctacctgaggaagattattgggaagctgtttggccaaacactcccatcccactgcactgcgagagcttctaaagcctctccctataggtgttgaaatcgatgaactccctaagcaaattgatgatacacagtacccaaaaacattcttctataaagaagaccttcatccag

SEQ ID NO: 138120 - DNA, 257 bp, Glycine max
ccattgattccgaagagaaaagaaaagatgtttgagccacaacagctatacactcgcgcgaagaccgaggaattcgacctcgaatcaggagaaaccctctacccagggctgagcgtcggcgagaaccagctcgatggggtttcatccgcaaggtctacggcatcctctccgcgcagatcgtcctcaccaccctcgtctccgtcaccaccgttttctatactccaatcaatgacctcctcaagggcaattccaccctc

SEQ ID NO: 138121 - DNA, 255 bp, Glycine max
gagattgttttcaacccttctgccactgttggtgaactaagtgaaccaatgtggccaatagaggcacgtaatgctgcaatagctaatagttactttgttgcttcaatcaaccgtgttggaactgagacattcccaatcaatttacttctggcgatggaaagccggcacatgcagatttcgggcacttctatggatccagttatgtttcagcacctgatgcatcgtgcacgccatctctatcccgcaatagggacg

SEQ ID NO: 138122 - DNA, 256 bp, Glycine max
ctaagtattcccaaagacttgtcgagtgaggaagctaatcaatatttgaaggacacatgcttgaagtatgagatcaaatgtcctccccctgagacaactgctcgtttgttggataaacttgttggtcacttttggaagagacgtgcgtaaatcctacattcatcataaaccaccctgagatcatgagtcctttagcaaagtggcacagatcaaaacgaggcctgactgaacgttttgaattgtttgttaataagca

SEQ ID NO: 138123 - DNA, 256 bp, Glycine max
gatagggcagtgccggcgcgcgctgaagtttgctaggttcatgagcaggttcgggaagagttaccgaagcgaggaagagatgagggagaggtacgagatattctcgcaaaacctcaggttcatccgctcccaaacaagaaccgcttgccctacactctctctgttaatcattttgctgattggacttgggaggagttcagaagacacagactaggcgctgcccaaaattgctctgccactcttaacggcaaccaca

SEQ ID NO: 138124 - DNA, 254 bp, Glycine max
cgcaccagtttcaccgcacgaatatcttgttgtttggagcgatccgagaaaaactctgtaaacatgttggtttaccaggacctccttacaggtgatgagcttctctctgactccttccgttacaaggaaatgagaatggaatgctgtgggaagttgaggggaagtgggttgttaaaggagcagttgatgtagacattggtgcaaacccttctgctgagggtggaggagaagatgagggagttgatgatgcagct

SEQ ID NO: 138125 - DNA, 253 bp, Glycine max
gccccatcatcggctccacctgctggaagtcagcaaaatggggtgaatgttgctgagttaatagtgggccgtggctttggaactgtcattagacatcgtgactttgaagagagatctaactattatgatctgcttcttgctgctgaatcgcgtgcaatttctggaaggaaaggcacccactctgccaaggatcctccagtgatgcatataactgatttgaccatggcatcggctaagaaagccagagacttct

SEQ ID NO: 138126 - DNA, 253 bp, Glycine max
ccaattcggaagtgcagcgcagagagaagaatgaacaactctattatggcttttgttctgctaatattactttcggcgttacgctactcaagcgccgaacaagctttcgatgttcgcaaacatctttccatgtctccagatatggagttgtgaaagacatcgctgacactaacttcgtgccttctaaaatccccgagggatgtgttccgatccatttgaatctcgtggcgaggcatggaactcgatctcctac

SEQ ID NO: 138127 - DNA, 254 bp, Glycine max
caaacccctccccaattctcaagccaaccatgtcttccttcaagagcaagtaccaagatgaactcattgccaatgctgcttacattggcaccccagggaagggtatccttgctgctgatgagtcaactggacaattggcaagcgattggccagcattaatgtcgagaatgttgaagcaaataggcgtgctcttcgtgaactcctattcaccacacctggtgcttttgagtgcctcagtggtgtgatcttgtttg

SEQ ID NO: 138128 - DNA, 255 bp, Glycine max
gagattttgctgctctttgaagaagggtgtttgcttgattttggagatgtcgctgctctcagatctcatcaaccttaacctctcagacactactgagaaggtgatcgcagagtacatatggatcggtggataggaatggacctgaggagcaaagcaaggactctcccaggaccagttagcgacccttcaaagcttcccaagtggaactatgatggttccagcacaggccaagctcctggagaagacagtgaagtg

SEQ ID NO: 138129 - DNA, 254 bp, Glycine max
atctcagccacccatggagacatggaccaaaacactcgcgatatcatcatgcgtgaatttcgctctggctcttctcgagttctaattaccactgacctcttggctcgtggtatagatgtacagcaagtgtcttggttataaactatgatcttcctacccaacctgaaaattatcttcatcgcataggacgaagtgggcgttttggaagaaaatgtgttgccaaaaactttgtgactgaggatggtgcaagaatg

SEQ ID NO: 138130 - DNA, 255 bp, Glycine max
attaattcaccagctacatagtttttctgtttgaagtgctacaaacaatggcagctagtcaggaagatgtgacgcttttgggagttgttggaagcccgtttgtgtgcagggtccagattgccctcaaattgagggaattgaatgcaaatttttggaagaaaatttggcaaacaagagtgatctacttctcaaatccaaccccgtttacaagaaggttccagtgtttattcataatgagaagcccatagcagagtc

SEQ ID NO: 138131 - DNA, 251 bp, Glycine max
gtgaaacagatgatttgctgctgtaacaaaatggatgctactacacccaagtattccaaggccaggtatgatgaaattgtgaaggaagtctcttcctacttgaagaaagtaggatacaaccctgacaaattccttttgttcctatctctggttttgagggagacaacatgattgagaggtccacaaaccttgactggtacaagggtccaactctgcttgatgcacttgaccagattagtgagcccaagagg

SEQ ID NO: 138132 - DNA, 250 bp, Glycine max
ggaggaaagatgagtagttcatcaaggccggtgccgaggagagagagtccatggggagtcaccggagagaatcatcctgaacccaaagctcaccgctgcaatgaccgtgtcgaggacgttattcaggttgctttgagggaaacccattcaagactgttccgggacctttcaagctcttctggcagtgcatgtgttccaaacccgtgaggaaccaacagccccatttacttatctggatttggagcctcta

SEQ ID NO: 138133 - DNA, 250 bp, Glycine max
ggagaagctgatgaaccagatcatggaattgaaattcacttcgaaatcgctgcagcgtcaatcgcgtaagtgcgagaaggaggagaaatcggagaagctgaaggtgaagaaggcgatcgagaaaggcacatggacggcgctcgaatctacgcggagaacgcgatccgtaagcgcacggagcagatgaactacctccgcctggcctcgcgcctcgacgccgtggtcgcccgcctcgacacgcaggcgaaga

SEQ ID NO: 138134 - DNA, 252 bp, Glycine max
caggcagaaagagcaattcagtgatggagttggctatagctggattgatggccttaaggcccatgctgcaaaacatgtgactgacaaaatgatgcttaatgctggtaacatctaccctcacaacacccaacaaccaaggaagcatattactacagaatgatctttgagaggttcttccctcagaactcagctaggctcaccgttcctggaggagcaagtgttgcatgtagcacagccaaagctgttgagtgg

SEQ ID NO: 138135 - DNA, 252 bp, Glycine max
atggggttgtgagttagggcagacagaatcaattgagaatggggatccgattcgtactgatggtgaacaagcaaggccaaactcgtcttgctcaatactacgaatatctcaccctcgaagagcgacgtccctcgaaggcgaaatcgttcgcaaatgcctcgcccgcaacgaacagcagtgttccttcgttgagcatcgcaactacaaaattgtatatcgtcgctacgcctctttgtttttcctcgttggagt

SEQ ID NO: 138136 - DNA, 252 bp, Glycine max
gaggaaaggactattataaagatagagaaagatgggtggaagatcaattactcaggagagaaaccagcaacaccactgttggacactgtcaaccacccaattcacatgaagaatctgtcaacacaggatctgagcaacttgcagcagagctgagggcagatattgtacacagtgtgtcagaaactggtgggcatcttagctcaagctgggagtggtggagttatcagtggctttggatcatgttttcaacac

SEQ ID NO: 138137 - DNA, 248 bp, Glycine max
cagatcattaacgtttataatcaggagtatgagagtggtgcagcattctggcctgatgtccatttccgtatcgtgatggcacttctagtctcacagatagttctgatgggactcctcaccaccaaaaagctgcttcgtcaactccttttctcgttgtgctcccaatactaaccatatggttccataggtactgcaaaggccgttttgaatcagcatttgttaaatttcccttacaggaagcaatgatg

SEQ ID NO: 138138 - DNA, 250 bp, Glycine max
aaaactgttgatatagcagccaaagaactaatagcaattgcttcccctggacaagttacacaggtacagcttgaccgagccaaaaaatccacaaagtctgcagtctaatgaatctggaatctagaatgattgcatcagaagatataggaaggcagattttgacttatggagaaaggaagcctgtggaacagttcttgaaggccgtagatgaaatcacgttgaatgatatcactaaaattgctcagaagat

SEQ ID NO: 138139 - DNA, 266 bp, Glycine max
attaaagactaaatctggtcataatgtgcctggagttgatcttaaacggagagaggcctatctgtcagaggatgagttcaacactgtatttggaatggcaaagaagcattttacaagttgccaagatggaagcaagacatgctgaaaaagaaatacgaattgttctaaacttgaaatgaaagagtgacgtctgcttctttagctgctatacctttcctcagttatctttaaaatgctcttatctgttgagatagtgtggttttatt

SEQ ID NO: 138140 - DNA, 264 bp, Glycine max
cccaatcgtagccgtcgcactctgtgttttcagcgccgtctccgatctccgacaatggcgacccaaatgagcaagaagagaaagttcgtagctgatggatgttcttcgctgaactgaacgaggttctgacaagagagttggccgaggacggttactccggcgtggaagttagggttacgccgatgcgcaccgaaatcataattagagccaccagaacccaagctgttctcggtgagaagggaaggagaataagggaacttacct

SEQ ID NO: 138141 - DNA, 262 bp, Glycine max
ctttctctctcatgttgtagtatctcacttgtgtttttcattcgtttctgaaccacacaaacatcaccaccgaacaatgccgacggggttaccggcgggaattccttagtggcgccggacgaagaggggtgggtgtgggggcagatcaaggcggaggcgcgccgcgacgccgagtcggagcctgctttggcgagctacctctactcgacgatcctctcgcactcgtcgctcgagcgttctctgtcttttcacctcggaaata

SEQ ID NO: 138142 - DNA, 262 bp, Glycine max
ggcacctcagaagtggagggattacagtgtggagtttcactttcctgaacctactgagctcacacccccacttctgcagcttattgaagtcagctttagtacccaaaccgggaagatttcaggctctcaaatgttgatgttggcattgatatggggactcgtgttgccattgttgggcctaatggagctggaaaatctacgttgttgaatcttctagctggtgatttggttccttctgagggtgaagttcgaaggagtcaga

SEQ ID NO: 138143 - DNA, 270 bp, Glycine max
gattgctagaatggaatttcgatgctcagtcatctcttttaccattctcttctctcttgctcttgcaggagagagccatgtccatgcatcgctacctgagaagattattgggaagctgtttggccaaacactcccattcccactgcactgcgagagcttctaaagcctctcccaccaggtgttgaaatcgatgaactccctaagcaaattgatgatacacagtacccaaaaacattcttctataaagaagaccttcatccaggcaaaaca

SEQ ID NO: 138144 - DNA, 259 bp, Glycine max
cattgggattgcaattgttagttggattgcactcccaacttccttcactatcttcaattttggagttcagaaagatgtcaagaattggcagctattcgtttgtgttgctgttggtctttgggcaggtcttattattggatttgtaactgagtactatactagcaatgcatatagtccggtgcaagatcgttgcagactcctgcaggactggtgctgcaactaatgttatatttggccttgccttgggatacaagtctgt

SEQ ID NO: 138145 - DNA, 264 bp, Glycine max
gctcttcatcatctacctttgctctgggggtgtctgtcggttacttcatcgctgaccttgggatgatattttggttttttccttctcttggtggatatgagtatgtgattcatcatttgctttctttagtagcagtatcattttcaatgttgactggggagggtcagctatatacatacatggtcctgatctctgagacaactactcctgggatcaacttgagatggtatcttgatgcagctggaatgaagaagtcaaatgctt

SEQ ID NO: 138146 - DNA, 263 bp, Glycine max
cccggagaacggcctcggcaagctccgaaagcaccactccttcgctttccgatctgcctccgccaaggaatcagacagcggaagcgtgaaatcgtacgtgaggattcgcccaagaatgcggtgagagtgacgcgaagtataatgatcgtgaaaccacctggtaaccagagtcccagtggatccgctccggcttcccccgccggttctactcctccggtgtctccgttttcgggagctagagaatccttccgttttcggagaag

SEQ ID NO: 138147 - DNA, 260 bp, Glycine max
gtcaacaaacagtgaaagaagaagatgatgaaggtccacctccgggatggcaacctctccccgctcagccaccgccaccgccacgtccatccggttgggctcaaatggtttgcggttcttgtcgtcgcctgctttcatatccacgaggtgccaaacatgtcaaatgttcatgctgtcagactgtcaacattgtattagaagctgatcaggttgggcaagttaagtgtggcagttgtgcggtattgctgatgtacccatat

SEQ ID NO: 138148 - DNA, 259 bp, Glycine max
tatggaacagtgtgtttgagaaggctgaggatgtagcaggcattgaaagaggaagcataagggcaacggttctgatagaaacacttcctgcagtgttcaaatggatgaaattctatatgagctgaaagagcattcggtgggtctaaactgtgggcgttgggattacattttcagttatgttaaaaccttccagactcacccagatcgtctactaccagacagggtccaggttggcatgactcaacatttcatgaagagt

SEQ ID NO: 138149 - DNA, 263 bp, Glycine max
gttcttgtttgtatatctttattctatattttatcaaactcccattttgtagctgcatcacaactacttatttatgtgggcgctataaatgttttataatatttgctgtgatgtttatgaatggttcggaatattaccaagattttcgtctttggactgttggggatggaattactttgatggtttgtacaagtatctttgtttcactaataactactattctagatacatcatggcacgggattatttggactacaagaccc

SEQ ID NO: 138150 - DNA, 265 bp, Glycine max
caccaacaagttaatagcattccgcaaaatggctgccaccaccttagtctctgaagtcactctcccctcctcctccggccagcggaagatgccgctgatgggcctcggcaccgcgccggaagcaaccagcgcggttaccacaaaagatgctgttcttgaggccatcaagcagggctacaggcactttgatgctgcttctgcttatggtgtggaacagtctgtgggagaagccatagctgaagcacttaagcaaggactaattgca

SEQ ID NO: 138151 - DNA, 257 bp, Glycine max
gcggaatcagctagaattttctaataatggccaaagacgttgagcaggttacagagcaaggtgaatactccgcgaaggattaccatgacccactccggcgccgttgatcgacccagatgagctcactaagtggtccttgtacagagccgccatagctgagttcatagcaacactccttttcctttacatcaccgtgttgaccattattggctacaagagacagagtgacaccaaaatccccggtaacaccgagtgcg

SEQ ID NO: 138152 - DNA, 259 bp, Glycine max
aagtacgagaaaatcagtgaaaaaaaggtttctacctcgattgaagccttgtgtcgaggttatccaacagaatttgcatcttacttccattactgccgatcattgaggtttgatgataagccagattatgcttatctcaaaaggatattccgtgacttgttcattcgtgaaggattccagtttgattatgtctttgactggaccattttgaagtatcagcaatcacagctagccactcctccaacacgggccattggtc

SEQ ID NO: 138153 - DNA, 259 bp, Glycine max
ctaagtactccaaggcaaggtacgatgaaattgtcaaggaagtaccttcctacatgaagaaggtcggatacaaccctgacaaaattccttttgttccatctctggttttgagggagataacatgattgagaggtctacaaaccttgactggtacaagggtccaacccttcttgaggcccttgatcagatcaatgagcccaagaggccatcggacaagcctctccgattgccccttcaggatgtctacaagattggtggg

SEQ ID NO: 138154 - DNA, 260 bp, Glycine max
ccaattttgatgagaaaacaacacttgactacatctaattagtttgcgtttcatattattgtttaccctttcgtttcaaatctaataatggttatttgagacatgcaggtggtcaagaattgctcgaaagttaccagggcgcactgacaatgagatcaagaactactggaggactctgatgaggaaaaaggctcaggacaaaaagcgaggagaagctgcatcatcatcatcatctagtgttgattcctcaatatcctcaa

SEQ ID NO: 138155 - DNA, 261 bp, Glycine max
ctacctacccttttgcagcccttaaacaaagtcattgacaaaagcacacaaagtctcttcccctcataaagcactgatttttacgcagaactcagtttagttcgtgcttcattaacatgggtgctggtgactactacaaaatactgaaggtgaagcatgatgccactgatgaagaagtgaagaaggcttataagaaattggcaatgaaatggcacccagataagaaccttgaagaccctcttaggaaagaagagtttgagg

SEQ ID NO: 138156 - DNA, 259 bp, Glycine max
ggtttctctagtgatcttcgttcttctgtggagatcttgttttttcatctcacttttcttctaattaaggaacaagctttccgcagttgaaaacctagctagctagcttccaccaatttgaatcatctatggctcgctctttctctaacgtcaaggttctctctgctcttgtggccgacggattctccaacactctcaccaggcgtgggtacgcagcagcgacacaaagcgcaacaagaggaggagctgcctccatcag

SEQ ID NO: 138157 - DNA, 266 bp, Glycine max
gcaaattccaattcccaattcccaattcccaattcgaaacccttattcctttcaaagaaccaaattgagtgatcgtgatggcaccaaaggcagagatgcagccagcggagaagaagcccgcggaggagaagaagtccacggtgggagacaaggctccggcggagaagaagccaaaggccggaaagaagcttccgaaggagggaggcgccggcggagaagggaagaagaagaagagatacaagaagagcgtggagacatacaagatc

SEQ ID NO: 138158 - DNA, 257 bp, Glycine max
ggagctgtctgtgcaaatttgcgttgttcttcgcggcacacctcactcactgaacggtaagtatggcggacaaggctgttacaatccgaacccgaaagttcatgaccaacaggcttctttccaggaagcagtttgtcgttgatgtccttcatccagggagggcaaatgtttccaaggctgaacttaaggagaagctggctaggatgtatgaagtgaaagaccctaatactgtatttgtcttcaaattccgaacacat

SEQ ID NO: 138159 - DNA, 254 bp, Glycine max
attaattcttggtcggtggtttgtctatcagaggtgtttttttgcagttgcagtagaacctaagatttgtgttcagatataaaaaagaaaaaaaaaaaaaggagcaacatagtcatttcctttgaccaagatgaagtttatgaaacttggatctaagccagattcttttcagagtgaaggggataataatatcaggtatgtcgcagctgagttggcaactgacatagtcattaatgttggaaatgtaaaatttc

SEQ ID NO: 138160 - DNA, 257 bp, Glycine max
attccaatatattccattctctctgtgtatttccctacctctcccttcaagatgcagatcttcgtcaagaccctcaccggcaagaccatcaccttgaggtggaaagctctgacaccatcgacaacgtcaaggccaagatccaggacaaggaaggaatccccccggaccagcaacgtctcattttcgccggaaagcaacttgaggacggccgtacccttgctgactacaacattcagaaggagagtactcttcacctc

SEQ ID NO: 138161 - DNA, 258 bp, Glycine max
cgtgcctctagggttatcatttctccatttccattttctctctcacttttcaagaatcgtaagctatgggaaagtcttacccaactgtgagtgtgattaccagaaggccgttgagaaggcgaagaagaagctcagaggcttcatcgctgagaagagatgcgctcctctaatgctccgtttggcatggcactctgctggaacctttgacaagggcacgaagaccggtggacccttcggaaccatcaagcaccctgccga

SEQ ID NO: 138162 - DNA, 257 bp, Glycine max
cttttggaacaatgtttgctctagtctgcttatggtttggtatatcagtacccctggtctttgtgggcagttacttgggctttaaaaagccgcaattgaagacccagtgaagactaataaaattcctaggcaggtacctgagcaggcatggtatatgaaatccgtcttctcaattcttattggaggcattcttccatttggtgcagtgttcatcgagctcttctttatcctgacatcaatatggctgaaccagttct

SEQ ID NO: 138163 - DNA, 257 bp, Glycine max
gatatgtgcctattgtagaagttctcatgcagatagacttaagaagatagagttattgttgaagtttattccacaaaaagagtacaggccatgttaaatgttttgttgattaaactctatgccaaggaagactggttagcgaaaatggagaatgctataaatgaggcatttgagcatgggacttctataacaaccaagggtattttgagacgcataattgcaacttattatcgatgtaatgcagtagaaaagctaga

SEQ ID NO: 138164 - DNA, 266 bp, Glycine max
gtgaagtgccaaagttcatattaagagagaaagagagagagagatagaagggaaaaaagcatcaaagatcatgaaacccaacttttcctttttatcaagcttttgatactgcaatatctatcagttttatgcatttctcaggaatttgatttcttctactttgttcagcagtggccaggagcatactgtgacacaaagcagagctgctgctatcctaagactgggaaacctgctgctgatttcagcattcatggactctggcctaa

SEQ ID NO: 138165 - DNA, 259 bp, Glycine max
atttattaccaaagagaagagaaaaagagacaagaagaggcgaatggcagatcagagcgagcattcgaaaacggcgtcgcctccggaggaccaggaccgtcccgttcgagtgtacgcggatggcatctacgatctcttccactttggccacgctcgctccctcgagcaagccaagaaatcgtttccgaatacatacttgcttgttgggtgttgcaacgatgaagtcacccacaaatacaaaggcaaaactgttatgaca

SEQ ID NO: 138166 - DNA, 257 bp, Glycine max
caacaacagctaaaaaaatctaaggtggtgaaaattgactcaagaaaatcatgggaacaccacataactaatgcaaccaataaaggctacctgttatggttcatttctctgcttattggtgcatgccttcaattgctatgaatcatttctttcaacaactggcctccacctatcaaaatgttctctttctgaatgttgatgttgatgaggtcaaggaagttgcttccaagttggaaattaaagcaattcctaccttt

SEQ ID NO: 138167 - DNA, 252 bp, Glycine max
gcgagttgactcagccgagcttcgacgagttccagcgccaaacctctctcatgaccagctgcaccctcctctggaaggagctctccgacacttctcctccctcgagcaagacctcaaccaaatccgaagccctcaagcgcaagattcacaccctcgacaactccacctcggactccctccgcctcctcgaccaccgcgaaacctctctcgacgccactctccagatcgccctccgcaagctcgacacgcgcc

SEQ ID NO: 138168 - DNA, 253 bp, Glycine max
agttcgtccgcaagaccggtggcgccggcaaaggtcgcactaacatgcgccgcaccgtcaagagtgctcctcagagcatttggtatggcctgaccgtcccaagtacttgggtccattctcggagcagattccatcatacctgaccggagaattccctggtgactacggatgggacactgctggattatcagctgacccggaaaccttcgccaggaaccgggagctggaggtgattcacagcagatgggcaatg

SEQ ID NO: 138169 - DNA, 255 bp, Glycine max
ttcgttgcttggtgatgtccctttctgttctcttcactcttggtcttgcgagagaaagccatgccagagacgaagatttttggcatgcttttggccaaacactcccattccaagttcattgcgagatcttctaaagcctggccctgcaagtgttgaaatcgatgatcaccctatgcaaattgaagaaacacagtacccgaaaaccttcttctataaagaagaccttcatccaggcaaaacaatgaaagtacaatt

SEQ ID NO: 138170 - DNA, 255 bp, Glycine max
tgaagatgctgttgaaagatctagcttttttgaagttcctccttttctttatccaaaacatgttggtgatatatcaaaaggaatggctgagcagatcacaagattctttctgctgagttgaaacttgggtctcaatactatttctatatggagacacaaactgcacttgctgttccagatgaagacaattgcattacagtttactcctcaaaccaatgccctgagtttgcgcattctactatagcaagatgccta

SEQ ID NO: 138171 - DNA, 252 bp, Glycine max
gaataaaggcaagctctatttggagtcaagtgaaacatctatcttcctgtccaagttctttgaataaaagtctgaatgtgtcatctctgactacaatatttgtgattctgaccaagttggttctatttgtttgatggccatcttgcacgtcctgatcttattgtgttcaagtgacagacaaatcagaacagggaagagagatttgaaatgtaaatgccaagtgaaagtgaaaagtacagtccagttttagtg

SEQ ID NO: 138172 - DNA, 260 bp, Glycine max
gattatcctaagtctttgggaatagtgctgcaatggcttcaagtcaggaggaggtgacccttttgggagctactggaagcccatttgtgtgagggttcatattgccctcaagttgaagggagttcaatacaaatatgtcgaagaaaatttgaggaacaagagtgaactgcttctcaaatccaacccagttcacaagaaggttccagtgtttattcacaatgagaagcccatagcagagtctcttgtgattgttgaataca

SEQ ID NO: 138173 - DNA, 254 bp, Glycine max
attgcacttagtcgacgtgttgagaagcattggcgtcttatcgggtggggacaaatccaagctggaatcactcttgatgtccctcccgcccccatctgagttgaacactgatcacaagaaacaccagcagctataaaaaactgagatgaatttagatatgtgggaagggaggcaattgttgggaaccatttttgtgaggtggagaagaaaacgttttttgattgttgtcttctattttgttttcacatcgttat

SEQ ID NO: 138174 - DNA, 252 bp, Glycine max
caaagatatgttcaagaagatggataatgataatgatggcattgtctccattgaagaactaaaagctggattccgaaactttgggtctctactggctgactctgaagttcagttgcttattgaagctgtagatagtaatggtaagggaacactagactacggggaattcgttgctgtttcccttcatttaagaaggatggctaatgacgatcatcttcacaaggccttctcctattttgacaaagatgggaa

SEQ ID NO: 138175 - DNA, 251 bp, Glycine max
aattggtaggaggactatgcgcaacagtctgaatttaagcatgagagatgcaccaagtgctcaatagcttacgattgtgctcattatgtacaggtttgtatgcagcaaagccagaaagagaaaaataaagtataaatctttccaaaaaattgttcatatcttgctgaccggtcctatccctgaagaacaatcaggattgtgggtgctctcgcatgaggattcatctagtgttacatttatgtgctgtatga

SEQ ID NO: 138176 - DNA, 251 bp, Glycine max
ctatcttgagactcttcttcttctatttctcattaccgttccgtttcgcgagtgattgaagctagttactagttacagaagaagatgtgcagctactctacactgcgattttcttcgaaatgattctcattctcacccttgtcttcaagaccccactgagaaaactcgtcatcgtttccctcgatcgtgtgaagcgcggtcgcggccccgtggtggtttccaccgtgggcgccacattggtggtggttctc

SEQ ID NO: 138177 - DNA, 252 bp, Glycine max
tgactcttggctctgtgtttacaatgtacatcggagaacgaattacagacctaaaacttgggaatggcacctctcttttgatattcaaaacattatctcgtacttgccagcttcttttggtaggacaattgctcaagcatttaatgatgcaaactacattggacttggtaccattgttttgtccttctttttgttggtagttggtattgtttatgttcaggaagcagagagaaaaatcccgcttaactatgc

SEQ ID NO: 138178 - DNA, 252 bp, Glycine max
ttaccttcactgttcaggatggaatagatgccattgaagatgttatctaccatgttgaaacatatgatgtgactacaattagagctacacacccatgtttctcatgtctcggaagattaaatcacttggtgtcaaatgggttatctccggagaaggatctgatgagatctttggagggtatctgtacttccacaaggcacccaacaaggaggagtttcacagagaaacatgccgcaagatcaaagcactcca

SEQ ID NO: 138179 - DNA, 251 bp, Glycine max
gaaaaagatcctgctttggagagacgattccagccagttaaagtgccagagccaactgtagatgaaaccatacaaatactgaaaggattagagagcggtatgaaattcaccacagactccgctatactgatgaggctcttgtagctgctgcacagctgtcctaccagtatatcagtgatcgatttttgccagacaaagctatcgatttgattgatgaagctggttcacgagtccggcttcaacatgcacag

SEQ ID NO: 138180 - DNA, 257 bp, Glycine max
agcaacactccttttcctttacatcaccgtgttgaccattattggctacaagagacagagtgacaccaaaatccccggtaacaccgagtgcgacggcgttggcattttgggcatcgcttgggccttcggtggcatgatcttcatccttgtttactgcaccgccggcatctctgggggacacatcaaccctgcggtgacattcgggttgttcctgggacgcaaggtgtctttggtgagggcgttgttgtacatgatag

SEQ ID NO: 138181 - DNA, 258 bp, Glycine max
ctaaaaacatgcgagccctggtgggaagtagattgcctaagttcaccaaatggcaagccaagctagtgaatggatcatttgattttattggcttaaactattactcctctggttatattaatggtgtccctccaagcaacgacaaacccaattttctaacagattctcgcaccaacacttcatttgaacgcaatggaagacccctaggtctaagggccgcttcagtttggatatacttttatccaaggggacttctag

SEQ ID NO: 138182 - DNA, 243 bp, Glycine max
cgattaggagatggctaagtcgaagaaccacaccgctcacaaccagtcctacaaggcccacaagaatggcatcaaaaagccaaagaggcaccgccacacttccaccaaagggatggatccaaagtttctgaggaacaaaggtacgcgaggaagcataacaagaagagcggtgaaacagccacggaagaagagtaaagtgtcactctcaaatggggctattaggatttgatttgctattcaagt

SEQ ID NO: 138183 - DNA, 249 bp, Glycine max
cccggagaacggcctcggcaagctccgaaagcaccactccttcgctttccgatctgcctccgccaaggaatcagacagcggaagcggcaaatcgtacggtgaggattcgcccaagaatgcggtgagagtgacgcgaatataatgatcgtgaaaccacctggtaaccagagtcccagtggatccgctccggcttccaccgccggttctactcctccggtgtctccgttttcgggagctagagaatccttc

SEQ ID NO: 138184 - DNA, 245 bp, Glycine max
caaacatggcaatgaagaagttcttgtgggttgttctgtccctttctttggtccttggagtggccaatagctttgattttcacgacaaggatttggagtccgaggaaagcctgtgggacttgtacgagagatggagagtcaccacacggtttcgcgaaccttggtgacaagcacaagcggtttaacgtgttcaaagcgaatgtgatgcatgtccataacaccaacaaaatggataagccttacaa

SEQ ID NO: 138185 - DNA, 241 bp, Glycine max
aatcgttgttgttctaaagcactcatccacacattctccgtcgccacgacaacaatggctccaaagaaaggtgcgaaaggtggagttgtagcagcaaagaagaaggttcaggagaaggtaacgaaccctttgttcagaagcgtccgaagcagttcgggatcggaggcgcgctgccgccgaaacgggacctgacgcgcttcgtgaagtggccgaagaacgtccaaatccaacgcaagaagcg

SEQ ID NO: 138186 - DNA, 240 bp, Glycine max
aacagggagacaagacagagtagtacagattactaccaatggctaccaaggtttacattgtttattattctacgtatggacatgttgagaagctagctagagagatagaaaaaggggctgcttctgtggagggatagaagcaaaactgtggcaggtacctgaaacattgcctgaagaagtccttgctaagttgggagcacctccaaagagtgatgttccaattattactcccaatgagct

SEQ ID NO: 138187 - DNA, 144 bp, Glycine max
aatacatccaatgtggcttgccatagtggaactgtgtattaatgagtttcgtgatttcaattgcgggttgcgcttgagatttacaatgtttcagtcgtgtatgtgttttattgacgagaacaatgtggcttggggtttagtgat

SEQ ID NO: 138188 - DNA, 248 bp, Glycine max
gaggaaggatttctaaagaatggacaatctcctcttctaactgtaatgtcagctggccatgttctccatgtgttcattaacggtcaacttgcaggaactgtgtgggggggattgggaaatcctaaattgacatttagtgcaatgtgaagctgagggctggcaataacaagctttctttacttagcgttgcagttggtctcccgaatgttggtgtgcactttgaaacatggaatgcgggggtgttaggc

SEQ ID NO: 138189 - DNA, 202 bp, Glycine max
cgatcatcacttcacttcactaatacatcatggcagacgagacccagaacaagtatgagagctctgaggttgaggtccaggatcgtggtgtttttgactttctcggtaagaaaaaggatgaagaagacaagcccatcctcaggaggaggtcatcgccaccgagtttcaaaaagtcactgtctcagaccaaggagagaccaag

SEQ ID NO: 138190 - DNA, 238 bp, Glycine max
atccaagaagagctagacagggtaattgggcttgaaagggtgatgactgaagctgacttctcaagcctgccttatctacaatgtgtgatcaaggaagcaatgaggcttcacccaccaaccccactaatgctccacaccgtgccaatgccaatgtcaaagttggaggctatgatattccaaaagggtccaatgtgcatgtgaatgtgtgggccgtagcccgtgacccggcagtgtggaa

SEQ ID NO: 138191 - DNA, 236 bp, Glycine max
atttagttccatacatagcaagaaagacacactcacacacagtgcttgtttagactagtgatcttccatggctgtgaaggatagaatcctggtcttgggacccacaggagccattggaaggcacatagtttggcaagtttaaaggcagggaatcccacttttatattggttagggacacccctgcctctgttaacaagccaaggcttgtcactgctgctaatcctgaaaccaggga

SEQ ID NO: 138192 - DNA, 239 bp, Glycine max
ctctgctcgtgcctctagggttatcatatctccatttccatttcctctctctcagtttccaagaatcttaagctatgggaaagtcttacccaaccgtgagcgctgattaccagaaggccgttgagaaggcgagaagaagctcagaggcttcatcgctgagaagagatgcgctcctctaatgctccgtttggcatggcactctgctggaacttacgacgtgagctcgaagaccggtggtc

SEQ ID NO: 138193 - DNA, 244 bp, Glycine max
acaccttctccaccacctccttactactacaagagtcctcctccaccatctcccgtttctcatcctccctactactacaaatctcctccacccccaacgtcgtctcccccacctccttatcactacgtgagcctccaccaccaaccaagtctccaccaccaccagtttacatttatgcttcccctccaccacccatctacaagtaagcttggaattaagaagcagcaacaataataagtcatgt

SEQ ID NO: 138194 - DNA, 244 bp, Glycine max
gagtaatttattgtgggattctattctaagattttgagaatgtctagctgtgggtgtggaagcagctgcaactgtggcagcaactgcggttgcaacaagtactcttttgacttgagttacgttgagaagacaccacagagactctagttttgggtgttgggcctgtgaaggcccaattggtagggtgctgaaatgggtgttgcatctgagaacggtggctgcaactgtggatcaagctgcacct

SEQ ID NO: 138195 - DNA, 240 bp, Glycine max
gcttccacaaggcacccaacaaggaggagtttcacagagaaacatgccgcaagatcaaagcactccaccaatatgattgcttgcgagccaataaatcaacatttgcttggggtctagaagcccgtgtaccattttggacaaggcatttatcaatactgcaatgagtattgaccctgagtcgaaaatgataaaaagagatgaaggacgaattgagaagtggattctgaggagagcctttga

SEQ ID NO: 138196 - DNA, 240 bp, Glycine max
atgaactaaaacatgcagttgcatttgttcggccagttagtgtggcctttcaggtggtgaatgggttccatttctacgagaatggagttttcactagtgacacttgtggtagcacttcccaggatgtgaacatgccgttcttgctgttggatatggagttgaaaatggtgtcccatattggctcataaaaaattcatggggagaaagctggggtgaaaatggctacttcaagatggaatt

SEQ ID NO: 138197 - DNA, 236 bp, Glycine max
acaagcgaggttggactccgtttgctcctttgtcctcttggttccaacgttgtaattacaacagcatgctgtactgtgggagttgctttgcctgtgtactctacgttcaaggcaatagaaagtaaagataacatgctcagcataagtgtcttctctactgggcagcctatggttcattcagtctcgctgaagtgttcacggacaagcttatttcttggtgtcctatctactatcac

SEQ ID NO: 138198 - DNA, 234 bp, Glycine max
atgtccgttagggtttgcagggatttgaccagccggagatcgctcggttatggttatgtcaactttagcaacccgcaagacgctgctagagcattggatgttctgaacttcactcctctcaataacaggccatccgtattatgtattcgcatcgtgatcccagtatccgtaaaagtggacaaggaaatatatttattaagaatttggatagggcaattgaccacaaggcattgc

SEQ ID NO: 138199 - DNA, 235 bp, Glycine max
gaaacatgtgactgatagaatgatgctcaatgctgctaacattttccccttcaacacaccaaccaccaaagaagcatactactatagaatgatatttgagaggttcttccctcagaactcagccaggctagtgttcctggaggaccaagtgttgcatgtagcacagccaaagctgttgagtgggatgctgcttggtctaacaaccttgatccatctggtagagcagcacttggag

SEQ ID NO: 138200 - DNA, 236 bp, Glycine max
agcatgcacccgccactcccagtggtcaaaagaaagtgcacagaagagtgtgagattaatggatatgtgatcccagagggagcattgattctcttcaatgtatggcaagtaggaagagaccccaaatactggacagaccatcggagttccgtcctgagaggttcctagagacaggggctgaaggggaagcagggcctcttgatcttaggggacaacattttcaacttctcccattt

SEQ ID NO: 138201 - DNA, 237 bp, Glycine max
cgcacgaatatcttgttgtttggagcgatccgagaaaaactctgtaaacatgttggtttaccaggacctccttacaggtgatgagcttctctctgactccttccgttacaaggaaattgagaatggaatctgtgggaagttgaggggaagtgggttgttaaaggagcagttgatgtagacattggtgcaaacccttctgctgagggtggaggagaagatgagggagttgatgatgca

SEQ ID NO: 138202 - DNA, 240 bp, Glycine max
aaattatataggcgtatatacgaagagtatttggcagttcctgtcataaagggtaagaaaagtgagcttgagaagtttgctggtggactctacactaccagtgttgaggcatttattccaaacactggtgtggtatccaaggtgcaacttctcattgtttgggccaaaattttgctaaaatgtttgagataaactttgaaaatgaaaagggagagaaagcaatggtctggcagaattcat

SEQ ID NO: 138203 - DNA, 235 bp, Glycine max
atcgagccgaatcggctcgaggccagagttacttcaaggctttgagtatttgccttatagcactaattggatcaactcaagctcaattgcagcttggtttctatgccaaaagttgtccaaaggctgagaaataattctgaagtacgttgttgagcatatccacaacgctccatcactagcagctgctctcataagattgcacttccatgattgttttgtcaatggttgtgatgga

SEQ ID NO: 138204 - DNA, 230 bp, Glycine max
agccaacagagagaagatgacccaaattatgtttgagactttcaatgtgcctgccatgtatgttgcaattcaggctgtcttgtctctgtatgccagtggacgtactacaggtattgtgcttgattcggtgatggtgtgagccacacggtgcccatatatgaagggtatgctcttcctcatgcaattcttcggttggaccttgctggccgtgatttaacagagtacttggt

SEQ ID NO: 138205 - DNA, 231 bp, Glycine max
agttcctccgctcaacaactataataacatctttctctctccgaacagatcacactatggccacctcaagcgccaaatcagtccatgatttcaccgttaaagatgccaagggaaatgatattaatctggtgactacaaaggaaaggtccttatcattgtcaatgttgcctcacaatgtggcttgactaattcaaattacactgagctcagtcagttgtatgagaaatacaa

SEQ ID NO: 138206 - DNA, 232 bp, Glycine max
gactagttctgtatcgcgtattgtcttcatacaggaacttgaacaatgaagaatgcaaagggcaagggagcagcaagggcctcaaaagaatcactgaagcccgttgatgaccgaaaggttggaaacggaaggcttccggtaagcctgggagaagtagtgcaccaaagaaggagaagaaggccaagaaagaccccaacaagcctaaaagaccacccagtgctttctttgtgtt

SEQ ID NO: 138207 - DNA, 234 bp, Glycine max
gctcttcctccaaacccacgaggcaacttccttcaacacaaggttccaaatctctgccataagacgcctcacttacgacaactctgtggccatggttccattcggaccttactggaagttcgtgagaagctcatcatgaacgaccttctcaacgccaccaccgtcaacaagctcaggcctttgaggacccaacagatccgcaagttccttagggttatggcccaaagcgcagag

SEQ ID NO: 138208 - DNA, 236 bp, Glycine max
gcttcttcgtctcaaacctcttcgttccttcgattcattccatttcttccaaaatggccaaagacccagttcgcgttctcgtcactggagccgcatggcaaattggatatgctcttgtccctatgatgctaggggagtgatgctgggtcctgaccagcccgtgatcctccacatgcttgacattcctccagcagcagagtcgttgaatggggttaaaatggaattggtggatgctg

SEQ ID NO: 138209 - DNA, 236 bp, Glycine max
aaacatcatacaatggcttgaaatcgatggtaattgaagaactgaggtcatattttcgtccagaattgctcaacaggatagatgaagtggtagtatttcaaccccttgaaaagtcacaggttcgtgagttttggttatgattaatagctcactggtaatattaatagtcacttggtaggctcttagtatatcatttcagtcgtgtttgttagcaataattttgattttctttacag

SEQ ID NO: 138210 - DNA, 238 bp, Glycine max
gagacatcactgcctccttctggtctccctggtgttggtctcctacgctgcccggtcggaatcagcgctgggcggctggagccccatcaaggacgtaaacgacagccacgtggcggagatcgccaacacgcgctgagcgagtacgacaagcgttctggggccaagctcacccttgtcaagctcgtcaagggcgagactcaggtcgtttccggcaccaactaccgtctcgtcctcaaag

SEQ ID NO: 138211 - DNA, 235 bp, Glycine max
ggagaagccaccagtatacaaaccacccgtttataagccaccagtttacaagccaccagtgtacaagccaccagttgagaagccaccagtgtacaagcctccagtgtacaagccaccagtatacaaccaccagtttataagcctccagttgagaaacctcctatttacaagccaccagtttacaagcctcctatagagaagccaccagtgtacaagccaccagtgtacaaaccac

SEQ ID NO: 138212 - DNA, 230 bp, Glycine max
aaaagcacaaagcaaagctcatccttgagttaaaaaatggcagcagcttcttccatggctctctcatccccatccttggctggcaaggccgtgaagctgggcccatcagccccagaagtgggaaggtgagcatgaggaagaccgtcaccaagcaggtctcctcaggaagcccatggtacggcccagaccgagtcaagtacttgggcacattctctggcgagcccccgtcc

SEQ ID NO: 138213 - DNA, 283 bp, Glycine max
aacacaggcgcagacgcaaacgcaaacgcaaacgcaaacgcaaacgcagagcgtgatccattgacgaagatggtgcagcgtctcacctaccgcaagcggcacagctatgccaccaagtccaaccaacacagggtcgtcaaaacccctggtgggaagctcgtttatcagactaccaagaagagggccagcggacccaagtgccccgtcactggcaagaggattcaggggattccacacttgaggcctgcagagtacaagaggtcaaggttacccagaaaccgta

SEQ ID NO: 138214 - DNA, 259 bp, Glycine max
ctgctctagcggctagggtattagcgttcttcttctagatttaaggaagatgggtaaggaaaaggttcacatcagtattgtggtcattggccatgtcgactctgggaaatccactaccactggtcacctgatttacaagcttggaggcattgacaagcgtgttattgagaggtttgagaaggaagctgctgagatgaacaagaggtctttcaagtatgcctgggtgctggacaaacttaaggctgagcgtgaaagaggt

SEQ ID NO: 138215 - DNA, 276 bp, Glycine max
caacaacttaaagattgagaacattctgttggatgatagtctcaatgcaaaagtcagtagatacaacattccattaccatccaagagtgcacataatgaacaaaatgccaccaatcacattagcagcacaaacaatacagaaaaggaagatatctatcagttgggtgttattctacttgaagttattactggaaaacaaattacatccacgagtgaaatagaggagctgaaggaagagctggagaatggttcaccagaagcaacatcagtaatcag

SEQ ID NO: 138216 - DNA, 274 bp, Glycine max
cagagagagcgagcagtttcagacacagagagaggggtttgggattggagggattgacgctgcgtctcttcctcttctctttcgatccatccctcattcctaatcctccaatccaaccacctcagcctcacactcacatatacacatatctgaacgcgtatcgtccctcctatggcttcaaagcgcatcctcaaggagctcaaggacttgcagaaagacccaccaacttcttgcagcgctggtccagtagctgaggacatgttccattggcaag

SEQ ID NO: 138217 - DNA, 274 bp, Glycine max
ctcgagccgctcaaccctagtaagccgcaatggtgaagtactcaccggagcctgacaatacaactaagtcttgtaaggctagaggcgccgaccttagggttcattttaagaacacaagggaaactgcctttgcaatcaggaagttgcccttggtcaaggctaaaaggtacttggaagatgttcttgcccacaagcaggcaattccattcagacgtttttgtcgaggtgttggaaggacaacccaggctaagaatagacactctaatggccaagg

SEQ ID NO: 138218 - DNA, 269 bp, Glycine max
ctgatctatcacattgaaacatatgatgtgacaacaattagagcaagcattcccatgtttcttatgtctcgtaagatcaagtcattgggagtcaaatgggttatatctggagaaggatctgatgagatctttggagggtatctatatttccacaaggcaccaaacaaagaagagtttcatcaagaaacatgccgcaagattaaagcactccacaaatatgattgcttgcgagccaataaatcgacctttgcctggggtctagaagccag

SEQ ID NO: 138219 - DNA, 272 bp, Glycine max
tgagcaatgaggcttcacccaccaaccccactaatgctcccacaccgtgccaatgccaatgtcaaagttggaggctatgatattccaaaagggtccaatgtgcatgtgaatgtgtgggccgtggcccgtgacccggcagtgtggaaggatccgttggagttccgactcgagaggttccttgaggaggatgtggacatgaagggccatgactgtaggctacttccattcggagcgggtcgccgggtatgcccgggtgcccaacttagtatcaa

SEQ ID NO: 138220 - DNA, 268 bp, Glycine max
cacatcgcagagagagatagagatccatcgatcaattaatttccaatggccgatcagctcaccgacgaacagatctctgagttcaaggtagcctttagcctcttcgacaaggacggcgatggctgtattaccaccaaggaacttgagactgtgatgcggtcgcttggtcagaacccaactgaggctgagctgcaggacatgatacatgaggttgatgctgatgggaatggtaccattgatttcccaggattcctcaatctcatggcgc

SEQ ID NO: 138221 - DNA, 271 bp, Glycine max
ccaggggctccaattcctactcttagccgcagatctctcagggcttgcatcttctcaggtaagttgtgaagatgtacacatcaaggaagaaaatccacaaggataaggatgctgaaccaactgagtttgaagagtcagttggacaggcattgtttgatctggaaaataccaaccaacagcttaaaagtgatctgaaggatttatacataaactcagctgtgcaagttgatgtttctgggaaccgcaaggctgttgttattcatgtccctta

SEQ ID NO: 138222 - DNA, 267 bp, Glycine max
  unsure (1)..(267): unsure at all n locations
ttgagggagagacatctatgtcctcatcatctgactgttctcttgntgatccacttgtagatggcctaattgcaacagcaggtttcttttgtatggcaggtatggaaggaatcccaactggtgcattgatatctttatcttgtaacttagattgatcatttccagaaggantagatcctttagaagtagtctgagatccaactagagaaggattagtcggctgtgatccaccatcagaaaaaggggacattgagggagagacatctt

SEQ ID NO: 138223 - DNA, 268 bp, Glycine max
gttgatttaacaaacaagcattatttcaagattaattcaagatcaagctttttcctcaaaacaagtatttccaagagatcaaggctctggtaattgattaccaggcagtgtaatcgattaccagaagataattttgaaaattagcttttaaaaagggttttgaatttgaattttgaatcatgtaatcgattaccaaatgtttgtaattgattaccagcaatgacacttcagaagacactttgaaaagtcatgacccttcaaaatataa

SEQ ID NO: 138224 - DNA, 260 bp, Glycine max
cagaaggctgaaaacattgtgtcacttttgaatgataaagataagatacatgaagtcagaaataaagctgctgcaaaccgtgacaagtacattggagtttcttctagtggaatcacatacaagtctgggtcagcctcctcttatggtagtggcagcagctttcaaagcagtggtaaatatggaggctttggatctagagatggtgacaggtataatgatagctatagagacaaaggatcctatgaagaagaaaaagatta

SEQ ID NO: 138225 - DNA, 258 bp, Glycine max
atactcaatcttcagcagtctttagtgaaagcaaatctagctggttacattaaactagttgtcccctgcaatgcagatgcgtatgagtcatcacttccttcacaaggtgcattccggcctgaactgacccaaatcatgactcagctggttcagttcctcaactcatacggtaccccgtttattgttaacatctacccattccttagcctctatgacaagaatgatttctcgcaagactacgcattctttgaggggact

SEQ ID NO: 138226 - DNA, 211 bp, Glycine max
ccttccttaagctccttagtgctgctccttgcagctctaattctatcccctcaagttcttgcaaactatgagaatcccccagtgtacaagcctcccactgagaaaccaccagttgataagcccccagttgagaagcctcctgtttacaaacctccagttgagaagcctccagtttataagcctccagtagagaagccaccagtgtacaagc

SEQ ID NO: 138227 - DNA, 265 bp, Glycine max
acgaggcatatgatgaagatgatgatgagccatctggtcaacgagtgcaatgtgctcaacagtagtgcaatttatggtagtagaggttctataatttctgcatggtttttatcttttgtttgcataatgcagttataactgcgtgataaatttaccctttaggttttggctggtaacgttatttagtcttggcagatttctaaagtctgttttttgttgtaatatatgaaaattaaatgttttggtacaaggcgcgcaataacga

SEQ ID NO: 138228 - DNA, 196 bp, Glycine max
ctctctgtgcgcagttccctacctctcctttcaagatgcagatcttcgtcaagaccctcatcgggaagaccatcacccttgaggtggaaagctctgacaccatcgacgacgtcaaggccaagatccatgacaaagaaggcattcccccggatcagcaacgtctcatcttcgccggatagcagctcgaggacggccg

SEQ ID NO: 138229 - DNA, 263 bp, Glycine max
ctgatgagcagaaggaccaagtagcagttgagcagattttgcgagttgtttttctagatccagagcgtccctgtccagcttaggaaaaactgaaccgacagctggctgatgctgatgctgaccttgaggtacgcaagacacctgcagaagatgcaggtcctaatattatcgggggagggcttgtcatagacgaatggaaagagaggatggaaagatacctcgcagagcagcagggtgaagtggctgtagattctgtatagagc

SEQ ID NO: 138230 - DNA, 263 bp, Glycine max
agaaggttgagccaaaacccagcaatgctttcacctcaaaagtggttgatttgttggagaaattggtggtgaagttcttgtatgattcttcactgccccatcactacctcactggtaattttgctcccgtgagtgagacccctccaaccaaggaccttcctgtcaaagggtaccttccggattgcttgaatggggagtttgtcagagttgggcctaatccgaagtttgctcctgtagctggatatcactggtttgatggagat

SEQ ID NO: 138231 - DNA, 262 bp, Glycine max
agatggggaactgatgagaacactgtcatagtaattttgggtcatagaactgtgtatcagaggcagcaaatcagaagagtttatgaggaaatttaccaggaggatcttgtgaagcgcctagagtctgagatcaaaggagactttgagaaagccgtgtaccgatggatactggaacctgcagatcgtgatgctgttttggccaatgttgccatcaagagtggcaaaaactacaatgtcattgtggaaattgccactatcctct

SEQ ID NO: 138232 - DNA, 260 bp, Glycine max
accatggaaataatcaaaactcatgacctagcctttgctgacagaccccagaacactgctgcaaagatcttgctctatggatgcacagacgttggcttcgcaagctatggagaaaagtggagacagaaaaggaaaatatgcgtccttgaacttctaagcatgaaaagggtgcaatcatttcgtgtcataagggaagaagaggctgcgaagttggtaaataagctacgtgaggcaagctcgagtgatgcaagttacgtgaa

SEQ ID NO: 138233 - DNA, 263 bp, Glycine max
gccgtcgccgcgaaacaccccctctccgtcgtcaagaacctcctcagcctccatatcctcctcgactacttcgacaacacaaagctccaccagatcaccaacgggaccactctttccaccactctctaccaaaccacaggtaatgccaacggcaacgtcggctccgtcaacatcaccgacctcaaagggggcaaggtcggcttcggctccgcggctcccggctccaaactcgactcctcctacatcaaatccgtcaaaagtat

SEQ ID NO: 138234 - DNA, 257 bp, Glycine max
ctctctctctagacttagattttgtgaatggctgaagtggaagatggacaggtcatcggcgtccacaccgttgatgagtggaagctgcaactccagaatgcaaaagactccaaaaaactgattgtggtggattttactgcttcctggtgtggtccatgccgttttatggccccagttcttgcagagattgcaaagaaaactcctgaattgatcttcctcaaagttgatgtggatgaagtgatgcctgttgctgagga

SEQ ID NO: 138235 - DNA, 267 bp, Glycine max
cctcgagccgattcggctcgaggtgaaaactcgcacgcctactcagaccgctagtcacgctcaccagtacttcctccgccgcaccaaccagaaccgccgtcgccggagatctagcctcttcgacatcaccgcggatacggtgatggaatcttctactataatggaagaagaacaagttccgcaagatacgatggcggcgcctatccccgccgcatatccgccttttcccggcgcgggttttccgatgagtctatctccggtggtgtt

SEQ ID NO: 138236 - DNA, 263 bp, Glycine max
atctgtgacgtggcgtctcgtgcagaaagacaggacctcatagctagagtctccaatgagtttaatggcaaactcaatatccttgtaaacaacgtgggaacaaacgtaccgaaacatacccttgatgttacggaggaagacttctcatttctgataaatacaaatcttgaatctgcttaccacctaagccagcttgcacatcctctcctgaaagcttcagaggctgcaaacatcatttttatatcctccattgctggtgtgct

SEQ ID NO: 138237 - DNA, 156 bp, Glycine max
  unsure (1)..(156): unsure at all n locations
aattcggctncagatgcttgctctagtctgcatggcttcgcttacctttaggtgttgattccaccaccagacagatgttcattgacgaagtcatggaactggtggagctgaacccattaaggacctcactggttggattgcccggtgtgagtcgtc

SEQ ID NO: 138238 - DNA, 261 bp, Glycine max
atctcagaattctctaaaagagatctttttctgctctttgaagaaagaagggtctttgcttgattttggagatgtctctgctctcagatctcatcaaccttaacctctccgataccaccgagaaggtgatcgcagagtacatatggatcggtggatcaggaatggacctgaggagcaaagcaaggactctcccaggaccagttagcgacccttcagagcttcccaagtggaactatgatggttccagcacaggtcaagctc

SEQ ID NO: 138239 - DNA, 263 bp, Glycine max
attctctctgtgtatttccctacctctcccttcaagatgcagatcttcgtcaagaccctcaccggcaagaccatcacccttgaggtggaaagctctgacaccatcgacaacgtcaaggccaagatccaggacaaggaaggaatccccccggaccagcaacgtctcattttcgccggaaagcaacttgaggacggccgtacccttgctgactacaacattcagaaggagagtactcttcacctcgtcctccgtctccgtggtgg

SEQ ID NO: 138240 - DNA, 265 bp, Glycine max
gttggagaatgaaaactgaaacagagccaaatgaaaccgagtcagattggagcgagttgactcgcgagtgcctcatcaacatcctctctcgactcagcgtcgaggatcgatggcgcggcaccatgctcgtttgcaagtcatggttcagcgtcttcaaggaaccctctcttcacttcgtcttcaacctcgaccctcaattcgactcgcccaccgaatcaactcgctggtggacccccgagttcgaggccaagatcgataacatgct

SEQ ID NO: 138241 - DNA, 266 bp, Glycine max
cgatactccatgggatggaggcacgttcaagttgacactccaatttactgaggagtatccaaataaaccaccgactgtacgatttgtgtctcgcatgtttcatccaaatatttatgctgatggaagtatttgtttggatatattacaaaatcagtggagtcctatttatgatgtggctgctatactcacatctatccagtcattgctttgtgatcccaacccaaattctcctgcaaactctgaagcagctcgaatgtttagtgaga

SEQ ID NO: 138242 - DNA, 262 bp, Glycine max
catatatagaagagccttccatatatagcctcccaaaaaaatgaagagtactacctctttggctctctttctactttgtgccctaacttcatcatatcagccttcagccaccgctgatattgtattcgacaccgaaggcaatcctattcgaaacggcggcacatactatgtgttgccagttataagaggaaagggcggcggaatagaatttgccaaaaccgaaacagaaacatgccctctcactgttgtgcaatctcccttt

SEQ ID NO: 138243 - DNA, 256 bp, Glycine max
ctgagccttagcgagcaacagcttgtggattgcgatcacgtgtgtgatccagaagaatatggagcgtgtgactcaggctgtaatggtgggttgatgaacaacgcatttgagtacatacttcagtctgggggagtacagaaagaaaaggactatccatacaccgggagagatggcacctgcaaatttgacaaaaccaaagttgtggctactgtatctaattacagtgtggtttcccttgatgaagaacaaattgctg

SEQ ID NO: 138244 - DNA, 264 bp, Glycine max
cgagagagggagagagatggaggtgagcatgaaagtgttggtgaaagttgcggcgttgcttttcctattgggattcactgcaacagttgttgatgctcgcttcgatccaagttcattcatcactcagtttctccccaatgctgaagccaacaattactatgttaaatccacaacaaaagcgtgctgtaacagctgtccttgcacaaaatcaatccctccacagtgtcgttgttcagatattggagaaacatgtcactctgcatg

SEQ ID NO: 138245 - DNA, 256 bp, Glycine max
agaacgaggagcctgaggcctaccacatcagaaccctcacttcagtccttggcagtgaggaggctgcaaaggaagctttgttgtatagttacaagtctgcagccagtgggttctcagctaagcttactccggagcaggttgaacagatttcaaagctaccaggtgttacttcaagttgttcctagcaggacatatcagctccatggaccaaataacctgcagtagagaatgttcacctaaagttgtatcggttaaa

SEQ ID NO: 138246 - DNA, 277 bp, Glycine max
cactcggacttctgctcgagacgctgtcttgcttcccagcaacacagtcatgactcctcccgtggtctccacacccaagggagagaggagtaacatccaacaacagaagatcctgcactttctcattaccctcgccactgagaatggcagcctgcactgctgcaccataggcaacagcttcatctgggttaatgctcttgcaaagctcctttccgttgaagaagtcctgcaacaactgttgaaccttgggaatcctagtagaaccaccgacaagaac

SEQ ID NO: 138247 - DNA, 255 bp, Glycine max
attaaagactaaatctggtcataatgtgcctggagttgatcttaaacggagagaggcctatctgtcagaggatgagttcaacactgtatttggaatggcaaaagaagcattttacaagttgccaagatggaagcaagacatgctgaaaaagaaatacgaattgttctaaacttgaaatgaaagagtgacgtctgcttctttagctgctatacctttcctcagttatctttaaaatgctcttatctgttgagatag

SEQ ID NO: 138248 - DNA, 255 bp, Glycine max
accgattgctagaatggaatttcgatgctcagtcatctcttttaccattctcttctctcttgctcttgcaggagagagccatgtccatgcatcgctacctgaggaagattattgggaagctgtttggccaaacactcccattcccactgcactgcgagagcttctaaagcctctccctagcaggtgttgaaatcgatgaactccctaagcaaattgatgatacacagtacccaaaaacattcttctataaagaag

SEQ ID NO: 138249 - DNA, 254 bp, Glycine max
gaagaaacttaatcgatcatcacttcacttcactaatacatcatggcagacgagacccagaacaagtatgagagctctgaggttgaggtccaggatcgtggtgtttttgactttctcggtaagaaaaaggatgaagaagacaagcctcatcctcaggaggaggtcatcgccaccgagtttcaaaaagtcactgtctcagaccaaggagagaacaagcacagcctcttagaaaagcttcaccgatctgacagcag

SEQ ID NO: 138250 - DNA, 255 bp, Glycine max
aaaacactgaatgctacaagcaatgggaaaatgtttatcaggacaacattgaagcaagtgcttcagttctgaagaagctttctgatgattggaaggagctatcaacaaaattgtctcctcatgatcatctgagggataccataaagaacttcaagcaaaagaatgagaaagtattggactctgagactgatgctgctcgtcatgcacacttcaaggatgccgataaatattgtaagataatcttaggaagagttt

SEQ ID NO: 138251 - DNA, 255 bp, Glycine max
atttagaagaagaaaccttagatggagaaaacttagaagaagaatacttacaagaaggagaaaacaactcaggtggagaaaacttagatggagaaaacaacccagaaggagaaaatttagaagaagaaaccttagatggagaaaacttagaagaagaatacttacaagaaggagaaaacaactcaggtggagaaaacttagatggagaaaacaacccagaaggagaaaatttagaagaagaaaccttagatggag

SEQ ID NO: 138252 - DNA, 255 bp, Glycine max
agtggtttcagtgagtgatcggtgttcacttgatccttcataagtcgtcatcatcatcatcatcatcaccgttgattgaagaagatgccgatcagaaacatcgccatcggaaggcctgaagaggctactcaccccgacacgttgaaggcggggttggctgagttcatctccaccttgatcttcgtgttcgccggttcaggttccggcatcgcctacaacaagctcaccgacaacggcgccgccactcccgccggc

SEQ ID NO: 138253 - DNA, 254 bp, Glycine max
ctcatcaactcgcttgtagaaaatgttcaaagggtcggagtggaaaagagttgccctcaggactgcaaccatgttccctgcagttgtctctgccattttctttgttttaaatgctctcatatggggccaaaaatcatcaggagctgtgccatttggcacaatgtttgctctgatctttttatggtttgggatctcggttccacttgtttttgtgggtagctatgttggattcaagaagcctgcaattgagaatc

SEQ ID NO: 138254 - DNA, 251 bp, Glycine max
catcaatcaaggaagtcagtacataaatctaatccaaacacttgcttcaaggtcaagcaagccaccccatgttaggttgactggagttgatgatcctgagtctgtgcagcgatctgttggaggcctacagaacataggacaaagactagaaaaacttgcagaggcacttggtttgccattcgagtttcgagcagtggcatcaaggacttccattgtcaccccatcaatgctcgactgtagtcctgatgaag

SEQ ID NO: 138255 - DNA, 252 bp, Glycine max
cggctcagccgctcgagccgctcgagcggctcgagcgagttagatagagatcatggaaaaagttggggtaaggctggtggtattgctgtgtttcattgtgacggcggcgatggcccaaaactgcgggcgacaagctggtgggcagacatgtggcaacaacctatgctgcagccaatacggttggtgtgggaacagcgaagatcattgttctccctctaagaactgccaaagcacatgctggggcagtggcgg

SEQ ID NO: 138256 - DNA, 254 bp, Glycine max
ctccgagaacaaaaaaaaaaaacgtgattcgctcttctcttagaataaaccacaaaaccaacaaacgagaagaggagtgagagaagatggggttgtcgttcacgaagctgttcagcaggttgtttgcgaagaaggaaatgaggattctgatggtaggtctcgatgctgctggtaagacaaccatcttgtacaagctcaagcttggagaaatcgtcaccaccatccccaccatcggatttaatgttgagactgtg

SEQ ID NO: 138257 - DNA, 251 bp, Glycine max
ttcaggtcttgatgcaagagcagcagctattgttatgaggactgtgagaaacactgtggacacaggaagaacagttgtctgcacaattcaccagcctagcattgatatctttgaagcctttgatgagcttttgttgatgaaaagaggagggcaagtgatctactcaggaccattaggccgaaattcccacaagattgtagaatactttgaggcaattccaggggttccaaaaattaaagagatgtacaacc

SEQ ID NO: 138258 - DNA, 251 bp, Glycine max
cacatagtagctattatactctctagagtaattgcggaatctgctagaattttctaataatggcgaaagacgttgagcaggtcacagagcaaggtgaatactccgcgaaggactaccatgaccctcctccggcaccgttgatcgacccagatgagctcacaaagtggtccttgtacagagccgccatagctgagttcatagcaacactcctttttctttacatcaccgtgttgaccattattggctacaag

SEQ ID NO: 138259 - DNA, 251 bp, Glycine max
aaatcctcaattttctgagcagccaaacactctctctctgtctctcgaaaattctcagtttgcagagaaaatctgaatcatgtcgtggcaagcgtatgtcgacgatcaccttctgtgtgacatcgaaggtaaccacctcactcacgctgctatcatcggccaagacggcagcgtttgggctcagagtaccgacttccctcagttcaaacctgaggagataactgccatcatgaatgactttaatgagcctg

SEQ ID NO: 138260 - DNA, 256 bp, Glycine max
cagatatataaatacaaatcgccacgccgctacgtcttcttcagccatttagctccatagctgcagcattagggtttttcatctgcttcaatggggaagggaacagggagttttggtaagagaaggaacaagactcacactctctgtgtgaggtgtggccgccgcagcttccatctccagaagagtcgttgcgccgcttgtgctttccccgccgcacgcactaggaaatataactggagcgtcaaggcaatccgca

SEQ ID NO: 138261 - DNA, 253 bp, Glycine max
gaagaaacggccgagcctttctgttttcccatgcaatgaatattgtcacggggccaaaagaagacaggcatctcttgactggcctccatactgttgctgatgtttattgtggcgattgccgtgaagtgttgggttggaagtatgaaagagcttatgaagcatcccagaagtacaaggaaggaaagttcatacttgaaaagtcaaaaattgttaaggagaactggtagcattcctttctgctccccattctatt

SEQ ID NO: 138262 - DNA, 249 bp, Glycine max
gttagtggtaatcacaaaggttcttacctaacaatgctaagttccggtggcttagtttttgggattataaacattgttggaaattttggcactgtgtttgttgacaatggatattgggtgagtgccattgctgcaagaccttcatctactcataaggggtacttgttgggaggcttggtctggtttgctgtgccattttctttggctacatcattaggtctaggagccctggcccttgatttaccaata

SEQ ID NO: 138263 - DNA, 250 bp, Glycine max
aagccacaatcatgggacctgctgatagcccatatgcaggtggtgttttcttagtttcaattcattttcctcctgactatcccttcaagccaccaaaggttgcttttcggactaaggtgttccacccaaacatcaacagcaatggcagtatatgtcttgacattctcaaggaacaatggagcccagctctaaccatttccaaggtccttttgtcaatttgctcattgttgacggatcccaaccctgatga

SEQ ID NO: 138264 - DNA, 246 bp, Glycine max
gcgagagagagagagaaacaaagcagcacccatttggatcctctcttctcttctttgatctccgttaccctttttgttttctcaacagagagagagagagagaatctttcgaagttcgtttgcgtgtgttgtgtggtcagtcaccgatggcagcaccacctgcgagggcacgtgccgattacgattacctcatcaagcttcttcttattggcgatacggtgtgggaaagagttgtctgcttttgcg

SEQ ID NO: 138265 - DNA, 251 bp, Glycine max
tcgtcaccatgccgcaaggggattacatagagcgtcacagaagagactatggctaccgtctcgatcacttcgagcggaagcgcaagaaagaggcgcgtcaagttcacaaacgctctgcaattgcccagaaggctctgggtattaagggcaaaatgattgccaagaaaaattatgctgaaaaggcacagatgaagaagactttggctatgcatgaagaatcaacttctaggcgcaagactgatgataatgtt

SEQ ID NO: 138266 - DNA, 251 bp, Glycine max
cacagactagagctaaatcagcatagagatacaaaaatgccaaaagtaaagacaaatcgtgttaaatacccagagggctgggaattaattgagcctacactccgtgaacttcaagcaaagatgagggaagctgagaatgatccgcatgatggcaaaagaaaatgtgagaccttatggcctatatttaagattgcacaccagaagagccgctacatatttgatctataccatcggaggaaggaaatttctaa

SEQ ID NO: 138267 - DNA, 249 bp, Glycine max
ggaaaagggaactggtaaaagtggcaagcctctccattacaaaggtagctcattccatagaattattcctagctttatgctccaaggaggtgattttacacatggcaatggtatgggtggagaatcaatttatggagagaagtttgctgatgagaacttcaagttaaagcatactggaccaggacttctatcaatggcaaatgctggtcctgacaccaatggctcacaatttttcattacaaccgtgac

SEQ ID NO: 138268 - DNA, 250 bp, Glycine max
gcaagtaatatggttgagtgatttagacaagactaaaggatatgccgttgattttttgtctatctctctccatgcagtctctagagaccctgaagcctatcctcttccttgtttatatacccagattgatacaggagaagctgatgatgaccacactgattctgaatccattcatatcccacaagatttgtccaacatcgcagagatgaggctcattccctctgatcctacacaattggattctctcttt

SEQ ID NO: 138269 - DNA, 249 bp, Glycine max
ttccgccttttgcgttgcaagctctctctttctttgctttttccccttttttgttttttctgtgctactatccattgtaaaccactggctcatacccgaggtgtatccactgttcgctgcggttggtgccgctgttgggatctgtggattccaattggttcgtaatatctgcatcaaccctgaagtcagggtgaacaaggagggaagaaaggcaggagtgttggagaactttgctgagggagagaagta

SEQ ID NO: 138270 - DNA, 248 bp, Glycine max
aagaccctcactggaaagaccatcacccttgaggtggagagctctgacactattgacaatgtcaaagctaagattcaagacaaagaaggtatcccaccagaccaacagaggctcatttttgctggaaaacagcttgaagatggccgaaccttggcagattacaacatccagaaagaatctaccctccacttggtgctccgtcttcgcggtggtatgcaaatctttgtgaagacccttactgggaagac

SEQ ID NO: 138271 - DNA, 248 bp, Glycine max
ctggtgtcgaccctaatctcccactcgagcgccaagaagaagcgaaacaacttctcatgcgctgtctcaatcttggaatctctgctctaaattctaatcttcccgccatagatgtcgtcgaacttgtggtgagggaattggaaacggatccgctgttcaattcgggccgtggatctgccctgacagaaaaaggaacggtggagatggaggctagcatcatggatggtccaaaacgacgatgcggcgcc

SEQ ID NO: 138272 - DNA, 249 bp, Glycine max
agataccaaggagcagaggacatatactggggaatgtgaggattgatttcttaatgctgagagacctagtttgaaacatcaaaggaaatggaaatctgaccccaattacaccaaatcatggtacgatagaggtgctaaaatctttcaggcagacaagtatcggaaaggtgcttgtgagaactgtggagctatgacacatgattctaagtcatgcatggaaagaccacggagagtgggagcaaaatggac

SEQ ID NO: 138273 - DNA, 249 bp, Glycine max
cagagaagcactcatcattcttcgtttgtctaagatccgccttctctgaattgtaaaaatgtcgctcggagaaactgcttgttcatacgcagctctcatccttcatgaagatggaatcagtgtaactgccgacaagatcagcaccttgttggaaactgcaaaggttcaagtagatacctattggccaaccttatttgctaaacttgctgagaagaaaaatcttggcgatttgatagccaatgcagcagg

SEQ ID NO: 138274 - DNA, 248 bp, Glycine max
ctttaaacgccgaagaaagttcatccaatctccgaagcccttcaccgcattgcaaccatgtcgagaagaaaggttagagagccaaaagaagaaaacgtgactctgggcccagctgttagagatggcgaacatgtctttggcgtcgctcgcatctttgcctccttcaatgataccttcattcatgtcactgatctgtccgggagggaaacacttgtacgcatcacaggtggaatgaaggttaaggctga

SEQ ID NO: 138275 - DNA, 243 bp, Glycine max
cccgcagtcatgggcaaggtcaagatcggaatcaacggatttggaagaattggccgtttggtggccagggtggctctgcagagagacgatgttgaactcgttgccgttaacgatcctttcattaccaccgattacatgacatacatgttctccaatacgacagtgttcacgggcactggaagcatcacgatgtcaccgttaaggatgagaagacccttctcttcggtgacaagccagtcactg

SEQ ID NO: 138276 - DNA, 248 bp, Glycine max
gaaaagaaaccctagcaagtggagcaatggcagacgttgaagtcgatgtggcggcacagcagcagcagggctgccgaagaagagaacgttcaagaagttcagttttcgaggcgtggatctcgatgcacttctcgacatgtccaccgatgaactcgtcaagatgttcagtgcccgcgctcgtagaaggttccagagaggcctcaccagaaagcccatggccttgatcaagaagctccgtaaagcgaaaa

SEQ ID NO: 138277 - DNA, 252 bp, Glycine max
gcttctgcttcttctcttgttgctgcttcaaaacagtgagaaaaatatggggttctcctcctttctgggtcgcgtcctctttgcttccctcttcatcctctcagcatggcagatgtttaatgaatttgatgacactggtggacccattgcaaaggagttgattcccaagttcactgttctgaagagaaatttatcctccaaactgggggtaaagacaccagatattaatgtgcggtcagtcattgcctctat

SEQ ID NO: 138278 - DNA, 247 bp, Glycine max
tgccattttggaagggcttggatatgcagctcctccaattatggcacttttgtttatactcgatgatgaagttgtgaagctatcaccccatgcccgtgccatcagagatgtagaggatgaagaactgtggagctttttctatgggatgtccccttggcagtttatactgatggttgcagcaagttcagttggagaggagctcttctacagggctgctgttcagggggcattggctgatatattttta

SEQ ID NO: 138279 - DNA, 237 bp, Glycine max
aaccatacaggatcagtgactgtgcacctgaagatgtctcaaaggcactaactaggactcttgcggacatgcagcttgactacattgatttatatcttatgcattggccttttaggacaaagttgggttcaagaggttggaaccctgagaatatggctcccttgtgtcttccagagacatggaatgcaatggaaggtttgtttgcctcgggtcaggcacgcgcaatcggggtgagca

SEQ ID NO: 138280 - DNA, 201 bp, Glycine max
cgggaaagaggcatggggtgtgccagctccaagctgttagatctccccgcagtggccctttgccgggagcggtgtggtttcctggacgaagcaattcaccagcgctatgcactcgccgccgctcacatcgcttacataaattctctcaagtcaattggtcactccttacacctgttcattcagcaagacatggattctcct

SEQ ID NO: 138281 - DNA, 245 bp, Glycine max
cgaaatgaaacatttaatttgcgtgcaatgcttttttgtaccattaatgattttccagcatatgggaacttgagcagttacagtgttaaaggccatcgtgcatgccccatctgtgaagaagacacaagttacatacaactgaaacatggaagaaaaacagtgtacactaggcatcgacgttttcttaaacctcatcatccttaccgacgattgaaaaaaacatttaatggaagtcaagagcatga

SEQ ID NO: 138282 - DNA, 248 bp, Glycine max
catatctccatttccatttcctctctctcagtttccaagaatcttaagctatgggaaagtcttacccaaccgtgagcgctgattaccagaaggccgttgagaaggcgaagaagaagctcagaggcttcatcgctgagaagagatgcgctcctctaatgctccgtttggcatggcactctgctggaacttacgacgtgagctcgaagaccggtggtcccttcggaaccataaagcacccctccgaactc

SEQ ID NO: 138283 - DNA, 244 bp, Glycine max
ctttgagtgttttccacctggtcacttgtactctagcaaagaacgagggtttcgcagatggtacaatcctccttggttctctgaggctactccatccaccccttatgatcctctcgttttaagacacacctttgagcaggcagtcataaaaagattgatgactgatgtgccttttggtgttctactctctggaggtttggactcttcattggttgcatccgtcacttctcgctacttggccaac

SEQ ID NO: 138284 - DNA, 244 bp, Glycine max
taaagacttgcttccaagatggttctgctatagaagctctgggatgacgttgttgctggccctcaacctgagcgtggccttggcaagctcagaaaactcaccaccctcaaaactattgatgaaggagacagtagcattctgcagaagacgttgtcgatgctgtcgacaccgacaatcccgttcactcccacgactccaacgacaccgggatccgcgcgtaaagctgacaacgtttggaggagcg

SEQ ID NO: 138285 - DNA, 245 bp, Glycine max
ggcgccattgatcgtgccactgctgaacctcgcagtgtacatttccctagcgatggcactcatgctcttcatggagagggtgtacatgggcattgtcatcatcctcgttaagctcttctggaagaagccccaccagcgctacaagttcgagccactccaagacgacgaggaactcgggaactctaattaccccgtcgtgcttgtgcagattccaatgttcaatgaaaaagaggtgtacaaggtgt

SEQ ID NO: 138286 - DNA, 245 bp, Glycine max
  unsure (1)..(245): unsure at all n locations
ggagtgaactgcatgtatgctccttggatttcttggcttctcatgcttcaatcagcacccatcatcgttcattcaacttcttgctacggagttctttgcttggccttttcgtttgtaatattgctgcttgacataaaactatatggacaatggttcacaactaaaaagaggtntctgtcagttgtggcaaaccctactagcctggtgtcggttatagggaacttggtgtctgctcaagttgttgc

SEQ ID NO: 138287 - DNA, 243 bp, Glycine max
gaattgttgtaactttttgattcctaaattctctaaaattcgaaattctaatttcgttaggggaaagagattgtttgtgtgtgagtgagtatggctggaaaaggcgagggtcctgctatcggaatcgatttgggaacgacgtactcttgcgtcggcgtgtggcaacacgatcgtgttgaaatcatagccaacgatcagggtaacagaactaccccatcctacgtggctttcaccgacacagaa

SEQ ID NO: 138288 - DNA, 243 bp, Glycine max
cgacgttgtttggggttagggttccggcgaggctgtaccacgagagggttgtggatcactacgacaacccccggaacgttggatcgtttgacaagaacgacccgagcgtggggacgggtttggtgggggccccggcgtgcggcgatgtgatgaagctccagattaaggtcgacgacaaaaccggaaaaatcgtcgatgctcgattcaaaactttcggctgtggctccgccattgcttcttcct

SEQ ID NO: 138289 - DNA, 243 bp, Glycine max
gaggtagacaggatggactgttgtggtacaaggactcggggcagcacttgagtggtgaattttcaatggctgtaatccaagccaataacttgctggaagatcagagccagattgaatcaggctgtttgagctccaatgagtctggcccttacggtaccttcgtcggtatctatgatggccatggagggcccgagacatcgcggtttatcaatgatcacctatttcaccatctcaagagattta

SEQ ID NO: 138290 - DNA, 245 bp, Glycine max
atatggaaggctcttctatatatctatcttgttccgtttgtgtcctaacttcatcatatcagccttcagccaccgctgatattgtattcgacaccgaaggcaatcctattcgaaacggcggcacatactatgtgttgccagttataagaggaaagggcggcggaatagaatttgccaaaaccgaaacagaaacatgccctctcactgttgtgcaatctccctttgaggtctcaaagggtctacca

SEQ ID NO: 138291 - DNA, 244 bp, Glycine max
ctctgctcgtgcctctagggttatcatatctccatttccattacctctctctcagtttccaagaatcttaagctatgggaaagtcttacccaaccgtgagcgctgattaccagaaggccgttgagaaggcgaagaagaagctcagaggcttcatcgctgagaagagatgcgctcctctaatgctccgtttggcatggcactctgctggaacttacgacgtgagctcgaagaccggtggtccctt

SEQ ID NO: 138292 - DNA, 259 bp, Glycine max
cagaattctctaaaagagatctttttctgctctttgaagaaagaagggtctttgcttgattttggagatgtctctgctctcagatctcatcaaccttaacctctccgataccaccgagaaggtgatcgcagagtacatatggatcggtggatcaggaatggacctgaggagcaaagcaaggactctcccaggaccagttagcgacccttaagagcttccaaggtggacttatgatggttccagcacaggtcaagctcct

SEQ ID NO: 138293 - DNA, 255 bp, Glycine max
gttgaatcgcgtcgattaaggttttgagatttctaggctttcatctcagacagtgaaaaaatgatagatataagtacacttaatgctgcacagattactgtgctgggatctgccttttgtgctatgctttccatgcatttcacgtcgcagttactgtctcagcatctcttttattggaagaatccgaaagagcaaaaggctattatcattatcatcctcatggctccaatctatgcagctgtctcctttgtgggt

SEQ ID NO: 138294 - DNA, 254 bp, Glycine max
tgtttgttgttgtaactcgttcttcttcttttgttgttctgtgtttgttttttctctcacctgaaaatgtcttgctgcggtggtaactgtggttgcggaagctcctgcaagtgcggcaacggctgcggaggctgcaagatgtacccagacttgagctacactgagtcaaccaccaccgagaccttggtcatgggagtggcacctgttaaggctcaatttgagggtgctgaaatgggtgtgcccgctgagaacga

SEQ ID NO: 138295 - DNA, 257 bp, Glycine max
ggagaaagtagcaagctgcagaagacgttgtcgatgccgtcgacaccaacaaccccgatgactccgacgactccaacgacaccgggatcggcccgtaaagctgacaacgtttggaggagcgtcttccatcctgggagcaactccgccacaaagaccatcggtgctcagatgtttgacaaaccacttcccaacactcccactgtctatgactggctgtacagtggggagaccagaagcaggcaccgctgaagctgaag

SEQ ID NO: 138296 - DNA, 256 bp, Glycine max
gtgaagcagcagagggaggagcggcattaaaaatgcagatcttcgtgaaaaccctaacggggaagaccataaccctcgaggtcgaaagcagcgacaccattgacaatgtcaaggctaagattcaagacaaggaaggcatccctccggatcagcagcgtttgattttcgccggaaagcaacttgaagatggaaggaccttggccgattacaacatccagaaggaatcaacccttcaccttgtcctcaggcttcgtgg

SEQ ID NO: 138297 - DNA, 254 bp, Glycine max
attttgttgagaagagagaatggctgtggcgtcgtcatcatcccttatcacgttgaaggtgaaaccttgcattttcgggtctcctcggagatccgcggtggttcggaattgtgcgaagtcaacggcggggacaatatcgacgagttggagcctggacagctggagggcgaagaaggcgcttcagcttccggagtacccagatgcgaatgaattggacctagtcctccaaaccctctcttcttttcccccaatcg

SEQ ID NO: 138298 - DNA, 256 bp, Glycine max
cagagagtggtttcagtgagtgatcggtgttcacttgatccttcataagtcgtcatcatcatcatcatcatcaccgttgattgaagaagatgccgatcagaaacatcgccatcggaaggcctgaagaggctactcaccccgacacgttgaaggcggggttggctgagttcatctccaccttgatcttcgtgttcgccggttcaggttccggcatcgcctacaacaagctcaccgacaacggcgccgccactcccgc

SEQ ID NO: 138299 - DNA, 255 bp, Glycine max
gtgtgttacaagaccattgaaaaagttgatagggccattgatgggcttaacgtgtacaacatactagagccatgctaccatttccccgatgctgccacagccaaagaaaatggaaccttaccaaggagtttcaagcaattaggagttactgagaggcctctcccagtgagaaagagaatgtttggtagagcttggccttttagagcaccagtcaaacctggtcttgttccattatggccccaattggctcaaact

SEQ ID NO: 138300 - DNA, 254 bp, Glycine max
caaggcgtggggcaagcttctgaggcccgtgacggtggcttccgtggccgtcatcgtgctcgcaatcgccgtgtccactgttatcagtttgaaaatcgtgtttccgagtagcgatggaagaagagcgttttgcgtcgatcgaaggcttcaacctattcagataggtatgaaaggcggttccgattcggatctgtttcctggtgctttttatctcacggaccaggagattgctgattattactggatgcttgtgt

SEQ ID NO: 138301 - DNA, 254 bp, Glycine max
atttttggttctattttcagattcctgaagacctccattttgtgcttagaatgcgacacacttttgaatcccttggctaccaatctggtttctacctctctcaactcttctcttcaacaaggaatacttcctcatcaacttctgttccttcaaaaccatccaccaatattccaattaggccacctcttccactcttcaactggggtcagagaccacttacttcagccacttccatgctatcctcacccaatttt

SEQ ID NO: 138302 - DNA, 254 bp, Glycine max
gtgaaagagaatccgaggcgaagagaagagaaaaattaagatggaggggaaggagcaggatgtgtcgctgggagcgaacaagttcccggagagacagccgattgggacggcggcgcagagccaagacgacggcaaggactaccaggagccggcgccggcgccactggttgacccgacggagtttacgtcatggtccttttacagagcagggatagcagagtttgtggccacttttctgtttctatacatcactg

SEQ ID NO: 138303 - DNA, 255 bp, Glycine max
aaaacacaaacaacacaaaattcattgcacagtgttattttcagtatcagcatcatggctccaattgcagtgggagatgtcattccagacggcattttggcttacttggatgaagaaaacaaaccccaaactgtctctattcactctctcgccgccggcaagaaagtcatcatctttggggttcccggtgccttcactcctacatgcagcttgaagcacgtgcctggcttcattgagagagcagaagagctgaaa

SEQ ID NO: 138304 - DNA, 250 bp, Glycine max
gtgcaagtgctctgatccagcacgactggactccaagaactcgattttcgcttgttggtgaggtggatactggggccatcgaaaagagtgcaaaggttggtcttgctgtggccttgaaaccatagaccaagtcgttttgtgagtgatatatgggatgcttctcgtggtggaggataataagttgttgtagactttcactttcccaatgaacatctagtgcttcattttggagctatatcaatttcttcat

SEQ ID NO: 138305 - DNA, 253 bp, Glycine max
atgattttggagatgatcaaattcttgggaggcttgaaggcatgaaggatgtaattgaacaagttaataagcaattcaaagatccggacatgacaacctttgtctgtgtgtgcattcctgaattcctttctctatatgaaacagaaagattggttcaggagcttacaaagtttgaaattgacacccacaatatcatcatcaatcaagtaatctttgatgatgaagatgttgaatccaagttacttaaagcaag

SEQ ID NO: 138306 - DNA, 253 bp, Glycine max
ttcactcacaacaacaacacatcactatggctcttctgagtcgagcctcttcacgcttccctcagctggtttcccctcaaagggtagtttcactccacacaacgctcccatctctgaacgcatccccatccacagccacgcctacaccatatgccccgccaccgcctccgtccgcttcctctcccgccggcgtttcgaaggcggcggagttcgtgatctcgaaggtggacgatctgatgaactgggcccgccg

SEQ ID NO: 138307 - DNA, 249 bp, Glycine max
ggaaagagttcatcagcatcctctactgcagagcttaacttccttggcctgcctattcgtgtgggagagaaagagtgccattattacatgcgtactggctcttgtaagtttggagcaaactgcaggtttaatcatcctgatcctacagctattggaggaggtgattctccttccggttatggtaatggaagttctatttcgttgcaaggtgtatcacaatcatctatatcctcatggtcttctactaga

SEQ ID NO: 138308 - DNA, 249 bp, Glycine max
tcagtacctcaccctgacagcagggttgagtatgagttctggaccaacagcaatgacgaatgtggagctcgttgcgacgaacagatgaattattgtgaagaattttaagggtcatgctcagattcttgagaggggtggttacaccttgttcactccacactacataacatggttttgtccaccacccttcattcttagcagtcagtgcaagtctcaatgtataaaccgtgggagatattgtgctccgga

SEQ ID NO: 138309 - DNA, 248 bp, Glycine max
gaaacgcgttggttgtcggaaaatcaccctcacctgatcactgtggaagtctctaggtgatggccggttcagaacctgttagggcagagggagagactatggctgtggatgctgccccaaggaagccccggattctacttgctgctagtgggagtgttgctgctgtcaaatttgcaaatctttgtcactgtttctctgaatgggcagatgtaagagcagtttccacaagtgcatctttgcatttcatt

SEQ ID NO: 138310 - DNA, 249 bp, Glycine max
gctaatccctcactcttgttcttcagtctcctcctattatccgccaccgtagccgccgccgaacggatcgacgatgaagacgaccttctgatccgtcaagtggtgccggatgcggaggaccaccacctgctcaacgcggacaccacttctccgccttcaagacaaagttcggcaagacctacgccacgcaggaggagcacgaccaccgcttccgtatcttcaagaacaacttgctccgcgccaagtcac

SEQ ID NO: 138311 - DNA, 253 bp, Glycine max
ctaccacctttccgccttcagccgtttcaaccaccagcaaatggctgggcttcgtggcggccgtgtggattcaatgcatctccggcaacaactacactttctcaaactactccgacgccctcaaatccctcatgcacctcactcagctccaactcaacaacctctccgtcgctaaagacgttggcaaagcctttgggcttctcgcgggcctggcctccgaccgcttccccacttgggccattctcctcatagg

SEQ ID NO: 138312 - DNA, 252 bp, Glycine max
acttgatcttagtgaggagcccatgtatgtgaacgcaaagcagtaccatgctattctgagacgcaggcagtatcgtgcaaaactggaagcacagaacaaactcatcaaagaacggaaaccatatcttcatgagtcccgccatctacatgcactgaagagagctagaggttccggtggacgctttttgaatgccaaaaagctccaagagttgaaactcacttcagcaaaccgtggcctagatgtttctggctg

SEQ ID NO: 138313 - DNA, 251 bp, Glycine max
catcaacctgtttttcctccattcagtcggaagacaaatcactaacattctttcctcatgacaattttttactactcgtaaaacaactttcttttccttttacccttttcataggtgtatgagttgtgtttgtcttgcagccttatatgcatgaatcacgccatctacatgcgacgcggcgaccaagaggatgcggtggtcgcttcttgaacacaaaaagctctactgatggaaatggtaaaaatgaaagt

SEQ ID NO: 138314 - DNA, 249 bp, Glycine max
catcgattaaagacttgcttccaagatggttctgctagagaagctctgggatgacgttgttgctggccctcaacctgagcgtggccttggcaagctcagaaaactcaccaccctcaaaactattgatgaaggagacagtagcaagctgcagaagacgttgtcgatgccgtcgacaccgacaatcccgatgactcccacgactccaacgacaccgggatccgcgcgtaaagctgacaacgtttggaggag

SEQ ID NO: 138315 - DNA, 248 bp, Glycine max
gtccagaagacagaaagcatagtctattgctctgtttgaagaattttaaatagtactacttgctttaccagtagtttatattaatgtttattgtatgttggatatatttggctgtttttcactgttgcttggtaagaaatgttttttctccgcctggttttgacagcaaggtacactgttcgttcctttgggattagaagaaatgagaagattgcatgctatgtcactgtcagaggtgacaaggcaat

SEQ ID NO: 138316 - DNA, 252 bp, Glycine max
attcgtattgtcgcagagaaagaaaaccctagctcaccgtttcaagatgcaaatcttcgttaagaccctcactggtaagaccatcactctcgaagtcgagagttcagataccatagacaatgtaaaggccaaaattcaagacaaggaagggatcccaccagatcagcaacggctcatttttgctggcaagcagcttgaggatggacgtacccttgctgattataacatccaaaaggagtccactctccactt

SEQ ID NO: 138317 - DNA, 249 bp, Glycine max
gtgagaaagagagagagagagagagaaactgagagaaattcgcaaaccctaatttcggaaagatcggcgatggctgcctccaaggatcgcgagaacttcgtctacatcgccaagctcgccgaacaggccgagcgatacgaagagatggtggaatcaatgaagaacgttgcgaatctcgacgttgaactgactgtggaggagcggaatttactttctgttgggtacaagaatgtgattggtgctcggaga

SEQ ID NO: 138318 - DNA, 248 bp, Glycine max
aggagactggccttatccccaatgctgttgctatgctcgatggtttatgtaaagatggtttggttcaagaagctttgaaactttttggtttgattcgggagaagggaaccattccagagattgtcatatacacagcggtagtggagggatacacaaaggcccacaaggctgatgacgccaaaaggattttcaggaaaatgcagagtagtggtatttcacccaatgctttcagttacacagtccttata

SEQ ID NO: 138319 - DNA, 240 bp, Glycine max
catggacttgtctggtgcattctccatcatacttggtctacttgcaccaatacttcaggagccatttaggcagattctgaagagactaccaggcacaatggacagcaccatagagagtactaatgagaagctgagtgggcctctcgatgagattgtcaagaagaggctggaagacaagaatagaccttcacagaatttccagtcactcattttgggtgcaagagagtcaaagaaagtatc

SEQ ID NO: 138320 - DNA, 248 bp, Glycine max
aaataacaagcacaattacagtgactccgcttggttcctcttcttcgatcttcggtttgattctgcgtttgttcacatcatggccaccgcttcagtggcatttaagtccagggaggaccaccgcaagcagattgagttggaggaggcgcgtaaagcggggcttgcgccagctgaactcgatgaagatggaaaggaaatcaatcctcacattccccagtatatgtcctctgctccttggtatcttaatg

SEQ ID NO: 138321 - DNA, 247 bp, Glycine max
gtgctctgctcgtgcctctagggttatcatatctccatttccatttcctctctctcagtttccaagaatcttaagctatgggaaagtcttacccaaccgtgagcgctgattaccagaaggccgttgagaaggcgaagaagaagctcagaggcttcatcgctgagaagagatgcgctcctctaatgctccgtttggcatggcactctgctggaacttacgacgtgagctcgaagaccggtggtccctt

SEQ ID NO: 138322 - DNA, 242 bp, Glycine max
ctccaagccttctacgttctcgtgagaagctcacgcaccttcgcttctatttccatgaaatttttactagcgacaaaccctctaatctcgtgatcgaccaccccaaggtggtagccgactctccccttccatttgggtcccaagtggtgatcgaggacccattaacaattgggcctgatgtcgagtccaaacagataggtaaggcccaagggttttacctatccgcaacccaaaggcccggt

SEQ ID NO: 138323 - DNA, 247 bp, Glycine max
gacaaattcatcaacatacaaggcgactacaaggctattgtacataatccaaatcctttgatccctcccatttttgcatcggatgataacacgtgttgcttagagtggaacactgcaatggaaaagcttactggttggagccgcgcggatgtcattggaaaaatgttggtgggagaggttttcggcagttgctgtcagttgaagggttcagattcaataacaaagttcatgattgtcttacacaatg

SEQ ID NO: 138324 - DNA, 188 bp, Glycine max
gatgctcaatgctgctaacagtcacatgtttctcagcatgagctttaaggccatcaatccaaccatagccaactccatcactgaattgttggattgatggccttgccgctcatgctgagaaacatgtgactgatagaatgtatgctcaatgctgctaacattttccccttcaacacacgaacaacaaa

SEQ ID NO: 138325 - DNA, 246 bp, Glycine max
aagaaggagaagcaaatggcttcctcaatgatctcttccccagctgttaccactgtcaaccgtgccggtgccggcatggttgctccattcactggcctcaagtccatggctggcttccccaccagaaagaccaacaatgacattacctccattgctagcaacggtggaagagtgcaatgcatgcaggtgtcgccaccagttggcaagaagaagtttgagactctttcctacctgccagaccttgat

SEQ ID NO: 138326 - DNA, 244 bp, Glycine max
ggagttacccagtgcacaatcgcgcatgcacttgagaagacaaaatatccagattcagatttatattggaagaaatttgaggataaataccacttttcatgccaatttactgctgacctaatagccatgaataatgctgattttataatcaccagtacataccaggagattgcaggaacgaaaatactgttggccagtatgagagtcacactggttttactcttcctgggctctatagggttgt

SEQ ID NO: 138327 - DNA, 245 bp, Glycine max
ctcgcactttctctctctaactcaatctctctctctctctctctctgaattttctcctctctccgattccttttattaattggagtttactcgctccttttcctttccctgaaaacatttcctcgtcgtattgatgtcggaaaagggccggccacttccaaaatttggtgaatgggatgtcaatgatccaacctcagctgaggggttcacagtgatttttaataaggccagggatgagaaaaaga

SEQ ID NO: 138328 - DNA, 244 bp, Glycine max
catggctttaggtgttcctgctcttccgttgacatacgtggctcacgttctggcagttgttgccagcgtcttggtcgtggtctgggtcgtcaatttcaggggtggcttggcttgggattctgataacaagtccctcatcttcaacattcatccagttcttattgttattggcttactagttcatgggggtgaagctattataagttacaaagcttttcccctaaagaaggaagtgaagaaattg

SEQ ID NO: 138329 - DNA, 242 bp, Glycine max
gttgtgggttatgtgaaaactccacgtggtctccgaacattgaacactgtctgggctcagcatttgagtgaggaattgaaacgtaggttctacaagaactggtgcaagtccaagaagaaggccttcaccaagtactctaagcagtatgaaactgaggagggaaagaaaaacattgaggcgcagctggagaaactgaagaagtatgctactgtggttcgtgttttggctcacactcagatcag

SEQ ID NO: 138330 - DNA, 239 bp, Glycine max
ctgaccttgggagaagtacaagtgaatatcctgccccatatgcaattatataccgtaacatggctatattgggggtacaaggttttggccatctaccaaaaaactgcctcttgctttgttacatattctttgctgctgccgtcgcaataaacttgattaaagatttccttggcaagagagggaggttcataccacttccaatggccatggcaatacctttctatatagggccatacttt

SEQ ID NO: 138331 - DNA, 245 bp, Glycine max
atcccatgcaagctcatctccaaaacctccatctctcacgacgttaggcttttccgctttgccctcccctccgacgacctactcatgggtttgccagttgggaagcacatattcctatgtgccaccgttgacgagaaactatgcatgcgagcctacactccaacaagcagcgttcacgaagtgggatacttcgacctcgtcgttaaggtttacttcaaaggggtgcaccctaagttccccaacgg

SEQ ID NO: 138332 - DNA, 243 bp, Glycine max
agaaaatatctttgcaagactgaggctgagttgaaagaagcttggcgtcctggagatcttggttacggaactagagttcctggtgacatgctgattgtcacaattgtcttctgttactctgttattgctcctgtgataatcccatttggtgctctatattttggcctaggatggcttgttttgcgaaatcaggcactcaaagtctatgtaccaacatttgaaagttatggaagaatgtggcca

SEQ ID NO: 138333 - DNA, 171 bp, Glycine max
cggatgcgccactggacaccccagttttgtgatgtcctgctccttcaccaaccaggtcattgctcagcttgagttgtggaaggagaagagtaccggcaagtacgagaagaaggtttacgttttgcccaagcagccttgatgagaaggggtggctgcacttgcagcctgggc

SEQ ID NO: 138334 - DNA, 269 bp, Glycine max
attgggataagctctaatcaatcaatttcaatggcatcatccaattcgactcagcaagaagggaacaaacccgcaaagagaaaacccgtgttcaccaaagtggatcagctcaaacctggaaccaacggtcacacgttggtggctaaggtcttgtcctccgacaccgtcgtacacaaaccgagaccctcttccgcacacaacctcaaacccactgtcatcgccgagtgcctcatcggcgacgacaccggtaccatcgtcttcaccgctcg

SEQ ID NO: 138335 - DNA, 273 bp, Glycine max
gaaaaaactgatgtgtttgggtttggaatcttgctgcttgaactgatcacaggtcataaggctctagattttgggcgagcggcaaaccagaaaggtgtaatgcttgattgggttaagaagctccaccaggatggaagattgagtcaaatggtagacaaagatctaaagggcaacttcgatctgattgaactagaagaaatggttcaggttgcactcttgtgtacacaattcaatccttcgcaccgccccaagatgtcagaagtattgaagatg

SEQ ID NO: 138336 - DNA, 272 bp, Glycine max
ccctacctctcccttcaagatgcagatcttcgtcaagaccctcaccggcaagaccatcacccttgaggtggaaagctctgacaccatcgacaacgtcaaggccaagatccaggacaaggaaggaatccccccggaccagcaacgtctcattttcgccggaaagcaacttgaggacggccgtacccttgctgactacaacattcagaaggagagtactcttcacctcgtcctccgtctccgtggtggcatgcagatcttcgttaagacactca

SEQ ID NO: 138337 - DNA, 269 bp, Glycine max
gagagctacactggaaggaagcagcgatatgtatacggaaccacattagacagcattgcaaaagttactggcattattaaatttgatttgcatgctgaaccggataatggaaaaacaaaacttgaagtaggaggaaatgttcagggtctctatgacttgggaccagggaagtatggctcggaagctgtttatgtccctcgtgtccctggtaccgattctgaagaagatgatggatacttgatttgttttgtacacgatgaaaataccgg

SEQ ID NO: 138338 - DNA, 275 bp, Glycine max
gttccagcacaggtcaagctcctggtgaagacagtgaagtgattttatacccacaagccattttcagggatccattcagaaggggtaacaatatcttggttatctgtgatgcctacactcctgctggagaacctattcccactaacaagaggcacgctgctgccaaggttttcagccatcctgatgttgttgctgaagtgccatggtacggtattgaacaagaatacaccttgttgcagaaagatatccaatggcctcttgggtggcctgttggt

SEQ ID NO: 138339 - DNA, 268 bp, Glycine max
tgccggttctggcactgagagaacagcatttgcaaaccttggtttacgaggatttgaggttattgatgatgcaacgaaacagctcgaggctgcatgccccggtgttgtgtcttgcgctgatatccttgctcttgctgctcgtgattccgttgttctgagtggtggactgagttatcaagtgcttactggacgcagagatggacgcatatcacaggcttccgacgtgagtaacttgcctgctccttttgactctgttgatgttcagaaa

SEQ ID NO: 138340 - DNA, 273 bp, Glycine max
cttcgtgaaagacctaacggggaagaccataaccctcgaggtcgcaagcagcgacaccattgacaatgtcaaggctaagattcaagacaaggaaggcatccctccggatcagcagcgtttgattttcgccggaaagcaacttgaagatggaaggaccttggccgattacaacatccagaaggaatcaacccttcaccttgtcctcaggcttcgtggtggcatcatcgagccttccctcatggctttggctcgcaaatacaaccaggacaagat

SEQ ID NO: 138341 - DNA, 272 bp, Glycine max
gtcgggcttcctcctggcgtgttgaacattctcactggattaggacctgaagcgggtgctcctttagcagctcatcccgatgtagacaagattgcctttactggaagctctgcaactgggagcaaaattatgacagctgcagctcagctgatcaagcctgtttcactagagcttggtgggaaaagcccaatcattgtttttgaggatgttgaccttgacaaggctgctgaatggaccatatttggttgcttctggacaaatggtcagatatg

SEQ ID NO: 138342 - DNA, 271 bp, Glycine max
cagccaagtgaaagtgagaacaaataaaaatcaaagagcataatgtcagggatcattcacaagattggggagacccttcatgtgggagggcacaagaaggaggaggagcataagggtgagcaccatgctggagaatacaaaggggagcaccatggtgaacacagtagtgagtacaaaggagagcatcatggtgaacacaaagctggagagtaccatggtgagcacaagccagagcacaaagaggggttcctagacaaagtcaaggacaaga

SEQ ID NO: 138343 - DNA, 273 bp, Glycine max
caaaggaagaaagaagaaaaaatggtggctgacaggagcaagaagccgaaggtctccgagaagggcgaaaacctcgatgaaatcgacggagaactcgtcctctctatcgaaaagttgcaggagatccaagacgagctcgaaaagatcaatgaggaagccagtgacaaagtgctcgaaatagagcagaagtacaatgagatacggaagcccgtctatgataagaggaatgatattatcaaggctattcccgatttctggttaactgcttttttg

SEQ ID NO: 138344 - DNA, 273 bp, Glycine max
caccaccgacgattccatttctacgaactcagacccttcaatcccaactcagaaaaaaaaaaatcatgaagctgaagacatatgcgggtcttagtatcattgcaactctggctattatatatcatgcgtttaacagtaggggccagttttatcccgcaatggtgtatctgtcaacttccaagatcagtttggtgcttcttctcaatatgggtttggtcttaatgtgtattctatggcaattaaccaagaaggtgttcctagagtccctccgag

SEQ ID NO: 138345 - DNA, 268 bp, Glycine max
caacaagagagaagtctcatgactggtgtgtacactattgctggtatcttttgcagcaactgtggtgaggaattgggatggaagtacctacaagcttatgaggcaagacagaagttcaaggaaggaaagttcataattgaaacggcaaagattgccaaggactactactagcttgtatattgaaggctacaaacactaattaaggtgttgagttgataagtttctcaataaatatttgtatgagaaaaaagatagagagataaaataa

SEQ ID NO: 138346 - DNA, 270 bp, Glycine max
attcaattattcattaaacatatgaatattagtgcatattattgtatcgagtagattaaatagattatctatatatatagatagatatctatttgaattgcttcattcgcgaggagccgtatgaggtgaaaatctcatgtacggttctgtaataaagatggaattgagaaacaaccatcaattataacccccaaagaaccagatttcgtaaacaacctagaggaagaatgagaggaatatcctatcgagggaatcatatttgcttcggaa

SEQ ID NO: 138347 - DNA, 272 bp, Glycine max
cccgtttataagccaccagtttacaagccaccagtgtacaagcctccagtgtataagccaccagtttacaagccaccagtgtacaagccaccagttgagaagccaccagtatacaaaccacccgtttataagccaccagtttacaagccaccagtgtacaagccaccagttgagaagccaccagtgtacaagcctccagtgtacaagccaccagtatacaaagcaccagtgtataagcctccagttgagcaacctcctatttacaagccacc

SEQ ID NO: 138348 - DNA, 271 bp, Glycine max
attgaattgacaatgaggcctgctcttgctttgcttcctcttctatttgctttcttgttagctgccactacggaatcaagaaaagatccaggggaatattggaaaatgatcatgaaagatcaggaaatgccagaaggacttcaaggtcttgtttcatttcaatctgaaaataaccctaagactcaagagcagcttggtaaaggttccaaaaaccattgtgaagagtctctagttacaaatacacaagttaacagtgacttcgaacccatac

SEQ ID NO: 138349 - DNA, 266 bp, Glycine max
ccgtaacaatgatcctcaactagcagacttcattgagagcgagttcttgtatgagcaggttaaatcaattaaaaagattgcagagtatgtgactcaactgagattagttggaaagggtcatggtgtgtggcactttgatcaaaggcttcttcatgatgaagatctataatctttgaacagcctctgttttctatacatatggtcctatgtgaagttatcaccgtgttgttctgtttgtagtaatagtgaataagtgtgttgttctg

SEQ ID NO: 138350 - DNA, 270 bp, Glycine max
cagagacgaggagagagaaacaaagaagagtgttcccacattacatggcctccttgcccttggggcaccaccaccatcaccaaccggcggcggcgactatacacccgtcgcaaccgccgcagtgtcagccgcaacccgaagttcctcgccggagctccgatatggagaccgataaggatatgtcagctactgtcattgaggggaatgatgccgttactggccacataatctccaccacaattggaggcaaaaatggggaactaaacagac

SEQ ID NO: 138351 - DNA, 267 bp, Glycine max
cgaaccctctcgttcgtgccgatcactaggtcacacttcatcaatggcgggtagaggcaaaaccctaggatccagcgccgctaagaaggccacctcaaggagcagcaaagccggcctccaattccccgtcggtcgtatcgccaggttcctcaaggccggaaagtacgccgaacgcgtcggcgccggagcccccgtctacctcgccgccgttctcgaatatctcgctgctgaggttttggaattagctggaaacgctgcgagagataa

SEQ ID NO: 138352 - DNA, 272 bp, Glycine max
tgcacggccacctcacaaagaggcctgaggagattggtgctggtgaccaaggtcatatgttcggctatgccactgacgagactcccgagctcatgcccttgagccatgtccttgccacgaagctcggtgccaagctcaccgaggttcggaagaacgggacatgcccttggctgagacctgatggcaagacccaagtcactgttgagtactacaatgacaagggtgccatggttccaatccgcgtccacactgtgctcatctccacacagcat

SEQ ID NO: 138353 - DNA, 271 bp, Glycine max
agctaaggcatcctacgttgaatatgcccatcattgactatgatttggcacttctcattcaaccaatgctcatgcttggcatcagcattggagtggtctttaacgttgtatttcctgattggattgtgactatagtgcttagtgttctcttctgaggcagatcaacaaaagcattctttaaaggggttgaaacatggaaaaaggaaaccataatgaaaaaggaggctgctaaacgacaagaatcaaacggttctggggctgtagtggaata

SEQ ID NO: 138354 - DNA, 269 bp, Glycine max
ctcgttagtcgtttgtaacgcctttgtttgcgttttttgcacagacgaattaacacgtatatagcaagcatggcagtcacactctacgaccttagctctgcctctgggttgaagaagcttgatgagtaccttctcccacgcagctacatcaccgggtaccaagctacaaaggatgatcttactgtttatgcagctttgccaactgctccatcagatgaatatggaaatgtttccaggtggtacaagcacattgatgctttgttgagaat

SEQ ID NO: 138355 - DNA, 268 bp, Glycine max
cgacaaccaaaaaccttactctttttcacgcgacgccctagttcatttttcttctccgttctcttctctctctgttcttcactcactctcattcattcaccatgacgaaacaacatgccaattggtctccttacgataacaacggaggatcatgtgttgcgattgctggagcagattactgcgttatcgccgcagatacgagaatgtccaccggttacaacatcctcactcgcgattactccaaaatctcccaactggctgagaagtg

SEQ ID NO: 138356 - DNA, 269 bp, Glycine max
ctcgttcttcttcgtcgttatcttcttcttttgtcgtctgtgtgtctgttttttctctcacctgaaaatgtcttgctgcggtggtaactgtggttgcggaagcgcctgcaagtgcggcaacggctgcggaggctgcaagatgtacccagacttgagctacaccgagtcaaccaccaccgagaccttggtcatgggagtggcaccagttaaggctcaattcgagagtgctgaaatgggtgttcccgctgagaacgatggctgcaaatgtg

SEQ ID NO: 138357 - DNA, 268 bp, Glycine max
ccaagactacgattttcaccttcttaatggcagttcagtcaaggttcccttcatgacgagcaagaagaagcagtttattatggcttttgatagtttcaaagtccttggtcttccctacaagcaaggcgaagataagcgccaattcaccatgtactttgtccttccagaaacaatagatgggctgttagctttggctgagaagttggcttctgaatctgggttcttggaacgcaagcttcctaaccaaaaagtggaagtaggggacttc

SEQ ID NO: 138358 - DNA, 268 bp, Glycine max
cgactccataacccaaaaatgcctttcaagaggtacgttgagattggaagggttgctcagatcaactatggcaaagagtacgggcggctcgtgatcattgtcgatgtcattgaccagaatagggctcttgttgatgctcccgacatggtgaggtcccaagtgaacttcaagaggctctcgctcactgacatcaagattgatattaagaggattcccaagaagaaggatctcattcaagccatggaggctgctgatgttaagaacagat

SEQ ID NO: 138359 - DNA, 264 bp, Glycine max
ctacccgccgctcgatgggaattgcgcttcaaggcgtctcgtagggctaatccgcctcacgagggtcaccaacggcacgtgcctttggggggccgaggccccctactgctggtcggcaaacggacggcgggcgcacgcgtcgcttctagcccggattctgacttagaggcgttcagtcataatccaacgcacggtagcttcgcgccactggcttttcaaccaagcgcgatgaccaattctgcgaatcaacggttcctctcgtac

SEQ ID NO: 138360 - DNA, 265 bp, Glycine max
gccactcaaggcggagttccctattttgagctacgccgatttctaccagttggctggcgttgttgccgttgaggtcacgggtggacctgaagttccattccaccctggaagagaggacaagcctgagccaccaccagagggtcgcttgcccgatgccactaagggttctgaccatttgagagatgtgtttggcaaagctatggggcttactgaccaagatatcgttgctctatctgggggtcacactattggagctgcacacaag

SEQ ID NO: 138361 - DNA, 258 bp, Glycine max
cagcatggagtcctcaaagatctatgcttacctcttcctttgcatgctcttcctctcctccgccactcccattctcggttgtggctactgtcggaaaccccccaaaaagcacaagcctggtaaaacaccaaagacacccacagtacccgttgttaagccaccagtcacaatccctcccattgttaagccaccagtcacaatccctcccattgttaatccaccaggcacaatccctcccatggtaattccaccagtcac

SEQ ID NO: 138362 - DNA, 269 bp, Glycine max
cttcaaagagcaaataacacacactatggccttgcagcaggggtgttcacaaaaaacattaacacagctaatactttgactagagcattgagagctggaacagtgtgggtgaactgctttgatacatttgatgcagcaattccctttggagggtacaaaatgagtggtcaaggacgagaaaaaggagaatacagtctcaagaattacttgcaagtgaaggctgttgttacatccttgaagaaccagcttggctttgaacatcattagct

SEQ ID NO: 138363 - DNA, 266 bp, Glycine max
ctgcaaagcatccttcgcttcaatctctctctctctctttgcgctttctgcaaaccgaacatttcatctccaaagggatcaacaggtcgaaggagaaatggggctgacattcacgaagcttttcagccggcttttcgcgaagaaggaaatgcgaattctgatggttggtcttgatgctgctggtaagaccactatcctctacaagctcaagctcggagagatcgttactacaattcctaccattgggttcaatgttgagactgtgg

SEQ ID NO: 138364 - DNA, 266 bp, Glycine max
catgactggtgtgaggcatttgacacctacccaagaacctatgatttactgcatgctgcaaacctactttctgttgagaagaaaagatgcaatgtctcatccattatgcttgagatggatcggatactacgacccggtggacgtgtatacatccgcgattctcttgatatcatcgatgaacttcaagagattgcaaaagcaataggctggtacgtgatgttgcgagacacggaggaggggcctcatgcaagttatagggtattggt

SEQ ID NO: 138365 - DNA, 266 bp, Glycine max
tagagacagaggaagcatatccctacacaggaaaagatggtgtctgcaaattctcagctgaaaatgttgctgttcaagtccttgactctgtgaatatcaccttgggtgctgaagatgaactaaaacatgcagttgcatttgttcggccagttagtgtggcctttcaggtggtgaatgggttccatttctacgagaatggagttttcactagtgacacttgtggtagcacttcccaggatgtgaaccatgccgttcttgctgttgga

SEQ ID NO: 138366 - DNA, 263 bp, Glycine max
ctcgagccggaaaagaccatcaaagtttcacttcagccttatccggtttagggtttcggttattgaccctacctttgacgtatcgaaaccttaagtttcggatcaggtctgagcaatctggttggtagaacctttggtcttagagagtcaagttttatgtctgaattagacgatcaaattcctactgccttcgatccttttgctgatgcaaatgctgatgactcgggtgctgggtcaaaggagtatgtgcatattcgggtaca

SEQ ID NO: 138367 - DNA, 265 bp, Glycine max
caatgggcacagagacctcatcggtagatatttcggaacccctgctcttggatcctcacgggaacgaggaaaaggaagagtatttgcgcgaagaggttccggagtggaaggagcagataacgataagagggttggtggtgagtgctgtgttggggagcttgtgctgcatcatcacccacaagctaaatctcaccgttgggatcatcccttctcttaatgttgctgctggcttgttggggttcttctttgtgaggacctggactgg

SEQ ID NO: 138368 - DNA, 266 bp, Glycine max
ccatttctatctatctcttgtttcaatttcaacaacggttactcctttttcgttttgagtttcaatcaagccatcatcatgtctaccgcatcgcaacccaaggccaagaaaacggcgtcgtccaagaagcccctctcccaccctcccttcgccgtgatgatagcagaggcgattgcgagtctgaaagagagaaccggttcgaaccaatacgcgataaccaaatacatcgaagggaagcacaaggagttgcctgcaacctacaagaa

SEQ ID NO: 138369 - DNA, 260 bp, Glycine max
cctcttcctcagtagtgcgattttcgattctcttctctgcaactatgcctaaccctaaggtcttcttcgacatgaccatcggcggtcaacctgccggccgcatcgtgatggagctctacgccgacgtgactccgagcaccgccgagaacttccgcgcgctctgcaccggcgagaagggcgccgggcggagcggcaagcccctccagtacaaaggctcgtccttccaccgcgtgatcccgaacttcatgtgccagggcggc

SEQ ID NO: 138370 - DNA, 261 bp, Glycine max
cctcgacctccggtttatatctatgcttccccacctccacctatctagcagtaagctcaaattgtgaaagcaccattcatgatgaatcatgttctagttttcatcgaggaataaaggcaagctctattttgagccaagtgaaacatctatcttcctgtctaagttctttgaataagagtctgaatgtgtcatctctatgctacaatgtttatgattcagatcaggttgattctatttgtttgatggccatcttgcacgtcc

SEQ ID NO: 138371 - DNA, 260 bp, Glycine max
caagcggtgggtttaggttagggtttggtgagcgatagggatggcgaagttcaatgtggtgcagaagaaaagaagagctctaatagcagagaagaagagacagcttcacggagaccctttaaccggcaagctcaagatcaaggaccaacccctttccctatccggaaaacgcaaacgcaagctcttcaaaaaatggcgccgggaccaaaaggacgccttgcagaatggtttggtaaccatggaagatgttcaaatggcag

SEQ ID NO: 138372 - DNA, 259 bp, Glycine max
gatggagagagggtcctattatgtcttaagcgggctttaagaattgcaaatgctgcccaacaaatggcaaatgcagcacgaggtagcactggatcagtaatgctcttcattgagatattgaataagtatctttacttctttgagaagggaaacctacaagtcaccgttgctgctatccagggcttaattgagttaattatgaatgagatgcagagtgataccacaactcaagatccagctgctaatgctttcttagcca

SEQ ID NO: 138373 - DNA, 254 bp, Glycine max
ctctacgccgacgtgactccgagcaccgccgagaacttccgcgtgctctgcatcggcgagaagggcgccgcgcggacggcaagcccctcgactacaaaggctcgtccttcgaccgcgtgatcccgaacttcatgtgccagggcggcgacttcaccgccggatacggcaccggtggcgactcgatctacagcgccaagttcgtcgacgagatcttcgtgaagttgcacactggtcccggcatcctctccatggcg

SEQ ID NO: 138374 - DNA, 259 bp, Glycine max
gatttctgcagaaagagattcaaccaagtttgttgtttctcctatcactggcgagttaattcctattagtgagatgtcagaacatatgcggatttctctcattgatcccaagtacaaagaacaaaaggaaagaatgtttgccaaaattcgagagacaactttggctgcggatgatgaaatttcaagaaacattgttggacttgctcggacccgtcctgatatattcggtactacagaagaagaggtctccaatgctgtc

SEQ ID NO: 138375 - DNA, 258 bp, Glycine max
cgccgccaccaaagtcagcggctcccacggcaacgccgtcaccgtcaacaagaaccgcaaggcggccgcgaaccgaaatcagagacggcaacggcgaatcccctacggcacaaggcaagttcgcgccacgtcccgtgcgggaagcgcaccgatttcggttacgagaaggatttcgatcagcgttactcgctcggaaaattgctcaggcactgccaatttggttacacgtacgttggaatcgacgaagccaatggcgat

SEQ ID NO: 138376 - DNA, 257 bp, Glycine max
ccacctcgtccccggcgaggtcctcaaatacgccgatcgcaaggtcgccgaattggaccgccacgttccctccaacgtgaagaaacgtctcctcccaggcccgctccgtcgtctccgaagtccgccgtgatggtgtctccgcctacgccaaaatcgtttactcgaagtatgagcccacggcggagcagtgtgccgtctccgcatggaggaagctcaaccagcttccgctcttccctcaggttgccaatgtcgtgttg

SEQ ID NO: 138377 - DNA, 252 bp, Glycine max
acaacttctgctacttcctactccaaccgcacttctgttccgcaattatcatgggcaaggtcaagatcggaatcaacggatttggaagaattggccgtttggtagccagagtggctctgcagagagacgatgttgaactcgttgccgttaacgaccctttcatcaccaccgattacatgacatacatgtttaaatacgacagtgttcatggacactggaagcatcacgatgtcaccgttaaggacgagcaga

SEQ ID NO: 138378 - DNA, 244 bp, Glycine max
cagagaatccaaacatgtgtgcttacatggcaccttctttggatgctaggcaagacatggtggtggtagaggtaccaaagctagggaaagaggctgcagtaaaggccataaaggactggggccagccaaagtcaaagattacccacttgatcttctgcaccactagcggtgtggacatgcctggtgctgattaccaactcaccaaacaattgggccttcgcccttatgtgaagaggtacatgat

SEQ ID NO: 138379 - DNA, 254 bp, Glycine max
caagtagagagagagagaaacacaactgctttgccaaaccttaatttcagggcacttccaagctaacaggaccagttgttgttccctttttgtgttgtttgattcagcgatttctggttttcgttttttttctttctttgtgataaggagagttcgatgtctttaagttgaataacttgttgggacatatttgactcggtgcttttcttttggtgcttgcctcatgggaaacagtgaggatgagaaatctgtta

SEQ ID NO: 138380 - DNA, 255 bp, Glycine max
ctgactcgttcttcttcgtcgttatcttcttcttttgtcgtttgtgtgtttctcttttctctcacctgaaaatgtcttgctgcggtggtaactgtggttgcggaagcgcctgcaagtgcggcaacggctgcggaggctgcaagatgtacccagacttgagctacaccgagtcaaccaccaccgagaccttggtcatgggagtggcaccagttaaggctcaattcgagagtgctgaaatgggtgttcccgctgaga

SEQ ID NO: 138381 - DNA, 254 bp, Glycine max
caatcatcttttgtgtgtgcttcagtactttagtgtgtgagttaattccaagattttgagaatgtctagctgtgggtgtggaagtagctgcaactgtggcagcaactgcggttgcaacaagtactcttttgacttgagctatgttgagaagacaaccacagagactcttgttttgggtgttgggtctgtgaaggcccaattggagggtgctgaaatgggtgttgcagctgagaacggtggctgcaactgtggat

SEQ ID NO: 138382 - DNA, 252 bp, Glycine max
cggcgactccggccaccgttggatttcaattggttcttgtttttgaacggtggagtaaagaggcatggctgacaaagaggaagagtcggcaatgccaagggacgcgaagattgtgaagtctttgctgaaatcaatgggcgtagaagactacgaacctcgcgtcattcacaagtgtctagagctatggtatcgctacgttgtcgatgtgttaaccgatgcacaagtctattcagagcatgctggaaaatctgc

SEQ ID NO: 138383 - DNA, 257 bp, Glycine max
tcttaagcaggcttctgaagatgcaaagaaacttgtgaatgaagaaagagcttttgctcgtgttgaaatagaaaatgccagagcagcagttcagagagtggaggaagcacttcaggagcatgagagaatgtctcaagcttcagggaagcaggatctggaacagtgaatgaaggaagttcaagaggcccggagaatcttgataaaagcacattcactcctcttactctcattgcctttgcgctcctcaaaaacagagt

SEQ ID NO: 138384 - DNA, 264 bp, Glycine max
ctgtgtcaagcctcccatcatctatggtgatgtgagccgtcccaagcccatgactgttttctggtcttcaactgctcaaagtttgaccaaacgaccaatgaagggaatccttactggccctgttactattctgaactggtcctttgttagagatgaccagccaagattcgaaacatgctaccagattgctttggctatcaaggatgaggttgaggatcttgagaaagcaggtattactgtcatccagattgatgaagctgctct

SEQ ID NO: 138385 - DNA, 259 bp, Glycine max
gttttctgattaactctttcttctcataactctgccgccgcaacagccccaaatccaatggcttcagagaagaaactttcgaacccaatgagggagataaaggtgcagaagctcgtcctcaatatctccgttggcgagagtggagatcgtcttaccagagccgctaaggtgttggaacagcttagtggccaagcccctgtgttttccaaagcaaggtacacggttcgttcctttgggattagaagaaatgagaagattg

SEQ ID NO: 138386 - DNA, 259 bp, Glycine max
caggtactgcgtttcggaagcagacacagatggctcgtacgaagcaaaccgctcgtaagtccacaggaggaaaggctcctaggaagcagcttgcaaccaaggctgcacgtaagtctgcaccaactactggtggtgtgaagaagccccaccgttatcgtcctggtaccgttgctcttcgtgaaattaggaaataccagaagagtaccgagcttttgatccggaagctccccttccagaggctggttcgtgaaattgctca

SEQ ID NO: 138387 - DNA, 258 bp, Glycine max
acttaattgccttaaggaacgttcgagaccacagaggtttctctagtcttcttctgtggagagcttgttttcttgttcattcatctcacttccaattaaggaacaagctttccaccaatttgaatcaccaatggctcgctctttctccaacctcaaggttctctctgctcttgtcgccgacggattctccaacactctcaccaggcgtgggtacgcagtagcgacacaaagcgcaacaagaggaggagcagcctccat

SEQ ID NO: 138388 - DNA, 259 bp, Glycine max
gcacagcactgtgtgaaagcattactcagtgcacaaactcacacgtatgattatcttccatacttctactcgaggatttttgaatatgaaggaagccctcagaaaagtgtggtggcagttctttggagacaatgttggagaaacagttgaaattggaaattttgatcctaaaatatctaccttctggattgaatctggtaagctgaaaggagttcttcttgaaagtgggagccctgaggaatttcaactcctgcctaaa

SEQ ID NO: 138389 - DNA, 257 bp, Glycine max
ccagaacgagtgttgttgctgatgggcattgttgctgttgtgggcagcaattggtttgtgttgatattgatgatgtggagacggagaagtttgcagggtctgttgctgccttggcctttgaaagagaggtcaaggccaattttagtgaatttcaggcctggcttgaaaagcatgcctcttatgaagctatagtggatggagcaaatattgggctctaccaacaaaattttgccgatggtggattcaacatttctcag

SEQ ID NO: 138390 - DNA, 258 bp, Glycine max
gtttgtattattgtagaggagagagggagagagatggagttgagcatgaaagtgttggtgaaagttgcttcgttgcttttcctattgggattcactgcaacagttgttgatgctcgcttcgatccaagttcattcatcactcagtttctccccaatgctgaagccaacaattactatgttaaatccacaacaaaagcgtgctgtaacagctgtccttgcacaaaatcaatccctccacagtgtcgttgttcagatatt

SEQ ID NO: 138391 - DNA, 257 bp, Glycine max
ctaagcactatagtaaaaaaaggacattcattcatctatggctacccttattgctcccagcaaccactctccccaagaagatgctgaagctctcagaaaggcttttgaaggatggggaactgatgagaacactgtcatagtaattttgggtcatagaactgtgtatcagaggcagcaaatcagaagagtttatgaggaaatttaccaggaggatcttgtgaagcgcctagagtctgagatcaaaggagactttgaga

SEQ ID NO: 138392 - DNA, 255 bp, Glycine max
ccagaagcagcaatgaagaagaagatgatggcaagcacagccatctccctcgtcttcgccgcgctcttcctcttctcctccgtccactctttctacctccctggtgtcgctcctcgcgatttccaaattggtgaccccctctttgtcaaagtgaacaagttatcatctaccaagactcaacttccatatgactactacttcttgaagtattgcaaacccaaaacgatattgaacaatgcagaaaatttgggagag

SEQ ID NO: 138393 - DNA, 259 bp, Glycine max
ccactcttcttctcttgcggctagggttttagcgcacttcttctagatttaaggcagatgggtaaggaaaaggttcacatcagtattgtggtcattggccatgtcgactctgggaaatccactaccactggtcacctgatttacaagcttggaggcattgacaagcgtgttattgagaggtttgagaaggaagctgctgagatgaacaagaggtctttcaagtatgcctgggtgctggacaaacttaaggctgagcgtg

SEQ ID NO: 138394 - DNA, 260 bp, Glycine max
gccgagttcctccaaacgcttcatttcaactcgctccgactcgatgatgggtcggtcgtgaacatgtcagtgcccatcgtgctggctattgatgatgcgcagaagcatcggatcggggataacaaaaaggttgctctttttgattccaagggagaccccgttgcaattctcaataatattgagatttataagcatcctaaagaagaaagaatagcccgaacttggggaaccattgcccctggcctaccttatgttgaaca

SEQ ID NO: 138395 - DNA, 260 bp, Glycine max
cttaccagacattccagagagttattgagaatgctaatgtgatcatggctacatatgaagatccacttctcggtgatgttcaggtctatccagagaaaggaacagttgctttttctgctggtttgcacggctgggcttttaccctgactaactttgccaagatgtatgcatctaagtttggagttgatgaaggaaaaatgatggaaaggctctggggtgaaaacttctttgatccagccacaaagagatggtccagcaag

SEQ ID NO: 138396 - DNA, 259 bp, Glycine max
caaaagactatcctaatgaagattggctgcatttgaccgcactcatccatgatcttggaaagattcttgcgcttcctagctttggtgagcttcctcagtgggctgttgttggagatacatttcctctgggctgtgcctttgatgagtcaaatgttcatcataagtatttcaaggacaacccggattacaaatgccctgcttatagcactaaaaatgggatctacacagaagggtgtggattagacaacatagtgatgtc

SEQ ID NO: 138397 - DNA, 253 bp, Glycine max
aattgccttaaggaacgttcgagaccacagaggtttctctagtcttcttctgtggagagcttgttttctcttgttcattcatctcacttccaattaaggaacaagctttccaccaatttgaatcaccaatggctcgctctttctccaacctcaaggttctctctgctcttgtcgccgacggattctccaacactctcaccaggcgtgggtacgcagtagcgacacaaagcgcaacaagaggaggagcagcctc

SEQ ID NO: 138398 - DNA, 256 bp, Glycine max
ctcgagccgctcgagccgattcggctcgaggttctagatcgcgagcggacccttaatttttaccttcaacacaccgccacaatggccgtcacgaaaagcatctccatcttcctcttcatcgccataagctgcgtggccgtagctcaggcagcgaacttcaacatcacaaacaattgcacctacacggtgtgggccgccgccgtgcccggcggcggctcaaggcttaaccctggcgaatcgtggaacatcagcgtga

SEQ ID NO: 138399 - DNA, 259 bp, Glycine max
atggcaatggcttcttcaatccctaatgcgccttctgcgttcaattctcagagctacgttggtctcagagcgccactgaggaccttcaacttttcttctcctcaagctgccaaaattcctcgctcccaacgccttttcgtcgtcagagcctccgattcggagttcgaagccgccgttgtcgccggtaaggttccgccggcgcctcccgtgccgcccagaccggcggctccggttggaacaccggtggttccttcacttc

SEQ ID NO: 138400 - DNA, 257 bp, Glycine max
ctgtcaccgttccgttccgttttcctctgtttttttttttctttcaaatccccgcttcgtggaaatcccgaacgagaaaccatgcttctccgaaccgctgctgcttctgcttcgtccctctccctcttcagcccgaacgccgaacctccccgttcggttcccgctcgtggattggtggttcgcgcaggaaagggatccacgaaccacggcgccctgaccggagtgatttttgaaccgttcgaagaggtgaagaagga

SEQ ID NO: 138401 - DNA, 255 bp, Glycine max
attgctttttaccttggttccttatgttcatatgtatccctcgtaaccctagagtggaaattaccagcttgacctcaatttctatgatagatcatgcccaaatttgcaaaggattgttggatatggtgtttggttagccttaaaaaatgacaacagaatggccgcgtccctccttcggttgcactttcacgattgcatagtaaatggctgtgatgcttctgtacttcttgatgatacaccatattttacgggcga

SEQ ID NO: 138402 - DNA, 253 bp, Glycine max
ctatcatcggtacatggaagatattgatcttatagccaagttgggatttgatgcttatagattttcaatttcttggtctcggattttccccgatggcttaggaacgaaaatcaatgacgaagggataactttttataacaacattattaatggtcttcttgaaagaggtatacaaccttatgtaactttgtaccattgggatcttccgctgcatcttcacgagtcgatgggaggatggttaaataaacaaatc

SEQ ID NO: 138403 - DNA, 256 bp, Glycine max
cagacgcagcggacgagctcacattcggctgcctatctgctgctggatccaacggtatgtctagctgcgaaactaactgtcagataccagaccacatgagatcgctcagcgcaactctacacgagctcaaaattggcacagtcaagtctggtgctcgtgtcaaggcggcggaggactaccttttggcaaatccgcattaatactgatcgaattcgatcatcagtattcagtgatctgcaaagactcttgtcttata

SEQ ID NO: 138404 - DNA, 252 bp, Glycine max
cgcccgcatcaccggctcccttcacatgaccatccagaccgctgtcctcatcgagaccctgcaccgctctcggcgccgaggttcgctggtgctcctgcaacatcttctccactcaggaccacgccgccgccgccatcgcccgtgacagcgccgccgtcttcgcctggaagggtgagaccctccaggagtactggtggtgcaccgagcgcgccctcgactggggccccggcggcggccccgacctcatcgtcg

SEQ ID NO: 138405 - DNA, 251 bp, Glycine max
tttgccagaagaatatccaatggctgctccaaaggttaggtttctgacaaaaatatatcatccgaacattgataagcttggcaggatatgtcttgacattctgaaagataagtggagtcctgcccttgggattcgcactgtacttttgagtattcaagctcttctaagtgcaccttctccagatgatccactttctgagaacattgccaagcattggaaatctaatgaggccgaggctgttgaaacagcca

SEQ ID NO: 138406 - DNA, 256 bp, Glycine max
caacaagggtgtagaaattgagaagattatacctatggatgctgctcctcttggtgttgcaatccagggataatataaagctgtgacaaagaataattgggggagaatgaactatgctaaacgtgtatgaaaaatttgcctgcagtgtacttttatcttggcaaagctttgtagtgtatagatatagatataaggctttctaaaagtgtagcgtattgtattatcttgaatgctgtgatttgaagtcttaataaaa

SEQ ID NO: 138407 - DNA, 257 bp, Glycine max
cagacacagtggagaagatcacattcgaatgcaaattggctgctggcgccaacggagggtctgctgggaagctaactgtcaaataccaaaccaaaggagatgctcagcccaacccagacgacctcaaaattggcaaagtcaagtctgatgctcttttcaaggccgttgaggcctaccttttggccaatcctcattacaactgatccaattcgatcttcagtattcagtgatctgcaaagaccttgttttatattata

SEQ ID NO: 138408 - DNA, 257 bp, Glycine max
caatcctacctttcttcaacttagtgctcatgctaataatcaacatagtttggagatcagataccatgaattcaaactccaagttggcaccaggaccaaggcagctacctcgcatcggatacatacaccaccttggaactctacctcatagatccctaacaagattggcaaatcaatatcggtctctcatgcatatgcagctaggtgagctatcctgcataatggtatcttcacccgagatggcgaaagaagtgatg

SEQ ID NO: 138409 - DNA, 253 bp, Glycine max
cgagtaccagcttttgttgctatgcttggcacccgcagacaaccttttcctgcgtttggatttgacttagttcattgctctaggtgtttgatcccgtttacagcctacaatgcctcttatttcattgaagtggacagattacttcgtcctggtggatattttgtcatctctggtccccctgttcagtggcctaaacaagataaagaatggtctgatctccaagctgtggcaagagccttgtgttatgaactga

SEQ ID NO: 138410 - DNA, 252 bp, Glycine max
atggcaacaaccactgtgatcatgaccactctcccccaattcagtggtcttagacctcaattctcagctgcccctgtgaagaacttggttgctgtccaacaacctatgaggcccaaggggaagggtgctttgggagctcgatgtgactacattggttcatccactaatctgattatggtggcttctacaaccctgatgctgtttgctggaaggtttggattggctccatcagcaaacaggaaagccactgca

SEQ ID NO: 138411 - DNA, 254 bp, Glycine max
cgccggatctgctaaaatacgcttgatccatatggggctcctcgaccacttgtgggacgacaccgtcgccggcgcaaggccggaaaacggtctcggcaagctccgaaaacaccacaccttcactttccgacctagctccggcaaagaaactgaaggcgggagcgtgagatcgtacggagacgagtcgtcggaggtagcgacgagagtgacgcgtagtatcatgatcgtgaaaccgcccgggtaccagggtggat

SEQ ID NO: 138412 - DNA, 256 bp, Glycine max
acaaaactttccgattttggcttggccaaagatggtcctgaaggagatgacacacacgtttcaactagagtcatgggcacacaaggctatgcggccccagaatacatcatgacaggacacttgacagcaatgagtgatgtgtacagttttggagtcgtgctcttggagcttctaacaggacgaaggtcagtggacaaagggcgcccacaaagagaacagaacctcgtggaatgggccaggtctgctttgaatgatt

SEQ ID NO: 138413 - DNA, 256 bp, Glycine max
aaaggattctacccgccgctcgatgggaattgcgcttcaaggcgtctcgtagggctaatccgcctcacgagggtcaccaacggcacgtgcctttggggggccgaggccccctactgctggtcggcaaacggacggcgggcgcacgcgtcgcttctagcccggattctgacttagaggcgttcagtcataatccaacgcacggtagcttcgcgccactggcttttcaaccgaccgcgatgaccaattgtgcgaatca

SEQ ID NO: 138414 - DNA, 253 bp, Glycine max
ctttgttcactcttcttctcttgcggctagggttttagcgcacttcttctagatttaaggaagatgggtaaggaaaaggttcacatcagtattgtggtcattggccatgtcgactctgggaaatccactaccactggtcacctgatttacaagcttggaggcattgacaagcgtgttattgagaggtttgagaaggaagctgctgagatgaacaagaggtctttcaagtatgcctgggtgctggacaaactta

SEQ ID NO: 138415 - DNA, 251 bp, Glycine max
atttgcacccttcatggtgttgattattgccatactaaacgatggtaccatcatgacaatatccaaggatcgagtgaaaccatctccaatgccagacagctggaagctgagggagatatttgccactggtattgtgctaggaagttacatggcactaatgacagtagtatttttctggatcatgaaggataccgacttcttctcggacaagttcggtgtgaggtctataaggaacagccccggagaaatga

SEQ ID NO: 138416 - DNA, 250 bp, Glycine max
aatttccatgcggtactatgttttctttgcaagtactagcacaaacagctagctactatttttgaacttgtcataattagtctctaattctaattagccatacattgaacacaccagcacaccttaaacgtaagtggtatttgttccacacaggtacactattccttcactctcagaagcctaccgagcccaccccgtgcacgttcaacacaagcaccctgacttaaactccctacaagaactccccgag

SEQ ID NO: 138417 - DNA, 249 bp, Glycine max
catatttgcaagaccatttattggagcattggatgggcatgtagatgctgtttcgtgtatgacgaggaaccctagccagttgaaagggatattctccagttcgatggatggagatattcgtctctgggatttagctgcaagacggacagtttgtcagtttcctggtcaccgaggtgctgtacgaggcttgacagcatctacagatggacgcattcttgtgtcatgtggaactgattgcactatcagact

SEQ ID NO: 138418 - DNA, 249 bp, Glycine max
cgactgcaaccatgttccctgcagttgtctctaccattttctttgttttaaatgctctcatatggggccaaaaatcatcaggagctgtgccatttggcacaatgtttgctctgatctttttatggtttgggatctcagttccacttgtttttgtgggtagctatgtcggattccagaagcctgcgattgagaatcctgtgaaaacgaacaagatcccaaggcagattcctgagcaggcgtggtacatga

SEQ ID NO: 138419 - DNA, 223 bp, Glycine max
actatacttgtcaaccctttgagagttagaatggctgctgctattgaaatccccacaatagtgtttccaaactcctctgcccaacagaggatgccagtggttggaatgggatctgcccctgacttcacatgcaagaaagacacaaaggaggctatcatggaggccgtgaaacagggtaacagaaacttcgacactgttgatacttatggctctaaaaaggtct

SEQ ID NO: 138420 - DNA, 254 bp, Glycine max
acttaattgccttaaggaacgttcgagaccacagaggtttctctagtcttcttctgtggagagcttgttttctcttgttcattcatctcacttccaattaaggaacaagctttccaccaatttgaatcaccaatggctcgctctttctccaacctcaaggttctctctgctcttgtcgccgacggattctccaacactctcaccaggcgtgggtacgcagtagcgacacaaagcgcaacaagaggaggagcagc

SEQ ID NO: 138421 - DNA, 250 bp, Glycine max
cgctctcacgtgatgcagtatggtgatgtacggcttagcagtgatgttctcttccattatttgggtacagatcctgctaatgataatttcacttttgtggacgaaaactccttatggtcaccttcaaaaccagtcaaccaacgtgatgctgatctcatccatttttgggataagttccgcaaagctcctgagggttctctcaggaaaaatgcagctcagaaacaagttttggaagcaatgtctcatagaa

SEQ ID NO: 138422 - DNA, 107 bp, Glycine max
agcatagcaaacatgggaagagctccttgttgtgacaaagctaatgtcaagagaggtccatggtcacctgaagaagacaccaaactcaaatcttatattgaagagca

SEQ ID NO: 138423 - DNA, 160 bp, Glycine max
tttgaagttgttggccatggaacagcttctcattcagcaccctgagtatcgggaaaaggtagtgctggtccagatagcaaatcctgcgagggggcgagggaaagatgtgaaagaagtgcaagccgagacgaaggccacagtgaaacggataaacgaaaca

SEQ ID NO: 138424 - DNA, 159 bp, Glycine max
gcgagatcttctaaagcctggccctgcaagtgttgaaatcgatgatcaccctatgcaaattgaagaaacacagtacccgaaaaccttcttctataaagaagaccttcatccaggcaaaacaatgaaagtacaattcagcaagcctccctttcaacaacc

SEQ ID NO: 138425 - DNA, 161 bp, Glycine max
gtggttcccctatgttgaacaaactataaccaatgctggaaattggttgattgggggtgacctagaggtcattgaaccaatccagtacaatgatggacttgatcattttcggctgtctccagcagaactccgtgcagagttcacaaggcgcaatgcagatg

SEQ ID NO: 138426 - DNA, 162 bp, Glycine max
tagaatttgaagaggcaaagcaatccatgttagaatcagagaagaaactaaatttcaaagaagaaacagctgctagtgccatggcagccagagatgcagcagaaaagtctcttaagttagcagacttgaggtcatctagactaagagacagagtagaggagc

SEQ ID NO: 138427 - DNA, 158 bp, Glycine max
ttgatgagatttggtcacataattcattacttcctgctgatccctacgagagagctctggcaaggttttgggttaaatatgctgatgatgacatgttttctgcagttattgcattcttccttagcaataatgatgaagagcgagaaaagagcatagag

SEQ ID NO: 138428 - DNA, 156 bp, Glycine max
tgctggcataacttcaacaacttattctttgttctcgatctcacgatggctcatttggccctgtctcagatggctgtaactgttcctgttggcagcgatttgtctctcagaagatctgcggttaaggcacctaactttaacttttgggataaatca

SEQ ID NO: 138429 - DNA, 163 bp, Glycine max
ggcattgattctgaagaggattacccttaccgtggtgttgatggtagatgtgacacatataggaaaaatgctaaggttgtttctattgatgactacgaagatgttcctgcctatgatgagttagctttgaaaaaggctgttgcaaatcagcccgtcagtgtag

SEQ ID NO: 138430 - DNA, 162 bp, Glycine max
tcagaattctctaaaagagatctttttctgctctttgaagaaagaagggtctttgcttgattttggagatgtctctgctctcagatctcatcaaccttaacctctccgataccaccgagaaggtgatcgcagagtacatatggatcggtggatcaggaatgg

SEQ ID NO: 138431 - DNA, 161 bp, Glycine max
agcagagggagtagcggcattaaaaatgcagatcttcgtgaaaactctgacagggaagactataaccctcgaggtcgagagcagcgacaccatcgacaatgtcaaggccaagattcaagacaaggaaggcattcctccggatcagcagcgtttgattttcg

SEQ ID NO: 138432 - DNA, 159 bp, Glycine max
gagaaaaatgaagtctttccatctcacagtgacagctttgtgctgtgtagtggttgtgcttggagtgcttccactctccctagatgcacaactagatccctccttttacagagacacttgtcccagggttcactccattgttcgtgaagtcgtcaggaa

SEQ ID NO: 138433 - DNA, 158 bp, Glycine max
gaatgctgtcatatttggtcctgatgatactccatgggatggaggcacgttcaagttgactctccaatttactgaggactatccaaataaaccaccgactgtacgatttgtgtctcgcatgtttcatccaaatatttatgctgatggaagtatttgtt

SEQ ID NO: 138434 - DNA, 157 bp, Glycine max
tgtaaaccttgtgaatgcggatttcatagccaagcagaaagggcttcgcataagcgaggaaagagtggttgttgattcatctcctgagatgcctgttgattcaatccaggtacagatatccagtgtggactccaaatttgcgagtgctgtatcagag

SEQ ID NO: 138435 - DNA, 158 bp, Glycine max
agccttcagccaccgctgatattgtattcgacaccgaaggcaatcctattcgaaacggcggcacatactatgtgttgccagttataagaggaaagggcggcggaatagaatttgccaaaaccgaaacagaaacatgccctctcactgttgtgcaatct

SEQ ID NO: 138436 - DNA, 161 bp, Glycine max
atttaaggaagatgggtaaggaaaaggttcacatcagtattgtggtcattggccatgtcgactctgggaaatccactaccactggtcacctgatttacaagcttggaggcattgacaagcgtgttattgagaggtttgagaaggaagctgctgagatgaac

SEQ ID NO: 138437 - DNA, 157 bp, Glycine max
atcaagctcctttgatatggatcattgctccagatgccttatcccatggacacaatatggtggagtttatctccttgaaattcaccggattcttcgccccggaggattttgggacttgtctggtccaccgatcaattatgagcgcaggtcgcgtgga

SEQ ID NO: 138438 - DNA, 158 bp, Glycine max
aaatatcaactcaataagaggattggacgttgtcaatgacatcaagacagcggtggaaaatagttgtccagacacagtttcttgtgctgatattcttgctattgcagctgaaatagcttctgttctgggaggaggtccaggatggccagttccattag

SEQ ID NO: 138439 - DNA, 156 bp, Glycine max
tcagtacctcaccctgacagcagggttgagtatgagttctggaccaacagcaatgacgaatgtggagctcgttgcgacgaacagatgaattttgtgaagaattttaagggtcatgctcagattcttgagaggggtggttacaccttgttcactcca

SEQ ID NO: 138440 - DNA, 157 bp, Glycine max
gttgcctatgtagttgatacaccccgttcagaagatcccaccactttcatgagcaacatgttgtatgcttgtagtatcctctataagacaaggttacctctcatcttgacattcaacaaggttgatgtagcagcacatcaatttgctttggagtgga

SEQ ID NO: 138441 - DNA, 158 bp, Glycine max
gtggtgacccagcggcaggcccagaccttctcgtggcggccactccccgacgagaagcgtggtttcacgctccgcataaaaaaaaaggacaagtccttcatactaaactcctacttggattacattatggagaaagccagcgacattcggaggaagaa

SEQ ID NO: 138442 - DNA, 157 bp, Glycine max
gttatccttctttttttctccttgaactcgaatattcactatggcagatgaggtggttctgctagatttctggccaagtccatttgggatgagggtcaggattgcacttgctgaaaagggtatcaaatatgagtccaaagaagaggacttgcagaac

SEQ ID NO: 138443 - DNA, 152 bp, Glycine max
gcaaagatcatacaaaccaaggacgagaacacgatgttgcttgaacttgcacttggtttattggttttggctctgtttctgcacttgcgtcccacacccactgcaaaatcaaaagcacttcgccatctcccaaacccaccaagcccaaagcc

SEQ ID NO: 138444 - DNA, 153 bp, Glycine max
ctgatccagattactgtagggaattaaagctgtggtatttactttcaaagactttggctgaagatgctgcctggaaatttgccaaagaaaacgaccttgacttggttgttgttaacccagcaatggttgtagggcctcttttgcaagcagagc

SEQ ID NO: 138445 - DNA, 151 bp, Glycine max
cgctgtggttatcatcttcttcttcctctttcttagatctcttctttctctacgccgcacgccgaaaccatggccggaaaaggagagggtcctgctatcggaatcgatctcggaaccacctactcttgcgtcggtgtgtggcaacatgacc

SEQ ID NO: 138446 - DNA, 157 bp, Glycine max
gaatcaaccaccgatgatgagttgaagaacacttttggtgaatttggaactattactagtgctgtagtaatgagggatggggatgggaaatcaaagtgttttggatttgtgaattttgagaatgctgatgatgctgctagggctgttgaggctctca

SEQ ID NO: 138447 - DNA, 156 bp, Glycine max
agacaaaatttatctttttgattctggagcccagtatctagatggaacaacagatattacacgaacagttcattttggtaaaccttcgactcacgaaaaagcgtgttatacagcagtcctaaagggtcacattgctcttggaaatgctagatttcc

SEQ ID NO: 138448 - DNA, 153 bp, Glycine max
agctgctgttcctgcgcgtgaacaagcctcaggtaagccaaagccatggttaaggctaacaatgttatccccaatggacacttccgtaagcactggcagaactatgtgaagacctggttcaatcagccagcacggaagacaagaagacggttg

SEQ ID NO: 138449 - DNA, 150 bp, Glycine max
atcaaatttatctgagtttgatgatgtccaaggccacccaggctttgacaaacagggaaccagattcaagcgcctcataaaagatcaaaatgagcacaaagatgttgaggagggtattagacgtttagtactttgctctggaaaggttta

SEQ ID NO: 138450 - DNA, 151 bp, Glycine max
gtcaaggactctgccaacaccgccttccaacaggcgacggtggagggtgtgctgtcttcggagacgatgcgcggcatccgcttcgacctgatggacgtcgtgctgcacgccgactccatccaccgcggcgcgggccagatcatgccgccga

SEQ ID NO: 138451 - DNA, 154 bp, Glycine max
ctttgtcccatcccacttggacttccacctcacccctttttctcaacgccatgaaaatagatatcagcaattgatcaaaggtctttttgtttttgtggctctgagaggggagtgattctaaactaatatatatgggggctggggaagagagcac

SEQ ID NO: 138452 - DNA, 152 bp, Glycine max
aaaatgctaaagtcgtttctattgatgactacgaagatgttcctgcctatgatgagttagccttgaaaaaggccgttgcaaatcagcccgtgagcgttgctattgaaggagggggcagggaatttcaattatatgtatctggtgtattcacg

SEQ ID NO: 138453 - DNA, 150 bp, Glycine max
cctctttcttcctcttcctcagtagtgcgattttcgattctcttctctgcaactatgcctaaccctaaggtcttcttcgacatgaccatcggcggtcaacctgccggccgcatcgtgatggagctctacgccgacgtgactccgagcacc

SEQ ID NO: 138454 - DNA, 150 bp, Glycine max
aaggagggcgcgtgaagctcaagactcgttacgggaattttctcagagctaacggcgggttgccgccgtggagaaactccgttacgcatgatattccgcacaggaccgccacgcaggattggatcctatgggacgtggatgttgttgaga

SEQ ID NO: 138455 - DNA, 150 bp, Glycine max
agagaatccgaggcgaagagaagagaaaaattaagatggaggggaaggaacaggatgtgtcgctgggagcgaacaagttcccggagagacagccgattgggacggcggcgcagagccaagacgacggcaaggactaccaggagccggcgc

SEQ ID NO: 138456 - DNA, 254 bp, Glycine max
agagaaataagggaaaaatggtgtcgctgaaactgcagaagcgcctctccgcaagcgtgctcaagtgcggcagaggaaaggtttggcttgaccccaatgaagtcaacgaaatctccatggccaattctcggcaaaacatcaggaagttggttaaggatgggtttatcatcaggaagccaaccaagattcactcccgctcacgtgctcgtaggatgaaggaggcaaagaggaagggccgccactccggttatggt

SEQ ID NO: 138457 - DNA, 252 bp, Glycine max
attgtttgttgttgtaactcgttcttcttcttttgttgttctgtgtttgttttttctctcacctgaaaatgtcttgctgcggtggtaactgtggttgcggaagctcctgcaagtgcggcaacggctgcggaggctgcaagatgtacccagacttgagctacactgagtcaaccaccaccgagaccttggtcatgggagtggcacctgttaaggctcaatttgagggtgctgaaatgggtgtgcccgctgaga

SEQ ID NO: 138458 - DNA, 249 bp, Glycine max
acagttacagcataacttctattctatatttctttctactcgcaagcaaatcagaagaagagaatggcagcagcagaggggctaaacagagagcagtacgtgtacttggcgaactgtcggagcaggcggagcggtacgaggagatggtggagttcatgcagaaggtggtggtggggtcgacgccggcgtcggagctcacggtggaggagcgcaacctcctctcggtggcctacaagaacgtcatcggct

SEQ ID NO: 138459 - DNA, 248 bp, Glycine max
ggccttcccacatgggaggaatgtttggaggttgcagtcgaaaagtttgaactagctgggacttctgcaacggatattgctttcattgtaaagaatcactgctcaaatgaaacagcacttgaaggattcaaaattgatgagatagtacaggcatggaatgagatgtatgatgcccaagggtggcagtttggtgatccatcattccgacttgaaccattgtttcgtcggcgtgttcctaaactccatta

SEQ ID NO: 138460 - DNA, 245 bp, Glycine max
gccttgaggaacgttccagaccacatacagaggtttctctagtgatcttcgttcttctgtggagatcttgttttttcatctcacttttcttctaattaaggaacaagctttccgcagttgaaaaccctagctagctagcttccaccaatttgaatcaccaatggctcgctctttctctaacgtcaaggttctctctgctcttgtggccgacggattctccaacactctcaccaggcgtgggtacg

SEQ ID NO: 138461 - DNA, 244 bp, Glycine max
ctgccattgataatgcccacattgaccagtggattgatttttcatccttggagatcgatgctaatctcatgaaattgctcctaccaagacttggatttgccccataccttcctccagttgaggagggtgcaaattctgcgttgaagagagcatttgaggccttgaacactcatcttgcctccaatacttaccttgttggccattctgttacccttgctgacatcataacaacatgcaacttgta

SEQ ID NO: 138462 - DNA, 249 bp, Glycine max
aatttcatgggtaccactaccacctttccgccttcagccgtttcaaccaccagcaaatggctgggcttcgtggcggccgtgtggattcaatgcatctccggcaacaactacactttctcaaactactccgacgccctcaaatccctcatgcacctcactcagctccaactcaacaacctctccgtcgctaaagacgttggcaaagcctttgggcttctcgcgggcctggcctccgaccgcttccccact

SEQ ID NO: 138463 - DNA, 250 bp, Glycine max
agggggattgcatttggacagaaaaatgcgtagctgttttgataaatttagctacttctcaagttggaagggaggaaattgtatctactcctggactcattggtgcattggcttcgatattggacaccggtgagctcatagaacaggagcaagctgtctcttgtctcctaattttgtgcaatagaagtgaggaatgcagtgagatggtcctgcaggaaggggttataccagcattggtttcaatatcagt

SEQ ID NO: 138464 - DNA, 248 bp, Glycine max
cgtgcctcaacgcttttttaactcctttcgcttttccattccaacctctttcacacttcagatctgtatcttcatcggttgttcaagtaaatggcctttgtcaccactgctgaagtgtgtgatgcgaacccacagttaattttgagtggggagcttcgtgcccttcagccagtttttcagatttatggccgtcgacaggttttctctggacctatagttaccttgaaggtgtttcaagacaatgtttt

SEQ ID NO: 138465 - DNA, 247 bp, Glycine max
cagacatcaatataagcagcgacccacatatatagctgacagtttcagttcattggatcaggttgtttctgctttaagagaagctggtctggaatcttcaaatttaataattggcattgacttcaccaagagcaatgagtggacaggcaagcactccttcaaccacaaaagccttcattttactggaaacactcctaatccgtatgagcaagcaatctctataattggccgtactctctcttcattt

SEQ ID NO: 138466 - DNA, 245 bp, Glycine max
gccagctgatggtctagctccggtctggaataatgatgttaggttcttctgtgttaaggattcttctggtagtccaattgcgtatttttattttgatccttatagtcgtcctgctgaaaaaaggcaaggtgcatggatggatgaagtctttgctcgtagtcgtgtgttatcgcgcgatggtacctcagcaagattgcctgttgctcacatggtgtgcaatcaaactcctccagtaggaaacaagc

SEQ ID NO: 138467 - DNA, 246 bp, Glycine max
gaaatcttcttttccgggtgtatgatcaattccactgttaggcgcaggacccatttagttcaatccttctcagttgccttcctctattggttgtactacgtttcatgatttctaacccttccttagcttaataatcatctatctaaaatatcataatatcttctactagctagttttatttttattatcacaataaaatctatctgcaatatattgttatttttattttctgagaaatttgtgtct

SEQ ID NO: 138468 - DNA, 246 bp, Glycine max
atcagtgcaagacaatcgccctccatcttctttcttcttcaattcattccgatggcgattccgttgccctctctcgatctcactcaccactccgatttcgaacccttagtctccccagacggttacatctccatttgcggctacggttccctcctctccgagacaagtgccagaaccactttccccgacctcgtcaacttccgaatcgcccggttaactggtttccgccgtctcttcaactccgtc

SEQ ID NO: 138469 - DNA, 244 bp, Glycine max
gatgtcttgaaggttattgctggtttctccctagctgacttgtatcctattaaagggcttcaagttttgacagggttgagatccaaagttgagaagttacatcaagaagttgataggatccttgagaaaattgtgagagaccacagggacacaagttcagaaacaaaggaaacccttgaaaaaactggagaggatctagttgatgtgctactaaagcttcagaggcagaacaaccttgagcatc

SEQ ID NO: 138470 - DNA, 246 bp, Glycine max
agggaagaaaaggaaatttatggaagtaagcaagcattacgtggcccatgaaaacagtaagatcggtgatagaaatgattcagttaaacttacaaatttcttgatgcctccaagttccggacccagaggatggaaaaatagttccaaaaatgatgccaaagagaaacatggagccgactccaagcccaagacaagccatacagaaaggattaaggattcttcaaatctcttcaagaatgctgcttc

SEQ ID NO: 138471 - DNA, 244 bp, Glycine max
agtgaaatggaaagattcaagatctgtgagaaggagacaaagacaaaagcattctccaaagaaggcttaggtcaacagcctaaaactgatcctagagagaaggctaaatcagagacaagggattggttgaacaatgtggttggggagttagaaaatcagattgataactttgaagctgagcttgaaggactttctgtcaagaaaggaaagaacaggcctcccagattgacacatctagaaacat

SEQ ID NO: 138472 - DNA, 245 bp, Glycine max
tcgagcttcagcaatggtgtacgtcaaggctcagaaatcaaaagcctacttcaagagatatcaagtcaagttcaagagaagaagagagggaaaaaccgattaccgtgccaggattcggttgattaatcaggacaagaacaaatataacactccgaaataccgatttgtggttcgctttagcaacaaggacattgttgcacaaataatatctgctagcattgccggcgatttagttcttgctacag

SEQ ID NO: 138473 - DNA, 242 bp, Glycine max
caatcatcttttgtttgttcttcagtactttagtgtgtgatttaattccaagattttgagaatgtctagctgtgggtgtggaagtagctgcaactgtggcagcaactgcggttgcaacaagtactcttttgacttgagctatgttgagaagacaaccacagagactcttgttttgggtgttgggtctgtgaaggcccaattggagggtgctgaaatgggtgttgcagctgagaacggtggct

SEQ ID NO: 138474 - DNA, 249 bp, Glycine max
gaatctcaagattctaagagagattttgctgctctttgaagaagggtgtttgcttgattttggagatgtcgctgctctcagatctcatcaaccttaacctctcagacactactgagaaggtgatcgcagagtacatatggatcggtggatcaggaatggacctgaggagcaaagcaaggactctcccaggaccagttagcgacccttcaaagcttcccaagtggaactatgatggttccagcacaggcc

SEQ ID NO: 138475 - DNA, 243 bp, Glycine max
ttgagacctacacactcacaaaggcaaataatttagttcttaacgtagatggtgcaattggatctcttttcttggatcttcttgctggtagtggaatgttcaccaaacaagagattgatgaaattgtggagattggctatctgaatggcctctttgtgctggcacgctccattggtctgattggacacacctttgaccaaaagcgattgaagcaaccactttaccgtcacccatgggaggatg

SEQ ID NO: 138476 - DNA, 244 bp, Glycine max; identical to SEQ ID NO: 115668

SEQ ID NO: 138477 - DNA, 246 bp, Glycine max
cttcccactttttatgagcattggccaacccccacgcttcctttattctccctctcaagcttcaagctactcacaccaatgaagatccagtgcgacgtttgcaacaaacacgaggcctccgtcttctgcaccgccgatgaagccgccctctgcgacggctgcgaccaccgtgtccaccatgccaacaaactcgcctccaaacaccaacgcttctctcttctccgcccttctcctaaacaacaccct

SEQ ID NO: 138478 - DNA, 243 bp, Glycine max
attttactttacagaaaagtatcaggaagtgaaaaaagttctggctgacactttttttggcccaccaaatgggggagtctatagcccatctgttcaaaacacactctacctgatggcaaaggccacactgaacagatttccagacatagcttatgtcagtctaaagatgccaaatcttcatttcttacctgtcaatatctcaaacaaggatggtcctattgtgaagtttgaggatgatgtgta

SEQ ID NO: 138479 - DNA, 242 bp, Glycine max
tgagaattgttcctctcttctcttccattcgtgtacgcgcaaaagaatcatgacgagttcctctgctgccgctcgcaagaatctgagtaagattgcctgcaataggctccagaaagagctcgtggagtggcaggtcaatccccccactggtttcaagcacaaagtcacagacaatctccagaggtgggtggttgaagtcactggagctcctgggacactttacgctaatgagacctaccagc

SEQ ID NO: 138480 - DNA, 242 bp, Glycine max
cagcttccacaatcctatcgcacatctttctcagttctacgatggagttttggggtgcggaggttaaggttggtgagtctgttaaggtagacccagccgaatttgaggcatgcatacacctttctcaggctgctcttggtgaggcaaagaaagataagcctgaaccggtggttctctacatgaaagttggtgaacagaaatttgtcttgggaaccctttccagggagaaaatccctcagata

SEQ ID NO: 138481 - DNA, 244 bp, Glycine max
  unsure (1)..(244): unsure at all n locations
tgctgggaagtcttctgaaagacgcagttatggtggaccacgagttccttaccgtggtggtcgtcgtggaggtttcagcaatggtgaaactggtgaaggtgaagacggacgacctcgaagagcatttgatcgtcgcagtgggactngacgaggaaatgaattcaaacgtgaaggttcaggacgaggtaactggggaacccaaactgatgaacttgctcaggtaactgatgaggttgtgaatgaa

SEQ ID NO: 138482 - DNA, 245 bp, Glycine max
gcagtagatggggtcatcaaaatttttaccattgcagtcacaattgtggttgttgcagtgcctgaaggtctacctttggctgttaccttaaccttggcatactcaatgcggaaaatgatggcagacaaggccttggtacggcggctatcagcctgtgaaactatgggctctgccacaacaatttgcagtgataagacaggaacattgaccttaaatcagatgactgtagttgaggcatatgttgg

SEQ ID NO: 138483 - DNA, 246 bp, Glycine max
gtcatcgttgggatctccatacgccggatctgctaaaatacgcttgatccatatgggcctcctcgaccacttgtgggacgacaccgtcgccggcccaaggccggaaaacggtctcggcaagctccgaaaacaccacaccttcactttccgacctagctccggcaaggaaacggagggcgggagcgtgagatcgtacggagacgaatcgtcggaggaagcgacgagagtgacgcgtagtatcatgat

SEQ ID NO: 138484 - DNA, 243 bp, Glycine max
cttcaggcgagagtgcagcgcctctacagctagcgtccggtggggtgcgattcgtgagctgcacctctctctctcgataatcagaggcaacttatttgctttggaattgatggaggccaaattttttcgctttctcaagattgtgggtgttggatacaaagccagagctgaagctgcagggcgtctattgtatctcaaattgggatacagtcatgaggtggaactagccgtccctcctgctgt

SEQ ID NO: 138485 - DNA, 239 bp, Glycine max
tgaaaaaggagaaacatttgcaatctttgaaattgactgaggtgactgtaagtgaccagcttgaaggttttcgagcatcaaaagagcatttcaaaggattgagtttccccactatttcttcagttggctcaaatgcagctataattcactattttccaaaggcagaaacatgtgctgaacttgatccagacaaaatttatctttttgattctggagcccagtatctagatggaacaaca

SEQ ID NO: 138486 - DNA, 238 bp, Glycine max
gagatggagaagccaggaggaggaggagtgttatcggcgaaggaggcattcgagaagcttgaaaaggtgggagaagggacatatgggaaggtgtacagagcaagagagaaggccacggggaagatcgtggctctgaagaagactcgtctccacgaggacgaagaaggtgtccctcccaccactctccgtgaggtttccattctgcgaatgctctctcgcgatccccatgtcgttaggt

SEQ ID NO: 138487 - DNA, 238 bp, Glycine max
atgatggatacggagatggggtgtatgcttatgaagggggcaaggtggaaccctacggggcgcgtggcacggcgccaaaatcgtcgacttgggcggcgtttgatgattacgggaggtccatcagtttcccctcgcagaaggaatcttcttctgtggggggtaagattgtgaaagcggtgcccaaggctgatacacaacaagatgtcaaaggtggcggcgtgcaaaagtttcgtgtcaa

SEQ ID NO: 138488 - DNA, 242 bp, Glycine max
tgggttcattgctgctgtggcacacactcatgttcttcaggaggggccagttacaggacgggcagccgatgctcttgcagcagcaaacaccgctgccgaagtggccttgcggcttgtaaggcctggaaggaagaacaaggatgtaactgaagcaattcagaagattgccgcagcgtatgattgtaaaattgttgagggtgttcttagccaccaaatgaaacagtttgtgattgatgggaata

SEQ ID NO: 138489 - DNA, 243 bp, Glycine max
ctactactgctagctgtgacttgtttgtgagttcaatcaaatcgcattggtatctgaaatcaggaaagatggttagcgtactgagatcaggcaggcacaaagggcagaaggcccagcaaccatccttgccattggaactgcaaacccaccaaaccgtgttgatcagagcacctatcctgattactacttcagaatcaccaacagtgaccacatgaccgagctcaaagagaaatttcagcgcat

SEQ ID NO: 138490 - DNA, 247 bp, Glycine max
caagatacgtcatctgacaataatgagaagaaaggtcaatattccaagttctggaatgagtttggtaaatccattaaacttggtatcatcgaggatgccaccaacagaaatcgtttggcaaaactgctcagatttgagagcaccaagtctgagggtaaattgacatctctggatcagtacatatctagaatgaaagctgggcagaaggatatcttttacataactggaaccagcaaagaacaactgg

SEQ ID NO: 138491 - DNA, 243 bp, Glycine max
ccttattctctctctccttcggctccatgccaaccgtcgttgcctccacccctgagttgttcaagctcttcctccaaacccacgaggcaacttccttcaacacaaggttccaaacctctgccataagacgcctcacttatgacaactctgtggccatggttccattcggaccttactggaagttcgtgaggaagctcatcatgaacgaccttctcaacgccaccaccgtcaacaagctcaggc

SEQ ID NO: 138492 - DNA, 246 bp, Glycine max
cccaccggagccaaggtcaccaaggccgctgccaagaagaagtgattgcatttgggcaattttgctagcacatgtgatcatcatcgtggttactcctttatagtagttttatccttgcagagtcttaggtgttttgtttaagttatatttttaagtttctgccgatttcatgtagccgtaactttcaaaactaggttcttgatcggcggtggtcaattttcattgctgtttgtttttgatgagtac

SEQ ID NO: 138493 - DNA, 240 bp, Glycine max
gaagcaatgcttatattttgggtggccaagacaaatcacagaactggcatgtctactctgcttctgcagattctgtaactccatgcgacaatgtttacactctagagatgtgcatgactggcctggatagagagaaagcacaggttttctacaaagaacaatctgcttcagctgccattatgactgttaattctggcattagaaaaattcttccagattctgagatttgtgactttgact

SEQ ID NO: 138494 - DNA, 237 bp, Glycine max
ggaatttattgaccagcatcaaccagatctgtgactgtgttcgattgggtaccaactattatttcaataggctgtcagtaacgtaaaagtaatccctgtgccccagccatggctgcaccgtttttctcaacgccctttcagccttatgtttatcagagtccgcaagatgcaattataccttttcagattttagggggtgaagctcaagtggttcagataatgttgaagccacaagaa

SEQ ID NO: 138495 - DNA, 244 bp, Glycine max
tccctcaccgctccgaattagggttttccaattcgcagagcaactcaacacaacgaaccaaaccaacaatgtcgcagccgcagcctcagtcgcagccgcaacacgggcaagcggcgctggagcaggtgcagtgcttcggtcgcaagaagacggcggtggccgtgacctactgcaagcgcgggcgcggcctcatcaagatcaacggctgccccatcgagctcgtcgagccggagatcctccgctt

SEQ ID NO: 138496 - DNA, 239 bp, Glycine max
ggcatactagattatcaaatatcccctgagactaagtcagacactagaactcccatccaaacttcaaataaggagttttctactccagtgaaaagcaaatctgaggccagcacatcttatgctttgagaggggtacaacaaaaccaacagggctcgccaggtttgagttggtggtcacctacaactgcaaagagtggtggggaacaagatgagaggggaagaagttcgccagttgaggg

SEQ ID NO: 138497 - DNA, 237 bp, Glycine max
gagtgatttcagtgagtgatcggtgttcacttgatctcatcataatcgtcagcgtcaattgaagaagatgccgatcagaaacatcgccgtcggaaggcctgaagaggcgactcaccccgacacgttgaaggcggctttggctgagttcatctcaaccttcatcttcgtgttcgccggctcaggctccggcatcgcctacaacaagctcaccgacaacggcgctgccacccctgccgg

SEQ ID NO: 138498 - DNA, 235 bp, Glycine max
gcccaaagccaatgactgtcttctggtcatctctggctcagagctttaccaagcgcccaatgaagggaatgcttaccggtcctgttaccattctcaactggtcctttgttagaaatgaccaacctagatctgagaccacctaccagattgctttggctatcaaggacgaagtggaggaccttgaaaaggctggcatcactgttatccaaattgatgaagctgctttgagagaggg

SEQ ID NO: 138499 - DNA, 236 bp, Glycine max
ctggtcatcgttgggatctccatacgccggatctgctaaaatacgcttgatccatatgggcctcctcgaccacttgtgggacgacaccgtcgccggcccaaggcggaaaacggtctcggcaagctccgaaaacaccacaccttcactttccgacctagctccggcaaggaaacggagggcgggagcgtgagatcgtacggagacgaatcgtcggaggaagcgacgagagtgacgcg

SEQ ID NO: 138500 - DNA, 237 bp, Glycine max
caatttcagccttcacgcgtggtggtggtgttgttcttcttctcttcccctttcttgttcttcttctgagcttgtttaagctcgttctatgtgattccattaacatatattatcacaatgtgtggtattcttgctgttcttggttgttctgatgactctcgagccaaaagggtccgcgtgcttgagctctctcgcagattgaagcaccgtggccctgactggagtaggctccatcaa

SEQ ID NO: 138501 - DNA, 237 bp, Glycine max
cagagacaacatagctctcaagggacttgccaagttcttcaaggaatcaagtgaagaagagagagagcatgctgagaagcttataaagtatcagaacattcgtggtggacgagtggtgctgcaccctatcacaagtcctccctcagaatttgagcattcggaaaaaggggatgccttgtatgccatggaactagctctttctttggagaagttgacaaatgagaaacttctgcatgt

SEQ ID NO: 138502 - DNA, 237 bp, Glycine max
agcctcacaaaagcaaagatcaaacaaaccaaggacgagaacacgatgttgcttgaacttgcacttggtttattggttttggctctgtttctgcacttgcgtcccacacccactgcaaaatcaaaagcacttcgccatctcccaaacccaccaagcccaaagcctcgtcttcccttcataggacaccttcatctcttaaaagacaaacttctccactacgcactcatcgacctctcc

SEQ ID NO: 138503 - DNA, 245 bp, Glycine max
tgaagctggagcggatcaaggactaccttcttctggaggaggagttcgtggcgaatcaggagcgactcaagccgcaggaggagaaggccgaggaagacagatccaaggtcgatgatctccgaggctctcccatgagcgtcggaaacctcgaagagctcatcgacgagaatcacgctattgtctcctcctccgttgggcctgagtactatgtcggaatcctgtctttcgttgataaggatcagttg

SEQ ID NO: 138504 - DNA, 237 bp, Glycine max
ggtgattgggaaaggtgctttcggtgaggtgaggttatgtcgtgctaaaggtacgggagagatttttgccatgaagaaattgaagaagtcagagatgcttagtcgtggacaggtggaacatgttcgatctgagaggaacttgctggcagaggttgatagcagatgcatagtcaaactccattattcattccaagattcagatttcctatatctcatcatggaatatttacctggtgg

SEQ ID NO: 138505 - DNA, 235 bp, Glycine max
gtcatcttaacatcttctgtggctgcagttgcatataataaaaggcctaaaagtcctgaagttgtagttgatgaaacctggtggtctgatccagattactgtagggaattaaagctgtggtatttactttcaaagactttggctgaagatgctgcctggaaatttgccaaagaaaacgaccttgacttggttgttgttaacccagcaatggttgtagggcctcttttgcaagcag

SEQ ID NO: 138506 - DNA, 236 bp, Glycine max
ctttcaaagtatttgcttttattttttggtgaaaaagtgtttatgcttttgctgttgtacaagatgagtgatgagaatggcgaagaacctcgagaaaaccgtccggttccacgcttgaatgaaaggattctttcatctctgtctaggagatcagttgctgctcacccttggcatgatcttgaaattggacctggagcgcctatgattttcaattgtgttgtggagatcactaaggg

SEQ ID NO: 138507 - DNA, 235 bp, Glycine max
cagaactactctccagctccaatgcgctcttcagtgatggcatctgtggccctcaaacctgcacatttcactgttgagaagtcctcagtgagaggccttccctctctctcaaggaactcttcttcattcagagttgtggccagtggcaagaagatcaagactgacaaaccttatggaattaatggtggcatggctttgagggatggaactgatgcatctggcaggaaaggaaagg

SEQ ID NO: 138508 - DNA, 234 bp, Glycine max
ttggaggatcctcttggcaagctcaatatgttttacctgccgtccaaaacgtgtaccaagctataagggctcaaggccttcatgatcaaatcaaggttacaacagttattgacacgaccctaataggaaactccttccctccatcacaaggctcctttaggggtgatgtgagatcatacctagaccccataattggatacttattatatgctggggctcctttattagtcaata

SEQ ID NO: 138509 - DNA, 235 bp, Glycine max
tgcttcttcgagtttcacagccaagtcgtaaaagggtttcaagggatggaaaacatgcagagcttctggcaattgggtgatgaactccgtgggcactcaaaagcatcggaggatcacaagtggttaatggttgcctcgaaactggccgaacagacaagattgaagggggagcgtgtgaacaaccttgatctttcaaagggacccattgaaacaaggtcaagggataaatttgggt

SEQ ID NO: 138510 - DNA, 231 bp, Glycine max
tgagaattgttcctctcttctcttccattcgtgtacgcgcaaaagaatcatgacgagttcctctgctgccgctcgcaagaatctgagtaagattgcctgcaataggctccagaaagagctcgtggagtggcaggtcaatccccccactggtttcaagcacaaagtcacagacaatctccagaggtgggtggttgaagtcactggagctcctgggacactttacgctaatga

SEQ ID NO: 138511 - DNA, 245 bp, Glycine max
tggaaagtatgcaatctgtttacttgaacagaaatcgtactgctaaggccatattggaccttgttcactctgctgagaataactcattatgctatgatcatcttgcattcaggacatttggggtgaatggttatggaattgattccatggctagtttttttctggattatggctatacacaaagggaagagttgaggtttccagccaaaaagttgagggctttgtggttttctcctcctgctgat

SEQ ID NO: 138512 - DNA, 238 bp, Glycine max
gcctcagattgagcattatggatgcatggtggatttgttgggaagagctggtcttataaaccaggctgtggatatcgtgaggaagatgcctatggagccagatgtggttatttgggcagcactgcttggggcctgtagatgtacaagaatgtggaaatggcagagctggcacttcagcggctcattgaacttgaacccaataaccccggaaactttgtcatgctctcgaacatttaca

SEQ ID NO: 138513 - DNA, 238 bp, Glycine max
aaacaaagtatagagtgaaagaatgggtgagaaaagcaagattttgatcataggaggcaccggctacatcggcaaacatatagtggaagcaagcgcaaaggctggaaatcccacttttgctttggtgagggaatccacactctctgacccctccaaggcacaactcatccacaattttgaggctttgggcgttaatttggtccgcggggatctgtacgatcatgagaagttggtgaaa

SEQ ID NO: 138514 - DNA, 235 bp, Glycine max
attcatcattttctctcttctctgcttcttcttgttcaaatcttaggagctgaggagaatcaatcgagagaaatatgtctggtatcgctcgtggacgccttgctgaggaacgaaagtcatggcgcaaaaaccatccacacggtttcgttgccaagcccgagactctacctgatggcaccgtaaatttgatggtctggcattgcactattcctggcaagaccgggactgattggga

SEQ ID NO: 138515 - DNA, 232 bp, Glycine max
cttaaaccctagcccctcttctcttcattcttcactcaggaaacaagcataatggccttctgtaataaggttggaaatgtcttgaggcagggtgctgctcgcagcacacaagcacctgtttcatccatgcttaattacattcgctgcatgtcttcaagcaagctttttattggaggcctttcacatggagttgacgatcagtctcttaaggatgcattttctggctttggag

SEQ ID NO: 138516 - DNA, 230 bp, Glycine max
agacaatgttgttttgattgttactggcaccttgcatgagagagatgttcaagaattactagaaaaatgccatccactcggcatgtttgacagtattgctactctggctgttgctcagaatatgcgggagctttacaggctggttcttgttgacactcctctggctccatacttctctgagtgcattacatcagaggacttggatgatatgaacattgaaataatgagga

SEQ ID NO: 138517 - DNA, 230 bp, Glycine max
cataactctgccgccgcaacagccccaaatccaatggcttcagagaagaaactttcgaacccaatgagggagataaaggtgcagaagctcgtcctcaatatctccgttggcgagagtggagatcgtcttaccagagccgctaaggtgttggaacagcttagtggccaagcccctgtgttttccaaagcaaggtacacggttcgttcctttgggattagaagaaatgagaa

SEQ ID NO: 138518 - DNA, 231 bp, Glycine max
ctcggtggtcgtatccgttttatactgtccggcagtgctcccctttctggtgataccccgaagttcatcaatatttgtcttggtgctccaatcggtcaaggatatggtctcacagagacttgtgctggtgggacattctctgatgttgatgatacatctgttggccgtgttggaccacctcttccgtgctcatttattaagctaatagactggcctgaaggtggatattta

SEQ ID NO: 138519 - DNA, 230 bp, Glycine max
cccaatcgtaaaaacaacaaatcataatcagtcatagcttcggcgacttctcgatattattttttctgacagagccaccgacagagccggcggttcccgtggcggtttgagaatggccgacaagtacaacctgaagaaccccgccgtgaagcggatcctccaggaggttaaggagatgcagtccaacccttccgacgatttcatgagcctccctctcgaggaaaatatat

SEQ ID NO: 138520 - DNA, 230 bp, Glycine max
atgattatgatgtctacaatgacttgggcaacccggatagcggtgataaatatgcacgccccgttcttggtggttcagccttaccttaccctcgcagaggaagaaccggaagaggagaaactagaaaagatcccaacagtgagaagccgagcgattttgtttaccttccaagagatgaagcatttggtcacttgaagtcatcagatttgctcgcttatggaatcaaatct

SEQ ID NO: 138521 - DNA, 227 bp, Glycine max
gataatccttgaggttcgggatcggaaccggatcggaggctcgtacctgaaatccgatctgatttgctgcgatccgaagctggccaaagaccgcaactgcaacctcggcgaggtcatcatccagaagaaccccgacaaccatgaactccccaaacgcatcaaaaccttcttccaaggtaccgatgagcaggtccagatggacgctgtaaccctcgagatcaacgcca

SEQ ID NO: 138522 - DNA, 227 bp, Glycine max
atagaagtactgtgttaaggaataaccctgcagctctgctggctttatgttggtattgggctacagatggtgtaggatccaaggatatggttattcttccgtacaaggacagcctgttattattcagtagatacttgcagcagctggtcatggaatctctaggcaaggagtttgacttggatggtaatcgggttaatcaaggaattagtgtctatggaaacaaagga

SEQ ID NO: 138523 - DNA, 233 bp, Glycine max
gcaatcactggtaaatcctgctgggaaggacttgtatgtttctctgtatgcctcttggtgtcattctcctatggcaattataagtctttgctttttggctcagacttaccaacatgccagtgctgtgattcaatcaatggaggaggaggatattaatgtcaaatttttggtccaactggataaattgattcgcttgatggaaactccaatctttgcttatcttcgattgcagc

SEQ ID NO: 138524 - DNA, 229 bp, Glycine max
aggagacgcgctgccaaaaagccttactctaggtccattgttggtgccactctggaagttatccagaaaaagagagctgagaagccagaagttcgagatgcagctagggaagctgctcttcgtgaaattaaggagaggatcaagaaaacaaaggatgagaagaaggctaagaaagcagaagttacagccaagtcacaaaaagcaggagggaaaggcatttctaagggtg

SEQ ID NO: 138525 - DNA, 229 bp, Glycine max
gcagagtgcagagccttctctcctctattttggcttccaacctttttgctccattcattctcaacaacaaaccaatctctatattttgcttagacaatgagggggagcttgtggcaacttgggcaatcgatcactcgccgtcttgcccatggagataagaaggctgttgctcgccgatgttttgcctcagaagctgagctgaaaaagacagtgtttcatgacttccatg

SEQ ID NO: 138526 - DNA, 228 bp, Glycine max
agagaatggctcccaagggtttaacctttctggctgtgttaatatgcgtttcagcactgtcactgagtccttctgttgcgggggaagggcaaaataatggccttgttatgaacttctacaaggaatcatgccctcaggctgaagacatcatcacagaacaagtcaagcttctctacaagcgccacaagaacactgctttctcctggctcaggaacatcttccatgact

SEQ ID NO: 138527 - DNA, 227 bp, Glycine max
ctgaagggcaagcaagcaaatgctctgttttggtcacctgccggtcgctacattgtactggctcggttgaaaggcttcaatggacagttggaattttacaacgttgatgaacttgaaaccatggctactgctgaacattttatggcaacagatattgaatgggatccaactggaagatatgttgcaactgcggtgacttcagttcatgaaatggagaatggtttcaa

SEQ ID NO: 138528 - DNA, 229 bp, Glycine max
cttcttctctggttgattcggatctagagtcttcagtttctcctacgttgttcttcgctttcctgttttcaatttcgattctttcgttaatttaataagatgtttgggagggcaccgaagaagagcgataatacgaggtactacgaaatcctcggcgtctccaagaacgcttcgcaggatgatctgaagaaggcttacaagaaagccgccattaagaatcaccccgaca

SEQ ID NO: 138529 - DNA, 225 bp, Glycine max
ctcactccagccacacgcctcagtagaccatggcctcattgggtgggttacaaaatctaagcggcatcaattttcttatcaaaaaagagggtccaaaagtcaatgcgaagttcgagctgaagccgccaccatatccactgaatggtttggagccggtgatgagccagcagacacttgagtttcattgggggaaacaccacaagacatatgtggaaaatctgaaaa

SEQ ID NO: 138530 - DNA, 231 bp, Glycine max
ctatttctcagtctctgtgtttgcggctgaggattccgaacgagtgaccttcttcgtttctcgcaaagtttaagtaatcatgggtaaggaaaaggttcacatcaacattgtcgtcattggacatgtcgactctgggaagtcaactaccactggtcacttgatctacaagcttggaggtattgacaagcgtgtgattgagaggttcgagaaggaggctgccgagatgaacaa

SEQ ID NO: 138531 - DNA, 227 bp, Glycine max
tgttgcacctctgggcgcacaggctgttaccaaaattcatgatatatttgattggtccaagaaatcaagaaaaggcctattgctttttattgatgaggcagatgctttcctttgcgagcgtaacagctcccacatgagtgaagctcaacgaagtgctctaaatgcattgctcttcagaactggtgatcagtctagagacatagtacttgtccttgccacaaacaggc

SEQ ID NO: 138532 - DNA, 227 bp, Glycine max
cttccttgtcactgcccgtgtgtcgccgccatggccaccgtcaccacccaagcctccgccgcaattttccggccatgtacctcgaaatcgaggtttttgaccggctcttccggtaaacttaaccgggaagtgactatgcggccaatggggtgccctccttctgcctctttcaaggttgaagccaagaagggagagtggttacctggcttggcctccccaacttacct

SEQ ID NO: 138533 - DNA, 222 bp, Glycine max
attgaagccagcgagtgagtgagcgagccaggtagggttatcggtgttcccctctttgtgttcgttcgcgacgatggggtccatccccgatccaggcgagttgagcgagtagactcagccgagcttcgacgagttccagcgtcaaacctctctcatgaacagctgcaccctcctctggaaggagctctccgatcacttctcctccctcgagcaagacgtcaa

SEQ ID NO: 138534 - DNA, 225 bp, Glycine max
cttacaagtacaagtctcctcctcccccagtccactctccacctccaccacactactactacaaatcaccccctccaccttaccactactaggtagcactttctcttcacacccccacatggatgcatacagaaagtgtgaaaatgaaagtcatggagtgggaagatgcatctgcagcttgcagatccacaaagaagtataaatgtttgattattatttagaggg

SEQ ID NO: 138535 - DNA, 229 bp, Glycine max
taacaacaaaagccttttttttttaaaaaaaaaattcctttaaaaaatgaagaatcactatcttcttcgcagactttcttgtttgtgccttcacctcatacctaccttcagccaccgctgatactatcttcgacataaatggtgattttgtccgaaacggtggcacatactacatcttgccagttataagacgagacggaggtagaatagaattagcagcaacaggaaa

SEQ ID NO: 138536 - DNA, 231 bp, Glycine max
gcaaaagccaagcttctgaaagatttgggagttaacagagtcatagactatcatagtgaagatgtaaaaactgttctaagggaagagttccccaaaggtattgacatcatctatgagtctgttggcggtgacatgttaaacttgtgcttgaatgctttggctgttcatggacgactcattgttattggcatgatttctcagtatcaaggagagaagggttggacgccatca

SEQ ID NO: 138537 - DNA, 266 bp, Glycine max
tgggggtgccatcgatgatgctgctcgctacttcaaggatgctcatgacagggcacttactccttatgagtttgttgaaggtatgaaaaagaagggaattcgtgtggcaggaatagggcacaggatcaagaatagggacaacaaagataagagagttgagctgctacagaagtttgcacgaacacattttccttccgtgaaatacatggaatatgctgttcaagttgagacctacacactcacaaaggcaaataatttagttctta

SEQ ID NO: 138538 - DNA, 264 bp, Glycine max
agcttgttcctggagttctattcattgatgaggttcatatgctagatatggagtgtttttcgtatttaaatcgtgctttagagagctccctatctccaatagtaatctttgctactaatagaggaatatgcaatgtaagagggactgatatgaccagtcctcatggcatacctgttgacctgttggatcggttggtgatcattcgaacgcaaacctatggtcctgctgaaatgatacagattctagctatccgtgctcaagtag

SEQ ID NO: 138539 - DNA, 262 bp, Glycine max
cgtcttcatggttcacttggctacaatccctgtcactggaaccggcattaaccctgcaaggagtttcggaccagctgtgatcttcaacaacgacaaagcctgggacgaccaatggatttactgggttggaccgtttgttggagctgcggtggctgcaatctaccatcaatacattcttagaggttctgcaatcaaagctcttggatccttcaggagcaacgcttaattaaaaaaaaaaaaaatcaagtttctccactaccta

SEQ ID NO: 138540 - DNA, 263 bp, Glycine max
gtggagcatatcatacgggaacaaaatacatgggctgcatatgaaattttggagttgttctgtgaatttgttcttgcacgtgtacctataattgagaatcagagggagtgccccacggaattgcgagaagccattgcaagtataatttttgctgctcctagatgttcagatgtaccagacttattgcacatcaagaacttgtttaccactaaatatgggaaagaatttgtctctgcagtatctgaacttcgtcctgattcggg

SEQ ID NO: 138541 - DNA, 261 bp, Glycine max
gctactttcagcagggtctccgggtaaacgctttatgatgccacatgctaaagccatgattcagcagcctcgtattccttcctctgggttgatgcctgcaagtgatgttcttattcgtgcaaaggaggtgataattaacagggacaatctggttaaactactggccaaacacacgggaaattcagaggaaacagttgctaatgtgatgaagagaccatattatatggatgcaacaagggctaaggaatttggggtcattga

SEQ ID NO: 138542 - DNA, 261 bp, Glycine max
attgaaatcctgagcttccattgtgctcactcatctcttacaacgaaaccctcttcatcttgttctatctgtgacgagcatcatggcctcaagagcagtgttattgttggctatgtgtgtgcttccggcgatggttgtggccattcgcccagcaaagaaccctttttgcgtgaagggtcgtgtctactgtgacccttgccgtgctggttttgagacctcagctaccacctacattgctggtgctgagattatgttgcaatg

SEQ ID NO: 138543 - DNA, 265 bp, Glycine max
ataataatagtgcttccttggttttgcaagtttgtgtttcagtgtttggcaattttatgttttctaatctaattattcaatgtttgtgtctcaacatctgattatgtattggtattttgtgatttttgctttgtgtggtgtagttagatgccttgacgcatcctttctttgacgaacttcgtgatccaaattctcgcttgccaaatggccgattccttccaccactatttaatttcaaatcccatgaactgaaaggtgtcccagc

SEQ ID NO: 138544 - DNA, 263 bp, Glycine max
tgcagatccgaggagttaccccttagctttttctctttccttattctatttcaaacttccaccagtgatggcaggtttggctccagaaggaacacaatttgatggtcgccaatatgatgctaagatgagtgaattgctttccactgatgggcaagaattcttcacctcatatgacgaagtctatgacagctttgatgccatgggattgcaagagaatcttctgcgaggcatatatgcttatggttttgagaggccttctgcaa

SEQ ID NO: 138545 - DNA, 262 bp, Glycine max
ctcgagccgctcgagccgctcgagccgctcgagccgcttttgctaccttaacctattttgattatcctcactttcaatggctcaatcccatactggaaaaacctcttccatgacttcaatactcctcctgtttatgcttcttatcagtaatacaggcacaacaggtgcacaatctggtgtatgctatggaagagttggcaacaatctgccatcgccacaagaagtagtttccctttttaaacagtacggcttccaaaggatg

SEQ ID NO: 138546 - DNA, 260 bp, Glycine max
atattcctctctcattctcactataaacacaaaacccttcccatcctaattaaggtgaaaatgaaggcatcacccattgcttggttcactttggtggttgtgtttcttgtggctgaagttcaagtttcaatggcagtgacatgcagcccagtgcagctgagtgcatgtgtaagtgcaataacctctagcacccctccatcaaacctatgctgctccaagatcaaagaacagaaaccatgcctctgccaatacctcaagaa

SEQ ID NO: 138547 - DNA, 261 bp, Glycine max
cggctcgagcggctcgaggaaaccaacaacagttcttgcactgaggtttcacgatgttgctggaacttgcacttggtttgtttgtgttagctttgtttctgcacttgcgtcccacaccaagtgcaaaatcaaaagcacttcgccacctcccaaaccctccaagcccaaagcctcgtcttcccttcattggccaccttcacctcttaaaagataaacttctccactatgcactcatcgatctctccaaaaagcatggcccct

SEQ ID NO: 138548 - DNA, 261 bp, Glycine max
cagcgacaatgtctggtgtcacttgttgtttgaggttccctggtcagttaaactctgatctgcgaaagcttgcagtgaacctcattcccttcccgcggctccactttttcatggtgggatttgctcctttgacatctcgtggctctcagcaatacagagccttgagtgttccagagctcacccagcaaatgtgggattccaagaacatgatgtgtgctgctgaccctcgacacggccgctacctcactgcctcagccatgt

SEQ ID NO: 138549 - DNA, 259 bp, Glycine max
gatgatatgaggatacctttggatatgataatccacaagcttgttaaagcttacatttgctcgtcttcgttgcgcaaatctgctttacgggctcttgcaaagacattaacagtagctcagctagcttatctcagagatcaatttactctgttagggccaaacaaaagtggattaatttctatgcagaactttaagacggctgttttgaggagctctacagatgcctcaaaggattcacgggtcttagattatgtcagta

SEQ ID NO: 138550 - DNA, 257 bp, Glycine max
cgagttggttcggctcggggcgaacatgcgagtcatcgatattggaggtggactgggcatagattacgacggttccaaatcgtgtgactctgatatttccgttgagtacagtctcgaggattatgcagtcgcggttgttcacgcggttcagtgtgtgtgcgaccgaagtccgtgaaacacccagttatctgcagcgagagtgggagagccatcgtgtctcatcattcggtcttgattttcgaggcggttggcaccag

SEQ ID NO: 138551 - DNA, 261 bp, Glycine max
cggctcgagcggctcgagtgaagtcataagtcatctctcctctcttgtaaacatggcagccgatacggaaccatagaagatcataattgataccgaccctggcatcgatgatgctatggcaatattccttgctctacaatcacccgaggttgaagttattggactcacaaccatctttggaaatgtgtacaccactctggcaaccagaaatgccttgcatttgttggaggttgctgggagaacggatataccggtggcaga

SEQ ID NO: 138552 - DNA, 262 bp, Glycine max
ctctttcttctacactattcattcaacccatgccggtcaacgtgaggtgctgaaggtcaatcgtggtctttcgaaatggggaacgggagcagaagctactcggcgaaccggagcgactacaagcttctagaagaagtcggttacggcgccagcgccaccgtctaccgtgcaatctacctcccctacaacgaggaggtcgccgtcaagtgcctggatctggatcgctgcaatataaatctggacgacatacgtagggaggcgc

SEQ ID NO: 138553 - DNA, 261 bp, Glycine max
tgtgactcgttcttcttcgtcgttatcttcttcttttgttgtttgtgtgtttgttttttctctcacctgaaaatgtcttgctgcggtggtaactgtggttgcggaagcgcctgcaagtgcggcaacggctgcggaggctgcaagatgtacccagactctgagctacaccgagtcaaccaccaccgagaccttggtcatgggagtggcaccagttaaggctcaattcgagagtgctgaaatgggtgttcccgctgagaacga

SEQ ID NO: 138554 - DNA, 260 bp, Glycine max
agttaatttgcgtctatattcattttggcatcgaggttgaatctcatcggagagagaaaaaccataaccatgtctggaagaggaaagggaggcaagggtctcggaaagggaggagcgaaacgacaccgtaaggttctgagggataacattcagggcataacgaagcccgcaattcgccgtctcgcgagacgtggcggcgtgaagcgtatcagtggtctcatctacgaagaaacccgcggtgttctcaagatcttcctcga

SEQ ID NO: 138555 - DNA, 252 bp, Glycine max
ggaccctctacctgtgccttgtgatttagagacattagaaggtcatattgagccgtctactgtgtggaatgctaagagtgatggaagcattagttgtgcgccaaaggagttggggggttgcggtagtgctgtattggagctgagacgcatcctcccagatgggtggatatctgacttggaagcctcagctcgcaatatgctgaaaatttgggaaattgagcacacaactcttcagcaaaaagaagcagtatc

SEQ ID NO: 138556 - DNA, 260 bp, Glycine max
tctcgagccgaatcggctcgagcttatcactcttcactcttcattagtcatcaacacttagacccaacaagtgtaaatgaagctagtggtggtgaagttggatttgcacgatgacaaagcaaagcagaaggcgatgaagtcggtttctagcatatcaggcatctattccatctccatggacatgaaggagaagaaactgactgtagagggtgacataaaccctgtcaatgtggtgagcaaattgagaaaaacctggcacc

SEQ ID NO: 138557 - DNA, 255 bp, Glycine max
gtttggagatggagctgctgcagtcattgttggttctgacccaattccacaagttgagaagcctttgtatgagcttgtttggactgcacaaacaattgctccagacagtgaaggtgctattgatggacaccttcgtgaagttggactcacatttcacctcctcaaggatgttcccgggattgtctcaaagaacattgataaggcactttttgaggctttcaacccattgaacatctctgattacaactccatctt

SEQ ID NO: 138558 - DNA, 259 bp, Glycine max
cttggatagtaattaacctcactcaaactcgggatcacagaaaccaacaacagttcttgcactgaggtttcacgatgttgctggaacttgcacttggtttgtttgtgttagctttgtttctgcacttgcgtcccacaccaagtgcaaaatcaaaagcacttcgccacctcccaaaccctccaagcccaaagcctcgtcttcccttcattggccaccttcacctcttaaaagataaacttctccactatgcactcatcga

SEQ ID NO: 138559 - DNA, 260 bp, Glycine max
caggaacagttatcagaacaactgtttcgagatggtggcattccattgccagtattttctgagtggtggctgtctaaacaaaaattctcagaaattgattcttttattctctcttcatttcgtggggcaagatgccaagggtgcaatggtttgagcatcagatatcagttaccatataatgaagatttttccctagcagatgtttttggacttcttgaaagaaacagaaatagattagggattgcagagtacagcatcag

SEQ ID NO: 138560 - DNA, 259 bp, Glycine max
ctgaaattgtgctctcaattgaagcaatggaagtaacagctgctccagtgccttatgtccaagaaattgcaaaggaggcattgaccatagtgcctgagcgttatgttcgaccagttcatgaacgtcctatattatctaactctacacctttacctgaaattcctgtcattgacttgagcaaattgttgtctcaagaccacaaggagcatgaactcgacaggcttcactatgcatgcaaagaatggggtttctttcagct

SEQ ID NO: 138561 - DNA, 258 bp, Glycine max
tgaagtgattcgtttctcgactaagtcaattgagagagagattaactctgtgaatgacaaccctttgattgatgtctcaaggaacaaggcattacatggtggcaatttccaaggaaccccaattggagtctctatggacaacacgcgtctggctcttgcatctattggcaaactcatgtttgctcaattctctgagcttgtcaatgatttttacaacaatgggttgccttcaaatctcactgctagcagaaatcctag

SEQ ID NO: 138562 - DNA, 258 bp, Glycine max
atataacatagtcctcctcctttgtttttccacatcacatcgcagatagagagagagatccatcgatcaattaatttccaatggccgatcagctcaccgacgaacagatctctgagttcaaggaagcctttagcctcttcgacaaggacggcgatggttgtattaccaccaaggaacttgggaacgtgatgcggtcgcttgggcagaacccaactgatgctgagctgcaggacatgatagatgaggttgatgctgatg

SEQ ID NO: 138563 - DNA, 253 bp, Glycine max
ctttagttcttcagtaatttattgtgggattctattctaagattctgagaatgtctagctgtgggtgtggaagcagctgcaactgtggcagcaactgcggttgcaacaagtactcttttgacttgagttacgttgagaagacaaccacagagactctagttttgggtgttgggcctgtgaaggcccaattggagggtgctgaaatgggtgttgcatctgagaacggtggctgcaactgtggatcaagctgcac

SEQ ID NO: 138564 - DNA, 253 bp, Glycine max
gtccagagccataggtgagtaatccacaaacttttttttttcttttaaaatacacgcgcggcgtattatagcagagtggacggttctggattattaatgttgtggtcgtgttgtgcaggggacaattatctgaaaccgtatgtaatttcggaaccggaggtaacggtaacggagcggagtgacaaggatgagtgtttgatactagggagcgatgggctttgggacacggtgcagaacgacaccgcatgtaagg

SEQ ID NO: 138565 - DNA, 263 bp, Glycine max
cttacttgaagttgtgctattcaatcccaaagccacagaaataatattattcagattttagagactgaaaacatcatggccaacctcgacctcgacccattccagacaagcatcttaatcctcgtcccaatagcactcctggtggcgttactatctcgtactcgtcgaagagcaccctacccaccaggcccaaagggtttaccaatcataggaaacatgttaatgatggagcagctaacccaccgcggcctcgccaacctggc

SEQ ID NO: 138566 - DNA, 256 bp, Glycine max
caaaagggtatgctgtggtcactggagcaaataagggaattggatttgcaatatgcaagcaattggcttctaatgggatcactgtggtgttgacagccagagatgagaagaggggtcttcaagctgtcgagaaactccaagagcttggtctttctggccatgtgggttttcatcaacttgatgttacagaccctgcaggaataagatcacttgcagatttcatcaggaacaaatttggaaaactagatatcttggt

SEQ ID NO: 138567 - DNA, 257 bp, Glycine max
attcctgagactgagtctgcccataccataatttacctcatagtgtcgacatggtttgcgaggaagagttgttgattgaaaaagtgtgctcgatctatgaacaaatctcaagcctcgagagtctcaaaccttgcaagaatgtcgacatgcttttcaccaaactagtcctgacatgcatacccccaagcccaatcgaagtcacaaagctaaacaaaaccgttcaagacattcgatcccaccttataaaactatgtggt

SEQ ID NO: 138568 - DNA, 252 bp, Glycine max
ttgagattaatggaaaagaagcaggtcgtattgtaatgggtctttatgggaaggctgttccaaaaactgcagaaaacttccgagcactttgcacaggggaaaagggaactggtaaaagtggaaagcctctccattacaaaggtagctcattccatagaattattcctagctttatgcttcaaggaggtgattttacacaaggaaatggaatgggtggagaatcaatttacggagagaagtttgctgatgaga

SEQ ID NO: 138569 - DNA, 258 bp, Glycine max
gtttgatcctggctcagaaggaacgctagctatatgcttaacacatgcaagtcgaacgttgttttcggggagctgggcagaaggaaaagaggctcctagcgtgaaggttgcttgtctcgcccaggaggtgggaacagttgaaaacaaagtggcgaacgggtgcgtaatgcgtgggaatctgccgaacagttcgggccaaatcctgaagaaagctaaaaagcgctgtttgatgagcctgcgtagtattaggtagttggt

SEQ ID NO: 138570 - DNA, 276 bp, Glycine max
gtagctcggatattcggctcgaggtcttattgattatgatatgctggagaaaactgctactctgtttcgtccaaaactcattgttgctggtgctagtgcttatcctcgggacattgactaccctcgtatgagaaaaattgcagatgaagtaggtgcttttcttatgatggatatggctcatataagtgggcttgttgctgcatctgtactttctaatccctttgagtattgtgatattgtgaccaccacaacccacaagtctttacgaggtccaag

SEQ ID NO: 138571 - DNA, 254 bp, Glycine max
ctccctttcagtattattaatttctatagagctgaagaaattaatattaatcaatcaatcaaaatggggttgtgcaaggtttcatttcctgtattatgtgtgttggggttggtcatgattgtgagtcacgttgccaatgctcaagactcaccagcagattacgtcaatgcacacaacgctgcaagatcagaggtgggtgttcaaaacttggcttgggatgacacggttgctgcttttgcacagaactatgctaa

SEQ ID NO: 138572 - DNA, 253 bp, Glycine max
agaagagagatggatccagacgcgttggcaaaggcattcgtggagcactactacagcaccttcgacaccaacaggaacggcttagcgaatctctaccaggagggttccatgctcactttcgaagggcagaagatccaaggcgcttccaacatcgttgccaagctcacctccctcccttttcagcagtgccaccactcaatctccaccgtcgactgccagccctccggcgtcaacgccggcatgctcgtcttcg

SEQ ID NO: 138573 - DNA, 253 bp, Glycine max
cattgacacacattttggctcttttgaagcattagtacaaaaagttaatgcagaaggtgctgcactacaggggtctggatgggtgtggcttggtctggacaaagagttgaagaggcttgtagttgaaaccactgccaaccaggacccactggttactaagggaccaaatttggttccaatgcttggtattgatgtttgggagcatgcgtactacttacagtacaagaatgttagaccagactatctgaagaac

SEQ ID NO: 138574 - DNA, 251 bp, Glycine max
gaatatattacattaagaaagcccaaagaaagaagaagatggcgtccgagtgcaaaggtaagagctcatggcctgagttggttggagtggaaggaacggtggcggtggctacaattgagagggagaatcctttggtggatgctaacactgtgcttaaaggatccatcgtcaccgctgattttcgatgtgatagggttcgggtttgggtcaccaaacatggaattgtttatcaggctccaagaattggataa

SEQ ID NO: 138575 - DNA, 251 bp, Glycine max
gccctgtagattcgttcccatggttcgatccttcccagtaaaacgcggcgtgttcgaattctgatcgcttttacgcgagaaagggggaacaccctctaagcctaagtattcctcaatgaccgatagcgtacaagtaccgtgagggaaaggtgataagacacctatttatggagtgcaatagagaacctgagatccgatgcgaacaatcagtcgaaggagcttagagcctttacttgatatttagtaaagcg

SEQ ID NO: 138576 - DNA, 250 bp, Glycine max
cgcaccagtttcaccgcacgaatatcttgttgtttggagcgatccgagaaaaactctgtaaacatgttggtttaccaggacctccttacaggtgatgagcttctctctgactccttccgttacaaggaaattgagaatggaatgctgtgggaagttgaggggaagtgggttgttaaaggagcagttgatgtagacattggtgcaaacccttctgctgagggtggaggagaagatgagggagttgatgatg

SEQ ID NO: 138577 - DNA, 249 bp, Glycine max
cttgcttccaagatggttctgctagagaagctctgggatgacgttgctgctggccctcaacctgagcgtggccttggcaagctcagaaaactcaccaccctcaaaactattgatgaaggagacagtagcaagctgcagaagacgttgtcgatgccgtcgacaccgacaatcccgatgactcccacgactccaacgacaccgggatccgcgcgtaaagctgacaacgtttggaggagcgtcttccatcct

SEQ ID NO: 138578 - DNA, 248 bp, Glycine max
aaaataggtaggttttggtgtgccagctgtgtggttttggcagattttccgtgaagcgtaagttggaaagtgaatcatcatcatgttttgggggaagtaaagggagcgtgttgttgagagtgagagaccctttgttggtgaataaatggttgttgtggtatctatcccctggaagatgctttgtagctgttacatgacatttaatacctttgtatgattaagtaaagtacagactactgtttgtactg

SEQ ID NO: 138579 - DNA, 252 bp, Glycine max
gaggaatatggcttccttaagctcctcattagtgatgctccttgcagctctaattctatcccctcaagttcttgctgactatgagaagcccccaatttacaagccacctgtttacacaccgccagtttataagcccccagtagttaaaccaccagtgtacaaacctccagtttacaagcctccagttgagaaaccacctgtttataagcctccagtttataagccacccatttacaagcctccagtgtataa

SEQ ID NO: 138580 - DNA, 254 bp, Glycine max
gttgcagtagacagtcctgttgggcgtttgggcctcagtgtttgctatgatttgagatttccagagatgtaccaattgctgcgtttccaacatgaagcacaggtactactggtgcctgcagcattcacaacagtaacaggtgaagcacactgggagattcttcttcgtgcccgtgcaattgagactcaatgctatgtcattgctgctgcgcaagctggcaaacataatgataaaagagaaagctacggtgacac

SEQ ID NO: 138581 - DNA, 255 bp, Glycine max
caggactgtttggcatctatgcaagcactagccctgattttgtgccaaaaactgttgatatagcagccaaagaactaatagcaattgcttcccctggacaagttacacaggtacagcttgaccgagccaaaaaatcacaaagtctgcagttctaatgaatctggaatctagaatgattgcatcagaagatataggaaggcagattttgacttatggagaaaggaagcctgtggaacagttcttgaaggccgtaga

SEQ ID NO: 138582 - DNA, 253 bp, Glycine max
agtttttctaatccatcaaataaagaccagcttgaaggaagaatgggcagcatcaaggaggatccatctctgaaacatattttggaggagatagagactggcggtcctgctgctatgatgaggtactggaataagaggaggttttgcagaagttgggacaagccatgggtcttgccaattcgggagatgcaggtgcctctgctgaaaattctggggcagatgagaccgaagatttgggaaatgaagatgaatc

SEQ ID NO: 138583 - DNA, 252 bp, Glycine max
caatagtgagtgagatcgtgaagaaattagtttggaaatggcagtggcaggttgtcagaagcttctggaactgagcaccaagatcgtcgctgttggcagaaactacgctgctcacgccaaggaattaggcaagccgttcccaaggagccggtgttgtttctgaaaccgacgtcgtcttacttgaaaaacggcggaaccatccaaatcccacacaacgagggcttactgcatcacgaggttgagctcgctgtg

SEQ ID NO: 138584 - DNA, 238 bp, Glycine max
caatggcgagcgctcccactccacgcgaagagttcgtgtacatggcgaagtggcggacaggccgagcgctacgaggagatggtggagttcatggagaaggtctccgcctccgccgagagcgaggagctgacgtggaggagcgtaacctcctctccgtcgcctacaagaacgtgatcggcgctcgccgcgcctcctggcgcatcatctcctcaatcgagcagaaggaggagaccgcggc

SEQ ID NO: 138585 - DNA, 243 bp, Glycine max
gtgctaacctccttatatgattatatcccacgcatgcggagttctgattcagaggaagtatcagaaaactcagaaaattctctatctaacaaaaggaagtataatatatcggtgtctctgagtggtcacttattgatcagtttctgataaatgaggccttagatattattgaagctgcaggaggctccttccacttagtcaactgccatgtgggtcagagcattgaagccgtatcattctctg

SEQ ID NO: 138586 - DNA, 255 bp, Glycine max
cagactgtggagctttttctatgggatgtccccttggcagtttatactgatggttgcagcaagttcagttggagaggagctcttctacagggctgctgttcagggggcattggctgatatatttttacgaggcagtatcttataacagatgttcaaggaatggcatcattgaccggtgtgctgcctccatttgttccatttgctcaagcatttgctgctgttcttacagctgtccttactggttctctctattac

SEQ ID NO: 138587 - DNA, 248 bp, Glycine max
ctcgagccgcgcaaaaactggaaaggaaaatcgtgccttcattgcagaagctggggcgattccgtatcttcggaatttactttcatcacccaatgcggttgctcaggagaattctgtgactgcgctgctcaatttgccatttttgacaagaacaaaagtaggattatggacgaggaagggtgtcttggatcaattgttgacgtgttgagatttggacacaccacagaggcaaaggaaaatgctgctgc

SEQ ID NO: 138588 - DNA, 243 bp, Glycine max
ctccattgtccattgttattaccttctttgtgttcttgctcttgcattggctagttaaaacttacaagcaaaaatcgagtcacaagttgccccctggcccatggaggttacccatcattggtaacctccatcagctagcattagcagcttcacttcctgatcaagctctccaaaaacttgtccgcaaatatggacctctcatgcacctccaactaggtgaaatttcaacgacttgtgtgtcct

SEQ ID NO: 138589 - DNA, 216 bp, Glycine max
gatgtgtacaagattggaggtattggaactgtgccagtgggacgtgttgagaccggtgtcttgaagcctggaatggtggtgacttttgcaccaactggactgacaactgaagtcaagtctgtggagatgcaccatgatctcttacagaggcacatcctggtgacaatgtgggattcaatgttaagaatgttgctgttaaggatttgaagcgtggtt

SEQ ID NO: 138590 - DNA, 245 bp, Glycine max
tttgctttcttcttcttctattgtcacacatacacatctactccttccctcatggctgagcaatcttccaagtccatttacgatttcacagtcaaggacatcagtggaaatgatgtgagtctgaataattacagcgggaggttctactgattgtgaatgtcgcctcacaatgtggtttgacacagacaaattacaaagaattgaatgtattgtacgagaagtacaagaatcaaggatttgaaatc

SEQ ID NO: 138591 - DNA, 249 bp, Glycine max
attggggatgcctccaatgcctccttttggaatgccacccatgggcagctactgacatataagttctcggcaatgaactcaagtgtataccgagagcagcgtagaacttgggagttttcaaacattttctctggggttttaatgcagtattctttccttgcttctaatggaggaggaggttcagttcaaaataatttcaagtttctgttggggggtttgtgccatatttttgtaatatttttctttata

SEQ ID NO: 138592 - DNA, 238 bp, Glycine max
tagggacggagggtacacgtgactcaggaggattttgagatggctgtggccaaggtgatgaaaaaggagactgaaaaaaacatgtcattgcggaagttgtggaagtgatttttatttcatgtttgtggtgcaattattatcctgcgaagatgggcagcgaacacaccttagggttatttcaatttacagtggcattggatttcattttgcttaagtttaccaagttatgtaccgaatc

SEQ ID NO: 138593 - DNA, 242 bp, Glycine max
taaattctctgtgttgtgttgtgtacttgtgttaattgtgttgttgttgtaggaaatttaagtgaagagagaatgatgatgaagtctgctatgtgtgcattggtgcttgtggcactggttgtggttgaagtgggcccatggctgaggctgcggtgacttgcaacccaacacagttgactccttgtcttccggcaattaattcaggttctgcacttcgagtgcttgttgccagaagctgaagg

SEQ ID NO: 138594 - DNA, 249 bp, Glycine max
gcctctgctaaagggagaaaaatggggttctcctcctttctgggtcgtgttctctttgcctccctcttcatcctctccgcatggcagatgtttaatgaatttgatgccaatggtggacccatctcgaaagagttgttcccaaactcagtgtggtgaagaataatttatcctctaaattgggggtagcgctaccagatattgatgcccggcaattcattgctaccatcatatttcttaagggggttggag

SEQ ID NO: 138595 - DNA, 247 bp, Glycine max
ttctaaagattatgattctaagtgttctaaagaatacacaccgtccagttaaattctggttcataaagaactacctgtgtcctccttttaaggatctgattcctcacatggctcaagaatatggttttgaatgcgactaatcacctacaaatggcctacatggttgcataagcagaaagaaaagcagcgaataatttgggcatataaaattttatctcttgatgtcatctttgccctttccttggag

SEQ ID NO: 138596 - DNA, 246 bp, Glycine max
atcaccggtttacaagcctccagtttataaaccagctgtttacaggcctccagtgtataaacccccagttgaaaaaccacccgtttataagccaccagtttacaagccaccagtgtagaagcctccagtgtacaagcaccagtttagatgccaagtgtgtacaaaccaccagttgagaagccaccagtgtaccagccaccagtatgtaagtcacttgtacacaagccactatgcacaagtcacagt

SEQ ID NO: 138597 - DNA, 261 bp, Glycine max
gcgctagccaatgtcctcttggtccttctcttgaacttgagcactttgctcaatgttcttgcttgtccctattgcccttacccatctcccaagcgctctccaaaaaagcctcccattgtgaaaccaccagttcaaaacaaccaataccatgtccaccacccaagtcatctccaaaaccaccccatgtacacccaccctatgtcccaaaacctcctcactaccctaaaccaccagttcatccagatccaccccatgtcccaa

SEQ ID NO: 138598 - DNA, 251 bp, Glycine max
cccttttcctaacctcaccggcgggtgctcgtactgctactgtcatgcctagaagggcggcggtcatcgtgtcggcggcgacggcggagacgccgaagaagaagggcgaatcgaaagggttcgtggaagaatgaggttcgtggcgatgaggctgcacacgagggaccaggccagggagggcgagaaggaggtcaagcagctcgaggagaaagccgttaccaagtgggacccatccgtcgaagggtacctga

SEQ ID NO: 138599 - DNA, 247 bp, Glycine max
gtcaataaccagtttgtcagggttttttgaggttactcctcgatgccttccagctatatatcctgtttgtatgaacttgacagctatgaaccttagctatgcagcagggattcagagcagagagctaaaaaactaatttgccgctgtgggaaacttcagcgattatggataatggattgcattggagactttggactacatgttgtggattccacatgtaaagatttgcaagaactaagggtttttc

SEQ ID NO: 138600 - DNA, 258 bp, Glycine max
cagggtggttgctatgccaaatgcattgacctctcacgggagaaagagccagatatttggaatgcaatcaggtttggcacagtgttggaaaacgtggtgtttgatgagcacgaccgagaagttgattactctgaaaatccagttacagaaaatactcgtgcctgcttatcctatagagtacattccaaatgcaaagttaccttgcgttggccctcatccaaagaatgtcatacttttggcatgtgacgcatttggggt

SEQ ID NO: 138601 - DNA, 237 bp, Glycine max
atacgccggatctgctaaaatacgcttgatccatatgggcctcctcgaccacttgtgggacgacaccgtcgccggcccaaggccggaaaacggtctcggcaagctccggaaacaccacaccttcactttccgactagctccggcaaggaagcggagggcgggagcgtgagatcgtacggtgacgattcgtcggaggaagcgactagagtgacgcgtagtatcatgatcgtgaaacgc

SEQ ID NO: 138602 - DNA, 206 bp, Glycine max
atctgattctttctctctcccttagtcaaagggactcattgttcttctcccaggttatttagaaaagcaaaatggtgaagatttgctgcattggtgctggatatgtggggagtcctactatggcagtcattgcactaagtgcccatccattgaagttgctgttgttgatatctctaaatcccgcattgcagcctggaacagtgacc

SEQ ID NO: 138603 - DNA, 208 bp, Glycine max
gactctggtggatgtggctcatgctgctattagaaatgatcccagaatcaattggctcgccaatccagtgcacaagcacagagatctgcgtgggctcacctctgctgggagaagcaacaggggtttacgtgcataggacatgtgtaccacaaagcacgtccatctcgcagggctacctggacgtgatacaacaccctgtctctccgcc

SEQ ID NO: 138604 - DNA, 250 bp, Glycine max
catttttctctcgctctctgccttccatcaacctcgcgatttcccttcccaagatagtagaagatggcagacgctgaggatattcaacctcttgtttgtgacaatggaacaggaatggttaaagctggtttgctggagatgatgccccacgtgctgtgtttcccagcattgtaggtcgtcctcgtcacactggtgtgatggttggcatgggccaaaaagatgcatatgttggtgatgaggcacagtctaa

SEQ ID NO: 138605 - DNA, 251 bp, Glycine max
taaaaatgttcttcgcaaagagccgatgagcaaggacatagctgaggatgatgcattcttctttaatgacaaattcaccagcaagttctttaaggtaaagatagggactgttgttgcacagagggagtctgaaccagaaaacctagaaactcggcaaagagtggaagaagacagaaagccacagatcgaagcagccattgtgaggataatgaagtctaggcggactctagatcataataatattgttgctg

SEQ ID NO: 138606 - DNA, 247 bp, Glycine max
ttaacatgacttccttaagctccttagtgctgctccttgcagctctaattctattccctcaagttcttgctgactatgagaagcccccggtgtacaagcctcccattgagaagccaccactttacaagatccaattgagaaacctcctgtttataaacctccagttgagaaaccccccatttataagcccccagtagagaagccaccagtgtacaagcctcctgtagagaaacccccagtttacaag

SEQ ID NO: 138607 - DNA, 245 bp, Glycine max
tgagggtcaagctctttgttgaatagtgtttgtgttgcctttatctgcaacttttaattgaaccaatcctaccctttttatgaacatatgaaaagatcggttttttgtggttcctccactcattgtgttgaagggtctcgcgaaatcaatcaagttttgagacctgttttctggtagaggtgtaagtacaagatcttaataataaggattttgtacaaaggaaaagttgagaataatctggggga

SEQ ID NO: 138608 - DNA, 224 bp, Glycine max
gagatggaaggcatagtacacaggacagttgaagtgaatggcataaaaatgcatgttgctgagaaaggtgaaggtcccgtggtcttgttcctccacggcttcccggagctctggtactcctggcgccacagattctggctctcagcaacctcggctaccgcgccgtggctccagatctccgcggctacggagacaccgagcaccagttcaatcagcagctacac

SEQ ID NO: 138609 - DNA, 234 bp, Glycine max
cagagatcggaacgtggaactgcggaaaccggaatatctcacttctcagatcagatcaatccgacgtcgttgcagttataatggctccattcagcggcgatgagacggcaccgtttttcggcttccttggagcgcagctgccctcgtcttctcctgtatgggagctgcctatggcacagcgaagagtggcgtgggcgtggcttcgatgggtgtgatgagacggagctggtgatg

SEQ ID NO: 138610 - DNA, 244 bp, Glycine max
gggaatcgtgagtttttaaatgagataggcatgatttctgctctgcagcatcctcatcttgttaaactctatggatgttgtgtggagggagatcaactattgttggtatatgagtatatggaaaacatagtcttgctcgcgctctatttggcgccgaagaacaccacataaaattggactggacaacaagatacaagatttgtgttggcgattgctagaggtttggcatacctccatgaagaat

SEQ ID NO: 138611 - DNA, 230 bp, Glycine max
caaatcatcacacacacatactaagaagcaacaattcttctacaatggatctcctccttctggaaaagaccctcataggtctcttcctcgctgcggtggtcgccatcgccgtctccaccctccgcgccggaaattcaagctcccaccgggcccactccccgtcccaatcttcggcaactggctccatgtcggcgacgacctcaaccaccgcaacgctcaccgatttggcc

SEQ ID NO: 138612 - DNA, 240 bp, Glycine max
ttcaaaacatactcctctgttctctctgtttctcttcaatcttcctgaaaaaacaaaaacacgaaaaatcatccaccctctcacattctctctctctctcctttcaactaatatggcaattgaaaacaagacaacactgtcagagaaatcaagccaaagaacaggagaatcatgggtgctggaggccctgatgatgacgacaataggtggccaccgtggttgaagccactgctgaaagag

SEQ ID NO: 138613 - DNA, 241 bp, Glycine max
ttgagattaatggaaaagaagcaggtcgtattgtaatgggtctttatgggaaggctgttccaaaaactgcagaaaacttccgagcactttgcacaggggaaaagggaactggtaaaagtggaaagccctccattacaaaggtagctcattccatagaattattcctagctttatgcttcaaggaggtgattttacacaaggacatggaatgggtggagaatcatttacggagagaatttgc

SEQ ID NO: 138614 - DNA, 250 bp, Glycine max
tttggaacccttctacgtgttctccattccctctctcactcctccatctacgtttcttaaatcatttccttctttctctctttctttatcttctcattttcctcattacactcttttttttctctcaactttctcttattaaccatagttcacatattatatcatcacatatcatagtgatatattatatcatatcacaatgtgtggcatacttgctgtgcttggttgctctgattcatctcaagccaaa

SEQ ID NO: 138615 - DNA, 245 bp, Glycine max
gccatgtccatgcatcgctacctgaggaagattattgggaagctgtttggccaaacactcccattcccactgcactgcgagagcttctaaagcctctccctgcaggtgttgaaatcgatgaactccctaacaaattgatgatacacagtacccaaaaacattcttctataaagaagaccttcatccaggcaaaacaatgaaagtacaattcaccaagcgtccctatgcacaacttatggtgtata

SEQ ID NO: 138616 - DNA, 196 bp, Glycine max
cttcgagtttcacagccaagtcgtaaaagggtttcaagggatggaaaacatgcagagcttctggcaattgggtgatgaactccgtgggcactcaaaagcatcggaggatcacaagtggttaatggttcctcgaaactggccgaacagacaagattgaagggggagcgtgtgaacaaccttgatctttcaaagggac

SEQ ID NO: 138617 - DNA, 244 bp, Glycine max
tgccgttcttgctgttggatattgttcactatctggtaagttgtaccacaagtgtcactagtggtagcacttcccaggatgtgaaccatgccgttcttgctgttggatatggagttgaaaatgggtcccatattggctcataaaaaattcatggggagaaagctgtggtgaaaatggctacttcaagatggaattggggaagaacatgtgtggtgttgcaacttgtgcacttatccattgtggc

SEQ ID NO: 138618 - DNA, 239 bp, Glycine max
tccgtgtttgacctgttatagtaaacagtgatggctgaaagggacttgaggcttttgggtgcttggttcagtccatttgccctgagggtgcagattgcccttaacctcaagggtttggattagaggttgttgaagagactttgaatcccaaaagtgaattgcttcttaagtcacaccctgtgcacaagaaaatcccagttttcttccatggagataaagtcatatgtgaatgtgcaatc

SEQ ID NO: 138619 - DNA, 228 bp, Glycine max
ttccaatatattccattctctctgtgtatttccctacctctcccttcaagatgcagatcttcgtcaagaccctcaccggcaagaccatcacccttgaggtggaaagctctgacaccatcgacacgtcaaggccaagatccaggacaaggaaggaatccccccggaccagcaacacctcattttcgctggaaagcaacttgacgacggccgtacccgtgctgactcaca

SEQ ID NO: 138620 - DNA, 240 bp, Glycine max
tggagccctttgctctgcatgtctctcttcccacaaagaacacagaataattcagataaggaggtcttcgtaccatgatgtgataagggtgtctgagatacagaaatttctggacataacaggttccaaacttacattattaacagtgccaagattgtgttcttaaatgaaaggccccaacctaggcctggaaaaggggtcaccaatacctgccaagtctgtgagcgcagctccttgatt

SEQ ID NO: 138621 - DNA, 247 bp, Glycine max
aagcttatggcctggttggaatggcagcgactcttgcaggagtttgtcaagtaccacttactgcagttttgcttctgtttgaattgacacaggactatcggattgttctaccacttcttggagcagaggcttgtcgtcatggatttcatctgtacagacaaaaagaggagatgatggaggggcaaaaaaaattgagttagaaaactcaaattctcctttacttcgagaaacatcttctcgtagttca

SEQ ID NO: 138622 - DNA, 243 bp, Glycine max
gtttataagcgacccatttacaagcctccagtgtataaacctccagttgaaaaaccaccggtttacaagcctccagtttataaaccacctgtttacaagcctccagtgtataaacccccaattgagaaccacccgtgtataagccaccagtttacaagccaccagtgtacaagcctccagtgtataagccacaagtgtacaagcaaccatgtacaagccacagttgaaaaaccacagtatagc

SEQ ID NO: 138623 - DNA, 226 bp, Glycine max
gtaaggtatctctgtaccaagagctcatgtcctgataattttgtaccaaaatactccttctggaggcaagaattatgaggctcataggtgttgggacgatatatttgatgcaatcactaatgctaacacttcatatacattactggttggtctgtttatactgaaatttccttggtgagggattctaggaggccaaagcctgggggagaccaaacacttggtgagc

SEQ ID NO: 138624 - DNA, 269 bp, Glycine max
gtgccacgtcaagtggatgaacacatgtttataacttttgggcttagctttgacatatgtcgcagtgatacaggagtttgtcctgggccagtacccttattttctgcaaacatgaacaacgagtcctttgtgttgccacatggcaaaggggtatcaatgcttgaagcgtttttccggaacgatgttactggggtgtacactagagattttccggatcagcctgcggttgtgtttgactttaccaacccaaacataacgtcgtcgccaga

SEQ ID NO: 138625 - DNA, 266 bp, Glycine max
ctgctattgatggacaccttcgtgaagttggactcacatttcacctcctcaaggatgttcccgggattgtctcaaagaacattgataaggcactttttgaggctttcaacccattgaacatctctgattacaactccatcttttggattgcacaccctggtgggcctgcgattttagaccaagttgagcaaaagttgggtctcaaacctgagaagatgaaggccactagagatgtgcttagtgaatatgggaacatgtcaagtgct

SEQ ID NO: 138626 - DNA, 264 bp, Glycine max
ggaaaccctagctggataggtcaaacatcatcatgtcggacgaagagcaccatttcgagtccaatgcagacgccggtgcctccaaaacctaccctcagcaagccggtaccattcgcaagaacggctacatcgtcatcaaaggacgcccctgctaggttgttgaagtttcgacttccaaaactggtaagcacggtcacgccaagtgccactttgttggaattgatattttcactgccaagaaacttgaggatattgtgccctctt

SEQ ID NO: 138627 - DNA, 261 bp, Glycine max
cgaccagcactcaaggagcatatgcagtattgcatgaaccatccagaagaaatgagtaaactatcaaaattgaaggctcaaataactgaggtcaaggggataatgatggaaaatattgagaaggttttggatcgtggagagaagattgaactgttggtggacaaaacggaaaacttgcagttccaggctgacagcttccagaggcagggcaggcagctgagaaggaagatgtggctgcagaatctccaaatgaagctgatg

SEQ ID NO: 138628 - DNA, 260 bp, Glycine max
ggccaacaaggtgcttatggaaaatgaaacttgggagatgactttgtatcagaagctagatttctccattgatgacattgtcatgaatttgacatcagccaatgtgattggcactggaagctccggagttgtgtacaaagttacaattccaaatggtgaaacattggctgttaagaagatgtggttagcagaagagtcaggagcattcaattctgaaattcaaacattggggtcaataaggcacaagaacatcatcaggc

SEQ ID NO: 138629 - DNA, 263 bp, Glycine max
gcttgcaactgatgagcttgattctgtatctaccgccaaggttgctttagctgaaacagaggtccgaaaaattcccaatgaaactgctaagcatgcaaatggtgaacatcaagcagaagaaaatagtaatgacctcatatgggctgatccaggttcatgctgttatgcactgtatgcaaagttgaaccctgatacagttctcttgcatcaatcacctttggcccttgcgaaagctttaaagaactcggtggaattggacgggt

SEQ ID NO: 138630 - DNA, 266 bp, Glycine max
ctttcaatggacagaaaaatggaaattacagcaactgttttaagatctttctctgatattttttatataatccatatcattttccaatttcgtactggatttattgctccctcttctcgagtatttggaagaggtgttttggttgaagatgcttgggcaatagcaatgcggtacctatcatcatacttcttaattgacattcttgccgttcttcccctcccacaggtggcaattttaattatcattccaaagttgagcggctctga

SEQ ID NO: 138631 - DNA, 264 bp, Glycine max
cgttgttgtaactcgttcttcttcttttgttgttctgtgtttgttttttctctcacctgaaaatgtcttgctgcggtggtaactgtggttgcggaagctcctgcaagtgcggcaacggctgcggaggctgcaagatgtacccagacttgagctacactgagtcaaccaccaccgagaccttggtcatgggagtggcacctgttaaggctcaatttgagggtgctgaaatgggtgtgcccgctgagaacgatggctgcaaatgtg

SEQ ID NO: 138632 - DNA, 259 bp, Glycine max
acttggaacccttctacgtgttctccattccctctctcactcctccatctacgtttcttaaatcattttcttctttctctctttctttatcttctcatttttctcattacactcttttttttttctctcaacttttctcttattaaccatagttcacatattatatcatcacatatcatagtgatatattatatcatatcacaatgtgtggcatacttgctgtgcttggttgctctgattcatctcaagccaaaagggt

SEQ ID NO: 138633 - DNA, 262 bp, Glycine max
gttatgaacttctacaaggaatcatgccctcaggctgaagacatcatcaaagaacaagtcaagcttctctacaagcgccacaagaacactgctttctcctggctcagaaacatcttccatgactgtgctgttcagagttgtgatgcttcactgttgctggactccacaagaaggagcttgtctgagaaggaaacagatagaagctttgggttgagaaatttcaggtacattgagaccatcaaagaagctttggaaagggaat

SEQ ID NO: 138634 - DNA, 258 bp, Glycine max
gctcgtgcctctagggttatcatatctccatttccatttcctctctctcagtttccaagaatcttaagctatgggaaagtcttacccaaccgtgagcgctgattaccagaaggccgttgagaaggcgaagaagaagctcagaggcttcatcgctgagaagagatgcgctcctctaatgctccgtttggcatggcactctgctggaacttacgacgtgagctcgaagaccggtggtcccttcggaaccataaagcaccc

SEQ ID NO: 138635 - DNA, 258 bp, Glycine max
tctgtatctatcttctctcggagccgctattatccccagacgccaccgccgcagcaccagaagaagaagaagagtgatggctgagtacgacctaactccgcggatggcgccgaatctcgacaggcaccttgtgttccctctcctggagttcctgcaggagcggcagctctacgacgacgaccacatcctgaaggcgaagatcgaccttctcaacaacaccaacatggttgactacgctatggacatccacaagagcct

SEQ ID NO: 138636 - DNA, 259 bp, Glycine max
ctccccgtggcttcaagaagaatctcaatggaggcccaggagctgaagcgcgtgttccagatgttcgaccgcaacggcgacgggagaataacgaagaaggagctgaacgactcgctggagaacctgggcatcttcatctctgacaaggacctgagccaaatgatccagaggatcgacgtcaacggcgacggttgcgtggacatggacgagtttggggagctgtatcagaccataatggacgagcgcgacaatgaggagg

SEQ ID NO: 138637 - DNA, 262 bp, Glycine max
caagaacatgccatggctagccgtcccatttgatgtaagtttgcacagaagactgattgacagataccgaattgatcgaatcccatcattcgttccattatgttcagatggcataaccattgaagaagacttgattggatgcattgaggattatggtgctgatgcatttcctttcacaaggaagaggcatgaggaattgaaagccatagatataaggaagcgtgaggaagcaaacttggaagaattattgggacacaaaggg

SEQ ID NO: 138638 - DNA, 262 bp, Glycine max
attttggctttcctctactacaattctaaaatcacgcaaatggcatccaagagaatactgaaggagctcaaggacttacagagagatccaccaacttcatgcagtgcaggacctgtgggtgaggacatgttccattggcaagcaaccatcattggtccaaatgacagtccctatgctggtggtgttttccttgtgaccatccatttccctcccgattatcccttcaaacctcccaaggttgcattcaggaccaaggttttcc

SEQ ID NO: 138639 - DNA, 270 bp, Glycine max
cgcagaagtcctaggagtgtaaaacagagacgcaaaatggagacgatcttgtcgtctgagaccatgaatattcccgacggcgtgacatcaaggttcacgctaaggttatcgaggttgagggccctcgtggaaaactcgtgcgagacttccaccatctgaacttggacttccaacttattaccgacgatggcggtaaaaggaagctcaagattgattcttggtttggttctcgtaaaacctccgccgccatccgcaccgccctcagccacg

SEQ ID NO: 138640 - DNA, 267 bp, Glycine max
cagcctggtgtgttgatccaggtctttgaaggtgaaagagcaaggactaaagataacaatttgttgggcaaatttgaactttctggcattcctcctgcccccaggggtgttcctcagattactgtgtgctttgacattgatgccaatggtattttgaacgtctctgccgaagataagaccactggccagaaaaataagatcactatcaccaatgacaagggtagactgtcaaaggaagatatcgagaagatggttcaagaggctgag

SEQ ID NO: 138641 - DNA, 258 bp, Glycine max
cgatccgcaagctccccttccagcgtcttgttcgtgaaattgcgcaagacttcaagaccgatttgaggttccagagtcacgctgttcttgcgcttcaggaagctgcggaggcttacttggtgggtttgtttgcggacaccaacttgtgtgcgattcacgccaagagggtgaccatcatgccaaaggacattcaactcgcacgccgcatccgtggagaacgtgcttaggctaataataagagtaataacgtagttgctg

SEQ ID NO: 138642 - DNA, 256 bp, Glycine max
aaaatgttgtacctggggtttagcagatgtaaaagtcaacagacagaaagcagggaaaggaagaccactgaataaaaagcaaagagaatggcgtttaagcaccccctttgattccttacgttttgtacggttgcactctgatatttaaataatttattttcccccaaagtttatgattagatttccatttttcgtctgtatgtgcgtctgtatatgtacatgcatatagactgcatgaatagataattagaacaat

SEQ ID NO: 138643 - DNA, 255 bp, Glycine max
gaaaaagcttgttctatcaactactagctggcttggtgggaagaatgacttcctgggcattgcctatctcactgttggagggttgtgtttctttttggcattggcttttaccgttgtatattttgtcaagccaaggcaacttggagatccctcatatttgtcatggaataggaatccaggagggcactgagcaaagaaactcactatgcttgttggtcatttccatgattataggccttgggtatgctacaaatg

SEQ ID NO: 138644 - DNA, 258 bp, Glycine max
ggaaggcgagggattgcgctgcgtctcttcctcttctctttcgattcatccctcattcataattttccaatccaacaacctcagcctcatactcacacatacacacatctgaacgcgtatcgtccctcccatggcttcaaagcgcatcctcaaggagctcaaggacttgcagaaagacccaccaacttcttgcagcgctggtccagtagctgaggacatgttccattggcaagcaacgattatgggtcctgctgatag

SEQ ID NO: 138645 - DNA, 260 bp, Glycine max
gggagtcagagaaaccctaggtaagaagaaaagatgccggctggtcatggtttgagatcccgcaccagagattccttctctcgtcctttcaggaagaagggaaccatcgccctcaccacatacctgagaacctaccacgtcggcgactatgttgacgtcaaggtttcggtgccgttcacaagggaatgccccacaaattctaccatggccgcaccggacgcgtctggaatgtcaccaaacgtgctgttggcgtcgaagca

SEQ ID NO: 138646 - DNA, 257 bp, Glycine max
gcattttggcccacagctacgttttccgtggcaagctcaaagaggatatctcaacttatgttctgcagcctatattgagcgtaaaaaatagagactataaacagctaacaagaaaaaagttgaaagaattgcaggaatggatagtggagatgtatcttgattatgtggtatcgatctggccctactattgtcgaacaataagattggccctcttcagagatctgattgttcgacaatagtagggccagatcgattcc

SEQ ID NO: 138647 - DNA, 257 bp, Glycine max
ctatggccgacgaagccaaagccaaaggcaacgcagccttctcctccggggactatcctgccgccatccaccacttctccgatgccatcgccctggctccctccaaccatgtcctctattccaaccgatccgccgcatacgcctccctcaaaaactacgcagatgcattagcggatgccaaaaagacagttgaactcaagcccgactggtccaagggttacagccgtctcggtgccgcgcatcttggcctttcccaa

SEQ ID NO: 138648 - DNA, 251 bp, Glycine max
gggaacttggtcggggcacaagctgcggcgaacatgggttggaaagagagtgcagtatgcttgttttcgctggggatggtgcattacttggtgctgtttgttacgctctatcagcgcttgtccggtggagatcgccttccggtgttgttgaggccggttttcttcttgttctttgcagcacctagtgtggcaagcttggcttgggaatccattgttggcacctttgatactgcttccaagatgctcttctt

SEQ ID NO: 138649 - DNA, 156 bp, Glycine max
agagagggtgagagccccgtcgtgcccggaccctgtcgcaccacgaggcgctgtcggcgagtcgggttgtttgggaatgcagccccaatcgggcggtaaattccgtccaaggctaaatactggcgagagaccgatagcgaacaagtaccgcgaggg

SEQ ID NO: 138650 - DNA, 258 bp, Glycine max
agccaacataatagccatctccgttgacttcagactcctcccacaccaccctatccctgctgcctaccaagacggttggaccaccctccaatggattgcttcccacgccaacaacaccaacaacaccaatccggagccatggctactcaaccacgccgacttcaccaaagtctacgtaggaggtgaaaccagcggtgctaacatcgcacacaacttgcttttgcgtgcaggtaacgaatccctccccggggatctgaa

SEQ ID NO: 138651 - DNA, 254 bp, Glycine max
ggattacgtaagcgatctggtgttcttttgtatggtccccctggaactaccaaaacattattagcaaaagctgttgctacagagtgctccttaaattttcttagtgtgaaaggtcctgaactgatcaacatgtacattggagagtctgaaaagaatgttcgagacattttccagaaggccagatcagcacgtccatgtgtcatcttctttgatgagcttgattctcttgcaccagctcgaggtgcctctggaga

SEQ ID NO: 138652 - DNA, 254 bp, Glycine max
caacacaagggaaggaaaaccaagtggaatcaatagccatgaagatcgttcggaaagacctcgtacccaatggacctggcagcgttaagatggttgcagtggattcggatgatctctggtttgcgtataacctgatagctcccggagactctgtcatggccgttactgtcaggaaggttctaagagaagctgctagtggcggacgggaagcagaacgcgtcaagctcaaattggaaattaaagtccaagagctt

SEQ ID NO: 138653 - DNA, 250 bp, Glycine max
cgacaccgctttcaccttctccaccaccagttcctccgcgcgtgaaaaagacgcgagtgcgagtgcgagtgcgagtcatttagtgacggaatacgatttgctgcatctgtggaagttggttgaggaaaaagacggagggccggcatggattcagatgatggaccgttctaccccgaccatgagatatcaagcgtggcgtagggatcctgagagtggaccgccgcagtatcggagcagaacagtgttcgaa

SEQ ID NO: 138654 - DNA, 253 bp, Glycine max
gtttggaatgtgagcactgcaagaccgatcaggaaaattactgtgaaaagttgcaatttgtctacaacggagtattctgggatggcagcatcacctatgggggctactctcaaatttttgtcgcagattacagatatgtggtacacattccggaaaacctagcaatggatgcagcggctcctctgctatgcgcaggaataacagtgttcaatcctttgaaagaccacgatttggtagcatcaccgggaaagaa

SEQ ID NO: 138655 - DNA, 253 bp, Glycine max
cccaagggaactgagagagagagagagagagagaagtcatggacgctgttcttcaaaccagaggccttctctctctccccgcaaaccccgttaacagaatctcactctttaacccttcacaaggtttaaagcacagatttttctctccaaagccaaaaaacctttctgggtcttctctttcctccaatgggttcccaaaactctcaccaagacccaacaatgtctttgcccaaagggaccaaaacaaaaactt

SEQ ID NO: 138656 - DNA, 250 bp, Glycine max
gcaaaaactcattcgcgatctcgttctgtacgtgcagccgcagcaagtgatcgaagcgaaaagagagaaattcatcgtcgcagtaatcatgggtaaggttcatggatcacttgcacgtgctggtaaggttagagggcaaaccccgaaggtggccaagcaggataagaagaagaagccacgtggccgcgcccacaagaggatgcagtacaatcgccgattcgtcaccgccgtggtgggattcggcaagaag

SEQ ID NO: 138657 - DNA, 248 bp, Glycine max
gaggagttgaagaagaagaagccctttgggttctctcgctccaacaacaagggcttctaagcctctctctcgtggagcaacaactgtgaaatctgtggaatcaaaggggcaagctgagaagtgtgccaagagaaagaggaagaaccagtatcgcggaatccgccagcgtccatggggaaagtgggctgctgagattcgcgacccaagaaagggggttcgtgtttggcttggaactttcagcactgctg

SEQ ID NO: 138658 - DNA, 248 bp, Glycine max
gtgaatatcaccttgggtgctgaagatgaactaaaacatgcagttgcatttgttcggccagttagtgtggcctttcaggtggtgaatgggttccatttctacgagaatggagttttcactagtgacacttgtggtagcacttcccaggatgtgaaccatgccgttcttgctgttggatatggagttgaaaatggtgtcccatattggctcataaaaaattcatggggagaaagctggggtgaaaatgg

SEQ ID NO: 138659 - DNA, 248 bp, Glycine max
cagtttcttattcgttagatctcatcttacactcaccgtcaagttcgtctcgcgccaccgtcgacgcagttccggccactgcctttggttccctcactttctgtctcttcttcttcttctcagaaatatgccttctcagaaggttgatacgggtcatcaagacacagtccatgatgttgcgatggattattatggtaagaggctggccacggcttcatcagatcacacgattaagataattggggtga

SEQ ID NO: 138660 - DNA, 252 bp, Glycine max
attatcctaagtctttgggaatagtgctgcaatggcttcaagtcaggaggaggtgacccttttgggagctactggaagcccatttgtgtgcagggttcatattgccctcaagttgaagggagttcaatacaaatatgtcgaagaaaatttgaggaacaagagtgaactgcttctcaaatccaacccagttcacaagaaggttccagtgtttattcacaatgagaagcccatagcagagtctcttgtgattgt

SEQ ID NO: 138661 - DNA, 266 bp, Glycine max
gaagaattagacttgaatgcagctctacaaagatatttcccgcaaggcattgacatctactttgacaatgtgggtggggatatgctcgatgctgcactccttaacatgaggattcatggtagaattgcagtttgtgggatggatctcagcaaagcctttccaagcccatagggatatacaatttattcaacctcattacaaagcgcatcaaaatgcagggttttttgcaaagtgattacttgcacctatacccgcgctttttggaa

SEQ ID NO: 138662 - DNA, 263 bp, Glycine max
accgtagtaattctagagctaatacgtgcaacaaaccccgacttctggaagggatgcatttattagataaaaggtcaacacaggctctgcctgttgctttgatgattcatgataactcgtcggatcgcacggcctttgtgcggcgacgcatcattcaaatttctgccctatcaactttcgatggtaggatagtggcctaccatggtggtgacgggtgacggagaattagggttcgattccggagagggagcctgagaaacggc

SEQ ID NO: 138663 - DNA, 261 bp, Glycine max
gcccctgggtttggagagcgcaagagccagtaccttgatgatattgccatcttgactggaggtactgtaatcagagaagaggttggccttactttggacaaagctgggaaagaggttctcggatatgcctccaaggtggtctcaccaaggatacaaccacaattgttggtgatggaagtacccaggaagcagtgaacaagagagttgcacaaattaggaacctaattgaggctgctgagcaagagtatgagaaagaaaagc

SEQ ID NO: 138664 - DNA, 265 bp, Glycine max
catttatcaactcactcatcaatctcgtttgttctcactaactattacttcatcatgtcgtcgagcacagttggtcaagtcatcaaatgcaaagctgcggtttcatgggaggcagggaagccacttgtgattgaagaagtaaggtggcaccaccacaagctggtgaagtgcgtttgaagatcctctacacctctctttgccacactgatgtttacttctgggaagccaagggccaaactccattgtttcctcgtatatttggtca

SEQ ID NO: 138665 - DNA, 266 bp, Glycine max
ccgaaaatggttgcgactttgagtcttccgatcatagacctctcttctccccatcgtctttccacagccaattccattcgtcaggcatgcgtggaatatggtttcttttaccttgtgaaccatggggtggacaccgattttggagcaaagtcttcgaccaaagttgcaagttcttctcgcttccggtccaacgcaaaatggacctggcccgcaaggaatatagaggctacactcctctctatgctgagacacttgatcctacttca

SEQ ID NO: 138666 - DNA, 264 bp, Glycine max
gttggtgtgtgtcaccggtgctgccggttatattgcttcatggattgtcaagttcctacttgaacgtggttacactgtaagggccgctgttcgaaacccaaatgatcacacgaaggtagaacatttgctaaaacttgaaggtgaaaggagagactgcacctttttaaggcagatcttttgggtgaaaattcttttgactccattgttgagggctgtgatggcgtctttcatactgcttctccttttattatcaacgtcaaagac

SEQ ID NO: 138667 - DNA, 267 bp, Glycine max
aaagaaagatgtcgatcttcgagtacaacgggagtgccctagtggctatggtggggaagaactgcttcgccattgcgagcgatcggagactcggtgttcagccccagaccaccgccaccgatttccagaggatttccaaaatcacgacaagctgttcatcggcctctcggcctcgccaccgacgcccagaccctctaccagcgcctccttttcggccacaaattgtatcagctccgcgaagagagggacatgaagccccaaactttt

SEQ ID NO: 138668 - DNA, 269 bp, Glycine max
gtgctctgctcgtgcctctagggttatcatatctccatttccatttcctctctctcagtttccaagaatcttaagctatgggaaagtcttacccaaccgtgagcgctgattaccagaaggccgttgagaaggcgaagaagaagtcagaggcttcatcgctgagaagagatgcgctcctctaatgctccgtttggcatggcactctgctggaacttacgacgtgagctcgaagaccggtggtcccttcggaaccataaagcacccctccg

SEQ ID NO: 138669 - DNA, 268 bp, Glycine max
aggcaaagatagtggcagagctccaagctgtgaagcacaacagtggcaagtcctacaatcagttagcggaggagactggactcaccaacgtctatgttgctcagcttctcaggagacaggctcagctcaatccccaaactgccctctacttcgggcagcgctgcccgacctgccccaagaccttgtttctgagatgatgagaccccctttgaggtcttatgaccctaatctcatccaagaccccactgtctataggttgaatgaagct

SEQ ID NO: 138670 - DNA, 265 bp, Glycine max
ctgcttttgtatctggtgtcacgttgatgctattaacttgcattgtgtggttaaaattggtgtcatatgcacatacaaactatgatatgagagcacttactgtttcgaatgaaaagggagaaacattacccaatactttgatatggagtatccgtacactgtgaccttcaggagtttggcatacttcatggttgctcctacattatgctatcagacaagctatcctcgcacaccttcagttcgaaagggttgggtgtttcgtcaa

SEQ ID NO: 138671 - DNA, 262 bp, Glycine max
gtcccacagaagaaaaacaaaaccctcactgagcgctgctgctttgagagagagatggctccgaaccttgaatgtcgtatgtacgaagcgaagtacccggaggtggacatggcggtgatgatacaggtgaagaacatagcgacatgggggcgtacgtgtcgctgctggagtacaacaacatcgagggcatgatcttgttctcggagctctctcgccgtcgtattcggagtgtgagcagcctcatcaaggttggccgcatcga

SEQ ID NO: 138672 - DNA, 264 bp, Glycine max
ctcgagccgaatcggctcgagtgatggcatcctttgttgctcttacagagtccagtggagaccttattgctgtctatcggcatgcaagtgcaacaccattaccaccatctattcttagtcgcggcatcggttggcagggattggcattctgttatcaggattgtttggaactggcaatggatcctctgtatctgtagaaaatgctggtcttttggctttaactcgtgttggcagtcgaagagtggtgcaaatagcggccggttt

SEQ ID NO: 138673 - DNA, 261 bp, Glycine max
ccttcacccacgcctcccccgtcttccacaacttcgccctcaactacgccgtcaagaggatcgacctcggcggcaaggccctcaccaactacctcaaggagctcgtctccttccgctccgttaatgtcatggaagagccttcatcatcgacgacgtcaaggagaaactctgctttgtctcactcgacgtcaaccgcgacctcaccatcgccaggaagagtgggaaagagaatctgttcaggtgcacctacgtgcttccgga

SEQ ID NO: 138674 - DNA, 260 bp, Glycine max
ggaggtcaagcagcccgaggagaaagccgttaccaagtgggacccatccgtcgaagggtacctgaaatttcttgtggacagtaagcttgtttatgacacgctggagaaaatcgttcaagaggctcctcatccttcttagctgaattcagaaacactggattggaaaggtctgcaagtttggcagaagatttggagtggttcaaggagcaaggttataccattcctgaaccttcttctcctggtcttacctatgcacaata

SEQ ID NO: 138675 - DNA, 260 bp, Glycine max
agattctattctaagattttgagaatgtctagctgtgggtgtggaagcagctgcaactgtggcagcaactgcggttgcaacaagtactcttttgacttgagttacgttgagaagacaaccacagagactctagttttggtgttgggcctgtgaaggcccaattggagggtgctgaaatgggtgtagcatctgagaacggtggctgcaactgtggatcaagctgcacctgtgacccatgcaactgcaagtaaggtcaagat

SEQ ID NO: 138676 - DNA, 259 bp, Glycine max
agaggggtttgccttgtgccgtttgtgttgttttcgggacgaagaagaagatggtgtcaggttctggaatctgcgcaaagcgggtggtggtggacgcgcgccaccacatgctgggtcgtctagcctccatcgtggcgaggagcttctgaacggccagaaagtggtggtcgttcgctgtgaagagatttgcatctcgggcgggctggtgaggcagaagatgaaatacttgaggttccttcgcaaacgcatgaacaccaaa

SEQ ID NO: 138677 - DNA, 157 bp, Glycine max
ctgccagtagtcatatgcttgtctcaaagattaagccatgcatgtgtaagtatgaactaattcagactgtgaaactgcgaatggctcattaaatcagttatagtttgtttgatggtatcttctactcggataaccgtgtaattctagagctaatacg

SEQ ID NO: 138678 - DNA, 256 bp, Glycine max
gatccatcgatcaattaatttccaatggccgatcagctcaccgacgaacagatctctgagttcaaggaagcctttagcctcttcgacaaggacggcgatggttgtattaccaccaaggaacttgggactgtgatcggtcgcttgggcagaacccaactgaggctgagctgcaggacatgataaatgaggttgatgctgatgggaatggtaccattgatttcccagaattcctcaatctcatggcgcgcaagatgaa

SEQ ID NO: 138679 - DNA, 256 bp, Glycine max
gtgacaccatgaatattaattcacttgcccggaaagccctggtcaatgcagatggtattatagagaaaacattcttgtggggtaggtactctatggaaatgtccgctgtcatttacaaggactgggttttcactatcaagcattacctaatgatcttgtaaagagaggagttgctgttaaggacccatctgctccccatggagttcgtcttttgattgaggactatccttatgcttctgatgggctagagatatgg

SEQ ID NO: 138680 - DNA, 258 bp, Glycine max
caaaaatatttcaacttctaaaagagcaagcagaacttgcaatgaaagctataatgaaactttacatccctggatggagatttctacctactgctaaccataggaggatgaaggaaattgatagagaaataaaagttcacttacagatatgattagcaacagagagaaagcactaaaggcgggtgaggctaccgagaatgacttgttaggtatacttttggagtcaaatcacaaggaaactgaagaacatggaaacag

SEQ ID NO: 138681 - DNA, 258 bp, Glycine max
acggttccgcttctggatccgcatccacctctcgagcttctccgtgtaccttccctcgcgccacttccatagatcgataaccattacgccagtgttgaagtagcacgcgtcacgtcccttaaacgacgccgcgtatagggttcgaccagaagcggtgcgtgaagtagttcgtgaagttagcgtggcagtactcgggagcgccgagcacgcgcgcgtggagatcaatgctccatagcttcgccacgtcatcaacgacga

SEQ ID NO: 138682 - DNA, 254 bp, Glycine max
caacaatgcctcctttgactttgtggctggtgctgccttttctcgtgttgctagcggcggcaacaacgtctccaacacgcgccacgacggtcgcctcgtcgttccacggtcaacgagagtttgactatttcctttcgcgttgcaatggcccggtacttactgcaaacgcacccgcagttgctgccccaccaacggttgctgcagaggctccaattttccaacagtgttcaccatacatggactctggcctgact

SEQ ID NO: 138683 - DNA, 254 bp, Glycine max
attaaatccttctgctccgcgtgttctcgctcctctcggccagaatccgagatcaaccccgacgatggcaaggggtttttctcggcttcttcagatttctgagatggcgactgtttcagctttagccaagtcaagctcgtcttcctgggtgaccaatccgtgggcaaaaccagcatcatcactcgattcatgtatgataaattcgataacaactatcaggctacaattggtattgattttctatcaaaaactat

SEQ ID NO: 138684 - DNA, 253 bp, Glycine max
acagtcggttcttccttctcaaatattcttgagatccccattttctccgaagcaaagccatggctaagggtcctggtctctactctgacatcggcaagaaagctagggatctgctgttcaaggactaccacatgaccagaagttcaccatcaccacctactcaccgactggagtggctattacagcatcaggaaccaggaaaagtgaactgtttctggctgatgtcaacacccagttgaagaacaaaaacatc

SEQ ID NO: 138685 - DNA, 256 bp, Glycine max
cacaaagagaagcattagcactaggagcagcaacaactagtctcagctgaaatggcctcttcagtgatggcatctgtggccctcaaacctgcccctttcactgttgagaagtcctcagtgagaggccttcccctctctcaaggaactcttcttcattcagagttgtggccagtggcaagaagatcaagactgacaaaccttatggaattaatggtggcatggctttgagggatggaactgatgcatctggcaggaa

SEQ ID NO: 138686 - DNA, 258 bp, Glycine max
gattgttgtgactcgttcttcttcgtcgttatcttcttcttttgttgtttgtgtgtttgttttttctctcacctgaaaatgtcttgctgcggtggtaactgtggttgcggaagcgcctgcaagtgcggcaacggtgcggtggctgcaagatgtacccagacttgagctacaccgagtcaaccaccaccgagaccttggtcattggagtggcaccagttaaggctcaattcgagagtgctgaaatgggtgttcccgctg

SEQ ID NO: 138687 - DNA, 254 bp, Glycine max
agcgtcgctgctccgtaccagtttcactgcataaatttgagagaaaactctgcaaacatgttggtttatcaggacctccttacaggtgatgagcttctctcggactccttccgttacaatgaaattgagaatgaatgctgtgggaagttgaggggaagtgggttgttaagggagcagttgatgttgacattggtgcaaacccttctgctgagggtggagaagatgagggagtcgatgacgcagctgttaaggtt

SEQ ID NO: 138688 - DNA, 256 bp, Glycine max
agttttggttgattcaaggccttcacagcattcggtgcggcattttaatcgatttatccaagcaggactgaatgaactaatggagtctaaaggtgggaaaaagaagtctagtagtagtagtagtaaatcattttctacgaagctcccctcggatacagcattgaagacgttagaccaaacggtggaatcaagaaattcagatctgctgcttactccaactgcgctcgcaaaccttcctgatatccatccagattga

SEQ ID NO: 138689 - DNA, 254 bp, Glycine max
attcggtgccggcatgtttgagatggagaaagtgaaaggtggaagtccatatggtgctggaacttacgccggtgatggctcaagacagccaagtgagcttgagttacaacaagcattccaccaagggaagtcattgctggcatcacaaagaagctcaagcaagctgcataatgttgccttgccttcatattagatcatactattattattaaaccataccacaatattgcttgaaaatcattgtccaattttta

SEQ ID NO: 138690 - DNA, 255 bp, Glycine max
gatccgagaaaaactctgtaaacatgttggtttaccaggacctccttacaggtgatgagcttctctctgactccttccgttacaaggaaattgagaatggaatgctgtgggaagttgaggggaagtgggttttaaaggagcagttgatgtagacattggtgcaaacccttctgctgagggtggaggagaagatgagggagttgatgatgcagctgttaaggttgttgacattgttgacacattcagacttcagga

SEQ ID NO: 138691 - DNA, 253 bp, Glycine max
ctcacgtggaaatttggggatagatcttccacccgagaaggtgtatttatttcaaaaagcagctatttacaaatgtaacatggctgggaaacctgctgttgtcacacgtgttgtggatactatgaccgatacctaagacctactcgtgctgaagcaactgatgttgccaatgcagtgttggatggcagtgatgcaattgttcttggggcagaaactttgcgggggttataccctgtagagactatttccactg

SEQ ID NO: 138692 - DNA, 249 bp, Glycine max
aaaaaaatctaagtccctttggtcttcatcttctgttctgatccaggtatggcttctaaacgcatcttgaaggagctcaaggatttgcagaaggatcctcctacctcatgcagtgcaggccctgtggctaggacatgtttcactggcaagccacaatcatgggacctgctgatagcccatatgcaggtggtgttttcctagtttcaattcattttcctcctgactatcccttcaagccaccaaaggttg

SEQ ID NO: 138693 - DNA, 252 bp, Glycine max
aaaaaaatctaagtccctttggtcttcatcttctgttctgatccaggtatggcttctaaacgcatcttgaaggagctcaaggatttgcagaaggatcctcctacctcatgcagtgcaggccctgtggctaggacatgtttcactggcaagccacaatcatgggacctgctgatagcccatatgcaggtggtgttttcctagtttcaattcattttcctcctgactatcccttcaagccaccaaaggttgctt

SEQ ID NO: 138694 - DNA, 254 bp, Glycine max
agaatatattacattaagaaagcccaaagaaagaagaagatggcgtccgagtgcaaaggtaagagctcatggcctgagttggttggagtggaaggaacggtggcggtggctacaattgagagggagaatccttggtggatgctaacactgtgcttaaaggatccatcgtcaccgctgattttcgatgtgatagggttcgggtttgggtcaccaaacatggaattgtttatcaggctccaagaattggataagaa

SEQ ID NO: 138695 - DNA, 256 bp, Glycine max
gtgatttcagtgagtgatcggtgttcacttgatctcatcataatcgtcagcgtcaattgaagaagatgccgatcagaaacatcgccgtcggaaggcctgaagaggcgactcaccccgacacgttgaaggcggtttggctgagttcatctcaaccttcatcttcgtgttcgccggctcaggctccggcatcgcctacaacaagctcaccgacaacggcgctgccacccctgccggcctcatctccgcctccatcgcc

SEQ ID NO: 138696 - DNA, 256 bp, Glycine max
ctactcaacgctgttataccggctggatcggcacttgttgatgactggcactgactgtcaaccatggtgaggacttttgagacacattgtggatccttgtctcaatacgggattaaacacatgaggtcctttcaaacatctgcaatgtatggataaagaatgatcaaatggctgaggcttcatcacaagcttgtgtcagtattccttccaatccctggagttctctgcaaaggggtttcagtgcataataactccc

SEQ ID NO: 138697 - DNA, 255 bp, Glycine max
aaggatattagtggaaatgccagagctctgaggaggttgagaacagcatgtgagcgggcaaagaggactctctcttccactgctcaaaccaccatagagattgattccttgtacgagggtattgacttctaacaaccattaccagagcccgttttgaagagctaaacatggatttattcaggaagtgcatggagcccgtggagaagtgtttgcgggatgccaagatggataagagacgcgtccatgatgttgttc

SEQ ID NO: 138698 - DNA, 254 bp, Glycine max
atttgataaaatattgtacacataaatctagctccaattcctaatcacctggttaatttcttcacatagagctatcaagatccaacgttaacatgaagaatgttttagtaaggtcagctgcgcgagctctgttggcggcggtgggcggactactaccgccagctctcaacggcggcgatcgtggaacagagacaccagcacggtggcggcgcgtttggaagcttccacttgcggaggatgtccactcttccaga

SEQ ID NO: 138699 - DNA, 253 bp, Glycine max
aaagacttgcttccaagatggttctgctagagaagctctgggatgacgttgttgctggccctcaacctgagcgtggccttggcaagctcagaaaactcaccaccctcaaaactattgatgaaggagacatagcaagctgcagaagacgttgtcgatgccgtcgacaccgacaatcccgatgactcccacgactccaacgacaccgggatccgcgcgtaaagctgacaacgtttggaggagcgtcttccatcct

SEQ ID NO: 138700 - DNA, 89 bp, Glycine max
gggccttcgcccttatgtgaagaggtacatgatgtaccaacaaggttgctttgcaggtggcacggttcttcgtttggccaaggatttgg

SEQ ID NO: 138701 - DNA, 259 bp, Glycine max
gtgaaagggcctttcttcagactttggatgggtcttgccgcactcctattgcagggtatgcttgtagaaacgaagatggcaattgtttgtttagaggattagttgcttcccctgatggaaccagagtgctagagacatccagggttggtccatatgctgttgaagatatgattgagatgggtaaggatgctggcaaggagcttctgtctcgggctggacctaacttcttcagtagttagcagcagatgattaaagtgtg

SEQ ID NO: 138702 - DNA, 255 bp, Glycine max
gcgcattatagcacaccacacaaaaaagcaaaacagagagaacaactgttactcacacacgccatgggtaaatgaatggtttttgagcaacagcagttaaaagagaaaagggattcagcgaagatgacatcggttggtgtggcaccaacttcgggtttgagagaagccagtgggcatggagcagcagctgcggatagattgccagaggagatgaacgatatgaaaattagggatgatagagaaatggaagccaca

SEQ ID NO: 138703 - DNA, 257 bp, Glycine max
tagctgttgaacctggttatcgaacaatgtcagaggttgcgttgagcatgctaagagaggaaggatttgcatctttctactatggccttgggccttctctgattggaatagctccatatattgcagtgaacttttgtgtttttgatttattaaagaagtcattgccagagaaatatcaaaagagaactgaaacatctctactcactgctgtggtttctgcatcacttgccacacttacatgctatcctctggataca

SEQ ID NO: 138704 - DNA, 260 bp, Glycine max
cttaaggaacataacatcatctgcttccaccttcaactttggtaaatttgaaccatggagcacttagacattgtgagtgaagtgaagcatcaaagaatcaaaaccaacgggatatggctacacgtggcagagaaaggaacaggtccactagttctgctgcttcatggcttcccagaaacatggtatgcctggcgccaccagatcaatttcttggcccatcatggctaccatgtggttgcacctgatcttagaggatatgg

SEQ ID NO: 138705 - DNA, 257 bp, Glycine max
tgtctctgttgttgacctcacagtgaggctggagaaagaagcttcctacgatgaaattaaaaatgctatcaaggaggaatcagagggcaagttgaagggaattcttggttacactgaagatgatgtggtctccactgactttatcggcgatagcagatcaagtatttttgatgcaaaggctggaattgcattgaataagaactttgtgaagcttgtttcttggtacgacaacgagtggggatacagctcacgtgtca

SEQ ID NO: 138706 - DNA, 256 bp, Glycine max
agaagatgtgtggcaatgaccatagggcatggtacactacggggtgtcctagcaaatatggttgggctgccctaataggccttgctctatacatcatattcttctcacccggcatgggaactgttccatgggttgtgaactctgagatctaccccttgaggtacagaggggtgtgcggaggaatagcatccacgactgtttggatttccaacctcattgttgctgagtccttcttgtccctcacagaagctatagg

SEQ ID NO: 138707 - DNA, 256 bp, Glycine max
attgtttgttgttgtaactcgttcttcttcttttgttgttctgtgtttgttttttctctcacctgaaaatgtcttgctgcggtggtaactgtggttgcggaagctcctgcaagtgcggcaacggctgcggaggctgcaagatgtacccagacttgagctacactgagtcaaccaccaccgagaccttggtcatgggagtggcacctgttagagctcaatttgagggtgctgaaatgggtgtgccgctgagaacgat

SEQ ID NO: 138708 - DNA, 256 bp, Glycine max
cagcctggtgtgttgatccaggtctttgaaggtgaaagagcaaggactaaagataacaatttgttgggcaaatttgaactttctggcattcctcctgcccccaggggtgttcctcagattactgtgtgctttgacattgatgccaatggtattttgaacgtctctgccgaagataagaccactggccagaaaaataagatcactatcaccaatgacaagggtagactgtcaaaggaagatatcgagaagatggttc

SEQ ID NO: 138709 - DNA, 253 bp, Glycine max
  unsure (1)..(253): unsure at all n locations
ctgctgtctccgacaacanttccgcgccgctacccgccgccaaactgagctacaaatgttcggtctgcaacaaagccttctcctcttaccaagcactcggtggacacaaggccagccaccggaagctcggcggcgagcaccactcgacctcctccgccgtgacaacgagttcggcgtcgaacggcggtgctaggacccacgagtgctccatctgccaaaagacgttcccaacaggacaggccttgggaggaca

SEQ ID NO: 138710 - DNA, 253 bp, Glycine max
cgcgcactctctcttttctctcttaacacaaaaaccctatcgttcttcgcggtttcgccgattctcgccatgccgaaagccaaatccgacgccaaagccgccgatagccggttgaagcgcaagggcgctggtgctggaaggaagcaatcgaagaaagctgctaaggatcctaacaagccaaagagacctccaagcgctttcttcgttttcatgtccgagttcagagagcagtttaagaaggagcatcctaaca

SEQ ID NO: 138711 - DNA, 184 bp, Glycine max
tggaccatcacccccttcacctgtgaagccaccaaatgtctgtgacaactactacagctgtgctgatagtgctacttgttgctgtattttcgagttcggaaatgcttgctttgagtggggttgctgtcctcttgagggtgctacctgctgtgatgaccactacagttgctgccctaacgactat

SEQ ID NO: 138712 - DNA, 258 bp, Glycine max
ctccaccctacaagtacccatctcctccacccccagtttacaagtacaagtctcctcctcctcctgttcattcaccacctccaccacactacatctatgcatcccctcctcctccatatcactactagatagtggttttgcttagcttcccgagtagttattaatgaagaatataagccaataaagaacgttgttgatagcaggaagatgcacttcgcaattacacaaggaaaacaacggaagcaaagtttccgcgca

SEQ ID NO: 138713 - DNA, 255 bp, Glycine max
atcactttgtcccttttcatacattcacatattcattttgccacaccttaaaaccaagcacccggccatatttcaatttttgttttggttagttgtcatgaagagagaaagagaggttgatagcttaaccatggcgaattgtttgatgttgctttctcgtggaagtgaatttgaggccacctactcaagcacttctatgagcaatcgtgtctttgagtgcaagacatgtaataggcaattcccttcatttcaagc

SEQ ID NO: 138714 - DNA, 255 bp, Glycine max
ctcgagccgggaatatctcattaaggtcgtgtgtcatacttctctggtcttgcaatgtaattatgacagttgggagcctggaaggtcgagtgaaattcgtgccaatttttgccatttgtaatttaacttattttcccatgcatgtacaaaaaataagaggaaattccgtgtgggaatttgatttttacataatctctgcatcgaatttgaactagttggaattgagaccaacggcaatggtcagcatgaaaaata

SEQ ID NO: 138715 - DNA, 256 bp, Glycine max
gagccattcgtgagcctagagttgttgtacagactaccagcgaagtagatatcctcgatgatggttatcggtggcggaaatatggacaaaaagttgtcaaaggaaatcccaacccaaggagttactacaagtgcacaaatgcagggtgcacagtaaggaagcatgtggagagagcatcacatgaccttaaatctgtgatcactacgtatgagggaaagcacaaccatgatgttccagctgctcgtgccagcagtca

SEQ ID NO: 138716 - DNA, 252 bp, Glycine max
caagattgcaaaatgaagttcaacattgcaaatcccaccactgggtgccagaagaagctggaaatcgatgacgacctgaagcttcgagcattttgggacaagaggatctcccaggaggttcttggtgatgctctgggtgaggagtttaaaggatatgttttcaaaatcaccggtgggtgtgacaaacaaggattccctatgaagcagggagtgctgacccctggtcgtgttcgacttttgctccatagagga

SEQ ID NO: 138717 - DNA, 250 bp, Glycine max
ttgcgaacattttgagtcttttccacctggtcacttgtattctagcaaagagagagcgttccgcagatggtacaatcctccatggttctctgaggctattccatctgccccttatgatcctcttgctttgaggcatgcctttgagaaggctgtggtaaaaaggttgatgactgatgtgccctttggtgttttgctctctggaggtttggactcttcattggttgcagccgtcacggctcgctacctggca

SEQ ID NO: 138718 - DNA, 251 bp, Glycine max
attaattgcaagaatggcacttcgttgcttggtgatgtccctttctgttctcttcactcttggtcttgcgagagaaagccatgccagagacgaagatttttggcatgctgtttggccaaacactcccattccaagttcattgcgagatcttctaaagcctggccctgcaagtgttgaaatcgatgatcaccctatgcaaattgaagaaacacagtacccgaaaaccttcttctataaagaagaccttcatc

SEQ ID NO: 138719 - DNA, 249 bp, Glycine max
gtgattgactttttttcttcttctattctcacacatacccatctactccttccctcatggctgaacaatcttccaactccatttacgatttcactgtcaaggacatcagtggaaatgatgtgagtctgaatgattacagcgggaaggttctactgattgtgaatgtcgcctctcaatgtggtttgacacagacaaattacaaagaattgaatgtattgtacgagaagtacaagaatcaaggatttgaaa

SEQ ID NO: 138720 - DNA, 252 bp, Glycine max
gatcactttctttatggaatgtatctaccattggggatgagggtctgtctcaggtagcaaaaggatgtcatatgttggagaagcttgacttgtgtcattgttcctcaatcagcaacaagggtttgattgcaatagctgaaggttgccccaacttgaccaccttaactattgaatcattggcaaatattggaaatgaaggtttgcaagctactgcaaggctatgccccaagctgcagtccatctcaatcaagg

SEQ ID NO: 138721 - DNA, 256 bp, Glycine max
ctggaaacagcgaaagtgaaataccactacttttaacgttattttacttattccgtgaatcggaagcggggcactgcccctctttttggacccaaggtcggcttcggccggtcgatccgggcggaagacattgtcaggtggggagtttggctggggcggcacatctgttaaaagataacgcaggtgtcctaagatgagctcaacgagaacagaaatctcgtgtggaacaaaagggtaaaagctcgtttgattctga

SEQ ID NO: 138722 - DNA, 253 bp, Glycine max
gaaatttttcttctctcagccatctctctctctctctgcgtccatggagttttggggtgttgaggtgaaaagtggagaatctctcaaggttgatccgggagatgacaagattatccacctttcaaatgcatgcctgggggatgtcactaaggataaagaaggtctaccagtagccctgtatgtcaagtttggtaaccaaaagcttgtacttggaacgctttcttctgaagcttttcctcagatatcttatgat

SEQ ID NO: 138723 - DNA, 255 bp, Glycine max
gcactgtggcagaagtcctaggagtgtaaaacagagacgcaaaatgaagacgatcttgtcgtctgagaccatgaatattcccgacggcgtgagcatcaaggttcacgctaaggttatcgaggttgagggccctcgtggaaaactcgtgcgagacttccaccatctgaacttggacttccaacttattaccgacgatggcggtaaaaggaagctcaagattgattcttggtttggttctcgtaaaacctccgccgc

SEQ ID NO: 138724 - DNA, 255 bp, Glycine max
acttgcacagaagctaatgcatcatggtctgtcccctcagaccccagctgcagccattgagcgaggaaccacacttcatcagcgcacggtgtttgctgaactaaaggaccttcacgagaaaattacatctgctcagctggtgtcaccaacgctgattattataggaaaagttgttgaactatcaccattttggccaattcctacaaaagaagaatcatgtttaatgcaggcatgatggatgttgtcaagaaatat

SEQ ID NO: 138725 - DNA, 254 bp, Glycine max
cgttattttacttattccgtgaatcggaagcggggcactgcccctctttttggacccaaggtcggcttcggccggtcgatccgggcggaagacattgtcaggtggggagtttggctggggcggcacatctgttaaaagataacgcaggtgtcctaagatgagctcaacgagaacagaaatctcgtgtggaacaaaagggtaaaagctcgtttgattctgatttccagtacgaatacgaaccgtgaaagcgtggc

SEQ ID NO: 138726 - DNA, 255 bp, Glycine max
caactatccatggcaaaccactggctcagacccgaggtgtatccactgttcgctgcggttggtgccgctgttgggatctgtggattccaattggttcgtaatatctgcatcaaccctgaagtcagggtgaacaaggagggaagaaaggcaggagtgttggagaactttgctgagggagagaagtatgctgagcatttcctgaggaagtatgtgcgcaacagaactcctgagattatgccctccatcaacagcttc

SEQ ID NO: 138727 - DNA, 256 bp, Glycine max
aacctacctctttttcttctctctcaacaacttcaccttcttcctcctcgatcatgtctcacttcaagggcaagtaccatgatgagcttatcgccaatgctgcgtacattggcactcctggaaagggtattcttgctgctgatgagtcaacagggacaattggcaagcgtttggccagcatcagtgtagagaacattgaatccaacaggcgagctcttagggagctgcttttcactgctcctggtgttcttcaata

SEQ ID NO: 138728 - DNA, 249 bp, Glycine max
gagaaagagagtctcttgctctgtatctttgatttgatcattccaatcttcaatttttctatatatccatcaatccgctgagtgcaaagttctaatctttcgcctattgggttctactcctttctctcttcgtttccgatcgatccaattttcttcccatggctacgatcggacacaacaatctcaatgccaaattggttcttctcggggacatgggtgctgggaaatccagcctcgttttgcgctttg

SEQ ID NO: 138729 - DNA, 254 bp, Glycine max
agaatatcaaattggtctcttgtcttcctcctcatctctacactactccacatagagcccagcctctcaagcccaagcccaagcccaagcccaagcccgttcataaaatcctcctgcagcagcacccagtacccagccctctgcgtctcatccctctccgtctacgcctccagcatccaacaggaccctcaccaactggttcagacagcactctccctctccctgaaccgcacccaagccaccaaaaccttcgt

SEQ ID NO: 138730 - DNA, 252 bp, Glycine max
aataattgcaatatgtttgttgcatcagcccgtcagttggttaaagccttagaagtgccattggttaatgatttaggatatacaaagagatatgtgcgctgcctacagatatcagaagtggtaaatagtatgaaagacttgatagattacagccgagaaactgggactggacctatggagagcttagcaaaattccctaggagaacaagtggttcagctggacctcgtggtcaagcacaacagcatgaagaa

SEQ ID NO: 138731 - DNA, 254 bp, Glycine max
cacaggttcaaagatgtgcagatgacaaagcagtgttgataacaacctacgaaggcaatcacaaccaccctttgccgccggccgccaccgccatggcaaatactacgtcagcagccgcagccatgctgctatcaggttcggcagccccaagcaaggaagcgctaacaaactctgcaggatattactcttcttcttcaattccctatgcttcaatggcaaccctatcagcttcagctccattcccaaccatcact

SEQ ID NO: 138732 - DNA, 253 bp, Glycine max
caacgatggtgaagggtcgtcaaggagagcgcgtcagactctacgtgaggggtacaatccttggatacaaaaggtccaagtccaaccagttcccaaacacatccctgatccaaattgagggagtgaacaccaaagaagaagtaggatggtatgctggcaagaaaatggcctatatctacaaggctaaggtgaaaaaggatggaagccattaccgctgcatatggggcaaggttacgaggcctcacggcaacag

SEQ ID NO: 138733 - DNA, 247 bp, Glycine max
gagttttggaacaatgtatatggatttgacatgagctgcatcaagaagcaagccataatggagcctcttgttgacacagtcgaccagaatcagattgctacaaactgtcagctactcaagacaatggatatctcaaagatggctcctggagatgcttcattcacagtaccttttaagcttgtagctgaacgtgatgactatattcgtgctcttgttgcatattttgatgtatcgtttacaaggtgtc

SEQ ID NO: 138734 - DNA, 246 bp, Glycine max
aagaagatgcattgtatgctttgaaggtatcattgaatgtttctgccaaccagcttacaaactggaataaaaatctagtaaacccttgtacttggtccaatgttgaatgtgaccagaatagcaacgttgttcgaatttcactagaatttatgggattcacaggatcgttgacacctagaattggatctctaaaaagtcttacaattctttctttgcaagggaataacattactggtgacataccaa

SEQ ID NO: 138735 - DNA, 270 bp, Glycine max
gaaaaatggggtgtttccatctcacagtgactagtctgtgctttgtagtggttgtggttggagtgcttccactctccttagatgcacaactagatccctcgttttacagagacacgtgtcccaaggttcactccattgttcgcgaagtggtgaggaacgtttccaagaaagatccccgcatgcttgccagtctcattagacttcactttcatgactgttttgttcaaggatgtgacgcatcagttttgttgaacaacactgccaccatag

SEQ ID NO: 138736 - DNA, 267 bp, Glycine max
gttgattcggatctagagtcttcagtttctcctcgttgttcttcgctttcctgttttcaatttcgattctttcgttaatttaataagatgtttgggagggcaccgaagaagagcgataatacgaggtactacgaaatcctcggcgtctccaagaacgcttcgcaggatgatctgaagaaggcttacaagaaagccgccattaagaatcaccccgacaagggcggtgatcccgagaagtttaaagagctggcgcaagcttatgaggtt

SEQ ID NO: 138737 - DNA, 263 bp, Glycine max
aagggatctggagagacattttgattcctatgggaaaatattaaatataaggatcagaaggaattttgcttttattcagtttgaatcccaagaggacgctactagagctttggaggccaccaacctgagcaagtttatggaccgtgttatcactgtggagtatgccattagagatgatgatgacagagacagaaggaatggatacagtcctgatagaagaggccatgactctcctgatgggagatatggtcgtggtagatccc

SEQ ID NO: 138738 - DNA, 272 bp, Glycine max
cggaatcggctcgagtctttctctctctctctctctctctctgaagatggcttcacgcaggctcgtatcttctctgattcgatcctcccttcgtagatctcaatcgaagccctcaatttccgcatcgacatcgatgttcacgtcatccaaccgtgcctcaccgcacggatacttgctgaaccgcgtcgccgagtacgccaccgccgcggctgctgctaccgctcctccctggtcctcctcctccggggaagaaggatctcggcggcggcggg

SEQ ID NO: 138739 - DNA, 261 bp, Glycine max
gaatatggcttccttaagctcctcattagtgctgctccttgcagctctaattctatcccctcaagttcttgctgactatgagaagcccccaatttacaagccacctgtttacacaccgccagtttataagcccccagttgaaaaaccaccagtgtacaaacctccagtttacaagcctccagttgagaaaccacctgtttataagcctccagtttataagccacccatttacaagcctccagtgtataaacctccagttga

SEQ ID NO: 138740 - DNA, 263 bp, Glycine max
gaacaagatagatatatagaagagccttccatatatagcctcccaaaaaaatgaagagtactacctctttggctctctttctactttgtgccctaacttcatcatatcagccttcagccaccgctgatattgtattcgacaccgaaggcaatcctattcgaaacggcggcacatactatgtgttgccagttataagaggaaagggcggcggaatagaatttgccaaaaccgaaacagaaacatgccctctcactgttgtgcaa

SEQ ID NO: 138741 - DNA, 256 bp, Glycine max
gatattgttggatggaagtccagatgaaaaggatcaaccggcaaacatagggataaggccagaggctttgcagaccattgaaaatcttcgatctcttgttcacaagcagtgtggaagggtcgtctcttgcgctgacctcgttgttctagccgcacgcgatgctgtttctctgtcaggggggccaatatttcccgtgccactgagaagaaaagatggtctaactttcagcatagacggcacaggaaaccttccggga

SEQ ID NO: 138742 - DNA, 271 bp, Glycine max
tttgcttgattttggagatgtctctgctctcagatctcatcaaccttaacctctccgataccaccgagaaggtgatcgcagagtacatatggatcggtggatcaggaatggacctgaggagcaaagcaaggactctcccaggaccagttagcgacccttcagagcttcccaagtggaactatgatggttccagcacaggtcaagctcctggtgaagacagtgaagtgattttatacccacaagccattttcagggatccattcaggagggg

SEQ ID NO: 138743 - DNA, 263 bp, Glycine max
gcgtagaggaagagtgcgaaagaaagatcgttctcgatgacagaggggaacggtgacaaaactctgcgaaagatcgcagacgcattcaatgaccttgcaaacgttttcaccgattctcagagcgcagaagcagaggtcaaggttgctcccttctctcatgcctgctctctcgtctcccctctcttcggttgcttgggcgtcgccttcaagttcgccgaaatggattacgtcgccaaggttcatgatctggcagaggcgtccaa

SEQ ID NO: 138744 - DNA, 257 bp, Glycine max
tttgatgtaaatatctctctctctgttaatgaccttcttgcatgctgtggctttctgtgtggatctggttgtgatgggggatatcccttgtatgcgtggcaatacttagcccaccacggtgttgtcactgaagagtgcgacccatattttgatcaaattggctgttctcatcctggttgtgagccagcttaccggactcccaagtgtgttaaaaagtgtgtaagtgggaaccaagtttggaagaagtcaaaacacta

SEQ ID NO: 138745 - DNA, 254 bp, Glycine max
cctcgagcgaatcggctcacggctcgagatcatggctgaacagaagcaccaccacaacttccaccaccacaagggcgatgatgaccctggcgaggttgattataagaaggaggagaagcaccacaagcatcttgagcaccttggggaacttggtgctgcggctgccggtgcttatgccttgcatgagaagcatgaggccaagaaagacccagagcatgctcacaggcacaaggtagaagaggagattgcggcag

SEQ ID NO: 138746 - DNA, 259 bp, Glycine max
gaggattttgataacagaatggtgaaccactttgttcaagagtttaagagaaagaacaagaaggacataagtgggaaccccagagcacttagaaggttgaggactgcttgtgagagggccaagagaacattgtcatccactgcccagaccaccattgaaattgattctctctatgagggaattgatttctactccactgttactcgtgccagattcgaggaactgaacatggatctctttaggaagtgtatggagccgg

SEQ ID NO: 138747 - DNA, 258 bp, Glycine max
cctcgagcgctcgagccgctcgagccgcgcaccagtttcaccacacgaatatcttgtacgtttggaaccatccgagaaaaactctgtaaacatgttggtttaccaggacctccttacaggtgatgagcttctctctgactccttccgttacaaggaaattgagaatggaatgctgtgggaagttgaggggaagtgggttgttaaaggagcagttgatgtagacattggtgcaaacccttctgctgagggtggaggaga

SEQ ID NO: 138748 - DNA, 257 bp, Glycine max
taagaagggtgtgccttgcaaggacttggtgcctgttgtggtagacatactagtaaaacactttggagctgtcctaaggaatagagaggaaggggaagattaagtgcatgtttggatagttattacaaacagacatttgcatcaaaatgagttttgcaaaaggatcctcaccctttcttttgcaaaatgagttttgaagatcattgatttgatctcggaatttgtgcataagttgaattaaaaaccaaatatgcatt

SEQ ID NO: 138749 - DNA, 262 bp, Glycine max
caccacttcatatccaaaagcctcatgttgtatgtgtaccattcccagcacaaggccatgtaaacccctttatgcaactagccaaactccttcattgtgtgggtttccacataacctttgtgaacactgagttcaaccacaaccgttttgttaagtcccatggaccagactttgttaatggtctccctgatttcaaatttgagaccatacccgatggcttgccgccttcggataaggatgcaactcaggatgttccagcact

SEQ ID NO: 138750 - DNA, 253 bp, Glycine max
cttcatcttctgttctgatccaggtatggcttctaaacgcatcttgaaggagctcaaggatttgcagaaggatcctcctacctcatgcagtgcaggccctgtggctgaggacatgtttcactggcaagccacaatcatgggacctgctgatagcccatatgcaggtggtgttttcctagtttcaattcattttcctcctgactatcccttcaagccaccaaaggttgcttttcggactaaggtgttccaccca

SEQ ID NO: 138751 - DNA, 183 bp, Glycine max
ctgatctgaaaatgagtgcatcgaggttcattaagtgcgtcaccgtcggcgacggcgctgtcggcaaaacctgcttgttgatttcctacaccagcaacacttttcccacggactacgtgcccacggtttttgacaatttcagtgctaatgttgtggtggatggaagcaccgtaaacctggggt

SEQ ID NO: 138752 - DNA, 270 bp, Glycine max
gcttttcaaggattacttcgttgacgagaggaagaagcttggaagcaccaagagcaccaacaacaataatgaacttaaatgcgctattgaccacattttggatgcccagagaaaaggcgagatcaacgaagacaacgtcctctacattgttgaaaacatcaacgttgctgcaattgaaacaactctatggtcgattgagtggggcattgctgagcttgtgaaccacccagagatccagcaaaagttaagggatgagattgacagagttct

SEQ ID NO: 138753 - DNA, 266 bp, Glycine max
ttctgttcatcctttgcttcccaaagaaagagaaaataaaaagcaatgggtagccttgaagcggaaagaacaacagtaggattggcagcaagagacccttcagggattctctccccatacacctacaatctaagaaacacaggccctgatgatgtttacataaaagttcactactgtggaatttgccattctgatctccaccagattaaaaatgatcttggcatgtccaactatcccatggtcccaggacatgaagtggttggtga

SEQ ID NO: 138754 - DNA, 263 bp, Glycine max
agaaaagaaagaaatagaaaaagaagaaaaaaacacagcgtcctagatttcctcttctctgcttcggaagaaagagaaaacaaacaaaacaatggcgttcgcttctttcctcggcagagtcctcttcgcttctgtcttcatactctctgcttaccaacaatttaatgaatatggagttgatgggggacctgctacaaaagcactcagacctaagtttgatgcctttacacatcgggtgcattctcaagtgggctttcaaattc

SEQ ID NO: 138755 - DNA, 259 bp, Glycine max
cagagacgcagccatggggcggagacctgcgaggtgttataggcaaattaagaacaagccataccccaagtcacgtttctgccgtggtgttcctgatcccaagatcaggatttatgatgttggtatgaagaagaagggtgttgatgagtttcctttctgtgtccatctggttagttgggagaaggaaaatgtttcaagtgaggccctggaagctgctcgcattgcttgcaacaagtacatggccaaatttgctggaaag

SEQ ID NO: 138756 - DNA, 255 bp, Glycine max
  unsure (1)..(255): unsure at all n locations
gtcaggaatcgtttatatatagcttcgtggctcgggggacgatggtgttagccgagtacaccgagttcactgggaacttccctgcaattgcagctcagtgcctccagaaactaccctcttccaataacaagttcacctacaattgcgaccaccacaccttcaattttctcgtcgaagagngttacgcttactgtgttgttgccaaggaatctgttagcaaacaaatctctattgctttccttgaacgtgtaaaag

SEQ ID NO: 138757 - DNA, 259 bp, Glycine max
gtttcaatggggagcgaagagcagaacggcgaattctacctgcgttactacgtcggtcacaagggcaagtttggtcacgagttcctggagttcgagttccgcccagacggcaagctccgctacgccaacaactccaactacaaaaacgacaccatcatccgcaaggaggtttacctaacccccgccgttctccgcgagtgccgtcgcatcatcgccgagagcgagattatgaaggaagatgataacaactggcccgaac

SEQ ID NO: 138758 - DNA, 256 bp, Glycine max
tcggtgtcaatcttgttttaggagatctatacgatcaccaaagtttggtgagtgctataaagcaggtcgatgtggtaatttctactgtaggacacctgcagctagctgatcaagataagatcatttctgcaattaaagaagcaggaaatgttaagaagttctatccatctgagtttggaaatgatgtggaccggactcatgcagttgaaccagccaagtctgcatttgcaacaaaggccaaagttcgccgagctat

SEQ ID NO: 138759 - DNA, 263 bp, Glycine max
ctgaaagatcagaaccctgatataaagctatatggcattgaaccagtagaaagtccaatactgtctggaggaaaacctggccctcataagatccaaggaattggtgctggcttcatccctggtgttctggatgtcgatttacttgatgaagttgttcaaatttcaagtgaagaagccattgaaactgctaaacttcttgctttgaaagaaggtttgctggtgggaatatcatctggtgcagctgcagctgctgcaattaagat

SEQ ID NO: 138760 - DNA, 251 bp, Glycine max
agaggggtttgccttgtgccgtgtgtgttgttttcgggacgaagcagaagatggtgtcaggttctggactctgcgcaaagcgggtggtggtggacgcgcgccaccacatgctgggtcgtctagcctccatcgtggcgaatgagcttctgaacggccagagagtggtggtcgttcgctgtgaagagatttgcatctcgggctggctggtgaggcagatgatgagatacttgaggttccttcgcagacgcatg

SEQ ID NO: 138761 - DNA, 255 bp, Glycine max
ggcgtttccacttcttgttagagcaggcttctttctcgttggatgagctggttgatattttgaacgtgccagtggccttgatgatagccgactcggcgtgctccaagagccaccggatggtcttgccgtcgaacttgtggtcgatctcttgggtcagctggaagatccgggcgacgcaggcgttggtctacggcattggtctctccgaggagagacatggccaagctgcaggtcggcgtctccttggtctggtgc

SEQ ID NO: 138762 - DNA, 258 bp, Glycine max
caacgccaagcacaagaagatactggaagggcttcttaaattaccagagaataggggatgtgctgactgcaaagctaaaggtccaagatgggctagtgtaaatcttggcatctttatatgcatgcagtgttcaggaatacatcgaagtttgggggtacatatatcaaaggttcgttctgcaaccctggacacttggcttccagatcaagttgcattcatccaatcaatgggaaacgagaaagcaaatagtttctggga

SEQ ID NO: 138763 - DNA, 256 bp, Glycine max
aaagatataggaaacgtcccattttaattgcagcttctgtgggaagctatggagcgtatttggctgatggctctgaatatgttggggactatggtgatgcagttactgtccagacactgaaagattttcacagggaaagagtaaagattcttgttgaggctggtgctgacttaatagcctttgaaacaattccaaataagctggaggcacaggcttatgctgaacttctcgaggaagaaggcatagaaactcctcc

SEQ ID NO: 138764 - DNA, 254 bp, Glycine max
cggctcgagcggctcgagtatttgatgaacatttttctccatcaccagcactgaaagaaaaagttccagtcacagatttaaactctgcaagcttatcagagccaccagtatcgagccaatgctcagccgagcaattagcactgaaaaacagggctcccagatggcatgagcagcttcagtgctggtgcctaaacttcaagggtcgtgtttcagtggcttctgttaagaactttcaacttgtagctgctgttgat

SEQ ID NO: 138765 - DNA, 256 bp, Glycine max
cttgggcagagagatggtggtgactactggacttctgatgccggtccattagaggcatttaagaggtttggaaagaagcttgaagagattgaaaagaagcttatagagaagaacaaagatgagacattgagaaaccgctatgggccagctaaaatgccttacactctgctctatccttctagtgaggagggattgactttcagaggaattcccaacagtatctctatctaaggaccctatggttgcttaagtactg

SEQ ID NO: 138766 - DNA, 253 bp, Glycine max
gatatactctgtaggtgtttcagtatttcttggtggtaataaaccctcaagaataggtgacgttcgtggagacattagcataaatttctcttgtgatccagagatatcttccaagctggtagatattgctttggatgaaatgttacgccttcaagaagaagggccttcagaacaggatgtttcaaccatacttgaaattgagcaacgagctcatgaaaatggactgcaggaaaattattactggttggatagg

SEQ ID NO: 138767 - DNA, 255 bp, Glycine max
cttcaagattcaggtactgcgtatcggaagcagacacagatggctcgtacgaagcaaaccgctcgtaagtccacaggaggaaaggctcctaggaagcagcttgcaaccaaggctgcacgtaagtctgcaccaactactggtggtgtgaagaagccccaccgttatcgtcctggtaccgttgctcttcgtgaaattacccaataccagaagagtaccgagcttttgatccggaatctccccttccagaggctggtt

SEQ ID NO: 138768 - DNA, 258 bp, Glycine max
gatgtcctgctccttcaccaaccaggtcattgctcagcttgagttgtggaaggagaagagtaccggcaagtacgagaagaaagtttacgttttgcccaagcaccttgatgagaaggtggctgcacttcaccttggcaaacttggagctaagctcaccaagcttagcccggcccaggctgattacatcagtgtgcctgttgagggtccatacaagcctgctcattacaggtactaagtaattgagattatcaacggaaa

SEQ ID NO: 138769 - DNA, 245 bp, Glycine max
ccggcgacgcatcattcaaatttctgccctatcaactttcgatggtaggatagtggcctaccatggtggtgacgggtgacggagaattagggttcgattccggagagggagcctgagaaacggctaccacatccaaggaaggcagcaggcgcgcaaattacccaatcctgacacggggaggtagtgacaataaataacaataccgggctcattgagtctggtaattgggatgagtacaatctaaa

SEQ ID NO: 138770 - DNA, 261 bp, Glycine max
ctataaaaaaaaatctacactatctatccttccacaacacaacacaattcaataccatttaccaaactcactcatcaattctcatctttcttctcactaactattaattcatcatgtcgagcacagctggccaagtcatcaaatgcaaagctgcggtttcatgggaggcagggaagccacttgtgattgaagaagtagaggttgcgccaccacaagctggtgaagtgcgtttgaagatcctctacacctctctttgccaca

SEQ ID NO: 138771 - DNA, 257 bp, Glycine max
cgagtgtcacttactcgcagctatcatcacgcgcttgaggcttccattgctagcaattttactgataacggatgcattgcgtgtatgtgtcacaacactgatggactttatagtgctaagcagactgctattgtgagagcttctgatgatttttaccctcgtgatcctgcttcccataccatccatatttcttctgttgcatacaactcactattccttggagaattcatgcaacctgactgggacatgtttcatag

SEQ ID NO: 138772 - DNA, 250 bp, Glycine max
aggcgatgcgggatgaaccggaagctgggttacggtgcccaactgcgcgctaacctagaccccacaaagggtgttggtcgactaagacagcaggacggtggtcatggaagtcgaaatccgctaaggagtgtgtaacaactcagctgccgaatcgactagccccgagaaatggatggcgctaaagcgcgcgacctatacccggccgtcggggcaaggaccaagccccgatgagtaggagggctcggcggtc

SEQ ID NO: 138773 - DNA, 253 bp, Glycine max
caggtgacaatgatcaaacccttgacggggcagcaatactcagagaaagtggcagaaaattgtgtggccatttggaggtctcttgggatttatacagattcagaagccgaagcaatagacaagtttctttctgttttcaaagacctaacattcccaccaggctcctctatccttttcactgtctcacccaatggatcattaacgataagtttctctggtgatgaaaccattccagaagttacgagtgctgtta

SEQ ID NO: 138774 - DNA, 252 bp, Glycine max
ctaaaggggatatttatagcttcgggaccgtgcttcttgaattggtgacaggtgaaagacctacccatgtggctaaagctccagaaacttttaaaggaaatttggtagagtggattcaacagcaatctagcaatgcaaaactccatgaagtcattgatgaatcactagttgggaagggtgtagaccaggagcttttccaatttctgaaggttgcaagcaactgtgttacagcaatgccaaaggagaggccta

SEQ ID NO: 138775 - DNA, 249 bp, Glycine max
acacaatacaacttggacaacctgcaacagttaaagttgctgcaaaccttgtccgacttctctcatataacaataagaatttcttagagaccgggttaattgttggtggatgggataaatatgaaggtggacaaatttatggagttcctctgggtggaacaatagtacaacaaccttttgctatcggaggatctggctccagttacttgtatggtttctttgaccaagcctggaaagagggaatgacca

SEQ ID NO: 138776 - DNA, 259 bp, Glycine max
atcgaggatgccaccaacagaaatcgtttggcaaaactgctcagatttgagagcaccaagtctgagggtaaattgacatctctggatcagtacatatctagaatgaaagctgggcagaaggatatcttttacataactggaaccagcaaagaacaactggaaaactctccattccttgagcggcttaagaagaaaaattttgaggttattttcttcacggatccagttgatgaatacttgatgcaatacctgatggatt

SEQ ID NO: 138777 - DNA, 253 bp, Glycine max
aaagacttgcttccaagatggttctgctagagaagctctgggatgacacggttgctgcttttgcacagaactatgctaatcaacgtaaaggtgattgtcaactgatccactctggtggtggtggccaatacggggagaatcttgctatgagcactggtgacctaagtggcacagatgcagtgaaattgtgggttgatgagaagtctaactatgactacaattctaattcctgtgttggtggagagtgtctgca

SEQ ID NO: 138778 - DNA, 251 bp, Glycine max
ggcttatggtggatacctaggcacccagagacgaggaagggcgtagtaagcgacgaaatgcttcggggagttgaaaataagcgtagatccggggattcccgatataggtcaacctttcgaactgctgctgaatccacgggcaggcaagagacaacctggtgaactgaaacatcttagtagccagaggaaaagaaagcaaaagcgattcccgtagtagcggcgagcgaaatgggagcagcctaaaccgtgaa

SEQ ID NO: 138779 - DNA, 251 bp, Glycine max
atcgcagagaagaacagagagagatccatccatcaattccaatggccgatcagctcaccgacgaacagatctccgagttcaaggaagccttcagcctcttcgacaaggacggggatggttgtattaccaccaaggaacttgggaccgtgatgcggtcacttggccagaacccaactgaggcagagctgcaggacatgataaatgaggttgatgctgatgggaatggtaccattgatttcccagaattcctg

SEQ ID NO: 138780 - DNA, 250 bp, Glycine max
caaaaagcatgggggcaacaccaataacgatgataacagcaaggattccaaggctgctggcgacaagagattcaaaacgctgcccccagcagagtctcttcctaggaatgaaaccattggaggctacatctttgtttgcaacaatgataccatggctgagaatctcaagagacaactctttggtctgcctccacgatacagagattctgttcgggccattactccggggttgccccttttcctttacaac

SEQ ID NO: 138781 - DNA, 247 bp, Glycine max
gggggcgcaacgccctcgacctattctcagactttaaataggtaggacggtgcggctgctctgttgtgctgcgccatgcaatcgagagctccaagtgggccatttttggtaagcagaactggcgatgcgggatgaaccggaagctgggttacggtgcccagctgcgcgctaacctagaccccacaaagggtgttggtcgattaagacagcaggacggtggtcatggaagtcgaaatccgctaaggag

SEQ ID NO: 138782 - DNA, 252 bp, Glycine max
acgctaccttgatgtgaaggaaggtgatggagaagtccttgaatggtcaacaagagtttctattgtgaaagggattgctaaaggtatagcatatttacatgcatacaaagcaaacaaaccagctcttgttcaccaaagcatctcagctgagaaagtgctcattgatcagcggtacaacccattgctttcagattccggcctgtacaagcttcttaccaatgatgttgtcttctccgcgctaaagggtagcgc

SEQ ID NO: 138783 - DNA, 253 bp, Glycine max
tggaaatgccaatgtctggaaattctttaccgatttgtttgattatttacctctgaccgcccttattgagagtcagattttctgtttgcatggaggtctctcaccatctttggatacacttgataatatccgtgccttggatcgcatacaggaggttccacacgaaggaccaatctgtgacctcttgtggtctgatccagatgatcgctgtggttggggaatatctccacgtggtgctggatatacatttgga

SEQ ID NO: 138784 - DNA, 240 bp, Glycine max
cgactggttctgttttctctctgctgcttcgattcattcacacaaccatgactagccttactaatggcgatgctggctccctcaacaaggtccccacgatcaagttcaccaagctcttcattaatggagacttcgttgactctctgtcaggaaagacatttgagacaatagatccaagaacaggagatgttatagcgaggataagcgagggagataaagaagacattgacattgctgtta

SEQ ID NO: 138785 - DNA, 283 bp, Glycine max
ctagatgcaagggcagctgcagttgtaatgagagcagtgaagaatgttgttggaactggaagaactgttgcatgcaccattcaccagccaagtattgatatatttgaggcatttgatgagcttattctcatgaaagctggaggtcgcttaacctacgctggcccacttgggaagcactcaagtagggtcattgaatactttgagagtataccaggagtgccaaagattaaagacaactataatccatcaacatggatgctagaagttacttcaagatctgcag

SEQ ID NO: 138786 - DNA, 282 bp, Glycine max
gtagctattatactctctagagtaattgcggaatctgctagaattttctaataatggcgaaagacgttgagcaggtcacagagcaaggtgaatactccgcgaaggactaccatgaccctcctccggcaccgttgatcgacccagatgagctcacaaagtggtccttgtacagagccgccatagctgagttcatagcaacactcctttttctttacatcaccgtgttgaccattattggctacaagagacagagtgacaccaaaatccccggtaacaccgaat

SEQ ID NO: 138787 - DNA, 282 bp, Glycine max
gcaggatctggtgatggaattgcatactcggttggtgccaatttcacacctcacatccttacagtaaatgatggcgaggacgttactatgaagattatgtccttctctcaacaaggatatcgagcaatttgcattctgtctgcaaatggcacaatttcaaatgttacactacgccaaccaacttcttctggtggtactttaacatatgaggggcggtttgaaattctttccttgtctggttcatatataacaactgagaatggattaacaaagagcagatct

SEQ ID NO: 138788 - DNA, 280 bp, Glycine max
gccaacatctccggcggccacgtcaaccccgccgtcaccttcggcgccttcgtgggcggcaacatcaccttactccgcggcatcgtctacgtcatcgcccagctcctcggctccatcgtggcctccctcctcctcgccttcgtcactgcctcccctgttccagcattcgggctttccgctggagtcggagttggcaacgctttggtgttggagatcgtgatgaccttcggtttggtgtacacagtctacgccactgccgttgaccccaagaagggcaatt

SEQ ID NO: 138789 - DNA, 130 bp, Glycine max
actcgttcttcttcgtcgttatcttcttcttttgttgtttgtgtgtttgttttttctctcacctgaaaatgtcttgctgcggtggtaactgtggttgcggaaacgcctgcaagtgcggcaacggctgcgg

SEQ ID NO: 138790 - DNA, 277 bp, Glycine max
ctcgttgtagagcaaacaaaccgaaacacattcaccacgatggcgaccaaagcgatggaggtggtgaagggtctggacgtgaaacggtacatgggtcggtggtacgagattgcgtgtttcccgtcgaggtttcagcccagtgacggcgtcaacaccagagccacctacgctctcagagatgacggcaccgtcaacgttctcaatgagacttggagtggcggcaaaagaagcttcattgagggcactgcttataaggccgatcccaacagtgacgagg

SEQ ID NO: 138791 - DNA, 276 bp, Glycine max
acactcttctatattcctagtactttgaagagatattgaaataaacaacaatggccaattccatgagctttttcctgcttctttcttttctagcttttgctcccttgtgcctctgtcactataaccaagagggttacctctaccctcagttttatgactattcatgcccacaagctcaacatattgtcaagtctgtccttgctaagtatgttgcagagcaacctcgattggcggcttcgattctcaggcttcatttccatgattgttttgtcaagg

SEQ ID NO: 138792 - DNA, 273 bp, Glycine max
atgggatcaaggtattataacaatgaagaaaggtgaaaatgcgcttttcaccatcccagctgagctagcttatggtgaatctggttctcctccaacaatcccccccaatgcaactcttcaatttgatgtggagctgttgtcttggactagtgtgaaggacatatgtaaggatggaggcttatttaagaagatacttaccgagggagagaaatgggaaaaccccaaggatcctgatgaagttttagtgaagtatgaagcacatcttgaggatgg

SEQ ID NO: 138793 - DNA, 278 bp, Glycine max
ttccgttttgcgtttctctgcctaaaaggattgaaagatgggtcaagcactaggttgctatcaagttgatcagtcaaatgtggctatcaaggagcattttggaaaatttgatgatgtcctagaacctggatgtcattgcctgccttggtgtcttgggtaccagattgctggtagtttgtcactgcgtgtgcagcaacttgatgttcgatgtgagacgaaaaccaaggacaatgtctttgtcactgtggttgcatctgtgcaataccgagctgtgtctg

SEQ ID NO: 138794 - DNA, 279 bp, Glycine max
ttggaatccaaaaatgagagacatcatcagcattcacataggtcaggccgggatccaggttggcaactcctgctgggaactctactgcctggaacatggcatccagcccgatggcatgatgccaagtgactcctccttcggtgtagcccacgacgccttcaacaccttcttcagcgaaaccggatccggcaagcacgtccctcgcgccgtcttcgtcgatctcgagcccaccgtcatcgacgaagtccgttgtggcacttaccgtcaactcttccaccc

SEQ ID NO: 138795 - DNA, 277 bp, Glycine max
cacaaggtaatgtagtcattggtgggataatggagcacattgaacaggctgggatacattctggtgactctgcctgctctattcccaccagaactgttcctgcttcttgcttggagacaatcaggtcgtggacagtaaacttggctaaacaattgaatgtttgtgggctcatgaattgtcagtatgcaataactccatcaggggatgtatttttgctagaggccaaccctcgagcttctcgtacagttccatttgtatcaaaagcaattggccatcc

SEQ ID NO: 138796 - DNA, 276 bp, Glycine max
ataaatattccgttttgcgtttctctgcctaaaaggattgaaagatgggtcaagcactaggttgctatcaagttgatcagtcaaatgtggctatcaaggagcattttggaaaatttgatgatgtcctagaacctggatgtcattgcctgccttggtgtcttgggtaccagattgctggtagtttgtcactgcgtgtgcagcaacttgatgttcgatgtgagacgaaaaccaaggacaatgtctttgtcactgtggttgcatctgtgcaataccgag

SEQ ID NO: 138797 - DNA, 277 bp, Glycine max
tccagataggagcagtgtccttcacaggattgatactattgatagatgtttcagtcacgaaactgtggaggaaattattgaagctttggagaaagaggctgctgagtctaatgacgaatggtactcgactactctaaggagaataagagaagcctccccgttgagtttgaaagttactttacaatctatacgtgaaggtagatttgaaacacttgataaatgtcttgtacgtgagtatcgcatgtccctacgtggtatttcaaagcatgtctcctct

SEQ ID NO: 138798 - DNA, 274 bp, Glycine max
cacacacactctctctggtgttgttgagttttgaaaatggtgtcgtcgcaggttgtgaatacttacccgttgtccagctacacgttcggcacgaaggagcccaagatggagaaggatacctccgtcgcggatcgtctcgctcgcatgaaagtcaactatatgaaggagggaatgaggaccagtgtggaaggaattttactggtacaagagcacaatcatcctcatatacttcttctccaaattggaaacacattctgcaaactcccaggcggtc

SEQ ID NO: 138799 - DNA, 273 bp, Glycine max
ggaagtgtaagcaagcaaaaccctagcggcgcctgctttctttgttcgtgttttgcatcaggatggagtctcaggtgaagcacgcacttgttgtcaaagttatgggtcgtactggatccagaggacaagtgacccaggttagagtgaagtttttggatgatcagaaccgtcacatcatgaggaatgtgaaaggacctgtgagagaaggagacattctcaccctactcgagtctgaaagggaagcaagaagattgcgctagatggtctcttttt

SEQ ID NO: 138800 - DNA, 272 bp, Glycine max
accactaccacctttccgccttcagccgtttcaaccaccagcaaatggctgggcttcgtggcggccgtgtggattcaatgcatctccggcaacaactacactttctcaaactactccgacgccctcaaatccctcatgcacctcactcagctccaactcaacaacctctccgtcgctaaagacgttggcaaagcctttgggcttctcgcgggcctggcctccgaccgcttccccacttgggccattctcctcataggctccgtcgaaggcct

SEQ ID NO: 138801 - DNA, 272 bp, Glycine max
atttggtcttaccttaattgaggcagctgctcatggtttgccaattgttgctactaaaaatggaggtcctgttgatattcatagggtacttgacaatggtctgctcgtagatccccatgatcagcagtctattgctgatgctcttttgaagcttgttagcaacaaacaactttgggcaaaatgtagacagaatgggttaaagaatattcatttattttcatggcccgagcactgtaagacttacctttctaaaatagccacttgcaagccaa

SEQ ID NO: 138802 - DNA, 276 bp, Glycine max
aaataatcaaagctttgtgtgatatggctaaagataatgcacatgttcctatgctttcccgcactcatggacagccagcttcaccaactactttgggaaaggaaatggcgatctttgctgcaagattaagcagagaaaggaaggatctgtctcaggttgagatagtggggaaatttgctggtgcggttggaaattacaatgcacatattgttgcatatcctgatgttaactggcctcacattgcagaacagtttgtacactctcttggattaagtt

SEQ ID NO: 138803 - DNA, 274 bp, Glycine max
gagagatgtgagattaatgggtatgagataccagccaagagcaaagtcatagttaatgcatgggcaattgggagggatcctaactattggattgaagctgagaagtttagtcctgaaaggttcattgattgctcaattgattacaaaggtggtgagtttcagtttattccatttggagctggaaggaggatatgccctggcatcaatcttggcattgttaatgttgaattctcacttgcaaatttgcttttccatttcgattggaagatggctc

SEQ ID NO: 138804 - DNA, 274 bp, Glycine max
ggaacaatctagacttgtcctcagcaaccgcaaggccgtagctggcaaccaggcacagctaggaattggatcagtggtcactggctctgttcaaagcctgaagccatatggtgctttcattgacattggtggaattaatggcctccttcacgttagtcagatcagtcatgaccgtgtaactgatatttcaactgtgcttcaacctggtgacatattaaaggtgatgatcttaagccatgaccgagagagaggtcgagtaagtctttccactaag

SEQ ID NO: 138805 - DNA, 274 bp, Glycine max
ggtcatcgttgggatctccatacgccggatctgctaaaatacgcttgatccatatgggcctcctcgaccacttgtgggacgacaccgtcgccggcccaaggccggaaaacggtctcggcaagctccgaaaacaccacaccttcactttccgacctagctccggcaaggaaacggagggcgggagcgtgagatcgtacggagacgaatcgtcggaggcacctacgagagtgacgcgtagtatcatgatcgtgaaaccgcccgggtaccagagtgg

SEQ ID NO: 138806 - DNA, 275 bp, Glycine max
atatatagaagagccttccatatatagcctcccaaaaaaatgaagagtactacctctttggctctctttctactttgtgccctaacttcatcatatcagccttcagccaccgctgatattgtattcgacaccgaaggcaatcctattcgaaacggcggcacatactatgtgttgccagttataagaggaaagggcggcggaatagaatttgccaaaaccgaaacagaaacatgccctctcactgttgtgcaatctccctttgaggtctcaaaggg

SEQ ID NO: 138807 - DNA, 271 bp, Glycine max
tgacacgtgtgaaggtacccgacacgtcgaaggcgcgcgtggcagcaaccattgggatgagagagtgcaaagagagatgcttgagggattgttcgtgtgtggcttacacgagtgccaacgagagctctggaagtgggtgtgttacttggcatggaaatatggaagacactaggacttacatgcaagtgggacaaagtttgttcgtgcgagtcgacaagcttgagttagctaaatatgcaaaacatccgtatggttctctaggcaagaaggg

SEQ ID NO: 138808 - DNA, 271 bp, Glycine max
gttgaatgatgattgcgaacattttgagtcttttccacctggtcacttgtactctagcaaagagagagcgtttcgcagatggtacaatcctccatggttctctgaggctattccctcagcaccttatgatcctcttgctttgaggcatgcctttgagaaggctgtggtaaaaaggttgatgactgatgttccctttggtgttttgctctctggaggtttggactcttcattggttgcagccgtcacggctcgctacctggcaggcacaaat

SEQ ID NO: 138809 - DNA, 273 bp, Glycine max
cctaggcacccagagacgaggaagggcgtagtaagcgacgaaatgcttcggggagttgaaaataagcgtagatccggggattcccgatataggtcaacctttcgaactgctgctgaatccacgggcaggcaagagacaacctggtgaactgaaacatcttagtagccagaggaaaagaaagcaaaagcgattcccgtagtagcggcgagcgaaatgggagcagcctaaaccgtgaaaacggggttgtgggagagctatacaagtgtcgtgctg

SEQ ID NO: 138810 - DNA, 270 bp, Glycine max
gccggcagactttcttaaatactgctaagtggattgaagaggtgcgaacagaaagaggcagtgatgtcattattgttcttgttgggaacaaaactgatcttgttgagaaaagacaagtctctatagaggaaggagaagcaaaagcacgtgagctcaatgtcatgtttattgaaactagtgctaaggctgggtttaatataaaggccctatttcgaaaaattgctgcagcattacctggaatggaaacactatcttctgcaaaacaagaag

SEQ ID NO: 138811 - DNA, 262 bp, Glycine max
cacttcctcaccccatcatcgcagcctcgaaaccctgagtcgccagcgcagccccgaaacctagtccatttcttgtgcggtttatcatgggggatagtcagtattcgttttctctcaccacatttagcccttctggaaagcttgttcagattgagcatgccttgacagctgttggctctggacagacgtctttgggaataaaagctgcaaatggagttgtcattgccaccgagaagaaattgccatctatattggttgatga

SEQ ID NO: 138812 - DNA, 269 bp, Glycine max
tcttaaacgtctttcgctgttccaagatgggtgtggctgagaacattcccgatatggaggagggtaccttggagattggaatggaatacagaactgtatctggagttgctggaccattggtcattcttgacaaagttaagggacccaaatttcaagagattgttaatattcgtttaggagatggaactactcggcgtggacaagttctagaggttgatggtgaaaaagctgttgttcaggtatttgaaggtacatctggaatcgacaat

SEQ ID NO: 138813 - DNA, 270 bp, Glycine max
ggacgagaccccagaattgatgccattgagtcatgttcttgcaactaaactcggtgctcgtctcaccgaggttcgcaagaacggaacctgcccatggttgaggcctgatgggaagacccaagtgactgttgagtattacaatgacaacggtgccatggttccagttcgtgtccacactgtgcttatctccacccaacatgatgagactgtgaccaacgacgaaattgcagctgacctcaaggagcatgtgatcaagccggtgatcccgga

SEQ ID NO: 138814 - DNA, 264 bp, Glycine max
ccgaaacccttcttccattaccggcgaacgaaatcggtgacagaaaagcaacaagcaatctcgatccccaaatcgtgaaatccgatgacgaccgctgcaagacccacatgggcacctgctaaaggtggcaacgaacaaggtggtactcgaattttcggtccctcacaaaagtactcttctagggacatcgcatcgcacaccactctcaagcccaggaaggaagggcaggacacacaggatgaattaaagagaagaaacctacgt

SEQ ID NO: 138815 - DNA, 263 bp, Glycine max
cactacttctcttccgcttcttctgatggcaaaccaagcttcactctccttttcttcttccgtgtctcctgttcacgcgcctctcaagcgcgtgggcacgcacaacggaagctttcattgcgacgaggccctcggctgcttcatgattcgcctcacgaacaaattcaacagcgccgaaatcgttcgctcccgagaccctcaggtgttggaggttctcgatgctgttctcgatgttgggggagtgtatgaccctgcccgagatc

SEQ ID NO: 138816 - DNA, 287 bp, Glycine max
cacctcattcggctcgagatgctcgtgcctctagggttatcatatctccatttccatttcctctctctcagtctccaagaatattaagctatgggaaagtcttacccaaccgtgagcgctgattaccagaaggccgttgagaaggcgaagaagaagctcagaggcttcatcgctgagaagagatgcgctcctctaatgctccgtttggcatggcactctgctggaacttacgacgtgagctcgaagaccggtggtcccttcggaaccataaagcacccctccgaact

SEQ ID NO: 138817 - DNA, 266 bp, Glycine max
agcagttcgtagggctaccatagcccagaaatttataccagtattcatgggtagtgctttcaaaaataagggggtacagccacttctggatggtgtaattagttatttgccatgtccaatagaagttagtaattatgcccttgaccaaactaagaatgaggacaaggttgagttgcgtggaagtcctgatgggccacttgtggcattggctttcaagttggaggaagggcggtttggtcagttaacatatctaagaatttacgagg

SEQ ID NO: 138818 - DNA, 264 bp, Glycine max
attcagccacagtttcggaggagaagaaaatagtcgttcgagatggcccctacgaagcaaactgctcgtaagtccacaggaggaaaggctcctaggaagcagcttgcaaccaaggctgcacgtaagtctgcaccaactactggtggtgtgaagaagccacatcgttaccgtcctggtaccgttgctcttcgtgagattaggaaataccagaagagtaccgagcttttgatcaggaagctccccttccagaggctggttcgtgaa

SEQ ID NO: 138819 - DNA, 266 bp, Glycine max
gacagctttgtgctgtgtagtggttgtgcttggagtgcttccactctccctagatgcacaactagatccctccttttacagagacacttgtcccagggttcactccattgttcgtgaagtcgtcaggaacgtttcaaagaaagatccccgtatgcttgctagtctcattagacttcactttcatgactgctttgttcaaggatgtgatgcatcagttttgttgaacaacactgccaccatagagagcgagcaacaagctctgccaa

SEQ ID NO: 138820 - DNA, 264 bp, Glycine max
ctcgagccgcaacagcacaaagcgggttactgtctgttcaagctaccatctctctctctctttcttagtgcctccttgccagaagttaaaatggcccaagaaactttcctattcacatctgaatcagtgaacgaggggcaccctgacaagctctgtgaccagatctccgatgctgtgctcgatgcatgcttggagcaggaccctgacagcaaggttgcctgtgaaacctgcaccaagaccaacatggtgatggttttcggagag

SEQ ID NO: 138821 - DNA, 263 bp, Glycine max
gatacaatgaatctaattgctcgtttgctagccattgctgcttatatttatcgacggaaatacaaggatggaaaaatcataccgttggatgattctttggattatggtgcaaactatgctcacatgttagggtttgatgatccggaaatgctggagtttatgaggctgtatatttccatccacagtgatcacgaaggtggcaatgttagttcacacacagcccacctagttgctagtccgctatcagatccttatcttgcatt

SEQ ID NO: 138822 - DNA, 261 bp, Glycine max
cttcgttttgttcttccttgcgctcctcctcgttcgttcgttctacctcgcgtagatcggcaatggcggagaccgagacgtttgctttccaggctgagatcaaccagctcctcagtctcatcatcaacaccttctactccaacaaggaaatcttccttcgtgaactcatcagcaacgcctctgatgctttggacaagattagatttgagagtttgacggacaagagcaagctcgatgctcagccagagttgttcattcata

SEQ ID NO: 138823 - DNA, 259 bp, Glycine max
tgataaagatgatcagttggctgtagaatttgttactgcagctgcaaacataagggctgcttcatttggcatccctctccaaaacctttttgaagctaaaggtattgctgggaatattgtgcatgccgtggcgactacaaatgctgtgattgctgggttgattgtcattgaagcaatcaaagtgctgaacaatgacattaaaaattatagaatgacatattgtctggagcatccagcaagatacatgctgcttatgccg

SEQ ID NO: 138824 - DNA, 287 bp, Glycine max
tatttagcttggaattcggctcgagcgaatatcttgttgtttggagcgatccgagaaaaactctgtaaacatgttggtttaccaggacctccttacaggtgatgagcttctctctgactccttccgttacaaggaaattgagaatggaatgctgtgggaagttgaggggaagtgggttgatccaggagcagttgatgtagacattggtgcacacccttgctgctgagggtggaggagacgatgtgggagttgatgatgcagctgtgaaggttgttcgacattgttga

SEQ ID NO: 138825 - DNA, 263 bp, Glycine max
gcattttcagaggaacaatggcgggtagggtttcgacgtgcttcttcttcgtgtttgctctttctctccttcttccttttcagatctccgctgaggaatcatcggagaaagagttcgtactcacattggatcactctaactttcacgacactgtcagcaagcacgatttcatcgtcgtcgagttctacgctccatggtgtggccactgtaagaaaaataagcccgagtatgagaaagctgcttctatcttgagtagtcatgat

SEQ ID NO: 138826 - DNA, 262 bp, Glycine max
gcacatcctacaccaaatacgagatcagaaagcgaaaccctgaaccaaaatcatgtgccctattggtaatcgacgtgcaaaaccacttctcatccatggccaccccaatcctccataacctcaacaccaccatctccctctgccgccgcgcctccatccccgtcatcttcactcgccactgccacaagtcaccctccgacgccggcatgctggaggagtggtggtccggggacctcatcgtcgacggcacggcggaggccga

SEQ ID NO: 138827 - DNA, 261 bp, Glycine max
cacagttatagggtacaagcaccagacggatcatgctcatgcgtgtggtggggttggcattcttggcattgcatgggcctttggtggcatgatcttcatccttgtctactgcactgctgggatttcaggaggtcacattaacccagcagtgacatttgggctgtttttggctcgcaaggtgtctttgatccgagccatcatgtacatggtggctcagtgcttgggtgctatctgtggagttggtttagttaaggctttcca

SEQ ID NO: 138828 - DNA, 260 bp, Glycine max
agaactagtctaagcagaaatggcctcttcagtgatggcatctgtggccctcaaacctgcccctttcactgttgagaagtcctcagttagaggccttccctccctctcaaggaactcctcttcattcagagttgtggccagtggtggcaagaagatcaagactgacaagccttatggaattaatggtggcatggctttgagggaaggagttgatgcatctggcaggaaaggaaagggaaagggcgtttaccagtttgtag

SEQ ID NO: 138829 - DNA, 261 bp, Glycine max
agaactagtctaagcagaaatggcctcttcagtgatggcatctgtggccctcaaacctgcccctttcactgttgagaagtcctcagttagaggccttccctccctctcaaggaactcctcttcattcagagttgtggccagtggtggcaagaagatcaagactgacaagccttatggaattaatggtggcatggctttgagggaaggagttgatgcatctggcaggaaaggaaagggaaagggcgtttaccagtttgtaga

SEQ ID NO: 138830 - DNA, 258 bp, Glycine max
gtggaaatggcgctatggcatttgatgtagagtacgcacgatggttagaagagcataatagacaaaccaatgagctaagggctgcaataaattctcatgctggagatattgaacttcgaaccattgttgacaatttcatgacgcagtttgatgatatcttcagactgaaaggtattgcagcaaaagctgatgttttccacattctgtcaggaatgtggaagactccagctgagaggtgtttcatgtggatggaggctt

SEQ ID NO: 138831 - DNA, 260 bp, Glycine max
gatagcaaaagctaccaaccaacattgttatatacacacacatagcaagcagaacaaacatatcagaagttagctgcataacccagagaaaagtaaacactgcaataggaagagctttcaaatggcagagggaaaaggtagagtttgtgtcactggaggcactgggttccttggttcatggatcatcaagagactccttgaagatggatatgctgttaacaccactattagatctgacccaggacgaaagagagatgtta

SEQ ID NO: 138832 - DNA, 231 bp, Glycine max
acttgctgaagatgttgatttggaaaaaatagccaaggatactcatggttatgttggtgctgatctagctagtttgtgtactgaagctgcacttcaatgcatcagagagaaaatggatgtgattgacttggaagatgagacaattgatgctgaaatattgaactccatggcagtgacaaatgagcatttccagactgctcttggatcaagcaatccttctgctctacgtga

SEQ ID NO: 138833 - DNA, 266 bp, Glycine max
ggaatgtatagcccaatgcattccagcaacaagaagaagtcattggccatgttccagcatgattcaaattgtatggcacttctgatggatggaagtgctgcattgggtcttgatttgagttttgttacgcatgtatttctaatggagccaatttgggacagaagtatggaggagcaagtaattagtcgtgctcatcgaatgggtgcttctcgtcctattcatgtggaaacattagcaatgcgtggtacaattgaagagcaaatgct

SEQ ID NO: 138834 - DNA, 266 bp, Glycine max
ctgaactgaattgagtctcaacaacccagttgagtaactaagatggcgcaagtgaggaacaagcaagtgcttctaaaggactatgttaccggttttcccaaagaatccgccatgaatattgtcgaaagtaccataacattgaagcttccacaaggttccaatgatgtcttgctcaaaaatttgtatttgtcttgtgatccgtatatgaggaatctcatgaacaggcccgaagccctcccaatagtcgtgcttacactcctggctct

SEQ ID NO: 138835 - DNA, 266 bp, Glycine max
cacttcccttgttcgtttcactctcacaatggactccctctctctcttctgcaccggagcccttctcgccggcggcctctactggttcgtctatgtactaggccccgccgagcagaagggcaaacgcgccaccgatctatccggcggctccatctccgccgagaaagtccaagacaactacaagcagtactggtccttcttccgccgccccaaggagatcgagaccgccgacaaagttcccgacttcgtcgacaccttctacaatc

SEQ ID NO: 138836 - DNA, 263 bp, Glycine max
gccagagatggcattgtttcgctaggaggtccccatatccctcttaagactggaagaagggatggtagaaggagcagagcggatgtggttgagcagttcctcccagaccacaatgagtccatttctgcagttcttgacaagtttggtgccatgggaattgacacccctggcgtcgttgcactgcttggagcacacagtgttggtcgaacccattgtgtgaagttggtgcaccgtttgtacccagagattgatccagctctgaa

SEQ ID NO: 138837 - DNA, 269 bp, Glycine max
ttcataattccatcagccatgagttttcaagacatccaaggtgggcccaaccctccctctcgccggaaccagtccccgtcgcaggccgttgccgccggaattttccagatcaacaccgccgtcgctactttccggcgactcgtcgatggcgttggaaccgttaaagacactcccgaacaccgtcagaaactgcacaatacgaggcagagaatattgctgctggtgaaagatcattctgctaagctcaaatccttgactgaatctgatcg

SEQ ID NO: 138838 - DNA, 272 bp, Glycine max
gatcaaactggttcctattgacctacaaaacaggcctgcttggtataaggagaaagtctaccctgaaaacaaggtgccatcattggagcacaatggaaaggtcttgggtgaaagtctcgatttagtcaaatacatagatgacaactttgaagggccgtctctagttcccagtgatcctgccaagacagagtttggtgaggagttgatttcccatgttgatacattcaccaaagagctgtattctgcattgaaaggagatccaatacatcaag

SEQ ID NO: 138839 - DNA, 275 bp, Glycine max
ggctcgagcttcctcattagtgatgctccttgcagctctaattctatcccctcaagttcttgctgactatgagaatcccccaatttacaagccacctgtttacacaccgccagtttataagcccccagttgaaaaaccaccagtgtacaaacctccagtttacaagcctccagttgaaaaaccacctgtttataagcctccagtttataagccacccatttacaagcctccagtgtataaacctccagttgagaaaccaccggtttacaagcctc

SEQ ID NO: 138840 - DNA, 269 bp, Glycine max
caactcgaagtactcccttcccaggttgatgcagaacttgctaatgacgaaggttggtggtacaagccagaatacatcatcaacgacttgaatataaactcagtgataactacgccttgtcacgaggagatcttgcccatcaactcatggactacacagaggccttacgtaatcagaggctatgcatattccggtgatggaaggaaagtgacacgtgtggaggtaacacttgatagtggagaaacatcgcacgtgtgcacattggccca

SEQ ID NO: 138841 - DNA, 262 bp, Glycine max
ccaaccttgactgattatgacatacgctattacatatatgagcttcttaaggccatagattactgccattctcaaggcataatgcatagagatgtcaagcctcataatgttatgatagatcatgaattacggaaactccgcttgatagattggggtcttgctgaattttatcatcctggaaaggaatacaatgttcgtgtggcttcaagatactttaagggccctgaacttctagttgatttacaagactatgactactcat

SEQ ID NO: 138842 - DNA, 262 bp, Glycine max
agatggcacgcttgtcactgctcattttcgcgttctgcgccgtcgccgtcgccgtcgccgtcgcgggctcctccttcgatgatgccaaccctatccgtttagcgtcggacttggagtcgcaggtgctggacgtgatcggacagagccgccacgctctctccttcgcccgcttcgctcgccgccacggcaagcgctaccgttccgtcgacgagatccgcaaccgcttccggatcttctctgataatcttaaactcatcagatc

SEQ ID NO: 138843 - DNA, 262 bp, Glycine max
caaacatcttcacaaactagtaatattattcttcgaatccattttattattcataatgggtattttcacatttgaggatgaaaccacctcccctgtggctcctgctaccctttacaaagctctagttacagatgccgacaacgtcatcccaaaggctgtcgaagccttcaggagtgttgaaaaccttgaggggaacggtggccctggaaccatcaagaagatcactttcgttgaggatggagaaagcaagtttgtgttgcac

SEQ ID NO: 138844 - DNA, 264 bp, Glycine max
gaaggagaagacagacaactttggttcaaaggcattaataggtgaaggatcgtatggaagggtgtattatgcaaccttaaacaatggaaaagcagtggctgtgaaaaagcttgatgtttcatctgaacctgaatcaaataatgagtttttgacccaggtttccatggtctcaagattgaagaatggcaattttgttgagttgcatggttactgtgttgaaggaaatcttcgtgtacttgcatatgagtttgctactatgggctc

SEQ ID NO: 138845 - DNA, 263 bp, Glycine max
caataatcaaagctttgtgtgatatggctaaagataatgcacatgttcctatgctttcccgcactcatggacagccagcttcaccaactactttgggaaaggaaatggcgatctttgctgcaagattaagcagagaaaggaaggatctgtctcaggttgagatagtggggaaatttgctggtgcggttggaaattacaatgcacatattgtcgcatatcctgatgttaactggcctcacattgcagaacagtttgtacactct

SEQ ID NO: 138846 - DNA, 257 bp, Glycine max
cttgtcgcaattaaacaacttgaccgaaatggactacaagggaatagtgaattccttgttgacgtattgatgttaagtcttcttcaccaccctaaccttgtcaacctgattggttattgtgctgatggggatcaaaggcttttagtttataaatttatgtctttaggatccttggaagaccacttacatgatatttctcctggcaagaaagaacttgactggaacacaaggatgaaaatagctgctgaggctgcaag

SEQ ID NO: 138847 - DNA, 264 bp, Glycine max
ttaaagaagcatctgaagaggcttaatgccccaaagcattggatgcttgacaaactgggtggtgcatttgctcctaagccctcatctggaccacacaaatcgagggaatgcctgccactcatactcattttgcgaaaccggctgaagtatgctctaacataccgtgaagtcattgctattctgatgcagcgacatgtccttgttgatggcaaagtcaggactgacaaaacataccctgctggttttatggatgttgtatcaatc

SEQ ID NO: 138848 - DNA, 259 bp, Glycine max
cagtaatctccatgagcttctattgaattgatactttgatcaagatggatgggaaaaactctcttcaaataactagaagtggtattggtgcttatgatgatgatggacatgccaaaaggactgggaatttgcagagtgctgtagctcatatcattactgctgttattggttctggtgttctttctcttgcatggagcacttcccaattaggatggattcgagggccattttccttgctttgttgtgcaattgtcaccta

SEQ ID NO: 138849 - DNA, 243 bp, Glycine max
ggctcgaggatgggaagcgaggaagtgaagaggttgagcttttttgagagtccatttgggaaaagggttgaatgggccttgaaactgaagggtgtagagtatgagtacatagaacaagatatcttcaagaagagcaatctccttctggagttgaacccggttcacaagaaggtcccggttcttgtccatgcccagaaacccatcgctgagtcatttgtcatcgttgaatacgtagatgaaaca

SEQ ID NO: 138850 - DNA, 257 bp, Glycine max
gaggaattgggagtgatggatttctcttcggtgagggctgcgttggattcgaagtcgtacgacaaggttgcggatgtgtgcgacaacttgatgcttcaggttgcagctgagggcattgcttatcaggacgattggccctacacaattcacctcctctctcacatttatgttcacgacatcaatagtgcgcgctttctttggaagtcaataccttcctcaatcaaagagagccagcctgaagtcaccgcggtttggaa

SEQ ID NO: 138851 - DNA, 256 bp, Glycine max
gtttggtggctgttccctttcacgattctttctttagatcctctcttgactctttattctttatgaaattgtgggtttgacttaaatttctctgggtttgttgatttcgtggcagtgattaagagaatggcttcagatcggaaacttcacacttttgaggaggtggcaaagcacaaccagaccaaggattgctggctcatcatttctggcaaggtgtatgatgtcacccctttcatggaggatcatcccggaggtg

SEQ ID NO: 138852 - DNA, 261 bp, Glycine max
ggaatcaccccaatgttccaagttgccagagctatattagaaaaccctaatgacaggaccaaagtacatcttatctatgccaatgttacgtatgaggacattcttttgaaggaagagctggacggtcttgcttctaacgatccagatcgattcaaaatatactatgtgttaaatcagcctcctgaggtatgggatggtggtgaaggatttgtgtcaaaggagatgattcaaacccattgccctactccagcacaagatatt

SEQ ID NO: 138853 - DNA, 262 bp, Glycine max
gaaaatggcggtgcctctactctcgaagaagatcgtgaagaagagggtgaagaagttcaagaggcctcagagtgacaggaaaatttctgtcaagacaaactggcgcagaccaaagggtatcgattcccgtgttaggagaaagttcaagggatgcactttgatgccaaacattggttatggttcagacaagaagacccgccactatctccctaatggttttaagaaatttgttgttcacaatgtgaaggacttggaactgctc

SEQ ID NO: 138854 - DNA, 264 bp, Glycine max
ctcgagccgattcggctcgaggggccattgtcacatagttagcagaagccctcccgaggtatgacaaggcttaccttaagcagtttcaacaagattttaaattgtttctaaaatcacgttcggaggaacttgtgcctggaggagcaatggtcttattgtttttcggtagagatgaaactcctagaagaacctcttttgaagtaactagcctaatactcaacgacatgctcttggagggtttgattgaagaagaaaaactggact

SEQ ID NO: 138855 - DNA, 261 bp, Glycine max
ggggtttaaccgtgtacctctcacttcttctacgaccatcatcttccttccttccttcaatggttctaactcttagcagccatggcgagcaccaaagttcagagggttatgactcagcccattaacttgattttcaggtttcttcagagcaaagcacgcattcagatttggctatttgagcaaaaggatttgaggattgaaggccgaatcattggttttgatgaatacatgaatttggttcttgatgatgctgaagaagtg

SEQ ID NO: 138856 - DNA, 257 bp, Glycine max
cgagtttcacagcgaagtcgtaggagggtttcaaaagatggagaacatgcagagcttctggcaattgggcgatgaactccgtggacactcaaaagcatcggaggatcacaaatggttaatggttgcttcgaaattggcggaacagacaagattgaagggggagcgtgtgaacaaccttgatctttcaaagggccccattgaaacaaggtcaagggataaatttgggttccaggtagagaacaaatttgattctctta

SEQ ID NO: 138857 - DNA, 258 bp, Glycine max
ctcttcttcaacaacccttcttttgatctgtgcaagtgatcttgacaggagggaacaacaatggtgaagtctataaactttctcctacttctgtctctactagcctttgctcccttatgtcactgtaaaaagaaaataggaggttacctctaccctcaattctacgacggttcatgccccagagctcaagagattgtccaatccatcgttgccaaggcagtggcaaaagaaccccgcatggctgcttcgttgctcaga

SEQ ID NO: 138858 - DNA, 263 bp, Glycine max
aaaagaaagaaatagaaaaagaagaaaaaaacacagcgtcctagatttcctcttctctgcttcggaagaaagagaaaacaaacaaaacaatggcgttcgcttctttcctcggcagagtcctcttcgcttctgtcttcatactctctgcttaccaacaatttaatgaatatggagttgatgggggacctgctacaaaagcactcagacctaagtttgatgcctttacacatcgggtgcattctcaagtgggctttcaaattcca

SEQ ID NO: 138859 - DNA, 262 bp, Glycine max
gcgctttctctctccctctctagaaccgtaaccgtcgtttctttctttctctctcctcaaccagagatatagagtcaccttcttatttttctgaatctcgcggcgttgttctttctgctgctgcggctgtggttccggcggcgatgggacagcaatcgttgatctacagcttcgtcgctcgaggcaccgttatcctcgcggagtacaccgagttcaccggaaacttcaccggcgtggcggcgcagtgcctccagaaactccc

SEQ ID NO: 138860 - DNA, 253 bp, Glycine max
caaaaccacagagactctagttttgggtgttgggcctgtgaaggcccaattggagggtgctgaaatgggtgttgcatctgagaacggtggctgcaactgtggatcaagctgcacctgtgacccatgcaactgcaagtaaggtcaagatgtataaccttgaagcagagatagctgtaatatatgtatcaacaaataataagaagtagaagttgcgtttggagctttagaataaagtgtttgctatgtgttttgt

SEQ ID NO: 138861 - DNA, 252 bp, Glycine max
caaatgcctcgtcatctaattagtgacgcgcatgactggattaacgagattcccactgtccctgtctactatccagcgaaaccacagccaagggaacgggcttggcggaatcagcggggaaagaagaccctgttgagcttgactctagtccgactttgtgaaatgacttgagaggtgtaggataagtgggagctggaaacagcgaaagtgaaataccactactttgaacgttattttacttattccgtgaat

SEQ ID NO: 138862 - DNA, 253 bp, Glycine max
  unsure (1)..(253): unsure at all n locations
ctaaaacatctcaatgggttcttcttctattacaacatcgcccccaancatgaccatggctgcgatcgtgctcctgttcacggtctttgccgtttcctccgccctagacatgtcgataatctcgtacgacagcgcccacgcggacaaggccgccacgttgcgcaccgcggaggagctgatgtccatgtacgagcagtggctcgtgaagcacgggaaggtgtacaacgcgctcggcgaaacggagacgcgcttc

SEQ ID NO: 138863 - DNA, 253 bp, Glycine max
ctagggtttagacaatggtcgatggcttcttcagatgttgagtaccgttgctttatcgatgggctcgcttgggccactgacgaccaagctctcgagagagccttctctcagtacggcgaaatcgttgaaacgaagattatcaacgatcgtgagactggcagatccaggggttttggatttgtgaccttcgcctcggagcagtccatgacagacgccatcgaagggatgaacggccaaaaccttgacggccgta

SEQ ID NO: 138864 - DNA, 251 bp, Glycine max
  unsure (1)..(251): unsure at all n locations
ctttctcctaaaacatctcaatgggttcttcttctattacaacatcggtcggaancatgaccatagctgcgatcgtgctcctgttcacggtctttgccgtttcctccgccctagacatgtcgataatctcgtacgacagcgcccacgcggacaaggccgccacgttgcgcaccgaggaggagctgatgtccatgtacgagcagtggctcgtgaagcacgggaaggtgtaccacgcgctcggcgagaaagag

SEQ ID NO: 138865 - DNA, 249 bp, Glycine max
gtgtagcctccccagtttttcatcactctggttctattcagggattgcacaacattcatgggagctttaatgtacccaatatgcccagtacacttacgtcaagaaactcaacaataaatagcgttcgaactgggggaggagttcaacaaccttcggcaagcctttcaagtggaagatttgcatctaataatctaccggttgctctgtcacagctatctcatggaggctcccatggacattcaggagtca

SEQ ID NO: 138866 - DNA, 246 bp, Glycine max
ggaaaaggaaaaggagagtggtgctcattgatatttaagattgagacaaggcttttttgttggttggagatgcatgattgtggtgtgctttgttttcatttcatcatatgacagccttgtgggtttctttggtgtttcttgatgcatacttaatttactttattattgtgtatttatctcttccatttacaaaaaaaaaagtttgtgtaggtttccttctttgaagtaaaaagaaattaaatatgt

SEQ ID NO: 138867 - DNA, 247 bp, Glycine max
gtagctattatactctctagagtaattgcggaatctgctagaattttctaataatggcgaaagacgttgagcaggtcacagagcaaggtgaatactccgcgaaggactaccatgaccctcctccggcaccgttgatcgacccagatgagctcacaaagtggtccttgtacagagccgccatagctgagttcatagcaacactcctttttctttacatcaccgtgttgaccattattggctacaagag

SEQ ID NO: 138868 - DNA, 246 bp, Glycine max
atggcttcttcgtcttcagaatcggcggtgtcggagcgaagaggaataccaggggctcagttcgtagaggatgtccaaacttacctcactcaatcgggtctcgatgttggttcagccctggcttttctccaagagagacttcagcagtacaaggtagtagaaatgaagcttcttgctcagcaaagggatcttcaggcaaagataccagatattgaaaagtgcttagacgttgttgctacattgaaa

SEQ ID NO: 138869 - DNA, 247 bp, Glycine max
gttgtttgccgcaaaatacaatgcaaccaatcctcctagtgacaggtgtcgcattgcttaatgcaacacctttttgggggtttctgccaaatcccataaaaagtccaagactagcgaaaatatttccatgggccggaacattccccctaccttcaagtataaagagacttacagagttattgtgggagacaattagtgatcctaaaagtattgctgaggtacttagtcaggtttatgcagatcattc

SEQ ID NO: 138870 - DNA, 256 bp, Glycine max
cattgcttcgcctcacaacagcagctgcagcagcaatggctcccaaacgaggtggaaaggctccggctcttgccgctaagaagaagcctgagaaggtcacgaatccgttgttcgagaagcgtccgaagcagttcggaatcggaggggcgttgcctccgaagcagagactgtgacgtaggttcgatgaagtgggccaacagaatgtgtcaaatgtcagcaggaagaagcaggatgtctgaagacagaggtttgaagg

SEQ ID NO: 138871 - DNA, 246 bp, Glycine max
caagattcagcaagtgcgttttggaagcagagaccgaaatacttcgagatggcccgtacaaagcaaactgctcgtaagtcaactggaggaaaagctcccaggaagcagcttgcaaccaaggctgcacgtaagtctgcaccaacaactggtggtgtgaagaagcctcatcgttatcgccctggaactgttgctcttcgtgcgattaggaaataccagaagagcactgagctcctaatcaggaagctt

SEQ ID NO: 138872 - DNA, 246 bp, Glycine max
accgattgcgagaatggactttcgatgctcagtcatctctggtaccattctcttctctcttgctcttgcaggagagagccatgtccatgcatcgctacctgaggcagattattgggaagctgtttagccaaacactcccattcccactgcactgcgcgagcttctaaagcctctccctgcaggtgttgaaatcgatgaactccctaagcaaattgatgatacacagtacccaaaaacattcgtcta

SEQ ID NO: 138873 - DNA, 251 bp, Glycine max
ctcttcaaaagggagaagcaaaggaaagagaactctcaaaaaactattatagcaatggcagaacaaaaccaaaaccaaacaactgaagctggaaggcaccaagaggttggtcacaagagccttctccagagtgatgctctttaccagtatattctggagacaagtgtctacccaagagaacctgaatccatgacagaactgagagagttgacagcaaaacacccatggaacatcatgacaacctctgcaga

SEQ ID NO: 138874 - DNA, 260 bp, Glycine max
aagaagctaagattaacacaccaacccactagaaacatgaaaacccctaacaaagcctcattactcttattccctctcttgtccctttccttatttatcaaccattcccatgcagcaggaatcgctgtgtactggggccaaaacggtggagaaggcaccttagcagaagcttgcaacacaggaaactaccaatatgtgaacatagccttcttgtccacttttggaaatggccaaaccccacaactcaaccttgctggtca

SEQ ID NO: 138875 - DNA, 254 bp, Glycine max
gtgaaagtgagaaaaaataaaaatcaaagagcataatgtcagggatcattcacaagattggggagacccttcatgtgggagggcacaagaaggaggaggagcataagggtgagcaccatgctggagaatacaaaggggagcaccatggtgaacacagtagtgagtacaaaggagagcatcatggtgaacacaaagctggagagtaccatggtgagcacaagccagagcacaaagaggggttcctagacaaagtc

SEQ ID NO: 138876 - DNA, 255 bp, Glycine max
tggtgaacataagtggaaaccgatggcttgcaatccgattggaaactttgggaggcctcatgatatggttgactgcaacctttgccgtcatgcatcaatggcagggcggagaaccagcaagaattcgcatccaccatggggttactacttagctatgctctgaacattactagtttgcttaccggtgtgctgaggctggcaagtttggctgagaatagtttaaacgcagttgaacggattggcacttacattgat

SEQ ID NO: 138877 - DNA, 244 bp, Glycine max
gcggctgaggaacttcagaatcagatggaacaagattatgacatagggtcgacaataagagacaagattattccccatgctgtatcatgggttactggggaggccatgcagggggatgagtttggagatctggaggatgacgaggatgatgaagagattggggaggatgatgatggagacggggaggaagatgaagatgacgatgatggcggagatgatgaggaagaaagcaggactaaaaaga

SEQ ID NO: 138878 - DNA, 259 bp, Glycine max
agagaaactccctaacagaatcattttcttccgagacggggtcagtgaaactcagttttacaaagtgctggaagaggaacttcaatccatcaggtgtgcatgctcaaggtttcctggctacaaacctaccattacctttgcagttgtgcaaaagaggcatcacacaaggttgtttccctttgaaactgaccagtcttcaactcaaaaaaacaattttctatatgaaaacattcctccagggactgtggttgattctgtg

SEQ ID NO: 138879 - DNA, 260 bp, Glycine max
tgaactcaacccttccttcgttccgcgacaacgatgaccaactacggcacaattccaacctcctcctcgccttcgaccaacctcgacttcatctcacgcgccaagcagcgcgtcaaggagggcctcggaacccgccgtccatggaagctcatgttcaatttccgatccttcggtctccccgccggggtcggagacgccgtcgcgcgtgtgagggagaacatctcctacttccagatgaactacgcgatcgtcgtgctcat

SEQ ID NO: 138880 - DNA, 261 bp, Glycine max
ctctagggttatcatttctccatttccattttctctctcacttttcaagaatcgtaagctatgggaaagtcttacccaactgtgagtgctgatcaccagaaggccgttgagaaggcgaagaagaagctcagaggcttcatcgctgagaagagatgcgctcctctaatgctccgtttggcatggcactctgctggaacctttgacaagggcacgaagaccggtggacccttcggaaccatcaagcaccctgccgaactggct

SEQ ID NO: 138881 - DNA, 265 bp, Glycine max
gtgccggcgcgcgctgaagtttgctaggttcatgagcaggttcgggaagagttaccgaagcgaggtagagatgagggagatgtacgagatattctcgcaaaacctcaggttcatccgctcccacaacaagaaccgcttgccctacactctctctgttaatcattttgctgattggacttgggaggagttcaaaagacacagactaggcgctgcccaaaattgctctgccactcttaacggcaacccagtttctactaaagattat

SEQ ID NO: 138882 - DNA, 258 bp, Glycine max
gccggcagactttcttaaatactgctaagtggattgaagaggtgcgaacagaaagaggcagtgatgtcattattgttcttgttgggaacaaaactgatcttgttgagaaaagacaagtctctatagaggaaggagaagcaaaagcacgtgagctcaatgtcatgtttattgaaactagtgctaaggctgggtttaatataaaggccctatttcgaaaaattgctgcagcattacctggaatggaaacactatcttctg

SEQ ID NO: 138883 - DNA, 258 bp, Glycine max
ggccacgaaatcggggaggttcactgggtttgttaaggagcctggtgtgcttgttggggagcacaagaaagtggctgttgtgaaggagtttcagggtaatttacctgacttgggactaggagatagtaaaagtgattatgacttcatgtcaatttgcaaggaagggtacatggtgccaaggactaagtgtgaaccactaccaagaaacaaacttttaagtccaattatttgtcatgagggtaggtttgttcaaaggcc

SEQ ID NO: 138884 - DNA, 256 bp, Glycine max
gacaaagctttggaaacatacagggagggtttgaaacatgatcctaacaatcaggaattgcttgatggcataagaagatgtgtagaacaaattaataaggctagccgtggagattttacacctgaggagttaaaggagagacaggccaaggcaatgcaagacccagagatacaaagcattctgcaagaccctgttatgacacaagtattgactgatttccaggaaaatcccagagctgcagaggaacatgtgaaga

SEQ ID NO: 138885 - DNA, 263 bp, Glycine max
cctggtcacttgtactctagcaaagagagagcgtttcgcagatggtacaatcctccatggttctctgaggctattccctcagcaccttatgatcctcttgctttgaggcatgcctttgagaaggctgtggtaaaaaggttgatgactgatgttccctttggtgttttgctctctggaggtttggactcttcattggttgctgccgtcacggctcgctacctggcaggcacaaatgctgccaagcaatggggaaccaaattaca

SEQ ID NO: 138886 - DNA, 231 bp, Glycine max
  unsure (1)..(231): unsure at all n locations
gtctcctcctcaatcttcattgtantgttctttcccttgnngacaaaccaagactaacacacacagaacatagcttgtgttggtgaggtgagaagataaagaaagaatggcatttgcaggaacaacacagaagtgtatggcctgtgacaaaaccgtttatctggttgataagttgaccgcggataaccgagttttccacaaagcttgcttcagatgccatcactgcaaagg

SEQ ID NO: 138887 - DNA, 251 bp, Glycine max
ggcagcagcagaggggctaaacagagagcagtacgtgtacttggcgaactgtcggagcaggcggagcggtacgaggagatggtggagttcatgcagaaggtggtggtggggtcgacgccggcgtcggagctcacggtggaggagcgcaacctcctctcggtggcctacaagaacgtcatcggctcgctgcgtgccgcgtggcgcatcgtctcctccatcgagcagaaggaggagggccgcaagaacgacga

SEQ ID NO: 138888 - DNA, 254 bp, Glycine max
cttagttatctaattacctcaattaatcccttaattgcaagcatcatggctgaggagaagcaccaccaccacttccaccaccacaagggcgatgatgtgcctggcgaggttgattataagaaggaggagaagcaccacaagcatcttgagcaccttggggaacttggtgctgcggctgccggtgcttatgccttgcatgagaagcatgaggccaagaaagacccagagcatgctcacaggcacaaggtagaaga

SEQ ID NO: 138889 - DNA, 256 bp, Glycine max
ctgctggattgtttcaatccactggatggccgtccgtagttgctgttgtgggtaactggtttgggaagagcaagagagggttgatcatgggaatttggaatgctcacacttcaattgggaacattgctggttctttgattgcttctgccatgttgagctatggatggggttggtcctttgtggtgccgggactaataactgctttcatcggtttggcggttttccttatattgccggtcacacccgagtcagtagg

SEQ ID NO: 138890 - DNA, 253 bp, Glycine max
attacgtttactagaagtggacaatagagtggtagtgccagctaaaactcatctgcgtgttattataacatcagctgatgtacttcatagttgggcagtaccttccctgggtgtcaaatgtgatgctgtgcctggtcgtttgaatcagatctctacttttatacaaagagaaggggtttactatggtcaatgcagtgagatttgtggaactaaccatgcctttatgcctattgtcatagaagcagtttctact

SEQ ID NO: 138891 - DNA, 254 bp, Glycine max
caaatagctcattagtgagtttttgagttcgtgtgtcctttctttgtgtgttgcaaggttacaagatggaggatcaaaatgcatcatctaatggattgggcaaggtgttccacaaggttaagccctaccttgctatgatgtcccttcagtttggctactccggaatgtacatcatcaccatggtttctttcaagcatggcatgagccattgggtactctccgtgtaccgtcatatagttgccactctcatcatg

SEQ ID NO: 138892 - DNA, 249 bp, Glycine max
ctcacctttctcctaaaacatctccagtgggttcttcttcttctattacaacaacgtcgtccaagaccatgaccatggccatggccacgatcctgctcctgttcacggtcttcgcggtttcatcggccctagacatgtcgataatctcgtacgacaacgcccacgccgccacgtcgcgcagcagcatgcagctgatgtccatgtcacgagcagtggctcagcacagcacggcaaggtgtacaacgcgct

SEQ ID NO: 138893 - DNA, 256 bp, Glycine max
gatccatctcttgtttcttgctttctttcttcaccatgtcacttgctgggaaaatcaccactgaaatcggggttcatgcaaccgctacaaagtggttcaacctcttcgcaacacaactccatcatgttcaaaacctaactgatagagtgcatggaaccaagctgcatcaaggtgaagactggcatcacaacgagacagtcaagcactggacttataccatagatggtaaggttacaacatgtctggagagtattga

SEQ ID NO: 138894 - DNA, 259 bp, Glycine max
agaattccaactgataaaaagaatattcagagaattccaaagacagagatgactgtcattaaggaagagcaacaaccaaaccaaatagctggccacaaagaacttggtcacaaaagtctccttcagagcgatgcactctatcagtatatacttgaaaccagtgtgtacccaagagagcatgagagcttgaaggagctacgagagttgacggaaaaacacccttggaacctgatggctacaccacctgacgaaggacaat

SEQ ID NO: 138895 - DNA, 250 bp, Glycine max
ctgccttacaacttgtgctcagaaaatctctggcttatggtggtatgtcgagtggcgttcatgacgagtgcctttgcacatccggatgattcagcacaactctgtgttcttgcagaagactgtgaccagcctgactatgttaaactggttaaggccctttgtgcagagcacaatgttagcctgctgacagttccgagtgcaaagacccttggagaatgggctggtttgtgcaagattgattccgaaggaa

SEQ ID NO: 138896 - DNA, 257 bp, Glycine max
attcagctctatgtaagttaactagctgctgttctttcaagtgctggatacaaggtggttgttcttgagaaaggaaactatttttctactcaggattattcatctctagaaggtccttccatgaatcaactatatgaaactggagggatccttgcttctgtggactcaagagtgctagttttggcaggatcaacagtgggtggtggctctgctgctaattggtcagcctgcattaagaccccacacaaggtgctaaa

SEQ ID NO: 138897 - DNA, 248 bp, Glycine max
cgagggtttgggtttctcttcctccctggaagaaaaagaagagtcaccgctacgacgccgttcgtgcttttttgaggtgccacagtcatgtttgggcgtggtggaccaaggaggagtgacaactccaaatattatgatattctcggggtttccaaaaatgccagtgaagatgaaatcaagaaggcctatagaaaggctgctatgaagaaccatccagataagggaggagatcctgaaaagttcaagga

SEQ ID NO: 138898 - DNA, 248 bp, Glycine max
gctgaaacacgccacactcttcttaccatgggcctcctcgatcacttgtgggatgacaccgtcgccggtcctcgcccggagaacggtcttggcaagctccgaaagcaccacaccttcgctttccgatctgcctccggcaaggaatcagacagcggaagcgtgaaatcgtacggtgaagatttgccggaggatgcggtgagagtgacgcgaagtatcatgatcgtgaaaccacctggtggtaaccagag

SEQ ID NO: 138899 - DNA, 248 bp, Glycine max
actttctatctcatttccaatctcattttcgttcggttcaaacactctcatggcatcagacaagaagattaggatcggcatcaacggatttggaaggattggccgtttggtggccagggttgctcttcagaggaatgacgttgaacttgttgctgtcaacgatcctttcatcaccactgattacatgacatacatgttcaagtacgacaccgttcatgggcagtggaagcattttgatgtgaagctga

SEQ ID NO: 138900 - DNA, 251 bp, Glycine max
gaagaaaagtcaaagacaatgtcagggatcattcacaagattgaggagacccttcatgtgggaggccacaagaaggaggaggagcacaagggtgagcagcaccatggtggagaatacaaaggggagcatcatggtgaacacagtactgaatacaaaggagagcatcatgttggtgagcacaagccggagcaccatggaggagaagagcacaaagaggggttcctagacaagatcaaggacaagatccacgg

SEQ ID NO: 138901 - DNA, 250 bp, Glycine max
ggcactttatgattctgatctgttggaggaagagcacatcgtgcagtggtatcaagaagggctgaatggcgacaacaaggactctcagatatggaagaaggccaaacctttgattgaatggcttcaaagtgcggaatcagaaacagaggaagagtaatctgcacgaatagtctttcatttcagtttctttacttgtgtcttttatttccaataaagggtcttgctgtagttggcccattgagcgttgttc

SEQ ID NO: 138902 - DNA, 254 bp, Glycine max
tgcatttattagataaaaggtcaacacaggctctgcctgttgctttgatgattcatgataactcgtcggatcgcacggcctttgtgccggcgacgcatcattcaaatttctgccctatcaactttcgatggtaggatagtggcctaccatggtggtgacgggtgacggagaattagggttcgattccggagagggagcctgagaaacggctaccacatccaaggaaggcagcaggcgcgcaaattacccaatcc

SEQ ID NO: 138903 - DNA, 251 bp, Glycine max
caaagatggcgatgttgcactctttttttggattatcaggtactggaaagacaactctgtctaccgatcataaccggtacttaattggagatgatgagcattgctggagtgaaaatggagtggcaaatattgaaggaggttgctatgcaaagtgtgtcgatctttcaaaggataaagaaccagacatctggaatgccatcaaatttgggacagtactcgaaaatgttgtttttgatgagcatactcgagag

SEQ ID NO: 138904 - DNA, 251 bp, Glycine max
cagaaggaaacaagagggaaagccttatgacaaacccaacattgtcactggagccaacgttcaggtttgctgggagaaatttgcaaggtactttgaggtggagttaaaggaggtgaagctccgtgatgattattatgtaatggaccctgaaaaggccgtggaattggtggatgagaacactatttgtgttgctgctatccttggttccacactaaatggagctagtgaagatgtcaaacgcttaaatgatc

SEQ ID NO: 138905 - DNA, 249 bp, Glycine max
gcaataaatgcccaaattctaacagaaatggagatccccgaaagctatattgactctctgcccaagaatggaagagcaagtctaggggactcgaactacaggagtataacagttgaattttttgatcctgaccagttcctatcaaccatggacttatcatcagaacataaaatcctagatctcaagaatagaattgaagcatcaatagtgatttggaagcgaaagatgcaccaaaaagattccaaatct

SEQ ID NO: 138906 - DNA, 251 bp, Glycine max
gtgagaggagagagaaagtagcagatcctccatggcctccaccaaggaacgtgaaaacttcgtctacgtcgccaagctcgccgaacaagccgaacgctatgaagaaatggtggaagcaatgaagaatgtggcgaagctaaacgtggacattgacggtagaggagcggaaccttctgtcggttgggtacaagaacgtggtgggtgctcgtagggcttcgtggaggattctttcctcgattggacactaaaaa

SEQ ID NO: 138907 - DNA, 249 bp, Glycine max
cgatgaggagccacacattccttaggataacttcacttttggtgtttattgggtggctcacggtttggatcttgttgcctacaaaggtttacaagaacacctggacccccaaactcaaaaccaagttaaactctacatactttagagagcaaggaacaaatctcttgcttttcacattccccgttatgctcataggggccctgagctgcatctatctccatcttcacgaaaaaggaacggaaaagctac

SEQ ID NO: 138908 - DNA, 248 bp, Glycine max
gcaaaggattctacccgccgctcgatgggaattgcgcttcaaggcgtctcgtagggctaatccgcctcacgagggtcaccaacggcacgtgcctttgtgggggccgaggccccctactgctggtcggcaaacggacggcgggcgcacgcgtcgcttctaggccggattctgacttagaggcgttcagtcataatccaacgcacggtagcttcgcgccactggcgtttcagcccatcgcgatgaccaat

SEQ ID NO: 138909 - DNA, 251 bp, Glycine max
gaataatcgagacacaaagatcatagtgatcattttttaatttctcagatttatccgacgtccttgcagatccaccaaccgttatggctgccttcagcggtgatgaaacggcaccgtttttcggcttccttggcgccgcagctgccctcgtcttctcctgtatgggagctgcctatggcacagcgaagagtggcgtgggcgtggcttccatgggtgtaatgagacctgagctggtgatgaagtcgattgtt

SEQ ID NO: 138910 - DNA, 251 bp, Glycine max
ataattaatttgttaaactaacatgttagaatttaattttatgcagcacattttatacaggcagaaagaacaattcagtgatggagttggctatggttggattgatggccttaaagctcatgctgagaaacatgtaaaacatgatagaaaccttttattctctaatcccattttttctcttgttgtcaattatcatgcaagacatctcatatttttaattattggcttattaaattttcctataggtgact

SEQ ID NO: 138911 - DNA, 243 bp, Glycine max
cctccatcttctcatgggctctgacaaaatactcccttctcatgtggtcgcaaatggccacgccccacttgattccggccacgcccgtctcaaagaactcggttacaaacaagaactcaagcgtgatctttcggttatttcgaattttgcgttttcgttttctattatatcggtgttgactggagtgaccactctttacaacactgggttgaattatggcggccctgtttcgctggtgtatgg

SEQ ID NO: 138912 - DNA, 251 bp, Glycine max
tcgggattgactgcctcaattgctctagaaaaggcaggacagatggaatctggaaaagtggtccttgttactgctgcggcaggaggaacggggcaatttgctgttcaggtacttcataaatcccatgccacttttctcaaccatatgagcttgtgtatatgtttccaggaactatttgttgtaacaaattgattgtttcttgatattctgtagttgtaggctgaacctgggaaaactaaccaatattttac

SEQ ID NO: 138913 - DNA, 261 bp, Glycine max
aaaatattttcttctatctcatcctttctgttagttttatttttatttttttatcttgggtaaaaaaaatcatgggtgttttcacttctgaaagcgaacacgtttcccccgtctctgctgcaaaattatacaaagctattgtcctagatgccagcaatgtcttcccaaagcattgcgcaatttcattaagagcgtagaaaccattgaaggagatggagggccaggaaccattaagaagcttactcttgctgaaggtttagg

SEQ ID NO: 138914 - DNA, 273 bp, Glycine max
gagaaaaatggggtgtttccatctcacagtgactagtctgtgctttgtagtggttgtggttggagtgcttccactctccttagatgcacaactagatccctcgttttacagagacacgtgtcccaaggttcactccattgttcgcgaagtggtgaggaacgtttccaagaaagatccccgcatgcttgccagtctcattagacttcactttcatgactgttttgttcaaggatgtgacgcatcagttttgttgaacaacactgccaccataga

SEQ ID NO: 138915 - DNA, 259 bp, Glycine max
gcaaaggattctacccgccgctcgatgggaattgcgcttcaaggcgtctcgtagggctaatccgcctcacgagggtcaccaacggcacgtgcctttggggggccgaggccccctactgctggtcggcaaacggacggcgggcgcacgcgtcgcttctagcccggattctgacttagaggcgttcagtcataatccaacgcacggtagcttcgcgccactggctttactaccaagcgcgatgaccaattgtgcgaatcaa

SEQ ID NO: 138916 - DNA, 257 bp, Glycine max
ctggggagagaccaacttggctgatgctagccctaggactgatacttcaacagatgatacagaagacaaaaatcaaaggcctgaaaggggtgaatccagtggatcaaaagataaatcagatcaaaagacattaagacggcttgctcaaaatcgtgaggctgccaggaaaagccgactgaggaaaaaggcatatgtgcaacaattagagagcagtaggttgaaactgacccaacttgagcaggagctccagcgagcac

SEQ ID NO: 138917 - DNA, 211 bp, Glycine max
acttttcatccttcgatcatacacttagttgcttccaattaagatggttctgctagagaagctctgggatgatgttgtggctggccctcaacctgagcgtggccttggcaagctcagaaaactcaccaccctcaaaactattgatgaaggagaaagtagcaagctgcagaagacgttgtcgatgccgtcgacaccaacaaccccgatgact

SEQ ID NO: 138918 - DNA, 257 bp, Glycine max
ttcaaggacaagaaagttgtcatctttgggctcccgggtgcatacacgggagtttgttcaaacaaacacgttcctccttacaaggagaatattgataagtttaaggctaaggggatagattctgttatttgtgtggctaactatgatccgtacactatgaatgcgtgggctgagaagcttcaagccaaagatgctattgagttttatggggactttgatgggagctttcacaaaagtttggaattagttactgatct

SEQ ID NO: 138919 - DNA, 263 bp, Glycine max
cactgttccaatacggaatctaaggcaaagcaaaccaaacatcttgaatcatgggttcaacaggtgagactcagattaccccaacccacgtatctgatgaagaagcaaaccttttcgccatgcaactagccagtgcttctgtccttccaatgatcctcaaatcagcacttgagcttgatctgttggaaatcatagccaaggctggccctggtgttcatctttcccccactgacatttcttctcagctcccaacacagaaccct

SEQ ID NO: 138920 - DNA, 267 bp, Glycine max
ctcgagccgcatttctgttggtgcttctggtgcactttttggcttgctgggaggcatgcattcagaactcattactaactggtctatatatgataacaagctaacagcactcctcacccttgtgatcatcattgttatcaatctagcagttggaattctcccacatgtggacaattttgctcatattggaggctttcttactggatttcttctcggatttgtgtttttgatacgtccccagtttggatgggttaaccaacgatatgc

SEQ ID NO: 138921 - DNA, 260 bp, Glycine max
caccgcacgaatatcttgttgtttggagcgatccgagaaaaactctgtaaacatgttggtttaccaggacctccttacaggtgatgagcttctctctgactccttccgttacaaggaaattgagaatggaatgctgtgggaagttgaggggaagtgggttgttaaaggagcagttgatgtagacattggtgcaaacccttctgctgagggtggaggagaagatgagggagttgatgatgcagctgttaaggttgttgaca

SEQ ID NO: 138922 - DNA, 256 bp, Glycine max
cttgcagaaagacccaccaacttcttgcagcgctggtccagtagctgaggacatgttccattggcaagcaacaataatgggtcctgctgatagtccttatgctggaggtgtattcctagtcactattcacttccctccggattatcctttcaagcctcctaaggttgcctttaggactaaggtgtttcacccgaacatcaatagcaatggtagcatttgtcttgatatcctgaaggagcagtggagccctgcactc

SEQ ID NO: 138923 - DNA, 257 bp, Glycine max
gcgaagaagaagctcagaggcttcatcgctgagaagagatgcgctcctctaatgctccgtttggcatggcactctgctggaacttacgacgtgagctcgaagaccggtggtcccttcggaaccataaagcacccctccgaactcgctcacggcgctaacaacggtcttgacatcgctgttaggcttttggagccactcaaagcggagtttcctattttgagctacgccgatttctaccagttggctggcgttgttgc

SEQ ID NO: 138924 - DNA, 234 bp, Glycine max
gagtcatttccttattggaagcagttctagtaatgctcctgtagatgttggaggttttcataatgaatttggaactagtagaaatcctgctcctcaaagttttcataataatctgactcaaactgcaagaggagttcacagtaactactctcaaagatccactccaacttttagggtttcttctagcttacgtttgggacgtgtggcaccttctgatgatggattgcaatggtg

SEQ ID NO: 138925 - DNA, 172 bp, Glycine max
acaagctttacgttacacaaggcgtgatcacagcataagcttacgtcacagtgaaactggaattgttgatcaagttttgctgaccacaaatgctgatggattaagatttgtgaaagtaagagtgagatctgttcgtataccacagattggtgacaaattcagtagtagacat

SEQ ID NO: 138926 - DNA, 263 bp, Glycine max
ctgctttcgtcttttacatcagcaggatggagtctcaggtgaagcacgcacttgttgtcaaagttatgggtcgtactggatccagaggacaagtaacccaggttagagtgaaatttttggatgatcagaaccgtcacatcatgaggaatgtgaaaggacctgtgcgagaaggagacattctcaccctactcgagtctgacagggaagcaagaagattgcgctagatggtttcttttggcttgcctccaaattcgaacaaaaca

SEQ ID NO: 138927 - DNA, 266 bp, Glycine max
ggcagactagtatccgatcctctgtcctctcgaagctttcatcgttcaacatattctcaccatctcagtcatgggcctgctatcttgttttaggtctaccgtcctgagaaaatgttccaaaggaagctctggcatgtcaagattcctgtatacgaacaattttcaacgaaacttgatttcgtctggtggcaatgaatcgtattatgggtattttaacaggagatcatacacttcactttatatgggaactggaactgtgggtggga

SEQ ID NO: 138928 - DNA, 257 bp, Glycine max
gaaagcatttgccaaggatgttttcattaatcaagaacgaaagttgggggctcgaagacgatcagataccgtcctagtctcaaccataaacgatgccgaccagggatcagcggatgttgcttttaggactccgctggcaccttatgagaaatcaaagtctttgggttccggggggagtatggtcgcaaggctgaaacttaaaggaattgacggaagggcaccaccaggagtggagcctgcggcttaatttgactcaa

SEQ ID NO: 138929 - DNA, 257 bp, Glycine max
tccaattccattcattcgttcattcccaggttgtgatggcagcagcaccagcagctaccttcgctattggaaccaccggttccctcggccaaagaggaagctcgcttcctcaatcaaagtcctttgggttgaaattcaactctctgaatcatttgaagagcttctgtggcctcaaggccatgtcatccgtgagatgtgagtcggaatcctccttcttcggtaacaaaaccggtgctgctctacgggcgtcttttgca

SEQ ID NO: 138930 - DNA, 255 bp, Glycine max
atctaagtccctttggtcttcatcttctgttctgatccaggtatggcttctaaacgcatcttgaaggagctcaaggatttgcagaaggatcctcctacctcatgcagtgcaggccctgtggctgaggacatgtttcactggcaagccacaatcatgggacctgctgatagcccatatgcaggtggtgttttcctagtttcaattcattttcctcctgactatcccttcaagccaccaaaggttgcttttcggact

SEQ ID NO: 138931 - DNA, 259 bp, Glycine max
cagactattacccttgaatgagtggagccaccttttggcctcttctgccaatgagaatgagaataggctgagtctaatagcttcatctggcacaccgataatcttattagtgttgcatatttcaatgaacattgccaagtgtgcataggggtcttcattaggtaatcctagaaataagttcccctgtattaaatgaattaaggactatgggtagttgatgttgttagcttgcacttcaggacgtgcaatgctggtgaaa

SEQ ID NO: 138932 - DNA, 257 bp, Glycine max
ctcagcgcgtaaagcatggctttgttggtggagaaaaccacgagtggtcgcgagtacaaggtcaaggacctttcccaggccgacttcggccgcctcgagatcgagctggccgaggttgagatgcccggcctcatggcctgtcggaccgagttcggcccctcccagcccttcaagggggcccgcatcaccggctccctccacatgaccatccagaccgccgttctcattgagaccctcaccgcccttgacgccgaggt

SEQ ID NO: 138933 - DNA, 258 bp, Glycine max
ggtgtccctcccaccactctccgtgaggtttccattctgcgaatgctctctcgcgatccccatgtcgttaggttaatggatgtcaaacaaggtcagaacaaggaagggaagacagtgctctacttggtatttgagtacatggacaccgatctcaagaaattcatacgctctttccgtcaatctggggaaaccattcctccccatatcatcaaaagcttgatgtaccagctttgcaagggcgttgctttctgccacggt

SEQ ID NO: 138934 - DNA, 253 bp, Glycine max
aatccctctttcttcctcttcctcagtagtgcgattttcgattctcttctctgcaactatgcctaaccctaaggtcttcttcgacatgaccatcggcggtcaacctgccggccgcatcgtgatggagctctacgccgacgtgactccgagcaccgccgagaacttccgcgcgctctgcaccggcgagaagggcgccgggcggagcggcaagcccctccactacaaaggctcgtccttccaccgcgtgatcccg

SEQ ID NO: 138935 - DNA, 211 bp, Glycine max
tgaagatcaacgcatcctctcaagtggggttcatgttgttgttggtactcctggacgtgtatttgacatgctgcgcaggcaatcattgcgctctgataacatcaggatgtttgtattggatgaggcagatgagatgctctctcgaggtttcaaggatcagatctatgatatttttcagctgctgccacctaagatccaggttggggttttc

SEQ ID NO: 138936 - DNA, 257 bp, Glycine max
ttttcgtcgttcattcatcagctgttctcttcgtttttctgcctacaatggatgagaattcagcaacaaatggaacccatgaggtggttttagatgtaaacagggacgtctctagaacaactcaagcttcacgctcttgtgtcaatgtttctttcttgcagaagttggtagctgaggtggtaggcacgtatttcttgatatttgcagggagtgcttctgtggtggtgaacaagaacaacaacaacgttgtaacactt

SEQ ID NO: 138937 - DNA, 260 bp, Glycine max
ctggaagtttcaaaatcgttgcggcggagaaagagattgatgagcaacaacagacaaacaaggacagatggaaaggtcttgcctatgatatttcagatgaccagcaagacatcacaagaggaaaggttatggttgattccctcttccaagctccacaggagactggaactcactatgcagtcatgagctcttttgagtaccttagcactggacttaaacagtataacttggataacaacatggacggtttttacattgct

SEQ ID NO: 138938 - DNA, 265 bp, Glycine max
actcactcatcaatctcgtttgttctcactaactattacttcatcatgtcgtcgagcacagttggtcaagtcatcaaatgcaaagctgcggtttcatgggaggcagggaagccacttgtgattgaagaagtagaggtggcaccaccacaagctggtgaagtgcgtttgaagatcctctacacctctctttgccacactgatgtttacttctgggaagccaagggccaaactccattgtttcctcgtatatttggtcatgaagctg

SEQ ID NO: 138939 - DNA, 262 bp, Glycine max
ctgaaacagagcatggctcctctcacattctccttcttcttcatccttatctcttacatttcttcatcatcagaagcgggatcaatcggaataaactatggaagaattgcgaacgacctacctacaccggcgaaagtggtggagcttcttaagagtcaggggctgaaccgtgtgaagctctacgacaccgacgccaccgtcttaaccgcgtttgccaactcaggaatgaaggtggtggttgccatgccaaacgagcttctcg

SEQ ID NO: 138940 - DNA, 224 bp, Glycine max
gagacgcttcgcaaatctcaatcgaatctcagaaaaatgagagaaatcatcagcattcacataggtcaggccgggatccaggtcggaaactcctgctgggaactctactgcctcgaacatggcatccagcccgacggcatgatgccacctgactccaccttcggtgtagcccacgacgccttcaacaccttcttcagcgaaaccggatctggcaagcacgtccc

SEQ ID NO: 138941 - DNA, 253 bp, Glycine max
gttctaagaaaccttaaaaaacaagtagtgttccgataagatggctcagcaggaagtggtagaagggttcaagttcgaacagaggcacgggaaagatcgcgtgagagtggcgcgcgtgtggtagacgaggcaggggcagcacttcgttgtggagtggcgcgtgggcatcactctcttctcagactgcgtcaactcgtatctccgcgatgacaactctgacatcgctgctactgataccatgacaaacacagta

SEQ ID NO: 138942 - DNA, 250 bp, Glycine max
tccattctcacactacttactctctttctctctctaaagggtttcctttgttctcttccaacttccaagaaatgtcgattatatcacgcagaggcatctgttacatgccaagactagatgcagcaaaagtatctgctgctttgctagagaaaggccaaaatcgtgtcatagatgcttcacttacacttattcgagaaagagcaaagcttaagggagaacttgtgcgtgctttgggaggtgctaaagcaac

SEQ ID NO: 138943 - DNA, 249 bp, Glycine max
ttccaagagatgaagcatttggtcacttgaagtcatcagattttctcgcttatggaatcaaatctgtatcccaagatgtcttgcctgtcttgactgatgcattcgatggaaatattttgagccttgagtttgataattttgctgaagtgcacaaactctatgaaggtggagttacactacctacaaactttcttagcaagatcgcccctataccagtgatcaaggaaatttttcgaactgatggcgaac

SEQ ID NO: 138944 - DNA, 254 bp, Glycine max
gtgagatacatggcttccttaagctccttagtgctgctccttgcagctctaattctatcccctcaagttcttgcaaactatgagattcccccagtgtacaagcctcccactgagaaaccaccagtttctaagcccccagatgagaagcctcctgtttacaaacctccagttgaaaagcctccaatttataagcctccagtagagaagccaccagtgtacaagcccccagttgagaatcctccagtttacaagcc

SEQ ID NO: 138945 - DNA, 253 bp, Glycine max
tgcagcttggatatagaaccattcctcctatccttccaagacaacacaaggggatatctctcatgatatcacccaaacacttactgcaatcttggcttgatagatctggcgtgcactgaacaagagtataaacttcctgggccccagacaaggttgcgttctttgttgcaaatttcatggtgcccgcaggaccagcattcgcagcctcacccactgcatcactcaacgttttggataacaaccagaacccata

SEQ ID NO: 138946 - DNA, 208 bp, Glycine max
agtgatttcagtgagtgatcggtgttcacttgatctcatcataatcgtcagcgtcaattgaagaagatgccgatcagaaacatcgccgtcggaaggcctgaagaggcgactcaccccgacacgttgaaggcggctttggctgagttcatctcaaccttcatcttcgtgttcgccggctcaggctccggcatcgcctacaacaagctca

SEQ ID NO: 138947 - DNA, 249 bp, Glycine max
cagctttcatagaaaatttgccatttgcttgagttcttctactatgacaaatggtgtaatgttctttggtgatggcccttacaattttggttatttgaactcggatctctccaaggttctaactttcacccctctcatttcaaaccctgttagcactgctccaagttatttccaaggggagccctcagtggaatactttattggggtgaaatctattaaagtctcagacaaaaatgtagcattgaacac

SEQ ID NO: 138948 - DNA, 256 bp, Glycine max
ctgaaaactgccatcgccaaagctggttacacaggcaaagttgtcattggaatggatgttgcagcttctgaattctacaaggaagacaaaacatacgatttgaacttcaaggaagataacaatgatggctcccagaggatctctggagatgctttgaaagatctgtacaagtcatttgtgtcagagtacccaattgtttcaattgaggatccatttgaccaggatgactgggagcactatgctaagctaactgctg

SEQ ID NO: 138949 - DNA, 249 bp, Glycine max
tcgatctcaaggccggaggtaaaagcaaaaaaaccaaaagaacagcacccaagtccaatgatatctatcttaagctcttggtcaagctttatcgcttccttgttcggagaactggcagcaaattcaatgccgttatactcaagagattgttcatgagcaaggttaacaagcccccattgtctttgtcaaggttgattaagtataccaaggggaaggaagataagattgctgtggtggtgggcaatataa

SEQ ID NO: 138950 - DNA, 252 bp, Glycine max
gtttccgttaacgctctccaatacaaaataaccactcactgaatattcggtcgaagatgtccgccgccgaagaagctaaagttcccgccgtcgaaaagccggtggaggaggtgaaggcgccgaagcttgccaaggagaagaaacctaaggctccgaaggaaaagaagccgaaacaggccaaaactgcttctcatcctccatatctccagatgattaaggacgctttgattgctctgaacgagaaaggaggat

SEQ ID NO: 138951 - DNA, 249 bp, Glycine max
tgaagatcaacgcatcctctcaagtggggttcatgttgttgttggtactcctggacgtgtatttgacatgctgcgcaggcaatcattgcgctctgataacatcaggatgtttgtattggatgaggcagatgagatgctctctcgaggtttcaaggatcagatctatgatatttttcagctgctgccacctaagatccaggttggggttttctctgccacaatgcctcctgaaagccctggaaatcacaa

SEQ ID NO: 138952 - DNA, 253 bp, Glycine max
caatcttcttcatcgtcgtcgccgcaatgggacgtgtgatccgtgcgcacgtatagggagcaggctcggtcttcaagtcccacacgcaccaccgcaagggccctgcccgcttccggagcctggatttcggagagcgcaacggctacctgaagggtgtcgtcactgacgtcatccacgatcctggccgtggcgcgcctctcgctaaggtcgccttccgccacccgttccgctacaagaagcagaacgagctctt

SEQ ID NO: 138953 - DNA, 231 bp, Glycine max
acaggaaagacttgccattgtgacagagttattacctaggggaagccttttcaaaaatttgcacaggaacaatcagacattagacatcagaaggcgcctaaggatggctcttgatgttgctagaggaatgaattatcttcatcacagaaatccaccaattgtgcatagagacctgaagtcttctaacctgcttgtagataaaaactggactgtaaagttttttgtcaggtt

SEQ ID NO: 138954 - DNA, 259 bp, Glycine max
atacaagtgtcgtgctgctaggcgaacagcagagaatgctgcaccctagatggcgagagtccagtagccgaaagcatcactagcttacgctctgacccgagtagcatggggcacgtggaatcccgtgtgaatcagcaaggaccaccttgcaaggctaaatactcctgggtgaccgatagtgaagtagtaccgtgagggaagggtgaaaagaacccccatcggggagtgaaatagaacatgaaaccgtaagctcccaagc

SEQ ID NO: 138955 - DNA, 278 bp, Glycine max
ggagttcggctcgagagcaaaaagaaagaatcccaggcgaggagaaagatggaggggaaggagcaggatgtgtcgttgggagcgaacaagttccccgagagacagccaattgggacggcggcgcagagccaagacgacggcaaggactaccaggagccggcgccggcgccgctggttgacccgacggagtttacgtcatggtcgttttacagagcagggatagcagagtttgtggccacttttctgtttctctacatcactgtcttaaccgttatggg

SEQ ID NO: 138956 - DNA, 255 bp, Glycine max
agaagatgacggtaaagatggcgaggatggttcagaagaacaagctgtgattggattatggagtggcattgcttggttggttggaatgactgtattcattgctgtgttgtctgagtatgtggtggatacaattgaggatgcatcagattcatggggtttgtctgtgagcttcctaagcatagtcttgctgccgatagttggcaatgcagctgaacatgcaggagcaattatatttgccttcaagaacaagctgga

SEQ ID NO: 138957 - DNA, 260 bp, Glycine max
ccagaccttaatttttctctcattcgcttcaaatttcaggaaatcaattatggctcaaccctcaacaagaataggccttgctggactggctgttatgggccaaaatctagcactcaatattgctgagaaaggctttcccatttctgtttataaccgaaccacttccaaggttgatgagactgtagaacgagcaaaacaagaaggaaatcttccagtttatggctaccatgaccccgaagcttttgttcattccattcaaa

SEQ ID NO: 138958 - DNA, 256 bp, Glycine max
tccatacccaacaccacccaaaacttaattggtttcgggcaagggcagcccacatctcttgtgggcctgaaccacctaaccccatctcagatctctcagatccaggcccaaatccagatccagaatcacagcaacacgctgagcttcctggggccgaagcccatccctatgaagcacgtgggcatgcctccgaagcccacgaagctatacagaggggttcgacagaggcactgggggaagtgggtggctgagatta

SEQ ID NO: 138959 - DNA, 258 bp, Glycine max
gaagactgagagaagagagatgggcgtgacgaaggaagaagttgaatcatccttgaaggccaaactgaacccttctcatcttgaagtggttgatacatctggagggtgcggtgcaagttttgtggtggagattgtatcagaacaatttgaaggcaaaaggctacttgagaggcatcgaatggtgaatgctgccttagaggaggaaatgaaacaaatccatgctctctctattaagaaagctgttaccccagaccagtg

SEQ ID NO: 138960 - DNA, 260 bp, Glycine max
ggcattgaaaactaattgaaggagttgcagtccagcgttgatcagaatcagagcatggacgggcatgattcagaagacccaaagcaaagcactgctgatatgacagcttttgtgcaaaatcttcttcagcagatgcaacttaggttccagacaatgtctgactccatcatttctaagattgatgagatgggagaccgtataaatgagttggagcaaagcatcaatgatttaagatcagagatgggagtggagagcactcc

SEQ ID NO: 138961 - DNA, 264 bp, Glycine max
ggtgaaagcagtagaattggctggttgtgattggattcacgttgatgtaatggatggtcgctttgttccaaatattacaattggacctcttgtggttgatgcattgcgccctgtgacagatcttcctttggatgtacacctgatgattgtagagcctgaacaaagggtaccagattttattaaggcaggagctgatatagtcagtgttcattgtgaacaatcttccaccatccatttgcatcgtacagttaatcaagtgaaaag

SEQ ID NO: 138962 - DNA, 255 bp, Glycine max
caagagtttgtggttggtctggcaatgaaagcttgccatgttcttcaattctttttgcgcctgagttttgtgctatctgtgtggctcttaattatacctttcataacattctggatatggcgattagcttttgtaaggagtttaggtgaagcccagaggttattcttaagccatttatcgacagcagttattctgactgattgcctccatggtttcctactttctgcaagtattgtcttcattttccttggggcc

SEQ ID NO: 138963 - DNA, 256 bp, Glycine max
aaataccgcccctttatgcgcgaagacagtgagaagaacatcaaatggagatatggtgctcctccaaattatgacgttgtcaacaaattatttgatgaaggcagaaccaaggtatggcctccgggttcacttgaagaaaaggtgcagactttagtgaagaattgggagatggaaatgttccacaaggaggatttcaaggataacagatcagtggacccagagaaatacactttcagcctaaacggaaggaagccta

SEQ ID NO: 138964 - DNA, 251 bp, Glycine max
gcaaaataactacaacacgtacagttttaatggcaagaaaaagcttgttctgtcaactactagctggcttggtgggaagaatgacttccttggcgttgcctatctcactgttggaggattgtgcttctttttggcattggcttttaccattgtatattttgtcaagccaaggcaacttggagatccctcatatttgtcatggaataggaatccaggagggcgctgagcaaagaaactcactatgctcgttg

SEQ ID NO: 138965 - DNA, 256 bp, Glycine max
cattctcccatttcctctcagaaccctcgatcactcccacgcgctcctatatcctctccttcaccgtcgctctctccaacgatcacaacaacatcgtcatcccatggcaaacgccgcatctggtatggcagtccatgatgactgcaagttaaggtttttggagctgaagacaaagaggacacaccgtttcatagtttttaagattgaggagcagcagaagcaggtcattgtggagaagcttggtgagccagcccaa

SEQ ID NO: 138966 - DNA, 258 bp, Glycine max
ctgcttcaacttgctccctcagaagcgaagaagaagccacagagagctagtctcctactctcacccgcaagaaaaaaatggcatctcacatcgttggatacccccgtatgggtcccaagagagagctcaagttcgctctcgagtctttctgggatggcaagagcagcgccgaggatttgcagaaggtgtcttctgatctcagggcatccatctggaagcagatggctgatgctgggatcaagtacatccccagcaaca

SEQ ID NO: 138967 - DNA, 129 bp, Glycine max
gcccggaccctgtcgcaccacgaggcgctgtcggcgagtcgggttgtttgggaatgcagccccaatcgggcggtaaattccgtccaaggctaaatactggcgagagaccgatagcgaacaagtaccgcg

SEQ ID NO: 138968 - DNA, 256 bp, Glycine max
gctgggaataatctggctatgcaagagtttatgatactaccagttggagcaacttcatttgctgaggctctccgcatgggcagtgaagtttatcatgtattaaagggaataatcaaggcaaaatatggacaagatgcatgtaatgttggagatgaaggaggatttgctcccaatgttcaagataacagggaggggcttgttttactcatggatgccattgacaaggctggttatactggcaagattaaaataggta

SEQ ID NO: 138969 - DNA, 252 bp, Glycine max
gaaagttcagaaatggtgggaaaaggggcttcaacccaacatgaaggaggtgacttcggcacaagactttgtggattcactgttaagcgcaggggacaagttggtggtggttgatttcttgtctcccggttgtggtggctgcaaagcccttcatcctaagatatgtcaatttgcagagatgaatcctgatgttcagttccttcaggtgaactatgaggagcataagtccatgtgttatagccttgatgtcca

SEQ ID NO: 138970 - DNA, 249 bp, Glycine max
tttccgtcttcttcttcttcttcttcttcctgtgtgtgcgtgtggcggagaatagtgatcaattgttaatggcataccaatcgatgcagggtccgatttcgggatcgagttcgagttcggggtttcagttattgaattctccgttcggagacaccacctacaccaaagtcttcgtcggaggcttggcctgggagactcagagcgaaaccatgcgccgctacttcgaacagttcggcgagattctcgagg

SEQ ID NO: 138971 - DNA, 251 bp, Glycine max
gcttcaaccctggttcgtttctgacaatagccaaggggtatggaagtggagggtattatggtcaatggagcgctatagggaggacagctgtcacgacgacattggctgggagcactgcggctctgacgacgttgttcagcaagcggttattggctggccactggaacgtgattgacgtgtgtaacggcctgcttggcgggttcgctgccattacatcgggctgtgccgttgtggaaccgtgggccgcgatt

SEQ ID NO: 138972 - DNA, 252 bp, Glycine max
aaacatgttggtttatcaggacctccttacaggtgatgagcttctctcggactccttccgttacaatgaaattgagaatggaatgctgtgggaagttgaggggaagtgggttgttaagggagcagttgatgttgacattggtgcaaacccttctgctgagggtggagaagatgagggagtcgatgacgcagctgttaaggttgttgacattgttgatacattcagacttcaggagcaacccgcttttgataa

SEQ ID NO: 138973 - DNA, 255 bp, Glycine max
catagcttgaaaacacagtgcttgtttagactagtatcttccatggctccgaaagatagaatcctggttttgggacccacaggagccattggaagacacatagtttgggcaagtgtaaaggcagggaatcccacttttatattggttagggacacccctgcctctgttaacaagccaaggcttgtcactgctgctaatcctgaaaccagggaagagctcattcagagcttccaaaattctggagttactctaatc

SEQ ID NO: 138974 - DNA, 253 bp, Glycine max
ccaatcttctctccacgcccttcttgggtaaccgtctgaagtgcagcaatggcagatggattgcattcgcagcatccatcggtagttcagaagttatctggacagtcttatcttgtgtccaggcttgctcctaatcactccagaaactgttctaccactggtagttacttcaatggaggtttgcagtcttcaggtttggttccagtcacggcacacgcgccggctgagaaaggggtgtctggatttttgttgg

SEQ ID NO: 138975 - DNA, 248 bp, Glycine max
aaatcttgttctcatgtgcctctttttgttgaaaacaaagacaatgatcccggtactattatgaaaaggcagctgcacaataatttttctgggttgttctatgggttaccattcactaagccaaatcctgaatttgtacaatctgttaagagccagtttccccctgaaagtaaactcttggttgtatgtcaggaaggactgaggtctgctgcagcagcaagtaagttagaagcagctggtttcgaaaa

SEQ ID NO: 138976 - DNA, 249 bp, Glycine max
attcaagtaatggggaagagcaaggttcttgtggtggggggaactgggtacatagggaggaggatagtgagggcaagcctggcactgggccatgagacctatgtggttcagaggccagagttgagcctccagatagagaagctgcagaggctcctctccttcaagaagcaaggtgctcatctcattgaggcctctttcaatgatcacaagagccttgttgatgctgtgaagcaggttgatgttgtcatc

SEQ ID NO: 138977 - DNA, 248 bp, Glycine max
gttggaatttatactgccttcaagtttcacaatgaaagtgggattgccaatctctacagcttgcattcatggcttggaattggggttattgtcctttatggcattcagtggatatatgggtttgtgatctttttcttccctggtgggactccagacattagacgcgcctcacttccttggcacgcgctatttgggctgtttgtatttgtcttggctgtgggcactgctgctcttgggtttctggagaa

SEQ ID NO: 138978 - DNA, 253 bp, Glycine max
cggatttggaagaattggccgtttggttgccagattcgctctgcaaagagacgatgttgaactcgttgccgttaacgaccctttcattaccaccgattacatgacatacatgtttaaatacgacagtgttcacggacactggaagcatcacgatgtcaccgttaaggacgagaagacccttctcttcggtgacaaggcagtcactgtttttggacacagaaaccctgaagagatcccatgggggtcaactgga

SEQ ID NO: 138979 - DNA, 256 bp, Glycine max
gttgaatcgcgtcgattaaggttttgagatttctaggctttcatctcagacagtgaaaaaatgatagatataagtacacttaatgctgcacagattactgtgctgggatctgccttttgtgctatgctttccatgcatttcacgtcgcagttactgtctcagcatctcttttattggaagaatccgaaagagcaaaaggctattatcattatcatcctcatggctccaatctatgcagctgtctcctttgtgggtc

SEQ ID NO: 138980 - DNA, 261 bp, Glycine max
ggacagaatacggtccttcttagaggccccaagaatgctcgggaagctgtgaaacactttggtcctgctcctggtgtgccacacagccataccaagccctatgtacgagcaaagggaagaaagttcgagagggctagaggaaggaggaacagcagaggatttagagtttgagaagtgtaatatgactttgttctattttttttttacaattgttcacttctgaaattaaactgtttgctctaggcgtcggtgacagttttt

SEQ ID NO: 138981 - DNA, 217 bp, Glycine max
agacttatgctacaaggagcatatttttcttgaaagatgatggaactttgacgccaatggccattgagttaagtaagccacatcctcagggttaagaatatggtcctgttagcgaagtctacgtgcctgccagcgaaggagtggaagcttatatttggttactggcaaaggcgtatgttgttgtgaatgatgcttgctaccatcagatcattaggca

SEQ ID NO: 138982 - DNA, 248 bp, Glycine max
atcaactacctcatgtccatgtccacccaaatcttctccggccacctcggcaacctcgaactcgccgccgcctccctcggcaacaccggcatccaaatgttcgcctacggcctcatgttgggtatggggagtgccgtggagacgctatgcggacaagcattcggagctcaaaagtacgggatgttaggagtctacatgcagcggtcaacgattcttctctcactagccggcgtagtgttgaccgtgat

SEQ ID NO: 138983 - DNA, 245 bp, Glycine max
gtttgcttcaatggaagtgatttccgcttcgagcttgaatcccaacgctccgatgttcgtgcctctcgcctatcggacggtggaggatttctccgaccaatggtgggacctcgtccactcctccccctggttccgcgactactggctccgcgagtgcttccaagatccccagtaccaatacgacgacgttttcgacttcgactttgacctagatctccaagataaagatgaaaatgaagggaagg

SEQ ID NO: 138984 - DNA, 249 bp, Glycine max
ctgctatttgccattgtcactctcattctcgatggcggcgaagatttcattggcaattggtttgagaactctcttcactgttttgggacttcttatgcttgctatcgttctttacactgtcttcaccgatggtcttccgtttcgcaaagaacttctcacaccgtggatggcagcaactttgatttatttttatatcaacgttgtagctttggcggtctggattgcttacaaggaatcaaacttaatcag

SEQ ID NO: 138985 - DNA, 250 bp, Glycine max
cttcgccgtttcagctgaagagccatccgcaggtaagcaatggttaagcatggtgatgttatccccaatgggcacttccggaaacactggcaaaactatgtgaagacttggtttaatcaaccagcccgaaagaccagaagacggttggctcggcagaagaaggctgtcaagattttccccaggcctactgctggatctctcaggcctattgttcatggccagactctgaaatacaacatgaaagtcagag

SEQ ID NO: 138986 - DNA, 248 bp, Glycine max
gttgagaaacatgccatggttgctgctggagctcttgtcaggcagaatacaaggatcccttatggagaggtttggggaggtaatccggcaaggttcttgagaaagctcacagaagatgaaatgaccttcttctcacaatctgccttaaattattctaatttggctcaggctcattctgctgaaaatgcaaaaggactcgatgagactgaatttgtaaaggttcttcacaagaaatttgctcgtcatgg

SEQ ID NO: 138987 - DNA, 254 bp, Glycine max
cacttttgcttcgagatggcaaagtcgaagaatcacacagcacacaatcagtcctacaaggcccacaaaaacggcatcaagaaacccaagaggcatcgccacacttccaccaaagggatggatcccaagtttctgaggaatcagaggtacgcgaggaagcacaacaagaagagtggtgaaacagccaccgaggaagagtgaaatggcactttctaacggaaccattagggtttttttatgctcatttttttggt

SEQ ID NO: 138988 - DNA, 248 bp, Glycine max
cttcagtttctcctcgttgttcttcgctttcctgttttcaatttcgattctttcgttaatttgataagatgtttgggagggcaccgaagaagagcgataatacgaggtactacgaaatcctcggcgtctccaagaacgcttcgcaggatgatctgaagaaggcttacaagaaagccgccattaagaatcaccccgacaagggcggtgatcccgagaagtctaaagagctggcgcaagcttatgaggtt

SEQ ID NO: 138989 - DNA, 246 bp, Glycine max
atactattgtgtggggtctgcctccagagaccttgctgtggcagaacttcgtaccttggtgcattcgcttttcttagaatcgtgtgcgtctgttgagcttgcttcgcgcctactatttgttgtcttaacagtttgtgttagtcatgaggtccaattcaatggtagcaagaaaccaagatgtgaaaataattagttagtggaggagattattgaggatttacaagcagtatctgaaagccagaaaga

SEQ ID NO: 138990 - DNA, 248 bp, Glycine max
ctcgagcctgaataattcagaaatgttactgcaaacattagctatccctacaatactccttgtgatattcatatgggtggtacaaccaaagcaacgtcatgggaagattgcaccaggtcccaaggcgttgccaattattggtaacctccacatgctagggaaactcccgcaccgcacccttcaaacctttgcaagaaaatatggacccataatgtccttgaagctagggcaagtccaagccatagtgg

SEQ ID NO: 138991 - DNA, 255 bp, Glycine max
aatgccatgggctccatgtatgctgctgttctccttattggcattaagaatgctaatgcagtgcagccagtggttgctgttgagcgaacagtcttttatagggaaaaagcagccggaatgtattcagctttaccgtatgcttttgctcaggttctaattgagctcccatatgttctagtacaagctgtggtatatggcattataatttatgccatgattggttttgagtggactgtaactaaagttttctggtac

SEQ ID NO: 138992 - DNA, 256 bp, Glycine max
cgtgtctctagcttttcatctataagaaagtttgaggtgaagcaaatgatcaaaacaatatctgggcatgcctcttcttcgggtgttacaaacttgagtgagttactcatatctctctcaagcactataatatgtagagttgcttttgggagaaggtatgaagatgaaggaagtgaaaggagtaggttccatgggttgctcaatgagcttcaggtattgatgggtaccttctttatttcggattttattccattca

SEQ ID NO: 138993 - DNA, 249 bp, Glycine max
gcctctttggttgatcttttcctacactgttggggcttttagtctttggggtggtggctttctctaccaatggggggttattgactattctggcggctatgtcatccacctttcttctggaatcgctggtttaactgctgcttactgggtacataaattttactcttatcatatttgcttcaaatatctaaaagctagctagctcccttagccaaagttttaaattgcggtggcggttgtagttttggt

SEQ ID NO: 138994 - DNA, 256 bp, Glycine max
aaaaagttagggtttgtaactttgtcttttgcttgcgaatctgaatcgaataataatcaatcaatcatcatgtcgtcggcgaagacgatcacactgaagagttcggacggcgaggctttcgaggtggacgaggcggtggcgctggagtctcagacgataaagcacatgatcgaggacgactgcgccgacagcggcatccctctgccgaacgtgacgagcaagatcctggcgaaggtgatcgagtactgcaagaagc

SEQ ID NO: 138995 - DNA, 254 bp, Glycine max
atttgaaggaaaattgtaagcagatacacatggtgcttttattgaccaagtgtgatctagttcctgcttgggcaacaaaaggatggcttagagttttgtcaaaagaatttccaactctagcattctatgcaaacattaacaagtccttcggacaaggttcacttctatcagttctgagacaatttgctcgattgagacgtgataagcaagcaatatctgttggatttgttggatacccaaatgttgggatgtca

SEQ ID NO: 138996 - DNA, 256 bp, Glycine max
ggcagaggaaaagggaagaagcaatctgttattgctgaggatcctggaagtggtgaagaggataaagtcccagcttatagaagaaggggaagaccagtgaagccactaacagatgaaattgaagaagtggaagtaactgaaataattgagaaagacgaggagaatgtgaaaggcaatggttctacggatgatttgaaaactcaggctatcacagttaataaaagaaaaaggaagagatctacacaggttaaagaga

SEQ ID NO: 138997 - DNA, 255 bp, Glycine max
gcaaaggattctacccgccgctcgatgggaattgcgcttcaaggcgtctcgtagggctaatccgcctcacgagggtcaccaacggcacgtgcctttggggggccgaggccccctactgctggtcggcaaacggacggcgggcgcacgcgtcgcttctagcccggattctgacttagaggcgttcagtcataatccaacgcacggtagcttcgcgccactggcttgtcaaccaagcgcgatgaccaattgtgcgaa

SEQ ID NO: 138998 - DNA, 256 bp, Glycine max
ctaatagagggctaatccttcacttgtttgttttgtggtgtattattacattttgcaccatgccttctctcttcgctagaaaccagaggttctcattggctactctcctgcttcttctggaactattgacaggaaaccttcgcatggcagatgctcaaattggtgtgtgttatggcatgctgggcaacaatctaccgtcagcaaacgatgttataggtctttatagatcaaataacataaagagaatgagactcta

SEQ ID NO: 138999 - DNA, 257 bp, Glycine max
tgccaagctcaccgaggttcggaagaacgggacatgcccttggctgagacctgatggcaagacccaagtcactgttgagtactacaatgacaagggtgccatggttccaatccgcgtccacactgtgctcatctccacacagcatgatgaccctgtcacaaatgatgagattgcagctgatcttaaagaacacgtaattaagcctgtaatccctgagaagtaccttgatgagaagaccattttccatttgaaccctt

SEQ ID NO: 139000 - DNA, 254 bp, Glycine max
atgatatacatgccatactggatgatggagaacatgcttttacaagagggggacattgtcaaagtgaaaaatgtgacacttccaaaggggacatatgttaagttacagccccacacaaaagactttttggatatttccaatccaaaagctatcttagaaacaacattgaggaatttttcctgcttgactactggagatagcattatggtggcttacaacaacaagaaatattacatagatattatagaaactaa

SEQ ID NO: 139001 - DNA, 254 bp, Glycine max
ggagtatggtgtgatttctatacctgaattttctcaccggcagcttacagacagagatcagttcattgttcttgcctcagatggggtgtgggatgttttaagcaacgaggaggtggttgagatagtatcttcagcgccaacgcgatcatcagcggcaaggattctggtagattctgctgctagggagtggaaacacaaataccctacatcaaagatggatgactgtgctgtagtatgcttatttttggatggga

SEQ ID NO: 139002 - DNA, 250 bp, Glycine max
ggagttcaacttcgagggtttccttcacaactctgtaatttctaattccacagttactcttgtggtttagcgagattcggagtgagtgatggctgcgaaggaagagaatcgaatatttgttggaggtttatcttgggaagttacggagcgtcaactcgagcatgcctttgctcgttacggcaaaattctcgaatgccagatcatgatggaaagggatacaggccgtccacgtggatttggttttatcaca

SEQ ID NO: 139003 - DNA, 249 bp, Glycine max
caggaagaaagaagtgcaatggacatcggaacctatggctatcctacaccagcagtgaaaaagattgagtcttactatgatgtgccagagggagtggatattcggggaagatatgatgcagagtttgcaaaaatcctcacaaaagatgctttgaaattcgttgctgacttgcaacgtgagttcaggaaccatatccagtatgcattagagtgcagaagagaagcaaagaagaagtacaatgaaggggct

SEQ ID NO: 139004 - DNA, 250 bp, Glycine max
gtaaagtcaaagtggtgcttttcccaaacttgaagagttcaaattttgttaatagtaagcgatgatgggaaagctaaaggtgtatgcggatcgaatgtcccagccttctcgagcagttctcatattctgcaggtttaacggaattgactttgaggagattaaagtagacatttccaaacgccaccacctttctcctgaatttagagaagtaaaccctctgcagaaagttccggctatagttcatggaagc

SEQ ID NO: 139005 - DNA, 251 bp, Glycine max
gaggttttgatgcaacgctgtcactgagaaaggatctctatctacgaaggagcggaataaaacccttctctctgtgattaagagaatggcttcagatcggaaactccacctcagcaagctcagtacaatcctgataagactccagaatttgtgatcaagattttgcagttcctggtccctctcctgatcttgggcttggcctttgttgtgcgacactacaccaagaaagagtagagttgttccttctttat

SEQ ID NO: 139006 - DNA, 252 bp, Glycine max
caaacgtgcaaaaaggatatgggcaaataggcagtctgctgcgaggtcaaaagagagaaagatgcgatacattgctgagcttgaaaggaaggtgcaaacattgcaaacagaagcaacatctttgtctgcacaattaactctcttgcagagagatacaaatggcttaaattctgagaacagtgaactgaagctgcggttgcaaaccatggagcaacaagttcacttgcaagatgcattaaacgatgcattaaa

SEQ ID NO: 139007 - DNA, 249 bp, Glycine max
cacctatttaccattttgttggtacctccacattcagtgaatacactgttgttcatgccggatgtgttgccaaagtcaaccctgctgccccacttgacaaaatttgtgttctcagttgtggaatttgcacaggtcttggggctactatcaatgttgcaaaaccaaaacctggttcttctgttgccatttttggacttggagctgttggccttgctgctgctgaaggggcaaggatttctggtgcatcaa

SEQ ID NO: 139008 - DNA, 250 bp, Glycine max
catttctccatttccattttctctctcacttttcaagaatcgtaagctatgggaaagtcttacccaactgtgagtgctgattaccagaaggccgttgagaaggcgaagaagaagctcagaggcttcatcgctgagaagagatgcgctcctctaatgctccgtttggcatggcactctgctggaacctttgacaagggcacgaagaccggtggacccttcggaaccatcaagcaccctgccgaactggctc

SEQ ID NO: 139009 - DNA, 248 bp, Glycine max
cctcctctctccgcatcgctgcgttttccgaatcgaaaggtgcgtaagtaacaatggtggagaaggccaagggtaggaaagaggaggtcgtcactcgagagttcaccatcaacctccacaaacgcttgcatggctgcacattcaagaagaaggctcctaaagcaattaaggagatacggaagtttgctcagaaagcgatggggacgactgatgtgagagtggatgtgaagctgaacaaggctgtgtgg

SEQ ID NO: 139010 - DNA, 241 bp, Glycine max
gcctggagaaggcaatatccattgttaaacctggggtacgattccgtgaaattggtgaagttattaatcgtcatgcttcaatgtctggcttttcagtggtaaaatcatattgtggtcatggaattggagagctcttccattgtgcacctgacattcctcattattcaagaaataaagcagttggtgtgatgaaggccggacagacctttacaattgaacctatgatcaatgccggtgtctg

SEQ ID NO: 139011 - DNA, 250 bp, Glycine max
ctttcattaccaacctcacaacacaacccctttctcttctcttcagattacaaatcccttcttctctctctctctctttattctcatttcacaactcatcaatcccctctctctctctcccaaacgcaaaacctaagcatggctcagaaggcccagaaaaacgacactgagtttaaggtccccgaacccatcatcaacccctgcaccaccaccaccaccaccaccacctcgatttccgaaccttctagat

SEQ ID NO: 139012 - DNA, 244 bp, Glycine max
caagacgctctgcattaagcccgtgattgggcttcgtgcgaacttagaaccaagcattctgggcatttcggtgggacttcaggagagaaggggaagtttgggctcaccaccgcacagattctgagggttgtgaagaagctggcccacgcaggcatgctggattgcttgcaactgctgcattttcatattggttctcagattccctcaaccgcgttgcttgctgatggcgtgggagaagctacgc

SEQ ID NO: 139013 - DNA, 250 bp, Glycine max
tgatgatatacacatattgtgacggtagtgaaatcgaggaaaaagaggtagcaatttgcgagttgcaatgagtaacgaaaaggctccttcatcagcttcttcgagtagctacgagttgagcaaaggcatcaatggcctcgacaaggttattcttcgcgacgcacgtggtagctccgctgagttgtacttgtacggtgctcacgtgacttcatggaagaatgaccatgccgaggaattgctttttctcagt

SEQ ID NO: 139014 - DNA, 248 bp, Glycine max
acaaaatcctagaggttgtgatattatggctcctacacttcaacgtgcactttctcatctgctcactcttgtagcttcactttcaatactcctagtggtaccctcctcttgtttcaaccctaaaaagattgtgaatgcttcctatgcttcatactccttatatggttcagattggtctcctgctgtagccacttggtatggaccagcccaaggggacggtagtgaaggtggtgcttgtggttatggaa

SEQ ID NO: 139015 - DNA, 247 bp, Glycine max
tcctgttctggttgaggttgtggagttgggttctgcgagaggaaaggagaatgcagctgcagctcttctacatctttgcttacatagtcccaaattttcaagcaaggtgcttcaacaaggagctgtcccgccattagtagctttatcacagtcaggcaccccaagggccaaagaaaaggctcaggctctcctcaatcaatttaaaagtcaaagacatgggagttctgggaggggctgatcttgaatt

SEQ ID NO: 139016 - DNA, 244 bp, Glycine max
attcccttcatctcaaggcgttctcttgggatcatatcaggcctaactggtgcaggtggaaactttggttctggtttgacccaattgatcttcttttcaacctcaaggttttctacttccactggtctctcccttatgggtgtcatgattgtgtgttgcactcttcctgtgactcttgttcacttccctcagtggggtagcatgttcctccctccttcaaaggatgtcaacaagtccactgagg

SEQ ID NO: 139017 - DNA, 245 bp, Glycine max
gtgttatacaaaggttacatttctgagttgtttgtgccataccaagacccaacagatgatttttactataagactttctttgatgctggagagtttgggtttggtctctccacggtctcattggtgcccaaccgtgattgcccatcgaatgctcagttcctagatacatatgttcacgctgctgatggtactccgttactcatcaagaacgcaatctgtgtctttgaacaatatggcagcatcat

SEQ ID NO: 139018 - DNA, 245 bp, Glycine max
ggtaattactagcttgcctcctcctgatgaagggcctaatttgagctatcatcgtcttgaggatcaattggcacttcttggaaaggtgttgagtgctggtgatgatcaagttggattagagcaactagatgaagatgcagatgaaattgcccttcagagtgcccgtcgctctcaaggatccatgagtgcaatgtcaggtgcaaaagggatggtttatatggagtacagtactgtgcgtaaaggcc

SEQ ID NO: 139019 - DNA, 244 bp, Glycine max
cgctctgtttctgtctctgtgtttgcggctgaggattccgaacgagcgaccttcttcgtttctcgcaaagtttaagtcatcatgggtaaggaaaagactcacatcaacattgtcgtcattggacatgtcgactctgggaagtcaactaccactggtcatttgatctacaagcttggaggtattgacaagcgtgtgattgagaggttcgagaaggaggctgctgagatgaacaagaggtcattca

SEQ ID NO: 139020 - DNA, 246 bp, Glycine max
gttaaatagtttttcattgtttcatttaatctacaatggctgcttcaacaatggctctctcttcatcatcattggctggccaagctatcaagcttgccccctccacccctcagcttggtgttggaagggttagcatgaggaaaacagcctccaagactgtttcttctggaagcccatggtacggcccagaccgtgtcaagtacttgggcccattctctggtgagcccccatcctacctcactggtg

SEQ ID NO: 139021 - DNA, 247 bp, Glycine max
gttcttctttcctcaaccttctttcttcttatatatcgaacatggctaagtattattcaagtgggaaaagctcttccatgactgctatagccttcctgtttatccttctaatcacttatacaggcacaacagatgcacaatccggggtatgttatggaagacttggcaacaacttaccaacccctcaagaagttgtggccctctacaatcaagccaacattcgcaggatgcgaatctacggtccaag

SEQ ID NO: 139022 - DNA, 248 bp, Glycine max
gttaggcccaagatgactttccgggtattttcagagattatggcactggctttcttcgaaataatactggaccagtgcttcgccctcttgggcatgaaattcacgtcggcatctttcctatctgctgttatgaactccgctccctctgttacttttgtgatggctgtcattctaagaatggagcacatgaagattaaggaggtggcatgtcaagccaaagtgattggcacagtaataacatttggagg

SEQ ID NO: 139023 - DNA, 247 bp, Glycine max
gtctcactgtcttgctatatttgggtgagaacacagaggatagtggagttcaacgagatggagcaaataaagcacagaacagttgaagtgaatggcataaaaatgcatgttgcagagaaaggagagggtccagtggtgttgttcctccacggcttccctgagctctggtactcatggcgccatcagattctctctctcagctccctcggctaccgcgccgtcgctcccgatctccgtggctacggtg

SEQ ID NO: 139024 - DNA, 242 bp, Glycine max
aaggaatcaacccttcacctcgtcctccgtctccgtggtggcatgcagatcttcgttaagaccctcaccggcaagactattaccctagaagtcgaaagctccgacaccatcgacaacgtcaaggctaagattcaggacaaggagggaatccccccagaccagcagaggctgatcttcgccgggaagcagctcgaggacggacgcacccttgctgactacaacatccagaaggagtcaactct

SEQ ID NO: 139025 - DNA, 242 bp, Glycine max
aaatagtaatattattcttcgaatccattttattattcataatgggtgttttcacatttgaggatgaaaccacctcccctgtggctcctgctaccctttacaaagctctagttacagatgccgacaacgtcatcccaaacgctgttgatgccttcaggagtgttgaaaaccttgaggggaacggtggccctggaaccatcaagaagatcactttcgttgaggatggagaaagcaagtttgtg

SEQ ID NO: 139026 - DNA, 244 bp, Glycine max
gagcaagctgaatcacgagaccacaagagatggatggaaaggcagaatgcgaaattgacagagaaagctaggaaggaagactatgcacggatacgcactcttgttgataatgcttataagagagaccccagaattttgagaagaaaggaagaagaaaaagctgagaaacaaaggaaaaaggaggctaagttcctagctaagaagttgcaggaagaagaggcagccagaatcgcagaagaggaga

SEQ ID NO: 139027 - DNA, 241 bp, Glycine max
gagttgtgtataccaaattgcttgatgccttcaatttcacccttcacacgtggtggtggtgttgttcttcttctcttcccctttctttttcttcttctgagcttgtttaagctctttctatttgattccattaacatatattatcacaatgtgtggtattcttgctgttcttggttgttctgatgactctcgagccaaaagggtccgcgtgcttgagctctctcgcagattgaagcaccgt

SEQ ID NO: 139028 - DNA, 247 bp, Glycine max
agtaattaacctcactcaaactcgggatcacagaaaccaacaacagttcttgcactgaggtttcacgatgttgctggaacttgcacttggtttgtttgtgttagctttgtttctgcacttgcgtcccacaccaagtgcaaaatcaaaagcacttcgccacctcccaaaccctccaagcccaaagcctcgtcttcccttcattggccaccttcacctcttaaaagataaacttctccactatgcactc

SEQ ID NO: 139029 - DNA, 262 bp, Glycine max
ttcggctcgagaaacaaaatacggtgcgttgaatggtggtgccaactttgttgcccctggttacaccaagggtgatggtcttggtgctgagattgttggcactttcatccttgtttacaccgttttctccgccaccgatgccaaacgtagcgccagagactcccacgtccccattttggcacccttgccaattgggttcgctgtgttcttggttcacttggcaaccatccccatcaccggaactggtatcaaccctgctcgt

SEQ ID NO: 139030 - DNA, 245 bp, Glycine max
cttttgatttgataacaacaatctcgttgtggttttccaatgctgcgaagtcgaagatctagctagaggcagagaacgttctccctaatcttctgccgatggcgatcttctacgctttggtggccagaggcacggtcgtcctggcggagttcagcgccgtcaccggcaacaccggcgccgtctcccgccgcatcctcgagaagcttccggcggagtccgactccaggctctgcttctctcaggat

SEQ ID NO: 139031 - DNA, 246 bp, Glycine max
gcgaggcatgctctcaatttttgaaattacttgcatagatagagcatcatggccatgatgaaacgtgctgcttcctcttcggttcgctcgctactttcctcatcctccaccttcaccagaaaccttcatgcctcaggtgaaaagaagaaaattgtgggggtgttctacaaagggaatgagtatgctaaattgaaccccaatttcgtggggtgtgttgaaggagcattgggtatacgtgagtggctg

SEQ ID NO: 139032 - DNA, 246 bp, Glycine max
cgtttttctcaccattggtggcacacaagccatagatataattttaccttccctagcacgtcctggtgccaacattctccttccaaaaccagggtacccacattatgaacttcgtgccactcgttgtcttcttgaaattcgacactttgatcttttgcctgagagaggatgggaagttgaccttgactctttggaagctttggcagatgagaacactgtggccattgttttcatcagtcctagtag

SEQ ID NO: 139033 - DNA, 237 bp, Glycine max
tttgtagttcgtagatagccgatgtgcttgtcttagtgtgtcagtcattcctgttcctcaagtcaagctttgtagtgagcagatataatggctgttgaaaggtccggaattgccaaagatgttacggaattgattggtaaaaccccattagtatatctaaataaacttgcggatggttgtgttgcccgggttgctgctaaactggagttgatggagccatgctctagtgtgaaggac

SEQ ID NO: 139034 - DNA, 238 bp, Glycine max
ctttctctcgtttcaatcgaaaccaaaacaaaatcatgggcagaaaattcttcgttggtggcaactggaaatgcaatgggaccactgaggaggtaaagaagattgttactactttgaatgaggctaaagtccctggagaagatgtcgtagaagttgttgtgagccctccttttgtgttccttcctgttgtaaaaagtttgctgcgccctgatttccatgtttcggcacaaaactgttg

SEQ ID NO: 139035 - DNA, 241 bp, Glycine max
ggactttcactagccgcagcagcctcaggaggagaataaggatgtctcacaggaagttcgagcacccaaggcacgggtcactgggatttctccccaggaagcgtgctgctcgtcacaggggaaaagtgaaggcattccccaaggatgacccatccaaggcacccaagctcactgcattcttgggttacaaggctggtatgactcacattgttagagaggtcgagaagccaggattaaagct

SEQ ID NO: 139036 - DNA, 245 bp, Glycine max
tgttgacaaaacaaattttaaaaggacttgcctatatctcaccagttctgcaagatacctcccaggaccagatgatatgctagttttggacattgcatattcaatttacaaacaatttgaagaatatccaaatgcactccaaattgcattgttcatggataattcgcagcatgtgagggaggtgttcacctcttgtaatgatgtgctgcgaaagaagcaattctgttacatgcttgcacgtcatg

SEQ ID NO: 139037 - DNA, 244 bp, Glycine max
tgggaggttgatgatgctgacaaattgtatgaggcaatcaaggcaaagaagaatgggaaagctgtggttgttgggggaggatacattggtctggagcttagtgcagtgttgaaactcaacaatattgatgttaccatggtctacccggagccttggtgtatgccacgactttttacggctggtatagctgaattctatgaggagtattacaaaaataagggtgtcaatatcattaaaggaactg

SEQ ID NO: 139038 - DNA, 243 bp, Glycine max
tccctgagccatggtaccatttccctcataaaattctctcttcctttttgggttctcctattccaagcttcaatcttttctctcttctcacagccttcttcactcacaggaggtgaagatgtcgactccggctaggaagagactgatgagggattttaaaagattgcaacaagatcctcctgctggcatcagtggggctccccaagacaataatattatgctttggaatgctgttatctttgg

SEQ ID NO: 139039 - DNA, 237 bp, Glycine max
cttaagaggcgtaaatcttatgcggataatgccagttctttgaaagctcaacttgatcaacaaaagactgttgttgagaatcttgtctctaatacaaggcttttggagagtaagatacaagaggcaaggtcgaaaaaagatactctcaaagcaagagctcaatcggcaaagactgcaaccaaggtgagtgagatgctgggaaatgtcaatacaagtagtgctctttcagcttttgaa

SEQ ID NO: 139040 - DNA, 237 bp, Glycine max
agcgaaagcagcataagaagttgtcaacctggaggatgtcttgcactgtaaatcaccacaaatttccttcaaaataattgagtgactggttcagtgttgtactatccttgtgatagcgcgcttttatttttccttctatttttgtcaaatattttcttttttcctttttctctcttcattcagaaaacaatgtctcgctgctgatttgcagtcttcttgtgttgactggaaaatgat

SEQ ID NO: 139041 - DNA, 243 bp, Glycine max
gattctaacatgatagttgtacttaatgacaacaaacaagtctctttaccaactgccacacttgatggtcctgcaactccggttggagccctcagtagtgctttaagcaaaattcaagcaagttctgaattccgcaaactcagagaagctgcaaaaaccatcacaaagcaaattggaggacaaacacatcaggttgcagcaaaagtagatgagtatgcaagaggcatgatcagtgcttctggc

SEQ ID NO: 139042 - DNA, 237 bp, Glycine max
cctcctctctccgcatcgctgcgttttccgaatcgaaaggtgcgtaagtaacaatggtggagaaggccaagggtaggaaagaggaggtcgtcactcgagagttcaccatcaacctccacaaacgcttgcatggctgcacattcaagaagaaggctcctaaagcaattaaggagatacggaagtttgctcagaaagcgatggggacgaatgatgtgagagtggatgtgaagctgaaca

SEQ ID NO: 139043 - DNA, 238 bp, Glycine max
gtggatcaggaatggacctgaggagcaaagcaaggactctcccaggaccagttagcgacccttcaaagcttcccaagtggaactatgatggttccagcacaggccaagctcctggagaagacagtgaagtgattatatacccacaagccattttcagggatccattcagaaggggcaacaatatcttggttatctgtgatacttacactccagctggagaacccattcccactaacaa

SEQ ID NO: 139044 - DNA, 239 bp, Glycine max
attgaatctcagaattctctaaaagagatctttttctgctctttgaagaaagaagggtctttgcttgattttggagatgtctctgctctcagatctcatcaaccttaacctctccgataccaccgagaaggtgatcgcagagtacatatggatcggtggatcaggaatggacctgaggagcaaagcaaggactctcccaggaccagttagcgacccttcagagcttcccaagtggaact

SEQ ID NO: 139045 - DNA, 235 bp, Glycine max
caaccatcctgctcctattccaatcaagcgcgaggcaggatatgaaagactaagggttggttatgttagtagtgactttggtaatcatcccttgtcacatctcatgaaatctgtttttggtatgcacaacaggaagaatgttgaggtgttctgctatgccttgagtgttaatgatggtactgaatgtaggcaacgtattcagtctgatgcagagcacttctgtagatgtatctgc

SEQ ID NO: 139046 - DNA, 237 bp, Glycine max
cggctcgagcggctcgagcggctcgagcggctcgagctaattcggagaccttgcaagacttcatcaatggctgatcaaagtttatattgtgtactactccatgtatgggcatgttgagaaactagcagaagaaataaagaaaggggcttcctctgtggaaggtgttgaggccaagttatggcaggtacctgagacactgctggatgaggtgcttggtaagatgagtgcaccacccaa

SEQ ID NO: 139047 - DNA, 241 bp, Glycine max
agcaaaggcagtataatccatctagtggcatgtattctcttgatgttgttcaaattagcaaagtgcaagctaaccagcgagcaggccgagctggacggacacgtcctgggaaatgctaccgtctatatccttcccgtatttacaatgatgagtttttggacgttacagttcctgaaattcagagatcttcccttgctggcagtgaccttcacttaaagtcattggacctcccagatattga

SEQ ID NO: 139048 - DNA, 239 bp, Glycine max
agagtacatggaaccaagctgcatcaaggtgaagactggcatcacaacgagacagtcaaacactggacttataccatagatggtaaggctacaacatgtctggagagtattgaatccattgatgaacagaacaaaacaatcacctacaagctcttcagtggagacattgatcataagtataagaaatttaagttcacctttcaagccattgataaggatcaaggcggtgcttttattaa

SEQ ID NO: 139049 - DNA, 239 bp, Glycine max
ccagagacgaggaagggcgtagtaagcgacgaaatgcttcggggagttgaaaataagcgtagatccggggattcccgatataggtcaacctttcgaactgctgctgaatccacgggcaggcaagagacaacctggtgaactgaaacatcttagtagccagaggaaaagaaagcaaaagcgattcccgtagtagcggcgagcgaaatgggagcagcctaaaccgtgaaaacggggttgtg

SEQ ID NO: 139050 - DNA, 236 bp, Glycine max
ctcttattgattgggcggttccgaagaacccggtttatctctggacgcttccgatcttccacgctaacggctggagcttcccgtatgggattgctgccgtgggtggaactaatatctgtgtccgcaagttcgacgctgagattgtttactctctcataaaacgccatcacgtgactcacatgtgcggcgcgccggtggtgctcaacatgttaaccaacgcgaactccccgttggag

SEQ ID NO: 139051 - DNA, 236 bp, Glycine max
gtacaagccaccagttgagaagccaccagtgtacaagcctccagtgtacaagccaccagtatacaaaccaccagtttataagcctccagttgagaaacctcctatttacaagccaccagtttacaagcctcctatagagaagccaccagtgtacaagccaccagtgtacaaaccaccagtgtacaaaccaccggtgtacaagccccctgttaagaaacctcctatttacaaaccac

SEQ ID NO: 139052 - DNA, 238 bp, Glycine max
  unsure (1)..(238): unsure at all n locations
gtcactccttgctcttagccctcctcctcttcgccgccgtgaccaccgccgcgatggcggtggccgcgtccgacgccgacgacatcctgatccgtcaggtggtgccagatgttggcgaacganagaggaggacaacctgctgaacgacgagcaccacttacgcgagcttcaaggccaagttcgccaagacctacgccaccaaggaggagcacgatcatcgattcggcgtcttcaagtc

SEQ ID NO: 139053 - DNA, 233 bp, Glycine max
cggaaccagagaaaaccaaccagaccgattactcttgaggaaacaaaaatctaagatgagccgccatccttctgtcaaatgggctcagacgtctgatgtactctacttaacagttgagctgcctgatgctcaggatgttaagctcaaactggagccagaaggaaaattttacttctctgcaactgctggtgcagagaaaattccttatgaggttgacattgatctgtttgaca

SEQ ID NO: 139054 - DNA, 241 bp, Glycine max
ctgagattgctggtgtggtggtttccgttgaacccaagccaattatgggtgcttggactgcgtgctcgtgctcacacaaactacagcacgaagtccatgagcgaagatggtggctatgcagtgatcagagcagcacattgacaagttggggtaggagcgcaaagactcacattgctgcttatggagaacgcaaccaacgtgctgcgacaggccgccacgagaccgctgacatcaacacctt

SEQ ID NO: 139055 - DNA, 236 bp, Glycine max
catgatccttctaaatgcctatataattgtgcacatgatgaagtgagttgccagaatttctgggaggtacctgcacttgtgaagatcagggaggttgccttagatctgataaaggcccctggaaaaaccctgatatattcaagatggttctcactggtggagcatggcggtcaaaacaagttgtaaaagttcttaacaatgaaagaaaggttattgtgtatgccaagccaggatac

SEQ ID NO: 139056 - DNA, 235 bp, Glycine max
gagctatggcgcaagaagcagtctgatgttatgagattcttgcagcgggtgaggtgctgggagtatcgccagcaaccttctattgtccgtttgacaaggtctactcgcccagataaggctcgtcgcttgggtttcaaggctaagcagggttacgtgatttaccgtgttcgcgtacgaaggggtggccgtaagagaccagttccaaagggtattgtttatggtaagcccaccaacc

SEQ ID NO: 139057 - DNA, 231 bp, Glycine max
ttctctttgcgcagttccctacctctcctttcaagatgcagatcttcgtcaagaccctcaccggaaagaccatcacccttgaggtggaaagctctgacaccatcgacaacgtcaaggccaagatccaggacaaggaaggaattcccccggatcagcaacgtctcatcttcgccggaaagcagctcgaggacggccgtaccctcgccgactacaacatccagaaggagtcaa

SEQ ID NO: 139058 - DNA, 231 bp, Glycine max
atcagcattgctcatagaataccaacagtaatggactgtgatagagttctagttgtagatgcagggcgggccaaagaatttgattcaccagccaacttgctccaaaggccatctctctttggggcattagttcaagagtatgccaaccgttccagtggcctataagaaagttccatgcatgtgtctctctcagccattcagacaataacagaaaaccaaacttaggctaag

SEQ ID NO: 139059 - DNA, 232 bp, Glycine max
atacactggtggcttgtaaacaggtggtttataaactggaggcttgtaaacccccaattgagaaaccacccgtttataagccaccagtttacaagccaccagtgtacatgcctccagtgtataagccaccagtttacaagccaccagtgtacaagcccccagttgagaagccgtcagtatacaaaccccccgtttataagccaccagtttacaagccgccagtgtacaagcc

SEQ ID NO: 139060 - DNA, 234 bp, Glycine max
gggaaacgctgcctttttaatggaggtagcatttgcccaaaaagtgtgcatggaggcacaaacttctgtgttgctcatggtggtggaaagaggtgtgctgttgcaggttgcacgaagagtgcacgtggtcgtactgactgttgtgtcaggcatggtggggggaagcgatgcaagtttgaaggctgtgggaagagcgctcaagggagcacagatttctgcaaggcacatggtggg

SEQ ID NO: 139061 - DNA, 236 bp, Glycine max
ccaattttcaccaaaacctaatactcccacaccaatcttcgatacatggacgccgattcacaacctcaacaactcgaagagagaacagaggagcaagaactgaagtacctggaattcgtgcaattcgcgaccatacaggctctgatgcgctgcgccatcctctactcatacgccaaggagcgcgcgggtcctctgaagcccggtgtcgacaccgtggaggaggccgtgaagaccgt

SEQ ID NO: 139062 - DNA, 244 bp, Glycine max
ctgagattgctggtgtggtggtttcctttgaccccaagccaattaagggtgattggactggtgctggtgctcacacaaactacaggcaccaagtccatgagagaagatggtggctatgaagtgatcaaagcagcaattgacaagttggggtagaagcacaaggagcacattgctgcttatggagaaggcaacgaacgtcgtgtgacaggacgccacgaaaccgctgacatcaacacctacttat

SEQ ID NO: 139063 - DNA, 233 bp, Glycine max
ctctagcacttaactagcaatattaattagcatttgctagagagactaggagtataaacataccccagtttaagatggcttcaaaaacttgttcctccctaaccctagcccaagtggctcctgcccccgtgatgcactcaaactaggtgtatgcgccaatgtgctaaacttggtgaacgtcactttgggtcaaccaccagttaccccttgctgcacccttctcgatggtctcg

SEQ ID NO: 139064 - DNA, 234 bp, Glycine max
cgttgggatctccatacgccggatctgctaaaatacgcttgatccatatgggcctcctcgaccacttgtgggacgacaccgtcgccggcccaaggccggaaaacggtctcggcaagctccgaaaacaccacaccttcactttccgacctagctccggcaaggaaacggagggcgggagcgtgagatcgtacggagacgaatcgtcggaggacgcgacgagagtgacgcgtagta

SEQ ID NO: 139065 - DNA, 230 bp, Glycine max
catcgttgggatctccatacgccggatctgctaaaatacgcttgatccatatgggcctcctcgaccacttgtgggacgacaccgtcgccggcccaaggccggaaaacggtctcggcaagctccgaaaacaccacaccttcactttccgacctagctccggcaaggaaacggagggcgggagcgtgagatcgtacggagacgaatcgtcggaggaaacgacgagagtgacg

SEQ ID NO: 139066 - DNA, 231 bp, Glycine max
ggcaactcaagtatttggagaattgctttattatcctcagacagattctctgatggaattcccctcaccggaatcattgaaaggtcgaattcttatatcaacaaaaccaccaaaagaatttcttgaatccaaagaatgtgatgacaaggacaatgaaaaggaatcagccgacgaggttttgtcattgccagaccaaacaagtgaacgggaaactgatgataagagtgcacc

SEQ ID NO: 139067 - DNA, 246 bp, Glycine max
gggaagtttcattttccccagtgctcagccatatccccatcgcaacttttctgaggaagttgctattcttgatggctactttggcaaacttggtgcaggaagcaatgcttatattttgggtggccaagacaaagcacagaactggcatgtctactctgcttctgcagattctgtaactcaatgtgacaatgtttacactcttgagatgtgcatgactggcctggatagagagaaagcacaggtttt

SEQ ID NO: 139068 - DNA, 247 bp, Glycine max
cacgaccatcaccacagcccattaagaatatcagtaagaagagcgtatgttctagaagattcatataaccagcttcgcatgagatcaactcaagatttgaagggaaggttgactgttcatttccaaggggaagaaggtatcgatgctggtgggcttacaagggaatggtaccaactgttgtctagagttatttttgacaaaggagcgctacttttcactacagtaggcaatgaatcaacatttcagc

SEQ ID NO: 139069 - DNA, 233 bp, Glycine max
ccttcttcctttacacctcgctggaaccagcgatggatcctcagcctgagccagtcagctacatatgcggagattgtggaatggagaatacgctgaagcccggtgacgttatacagtgccgtgagtgcggttaccgtattctttacaagaagcgcactcgtcgcattgtccagtacgaggcacgctgaagaaaactgctaaaacgtttgcaagtaatttccatgaagaaattg

SEQ ID NO: 139070 - DNA, 277 bp, Glycine max
gcaaggcctactaagcgacgaaatgcttcggggagttgaaaataagcgtagatccggggattcccgatataggtcaacctttcgaactgctgctgaatccacgggcaggcaagagacaacctggtgaactgaaacatcttagtagccagaggaaaagaaagcaaaagcgattcccgtaatagcggcgagcgaaatgggagcagcctaaaccgtgaaaacggggttgtgggagagctatacaagtgtcgtgctgctaagcgaacagcagagaatgctg

SEQ ID NO: 139071 - DNA, 286 bp, Glycine max
acgatcctccgatcatacacttagttgcttccaattaagatggttctgctagagaagctctgggatgatgttgtggctggccctcaacctgagcgtggccttggcaagctcagaaaactcaccaccctcaaaactattgatgaaggagaaagtagcaagctgcagaagacgttgtcgatgccgtcgacaccaacaaccccgatgactccgacgactccaacgacaccgggatcggcccgtaaagctgacaacgtttggaggagcgtcttccatcctgggagcaact

SEQ ID NO: 139072 - DNA, 277 bp, Glycine max
gaggttactacccacttcttaccattgatgtttgggagcatgcttactaccttgattttcagaaccggcgtcctgattatatatcagtgttcatggataagcttgtttcctgggatgcagtgagctctagacttgaacaagctaaggctttaattaccagtgcatgatgctgaattaaatgcagaataagtgatttatcctgatagtgatgatgaattggatggcgtcatgcggaatagtgaattatttttatctagaaagtgtaagcaggcacatc

SEQ ID NO: 139073 - DNA, 285 bp, Glycine max
gctctcggcggatgtgtgagtttgcatggttggatagcaatggcagcaaagaaggtgtgtgtaacaggtgctggaggattcgtagcgtcttggcttgttaagcttcttctttccaaaggctacattgtccatggaactgtgagagaccctgaacctgctactcagaaatatgaacacttgctcaaactccacggagcttctgaaaacctcattctcttcaaggcagatctcttgaactacgaatctcttcgctcagcaatttctggatgcactgcagttttccat

SEQ ID NO: 139074 - DNA, 278 bp, Glycine max
attctgaatggagctttctgcaccttcttcaccctctcttctaagatgtccttcatccctgcttctgaattctagggttagggttttccatacaatacccaaccccacacgcccacctttccaagcttcaatcttttcactcaaccaacgcaatctcactccaatggatcttcccagaaacgtctcctccgctgccttggtgggagacaacgcttcggccacgaccactttgccaattgactcagatgctagaatcggagaggttaaaagggtcacca

SEQ ID NO: 139075 - DNA, 271 bp, Glycine max
agtcatcatccatatcacaaaaaactattttggcttctgcctttccttttccagggagctcattgacaatggctgaaacaaagtgggtcatgaaggacaaaagatggtctctccatggaatgacagctctagtcacaggaggcacccgaggcatagggcatgccattgttgaagagttagctgagtttggagcaactgttcatatatgtgcacgtaatcaagatgatattgataaatgtttagaagagtggaaaaacaagggacttaatgt

SEQ ID NO: 139076 - DNA, 283 bp, Glycine max
gtattcgactcgagatttctaatctcattctccttctgttcaaacactctctctcatggcatcagataagaagattaggatcggcatcaacgggtttggaaggattggccgtttggtggccagggttgcccttcaaaggaatgatgttgaacttgttgctgtcaacgatcctttcatcaccactgattacatgacatacatgttcaagtacgacaccgttcatggccagtggaagcattttgatgtgaaggtgaaggactctaagacccttctctttggtgag

SEQ ID NO: 139077 - DNA, 286 bp, Glycine max
ctcctcaatctcgagccgaatcggctcgaggatttctgctctgcagcatccgcatcttgttaaactctatggatgttgtgtggagggagatcaactattgttggtatatgaatatatggaaaacaatagtcttgctcgcgctctatttggcgccgaagaacaccaaataaaattggactggacaacaagatacaagatttgtgttggtattgctagaggtttggcatacctccatgaagaatcaagattgaagattgttcatagggacattaaggcaactaatgtg

SEQ ID NO: 139078 - DNA, 260 bp, Glycine max
aatcgatgaactccctaagcaaattgatgatacacagtacccaaaaacattcttctataaagaagaccttcatccaggcaaaacaatgaaagtacaattcaccaagcgtccctatgcacaaccttatggtgtatatacatggttaacggatattaaagacacctctaaagaaggatatagttttgaagagatatgcatcaagaaagaagcgtttgagggagaagagaagttttgtgcaaaatccttgggaacagtaattg

SEQ ID NO: 139079 - DNA, 269 bp, Glycine max
gagcaagctgaatcacgagaccacaagagatggatggaaaggcagaatgcgaaattgacagacaaagctaggaaggaagactatgcacggatacgcactcttgttgataatgcttataagagagaccccagaattttgagaagaaaggaagaagaaaaagctgagaaacaaaggaaaaaggaggctaagttcctagctaagaagttgcaggaagaagaggcagccagaatcgcagaagaggagaggcagcgaaaagaggaggcagagag

SEQ ID NO: 139080 - DNA, 266 bp, Glycine max
ctttctctcgtttcaatcgaaaccaaaacaaaatcatgggcagaaaattcttcgttggtggcaactggaaatgcaatgggaccactgaggaggtaaagaagattgttactactttgaatgaggctaaagtccctggagaagatgtcgtagaagttgttgtgagccctccttttgtgttccttcctgttgtaaaaagtttgctgcgccctgatttccatgtttcggcacaaaactgttgggttcgcaaaggtggtgcttataccggt

SEQ ID NO: 139081 - DNA, 254 bp, Glycine max
catccctgtcaaacaaaccatggcttccgaaacaaaccagtccaagaatgtgtgtgtaattggagctggaccctcggggctattggcagcgagggagctgagaaaagaaggtcacaaggtggttgtgttggagcagaaccatgatattggaggtcaatggctatgtgacccaaatgtacaagaggaggatcccttaggaagagacccttggctaaaggtgcatagcagcatctatgagtctttaaggttcatgt

SEQ ID NO: 139082 - DNA, 279 bp, Glycine max
tgcgaaatctaataattctagggtttttctccttcgaagatcaatcaactgggctttgaaatggtgaaggagaccgaatactatgacgtgctgggtgtcagccctacggcatccgaagccgagattaagaaagcttattacattaaggcacggcaagtgcatccagataaaaacccaaatgaccctcttgctgcacaaaattttcaggttttaggtgaggcttaccaagttctgagtgacccagctcaaagacaagcttatgatgctcatggaaaatca

SEQ ID NO: 139083 - DNA, 260 bp, Glycine max
gctccttcagaatccgcttggagcttaaggacctccagaaagaccctccaacctcttgcagcgccggtcctgtagcggaagatatgtttcattggcaagcgactataatgggtccccctgatagcccttatgctgggggtgtttttctagttactattcattttcctccggattatccattcaagccacccaaggttgcatttaggactaaagttttccacccaaatatcaacagcaatggtagtatgtgtcttgatatc

SEQ ID NO: 139084 - DNA, 273 bp, Glycine max
tgattttgttgaagaagatggatcctttggggatgatgagcaaaagcaagctcagacactgagagtgtcatgctggttgaacggtgcagcttgtagccttaaacttaatgactttcctggagcaatcaagctatgttcacaggtgcttgatgttgaattttgcaacgtgaaagctttttacagacgagcacaagcatatatagaaactggagattaccttttagcagatgtagacatcaagaaagctcttgtggtggacccacaaaacaggga

SEQ ID NO: 139085 - DNA, 264 bp, Glycine max
ctcgagcgaacgacgatgataccatcggcgacctgaagaagcttgtggcggctcagactggcacaagagccgacaagatccgcatccagaagtggtacaccatctacaaggatcacatcactctcaaggattacgagatccatgacggcatgggtctcgaactctactacaactaaacacaacaaggtgtgttttatgcgtaatatactatgtgctgggaatgggataagcgctaaatgtaattctgacttgcgaaagttccca

SEQ ID NO: 139086 - DNA, 264 bp, Glycine max
caacattttacactcttttcttcttctcgttgttgcttcggtgttgaatcatggatcagaaagtcgatttcagtgctccgcattccatgggaaccactatcatcggcgttacttacaacggcggtgtcgttctcggagccgacgctcgaaccagcactggagtgtatgttgccaaccgagcatcggacaaaatcacacagctcactgataatgtttacgtgtgtcgctctggatcggctgctgattctcagattgtctctgact

SEQ ID NO: 139087 - DNA, 261 bp, Glycine max
attaactctgcccattcgttgagcgttgaggctgcttatatcaaccagaatttctctcagcaggtgcttattagggatgggaataaggttacttttgatgaggctaacccttttgctaatgaaggtgaggaggttgcttctgtcgcttataggtataggaggtggaagcttgatgatgatatgtatcttgttgcgaggtgtgaggttcatagtgttgttgacgtgaacaagcagaggtcgttccttactttgaatgcgttg

SEQ ID NO: 139088 - DNA, 265 bp, Glycine max
  unsure (1)..(265): unsure at all n locations
cggctcgagctcgaccgaatcggctcgagcttcagtttctcctcgttgttcttcgctttcctganagcaatttcgattctttcgttaatttaataagatgtttgggagggcaccgaagaagagcgataatacgaggtactacgaaatcctcggcgtctccaagaacgcttcgcaggatgatctgaagaaggcttacaagaaagccgccattaagaatcaccccgacaagggcggtgatcccgagaagtttaaagagctggcgcaa

SEQ ID NO: 139089 - DNA, 275 bp, Glycine max
  unsure (1)..(275): unsure at all n locations
ctcctatttacaagccaccagtttacaagcctcctatagagaagccaccagtgtacaagccaccagtgtacaaaccaccagtgtacaaaccaccggtgtacaagccccctgttaagaaacctcctatttacaaaccaccttacccaaagtaccctccaggctccaactgaagacacccacctgattttgaattaagttaagggatgtattaagtatatgctaaataagaggtgtatctacaaccattgactttgtcatgctcanaaatttagttt

SEQ ID NO: 139090 - DNA, 270 bp, Glycine max
gccaccagtgtacaagccaccagttgagaagccaccagtatacaaaccacccgtttataagccaccagtttacaagccaccagtgtacaagccaccagttgagaagccaccagtgtacaagcctccagtgtacaagccaccagtatacaaaccaccagtttataagcctccagttgagaaacctcctatttacaagccaccagtttacaagcctcctatagagaagccaccagtgtacaagccaccagtgtacaaaccaccagtgtacaa

SEQ ID NO: 139091 - DNA, 270 bp, Glycine max
accctccacaaattcccaaccctaaaaccacgccacgtcaccaccaccaccgccgccgccaccaccaccgttctctccctcctccgccgccgcctccgccaccgtctccgcctcttcctcttcctcttgctccccttcttctacttcctcgtctcccaccccacaaactccttcctcctcgatttcctctccgccttctccttctccgccgcgctcttgttctctctcaacctcgccctccctcgaatcccctccctccgcctcttcctc

SEQ ID NO: 139092 - DNA, 261 bp, Glycine max
agaataaagcatccaaagatgaaacgtcatctaaagattctccagcagcacaaagagctactacagctacttctggacctgcaactggttttccaggcaacccttttgatttctctgcaatgtctggcctgctcaatgatccaagtatcaaggaattggctgaacagatagcaaaagatccatcattcaaccagatggctgagcagcttcagaaaacttttcaaggagctccacaggatgctatgcctagctttgataatc

SEQ ID NO: 139093 - DNA, 260 bp, Glycine max
ccgtaacggaatccgaaggctcctcttctgctacctcaacgttgccgtcttgggttgacggacgagctcgtggtgctaaaacgattggaaccaccgaaacgacggctcaggtgcatccgaggctcttcactcgcacgctgattgatagagcggtggagaagcatggagtgaaggtggagattgcgaaattggaacggttggttgtggcagaaggacgagttggatcggtggtgcttgaaggaggacgagttttggaagcg

SEQ ID NO: 139094 - DNA, 264 bp, Glycine max
cttgggtctattatgaatatggaaacatagaagagattctcaaatttgaatctaacatacccataccagacatcaaggaagaccaagtgctcatcaaggttgtggctgcggcgcttaatcctgcagattatatgagggctcttgggtttttcaaggacactgatgcacccttacctattgttccagggtttgatgctgctggtgtggtggtgagagtgggaagtaaagtgagcaaattcaaggttggagatgaagtttatggtg

SEQ ID NO: 139095 - DNA, 261 bp, Glycine max
acaatgagagtgagcaagtgaggaaccaccacctcctccatcatcactcatccttctccctccatgatgagtagtggtgtttggaatttcattgcaagcactatagcggatcaaatcagcgtttgtggcatcaagttccttttggagcctaaggacttgcttttggagcactgaaatggccccaacacaaccatacactggatctttgatccttgcttcggcttcataggccagagagttcacagcatcctctctttgatg

SEQ ID NO: 139096 - DNA, 269 bp, Glycine max
ctccaaagtttgtggaacaaaccaaaaatagaggtctgttgtctagttggtgtccccaagagcaagtgttggctcaccccgcgattgggggttttttgacgcacagtggttggaattcaacgttggaaagtgtgtgtggaggtgttccaatgatatgttggcctttctttgcggagcaacaaaccaattgtcgattctgttgtaaggaatgggggattggattggagattgaagatgttaagagggataaaatagagagccttgtgagg

SEQ ID NO: 139097 - DNA, 285 bp, Glycine max
cggctcgagtggaggacccccaggcggtggtggtgcatcaggcgaagaagacgaggacgattctcacgatgagctctagattagtcggagtctgttaaatttttatgatagctgggaattaagaagtcccctgcgcttgcttttttggtggcgatgataagatactttgtgaaattacttgtactttacttttttgcttagttttacgacgaaacttcttcaactgtaagaatgagcttgttttcacttccaaaaaaatatggggtccaaaaaaaaaaggggggg

SEQ ID NO: 139098 - DNA, 267 bp, Glycine max
tgcagctctatggaggatcttgagaacttggctcttggaggcatgagtgttgccaggctcaacatgtgccatgggaccagggagtggcaccgtgatgtgattaggaagatcaagaagttgaatgaggagaaagggttctgtgtttctgtaatgattgacactgagggtagtcagattcatgttgttgatcatggagctccttcctccgttaaagttgaggaaggttcaaattgggtgtttactgctgaacattatgagggttctcgt

SEQ ID NO: 139099 - DNA, 257 bp, Glycine max
cgaaacatgaggcatatggcttccttaagctcctcattagtgctgctccttgcagctctaattctatcccctcaagttcttgctgactatgagcagcccccaatttacaagccacctgtgtacacaccgccagtttataagcccccagttgaaagaccaccagtgtacaaacctccagtttacaagcctccagttgaaagaccacctgtttataagcctccagtgtataagccacccatgtaccagccaccagtgta

SEQ ID NO: 139100 - DNA, 250 bp, Glycine max
gttggcaagaagaagtttgagactctttcctacctgccagaccttgatgatgcacaattggcaaaggaagtagaataccttcttaggaagggatggattccttgcttggaattcgagttggagcacggtttcgtgtaccgtgagcacaacaggtcaccaggatactacgatggacgctactggaccatgtggaagctgcctatgtttggttacactgctgcttctcaggtgttgaaggagcttcaagagg

SEQ ID NO: 139101 - DNA, 272 bp, Glycine max
actctcaaccacccaatatacattcctcttctatcacaacatcgtccgcaaccatgaccatggctgcgatcgtgctcctgttcacggtctttgccgtttcctccgccctagacatgtcgataatctcgtacgacagcgcccacgcggacaaggccgccacgttgcgcaccgaggaggagctgatgtccatgtacgagcagtggctcgtgaagcacgggaaggtgtacaacgcgctcggcgagaaggagaagcgcttccagatcttcagggac

SEQ ID NO: 139102 - DNA, 286 bp, Glycine max
ccagagacgaggacaaggtctactactcttgcggctagggtttagcgcagttcttctagatttaaggaagatgggtaaggaaaaggttcacatcagtattgtggtcattggccatgtcgactctgggaaatccactaccactggtcacttgatttacaagcttggaggcattgaaaagcgtgttattaaaaggtttgagaaggaagctgctgagatgaacaagaggtctttcaagtatgcctgggtgctggacaaacttaaggctgagcgtgaaagaggaatcacc

SEQ ID NO: 139103 - DNA, 267 bp, Glycine max
ctcgagctcgagccgctctacccctccgaaacccgacccgaaaatgcgatccaaatcggatcccccggtggcccctccctcctcctccggcggaagcgactcctcctccggcgcatccatcgatccgatcttccacctcctccgcgtcctccccttcagcttcctccgcccccctcgcctccgcctcaagcttccctccttcaccctcccctccccgaacgccgtcttcgccctcctcctactcacctacttcatggtcgtctccgg

SEQ ID NO: 139104 - DNA, 283 bp, Glycine max
gaggttactacccacttcttaccattgatgtttgggagcatgcttactaccttgattttcagaaccggcgtcctgattatatatcagtgttcatggataagcttgtttcctgggatgcagtgagctctagacttgaacaagctaaggctttaattaccagtgcatgatgctgaattaaatgcagaataagtgatttatcctgatagtgatgatgaattggatggcgtcatgcggaatagtgacttatttttatctagacagtgtaagcaggcacatcttttgt

SEQ ID NO: 139105 - DNA, 257 bp, Glycine max
cgtctgcaaaggattctacccgccgctcgatgggaattgcgcttcaaggcgtctcgtagggctaatccgcctcacgagggtcaccaacggcacgtgcctttggggggccgaggccccctactgctggtcggcaaacggacggcgggcgcacgcgtcgcttctagcccggattctgacttagaggcgttcagtcataatccaacgcacggtagcttcgcgccactggcttttcaaccaagcgcgatgaccaattgtgc

SEQ ID NO: 139106 - DNA, 259 bp, Glycine max
gatattctgggttggaccaattgttggagcagcagtggctgcattttaccaccaatacatccttagagcagcagctatcaaggctcttggatccttcaggagcaacgcttaattaattaatcaattaagctagctaccttgattaatttgccaacaagggctatgcatggtgtttcccccgaagaataataatttctatgttgaggagtgctagtgatctgtctatgcagttccctaatttaggctttttcgtcttttc

SEQ ID NO: 139107 - DNA, 257 bp, Glycine max
attgctccgtgtttgacctgttatagtaaacagtgatggctgaaagggacttgaggcttttgggtgcttggttcagtccatttgccctgagggtgcagattgcccttaacctcaagggtttggattatgaggttgttgaagagactttgaatcccaaaagtgaattgcttcttaagtccaaccctgtgcacaagaaaatcccagttttcttccatggagataaagtcatatgtgaatctgcaatcatagttgagtac

SEQ ID NO: 139108 - DNA, 263 bp, Glycine max
aattttaattgacttttctcccctcataaaaaaaacctaccaatggctcccgcaaaggcagagaagaagcccgcggagaagaagccggcagagaaggccccagcggagaagaagccgaaggcgaagaagaagatatcgaaggaaggaggaagcgagaagaagaagaagagaacaaagaagagcgttgagacctacaagatctacatcttcaaggtgttgaagcaagtgcaccccgacatcgggatctccagcaaggctatggg

SEQ ID NO: 139109 - DNA, 267 bp, Glycine max
gagagagagagagagagaggagagagtattggcgcttcatcaagatgggtatttctagggattccatgcacaagaggcgtgccactggtggcaagaaaaaggcttggagaaagaagagaaagtatgagcttgggcgtcaggcagcaaacaccaagttatcaagcaacaagacaatcaggaggattcgtgttagaggtggcaatgttaaatggagggcattgaggctggatactggcaattactcatggggtagtgaagcagttactc

SEQ ID NO: 139110 - DNA, 259 bp, Glycine max
gtctcttagctttgattctctgttctctgttttgttctgtttcgcgtgaacttaaacaatgaagactgcaaagggcaagggagcagcgaggccctcaaaagaatcactgaagcctgttgatgaccgaaaggttggaaagcggaaggcttctggtaagcctgagaaaagcagagcaccaaagaaggagaagaaggccaagaaagaccccaacaagcctaaaagaccaccgagtgctttcttcgtgttccttgaggagttc

SEQ ID NO: 139111 - DNA, 252 bp, Glycine max
cagaatcagggcattttgaatttaattgaggccaaatgggatgatattgttgctcaaatgcctctcaagatttgttatccagcactggagggtgaggaatggcgtataaccactggctgtgaccccaagaacaccccttggtcataccataatggaggatcttggccgacacttctatggcagttcacgttagcctgcatcaagatgggaaggcctgatttggcacaaaaagcagttgattcagcagagaaa

SEQ ID NO: 139112 - DNA, 257 bp, Glycine max
cacatagtagctattatactctctagagtaattgcggaatctgctagaattttctaataatggcgaaagacgttgagcaggtcacagagcaaggtgaatactccgcgaaggactaccatgaccctcctccggcaccgttgatcgacccagatgagctcacaaagtggtccttgtacagagccgccatagctgagttcatagcaacactcctttttctttacatcaccgtgttgaccattattggctacaagagacag

SEQ ID NO: 139113 - DNA, 257 bp, Glycine max
ggctggaccatccttgccgccgtttgccgcggcatctccggccactctctctcatcgccattcagtgtattttggtttagttgcaaagttttagagttggattggaagattgtgaactaagaaagatggtgaagttgactatgattgcccgtgttactgatggtcttccgctagctgaaggactggatgatggtcgtgatcttaaagatgcagaattttacaaacaacaagtcaaggctttgtttaagaatctctca

SEQ ID NO: 139114 - DNA, 253 bp, Glycine max
ccaaaaccctagcggcgcctgctttcttcgttcgtcttttgcatcagccatcaggatggagtctcaggtgaagcatgctcttgttgtcaaagttatgggtcgtactggatccagaggacaggtgactcaggttagagtgaagtttttggatgatcagaaccgtcatatcatgaggaatgttaaaggaccagtgagagaaggagacattctcaccctactcgagtctgaaagggaagcaagaaggttgcgctag

SEQ ID NO: 139115 - DNA, 256 bp, Glycine max
ctcagtagtgcgattttcgattctcttctctgcaactatgcctaaccctaaggtcttcttcgacatgaccatcggcggtcaacctgccggccgcatcgtgatggagctctacgccgacgtgactccgagcaccgccgagaacttccgcgcgctctgcaccggcgagaagggcgccgggcggagcggcaagcccctccactacaaaggctcgtccttccaccgcgtgatcccgaacttcatgtgccagggcggcgac

SEQ ID NO: 139116 - DNA, 258 bp, Glycine max
gtatttttgatgcaaaggctggaattgcattgaataagaactttgtgaagcttgtttctagagacgacaacgagtggggatacagctcacgtgtcattgatcttcttgtattcgttgccaagaagtctctttaaggtgttacttcaaagtagcttgtcttcacattattaccgtatgtttatgtttagctgcgatttagtgtcttgctcgagcaaaaaatgagaggtctgaataaatcggtttctgaaaccagtggtg

SEQ ID NO: 139117 - DNA, 261 bp, Glycine max
ggctattccatctgccccttatgatcctcttgccttgaggcatgcctttgagaaggctgtggtaaaaaggttgatgactgatgtgccctttggtgttttgctctctggaggtttggactcttcattggttgcagccgtcacggctcgctacctggcaggcacaaaagctgcgaacaatgagggaactaaattacactctttctgtgtaggccttgacagtacacccgacctaaaggctgctaaggaagtagcagagtacat

SEQ ID NO: 139118 - DNA, 254 bp, Glycine max
gagttgaaaaagttcgtggaactttgcaccttgttaggtcatattcctttcaaaattacaggcttcggcttgacatcgattcctttgcacttccaaaagaattggttgtgcagtccttgttttcagacaccatctttaagtttctgtcgacgtttgagttctataatggctggtgattcttctgtaatgtccaatggatacagcaagggcagtgtcaatccactaactaacctgcgaaggacttaccaagtgtt

SEQ ID NO: 139119 - DNA, 255 bp, Glycine max
gttacgtacatagcttgaaaacacagtgcttgtttagactagtatcttccatggctccgaaagatagaatcctggttttgggacccacaggagccattggaagacacatagtttgggcaagtgtaaaggcagggaatcccacttttatattggttagggacacccctgcctctgttaacaagccaaggcttgtcactgctgctaatcctgaaaccagggaagagctcattcagagcttccaaaattctggagtta

SEQ ID NO: 139120 - DNA, 253 bp, Glycine max
gtcctcttacagcagtagttctgggaacttttgcaaaaatatttcatccatcatcaatttctttggtgggagatatacctcaaggcctaccaaaattttctgttccaaaatcttttgagtatgcacagtccttaattccaactgctcttctcataactggtgtggctatattggaatcagtgggaattgcgaaggcattagcagcaaagaatgggtacgagttggattcaaatcaagagttgttcggtcttgg

SEQ ID NO: 139121 - DNA, 253 bp, Glycine max
caggtgggactgagagttcagcagtaacagtggaatgggcaatcacagagctattgagaaggccagagattttcaagaaggcaacagaggagctagacagggtaataggtagagaaagatgggttgaagagaaggacattgtaaatttgccttatgtgaatgccattgcaaaggaagcaatgaggctgcaccctgtggcaccaatgttggtgccaagactagccagagaggattgccaagttggagggtatga

SEQ ID NO: 139122 - DNA, 253 bp, Glycine max
ataaggatgagaagtacagcacgagggtgaaggatgaagaggggtgccctgctttctctttgatcaacaaggccactggtgaggccttgaagcactccatcggtgctactcatccagttcggctgataccttacaagccagactatcttgatgagtctattctttggactgaaagccgtgacttaggagatggccacagagctataaggatggtcaacaatgttcatcttaatgtggatgcttttcatggcga

SEQ ID NO: 139123 - DNA, 251 bp, Glycine max
cttctggaatcattctcggaagggagcttgtgaattctccggctaatgtgctcacgccaggggtattggctgaagaggcatcaaagattgcttcaacatataatgatgtttttactgccaaaatattagatgctgagcagtgtaaagaattgaaaatggggtcctatcttggtgttgctgcagcctcagcaaatcctcctcattttatccatctgtgttataaaccaccaactggacctgtcaatgtcaag

SEQ ID NO: 139124 - DNA, 252 bp, Glycine max
ggctcgagcaaaaacaatggcgacatcgctctccgtttcgccatctctctctctcaacactctcttcttcgccaaagcgcttcctctatctcgtccctcccttctctctctccctctccccaaatccctcctctctctctccacgcgccgcctcaccttcgccgtccgcgccgaatcccaaaacggcgccgatgccgtccccgcacactacgacttcgacctcttcaccatcggcgccggcagcggcggcgt

SEQ ID NO: 139125 - DNA, 253 bp, Glycine max
gtcggatgcatcccttccaaggcacttctgcattcttcccacatgtatcatgaggctaaacatgcatttgccaaccatggggtcaagttttcatctgttgaggttgatttgccagccatgatggcccaaaaagataaagcagtttctaatcttaccaagggtattgaaggtctattcaagaaaaacaaggtaaactatgtcaaaggttatggcaaatttgtttcaccatctgaagtctctgtggacaccactg

SEQ ID NO: 139126 - DNA, 257 bp, Glycine max
gaaacgacattggtggatacacacttgcttacaatttggagacagcaatttctggatgcactgaggttgttgagaccagaatcaaaaaaaataaaaaatgcatgtctccgcttagcttgtattttctggcaattgctgattttaccttggaggtttctgtttgcatttgttcctccatgccaaattgctcatggatggatctccttcatttgctctctgcttttcatctctgggatagcttacgttgtgactaagat

SEQ ID NO: 139127 - DNA, 261 bp, Glycine max
atgactttgaagaaaagataaattttgctgtttttccatcaatgcaaggggggccacacaataaccacattgctgcacttgctatagctttaaaacaagtcgctactcctgagtataaggcatacatgcagcaggtgaagaagaatgctcaagctttagcatgtgctttactgagaagaaaatgccgtctagtaactgggggtacagacaaccatctaatactttgggatttaaggcccctgggattgacaggtaaatttt

SEQ ID NO: 139128 - DNA, 258 bp, Glycine max
gatcgatcaagcatcagggagctttgagggttgattctctggtgtagtagcaatcagcacaatagaaaatgttttttgacggatatggatatcatgggacatcatttgagcagatatatcgatgctacccagcttcctttattgaaaagccccaaatcgaaagtggtgacaaaattatcatgcctccatcagcccttgaccgtctagcatctctgcatattgattacccaatgttgtttgaactccgtaatgatgctg

SEQ ID NO: 139129 - DNA, 253 bp, Glycine max
gttgggatctccatacgccggatctgctaaaatacgcttgatccatatgggcctcctcgaccacttgtgggacgacaccgtcgccggcccaaggccggaaaacggtctcggcaagctccgaaaacaccacaccttcactttccgacctagctccggcaaggaaacggagggcgggagcgtgagatcgtacggagacgaatcgtcggaggacgcgacgagagtgacgcgtagtatcatgatcgtgaaaccgccc

SEQ ID NO: 139130 - DNA, 251 bp, Glycine max
agatgatagagagaacgagccagagtaagaaaggagtgtcattcatggcgattgaggcatggttgatggacgatagcaatgaagatccaaggctttctcaccgtcgcaatcccaacgaatcagtttcattggaccaattagcagaattgggtgtgttatactggaagctcaatccaactatctatgagaacgatcaagagttgaccaagattagacaagataggggatacaactacatggacctgcttgat

SEQ ID NO: 139131 - DNA, 250 bp, Glycine max
taattatggagagaatgggggataaggacatagtcgaacgagcatttaagacattccataacagtttcaaccaaccaaaaacttctgttgaagacaaatctttgacaaagaagcaggttccttcaagggggactgtgccaaaggttccaacatctacaactttgaggaaagaaaatggacggccaactaaggttgagaatgtggataaaagtggaaatgctctacgaactactttgggcccaaaacctga

SEQ ID NO: 139132 - DNA, 250 bp, Glycine max
gattgtttgttgttgtaactcgttcttcttcttttgttgttctgtgtttgttttttctctcacctgaaaatgtcttgctgcggtggtaactgtggttgcggaagctcctgcaagtgcggcaacggctgcggaggctgcaagatgtacccagacttgagctacactgagtcaaccaccaccgagaccttggtcatgggagtggcacctgttaaggctcaatttgagggtgctgaaatgggtgtgcccgctg

SEQ ID NO: 139133 - DNA, 255 bp, Glycine max
tttggatgggttagaggggtcagctcgcgcctttatgaaggacgaactcgaggacttgatatccagagcaagaacttctctggccatgtttgttgctgttttgcccccaaaggttgaacaaattattgatgaacctttaagtggagactttccctcatgggtgagcagcaaggatcggagacttttggagtctactgttggcgacatcaaggccaatgttgtggtagctaaggatggaagtggcaagtttaagac

SEQ ID NO: 139134 - DNA, 254 bp, Glycine max
cttgatcaccataaccatgtcaatggcaacaacatcccctcacaccgccctcttccaaaaccgcaccaaccctttcactctctcctccttcaaacccacatccatcaaatgcgccacccaactccatacccaagccccgcccctcacccactcccaagatcgcgtcttcaacttcgccgccggtcccgccaccctcccggaaaacgtcctcctccgtgcccaatccgagctctacaactggcgcggatccggca

SEQ ID NO: 139135 - DNA, 250 bp, Glycine max
ggcaaggaggagtataatgcatttttttattcccttgtttcaattgatacccaggagatgtattactcaactaagagacagcaatttttaattgatcagggttacagctttaaggtaattactagcttgcctcctcccgatgaagggcctaatttgagctatcatcgtcttgaggatcaattggcacttcttggaaaggtgttgagtgctggtgacgatcaagttggattagagcaactagatgaagatg

SEQ ID NO: 139136 - DNA, 249 bp, Glycine max
ggagaggccattattgacactgctgcaggagtgcttggtaaatatgatccacgtccggttcagcctgatagcctttttcctgtgttctctgttacgaagggtatcacagcaggaatgatacattggctggttgacaatggacaactaaaccttgaagagaatgttgcaactatttggccagcatttcgatcaaatgggaaggatgtcattaaggttcatcatgtgcttaaccatacatctggtttgcac

SEQ ID NO: 139137 - DNA, 249 bp, Glycine max
ggaacccaaaccgaaaccctaaccctaacggagagatggcggagcacttggcatcgatattcgggacggagaaggacagggtgaactgtccgttctacttcaagatcggcgcgtgcaggcacggcgaccggtgctcccggcttcacaccaagccgacaattagcccaacattggttctgtcgaacatgtaccagaggcccgacatgaacatgagcattatcaccaaccccgatcagccacaaccccaat

SEQ ID NO: 139138 - DNA, 247 bp, Glycine max
cacaagcaaattgggcctgggatgtttcaacagatgacagagcaggtctgtgagcaatgtcctaacgtcaaatacgtaagggaggggtatttcatcactgttgatattgagaaaggcatgcaagatgggcaggaggtgctattctatgaggatggagagcccataattgatggggaatctggagatttaaggtttcgtatccgaactgcacctcatgacgtcttcagaagagaaggcaatgacttgc

SEQ ID NO: 139139 - DNA, 251 bp, Glycine max
  unsure (1)..(251): unsure at all n locations
gttgaaagcattttctaaatttgagaacacttcagaagctctagaggcagctactttacttattgatggaaaagctagcaagggtctgcgcaagttcctgcgtgttcattgtgaaaatgattaataangtgtggcagattcaaagcttgggaatgtgatcaaggagaaattgaaaattgactgtattcacaacaatgcagttatggagttgatgagaggcgttagaaatcagttaactgaacgtatatctg

SEQ ID NO: 139140 - DNA, 253 bp, Glycine max
actaaccaaacatgaatatcaaacccatcatcatcctagctttcttaatttccctctctttaacaaacgtcgtcgtttcagctcgactctttcccaacgtctcctcctggctcaacgcccacgcccctactggaggcgcgtgggatgcctttctcaactttaccggttgtcaccgcggcgacaagtacgacggcctcgccaatttaaaatcatactttgaacgattcggttacttccctcacgcgccgccctc

SEQ ID NO: 139141 - DNA, 253 bp, Glycine max
cgagaacaaaaaaaaaaaaaaaaaaaaacccgcgatccgccctcccctgggaaaagggaaacccagaagtccgaccgaaagaaaagagcgttttaaaagtgaaaaaaaatggggtttccgtccacgaagctgttcaccgggttttttccgaaaaaggaaatggggtttccaatggaaggccccgatccggcgggaaaaacacccatctggaaaaagctcaaccttggagaaatcgtcccccttttccccccaa

SEQ ID NO: 139142 - DNA, 255 bp, Glycine max
tcttgctctatagctgtggaggcagctgctgatagataccctggagtagaacagtatgcaattagagcatttggggatgctttggaggccatcccaatagcccttgctgaaaatagtggcctgcaaccaattgaaacattatctgctgttaagtctcagcaaataaaggataataaccctcactttggcattgattgtaatgatgttggcactaatgacatgcgtgagcaaaatgtctttgaaactttgatcgga

SEQ ID NO: 139143 - DNA, 253 bp, Glycine max
ggacgagaccccagaattgatgccattgagtcatgttcttgcaactaaactcggtgctcgtctcaccgaggttcgcaagaacggaacctgcccatggttgaggcctgatgggaagacccaagtgactgttgagtattacaatgacaacggtgccatggttccagttcgtgtccacacagtgcttatctccacccaacatgatgagactgtgaccaacgacgaaattgcagctgacctcaaggagcatgtgatc

SEQ ID NO: 139144 - DNA, 254 bp, Glycine max
taaccatgtcagacgaggagcaccacttcgagtcaaaggctgatgctggagcatcaaagacatttccccagcaagctggaaccatccgcaaaaacggttacattgtcatcaagaacaggccatgcaaggttgtggaggtttcaacttccaaaactggcaagcatggacacgcaaagtgtcactttgttgcaattgacatcttcactgggaaaaagcttgaggatattgtcccatcttcccataactgtgatgtt

SEQ ID NO: 139145 - DNA, 250 bp, Glycine max
gctagctgtgacttgttttgagttcaatcaaatcgcattggtatctgaaatcaggaaagatggttagcgtactgagatcaggcaggcacaaagggcagaaggcccagcaaccatccttgccattggaactgcaaacccaccaaaccgtgttgatcagagcacctatcctgattactacttcagaatcaccaacagtgaccacatgaccgagctcaaagagaaatttcagcgcatgtgtgacaagtctatg

SEQ ID NO: 139146 - DNA, 238 bp, Glycine max
tgacaatttttccatcatcatcaacagaggaacatagtccgaggaacagccaccacatgtatggcagggagttccgatcgatgttggacggactcgacgaggaagggtgtgttgaagaaccggggcatcaatctgagaagaagcgtcgactaagtgtggaacaagtgaaggctttggagaagaactttgaggttgaaaacaagcttgaacctgagaggaaggtcaagcttgcccaaga

SEQ ID NO: 139147 - DNA, 246 bp, Glycine max
aaacattgaggaagggcagtgttgtgataactggggcttcatctggactaggcctggccactgctaaggctttggctgagacgggaaaatggcatgtaataatggcctgcagggattacctcaaagctgcaagagctgcaaaatccgctggcatggctaaggaaaactacaccatcatgcacttggaccttgcctcgctcgacagtgtccgccaatttgttgataacttcagaagatcggaaatgc

SEQ ID NO: 139148 - DNA, 245 bp, Glycine max
cacgctgctgccaaggttttcagccatcctgatgttgttgctgaagtgccatggtacggtattgaacaagaatacaccttgttgcagaaagatatccaatggcctcttgggtggcctgttggtggtttccctggacctcagggtccatactactgtggtgttggcgctgacaaggcttttggccgtgacattgttgacgcacactacaaagcctgtatttatgctggcatcaacatcagtggaat

SEQ ID NO: 139149 - DNA, 243 bp, Glycine max
ctttagtgtgtgatttaattccaagattttgagaatgtctagctgtgggtgtggaagtagctgcaactgtggcagcaactgcggttgcaacaagtactcttttgacttgagctatgttgagaagacaaccacagagactcttgttttgggtgttgggtctgtgaaggcccaattggagggtgctgaaatgggtgttgcagctgagaacggtggctgcaactgtggatcaagctgcacctgcga

SEQ ID NO: 139150 - DNA, 247 bp, Glycine max
tctctatattccattgccacccagttttgaatatatttttattccttctttgtttcttcactttcttccatacacataaccatgtcttctcagactgttgtcctcaaagttggtatgtcatgtcaagggtgtgctggagcagtgaacagggttttgggaaaaatggaaggtgttgagtcatttgacattgatctgaaggagcagaaggtgacagtgaaaggaaatgtggagccagatgaagttctgc

SEQ ID NO: 139151 - DNA, 248 bp, Glycine max
caacaaacgccacaatggccgtcacgaaaagcctctccatcttcctcttcattcaccataagctgcgtggccgtagctcaggcagcgaacttcaacatcacaaacaattgcacctacacggtgtgggccgccgccgtgcccggcggcggctcaaggcttaaccctggcgaatcgtggaacatcagcgtgatgaacggcacgacaggaggacgcatctggggtcgaacaaactgcaccttcgacaacgc

SEQ ID NO: 139152 - DNA, 221 bp, Glycine max
ggcatgaaggaagaagacaaggactgggaatgtacactttcagaaacggggaaacacaatgtggtcattggcagaatgggattcttgatgatcctaaaagacataatagtcctactgggtctccatgtgctgtggaccatgccaaggttttcaatgcagtacaggacgcacattctgctgctgagaaagcttacaatatggcataggtggatgacggggtg

SEQ ID NO: 139153 - DNA, 246 bp, Glycine max
atcatgagctcgaaactgcaaggatcaatggattgctgggtaatattgatgcaaacactggtgatcctcaagttggttgggacactgatcagtttcttgtagatattcaagaggcgacactgattatgctcagtgtgatcagaaatggaggacttgcacccggtggattcaacttcgatgcgaaattgcggagagagagcacagatgttgaagacttgttcatagcccacattgttggaatggata

SEQ ID NO: 139154 - DNA, 247 bp, Glycine max
ggcggcgtgagaatgttggacatcaacctattcagagaggagaagggccacaaccctgaactcatacgcgaatcccaacgccgtcgtttcgccagcgtcgaaatcgtcgacgaggtcatcaatctcgacaaagaatggcgaaaacgccaattcgagttggaaaatctccgcaaggaattcaacaagatcaacaaggaagtctccaaactcaagcgtgctggggaggatgcttctaagttcattactg

SEQ ID NO: 139155 - DNA, 245 bp, Glycine max
tgcctagattcttcagccaaagtagaagctgctcacagttccagaaccccttctggaatttcaaaaactagtccttcatctgttccttccaacttatctattctgtcatatagtgaagcaagtgatttctcaaatcttccaacaccaaggtctgagagcgaaatcttgtcttccccaaatcttaaggcctttaccttcaatgagctaaagaatgccaccaggaactttcgcccggacagtcttct

SEQ ID NO: 139156 - DNA, 245 bp, Glycine max
ttcttcttctacatccactgcacaattgccacatgaatcattagttagggtttattctccaagaaaagcaatgagtgcgtccaggttcatcaagtgtgtcactgtgggtgacggtgccgttggcaagacttgcatgctcatctcctacaccagcaacacttttcctacggactacgtgccaactgtctttgacaatttcagtgcaaatgtagttgtggatggaagcactgtgaatcttgggttgt

SEQ ID NO: 139157 - DNA, 245 bp, Glycine max
ccttgatattcacaacttttctcttccctttgcacttcccttaccgtttcttgttcttccactgtgtttctctcacactatttactctttgataagctcatcattgtatgatggcgaagatccagcacagtgaagtggaagtgaagggactgaagctgcacgtggcagagattggaagtggctccaaggcagtggtgttcttgcatggattcccagagatctggtacacatggaggcaccaaatg

SEQ ID NO: 139158 - DNA, 244 bp, Glycine max
gagcagcagtgcagggaagttggtgtgtgtcaccggtgctgccggttatattgcttcatggattgtcaagttcctacttgaacgtggttacactgtcagggccactgttcgaaacccaaatgatcacacgaaggtagaacatttgctaaaacttgaaggtgcaaaggagagactgcacctttttaaggcagatcttttgggtgaaaattcttttgactccattgttgagggctgtgatggcgtc

SEQ ID NO: 139159 - DNA, 245 bp, Glycine max
tgttagtggaatgaattactacgcatgtttatctattttatctcttgctattctcacacccttcgcaattgctgtggacaggaccgcaaatgtgggctgctggatggcaaacagccatgtctcaacattggaccccaattcatatggtggctagctgctcaaagtgtattctatcatctatacaatcaagtgtcatacatgtctctggatcagatctctcacctgacgtttagcattggaaacac

SEQ ID NO: 139160 - DNA, 238 bp, Glycine max
  unsure (1)..(238): unsure at all n locations
cacatatgtcttgtggtgtttcccccaatgagactcaagtgtctgagagctcatcaccggctcnaaaccattcagtgagtatggtggcggcttcagctcgagcttcgcattgtctggtttggagccggtgatgagccagcagacacttgagtgtcattgggggaaacaccacaagacatatgtggacaatctgaaatcacaaattgttcgggcagagcttgatgggaaatcactagaa

SEQ ID NO: 139161 - DNA, 249 bp, Glycine max
gctcctaccagaagaccaatctcatcttaccacaagatttgctgggacattgggatacacagcacctgagtatgcactccatggtcaattatcagaaaaggctgatatatacagctatggaattgtagtccttgagattataagtggtcaaaagagtattgattccaaggtcattgttgttgatgatggtgaggatgaataccttcttcgacaagcttggaagttatatgtgagaggcatgcacttgga

SEQ ID NO: 139162 - DNA, 246 bp, Glycine max
gcctctttcaagaagcatctgagtgtttattattcgtaatatatagtcactcaagcttctaggatttctgccagctacatgaaaatgggaagcaacttgaggtttttgagtctttgcctcttggcattgattgcatcaactcatgcccaacttcagcttggtttttatgcccagagctgcccaaaagctgagaaaatcattttgaaatttgttcatgagcatatccacaatgctccatcactagca

SEQ ID NO: 139163 - DNA, 260 bp, Glycine max
acccccaccatacaagtacccatcacctccaccaccatacaagtacccttctcctccaccaccaccatataagtacccatctccaccacccccagtctacaagtacaagtctccaccacccccagtttacaaatacaagtctcctcctcctcctgttcattcaccacctcccccagtttacatctatgcatcccctcctcctccatatcactactaggttatttctgaagaatataagccaataaaaaacgttgttgata

SEQ ID NO: 139164 - DNA, 269 bp, Glycine max
tcggctcgagctgtagtcgctatcaaatacaaagatgggattctaatggccgctgacatgggaggttcgtatggatctaccctgcggtacaagagtgttgagcgtatcaagcctattggaaagcattctcttcttggtgctagcggggagataagtgactttcaggagattctgcgttaccttgatgagcttatcctatatgacaacatgtgggatgatgggaattctctagggccgaaggaggtgcataattatttaacccgtgtgat

SEQ ID NO: 139165 - DNA, 261 bp, Glycine max
atttagtggtgctttttttgtcttctctggcaaacctagttagtcttattacgagacgaccagatttagttcgaattgttcgattgcgacggctaggaagatgcttatcgacggtgaagctgaaattgctcaaggtggtggagaagaagtgtcgaattttgatttcgacttgtttattattggggctggaagtggtggcgttcgtgccgctagattttcgtcgaattttggagctaaggtggggatttgtgagcttccatt

SEQ ID NO: 139166 - DNA, 261 bp, Glycine max
cacttttcatccttcgatcatacacttagttgcttccaattaagatggttctgctagagaagctctgggatgatgttgtggctggccctcaacctgagcgtggccttggcaagctcagaaaactcaccaccctcaaaactattgatgaaggagaaagtagcaagctgcagaagacgttgtcgatgccgtcgacaccaacaaccccgatgactccgacgactccaacgacaccgggatcggcccgtaaagctgacaacgttt

SEQ ID NO: 139167 - DNA, 257 bp, Glycine max
caagaagatggcgtccgagtgcaaaggtaagagctcatggcctgagtaggttggagtggaaggaacggtggcggtggctacaattgagagggagaatcctttggtggatgctaacactgtgcttaaaggatccatcgtcaccgctgattttcgatgtgatagggttcgggtttgggtcaccaaacatggaattgtttatcaggctccaagaattggataagaagtgtttacactaaagcacttcatatatatgttat

SEQ ID NO: 139168 - DNA, 260 bp, Glycine max
ccaggtgaaaggcagggacgagtcgaaatggctgaagcagagagtgtgcagattcctcaagtcaaacttggaactcaaggccttgtggtttcaaagttagggttggggtgtatgacccttagtggacgctataatgatccacttcctgaagaggaaggcatatctgttattaagcatgcttccagccaaggaatcactttttttgacacatctgatgtctatgggctcgaccatgctaacgaatttttgctcggaaaagc

SEQ ID NO: 139169 - DNA, 261 bp, Glycine max
caaccaatggctgccaccgaacacagactaagcttggaacctgagaaaaagaaccttctcagacaccacaccgagaagcacttcacagccggcgaaatcgtccgcgacatcatcatcggcgtttccgacggcctcaccgtccccttcgccctcgctgccggactctccggtgccaatgccacctcctccattgttctcaccgccggcatagccgaagttgccgccggcgccatctccatgggtctcggcggttatttggca

SEQ ID NO: 139170 - DNA, 266 bp, Glycine max
  unsure (1)..(266): unsure at all n locations
caccaccacctcgctctcttcttccctgcttcacaatttttattttaatgatactattttgttattgttaagacggcatcatcagggaaatggatcgggtgaagggtccatggagcccagaagaggacgaggctttgcggaggctggttcaggcccacgggcctcgaaactggtcggtgataagcaagtccgttccgggacgatccgggaaatcgtgccgcttacggtggtgcaaccagctctcgccgcangtggcccaccgcccc

SEQ ID NO: 139171 - DNA, 268 bp, Glycine max
aaaaaaaaaaaaaaaaaaaaaatccgggattcgctcttctcttggaaaagtgaaaaccagaagtacgaacgaaagagaaaagcgttttaaaagtgagaaaaaatggggttttcgttcacgaagcttttcagcaggttttttgcaaaaaaggaaatgaggattctgatggtaggccccgatcctgctggtaaaacaaccatcttgtacaagctcaagcttggagaaatcgtcaccactatccccaccatcggatttaatgttgagactg

SEQ ID NO: 139172 - DNA, 257 bp, Glycine max
ctccttcttcaggtggtacttcttgaacgtgattttcaacatccttaacacgaagatctacaattacttcgcctatccatacttcgtatcggttatccatttattcgtcggtgtggcgtactgtttggtgagctgggccgtgggacttcctaaacgtgctcctatagactccaacctactgaagttgctcattccggtggctgtgtgccatgcattaggccacgtgaccagcaatgtctcatttgctgcagttgctg

SEQ ID NO: 139173 - DNA, 269 bp, Glycine max
tcggctcgagaaggaatcttccacctacacttaccttctcgctgatgcctcgcacacagaaaaacctgcacttctgattgacccagttgataggacagtagacagggacttgtcgatcattgagcaactggggttgaagcttgtgtatgccatgaacacacatgtgcatgcggatcatgtcactgggactggccttatcaagagcaaagttccttctgtaaaatctgttatttcaaagccaagtggtgcaacggcagatctttatgtgg

SEQ ID NO: 139174 - DNA, 260 bp, Glycine max
gccttcaatttcacccttcacacgtggtggtggtgttgttcttcttctcttcccctttctttttcttcttctgagcttgtttaagctctttctatttgattccattaacatatattatgacaatgtgtggtattcttgctgttcttggttgttctgatgactctcgagccaaaagggtccgcgtgcttgagctctctcgcagattgaagcaccgtggccctgactggagtgggctccatcaacatggtgactgcttttta

SEQ ID NO: 139175 - DNA, 259 bp, Glycine max
ccgaggcaccaacagaaacagtagaaaaaacaactacagaagtagccccagaggagcctaaagaagttccagttgagaccgaggaggtggtggcaaaggagacagaggaagagaagccagcagaagagaaatcagaggagaaaactgaagaagtgaaagaagaagcagaggagcctaaagaaactactgaaacagaatcagcagcagcagcaccaccagcaaccacagaggaagagaacaaaccagctgagtcagttga

SEQ ID NO: 139176 - DNA, 259 bp, Glycine max
ctcagttattgtaggtgttgcagcatcagggcaggaaatatcaacccgtcctttccagttggtgagtggacgagtctggaaaggaacagcttttggtggcttcaagagcaggtcacaggtgccttggcttgtagacaagtacttgaagaaggaaatcaaggttgatgagtacattacccatactttgacactttcggagatcaacaaggcttttgatcttttgcatgaagggggatgccttcgctgtgtgctttctaca

SEQ ID NO: 139177 - DNA, 263 bp, Glycine max
aagaaaatggcggtgcctctactctcgaagaagatcgtgaagaagagggtgaagaagttcaagaggcctcagagtgacaggaaaatttctgtcaagacaaactggcgcagaccaaagggtatcgattcccgtgttaggagaaagttcaagggatgcactttgatgccaaacattggttatggttcagacaagaagacccgccactatctccctaatggttttaagaaatttgttgttcacaatgtgaaggacttggaactgct

SEQ ID NO: 139178 - DNA, 262 bp, Glycine max
atgatttcgaggctgggttcagagaattcaaggatgattcggaaatcgaggatgttgatgacgaggacgatgaagacgaggaggagttgaagaagaagccctttgggttctctcgctccagcaacaaggctgcttctaagcctctctctcgtggatcagcaactgtggaatcaaaggggcaagctgagaagtgtgccaagagaaagaggaagaaccagtatcgtggaatccgtcagcgtccatggggaaagtgggctgctga

SEQ ID NO: 139179 - DNA, 262 bp, Glycine max
ggaagagtatgaggttcatactgtttctggtatagattataatcaatattttggtggcggtgtaatgtactggaacccttctgactatccagggaaaggtttctcccggcctccctcgcttagctctgatgacagtctatgggctttgcgtgatgctgacatgaataggacggtggatgatatggttgctttctcttcttcgtatagtacgaatggtttaacatcacccactgctgctacattttgttctcctttcgatcct

SEQ ID NO: 139180 - DNA, 264 bp, Glycine max
gctctctcacgcagtcgcagtgagtgaaaaggaaaaccctaattgaggtattctcagtgccttcgagagaaagaaaaaatggcagataatcttgttctccgtggcaccatgcgcgcccacaccgacgttgtgacggcgattgccactcccatcgacaactccgacatgatcgtcaccgcctcacgcgacaaatccatcatcctctggcatcttaccaaggaggacaagacttacggtgtcccccgccgccgcctcaccggccat

SEQ ID NO: 139181 - DNA, 265 bp, Glycine max
aggacgcttccgatgttccacgctaacggctggagcttcccgtatgggattgctgccgtgggtggaactaatatctgtgtccgcaagttcgacgctgagattgtttactctctcataaaacgccatcacgtgactcacatgtgcggcgcgccggtggtgctcaacatgttaaccaacgcgaactccccgttggagaaaccggttcagatcctcaccgccggagcgccgcctcctgcggcggtgctcttcagaacagaggctttgg

SEQ ID NO: 139182 - DNA, 266 bp, Glycine max
atccaacgaggttcttgggatgatgtttttaaggttgctgttgcactgtacataataggcacattggtctggaatatcttttcaactggagagaaaattcttgactaaagaatgtaatgatgatgtcaatgaaggtgtatgcaacataagccgtagagattaaaagaaaaaagaaagaaagatggaacaaaatcaatgaccaaatttgtcaagcgcttggaagcgtaaaagcagcctgcagaaattgaagagagtcaccatcaaag

SEQ ID NO: 139183 - DNA, 280 bp, Glycine max
gtttaagctttgtctgttaatttagttttccaaatttaacacattgttaaggctaattatggctgatattgagggttctccaggaagctccatgcatggagtaactggaagggaacaaaccttcatagcctcagtggcttcccctatggtccctacagacaccacagcaaatttcgctttgccagtagattctgagcacaaggcaaaaattttcaagcttttttccttagccaaccctcacatgagaaccttccacttgtcttggatatccttcttcact

SEQ ID NO: 139184 - DNA, 258 bp, Glycine max
aataagacattgtttggtttggttacttgctcgaatttcctcgaatcgcttaatttgtatttgattagttaaaccgcaacgcggaatctcttttctcgaactggctaactctcaggcaagtggttcggacgctgattccagcaacaagcggctggtgctcgcactgtatgacgccctaaactccggcgactccgacgccgtcgtcaagatcgtcgccgccgacctcgagtggtggttccatggtccgccctcacacca

SEQ ID NO: 139185 - DNA, 240 bp, Glycine max
tgtctccaaaaccatccaactctcatgtgcgaagagaacatacacaatctcttcaaactctaattttcttttcctgtcatttaattgcctcaatggcggcttccgtcgaccagcgtccgtatcccggcttccacaatggcgtcgtactgcacctcaaactatgcccggatatcccgcgttgcaagtagctacacgatccgccgctgccactctcggattcctcaagcgacgtagaagaag

SEQ ID NO: 139186 - DNA, 257 bp, Glycine max
agcttgcagggcttgtggacttggatgctgctgtgtgcctctgcacaaccattagggctaagattcttaacatcaatatcatcatccccattgctcttcagcttctcattgactgtggcaagaccccaccagatggattcaagtgtgcagatagttagttaatatataattaattattatggaattgcataactcatgcatgaataaaaacaagttgagaagatcgatgtagtgaaggaatggtctttcgtttctct

SEQ ID NO: 139187 - DNA, 255 bp, Glycine max
cgagacttctataatgttagaaaagttgacactcatgtccaccattcggcatgcatgaatcagaaacatcttttaaggttcataaagtcaaagctgagaaaagagcctgatgaggttgtaatatttcgagatgggacatatctaacattggaagaggttttcaagagtttagatttaactggatatgatctcaatgttgaccttttggacgttcacgcagacaagagtacttttcatcgctttgataagttcaat

SEQ ID NO: 139188 - DNA, 256 bp, Glycine max
cggctcgagcggctcgagcggctcgagtatattttctagatttttataataaagggtcctgcagttgcctccgaggaacaagggggcttgtatcttccccaagggcttgaatctttgtccaatgaattgagatatcttcgttggacccattaccctttggaatctctgccttcaaagttttcagctgaaaatcttgttgaactgaacttgccctatagccgagtgaaaaaactttggcaagcagtgccagatcttg

SEQ ID NO: 139189 - DNA, 246 bp, Glycine max
attcaacaggactttccgttcacgacactcccttttatcgtttcacttccgacgtcgtcgtcttcaattttggatcttcgaatcgaatcgcatcctatgggtagcagcagaggacacacgctcatggaggttggacccgacggggttgccgtcatcaccatcgtcaaccctcccgttaattcactttcctttgatgtattgcgcagtttaaaggagagttttgatcaggcgatacagagagatgat

SEQ ID NO: 139190 - DNA, 260 bp, Glycine max
aaccaagcgcaccatggacagcaaaaacgtcgtcgtttgcgacaacggaaccgggtatgtgaagtgtggttttgctggggagaatttccccacatcggtttttccctgtgtggtgggaaggccaatgctccgttacgaagaatcactcaccgagcaggcgcttaaggatattgttgttggagaagggtgtgcagacttgcggcatcagcttgatatatcttatcctgtgaacaacggcattgtgcaaaactgggatgata

SEQ ID NO: 139191 - DNA, 263 bp, Glycine max
aattagttcattctctttgcgcagttccctacctctcctttcaagatgcagatcttcgtcaagaccctcaccggaaagaccatcacccttgaggtggaaagctctgacaccatcgacaacgtcaaggccaagatccaggacaaggaaggaattcccccggatcagcaacgtctcatcttcgccggaaagcagctcgaggacggccgtaccctcgccgactacaacatccagaaggagtcaacccttcaccttgtccttcgtct

SEQ ID NO: 139192 - DNA, 265 bp, Glycine max
actccagagccaaggtaggttaaacaatcttcttcatcgtcgtcgccgcaatgggacgtgtgatccgtgcgcagcgtaagggagcaggctcggtcttcaagtcccacacgcaccaccgcaagggccctgcccgcttccggagcctggatttcggagagcgcaacggctacctgaagggtgtcgtcactgacgtcatccacgatcctggccgtggcgcgcctctcgctaaggtcgccttccgccacccgttccgctacaagaagca

SEQ ID NO: 139193 - DNA, 229 bp, Glycine max
agagagagaggcatactcattgtgggacgtgtgctactttgagagagggtcggtttcactaatcaaggtgcgatgatgaagctctctgagatcgcaccaccggtatggcgatgagtattcatcacagggttccagttctacttaggagttggagcgcttatcgctggctgcataaacttcgcaaccgctacacgcgcgtggggatggtatatctctctctcccttgtaa

SEQ ID NO: 139194 - DNA, 253 bp, Glycine max
gagaagagaagattgttaattgaagcagaggaagacctaacatgtccgttacggagctgaaggagcgtcacttggcggcgacggaaaccgtcaacagtctcagggagcgcttgaaggagaggcgtctttcattgctcgatacagatattgctggctacgccaggtctcaaggtagatcccctgtcacctttggtcccaccgatctcgtttgttgtagaactctccagggtcatgcgggaaaggtgtactcatt

SEQ ID NO: 139195 - DNA, 251 bp, Glycine max
gcgaagcagaggaaactctggtggaggcccgcagcgatactgacgtgcaaatcgttcgtctgacttgggtataggggcgaaagactaatcgaaccgtctagtagctggttccctccgaagtttccctcaggatagctggagcccgcgggcgagttctatcgggtaaagccaatgattagaggcatcgggggcgcaacgccctcgacctattctcaaactttaaataggtaggacggtgcggctcaacagag

SEQ ID NO: 139196 - DNA, 254 bp, Glycine max
atccaattgatgggtttcttcttcatgacagtcttcatgtttgctcttgctataccttacaatcactggaagaatcacaacaatattgggtttgttgtgatgtattctttcacctttttcttctccaattttggtccaaatgccaccacatttgttgtgccggcagagattttcccagcaaggctgagatctacttgtcatggaatctcagctgcggcaggaaaggcaggagcaattgttggtgcatttggatt

SEQ ID NO: 139197 - DNA, 255 bp, Glycine max
caccaccaacacgctttcactttcctgaacaaccacttcatcttcactcttccttcaattttccaacaagtttgttcaactgtcccattattggcgttactatgctacccactggagcaaaagagacccaattacgtgagagcaacagtcagaaggtccatcctcaaccaatagaagaggccatgaatcagaatccagaagcaatggaaaccctaatatctaaagtttttatgaatatctcttccctgcagtcag

SEQ ID NO: 139198 - DNA, 255 bp, Glycine max
tcgagccgaatcggctcgagatccgatccgagatgtacggattcacagctctcaccttcaacatccacggcggcttcctagaggccatcgtccgcggccaccgcgccggcctcctcaccacagccgattacaacaacctctgccaatgcgaaaccctcgacgacatcaagatgcacctctccgccaccgagtacggtccttacctccaaaacgagccttctccattgcataccacaacgattgtggagaagtgta

SEQ ID NO: 139199 - DNA, 250 bp, Glycine max
cctgagtatcgtatcgttttattattatttctaattctctcttatcaggtccattgaatatgtctccgtcgttggatcttcctcccaagggtggcttcagttttgatctatgccgaagaaacgcaatgcttcaaaacaagggcctcaaagccccaacctttctcaaaactggcaccactatggtcggttaagtttcccaggatgggtcacttcttggcgcgagactctagggcctctaagggccctagtg

SEQ ID NO: 139200 - DNA, 257 bp, Glycine max
aaaaaaaaaatccgcgattcgctcttctcttggaaaagtgaaaaccagaagtacgaacgaaagagaagagcgatttagaagtgagagaagatggggttgtcgttcacgaagctgttcagcaggttgtttgcgaagaaggaaatgaggattctgatggtaggtctcgatgctgctggtaagacaaccatcttgtacaagctcaagcttggagaaatcgtcaccactatccccaccatcggatttaatgttgagactgt

SEQ ID NO: 139201 - DNA, 261 bp, Glycine max
atttccttgatatcttagttatctaattacctcaattaatcccttaattgcaagcatcatggctgaggagaagcaccaccaccacttccaccaccacaagggcgatgatgtgcctggcgaggttgattataagaaggaggagaagcaccacaagcatcttgagcaccttggggaacttggtgctgcggctgccggtgcttatgccttgcatgagaagcatgaggccaagaaagacccagagcatgctcacaggcacaaggt

SEQ ID NO: 139202 - DNA, 246 bp, Glycine max
cgagttagggctttacagtgtttctcttccttcttcttcttcttcttcttcttcttcgttgaatcgcgattgttctgtgcgagagaaagaagagagagatcgaaaatggcgttggctttcgacgagttcggaaggccgttcataatcctgaaggagcaggagcagaagagcagactccgaggattggacgctcagaaagccaacatctccgccggcaaagccgtggctcgcatcctccgaacctcc

SEQ ID NO: 139203 - DNA, 251 bp, Glycine max
cggccattaacatgggaggtggttttcatcactgttctgcacaaaaagggggtggattctgtgcttacgcagatatttctctatgcatccactttgcttttgttcggttgaatatatcaagggtgatgatcattgatcttgatgcacatcaaggaaacggtcatgaaatggacttcgcttatgatagccgagtctatatcctggatatgtacaatcctggaatatatcctttggattatgaggcgagaaac

SEQ ID NO: 139204 - DNA, 254 bp, Glycine max
ataacatagtcctccttcctttgttttttccacatcacgacatcacatcgcagagaagaacagagagagatccatccatcaattccaatggccgatcagctcaccgacgaacagatctccgagttcaaggaagccttcagcctcttcgacaaggacggggatggttgtattaccaccaaggaacttgggaccgtgatgcggtcacttggccagaacccaactgaggcagagctgcaggacatgataaatgaggt

SEQ ID NO: 139205 - DNA, 236 bp, Glycine max
cagcaagtgcgttttggaagcagagaccgaaatacttcgagatggcccgtacaaagcaaactgctcgtaagtcaactggaggaaaagctcccaggaagcagcttgcaaccaaggctgcacgtaagtctgcaccaacaactggtggtgtgaagaagcctcatcgttatcgccctggaactgttgctcttcgtgagattaggaaataccagaagagcactgagctcctaatcaggaag

SEQ ID NO: 139206 - DNA, 255 bp, Glycine max
agcagcagtggcggcaagcaactccatccgcaatgggaatcgatttgaaggcaggaggtaagtccaagaagaccaagcgaaccgcccccaaatccgatgatatctacctcaagcttctcgtcaagctgtaccgttttcttgttcggaggactgggagtaacttcaatgctgttgtcctcaagcgccttttcatgagcaaggtcaacaagcccccgctatccctctctagattgatccgttacacgaagggaaagg

SEQ ID NO: 139207 - DNA, 255 bp, Glycine max
cggaagggtaaaacttcagaggagttagttcacaccctccacttctacagggatatcatttcagggccgtttgaaaagctaattagagggtcgaagattctgccattggctggcgctgaatactcaaagaaggtgatggaaaactgcgtggcacacatgaagtctgttgggacttacggtgatgctgaagccgcagccattgaaaagtttgctgaagccttcaagaatgtgaattttgcacctggtgcctctgtt

SEQ ID NO: 139208 - DNA, 255 bp, Glycine max
ctctcatcattctcatattattgtcgccacttcgacctcaatcaccctcgcgccctcgctcttcccttcctggtggcgacaatgtcgactcctgctaggaagaggctgatgagagacttcaagaggctgcaacaagacccgcctgcagggatcagcggtgccccccacgataacaacataatgctgtggaatgctgtcatatttggtcctgatgatactccatgggatggaggcacgttcaagttgactctccag

SEQ ID NO: 139209 - DNA, 256 bp, Glycine max
ctctcatcattctcatattattgtcgccacttcgacctcaatcaccctcgcgccctcgctcttcccttcctggtggcgacaatgtcgactcctgctaggaagaggctgatgagagacttcaagaggctgcaacaagacccgcctgcagggatcagcggtgccccccacgataacaacataatgctgtggaatgctgtcatatttggtcctgatgatactccatgggatggaggcacgttcaagttgactctccagt

SEQ ID NO: 139210 - DNA, 261 bp, Glycine max
aagctcgactaggagtgtgtgccaatgtgctaaacgggttgttgaacgtgactttgggtcaaccaccagttagcccatgctgttcccttctcaatggtctcgttgatcttgaagctgcagtgtgcctttgcactgccctaaagcaaacattttgggcatcaacctcaaccttccaatctcactcagcttacttctcaatgtttgctcaaggaacgccccacgtgatttccaatgtgcctaaatcatggcctatgctatgca

SEQ ID NO: 139211 - DNA, 257 bp, Glycine max
gcattttgcttgttatttcacgcgttctctctccaatttggacctccctttccttcgttcctcactcactgcaacggcgccggagatccgtcgctctcctcctccaccaccaccgcgatgggcgccaattccatgctcgcgagttctctcacgatctcgacgaccagatctcccagctcatgcagtgcaagccactctccgagcaacaggtccgaggtttatgtgagaaggctaaggagattttaacggatgaaagt

SEQ ID NO: 139212 - DNA, 256 bp, Glycine max
atcactttgagcaatggtgaaggctgtggcagttcttggcagcagcgagggtgtcactggaactattttcttcactcaggagggaaatggtccaaccaccgtaactggatctcttgctggtcttaagcctggtctccatgcttccatgtccatgccttgggggacactaccaatggttgcctgtcaactggagcgcatttcaatcctaataacaacgagcacggtgcccctgaggacgagaatcgtcatgctggtg

SEQ ID NO: 139213 - DNA, 255 bp, Glycine max
aacgtacctggtgacccacaaggccacgaaggagcagttcgcgtgcaagtcaatcgctacgcggaagctggtcaaccgcgacgacatcgacgacatccgccgcgaggtccagatcatgcaccacctcaccggccacccaacatcgtcgagctcaagggcgcctacgaggaccgccactccgacaacctcgtcatggagctctgcgccggcggtgagctcttcgaccgcatcatcaccaagggccactactccgag

SEQ ID NO: 139214 - DNA, 253 bp, Glycine max
aggagaagatataaggtaacttgagtatggagttcatgtggtgtctggtactcctggccgagtttgtgacatgatcaaaaggagaacattgcgcacgagagctatcaagatgctagttcttgatgaatctgatgaatgttgagcagagggtttaaagatcaaatttatgatgtgtatagatatctcccacccgaccttcaggtttgcttgatttctgctacccttcctcatgaaatactggagatgacaaaca

SEQ ID NO: 139215 - DNA, 262 bp, Glycine max
aagcaaacaccaacaacagttccagaaaatgaaacaacagaggtaatcaagacccaggaaacaaccccggaaccagtaccagccactgaggctcctgcaacagaacaagcagcagctgaggttcctgcccaagaagaacaacagcaactgaggttcctgccccagaatcaaccaccgaagcaccaaaggaagaaaccaccgaagcgccaacaacagaaacagtagaaacaacaactacagaagaagccaagccagaggagcc

SEQ ID NO: 139216 - DNA, 257 bp, Glycine max
agggagttcgtggatgagtacaccgttcgcgttgtggatgtgtttgcgatgcctcagagtgggactggtgtcagcgttgaagctgttgatcatgtttttcagactaatatgcttgatatgttgaagcaaactggaaggcggagatggttgtggggtggtatcactcgcatcctggatttgggtgttggctttctggagtggacattaatacgcaacagagttttgaggctttaaatcaacgggcagtggctgtggtg

SEQ ID NO: 139217 - DNA, 260 bp, Glycine max
aactattataagttacaaagcttttcccctaaagaaggaagtgaagaaattgatacaccttgttttccatgccatcgcattaatacttggaatagttggaatttatactgccttcaagtttcacaattgaaatgggattgcaatctctacagcttgcattcatggcttggaattggggttattgtcctttatggcattcagtggatatatgggtttgtgatctttttcttccctggtgggactccagacattagacgcgc

SEQ ID NO: 139218 - DNA, 255 bp, Glycine max
actcactctgcactcaccactgccacacttcaatcgcactaatggctgtcaccttctcagatctacacaccgaagagggcatcaaatccctcgatcaattcctttctgggaaaacctatatttctggggatcagttgcaaaggatgatattaaagtgtatgcagctgttgttgaaaagccaggggacacttttcctaatgctgccaagtggtacgatgctgtctcttctcaacttgctccaagctttcctggcca

SEQ ID NO: 139219 - DNA, 254 bp, Glycine max
ctgtttgcttcaatggaagtgatttccgcttcgagcttgaatcccaacgctccgatgttcgtgcctctcgcctatcggacggtggaggatttctccgaccaatggtgggacctcgtccactcctccccctggttccggactactggctccgcgagtgcttccaagatccccagtaccaatacgacgacgttttcgacttcgactttgacctagatctccaagataaagatgaaaatgaagggaaggaagggaaa

SEQ ID NO: 139220 - DNA, 245 bp, Glycine max
actaatggaagtcgggggaaggttgtcttactttttgatgataatcccttgtcaaagattggcgtaagatttgataaacccatacctgatggagttgatcttggaggtttgtgtgagggtggtcaaggatttttctgcaatgtcaccgatcttcgattggaaaacagtggcattgaagaacttgagagattacttagtaatacatggtgtgaggttatggttagtgagagcagaaatgcaccttt

SEQ ID NO: 139221 - DNA, 249 bp, Glycine max
tgagggtgccaagtcactcttcaaaggtgctggtgcgaacatattgcgtgctgttgcaggtgctggtgtgcttgctggttatgacaagctgcagctcattttgtttggtaagaaatatggatctggcggcggcaaaaatgatgacgacaatttcctgggataatcatgccgattgccttgtcatttgaataattatggatgagaaatattggtattgatattttcccaaatttaggaccttgatactta

SEQ ID NO: 139222 - DNA, 255 bp, Glycine max
agagaagagaagctaaagatagataggagatgggagtggagaagcagttgttgaggtctggcaccggtccgaagccaattcccggtcagaacgtaaccgttcactgcactggtttcgggaagaacggtgaccttttcagaaattctggagcacaaaggatcctggccagaacccattcactttcaaaatcggccaaggttctgttatcaaaggatgggatgaaggtgtgcttggcatgcaaattggtgaagttgc

SEQ ID NO: 139223 - DNA, 254 bp, Glycine max
ctttcttcctcttcctcagtagtgcgattttcgattctcttctctgcaactatgcctaaccctaaggtcttcttcgacatgaccatcggcggtcaacctgccggccgcatcgtgatggagctctacgccgacgtgatccgagcaccgccgagaacttccgcgcgctctgcaccggcgagaagggcgccgggcggacggcaagcccctcgactagaaaggctcggccttcgagcgcgtgatcccgaacttcatgt

SEQ ID NO: 139224 - DNA, 252 bp, Glycine max
tcaagggattcgattctctctgcactcacttctagggttttctctgcgctataagcaatcatggcggatgaaacaccaaatgagatgaaggaggaggttccagaaattgttccttttgatcctaccaagaagagaagaagaagaaaattacaattgtagatcctgctgatgaacctgtggagaaattggctgagaagacagaaaacctctcagtttccgagggggttgagactgcatttactggtttgaaaa

SEQ ID NO: 139225 - DNA, 246 bp, Glycine max
ctttatgtcactgtgctcaccattattggctacaaaaggcagactgatacaacggtaggtggcaccgactgtgatggggttggcattttgggcatcgcttgggcctttggtggcatgatcttcatccttgttactgcaccgccggtatttcaggaggacacataaacccggcggtgacattcgggttgttcctaggacgcaaggtgtcgttgataagggcgttgttgtacatggtggcacagtgtg

SEQ ID NO: 139226 - DNA, 248 bp, Glycine max
ttctcgagccgaatcggctcgacgttcttcttcttttgttgttcttcgtttgttctttctctcacctgaaaatgtcttgcatcggtggtaactgtggttgcggaagctcctgctagtgcggcaacggctgcgaggctgctagatgtacccagacttgagctacactgagtcaaccaccaccgagaccttggtcatgggagtggcacctgttaaggctcaatttgagggtgctgaaatgggtgtgcccg

SEQ ID NO: 139227 - DNA, 251 bp, Glycine max
cattctcatatcctcaatcaccccctcgcactcgctcttcccttcctctggtggcgacaatgtcgactcctgctaggaagaggctgatgagagacttcaagaggctgcaacaagacccgcctgcagggatcatggtgccccccatgataacaacataatgctgtggaatgctgtcatatttggtcctgatgatactccatgggatggaggcacgttcaagttgactctccaatttaactgaggactatcca

SEQ ID NO: 139228 - DNA, 250 bp, Glycine max
tcagaactctgcttcttcggattccgatcgcacgcgccgtcaccatggtgaacgttccgaaaactaagaagtcatactgcaagagtaaggtgtgcaggaagcacacgctgcacaaggttacccaatacaagtgggtaaggatagcattgctgcccaaggaaaacgccgttatgatcgcaaacaatccggttatggtggacaaactaagcccgtcttccacaagatggctaaaaccaccaagaagattgtt

SEQ ID NO: 139229 - DNA, 249 bp, Glycine max
gctagccacaatgcagatattcgtgaaatccctaacggggaagacgataaccctagaggtagagtcttcggacacgatcgacaatgtgaaggcgaagatccaggacaaggagggcatcccgccggatcagagcgcctgatcttcgccggaaagcagctggaggacggacgcacccttgccgactacaacatccagaaggagtccactctccacctcgtcctccgcctccgcggcggcgccaagaagcgc

SEQ ID NO: 139230 - DNA, 244 bp, Glycine max
agaaaattttctggaggttttgatatttctgcatttggtggtattcaagaggcaaaagagcgtccaaaacctggttgggtatcagtagatagcatcactgatactattgaagcggctaggaaaccatcagtgctgccattgatggccttgccttgggtggaggcttagaagttgcaatggcatgcaatgctcggttatcaactccaactgctcagctgggattgcctgaacttcagcttggaat

SEQ ID NO: 139231 - DNA, 243 bp, Glycine max
ctttggcaacatttatgatccctacctttgctcagctcactcctaattattatgacaaagtttgccctaaggcgttgccaatcataaagtcaattgttaagcaggcaattattcgtgaaaaacgcattggagcatccttgctgcgtttgcattttcatgactgctttgttaatggctgtgatggatcagtgctgctagatgacacaccttccttcttgggggagaagactgcacttccaaatc

SEQ ID NO: 139232 - DNA, 248 bp, Glycine max
actttatagtaataatataactggtaaaatcccagatgagcttggaagtttgagaaacttggtgagcttggatctttactcgaacaacattactggccccatttcagacaacttggccaaccttaaaaactacgtttcctgcgtctgaacaataacagcttgtcaggaaagatccctgttcgtttgaccactgttgattcacttcaagttcttgatttatcgaacaacaacttaactggagacatccc

SEQ ID NO: 139233 - DNA, 248 bp, Glycine max
agttgtcttactttttgatgagaatcccttgtcaaaaattggcgtaagatttgataaaggcatacctgatggagttgatcttggaggtttgtgtgagcctggtcaaggatttttctgcaatgtgactgacttcgattagaaaacagtggcattgaagaacttgacaaattacttatgaatacattgtttgaggttgtggttagtgagagcagagatgcacctttcattttgttcatgaaagatgcaga

SEQ ID NO: 139234 - DNA, 249 bp, Glycine max
aagatggctcgtgatatctctgctcgcatctttcatatacaagcgaagttagactccgattgctcttgtgtccacttggttccaacgttgtaattagaacagcatgctgtactgtcggagttgctatgcctgtgtacactagttcaaggcaatagatagtaaagagcaagatgctcaacataggtgtcttctctactgggcagcctatggttcattcagccttgttgaagtgttcacagacaagcttat

SEQ ID NO: 139235 - DNA, 220 bp, Glycine max
tttcaacctctctgattttgtaattgagttcgatcaaatagctcccagtactggaattgagttctgaatatcatcacgtaatttgaaggaaagatggtgagcgtactgagatccgccaggcacaaaggcataaggccagcatccatccttgccattggaactgcaaacccaccaaactgtgttgatcagagcacctatcctgactactacttcagaatca

SEQ ID NO: 139236 - DNA, 162 bp, Glycine max
atgttaaatagaaaagaggagtttgagaatggcaacgatcagcgcggttcaggtggagttcctggagtttccagcggtggttacttcaccagcctccggcaagacctatttcctcggcggcgcatggagagaggattgacgattgaggggaagttcataaag

SEQ ID NO: 139237 - DNA, 243 bp, Glycine max
catttctccatttccattttctctctcacttttcaagaatcgtaagctatgggaaagtcttacccaactgtgagtgctgattaccagaaggccgttgagaaggcgaagaagaagctcagaggcttatcgctgagaagagatgcgctcctctaatgctccgtttggcatggcactctgctggaacctttgacaagggcacgaagaccggtggacccttcggaaccatcaagcaccctgccgaac

SEQ ID NO: 139238 - DNA, 229 bp, Glycine max
aatgggcttgtaagtattgtggtgaatgtgatgggtgatgttttcccggagctaaaacaactggtaacacacattcggaagataattgatgaggtggtggaaatgtttgggtgatctgaattaagggtattgagatatttgaggctgctgttcgacaagttctgggaaacatactgtgtggggtggttgcttttgtcttgtgggatacatatgggtttccatgagatct

SEQ ID NO: 139239 - DNA, 245 bp, Glycine max
aaacattactgatagttctcatccacaacacaatgatttccaatcccatgttaatgttactagttgtggtactactggtggttggttttgcaaagtcagattgaagtaaggacagagaagaatgtgagacaaactaattgacctagctagctgtgttccttacgttggtggtgaagccaaaacccccagcatagattgctgcactggtctcaaagcggttcttgaccggagcaagaaatgcctct

SEQ ID NO: 139240 - DNA, 257 bp, Glycine max
attcggctcgtgttctattgcagcatggtgtcttcctcccaacacattctggtcacctgtggtgccggtttcattggcacccacaccgtcgttcagcttctcatagctggcttcagcgtttcaataatcgacaatttcataactccgtcatggtagctgtggaccgcgtccgccaagtggttggccctctgctttctcagaacctccaattcacccagggcgatctccggaatagggatgacttggagaaactcttc

SEQ ID NO: 139241 - DNA, 239 bp, Glycine max
tgctggtggcatgcctggtaacattgattttagcaaaatcttgagtgaccctgaactgatggcgtcatttggtgatccagagattatggctgctcttcaagatgttatgaagaaccctgctaatttgccaagcaccaatcaaatccaaaggtagctcctgtaattgcgaaaatgatgaccaaacttggaggtggtcccaagtgaatacttttagatgcttgttagttatgtgagacttc

SEQ ID NO: 139242 - DNA, 240 bp, Glycine max
gttctcttctgttcattgaatctgtccctttgataggatgctttttttttaggattacaccggtgataatgtgacgacggagaacctctttgctgttattcttggagacaagagtaaattgaaggaggaagtggcaaagtgatcaacagcaaacccgaggacagaatatttatatactactctgatcatggaggtcctggaatacttgggatgccaaacatgccatacctttatgccatg

SEQ ID NO: 139243 - DNA, 240 bp, Glycine max
tgcacggagccgtggtggttctggctctgtccttttttcctttctctcgttaccagaaccagaagaaccatttgtggccaacatggatttggaccagtggatctccaaggtcaaagagggccacatcttcttgaagacgagcttcaacttctctgcgaatatgtaaaagagatccttattgaggagtccaatgtgcagcctgtcaatagtccagtgactgtttgtggtgatattcatggt

SEQ ID NO: 139244 - DNA, 243 bp, Glycine max
agcagcagtggcggcaagcaactccatccgcaatgggaatcgatttgaaggcaggaggtaagtccaagaagaccaagcgaaccgcccccaaatccgatgatatctacctcaagcttctcgtcaactgtaccgttttcttgttcggaggactgggagtaacttcaatgctgttgtcctcaagcgccttttcatgagcaaggtcaacaagcccccgctatccctctctagattgatccgttacac

SEQ ID NO: 139245 - DNA, 245 bp, Glycine max
aaaaatcaataccttagagaaaacaaaagcacagaatcgaaagatgagttcttttttgagagagattgggatggcttcgacgaagaagatcacactgaagagttcggacggcgaggccttcgaggtgaggaggcggtggcggtggagtcccagacgatcaagcacatgatcgaggacaactgcgccgacagcggaattcctctccccaatgttaccagcaagattctggccaaggttatcgagta

SEQ ID NO: 139246 - DNA, 260 bp, Glycine max
cctgcatcttgtgccgatgtggcattcagaactatgtgggctgagtttgagtgggaaaacaaggttgccgtaaatacagtattacaagatgagagggacttcctgaaccacattatcaagtctacaaatatgaatgcctgactccaccatcggcattggaaggggattgtggattccttgctgcaaacctttatgctaagagtgtttttggggaagatgctttggtgaatgtgagcattgaaaagcaatcagatggtaag

SEQ ID NO: 139247 - DNA, 265 bp, Glycine max
gttgggatctccatacgccggatctgctaaaatacgcttgatccatatgggcctcctcgaccacttgtgggacgacaccgtcgccggcccaaggcgaaaaacggtctcggcaagctccgaaaacaccacaccttcacttccgacctagctccggcaaggaaacggagggcgggagcgtgagatcgtacggagacgaatcgtcggaggaagcgacgagagtgacgcgtagtatcatgatcgtgaaaccgcccgggtaccagagtgg

SEQ ID NO: 139248 - DNA, 264 bp, Glycine max
cttgagagaaaaaatattccatttccagaattagtagcactaatgctctcttttgtttcgaaaaaaatggttcaacaggaagtgcgtaaaggtccttggacagaacaggaagacttcaaattggtgtcctttgttggttgtttggagaccgtagatgggactttatagctaaggtttgaatagaacaggtaagagttgcagattaaggtgggttaattacctacatcctggcctcaagcgtggaaagatgaccccccaggaaga

SEQ ID NO: 139249 - DNA, 265 bp, Glycine max
ctttctggttgtgaaaagaggaaagagaactcagtgccccaaatgggaccatgtcatgtcatcattggtctgatatagatttagctcccccattcgaatgatgacatgacatggtccctgttgggggactgagttatcttctggttgtgaaaagaagaaaataaatttcatatatgatatatatccctttaggattattgaatttgtgaaaaatcgatcatttgagagtagagaatgatagggactttgctgctgttattgtcta

SEQ ID NO: 139250 - DNA, 262 bp, Glycine max
ccactgtatacttccatcctgatgagaagtacttgccatcatcagtgcaatggttttttaagaatggagcagttttgcatgcagcaggcaataagaaaggtatagctatagattatcagggctcaaatttacctagtgaggaacaaatgatggtgcattttggattgatttgcctactgatggagatgcaagacacaatctaaagaagggaaacatagagagtgctgaactctatgttcatgtgaaacctgcattgggagga

SEQ ID NO: 139251 - DNA, 257 bp, Glycine max
aactgaggcccacttctatcgagaaagaggtgtttccaaagattgcagcagataaaaagctatatgcaatggtcctgccaggattctggatggacattggacaaccaaaggactatatttctggcctgacactttactggactcgctgaggaaaaagtctccttctaaactggccagtggtcctcactttgtggggaatgtcattgtgcatgaaactgccactattggtgagggatgtctcattggacctgatgttg

SEQ ID NO: 139252 - DNA, 263 bp, Glycine max
gtaatattattcttcgaatccattttattattcataatgggtattttcacatttgaggatgaaaccacctcccctgtggctcctgctaccctttacaaagctctagttacagatgccgacaacgtcatcccaaaggcttcgaagccttcaggagtgttgaaaaccttgaggggaacggtggccctggaaccatcaagaagatcactttcgttgaggatggagaaagcaagtttgtgttgcacaaaatagaatcagttgatgag

SEQ ID NO: 139253 - DNA, 263 bp, Glycine max
caggctaccccttcaggatgtgtacaagattggaggaattggaactgtgcctgtgggacgggttgagactggtgtcttgaagcctggaatggtggtgacttttgcaccaactggactgacaaccgaagttaagtctgggaaatgcaccatgaagctctcacagaggctcttcccggtgataatgttggattcaatgttaagaatgttgctgttaaggatctcaagcgtggttatgttgcctcgaactcaaaggatgatcctgc

SEQ ID NO: 139254 - DNA, 269 bp, Glycine max
tcgggactttcactagccgcagcagcctcaggaggagaataaggatgtctcacaggaagttcgagcacccaaggcacgggtcactgggatttctccccaggaagcgtgctgctcgtcacaggggaaaagtgaaggcattccccaaggatgacccatccaaggcacccaagctcactgcattcttgggttacaaggctggtatgactcacattgttagagaggtcgagaagccaggatcaaagcttcacaagaaggaaacatgtgagcct

SEQ ID NO: 139255 - DNA, 266 bp, Glycine max
gtgatttcagtgagtgatcggtgttcacttgatctcatcataatcgtcagcgtcaattgaagaagatgccgatcagaaacatcgccgtcggaaggcctgaagaggcgactcaccccgacacgttgaaggcggctttgctgagttcatctcaaccttcatcttcgtgttcgccggctcaggctccggcatcgcctacaacaagctcaccgacaacggcgctgccacccctgccggcctcatctccgcctccatcgcgcatgcattcg

SEQ ID NO: 139256 - DNA, 261 bp, Glycine max
ccaaccttcaacgtctcttcctctcttccttttttccctaattgcaccctctttggctcaacaatccttcagacccagagccctcgttgtcccagttaaaaaagacgcttccaccctccaatatattactcaaacaaacaaagaacaccactcgtcccagaaaacctagtacttgacatcggtggccaattcctgtgggtcgattgcgacaacaactacgtctcctccacttaccgccccgcacggtgtggctccgccagt

SEQ ID NO: 139257 - DNA, 261 bp, Glycine max
accaaagtctcctgcacaggctacatgccccattgacacgctcaaactaggtgcttgtgtggatcttcttggtggcttggttcacattggcttgggagaccctgttgcgaaccagtgctgccccgtgcttcaaggctggttgagcttgaagctgcggtgtgtctttgcaccactcttaagctgaagcttctcaacctcaacatttatgtcccacttgcccttcagcttcttgtggcttgtggcaagtctcctcctcctggt

SEQ ID NO: 139258 - DNA, 262 bp, Glycine max
cccgttgaatcaatagaagtccagcggcaacttgttgctcgtaccccagtcttttatcggctggaacaattggacaatggtgttacttctgttgggtatatacgcctcaaagagttcaatgcattggccagaaaaacttggtcattgcaatgaaacgacttcaagacatgggtgcctcatatttcatattggatctcagagacaatcttggtgggctagtacaggccggaattgaaattgcaaagcttttcctaaatgaagg

SEQ ID NO: 139259 - DNA, 260 bp, Glycine max
gttggatcaaacatttccttctgaattcaaagaccttacagaacccatagaaattcctggctgtgttccaatatatgggaaggatttaccaaaaccggttcaggatcgaaccggccaaatgtacgagttctttcttaaacgatgcaaacaactccatgaaaccgatggggtcttggttaacagcttcaaaggcattgaagaagggcctataagagcattggtagaggaaggaaatggttacccaaatgtttatccgattg

SEQ ID NO: 139260 - DNA, 258 bp, Glycine max
gtttgttgttgtaactcgttcttcttcttttgttgttctgtgtttgttttttctctcacctgaaaatgtcttgctgcggtggtaactgtggttgcggaagctcctgcaagtgcggcaacggctgcggaggctcaagatgtacccagacttgagctacactgagtcaaccaccaccgagaccttggtcatgggagtggcacctgttaaggctcaatttgagggtgctgaaatgggtgtgcccgctgagaacgatggctg

SEQ ID NO: 139261 - DNA, 258 bp, Glycine max
gcaagacttcatcaatggctgtcaaagtttatattgtgtactactccatgtatgggcatgttgagaaactagcagaagaaataaagaaaggggcttcctctgtggaaggtgttgaggccaaattatggcaggacctgagacgctgcaggatgaggtgctcggtaagatgagtgcaccacccaagagcgatgtaccagtcattaccccgaatgaactatccgaggctgatggctttgtattcggcttcccaacaaggtt

SEQ ID NO: 139262 - DNA, 260 bp, Glycine max
ctacgtgttctccattccctctctcactcctccatctacgttacttaaatcatttccttctttctctctttctttatcttctcattttcctcattacactcttttttttctctcaacttttctcttattaacctagttcacatattatatcatcacatatcatagtgatatattatatcatatcacaatgtgtggcatacttgctgtgcttggttgctctgattcatctcaagccaaaagggttcgcgtccttgagcttt

SEQ ID NO: 139263 - DNA, 263 bp, Glycine max
ctttgatactgcttctctgtatgaaagtgaggagtctctaggccaagctgtggcaaaggccttagagctaggcctcataaatagcagagaggaattattcatcacatcaaaactatggtccactgatgctcatccgaccttgttgttccagctcttaagacctccctgcagaagttgggattggagtatgtagatctctatttgattcattggccagtgaggctgaaacctgaagccaaagggtaccataatatattaaagga

SEQ ID NO: 139264 - DNA, 261 bp, Glycine max
ctcgagtcgaatcggctcgaggtaaccaatcatctttagttcagcagtaatttattgtacgattctattctaagattttgagaatgtctagctgtgggtgtggaagcagctgcaactgtggcagcaactgcggttcaacaagtactcttttgacttgagttacgttgagaagacaaccacagagactctagttttgggtgttgggcctgtgaaggccaattggagggtgctgaaatgggtgttgcatctgagaacggtggc

SEQ ID NO: 139265 - DNA, 270 bp, Glycine max
tgatgcgaacttgccaaaggccagagtccaaagtttatggtgtttgcttgctcagactctcgagtttgcccatcccacattctggatttcaatccgggtgaagcctttgtggtccgaaatatcgtcaacatggttccaccaatgacaagaccaagtattcaggaacaggggcggccattgaatatgctgtcgtacatttaaaggtggagaatattgtggtcattggacacagctgctgtggaggtataaagggcctcatgtctatcccag

SEQ ID NO: 139266 - DNA, 257 bp, Glycine max
cttctttcctcaaccttctttcttcttatatatcgaacatggctaagtatcattcaagtgggaaaagctcttccatgactgctatagccttcctgtttatccttctaatcacttatacaggcacaacagatcacaatccggggtatgttatggaagacttggcaacaacttaccaacccctcaagaagttgtggccctctacaatcaagccaacattcgcaggatgcgaatctacggtccaagcccagaagtcctcg

SEQ ID NO: 139267 - DNA, 256 bp, Glycine max
cttgcttccaagatggttctgctagagaagctctgggatgacgtcgttgctggccctcaacctgagcgtggccttggcaagctcagaaaactcaccaccctcaaaactattgatgaaggagacagtagcagctgcagaagacgttgtcgatgccgtcgacaccgacaatcccgatgactcccacgactccaacgacaccgggatccgcgcgtaaagctgacaacgtttggaggagcgtcttccatcctgggagcaa

SEQ ID NO: 139268 - DNA, 257 bp, Glycine max
cacgaatttcattgcagagtgttattttgagtatcagcatcaatggctccaattgcagtgggaaacgtgattccagacggcattttggcttacttggatgaagaaaacaaaccccaaactgtctccattcctctctcgccaccggcaagaaagtcatcatctttggggttcccggtgccttcactcctacttgcagcttgaagcacgttcctggcttcattgagagagcagaagagctgaaagggaagggtgtggac

SEQ ID NO: 139269 - DNA, 257 bp, Glycine max
attaatttctatagagctgaagaaattaatattaatcaatcaatcaaaatggggttgtgcaaggtttcatttcctgtattatgtgtgtaggggttggtcatgattgtgagtcacgttgccaatgctcaagctcaccagcagattacgtcaatgcacacaacgctgcaagatcagaggtgggtgttcaaaacttggcttgggatgacacggttgctgcttttgcacagaactatgctaatcaacgtaaaggtgattgt

SEQ ID NO: 139270 - DNA, 261 bp, Glycine max
ctctctcctccatggacccaacttcgatccctccccctccggccaccaccgtccccttcactgtcgaacccagcaatcacgtgacccccgccgacaacaccaacaccaaccaccctccttacgatgagatgaatacacagcaatcggggctctgaaggagaaagatggttcgagcaagcgagccataggaaagtacatggaacaagtgtacaaggaccttccacccacccactctgctttgttgactcaccatctcaaccg

SEQ ID NO: 139271 - DNA, 251 bp, Glycine max
ctcgagccgcttgtgggtcacacatcagtactcaagagtacctgtttttgagcaacgtgacgataatataatgggtatagcttatgcaatggatctgctggattatgttcaaaagggtgagttgctaaaagtactacagttggagatatggctcacaagcctgcttattttgtacctgattcaatgtctgtttggaatcttcttagagagttcagaatcaggaaggttcacatggcagttgttcttaatga

SEQ ID NO: 139272 - DNA, 258 bp, Glycine max
atcacattttatgttaagtcaatcatcaccattcaccactcaagttaatagcattccgcaaaatggactgccaccaccttagtctctgaagtcactctcccctcctcctccggccagcggaagatgccgcgatgggcctcggcaccgcgccggaagcaaccagcgcggttaccacaaaagatgctgttcttgaggccatcaagcagggctacaggcactttgatgctgcttctgcttatggtgtggaacagtctgtgg

SEQ ID NO: 139273 - DNA, 253 bp, Glycine max
cacttgttcaattactccttcaaatcagtctggcttgacaagcaggaaaggtatttattgctctctacttaggtaacataagccaacaattttagtagtaattaatggctggagaattgggagttttgatgcacttgatgtggcaaagacacaatggtaccacttcactgctattgtgatcgctggaatgggtttcttcaccgatgcctatgacctcttctgcatttccctagtcaccaagcttctagggagg

SEQ ID NO: 139274 - DNA, 255 bp, Glycine max
tgaacgcgtatcgtccctcctatggcttcaaagcgcatcctcaaggagctcaaggacttgcagaaagacccaccaacttcttgcagcgctggtccagtagctgaggacatgttccattggcaagcaacaaaatgggtcctgctgatagtccttatgctggaggtgtattcctagtcactattcacttccctccggattatcctttcaagcctcctaaggttgcctttaggactaaggtgtttcacccgaacatca

SEQ ID NO: 139275 - DNA, 260 bp, Glycine max
agaaagaagcgtttgagggagaagagaagttttgtgcaaaatccttgggaacagtaattggttttgccatttcaaagctgggaaagaacattcaagtactttcaagttcctttgtcaataagcaagagcaaacactgtggaaggagtgcagaatcttggagacaaagcagtgatgtgtcatgggctaaatttcagaactgcagtattttactgccataaagtccgtgaaacaacagctttcatggttccattggtggctg

SEQ ID NO: 139276 - DNA, 264 bp, Glycine max
ctgcagcattagggtttttcatctgcttcaatggggaagggaacagggagttttggtaagagaaggaacaagactcacactctctgtgtgaggtgtggccgccgcagcttccatctccagaagagtcgttgcgcgcttgtgctttccccgccgcacgcactaggaaatataactggagcgtcaaggcaatccgcagaaagaccaccggaactggcaagatgaggtacttgcgtaacgtgcctcgccgattcaagagtggcttca

SEQ ID NO: 139277 - DNA, 254 bp, Glycine max
agcaaatgaagccactaagatgttgacttcaaacaattgggtcattttggaaattgcttccactagatcttcacttgacctcctaaaggcaaaacaagcatatcaagcccgtttcaaaaagtcccttaagaagacgttgcctatcatactaaaggggacatccgcaagctattggttcctcttgtgagcacattccgttatgagggggatgaggtgaacatgacattggcaaaatctgaggctaaactgcttca

SEQ ID NO: 139278 - DNA, 253 bp, Glycine max
cgcaggcgtctcactccttctccggaatccggagcgacgagacgaagaggttgatacacaggctggccagggactccgggaaagattttgcgcgcgtggagatgacctccaagtttgctgacttgactacaacaacatcatgaggatgatttcggggaagcggttttacggagaagagagtgaacttaacaacgttgaggaagcgaaggagttcagagacactgtgaatgagatgctgcaactcatggggttg

SEQ ID NO: 139279 - DNA, 252 bp, Glycine max
gaggattatgggacctaattatgtccctggggataaaaaggatttgtatgttaaaagtgtgcaacgaactgtcatttggatgggaaagaggcaagaaactgtagaggatgtcccctgtggtaatacgtggctatggttggtcttgaccagttcatcacaaagaatgcaacattgacaaatgagaaggaagtcgatgcccaccctatccgagctatgaagttttctgtctcacctgttgttcgtgttgctgtt

SEQ ID NO: 139280 - DNA, 254 bp, Glycine max
gttgtcataaagcacgcggctttgttcacgtccaccatcatgagcaggctcctcgcgaggcccaacgtgaagctcttcaacgcggtggcggcggaggacttgatcgtgaaggaagggagggttgccgggttgtgaccaattgggctctggtttcgatgaaccatgacacgcagtcatgcatggaccccaacgtgatggaggcgaaggttgtggtgagctcttgtgggcacgatggaccctttggcgccactggg

SEQ ID NO: 139281 - DNA, 251 bp, Glycine max
agcaaaggcttggagtctgctcaatctgaaatcaatgatttggactgggaaagcactttctttttgcgccatcttcctgtctctaacatctcagagatccctgatcttgatgaagattacaggaagtaatgaaggattttgccgtggaactggagaaactggcggactagttcttgagttgctgtgtgagaatcttgggctagagaaagggtatctgaagaaggtgttctgtgggtcaaagggaccaaatt

SEQ ID NO: 139282 - DNA, 258 bp, Glycine max
ctcatgcaaaggtcttcttctacttcacttgctgctgggaggttgttctccacaacaacagcaaccattattgattccccttcacttgctcagagaatcagagatttgcctaaggacctccctggaaccacatcaagaaacatgtttctcagctcattgggaggactccacttgtttatcttaacaaagtcactgaaggatgtggagcttatgttgctgtcaagcaagagatgatgcaacctactgccagcatcaaag

SEQ ID NO: 139283 - DNA, 261 bp, Glycine max
cgagagtgaagcgagacgcgagatggatccagacgcgttggcaaaggcattcgtggagcactactactccaccttcgacaccaaccgcaacaatctcgccaatctctaccaggaaggttccatgctctctttgagggtcagaagatccagggctcccacaacatcgtcgccaaactcacctcccttcccttccaacagtgccagcactccatcaccaccgtcgattctcagccctcaggcgtcaacgccgccatgctcgtc

SEQ ID NO: 139284 - DNA, 263 bp, Glycine max
acggctcgaggatgcctcgtggaacgcttgaagttgttctgatcagcgccaaaggaatcgatgacaatgattttctctccagcattgatccttatgtgattctcacatacagggcacaggagaaaaagagcactgtgcaagaagatgctggatccaagccacaatggaatgagagctttcttttcactgtctctgacagtgcatctgaacttaatctaaagataatggataaagacaactttagtcaagatgattgtcttggc

SEQ ID NO: 139285 - DNA, 256 bp, Glycine max
caattttcactcaaagcttcggtttcagagaccccacttggtcagagccatggtttctgattccaacacttccaggagacaaatagagattgtgtatgaccccgaaggaaggattaacaagttggctgatgaagtggacagggaaactcccctttcaaggcttactttgttctctccttgcaagataaatgttttcttgagaataaccaacaagagggaagatgggtatcatgatttggcatccctttttcatgtg

SEQ ID NO: 139286 - DNA, 252 bp, Glycine max
cttcaaaacactcataacacaaagcacaaagcaaagctcatccttgagttaaaaaatggcagcagcttcttccatggctctctcatccccatccttggctggcaaggccgtgaagctgggcccatcagccccagaagtgggaagggtgagcatgaggaagaccgtcaccaagcaggtctcctcaggaagcccatggtacggcccagaccgagtcaagtacttgggcccattctctggcgagcccccgtccta

SEQ ID NO: 139287 - DNA, 254 bp, Glycine max
caacgcctcgagaatgatccccaagagaagaaattggagtacaatggaagtcaagtaccggaagaatttgtggaaacagagtattaccaagatctcaacagcgtggacaaacaccaccatacgacgggaacaggatttatcaaagtagagaaaaatggaaatgactttcacatagaaccagataatgacactggttgccatcactcttgcaagtgcaatccagcaaccaatgattgggttccttctccttccaa

SEQ ID NO: 139288 - DNA, 252 bp, Glycine max
cataaaccccagagcgcatggcgacttcgactcctaaaaccaacgtcgttttcatagacaccaacctcgatacccacttggccctcgtcgtttccgacctcgacactgtctccaacctcaaaaagagtattctgtcggaacatcccttatgctttccgaaaattgggaaaattcagattcatgggataaaggttgagcgcaaggggtacttttaccaccttacagattccatgcctgtgagaagtgccttca

SEQ ID NO: 139289 - DNA, 253 bp, Glycine max
attagggttttcgctcaccggtgtgcagtcgagcccccgaagaaaaagcgaaaatgccgtcgcacaagacattcagaatcaagaagaagttggcgaagaagatgaggcagaacaggcctatcccctactggatccgcatgaggaccgacaacaccatcaggtacaacgcgaagcccgttactggcgtcgcaccaagcttggattctgaggtgcttgctttgcctcggttctgtttatccaattaattagtgtt

SEQ ID NO: 139290 - DNA, 252 bp, Glycine max
acttaattctctctactactgctagctgtgacttgttttgagttcaatcaaatcgcattggtatctgaaatcaggaaagatggttagcgtagtgagatcaggcaggcacaaagggcagaaggcccagcaaccatccttgccattggaactgcaaacccaccaaaccgtgttgatcagagcacctatcctgattactacttcagaatcaccaacagtgaccacatgaccgagctcaaagagaaatttcagcgc

SEQ ID NO: 139291 - DNA, 259 bp, Glycine max
aagttagtagcgagagagggagaaatgaaggttgtttacttcttcgttgtgctattggctttggcatcctccattgcctttgcttatgatccaagccccctgcaagacttttgtgtggctatcaatgataccaaaactgtgttcgtgaatggaaaattttgcaaggatccaaagcttgctaaggctgaagatttcttctttcctggattgggacccggaaacacttcaaaccccctaggctcaaaggtgacagctgtca

SEQ ID NO: 139292 - DNA, 250 bp, Glycine max
gttctggtttatagatctttgcgaaggaggtttacagcgctcaaccaaagatgcagaacgaggaaggacagatcactgagctttacattcctaggaagtgctccgccacaaacagattgattaccgctaaggaccatgcttcggttcagatcaacattgggcatgtggatgagaatggcgtctacaatggccatttctccacttttgccctctgcggattcatccgtgctcagggtgatgctgacagtgc

SEQ ID NO: 139293 - DNA, 251 bp, Glycine max
cttaacatctacgtgaacaatgctggaataaacattagaaaaccaaccattgagtacactgctgaagaatattcacagattatgacagttaatttagactcctcattccatctgtgccagcttacatatcctcttctgaaagcatctgaaaagggatgcattgtgttcatttcatctgttgctggtgtagtgagtttaggtactggagctgtctttgcagcaagtaaagctgcaattaatcagcttacaaa

SEQ ID NO: 139294 - DNA, 250 bp, Glycine max
atcacttccccacttcccctgtaaatcacgtttagttcgcacaaggttttaaaaaatggctgatgctgaggacattcaacctcttgttgttgataatggaactggaatggtcaaggcgggttttgcaggtgatgacgctcctagggccgtgttccccagtattattgggcgaccacgccataccggtgtaatggttgggatgggtcagaaggatgcttacgtgggtgatgaagctcaatcaaaaaggggt

SEQ ID NO: 139295 - DNA, 251 bp, Glycine max
cagatctccaagaaacaaaagatgctattgttaaagcatccgacctgccattatcaattcttattgttggggtaggaggagctgatttcaaagaaatggaggttttggatgcagacaagggagagaggctagaaagttcatatggacgcgttgcttcacgtgatatagtccaatttgttccatttcgggagcttcaaagtggattttcagttgttcaagcacttctagcagaattacccgctcagttttta

SEQ ID NO: 139296 - DNA, 251 bp, Glycine max
ttccccagcaagctggaaccatccgcaaaaacggttacattgtcatcaagaacaggccatgcaaggttgtggaggtttcaacttccaaaactggcaagcatggacacgcaaagtgtcactttgttgcaattgacatcttcactgggaaaaagcttgaggatattgtcccatcttcccataactgtgatgttccccatgttaatcgcattgactaccagctcattgacatctcagaggatggatttgtgagt

SEQ ID NO: 139297 - DNA, 251 bp, Glycine max
ccttcacttgaccgttctgtggtgtatcatcacatattgcaccaggccttactctcttcgctagaaaccagaggttctcattggctaatgtcgtgattcttctggaactattgacaggaaaacttcgcatagcagatgatcaaattggtatgtgtgatagcatgctgggcaacaatctaccgtcagcatacgacgctacaggcccagagagatcagataacataaagagaacgagactctatgatcccaat

SEQ ID NO: 139298 - DNA, 252 bp, Glycine max
aatactgcaatgagtattgaccctgagtcgaaaatgataaaaagagatgaaggacgaattgagaagtggattctgaggagagcctttgatgatgaagagcatccttatctgccaaagcacattttatacaggcagaaagagcaattcagtgatggagttggctatagctggattgatggccttaaggcccatgctgcaaaacatgtgactgacaaaatgatgcttaatgctggtaacatctaccctcacaac

SEQ ID NO: 139299 - DNA, 252 bp, Glycine max
ccgagattgatcccatctgtgcccttcaggctctcatggaaggccttcaggttctgaccttggaggatgttgtttctgaggctgatatctttgtcaccaccaccggtaacaaggacatcatcatggttgaccacatgaggaaaatgaagaacaatgccattgtttgcaacattggtcactttgacaatgagatcgacatgcttgggctggagaactaccccggcgtgaagcgcatcaccatcaagccccaaa

SEQ ID NO: 139300 - DNA, 255 bp, Glycine max
tgaacccgtttcgccttcgatcaaagggaagaacaaacattcaattcatggcggctgcaaagcttcaagctttatggaatcacccagctgggcctaaaaccattcacttctgggcacctacctttaagtggggcatcagcattgccaacattgctgatttctcaaaaccacctgagccatcttcctatcctcagcaaatagcggtcacagctactggaattatctggtctcgttacagcactgtaatcaccccaa

SEQ ID NO: 139301 - DNA, 254 bp, Glycine max
ctacccgccgctcgatgggaattgcgcttcaaggcgtctcgtagggctaatccgcctcacgagggtcaccaacggcacgtgcctttgggtgggccgaggccccctactgctggtcggcaaacggacggcgggcgcacgcgtcgcttctagcccggattctgactctagagcgttcagccataatccaacgcacggtaggttcacgccactggcttttcaaccaagcgcgatgaccaattgtgcgaatccacggt

SEQ ID NO: 139302 - DNA, 250 bp, Glycine max
ggtgtttccatctcacagtgactagtctgtgctttgtagtggttgtggttggagtgcttccactctccttagatgcacaactagatccctcgttttacagagacacgtgtcccaaggttcactccattgttcgcgaagtggtgaggaacgtttccaagaaagatccccgcatgcttgccagtctcattagacttcactttcatgactgttttgttcaaggatgtgacgcatcagttttgttgaacaacac

SEQ ID NO: 139303 - DNA, 250 bp, Glycine max
caaaatcgtgaggctgccaggaaaagccgactgaggaaaaaggcatatgtgcaacaattagagagcagtaggttgaaactgacccaacttgagcaggagctccagcgagcacgccagcagggaatatttatttcaagtactggagatcaggcacagtcaatgagtggaaatggcgctatggcatttgatgtagagtacgcacgatggttagaagagcataatagacaaaccaatgagctaagggctgcaa

SEQ ID NO: 139304 - DNA, 241 bp, Glycine max
atccatcgatcatacacttagttgcttccaattaagatggttgtgctagagaagctctgggatgatgttgtagctggccctcaacctgagcgtggccttggcaagctcagtaaactcaccatcctcaaaactagtgatgaaggatggagtagccagctgcagcagacgttgtggatgccgtggacaccaacaaccccgatgtactccgtagactccaacgacaccgggatgggaccgtaaa

SEQ ID NO: 139305 - DNA, 249 bp, Glycine max
gttttcttcatatcttccttgtcactgcccgtgtgtcgccgccatggccaccgtcaccacccaagcctccgccgcaattttccggccatgtacctcgaaatcgaggtttttgaccggctcttccggtaaacttaaccgggaagtgactatgcggccaatggggtgccctccttctgcctctttcaaggttgaagccaagaagggagagtggttacctggcttggcctccccaacttacctcaatggcac

SEQ ID NO: 139306 - DNA, 249 bp, Glycine max
acaagggagatcacttacctttcctaaggtggttcgattttcagaacgtggagaagaggttgaagaatatcagtaagaggtatgataccatcttgaataagatccttgatgagaaccgtaacaacaaggaccgcgagaattccatgattggtcatctcctcaaactgcaagagacacagcctgactattataccgaccaaatcatcaaaggccttgctttggctatgctctttggtggaacagactcgt

SEQ ID NO: 139307 - DNA, 246 bp, Glycine max
caagatgcctctggcctgcaaaagagtgcaaatctctacttctctgtatcaattgtgattgtcttcgtatgcatggttttctacaacatggtgcacaaacttcctgtgatgaagtactataaggaacttaaggttgaggcagtcactgcaaatgaagacaatggtcccctgactggagctgtctggaggtcaactgtatggaatattgtgggaagaatcaagtggtatgggtttggcattgtgctc

SEQ ID NO: 139308 - DNA, 247 bp, Glycine max
tggcaccaggttaattaaggagagggtatagtatggcccagtctagtggcaaaactttggtgcagtggttggtagcagcattgctcattgccttgttgggtggtgcacaagctgttgcaatatgtaacatagactcaagtcaattaaacttgtgtcgtgctgcagttactggtcaaaaccctccaccaccggatgagaaatgttgtgcagttattcgccaagccaatttgcgttgcctctgcagtta

SEQ ID NO: 139309 - DNA, 247 bp, Glycine max
cttcctcttcctcagtagtgcgattttcgattctcttctctgatactatgcctaaccctaaggtcttcttcgacatgaccatcggcggtcaacctgccggccgcatcgtgatggagctctacgccgacgtgactccgagcaccgccgagaacttccgcgcgctctgcaccggcgagaagggcgccgggcggagcggcaagcccctccactacaaaggctcgtccttccaccgcgtgatcccgaactt

SEQ ID NO: 139310 - DNA, 247 bp, Glycine max
gtcactgagctgccaggatttgaattcttccccgacaccaaggctcgcattcttggtggcaaagctgactacctcccccctatcctcactacttagtttgattttgtactttgttacaaacttgtgattgcttacatcctaatttgtgtttttattactacttagtaataatcttaatatagtctgtgatgtcttgtggagatttttttttcttctatttttttgaagatgtcagtgacagatttta

SEQ ID NO: 139311 - DNA, 248 bp, Glycine max
tatagaagagccttccatatatagcctcccaaaaaaatgaagagtactacctctttggctctctttctactttgtgccctaacttcatcatatcagccttcagccaccgctgatattgtattcgacaccgaaggcaatcctattcgaaacggcggcacatactatgtgttgccagttataagaggaaagggcggcggaatagaatttgccaaaaccgaaacagaaacatgccctctcactgttgtgca

SEQ ID NO: 139312 - DNA, 246 bp, Glycine max
cgaaatatggcttcaactcatctgcttcccctagcaaccttcttcttacttctctccgcttcttatctccagattgctggggcggaagcacaaccgttgactagtctcaagcttaactctcatattcttcaggagtctactgctaaagagattaatgaaaatcccgaggcaggatgggaggctgctataaatcctcgtttctccaattatacagttgaacaatttaagcgccttcttggagtcaaa

SEQ ID NO: 139313 - DNA, 245 bp, Glycine max
gaactttgtttcccaacctccattgcctccgcttctacctcgctaccatgatcattcctgagaagaaccgcaaggagatctgcaaatacctcttccaagagggagtttgctttgcgaagaaggacttcaatttggcgaacaccctgagattgacgtgccgaatctgcaggtgattaagctgatgcagagtttcaagtctcgcgagtatgtgagggagacttttgcttggatgcactattactggt

SEQ ID NO: 139314 - DNA, 245 bp, Glycine max
cgaaaatgtggaagagaacgggttttgaagaagaagcagttcaattgatcaactcagatttcagggacctaagtctagctgctaatagactcgcccatcatgccatcaaacttggtggcattggctttggagcctcttttttcggattgtttgctgccattgctgctatttatctgttgattttggatcgtacaaactggaaaacaaatattctcacagcactactcattccatacattttcttc

SEQ ID NO: 139315 - DNA, 245 bp, Glycine max
caaccctaacgcgtgcagagcagagagagacgcagccatggggcgaagacccgcgaggtgttataggcaaattaagaacaaaccataccccaagtcacggttttgccgtggtgttcctgatcccaagatcaggatttacgatgttggtatgaagaagaagggtgttgatgaatttcctttctgtgtccatctggttagttgggagaaggaaaacgtttctagtgaggccctggaagctgctcgta

SEQ ID NO: 139316 - DNA, 244 bp, Glycine max
gagaaggcctaccatgaacagctctcagtggcagaaattaccaacagtgcttttgagccatcgtccatgatggccaagtgtgatcctcgtcacggaaagtacatggcgtgttgcctgatgtaccgtggtgatgttgtgcccaaagatgtaaacgctgctgttgccaccatcaagaccaagaggaccattcagtttgtggattggtgccctactggtttcaagtgtggtattaactaccagccac

SEQ ID NO: 139317 - DNA, 245 bp, Glycine max
cttgaggtcaatcctaggcaccctattatcaaggagctccgagagagagtagtaaagaaccctgaggatgagggtgtgaaacatacagcacagttgatgtaccagaccgcactcttcgaaagtggcttcctgcttgatgatcccaaggattttgcttcccgtatttatgattcagttaagaccagcttggacatcagtcctgaagcaacagttgaggaggaagatgacaccgaagtagaggctga

SEQ ID NO: 139318 - DNA, 247 bp, Glycine max
caccgtttctttcacttcacaaaaatgaaaaacatgaaattgtgttcggtgatgctatgcttatcactagcgttccttcttggggccacagcagaacaatgtggcacacaagctggtggagcgttatgcccaaatagattatgttgcagcaaatttgggtggtgtggtgacacagattcctactgtggagaaggttgccagagccaatgcaaatctgcaacaccctcaacaccaactccaacaacac

SEQ ID NO: 139319 - DNA, 247 bp, Glycine max
cttccttctacatcaccttattcctctttcctcttcattctcttcccaaataaaactataatcagtcttcagtgatcgtcaacacttaagacccaagtgtaaatgaagaaagtggtggtgaagttgaatttgcacgatgacaaagcaaagcaaaaggccatgaagtcggtttctagcctagcaggcatcgattctatctccatggacatgaaggagaagaaactgactgtcgtgggtgaaatagacc

SEQ ID NO: 139320 - DNA, 243 bp, Glycine max
tgttgagagagaaattgctctccaggctagcaagaataaacgtctcaaggaagttgaggagcagcaaaagaaagccctggaggaagatccatctgtatttgattatgatggagtctatgaccaaatgaaagagaaagttgctcgtccattggtacaagatcgtgaagagagaaagccaaaatacatccaaaatctgattaaaaaagcaaaagagcgagagcagtatcgtgagattgtttatga

SEQ ID NO: 139321 - DNA, 243 bp, Glycine max
aacacagccagttctatcaaacttaggatcaacagtcccaaagaagaagaagctttgcacgattgtgtggagttgatggacttatctatcagcagagttagggactcaatggtgaccctaacaaaacaaaccattgagtcccaacaagatgcacacacatggctaagtagcgtgcttactaaccatgcaacttgtttggatgggttagaggggtcagctcgcgcctttatgaaggacgaactc

SEQ ID NO: 139322 - DNA, 243 bp, Glycine max
aagaaaacagctagtgaaatagacactttggttgcagggtggctggaggaacacaaaagaaaaagagctacgagtacaaatggacaggaagaacaggatgtcatgggtgttatgctgaatgttctgcaggatcttaaggtttctggttatgattcagacaccatcatcaaggctacttgcctgaatctgattttggcaggaggagacagcatcatggtggctctaacatgggcgctatctctg

SEQ ID NO: 139323 - DNA, 252 bp, Glycine max
gaaggtgaaccagaaggaaatttggatcatcctgccccccaagatccacctatttggcatgagataatgcgcttctttaccaaccctcgcaagcctatgatacttgctctcgctagaccagaccctaaaaagaacatcacaactttggtaaaagcatttggagaatgccgtcctcttcaatcgcttgccaaccttacattaattatgggtaaccgagatggaattgatgagatgtcaagcacaaatgcttct

SEQ ID NO: 139324 - DNA, 251 bp, Glycine max
cactatacttgtcaaccctttgagagttagaatggctgctgctattgaaatccccacaatagtgtttccaaactcctctgcccaacagaggatgccagtggttggaatgggatctgcccctgacttcacatgcaagaaagacacaaaggaggctatcattgaggccgtgaaacagggttacagacacttcgacactgctgctgcttatggctctgaacaggctctcggtgaagctctcaaggaagctatcc

SEQ ID NO: 139325 - DNA, 247 bp, Glycine max
aaagacttgcttccaagatggttctgctagagaagctctgggatgacgttgttgctggccctcaacctgagcgtggccttggcaagctcagaaaactcaccaccctcaaaactattgatgaaggagacagtagcaagctgcagaagacgttgtcgatgccgtcgacaccgacaatcccgatgactcccacgactccaacgacaccgggatccgcgcgtaaagctgacaacgtttggaggagcgtctt

SEQ ID NO: 139326 - DNA, 251 bp, Glycine max
gtggttcagaggccagagttgagcctccagatagagaagctgcagaggctcctctccttcaagaagcaaggtgctcatctcattgaggcctctttcaatgatcacaagagccttgttgatgctgtgaagcaggttgatgttgtcatcagtgccatctctggtgttcacatcaggagccacagcatcactctgcaactcaaacttgttgaggccatcaaagaagctgggaacgttaagcgtttcttgccttc

SEQ ID NO: 139327 - DNA, 218 bp, Glycine max
cagctccagtcttctatcatcatcgaatccactccagcgttgttgcattgtagaaggcgatggccgcgcgagctctgttgaccagaaaaaccctagccaccggtgctcgcaacgacgcgagcccataatcggagttggcataacagcagcggctactcattcacgcgggttgcacgtgtacacgctacccgatctggattacgactatggcgcactgg

SEQ ID NO: 139328 - DNA, 251 bp, Glycine max
gtgaaaatggcggtacccttgctctccaagaagatcgtgaagaagcgcgtcaagaagtttatacgcccccagagtgatcgcaagatctccgtcaagccaagctggcgcagacccaagggtattgattctcgtgtcaggagaaagttcaaaggatgcactttgatgcccaacattggttatggctcagacaagaaaacccgccattatctaccaaatggtttcaagaaatttgtcgtgcacaatgtgaaaga

SEQ ID NO: 139329 - DNA, 255 bp, Glycine max
ctttcgcaccttcgaaaatcaattttctgtcttctctgcgtcaccttcctctctcaatcgttttccatggctcgtaccatgcaaactgctcgcaaatccaccggtggaaaggctcctaggaagcaactcgccaccaaggctgcaaggaaatctgcaccgtcaaccggtggagtcaagaagcctcatcgctatcgccctggaactgttgctcttcgtgagatccgaaaataccaaaagagcacagagcttctgatc

SEQ ID NO: 139330 - DNA, 251 bp, Glycine max
gttgttttatatagacgagcttacaaaagatgcagccttggatccaacggggctggtggcagtagctgtggcccatgcatttgcactgtttgtaggtgtctccgtcgcagccaacatctcgggtggccatttgaacccagctgttacttttggattggccattggaggcaacatcaccctcattactggtttcttatactggattgcccagttgttgggttccattgtggcatgcctcctcctcaatttca

SEQ ID NO: 139331 - DNA, 245 bp, Glycine max
gggtggtgaccaagaaaaccaatcaataaaaaacatcaacaaagacacccaagaagaggcctttatgtttgacagaagaaatatcctcattggcctaggaggcttttatggtaccctaagcaatgattcattgtcccttgcagcacctatctcccctccagagataaccaaatgtggcccacctgaccttccctcaggagccaaacagaccaattgttgccctccaatttcctcaaacatcatag

SEQ ID NO: 139332 - DNA, 245 bp, Glycine max
cggatttggaagaattggccgtttggtagccagagtggctctgcagagagacgatgttgaactcgttgccgttaacgaccctttcatcaccaccgattacatgacatacatgtttaaatacgacagtgttcatggacactggaagcatcacgatgtcaccgttaaggacgagaagacccttctcttcggtgacaagccagtcactatttttggacacagaaaccctgaagagatcccatgggggt

SEQ ID NO: 139333 - DNA, 248 bp, Glycine max
gttgaaagctctggtgagctttgtgaaccaggctgatcatcttcggcaggaaactttgcagcaaatgtctcgaatacttacaatccgtcaggcagctcgatgcttgcttgctttgggggaatatttccaacgcctgagggctttgagctcactgtggtctaatagacctcgtgaacctgcttagtctcacaacaaggttacaagagcgcaaactcataacatgaacgtgatgtgatgatgaatatggg

SEQ ID NO: 139334 - DNA, 245 bp, Glycine max
taaccaatcatctttagttcttcagtaatttattgtgggattctattctaagattttgagaatgtctagctgtgggtgtggaagcagctgcaactgtggcagcaactgcggttgcaacaagtactcttttgacttgagttacgttgagaagacaaccacagagactctagttttgggtgttgggcctgtgaaggccaattggagggtgctgaaatgggtgttgcatctgagaacggtggctgcaa

SEQ ID NO: 139335 - DNA, 246 bp, Glycine max
ctcgagcgaatcggctcgaggtccttccttcgtcaacacccctttttgctgatggcgcaaattctgctccatgggactcttcatgccactatctatgaagtcgataagctcaaaattggtggaggcaactttttaaccaagatcgtacaaaacatcgaggagactgttggtattggaaaaggtgtcactaaactatatgcaaccattgatctagagaaggcacgagtggggaggaccagaattatt

SEQ ID NO: 139336 - DNA, 250 bp, Glycine max
ctcacgcatttcctcgttttcttcttcttcccttttctctcttctctctctttctccggcgacgatctcagattccggtcactcctctcgccggcgatcccttattcctccgtcctccgtcgagtcctttccgattcgaatcgttcccagccttgtgccaccatgaatcccgaatacgattatttgttcaagcttttgctgattggagattctggtgtaggcaagtcatgtcttctcctgaggtttgctg

SEQ ID NO: 139337 - DNA, 249 bp, Glycine max
ggagaaagggtgtgagaatggagagcaaagaggaagatgtaagggttggagcaactaagttctcagaaaggcaaccaattggtacagcagctcagggtgacaaggactacaaagaaccacccccagcacctttgtttgagcctggtgagctaaagtcatggtccttctacagagctggaattgctgagtttgtggccactttcttgttcctctacattaccatcttaactgtcatgggtgtcaacaggt

SEQ ID NO: 139338 - DNA, 253 bp, Glycine max
tcacaaactagtaatattattcttcgaatccattttattattcataatgggtattttcacatttgaggatgaaaccacctcccctgtggctcctgctaccctttacaaagctctagttacagatgccgacaacgtcatcccaaaggctgtcgaagccttcaggagtgttgaaaaccttgaggggaacggtggccctggaaccatcaagaagatcactttcgttgaggatggagaaagcaagtttgtgttgcac

SEQ ID NO: 139339 - DNA, 249 bp, Glycine max
gttcagtctttcttggaactttgttactctcacacatgtctcgctccgtgcctttggtttcaaccatttttgtgctgcttctgcttctggtggccactgagatgatggggccaacaatggtggcagaagcaagaacttgtgagtctcagagccaccgtttcaaggggccatgtttgagtgacaccaactgtggctctgtttgccgaaccgaacgtttcactggaggacactgccgtggcttccgtcgca

SEQ ID NO: 139340 - DNA, 248 bp, Glycine max
caggttcaaaccggagcaaaaaaacttgttacgatggtttcttccgacaaggatccacgagaggaagtccttcaagcatggtacatggatgatagtgatgaagatcaaagactcccccaccacaaagaacccaaggagtttgtctcgttggaccaacttgctgaacttggagtccttagctggaaattagatgctgataaccatgaaaatgatccagagctgaaaaagattcgtgaagagcgtggcta

SEQ ID NO: 139341 - DNA, 243 bp, Glycine max
cttggcaagctcagaaaactcaccaccctcaaaactattgatgaaggagaaagtagcaagctgcagaagacgttgtcgatgccgtcgacaccaacaaccccgatgactccgacgactccaacgacaccgggatcggcccgtaaagctgacaacgtttggaggagcgtcttccatcctgggagcaactccgccacaaagaccatcggtgctcagatgtttgacaaaccacttcccaacactccc

SEQ ID NO: 139342 - DNA, 247 bp, Glycine max
cttcttctcttcccctttctttttcttcttctgagcttgtttaagctctttctatttgattccattaacatatattatcacaatgtgtggtattcttgctgttcttggttgttctgatgactctcgagccaaaagggtccgcgtgcttgagctctctcgcagattgaagcaccgtggccctgactggagtgggctccatcaacatggtgactgctttttagcacatcaacggttagccatagttgat

SEQ ID NO: 139343 - DNA, 245 bp, Glycine max
ggaagcagctgcaactgtggcagcaactgcagttgcaacaagtactcttttgactacgttgagaagatcacaaatgagactctagttttgggtgttgggccggtagaaggcccaattcgagggtgctgaaatgggtgttgcagctgagaacggtggctgcaactgtggatcaaactgcacttgcgacccatgcagctgcaagtgagatcaacatgcataaccttcaagcagagatagctgtaata

SEQ ID NO: 139344 - DNA, 245 bp, Glycine max
gttggtgtgtgtcaccggtgctgccggttatattgcttcatggattgtcaagttcctacttgaacgtggttacactgacagggccactgttcgaaacccaaatgatcacacgaaggtagaacatttgctaaaacttgaaggtgcaaaggagagactgcacctttttaaggcagatcttttgggtgaaaattcttttgactccattgttgagggctgtgatggcgtctttcatactgcttctcctt

SEQ ID NO: 139345 - DNA, 246 bp, Glycine max
ccagcacaaagggcgtaggagaagagggtttcgttccgtttcaatggggagcgaagagcagaacggcgaattctacctgcgttactacgtcggtcacaagggcaagtttggtcacgagttcctggagttcgagttccgcccagacggcaagctccgctacgccaacaactccaactacaaaaacgacaccatcatccgcaaggaggtttacctaacccccgccgttctccgcgagtgccgtcgcat

SEQ ID NO: 139346 - DNA, 246 bp, Glycine max
ggcacagacagcatgcaagggccaggccttcaccgaaaacaaggttttcaccacatgccgtgatcttcctcacctatcctcgtacctccactggacctttgaccaggccacagggaagttggacatagccttcagacacacaggaatctctggaacagacaagtgggttgcatgggctatcaatcccagcaacaacctcaattcagctatgacgggagcacaagctctggtggctatcataccatc

SEQ ID NO: 139347 - DNA, 240 bp, Glycine max
cttcttctcttgcggctaggtttagcgcagttcttctagatttaaggaagatgggtaaggaaaaggttcacatcagtattgtggttattggccatgttgactctgggaagtccactaccactggccacctgatctacaagcttggaggcattgacaagcgtgttattgagagatttgagaaggaagctgctgagatgaacaagaggtctttcaagtatgcctgggtgcttgataagctta

SEQ ID NO: 139348 - DNA, 243 bp, Glycine max
accgtcgagaaggcaaccgcggacgccgcgctggtcgaaaaatccgtcaacacgatccgcttcctcgccatcgacgccgtcgagaaggcgaattcgggtcacccggggctccccatgggatgcgctccgatgggtcacgtgctatatgatgaaaccatgaagtataaccctaagaaccctttctggttcaaccgcgatcgcttcgttctctccgctgggcacgggtgcatgcttcagtacgcg

SEQ ID NO: 139349 - DNA, 246 bp, Glycine max
cagcagtgcagggaagttggtgtgtgtcaccggtgctgccggttatattgcttcatggattgtcaagttcctacttgaacgtggttacactgtcagggccactgttcgaaacccaaatgatcacacgaaggtagaacatttgctaaaacttgaaggtgcaaaggagagactgcacctttttaaggcagatcttttgggtgaaaattcttttgactccattgttgagggctgtgatggcgtctttca

SEQ ID NO: 139350 - DNA, 243 bp, Glycine max
gttcatctatggcaggagcaaaagggttcgttgaagcagataatgcagaggccataattaccagaattgaacacaaatcgcgaaagatcgaaactttgctcaaacagtataagcccgtggaagcccttaaaactgcccttgaaggcacatttgccatcattggggatgagcgttgcaagtcggcacactggcttgtggtgcacagagctataatggctataaaagatgtggatgggatgcttt

SEQ ID NO: 139351 - DNA, 246 bp, Glycine max
gtcttcgagtttcacagcgaagtcgtaggagggtttcaaaagatggagaacatgcagagcttctggcaattgggcgatgaactccgtggacactcaaaagcatcggaggatcacaaatggttaatggttgcttcgaaattggcggaacagacaagattgaagggggagcgtgtgaacaaccttgatctttcaaagggccccattgaaacaaggtcaagggataaatttgggttccaggaagagaac

SEQ ID NO: 139352 - DNA, 245 bp, Glycine max
ggaggctatgatattccaaaagggtccaatgtgcatgtgaatgtgtgggccgtggcccgtgacccggcagtgtggaaggatccgttggagttccgacccgagaggttccttgaggaggatgtggacatgaagggccatgactttaggctacttccattcggggcgggtcgccgggtatgcccgggtgcccaacttggtatcaacttggtaacatccatgttgggccacctcttgcaccatttttg

SEQ ID NO: 139353 - DNA, 243 bp, Glycine max
agtaccttggcgacgaggatataaaggtgaaggaggctgcagggggcattttggcaaatttagcattgagccgcgttaaccacgacatcatggttgaagcaggtgttatacctaaattggcaaagttcttaacatctaatttggaaggatctaaagttattaggaaggaagcaaggaatgcattgctggaacttgttaaggacaagtatcatagaattcttgttattgaggaaggtctggtcc

SEQ ID NO: 139354 - DNA, 242 bp, Glycine max
attaatttctatagagctgaagaaattaatattaatcaatcaatcaaaatggggttgtgcaaggtttcatttcctgtattatgtgtgttggggttggtcatgattgtgagtcacgttgccaatgctcaagactcaccagcagattacgtcaatgcacacaacgctgcaagatcagaggtgggtgttcaaaacttggcttgggatgacacggttgctgcttttgcacagaactatgctaatca

SEQ ID NO: 139355 - DNA, 242 bp, Glycine max
cttcaaacctaacgcagcatcgctattctcttcattccatggctttgcccaaccagcaaaccgtggattaccctagtttcaaactcgttatcgtcggcgatggtggcacaggaaagacaacctttgtgaaaaggcatctcaccggagaattcgagaagaaatatgagccaaccatcggtgtggaggttcacccattggattttttcacaaactgtggaaagattcgattttactgctgggat

SEQ ID NO: 139356 - DNA, 241 bp, Glycine max
attgtttgttgttgtaactcgttcttcttcttttgttgttctgtgtttgttttttctctcacctgaaaatgtcttgctgcggtggtaactgtggttgcggaagctcctgcaagtgcggcaacggctgcggaggctgcaagatgtacccagacttgagctacactgagtcaaccaccaccgagaccttggtcatgggagtggcacctgttaaggctcaatttgagggtgctgaaatgggtgt

SEQ ID NO: 139357 - DNA, 242 bp, Glycine max
gttaatgtctcagaaattcactctagcttatgctgcactcgtcggagtgggtggtgtaatgggttatctcaagagtggcagcaacaagtcactttggctgggggtttgtctgcatcactgctgtattatgtttatactgagctacctggaagccctgttttcgcatcatctgttggccttggcatatctgctgcacttcttggggtgatgggttctcgtttcaagaaatcaggaaaggtctt

SEQ ID NO: 139358 - DNA, 241 bp, Glycine max
attggtcgcttgctagctggcataggaattggtgtaacatctgcaattgtaccactttacatatctgagatttctccaaccgaaattcggggtgcgcttggatctgttaatcaacttttcatatgtattgggattcttgcagcattactggctggtttgcctctggtgggaaatcctatatggtggcggacaatgtttggaattactgtagttccatctgttctgttagcacttggaatga

SEQ ID NO: 139359 - DNA, 244 bp, Glycine max
cacagtttacacacgagtacccattttctcttctcaatttctcagagtgtgcagagaaaatcatggtggacgcagcagaacgtaggtacttggaggatgacgattcatcactcatgaaaactattaagggggcaacaactggtttagttgctggcactatctgggggaccgtagttgccacctggtatgatgtccctcgtgtagagagaaatgttgctcttccagggctgattaggactttcaa

SEQ ID NO: 139360 - DNA, 248 bp, Glycine max
cggctcgagggaagcgaagaagtgaagctgttgagcttttgggtgagtccatttggtaaaaggattgagtgggctttgaaactgaagggtgtagagtatgagtatatagaagaagatatcttcaacaagagtagtctccttctggagttgaacccggttcacaagaaggttccggttcttgttcatgcagaaaaatccatcatcgctgaatcattcatcatccttgaatacatagatgaaaaatggaa

SEQ ID NO: 139361 - DNA, 244 bp, Glycine max
gtataacgctgctgccgaaacccttcccgatccttgaggtaagtgagtagtcggtggttcagggtggtgcatactgctaagggtaagcaataggatgtggttaccatcgcgtagaccatcatgctccataagcggctccatggctgcacatttaagagaaagctcctagagctattaaggagataaggatatttgcccgaaaggccacggggaccactgatgtgagggtggatgtgaagttgaa

SEQ ID NO: 139362 - DNA, 238 bp, Glycine max
gaagaactctggccagcattggatgacttgcttagagatgaggacgatacaactgtgtctacaccatatactgctgctgttttagagtaccgggttgttattcatgatccattggaagcttctgtcgacgaaaagaagtggcataatgtaaatggtcatgccattgtggatgctcaacatccagttagggcaaatgtggctgtgagaaaggagcttcatactcctgcatctgatcgat

SEQ ID NO: 139363 - DNA, 243 bp, Glycine max
ttatcatttctccatttccattttctctctcacttttcaagaatcgtaagctatgggaaagtcttacccaactgtgagtgctgattaccagaaggccgttgagaaggcgaagaagaagctcagaggcttcatcgctgagaagagatgcgctcctctaatgctccgtttggcatggcactctgctggaacctttgacaagggcacgaagaccggtggacccttcggaaccatcaagcaccctgc

SEQ ID NO: 139364 - DNA, 243 bp, Glycine max
gagtgagcaacttccaacaccatagtgaaatggcttccaaggctgcacttctcttgtgtttcaatgttctcttcttcaccgtggttagctccacatatgtgccatgcaacccaccccccaaaactccaaaacacccacctgtcccaaagccaccttccccaaagcaagcaagttgccccaaagacactattaagtttggtgtgtgtgctgatgtgttaggtttgatcaacgtgcaacttggga

SEQ ID NO: 139365 - DNA, 241 bp, Glycine max
ctcgttcttcttcgtcgttatcttcttcttttgttgtttgtgtgtttgttttttctctcacctgaaaatgtcttgctgcggtggtaactgtggttgcggaagcgcctgcaagtgcggcaacggctgcggaggctgcaagatgtacccagacttgagctacaccgagtcaaccaccaccgagaccttggtcatgggagtggcaccagttaaggctcaattcgagagtgctgaaatgggtgtt

SEQ ID NO: 139366 - DNA, 254 bp, Glycine max
accggtgatgagccagcagacacttgagtttcactgggggaagcaccacaagacttatgtggaaaatctgaaaaaacaagttgttgggacagagcttgatgggaagtcactagaagagattattgtcacatcatacaataagggtgacattcttccagctttcaacaatgcagcacaggtatggaaccatgacttcttctgggagtgcagaaaccaggtggaggtggaaagccatccggggagcttctagaact

SEQ ID NO: 139367 - DNA, 255 bp, Glycine max
atccccgtggccaatggcgtgaatgcaagcttgatatcaaaaactgctcacctaatcaactcagtgtaatgcaaggattcaggacagatttcttaagggcatttagtgtggttggcaacgccgcatctaaagggcattttatagatggttgctatgcacactgccaaactggaatacaagagacatggctgagaaatgactccccagtggtgccaagacatcaattgcaaaggcagtgggtgattggttttatga

SEQ ID NO: 139368 - DNA, 257 bp, Glycine max
tgccaacactgaccaaattgcatctgggattcacttcaggctgcgggctcgggctttcattgttgctcagccaaacggtaaccgggtagtgtttgtgaacctcgacgcttgcatggcttcacagcttgtagtcatcaaattaatcgagaggctgaaagcaagatatggtgactatatactgaaaagaatgtggctattagtggaattcacatcatgctggtcctgggggttatctccaatatgttgtatatattgtg

SEQ ID NO: 139369 - DNA, 257 bp, Glycine max
atcaaaggcaagaagaaaacttgccctcaacatatgtggagaagtgtgacattttcagtggggagtaggtgccaaatccaaaggcaccatactacacaaacaagacatgttgggcaattcatgagcaccaaaattgcatcaagtatgggaggcctgactctgagttcatgaagtggaggtggaagccaagtgagtgtgaactccccatatcaacccttttcagttccttgaaattgttaagggaaaatccatggctt

SEQ ID NO: 139370 - DNA, 259 bp, Glycine max
cctctccctacactccggatgcaatatgggcaaagatggggatgtggcactcttctttggactctcaggtactgggaagaccactctttccaccgatcacaataggtatttaatcggagatgatgaacactgttggggtgacaatggtgtctccaacattgaaggtggttgctatgccaaatgcattgacctctcacgggagaaagagccagtatttggaatgcaatcaggtttggcacagtgttggaaaatgtggtgt

SEQ ID NO: 139371 - DNA, 259 bp, Glycine max
tgagcacagctcaacaagtatggttgcgcaaattgggaggtgcaaagcctgttgtgaatgaaaatgctggtgggattattactgctggacgcgctaaaagatcagatttgcagccagtaaggaatggtgaaaggtttaagcagttaaaagaagaggacaagaagaaaaaggtaagcaaggcactgccagtggaagaagttcagcccctggcttctgtgtctgcttctgatgatggctcggatacagaaagtgacaataa

SEQ ID NO: 139372 - DNA, 256 bp, Glycine max
cggaaacaagattgatataccttatgctgcttcagaggatgaactacgttatcatatgggcctcactaacttcaccacaggcaaaggcaaggttaatttggttgactccaatgttcgtcctttggaggttttcatgtgcagtattgtccgcaagatggggtatggtgaaggctttcagtggctctctcagtacattaaatagagaacaatgtttgctctttattatcctcatgctaatgtagtctccacattagcg

SEQ ID NO: 139373 - DNA, 253 bp, Glycine max
tccccttcaacacaccaaccaccaaagaagcatactactatagaatgatatttgagaggttcttccctcagaactcagccaggctgagtgttcctggaggaccaagtgttgcatgtagcacagccaaagctgttgagtgggatgctgcttggtctaacaaccttgatccatctggtagagcagcacttggagtgcatgcatcagcttaggaaatcaggtcaaagctgtagaaccagagaagatcataccaaag

SEQ ID NO: 139374 - DNA, 255 bp, Glycine max
atctaagtccctttggtcttcatcttctgttctgatccaggtatggcttctaaacgcatcttgaaggagctcaaggatttgcagaaggatcctcctacctcatgcagtgcaggccctgtggctgaggccatgtttcactggcaagccacaatcatgggacctgctgatagccatatgcaggtggtgttttcctagtttcaattcattttcctcctgactatcccttcaagccaccaaaggttgcttttcggacta

SEQ ID NO: 139375 - DNA, 256 bp, Glycine max
ccaaattctagctcctttcagctgcacaagagtctccaatcccaactctctctctctctctccacttgccaaaggaaaaaggctaaagagaaaagggaccaaaccacacacacacacacagaaatatgtcttccccaagcaagcgccgagagatggacttgatgaaactgatgatgagtgattacaaggtcgagatgattaatgatggatgcaagaattttatgtgcaattccatggacccaatgacagtccttat

SEQ ID NO: 139376 - DNA, 250 bp, Glycine max
ggagctgcatatccaattatggcacttttgtttatactcgatgatgaagttgtgaagctatcaccccatgcccgtgccatcagagatgtagaggatgaagaactgtggagctttttctatgggatgtccccttggcagtttatactgatggttgcagcaagttcagttggagaggagctcttctacagggctgctgttcagggggcttggctgatatatttttacgaggcagtaatcttataacagatgt

SEQ ID NO: 139377 - DNA, 252 bp, Glycine max
ctttaattggaagagcttatgtgcctgtttcggaggtcttggatggtgaggaaatagacaggtgggttgaaatattggatgaggaaaaaaacccaatacatgagggttcaaagatccatgtgaagctgcaatattttgatgtcacaaaagaccgcaactgggctcgaggcattagaagtcctaaatttcctggagttccctatacttcttctcacagaggcaaggatgtaaggtatctctgtaccaagatgc

SEQ ID NO: 139378 - DNA, 250 bp, Glycine max
ggaattgttcattcagatatgtggtcccttgatcctaaaacttgggaatggaacaaggttaagaaaagtggaatgcctcctggtcctcgtgctgggttttccatgtgtgttcataagagaagggctctgctatttggtggtgttgtggatatagaagttgaaggtgatgtaatgatgagcttgtttttgaatgagctttatggactcagttagacaccaatcgctggtatcctctggagttaagaaagga

SEQ ID NO: 139379 - DNA, 252 bp, Glycine max
gagcaattcagtgatggagttggctatagctggattgatggccttaaggcccatgctgcaaaacatgtgactgacaaaatgatgcttaatgctggtaacatctaccctcacaacaccccaacaaccaaggaagcatattactacagaatgatctttgagaggttcttccctcagaactcagcaaggctcaccgttcctggaggagcagtgttgcatgtagcacagccaaagctgttgagtgggatgctgctt

SEQ ID NO: 139380 - DNA, 255 bp, Glycine max
ctctttgacggtggtgctgtcagcattgacctcagcttgagcagtaaaacatcatcagcactactacggtaccatggctgtgctgcaatctttcgtttcggtccacccagattctcacttccccatacagaacctcccttacggagtcttcaagccccaatccgcttcgcctcctcgtcccggcgtcgccatcggcgacttcgtcctcgacctctccgaaatatcttccgctggtctcttcgacggtcctctcct

SEQ ID NO: 139381 - DNA, 252 bp, Glycine max
ccaatctaaatccgaacccgaaccaaccatgttcggaccagcccaattcacttccgaacctccgaaatccactctcaaattcctctgtagctacggcggcaaaatcctccctcgctaccccgacggcaagctccgctacctcggcggccacacccgcatcctcgccgtcgatcgctccattccattctccgagctattgctgaaactggggagctctgcggcgcctccgtgaggcacctccgctgccaatta

SEQ ID NO: 139382 - DNA, 255 bp, Glycine max
gtcaggattgcacttgctgaaaagggtatcgaatatgagtacaaagaagaggacttgaggaacaagagtcctcttctcttacaaatgaacccggttcacaagaagattccggttctcatccacaatggcaaacccatttccgaatccctcattgctgttcagtacattgaggaggtttggaatgacagaaatcccttgttgccttcagaccttaccagagagctcaggctagattctgggctgattatgttgaca

SEQ ID NO: 139383 - DNA, 253 bp, Glycine max
gatatatagaagagccttccatatatagcctcccaaaaaaatgaagagtactacctctttggctctctttctactttgtgccctaacttcatcatatcagccttcagccaccgctgatattgtattcgacaccgaaggcaatcctattcgaaacggcggcacatactatgtgttgccagttataagaggaaagggcggcggaatagaatttgccaaaaccgaaacagaaacatgccctctcactgttgtgcaa

SEQ ID NO: 139384 - DNA, 258 bp, Glycine max
ctgtgctctgctctcatctcattcatattcatttcaatggcaactcaaggtcaagtcattacctgcaaagctgcggtggcctgggaacccaacaagcccttaaccgtccaagacgttcaggttgctccgcctcaggccggcgaggtccgtgtccaaatcctcttcaccgctctctgccacaccgatgcttacacttggggcggcaaggatcccgaaggtctcttcccctgtattctcggccacgaagctgcagggatt

SEQ ID NO: 139385 - DNA, 249 bp, Glycine max
gccccctccgcccagcctccgcctcagcagcagcccgccagcgccgacgaggtccgacccctctggatcggggatctgcagtactggatggacgagaactatctctatacctgctttgctcacaccggcgaggttacatcggttaaagtaattcgaaacaagcaactagtcaatctgaaggttatgggtttattgagtttaatatcgtgctggagctgagagaattcttcaaacatataatggggcaat

SEQ ID NO: 139386 - DNA, 253 bp, Glycine max
atctttcttgccatggaagatctacttgagaggaggacttggtgttggtgcctttcagaggatttatggtgggagcaagaggaatggtagtcgccctcctcatttttgcaagagcagtggtgccattgctcgtcacattcttcaacagttgcagaacatgaacatcattgaactggacaccaagggtggcaggaaaatcacttccagtggccgacgggatcttgaccaagtggctggacgcattgtggttgca

SEQ ID NO: 139387 - DNA, 252 bp, Glycine max
cagtttcttattcgttagatctcatcttacactcaccgtcaagttcgtctcgcgccaccgtcgacgcagttccggccactgcctttggttccctcactttctgtctcttcttcttcttctcagaaatatgccttctcagaaggttgaaacgggtcatcaagacacagtccatgatgttgcgatggattattatggtaagaggctggcacggcttcatcagatcacacgattaagataattggggtgagcaac

SEQ ID NO: 139388 - DNA, 252 bp, Glycine max
gtttgatcctggctcagaaggaacgctagctatatgcttaacacatgcaagtcgaacgttgttttcggggagctgggcagaaggaaaagaggctcctagcgtgaaggttgcttgtctcgcccaggaggtgggaacagttgaaaacaaagtggcgaacgggtgcgtaatgcgtgggaatctgccgaacagttcgggccaaatcctgagaaagctaaaaagcgctgtttgatgagcctgcgtagtattaggtag

SEQ ID NO: 139389 - DNA, 250 bp, Glycine max
ggttaaagctgacagagatgaatcatctccatatgctgctatgcttgctgcgcaggatgttgctgctagatgcaaggaactgggcataactgctcttcatatcaagctccgtgccacaggtggaaacaagacaaaaacaccaggtcctggtgctcaatcagctcttcgagcccttgacagttcaggaatgaaaattggtcgcatagagatgtgacccccattccttccgatagcacacggagaaagagtg

SEQ ID NO: 139390 - DNA, 250 bp, Glycine max
caaggacttccattgtcaccccatcaatgctcgactgtagtcctgatgaagcacttgtggtgaactttgcattccagcttcatcacatgcccgacgagagtgtttcaacagcaaacgaacgggaccaacttcttcgcttggtgaagagcttgaatccaaagcttgtgacagtggtggagcaagatgtgaacacaaacaccacccgttcttacctagatttgttgaggcctacaattattactctgctgtg

SEQ ID NO: 139391 - DNA, 253 bp, Glycine max
gtaagcactatagtaaaaaaaggacattcattcatctatggctacccttattgctcccagcaaccactctccccaagaagatgctgaagctctcagaaaggcttttgaaggatggggaactgatgagaacactgtcatagtaattttgggtcatagaactgtgtatcagaggcagcaaatcagaagagtttatgaggaaatttaccagaggatcttgtgaagcgcctagagtctgagatcaaaggagactttg

SEQ ID NO: 139392 - DNA, 254 bp, Glycine max
cagcttcagcagcagcggcaagcaactccatccgcaatgggaatcgatttgaaggcaggaggtaagtccaagaagaccaaacgtacagcccccaaatccaatgatatttacctcaagctcctcgtcaagctgtaccgttttcttgttcggaggactggtagtaacttcaatgccgtcatcctcaaacgccttttcatgagcaaggtcaacaagcccccgctatccctctctagattgattcgttacaccaaggg

SEQ ID NO: 139393 - DNA, 255 bp, Glycine max
aaaaccctaacaacacaggcgcagacgcaaacgcaaacgcaaacgcaaacgcaaacgcagagcgtgatccattgacgaagatggtgcagcgtctcacctaccgcaagcggcacagctatgccaccaagtccaaccaacacagggtcgtcaaaacccctggtgggaagctcgtttatcagactaccaagaagagggccagcggacccaatgccccgtcactggcaagaggattcaggggattccacacttgaggcc

SEQ ID NO: 139394 - DNA, 253 bp, Glycine max
ctcattaattgcaagaatggcacttcgttgcttggtgatgtccctttctgttctcttcactcttggtcttgcgagagaaagccatgccagagacgaagatttttggcatgctgtttggccaaacactcccattccaagttcattgcgagatcttctaaagcctggccctgcaagtgttgaaatcgatgatcaccctatgcaaattgaagaacacagtacccgaaaaccttcttctataaagaagaccttcatc

SEQ ID NO: 139395 - DNA, 246 bp, Glycine max
gtcgctccgcaccagtttcaccgcacgaatatcttgttgtttggagcgatccgagaaaaactctgtaaacatgttggtttaccaggacctccttacaggtgatgagcttctctctgactccttccgttacaaggaaattgagaatggaatgctgtgggaagttgaggggaagtgggttgttaaaggagcagttgatgtagacattggtgcaaacccttctgctgagggtggaggagaagatgaggg

SEQ ID NO: 139396 - DNA, 249 bp, Glycine max
cagagtttgtgtaaccaacttcacctttccttccttccttccttcttccgatttcgaagatggctgaagcagaggatgccgtacgacgccgtaatgcggtcgccgagtatcgaaagaaacttctccagcacaaggaattggaatccagagtccgatccgtcagggagaatttgcgagcttcaaagaaagagttcaataaaacagagatgatttgaagtctcttcaaagtgttgggcagatcattggcga

SEQ ID NO: 139397 - DNA, 250 bp, Glycine max
atccatttcaaataattctgatgatgaggtacaccaatactggcgatgtcagctccctgatgatatcacccctgatttcaaggtcatgggagaagatgagtctcgagttcttgatgatctttctttagcaggcttatccatacatgatgacaatgaagcctccaggtttccttcctctaaaggaagtaaatatattataaatgagcaggaggaaatatctcaacagcatgttaatggcaatagcttggca

SEQ ID NO: 139398 - DNA, 247 bp, Glycine max
tttgagcttaaaccctagccgctcttctcttcattcttcactttggaaacaatcataatggcgttctgtaataaggttggaaatgtcttgaggcagggtgctgctcgcagcacacatgcccctgttgcgtccatgcttaattacatccgctgcatgtcttcaacaagcttttcattggaggcctttcatatggagttgatgacagtctcttaaggatgcattttctggctttggagatgtggttgat

SEQ ID NO: 139399 - DNA, 247 bp, Glycine max
ctggtttcgagggtgacaacatgattgagaggtccaccaaccttgactggtacaagggaccaactctccttgaggctcttgaccaaatcaatgagcccaagaggccctcagacaagccactcaggcttccattgcaggatgtctacaaaattggtggtattggtaccgtgccagtgggacgtgttgagactggtgtcgtgagcccggtatggtggtgacttttggtcccactgggctgacaactgag

SEQ ID NO: 139400 - DNA, 250 bp, Glycine max
cggctcgagctttctggctgtgttaatatgcgtttcagcactgtcactgagtccttctgttgcgggggaagggcaaaataatggccttgttatgaacttctacaaggaatcatgccctcaggctgaagacatcatcacagaacaagtcaagcttctctacaagcgccacaagaacactgctttctcctggctcaggaacatctccatgactgtgctgttcagagttgtgatgcttcactgttgctggact

SEQ ID NO: 139401 - DNA, 252 bp, Glycine max
cagtcctgcttctgacaggagttggtttcttttctcttatattgtttgggggcccgcttgcacccggtcttgcgagtattggaatgactccacttctagcagctgtatatgtgggtgccttgcagaacatatttagcaagagtgccaagtacagcttatttgatcctgcaaagaaatggcctatattccattggatgaggataccaggttaaagggaaggcagccattgatgttgtgtgcaacccattgggg

SEQ ID NO: 139402 - DNA, 241 bp, Glycine max
gggctaagtctaagtgtagtaccgttgggattcaaggaatcgcttgggccttcggtggcatgatcttcgccctcgtttactgcaccgcttgcatctcagggggacacataaacccggcggtgacatttgggctgtttttggcgaggaagttgtcgttgccagggcgattttctacatcgtgatgcaatgcttgggtgtatttgtggcgctggcgtggtgaagggtttcgaggggaaaacaa

SEQ ID NO: 139403 - DNA, 241 bp, Glycine max
cacgggcaggcaagagacaacctggtgaactgaaacatcttagtagccagaggaaaagaaagcaaaagcgattcccgtagtagcggcgacgaaatgggagcagcctaaaccgtgaaaacggggttgtgggagagctatacaagtgtcgtgctgctaggcgagcagcagagaatgctgcaccctagatggcgagagtcagtagccgaaagcatcactagcttacgctctgacccgagtagca

SEQ ID NO: 139404 - DNA, 247 bp, Glycine max
ggtatctgaactctccacctccaaggtgatggtctttcccgtcaaagtcttgacgaaaatctgcatgccatagacaatgtgaaagccaagattcaagataaggagggtatccccccagaccagcagaggcttatctttgctggtaaacagcttgaagatggacgaacccttgcagattataacatccagaaggaatctacctgcacttggttttgaggcttcgtggtggcatgcaaatctttgttaa

SEQ ID NO: 139405 - DNA, 247 bp, Glycine max
gttggctttctctcgcgttttccaattccccccaaatctcacgcctagggtttctatcgcaaaccctccctccctccaaccaggtcgcgtgcaaagggatttcgaagcttcggaagaaaaaaatgaaacctgttttctgtggaaacctggatttcgacgcgcgtcaatctgacgtggagaggctcttcagaagatacggcaagttgatagagttgacatgaaatccgggtttgcttttgtctacatg

SEQ ID NO: 139406 - DNA, 249 bp, Glycine max
gattgttgtgactcgttcttcttcgtcgttatcttcttcttttgttgtttgtgtgtttgttttttctctcacctgaaaatgtcttgctgcggtggtaactgtggttgcggaagcgcctgcaagtgcggcaacggctgcggaggctgcaagatgtacccagacttgagctacaccgagtcaaccaccaccgagaccttggtcatggagtggcaccagttaaggctcaattcgagagtgctgaaatgggtg

SEQ ID NO: 139407 - DNA, 249 bp, Glycine max
aaaagaaagaaatagaaaaagaagaaaaaaacacagcgtcctagatttcctcttctctgcttcggaagaaagagaaaacaaacaaaacaatggcgttcgcttctttcctcggcagagtcctcttcgcttctgtcttcatactctctgcttaccaacaatttaatgaatatggagttgatgggggacctgctacaaaagcactcagacctaagtttgatgcctttacacatcgggtgcattctcaagtgg

SEQ ID NO: 139408 - DNA, 247 bp, Glycine max
cggctcgagtagatatatagaagagccttccatatatagcctcccaaaaaaatgaagagtactacctctttggctctctttctactttgtgccctaacttcatcatatcagccttcagccaccgctgatattgtattcgacaccgaaggcaatcctattcgaacggcggcacatactatgtgttgccagttataagaggaaaggcggcggaatagaatttgccaaaaccgaaacagaaacatgccct

SEQ ID NO: 139409 - DNA, 248 bp, Glycine max
tggagctcttgaaaaggtcaaggatacattgaaggagttggtgatgcttcctttacagaggcctgaacttttttgcaaggggcaattaaccaagccgtgcaaaggaatcctattatttggtccccctggaactggtaaaacaatgctcgcaaaggcaatagctactgaagctggtgcaaacttcatcaacatttctatgtcgatattacctctaagtggtttggggagggtgagaaatatgtgaaagc

SEQ ID NO: 139410 - DNA, 246 bp, Glycine max
actcgagccgaatcggctcgagatagtacagaacataaagtcatataccgtgactttaaaacaccaaatatcctactcgataacaactataatgccaaactttctgattttgggttggccagagatggtcctactggtgataaaagccatgtctctactagggtcatgggaacccgtggatatgcggcaccagagtatttgcgacaggtcatctcactaccaagagtgatgtgtatagttttggag

SEQ ID NO: 139411 - DNA, 247 bp, Glycine max
aacaactctttctcttcttccttcgctcgttgttctccctcgcgtagatcgacaatggcggagacagagacgtttgctttccaggctgagatcaaccagctcctcagtctcatcatcaacaccttctactccaacaaggagattttccttcgtgaactcatcacaacgcctccgatgctttggccaagattcgatttgagagttgacagataagagcaagctcgatgctcagccagagttgttcatt

SEQ ID NO: 139412 - DNA, 236 bp, Glycine max
atggcttccttaagctccttagtgctgctccttgcagctctaattctatcccctcaagttcttgcaaactatgagaatcccccagtgtacaagcctcccactgagaaaccaccagtttataagcccccagttgagaagcctcctgtttacaaacctccagttgagaagcctccaatttataagcctccagttgagaagccaccgtgtacaagccgccagttgagaagtcaccagtg

SEQ ID NO: 139413 - DNA, 251 bp, Glycine max
tctcgagccgaatcggctcgaggcttggaggagtgggacacatgggacgtgaagatagcaaaggcactgggtcatcatgtgacacgtgataagctcttctgacaagaagaaacaagaggcacttgaacaccttggagctgatcaatatctcgttagctctgatgccctgccatgcaggaagctgctgattcacttgactacatcttgacactgtgcctgttggtcaccctcttgagccttatctctccttg

SEQ ID NO: 139414 - DNA, 259 bp, Glycine max
cttgaatcttcgttatccttcttttttttctccttgaactcgaatattcactatggcagatgaggtggttctgctagatttctggccaagtccatttgggatgagggtcaggattgcacttgctgaaaagggtatcaaatatgagtccaaagaagaggacttgcagaacaagagccctttgctcctcaaaatgaacccggttcacaagaaaatcccggttctcatccacaatggcaaacccatttgtgaatctctcgtt

SEQ ID NO: 139415 - DNA, 257 bp, Glycine max
gaaaatattggcatgctcattttgggtcgtgtgctacttggttttggggtcggtttcactaatcaagctgcaccgttgtatctctctgaaatcgcaccaccgaaatggcgaggagcattcaacacaggcttccaattcttcttaggagttggagcgcttatcgctggctgcataaacttcgcaaccgcgaaacacacgtggggatggcgagtctctcttggccttgcagtggtgcctgcatcagttatgacaattgg

SEQ ID NO: 139416 - DNA, 252 bp, Glycine max
gcttaattctctctactactgctagctgtgacttgttttgagttcaatcaaatcgcattggtatctgaaatcaggaaagatggttagcgtactgagatcaggcaggcacaaagggcagaaggcccagcaaccatccttgccattggaactgcaaacccaccaaaccgtgttgatcagagcacctatcctgattactacttcagaatcaccaacagtgaccacatgaccgagctcaaagagaaatttcagcgc

SEQ ID NO: 139417 - DNA, 245 bp, Glycine max
gaaatgaggaggagagtagcaagagtagtaaggtgactctgtctgggttgttgaattttatagatgggatttggtctgcttgtggaggtgagaggatcattgttttcacgacgaattatgtggagaaacttgaccctgctttgattaggagagggaggatggataagcacatagagatgtcttattgttgctatgatgcattcaaggtgctggccaagaactacttggatgttgagtctcatcat

SEQ ID NO: 139418 - DNA, 238 bp, Glycine max
agttgcaaccattgccagggaagaaggtctttcagcactctggaagggcattgtgccagggttacatcgtcaatgtttgtatggaggcttaagaattgggttatatgaccctgttaagactttctatgtggggaaagaccatgttggagatgttccattgtcaaagaaaattcttgctgcatttacaactggtgcttttgcaattgcagtggcaaatccaactgatcttgtcaaagtt

SEQ ID NO: 139419 - DNA, 242 bp, Glycine max
atccgttgagaatggcgttgccggtagtcgtcgatgcagagtacctcaaggaggtcgacaaggctcgccgcgatctccgcgcactcatcgctaacaggaactgcgctcctctcatgctccgattagcctggcacgatgccggaacttacgatgctaagaccaagaccggtggacctaacggttcgatccggaacgaggaagagtattctcacggagccaataatggcttgaagaaagctatt

SEQ ID NO: 139420 - DNA, 258 bp, Glycine max
aacgtctatgttgctcagcttctcaggagacaggctcagctcaatccccaaactgcccctctacttcgggcagcgctgcccgacctgccccaagaccttgtttctgagatgatgagaccccctttgaggtcttatgaccctaatctcatccaagaccccactgtctataggttgaatgaagctgttatgcattttggggagagcatcaaagaaataatcaatgaggagtttggtgatgggatcatgtcagcaatagat

SEQ ID NO: 139421 - DNA, 253 bp, Glycine max
gtgcgctgttcctctgtctgtcgtttttgttttcagaccaaaccctagctccgcatcgcaaccatgtcgaccaagcaaggtggaaaagctaagcctttgaagaaacccaagtctgataagaaggattacgacgaggttgacatggctaacattcagaagaaaaaggaagaggagaaggcgctaaaggagttgaaagccaaggcgcaacagaagggaagctttggaggttctgggctcaagaaaagtggaaaga

SEQ ID NO: 139422 - DNA, 195 bp, Glycine max
gcttccttaagctccttagtgctgctccttgcagctctaattctatcccctcaagttcttgcaaactatgagaatcccccagtgtacaagcctcccactgagaaaccaccagtactataagcccccagttgagaagcctcctgtttacaatcccccagttgaaaatcctccaatctataagcctccagtagagaa

SEQ ID NO: 139423 - DNA, 245 bp, Glycine max
ggttaaaattcctgaaccgggacgtggcggctgacggcaacgttagggagtccggagacgtcggcgggggccccggaaagagttatcttttctgtttaacagcctgcccaccctggaaacggctcagccggaggtagggtccagcggctggaagagcaccgcacgtcgcgtggtgtccggttcgcccccggcggcccttgataatccggaggaccgagtgcctcccacgcccggtcgtactcata

SEQ ID NO: 139424 - DNA, 244 bp, Glycine max
cgaaggcgaagattgtggatatttgtgagaaaggggattcatacattagagagtaagcttataatattcataaatgaaggagcattgcctgttcttaacatatattgatatggcatgccatatagatggattcatcactgcggtagctcacacccatgttcttcaggaaggtcctgttgctgccacaaatactgctgctgaggtggccttgaggcttgtcaggccgggaaagaaggtaatcaat

SEQ ID NO: 139425 - DNA, 241 bp, Glycine max
cattttcaccaagggtgacctgaaggaggtcagtgaggaggttgctaagtacaaggttggagctcctgctcgtgttggtttggttgctccaattgatgtcgttgttcctcctggcaacacagggctcgatccctctcagacctctttcttccaggtgcttaacattcctaccaagattaacaagggtactgtggaaatcattacacctgtggaactcattaggaagggagacaacgttgga

SEQ ID NO: 139426 - DNA, 250 bp, Glycine max
ctcacgcagtcgcagtgagtgaaaaggaaaaccctaattgcggtattctcagtgccttcgagagaaagaaaaaatggcagataatcttgttctccgtggcaccatgcgcgcccacaccgacgttgtgacggcgattgccactcccatcgacaactccgacatgatcgtcaccgcctcacgcgacaaatccatcatcctctggcatcttaccaaggaggacaagacttacggtgtcccccgccgccgcctc

SEQ ID NO: 139427 - DNA, 251 bp, Glycine max
actggttagttgggagaaggaaaatgtttcaagtgaggccctggaagctgctcgcattgcttgcaacaagtacatggccaaatttgctggaaaggatgctttccacttgagagtcagggtgcacccattccatgttcttaggatcaacaagatgctttcgtgtgctggtgctgataggctccaaactggaatgagaggtgcttttggaaagccacagggtacttgtgctagagtggctattggacaggtcc

SEQ ID NO: 139428 - DNA, 245 bp, Glycine max
cttgtccatctatcccacaactaatttttgattttccttgtttaacttatcttcttcctcccttgtttgtttgtttctttgtttctttggcttgacaagaagaagatgatgatgatgacaatggaggggatgatggacaagggggtgttggatgatgtgataagaaggcttctggaagggaaaggagggaaacaggtgcagctctctgagtccgagatccgtcaactctgcgtcaacgccagaca

SEQ ID NO: 139429 - DNA, 118 bp, Glycine max
caaaaatttagtttaatttacaaattatggcaagggttacacctggctagcttccgcgtttagatcatttgtttatagtgctatggccacgacaagagtgttatgggtgcatgaatgt

SEQ ID NO: 139430 - DNA, 238 bp, Glycine max
tgctgtgggagtcatcaagaacgttgagaagaaggatcctaccggagccaaggtcaccaaggctgcccagaagaaaaagtcaccacttggttggttacaataaatgttggtttcttttctgtactcttgtgtcttcttttctaggtagcttgtttttcggacaaagtttgaagtctccaccatcatctcgcaactgttgttcccagaactgggttcttgatcgacggtggcaaaattg

SEQ ID NO: 139431 - DNA, 238 bp, Glycine max
caactttgcaactttgagcagaaaatctcacagtcgaaggaagaaataatcgccaatggcaattgaacacgaagacgatctcaaagacgagaagaaccctcgacccctcgacgaggatgacatcgccctcctcaaaacctacggtttgggaccttattccacaagcataagaaacccggagaaggaaatcaaagatatggccaagaaagtgaatgacttatgtggtatcaaggagtct

SEQ ID NO: 139432 - DNA, 256 bp, Glycine max
aaagcatataagagatggggttagaagggaaggaaacgccgtcgtttatgagggattttctcgataagtgtggtggctgcgccgttattgacggtggttttgccactgaacttgaaaggcatggggcggacctcaatgacgaactctggagtgccaaatgccttattagctccccacatcttgtccgaagggttcacctagattacctcgatgcaggagcaaacataatattagcagcatcttatcaggccactat

SEQ ID NO: 139433 - DNA, 250 bp, Glycine max
gtcagattggcaacgctcaacccaacttcttgtctcagctttctcaggataactggccttctgttctgtttgccatggggggtggagtggtccttagtgttggaaatttgtcaacacaatatgcttgggcttttgttggtttatcagttgtagaagtgatcacatcaagcataactgttgttataggaacaacattgaattactttttggatgacaagatcaacaaagccgagatttttcccaggagttg

SEQ ID NO: 139434 - DNA, 249 bp, Glycine max
catgaacaaggtccgcgacgagtttgtcaacaacggtggtcccggcgacgaagttctcaaggagcttcaatctatatgggaatcgaagatgatgcaagctggtgccattgttggtcccatagaaaggtccggggcgcctaagccaacgcccggtggtccaattactccggttcatgatcttaacatgccttatgaggggactgaggagtatgaaactcccacagcggaaatgcttttcccccctacgcc

SEQ ID NO: 139435 - DNA, 243 bp, Glycine max
ccaaaaggaagttgatttccaaggaggacgtcgaggacgttaggagggaaattcagataatgcatcatttagctggtcacaagaacattgtcaccatcaagggtgcttatgaggatcctctctatgttcatattgtcatggagctttgttccgggggtgagttgtttgatcgcatcatccagaggggccactataccgagaggaaggccgcggagttgaccaaaattattgttggggttgttg

SEQ ID NO: 139436 - DNA, 240 bp, Glycine max
gatttcctcttctctgcttcggaagaaagagaaaacaaacaaaacaatggcgttcgcttctttcctcggcagagtcctcttcgcttctgtcttcatactctctgcttaccaacaatttaatgaatatggagttgatgggggacctgctacaaaagcactcagacctaagtttgatgcctttacacatcgggtgcattctcaagtgggctttcaaattccagagattaatctgaaattttt

SEQ ID NO: 139437 - DNA, 243 bp, Glycine max
gcaaaggattctacccgccgctcgatgggaattgcgcttcaaggcgtctcgtagggctaatccgcctcacgagggtcaccaacggcacgtgcctttggggggccgaggccccctactgctggtcggcaaacggacggcgggcgcacgcgtcgcttctagcccggattctgacttagaggcgttcagtcataatccaacgcacggtagcttcgcgccactggcttttcaaccaagcgcgatgac

SEQ ID NO: 139438 - DNA, 236 bp, Glycine max
cgagctcaaagagctagtgaatgccgaatggctgcattttatgctggttttcccgaaactgtgcctgttaggaccgttaataggcaatgttcatctgggctccaggctgtcgctgatgtagctgctgctataagggctgggttctatgacattggtattggtgccggtttggaatctatgaccactaatccaatgggatgggatggatcagtgaatcctaaggtaaaaatgtttga

SEQ ID NO: 139439 - DNA, 246 bp, Glycine max
attctctctcagtgctctcgatctccatctgcaacttccttgtctgacagatcctgtgttccggagaaaggaaaggaaaggaaagatgtcggggcaaacgcagcgtctgaacgtggtccccaccgtgacgatgctgggagtggtgaaggcccgattggtcggcgccacgcgcggccacgacctcctgaagaagaagagcgacgcgctcacggtgcagttccgccagatcctgaagaagatcgtctc

SEQ ID NO: 139440 - DNA, 242 bp, Glycine max
acccgattcgatcaagacatttggtgaagcattggataagacccagaccgtcatttggaatggaccaatgggtgtttttgagtttgataagtttgccacaggaacagaggccatagccaagaaactggcagagctgagtgggaagggagtaacgaccatcattggaggaggtgactctgttgccgctgtggagaaggttggtcttgcagacaagatgagccacatctccactggtggtggtg

SEQ ID NO: 139441 - DNA, 239 bp, Glycine max
cgcagagtagagcagctcagaagagggaaaacggcacgccgccgtagaagaaaacaaccatggtgcacgtctccttttacaggaactatgggaagacattcaagaagccgcgtcgtccgtacgagaaggagcgtctcgacgcggagctgaagctggttggtgagtacgggcttcggtgcaagagagagctgtggagggtgcagtacgcgctcagccgcatccgcaacaacgcgcggaac

SEQ ID NO: 139442 - DNA, 241 bp, Glycine max
gtaaaatactactctcttataaaggcattgttgacgtccatttgctgtaacttccacttgttggtgacagctaaagttagtaggatccttacagttactggtttaataactggagaaaaagtctcattgtagtcttttcccagttgttgataaaagcctttggctacaagcttcaccttgtacttagtaatagagccatctggattctcttttactcgaaacacccacttgcaactgatga

SEQ ID NO: 139443 - DNA, 237 bp, Glycine max
attctagttcgtgttcttcgtcgcaaatccgaagtaggatctctcttgttttttctctaggtttttcgcgatggcgtcgaagcgaattttgaaggagcttaaggatttgcagaaggatcctccaacatcttgcagtgccggtcctgttcatgaagatatgtttcattggcaagctacaattatgggtcctccagacagtccctatgctggaggtgttttcctagtgactattcattt

SEQ ID NO: 139444 - DNA, 237 bp, Glycine max
ccctcataaaaaaaacctaccaatggctcccgcaaaggcagagaagaagcccgcggagaagaagccggcagagaaggccccagcggagaagaagccgaagggtacgaagaagatatcgaaggaaggaggaagcgagaagaagaagaagagaacaaagaagagcgttgagacctacaagatctacatcttcaaggtgttgaagcaagtgcaccccgacatcgggatctccagcaaggc

SEQ ID NO: 139445 - DNA, 250 bp, Glycine max
cgcttccctgtttcatagcagaatgtggctacaagatatggtggtacgtctcgggagcatcacaaataccacattatggtaatatatacgtgagcagcatcattctgtgcacattggacctatgttcttggctgtatagaacctccattttcttcctggtgtgtgttctctttcgacttatctgctacttgcaaatacttagactagatgagtttgctcgagtttttcagcgagaaactgaggtggggtc

SEQ ID NO: 139446 - DNA, 243 bp, Glycine max
ctctgcctaaaaggattgaaagatgggtcaagcattcggttgctaccaagtcgatcagtcaaatgtggctatcaaggagcattttggaaaatttgatgatgtcctagagcctggatgtcactgcctgccttggtgtcttgggtaccagattgctggtagtctgtcgctgcgagtgcagcaacttgatgttcgatgtgagacgaaaaccaaggacaatgtctttgtcaatgtggttgcatctgt

SEQ ID NO: 139447 - DNA, 240 bp, Glycine max
ctctctcaacaacttcaccttcttcctcctcgatcatgtctcacttcaagggcaagtaccatgatgagcttatcgccaatgctgcgtacattggcactcctggaaagggtattcttgctgctgatgagtcaacagggacaattggcaagcgtttggccagcatcagtgtagagaatattgaatccaacaggcgagctcttagggagctgcttttcactgctcctggtcttcttcaatatc

SEQ ID NO: 139448 - DNA, 241 bp, Glycine max
ctaaaaagcacttcttagttctccctctcccactaaaaaccatagtactctagataataattaacatcaaccctcactccttcgcacaccaaacccttccttcctatctctcactaatctaatggaatccgcagcactgtcgcgcataggcctggcgggcctggcggtgatgggccaaaacctagccctagacatcgcagaaaaggggttcccgatctccgtgtacaaccgcacggcctct

SEQ ID NO: 139449 - DNA, 240 bp, Glycine max
ctttcacttcaaaacttgtttaccctttgttctctcctcttccagacaccaacatggcctcaatgaccatgatatacaccttactctttccttccttcactttggcatatgctattaaggcctccaccatcatcaactacaccgacaatgaagtcatggccatgtacgaggagtggttggtgaagcaccaaaaggtgtacaatgagttgggaaagaaggacaagagattccaagttttca

SEQ ID NO: 139450 - DNA, 234 bp, Glycine max
cttatcttccctcaaccacttctcagtgtcccgaaaatcttctcaccttcagaccagagcttcttcagaggaatcatcctcagtagatgccaatgaggtgttcacagatttgaaggaaaagtgggatgctcttgaaaacaagtccacagtacttttttatggtggtggggctttagttgctgtgtggctatcgtcgattcttgtgagcgccatcaactctgttcccttgcttcc

SEQ ID NO: 139451 - DNA, 237 bp, Glycine max
aaaaaagacaaagaagatcaaggaagtgtcacatgaatggtccttggtgaacaagcagaagcccatttggatgaggaagcctgaggagatcacaaaagaggagtattctgctttctacaagagtcttaccaatgactgggaagagcatttggctgtcaagcacttctctgttgagggtcagttggagtttaaggctatactctttgttcccaagagggcaccttttgacctctttga

SEQ ID NO: 139452 - DNA, 175 bp, Glycine max
caaaccttgctctatactacacagtacacacactagaagaataatggcttccatcctccactactttttagccctctctctttcttgctcttttcttttcttcttatccgactcagtcacccctacaaaaccaataaaccttgttgttctacccgttcaaaatgatggttccaca

SEQ ID NO: 139453 - DNA, 264 bp, Glycine max
gcgaaacgctcttcgttatcttttctcagactccgcggcgtagatccgaggagttcgggaaatcctaactcatcatctcaactcaagtcatggctggacttgcacctgagggatcacagttcgatgctcgtcaatatgattctaaaatgagtgacttactttcatctgatggacaggacttcttcacatcctatgacgaggtttatgatagttttgacgctatgggtttgcaggaaaatcttctcaggggaatttacgcatatg

SEQ ID NO: 139454 - DNA, 264 bp, Glycine max
gtcactggatggactgccaccccaatgcaggatgttcaggttacaattgattggtttatttcctctcaggaatgtgttcccaggacctattgtgttttaaatccacaaaatccttttgtgttaaataggtggatggggaaactgactttcccccagggcacttcccgaagtgttaaaagaatgcctctttctatagggggaggagctggtgcaaagaatgctattctcatgaatatgccaaatgctgttctttcaatgtggaga

SEQ ID NO: 139455 - DNA, 265 bp, Glycine max
aacgcacgcaggaggaggagattgatcgagagaagagaagatgactacacgcttcaagaagaacaggaagaagagaggccacgtgagtgccggccatggccgcatcgggaagcaccggaagcaccctggaggacgcggtaatgccggaggcatgcaccaccaccggatcctctttgacaagtaccaccctgggttcttcggcaaggtcggaatgcgctattttcacaagctccgcaacaaattctactctccgatcctcaacatc

SEQ ID NO: 139456 - DNA, 110 bp, Glycine max
ttcggctcgagtgcagagcgaggtagctagctaggaagcaagcacagagatggaggcaaagagaggccatgccctcatgtgcttggcacgtgttacgatcttcctctgcg

SEQ ID NO: 139457 - DNA, 265 bp, Glycine max
tgatgattggaagagggtttctcagcatgttcctggcagaactgagaaggagtgtgttgctcattttctgaagcttccttttgcgaatcaattccagcattatcaacaacaccctgctgtcaatggcacagatgacggttgtaatctgttaaagatggtaactaatgctgatgctgaatctgaattggatactgttgcctctgctgaacccagtaagagaatgcgtctcacgcctcttgcagatgcaagcaatcccattatggct

SEQ ID NO: 139458 - DNA, 263 bp, Glycine max
ggccggtattcaggtcggaaacgcctgctgggagctctactgcctcgaacacggcattcagcctgatgggcagatgccaagtgataagactgttggtggaggtgatgatgctttcaacaccttcttcagtgaaactggggctggaaagcacgtgcctcgtgcgatttttgtagatctcgagcctactgtgattgatgaagttaggactgggacataccgccaactatttcatcctgagcagctcattagcggaaaggaggatg

SEQ ID NO: 139459 - DNA, 267 bp, Glycine max
tcttgctctatactacacagtacacacactagaagaataatggcttccatcctccactactttttagccctctctctttcttgctcttttcttttcttcttatccgactcagtcacccctacaaaaccaataaaccttgttgttctacccgttcaaaatgatggttccacagggctccattgtcccaacctccaaaaaagaacccctctaatgcaagtaccagtcctggtggacctcaatggaaatcacttgtgagttaactgtgag

SEQ ID NO: 139460 - DNA, 258 bp, Glycine max
cgacggcgttggccttctcggcatcgcatgggccttcggtggcatgatcttcgtcctcgtctactgcaccgccggcatttctggtggacacatcaaccctgcggtgacttttggcctgttcctggcccgcaaggtgtctctcattcgcgccgtgttctacatggtagcacagtgtcttggtgccatctgcggtgttgggttggtgaaggccttcatgaagcactcctacaactccctcggcggcggtgctaactccgt

SEQ ID NO: 139461 - DNA, 253 bp, Glycine max
gttcttccacccccgtaccgtctctgcctctctgcaatccacagccgaaaatgcctttcaagaggtacgttgagatcgggagggttgctcaaatcaactacggcaaggaatatggcaggctcgtcgtcatcgtcgacgtcattgaccagaacagagcacttgtcgatgcccctgatatggtgaggtcccaagtcaatttcaaaaggctttcccttaccgacatcaagattgacatcaagagggtccctaagaa

SEQ ID NO: 139462 - DNA, 259 bp, Glycine max
  unsure (1)..(259): unsure at all n locations
attttctgaacgatanttcccccacagaatatcacaggcagcgaagatgagtcaggagcagccacggcgcccccaatgccaagaccccatcaaatacggcgacgtttttgacgtctacggtgaccttgcacagatgcccattgcaccggaagatgctgccatgatgcaaagcgcggaagctcgagtactcggaaaaacccaacccggcggagcttcttccgtcatgcaatccgccgccacaaggaatcgtcaggctggt

SEQ ID NO: 139463 - DNA, 173 bp, Glycine max
  unsure (1)..(173): unsure at all n locations
ttcaaaccttgctctatactacacagtacactnactacaagcatcctggtctccatcctccactactttttagccctctctctttcttgctcttttctattcttcttatccgactctttcacccctacaaaaccaatacaccttgttgttctacccgttcaaaatgatggttc

SEQ ID NO: 139464 - DNA, 263 bp, Glycine max
ggcaacccggttcatgccactagtgtcacttatgtagccactaaaagtgttggtggctacaatgatgacactaataagcaacatgataccaccggtgtctatcctgagaaagataccggtaggcatcattttggtcgtggttacgatagtgacactaataagcaacaacatgatgctattggtgtttatcccggaatagacattggtagagatcatgagactaccggtgtttatggcctaaacaccgatagacatcatggaac

SEQ ID NO: 139465 - DNA, 262 bp, Glycine max
ccaccccgcgcgctaccgcactcagccttgcaaggatggcaccagttgtcgccgccgcgtgtgtttcttccgcgcacacgccggatcaacttagggttttgccacagcagagtccgcgcagtgctgattcctacgacgggtctcctttgaggcacgcgattgagtcgtcgtgtgcaaagttcgcatccgtttgtggctctcccggttcggcctctcgccggtggagtctccgccgatgtcgccgatgatgtgagtgttaaga

SEQ ID NO: 139466 - DNA, 265 bp, Glycine max
ataagggtcttcctagaaacactcaaggtgtggctgggttaggccatgcaccaatttctcttccaaaccaactcgcataccactttggcctacaacgccaattcaccacttgcctttctcgctactctacttcaaagggtgctataatattcggggatgcacctaacaacatgcgacagtttcaaaaccaagatattttccacgatttggccttcaccccattaaccatcaccctgcagggagagtacaacgtgagagtcaactc

SEQ ID NO: 139467 - DNA, 253 bp, Glycine max
cagaaacctggcggcacccctgtttttctctttttctcagttaataccagtgggcaatttgtggggcttgctgagatgattggtcctgttgattttaacaagagtgttgagtattggcagcaagacaagtggaatggttgctttcctcttaagtggcacattgttaaggatgttcctaacaatttgttgaggcacattacttggacaacaatgagaacaacctgtcactaacagtagggatacacagaggtta

SEQ ID NO: 139468 - DNA, 254 bp, Glycine max
gggaaggtgtaccatagccacgatggtctggcgccgcattctcacgaacccatttactcccccggctcattcaccagaagagctccaccgcttctcaacagaaacttcaacgaaagagccttcaccgtcggaatcggtggacccgtcggtactggcaaaacagctctcatgttggccctttgtgaactcttgcgcgaaaactacagtctcgcagctgtgacaaatgatatattcactaaagaggatggtgagtt

SEQ ID NO: 139469 - DNA, 240 bp, Glycine max
ggagacaccagaagcacacgtgttcaaggctgatattccagggctgaagaaggaggaagtgaagctggagattcaagatgacagagttcttcagataagcggagagaggaatgttgaaaaagaagacaagaatgatacgtggcatcgcgtggagcgaagcagtggtaagttcatgaggaggtttagattgccggagaatgctaaagtggatcaagttaaggcttccatggaaatggggtt

SEQ ID NO: 139470 - DNA, 259 bp, Glycine max
gacttggagtggtacttcttcagcgcgctggatcgcaagtacggaaacggctccaggaccaaccgcgccaccgagaggggttactggaagaccaccgggaaagaccgtcccgtcacccacggcgaccgcaccgttggaatgaagaagacgcttgtttaccacagcggccgtgccccacagggccgtcgcaccaactgggtcatgcacgagtataagatgctcgacgatgaattggcacgttccggcacagtgctggatg

SEQ ID NO: 139471 - DNA, 260 bp, Glycine max
gcgagtgcaaagacccttggagaatgggctggtttgtgcaagattgattccgaaggaaaagcaaggaagattactggttgctcctgtgtggttgtgaaggatttcggtgaggagcatgaagcctataacgtcgttctgcagcatgtgaaatctcaatgagttgcaagattcatagattttatgcacttcacattttcattttgggttattccttgagaatgaattttgccttgtggctggattatatctacctgggtttt

SEQ ID NO: 139472 - DNA, 258 bp, Glycine max
gagaaaagtagtgtattaagactacaaattttcaatttttcaatggcgtcgaggcaacaaaaagaggatcgagctgaggcagctgcgaaagttgctgcgaaagaactcgaacaactcaaccgagaaaaagaccgtgatttcagtgttggtgttgcagaccaacaccaacaagaagaacatcagttagatcaacaaaagcgtggtgtaatcggatccatgttcaaggcggtgcaagacacctacgagaacgccaagaag

SEQ ID NO: 139473 - DNA, 263 bp, Glycine max
gtaaagctaacttcaacacctttaattttctaaaagtaattcaacggctgaataccaagcggagaagatgagtcaggagcagccacggcgtcccaaaggccaaaaccccatcaaatacggcgacgtttttgtcgtctccggcgaccttgcacagaagcccgtcgcaccggaagatgctgccatgatgcaaagcgcggaagctcgagtgctcggacaaacccaacccggcggagcagcttccgtcatgcaatctgccgccacca

SEQ ID NO: 139474 - DNA, 257 bp, Glycine max
tgacgccaagatagacaagactcaggttcatgaggttgtgcttgttggaggttccactaggatccccaaggttcagcaactcttgcaggatttcttcaacgggaaagagctttgcaagcgtattaaccccgatgaagctgtggcgtacggtgctgctgttcaggccgcgatcttgagcggcgaaggagacgagaaggttcaggatttattgctgctggatgttacaccactcagtctcggtctatgaaactgctggt

SEQ ID NO: 139475 - DNA, 255 bp, Glycine max
cccagacaagattccctttgttcccatctctggttttgagggtgacaacatgattgagaggtccaccaaccttgactggtacaagggaccaactctccttgaggctcttgaccaaatcaatgagcccaagaggccctccgacaagcctctaaggcttccattgcaggatgtctacaagattggtggtattggtactgtgccagtgggacgtgtagagactggggttgtgaagcctggtatggtggtgacttttgg

SEQ ID NO: 139476 - DNA, 260 bp, Glycine max
ggataactcaccaccctcaaaactattgatgaaggagaaagtagcaagctgcagaagacgttgtcgatgccgtcgacaccaacaaccccgatgactccgacgactccaacgacaccgggatcggcccgtaaagctgacaacgtttggaggagcgtcttccatcctgggagcaactccgccacaaagaccatcggtgctcagatgtttgacaaaccacttcccaacactcccactgtctatgactggctgtgcagtgggga

SEQ ID NO: 139477 - DNA, 248 bp, Glycine max
gtcaccgtcttctctgccgccatgaagctcgtcaggtttctgatgaagctgaacaacgaaaccgtatcaatcgagctcaagaacggcacagttgttcacggcaccattacaggtgttgatatcagtatgaatacacatttgaaaacagttaaactaactctgaaagggaaaaacccagttactttggatcatctcagtgtgagaggcaacaacttcgatattatatcctcctgacagctgaatctgag

SEQ ID NO: 139478 - DNA, 257 bp, Glycine max
gtacaattacaggaaagactgaggcccttgtggacctaacagtgatagagatattgtcaaggcatgcttctgatgaggtctaccttggacagagggacaatccaaattggactgatgacacaaaggcaattcaagcctttaagaagtttggaaacaagctgaaggaaattgaggacaaaatctcagggaggaacaagaattcaagccttaggaaccgtaatggaccggcgcagatgccctacatgtgcttcttccta

SEQ ID NO: 139479 - DNA, 214 bp, Glycine max
tcggcattcggctcgccggttccatgtgaacggcaattccacatgggttagtcgatcctaagggacgggggacgccagtctgctaacgctctgtgcgcgtactccgcacgggaatcgggttaaaattcctgaaccgggacgtggcggctgacggcaacgtcagggagtccggagacgtcggcgggggcccacgaaagagctctcttttctgctt

SEQ ID NO: 139480 - DNA, 249 bp, Glycine max
gggctccgcgattcaggcggcggaggtgagagcaacgggaagtaacgttataacgccgggtggacttgcggctatggctcaatcagctgctgcttataatgctgactgcaagcttgaccaggacaaggtcaagctcgccgacgttttggccggagccaccgccaagttgcccgcggacaaggccgccacactgcaagatgctgaaggtgtagcgtgtgctgaggtgaggaacaaccctgatgccacgcc

SEQ ID NO: 139481 - DNA, 251 bp, Glycine max
cttcttctcttgcggctagggttttagcgcagttccttctagatataaggaagatgggtaaggaaaaggttcacatcagtattgtggtcattggccatgtcgactctgggaaatccactaccactggtcacctgatttacaagcttggaggcattgacaagcgtgttattgagaggtttgagaaggaagctgctgagatgaacaagaggtctttcaagtatgcctgggtgctggacaacttaaggctgagc

SEQ ID NO: 139482 - DNA, 254 bp, Glycine max
caaaacagtaaagctaacttcaacacctttaattttctaaaagtaattcagcggctgaataccaagcggagaagatgagtcaggagcagccacggcgtcccaaaggccaaaaccccatcaaatacggcgacgtttttgtcgtctccggcgaccttgcacagaagcccgtcgcaccggaagatgctgccatgatgcaaagcgcggaagctcgagtgctcggacaaacccaaccggcggagcagcttccgtcatgc

SEQ ID NO: 139483 - DNA, 256 bp, Glycine max
aaaagactcacatcaacattgtcgtcattggacatgtcgactctgggaagtcaactaccactggtcatttgatctacaagcttggaggtattgacaagcgtgtgattgagaggttcgagaaggaggctgctgagatgatcaagaggtcattcaagtatgcctgggtgcttgacaagctcaaggctgagcgcgaaagaggaattaccattgatattgctttgtggaagtttgaacacaccaagtactactgcacagt

SEQ ID NO: 139484 - DNA, 223 bp, Glycine max
ccacactccaatcgtagccgtcgcactctgtgttttctgcgccgtctccgatctccgacaatggcgacccaaatgagcaagagaaagttcgtagctgatggagtgttcttcgctgaactgaacgaggttctgacaagagagttggccgaggacggttactccggcgtggaagttagggttacgccgatgcgcaccgaaatcataattagagccaccagaaccc

SEQ ID NO: 139485 - DNA, 258 bp, Glycine max
gtaatcgagaaagagaagaagcatatatatcaaaatggctgcagagatggagagggagtcattgctaactgaagctcctaatgcaccagttactgcacagagaagggtcagaaatgacttagaaaattctctaccaaaaccatacttgccaagagcattgaaagctcctgatacgggtcacccaaatggaacagcaggccacaggcaccacaacttatctgttcttcagcagcattgtgctttttttgatcaagatga

SEQ ID NO: 139486 - DNA, 252 bp, Glycine max
ctctctttgacggtggtgctgtcagcattgacctcagcttgagcagtaacacatcatcagcactactacggtaccatggctgtgctgcaatctttcgtttcggtccacccagattctcacttccccatacagaacctcccttacggagtcttcaagccccaatccgcttcgcctcctcgtcccggcgtcgccatcggcgacttcgtcctcgacctctccgaaatatcttccgctggtctcttcgacggtcct

SEQ ID NO: 139487 - DNA, 251 bp, Glycine max
gtaacaaagaaaagaagaaaggaaagaattgatcgttgaaaatgcagggaggaaagaaagcgggagagtccattaaggaaacagctacaaacattggtgcttctgccaaggctggcatggagaagaccaaggccactgtccaagagaaggcagaaagaatgacagcacgtgatccggtgcaaaaggagttggcaacccaaaagaaagaggcaaagatgaaccaggcggagctggcacaagcaggcggcgcg

SEQ ID NO: 139488 - DNA, 252 bp, Glycine max
ttcgctcagacgcagaggagcagaagcctaagcctcaaacatggcgagagggttaaagaacccctgaagaggctcaatgctccaaaacattggatgcttgacaagcttggtggtgcctttgcacccaagccatcatctggaccccacaagtcccgggagtgtcttcctctgatcctcatcctacgaaacaggctaaagtatgctctaacatatagagaagttattgccatcttgatgcagcgccatgttctt

SEQ ID NO: 139489 - DNA, 255 bp, Glycine max
caaaaccaaaacagtaaagctaacttcaacacctttaattttctaaaagtaattcagcggctgaataccaagcggagaagatgagtcaggagcagccacggcgtcccaaaggccaaaaccccatcaaatacggcgacgtttttgtcgtctccggcgaccttgcacagaagcccgtcgcaccggaagatgctgccatgatgcaaagcgcggaagctcgagtgctcggacaaacccaacccggcggagcagcttccg

SEQ ID NO: 139490 - DNA, 252 bp, Glycine max
ataaccctttctacttgagaagctctaacagcttccaaactctctttgagaaccaaaacggtcgcattcgtctcctccagagattcaacaaacgctccccacaacttgagaaccttcgagactaccggattgtccagtttcagtcaaaacccaacacaatccttctcccccaccatgctgacgccgatttcctcctctttgtccttagcgggagagccatacttaccttggtgaacaacgacgacagagact

SEQ ID NO: 139491 - DNA, 255 bp, Glycine max
ggatgtaatgccaatcgctactggtcacgagcgacaggtgcttcaggctgagctcgagggaaggaatattcttgaaatagaccatcccgaaggtccattcggcacgaaggaagcacctgctgttgtcaaatcttactatgataaaaggatagtcggatgcccaggaggtgaaggtgaggatgagcatgatgttgtctggttttggctggagaaagacaagccccacgaatgtccagtgtgcgcacagtattttgt

SEQ ID NO: 139492 - DNA, 256 bp, Glycine max
atgaatccaatccctcaaagaattgttcatggaacaacaatcgagattctttggaccatatttcctagtgtcatactaatgttcattgctataccatcgtttgctttgttatactcaatggatgatattgtagtggatccagccattactatcaaagctattggacatcaatggtattggacttatgagtattcagactataacaactctgatgaacaatcacttgcttttgatagttatatgattcctgaagatg

SEQ ID NO: 139493 - DNA, 257 bp, Glycine max
acgaaatcgcgaacagaacagcaacgttaacaatgggttctcgctacgaggtggaactgaagctctcatcggcacgcgctctcaagaacgtgaactggcgccatggcccgaaccgcccatacgtcgtcgtttgggtcgacccaagcaacaagctctcgacgcgcgtggacgaaagcggcgacactgacgcgaattgggaccaaacgctcacaattccgttgccaccaaagcctatcgaggatcaacgttgtacatcg

SEQ ID NO: 139494 - DNA, 257 bp, Glycine max
ctcagtcacccctacaaaaccaataaaccttgttgttctacccgttcaaaatgatggttccacagggctccattggaccaacctccaaaaaagaacccctctaatgcaagtaccagtcctggtggacctcaatggaaatcacttgtgggttaactgtgagcagcagtactcatccaaaacgtaccaagcacccttctgccactccacccaatgctctagaaccaacacccaccaatgcctcagtgccccgcggcatc

SEQ ID NO: 139495 - DNA, 256 bp, Glycine max
agtacttccttacaatcaaaaccaacaacaactatggcaagttatcaaaagcactacgatgatcagggtcgcaaggttgacgagtatggcaacgttgagaagcaaaccgacgaatacggcaaccctgttcatgctgctagtgtcacctatgtagccaccagaactgctgctggtggttacagtgatgacattaataatccaacatgataccaccaatgcctacggcgtagacactggtagaagcattctagtggtg

SEQ ID NO: 139496 - DNA, 253 bp, Glycine max
atagaacttccttataaccaaaaccaacaacaactatggcaagttatcagaagcactacgatgatcagggtcgcaaggtcgacgagtatggcaatgttgagaggcaaactgacgaatatggcaacccggttcatgccactagtgtcacttatgtagccactaaaagtgttggtggctacaatgatgacactaataagcaacatgataccaccggtgtctatcctgagaaagataccggtagcatcattttggt

SEQ ID NO: 139497 - DNA, 248 bp, Glycine max
ggcctttctatttgtacagcaagccccagataactaggaaagttgaagcctacaaggatgacttggaagggttgaactccataattggttatgccattaaggccaataataacttgaagattttggaacatttgaggcacttgggttgtggtgctgtgcttgttagtgggaatgagctgaagttggctcttcgagctggctttgatcccacaaggtgtatctttaatgggaatgggaaaacttggagg

SEQ ID NO: 139498 - DNA, 252 bp, Glycine max
gtggtttaggttaggatttggtgagtgagtggggatggcgaagttcaatgtggtgcagaagcgaaggagagctctaatagcagagaagaagagacagcttcacggagaccctttaaccggcaagctcaagatcaaggaccaacccctttccctatccggaaaacgcaaacgcaagctcttcaaaaaatggcgctgggaccaaaaggacgccttacagaatggtttggtaaccatggaagatgtcaaatggca

SEQ ID NO: 139499 - DNA, 254 bp, Glycine max
gatttttatttctccaaaatgatcaattttataagattgaatcgactaaaaaatgaaatgaatcatttcatattgatagtattgctatgcttagtccccaaagaaccagatttcgtaaacaacatagaggaagaatgaaaggaatatcctatcgagggaatcatatttgcttcggaagatatgctcttcaagcacttgagccagcttggataacatctagacaaatagaagcgggacggcggcaatgtcacgaa

SEQ ID NO: 139500 - DNA, 246 bp, Glycine max
cacacgttgtcgcgcacacattccttcattccgcagcaactaagacactacttttaccttaaacaacaatggccgatgccgaggatattatacccctcgtttgcgataatggaaccggaatggtcacggctggttttgctggagatgatgcaccgagggctgtgttccctagcattgtggggcgtccacgtcacactggggtgatggttgggatggggcagaaggatgcgtatgttggggacgagg

SEQ ID NO: 139501 - DNA, 238 bp, Glycine max
cgagcgaattcggctcaggattgattggacttggtgaacatattgcacagcagaactgtaggacaagaccaagctgttaatgctgttgctgaggctgtgttgagatctagagctgggctaggaagacctcaacaaccaactggttcattcctattccttggtccaactggtgttggtaaaactgagcttgcaaaggctcttgctgagcaactatttgataatgaaaaccagtggtgag

SEQ ID NO: 139502 - DNA, 252 bp, Glycine max
tagaagcacacgtgttcaaggctgatattccagggctgaagaaggaggaagtgaaggtggaaattgaagatgatagggttcttcagataagcggagagaggaaccttgagaaggaagataagaacgacacgtggcatcgcctggagcgtacagtggcaagacccatgaggaggttcaggttgccggagaatgctaaagtggagcaagtgaaggcttctatggaaaatggggttcttactgtcatgttcccaa

SEQ ID NO: 139503 - DNA, 254 bp, Glycine max
  unsure (1)..(254): unsure at all n locations
aaaccctcctctcttactttccaaacccactctttccccataaccctacccactcnccctcgcgccgccgccaaaccccctctcctcgtcttctccaaaaacccaatttccgacatcgtctcctccaccttctcacgcgccgaagaaggcgcgtgggacgacgagaagccgcgcgaggagtgcggcgtggtcggcatatacggcgaccctgaggcctcgcgcctctgctaccttgccctcacgcgctccagcat

SEQ ID NO: 139504 - DNA, 255 bp, Glycine max
gttcagcaagaatattctagaggcctcatacgacaccaaattcgaggagataaacaaggttctgtttggtagagaggaggggcagcaacaaggggaggagaggctgcaagagagtgtgattgtggaaatctcaaagaaacaaattcgggaactgagcaaacatgccaaatctagttcaaggaaaaccatttcttctgaagataaacctttcaacttgagaagccgcgaccccatctatgtcaacaagcttggcaa

SEQ ID NO: 139505 - DNA, 254 bp, Glycine max
gatggcacaagttgaacttcgtgacgagcatgggaacccagttgaactaacagatgcatatgggaatccggtttggttaacggacgagaaaggcaacccggtgcacctcacggctgtggcaaccaatgcacacaaatctatgcttcagaatgacaccccacaagagcttcctcactccaagagttcaagctcgtctgaggatgaagggcatggagagaggatcaggaagggactgaaggataacatagaagaaa

SEQ ID NO: 139506 - DNA, 249 bp, Glycine max
tagaggttcaaccaacgctccccacaacttcagaatctccgagactaccgcattttggagttcaactccaaacccaacaccctccttctccccaaccatgctgacgctgattacctcatcgttatccttaacgggactgccattctttccttggtgaacaacgacgacagagactcgtacagacttcaatctggtgatgccctgagagtcccctcaggaaccacatactatgtggtcaccctgacaaca

SEQ ID NO: 139507 - DNA, 248 bp, Glycine max
ttggaatcaaaaaatgagagaaatcatcagcattcacataggtcaggccggaatccaggttggcaactcctgctgggaactctactgcctggaacatggcatccagcccgatggcatgatgccaagtgactcctccttcggtgtagcccacgacgccttcaacaccttcttcagcgaaaccggatccggcaagcacgtccctcgcgccgtcttcgtcgatctcgagcccaccgcatcgacgagtccgt

SEQ ID NO: 139508 - DNA, 250 bp, Glycine max
ttagaaatgaagagtactatcttctttgctctctttctagtttgtgacctcaccatctcatacctgcactcagccaccgctcagttcgtgctcgacactgatgatgatcctcttcaaaacggtggcacatactatatgttgccagttatgagaggaaagggcggtggaatagaagtagattcaactggaaaagaaatatgccctctcactgttgtgcaatcacccaatgagctcgataggggattggact

SEQ ID NO: 139509 - DNA, 252 bp, Glycine max
tacacaactactacaagtacttccttacaatcaaaaccaccaacaactaaggcaagttatcaaaagcactacgatgatcagggtcgcaaggttgacgagtatggcaacgttgagaagcaaaccgacgaatacggcaaccctgttcatgctgctagtgtcacctatgtagccaccagaactgctgctggtggttacagtgatgacattaataagcaacatgataccaccaatgcctacggcgtagacactggt

SEQ ID NO: 139510 - DNA, 220 bp, Glycine max
gtgattcacagaagcagttgcgccatgagaaacactatcggtccgtgagttctcatgatgtggcatattgggcgcgcagtttatgctggatttggagagagcctgcaaagatcattacaccaaaagatgctggagatttggtttgggcttggggttcagagttgtttctccttctcatggttttaggaagttgtcagttgcacatattgtttcaccatac

SEQ ID NO: 139511 - DNA, 249 bp, Glycine max
tgcaaagtcatatggagccagtggtgttgagtactcagaacaggctgagaagcagattgagatgtatagcaagcaaggattttcaggtcttccaatatgcatggctaagactcagtattctttctcagacaatgctgcagcaaagggagctccaagtgggtttgtcttacccataagggatgtaagagctagtataggcgctggatttatttatcctttagttggaacaatgagtagatgccagggctt

SEQ ID NO: 139512 - DNA, 235 bp, Glycine max
ttgcatttgaactggtccacaacagtatctctatctgaagaggtttgtggttccttaagttttgtggctttgaataaaagatagaagagaaggaatctgaatttactcatccaacctgcacatggtaatctagtgtgtttgagtgctttcatgtttggctttaataaaataaaagcagttgttttgtaaaatgttcagaatcaataaaagcatttactgctttgctttgtgcgct

SEQ ID NO: 139513 - DNA, 244 bp, Glycine max
acttcacatgccaagatccttgagaacaataagcaatgggatggggagaagtgtattatcttgacttgcagctttactcctggttcttgttctttaactgcatataagctcactccatctggttatgaatgggggcgtgttaataaggatacgggaagcaatccacatggttaccttcccacccattatgagaaggttcagatgctccttagtgatcgcttccttggtttctcatggttcctga

SEQ ID NO: 139514 - DNA, 246 bp, Glycine max
gccatatttgaggcgaataaatgcaacctccataaaggcttatgctaccagaaccatccttttcctgaaaaatgacggaactttaagaccacttgccatagagttatctttgccacatcctcagggagatcaatctggtgcttttagtcaagtttttctgcctgcagatgaaggtgttgaaagttctatttggctgctagcaaaggcttatgtagttgtgaatgactcgtgctatcatcaacttgt

SEQ ID NO: 139515 - DNA, 247 bp, Glycine max
tgacaaacccacatattgggaatactggcataaattttgatgatgaggaatcaatacagtgtttccttgctggacttgtaattagaagtttgagtatcagtacctctaactggagatgtaagaagcctctgggggattacctagctgaaaggaatatcatgggaatttatgatgttgatactcgtgcaatcacgcggcgattgcggcaagatggcagtcttattggtgttttgacactgacaattcc

SEQ ID NO: 139516 - DNA, 242 bp, Glycine max
gagaatataggaatataagaactaagatggattggatcggagcgtaccgcggaggccagagaagcagggactggtgcgacccttcatcaccattcactgatttgtgggaccctcgtcgtgtcggtgacgctgatgatatcacctcctctctcgcctatgatcacgttgactggcgtgagactgataaagctcatatcttccgtgctgatcttccaggggtgaagaaagaggattgaaggtgc

SEQ ID NO: 139517 - DNA, 246 bp, Glycine max
gagaatataggaatataagaactaagatggattggatcggagcgtaccgcggaggccagagaagcagggactggtgcgacccttcatcaccattcactgatttgtgggaccctcgtcgtgtcggtgacgctgatgatatcacctcctctctcgcccatgctcacgttgactggcgtgagactgataaagctcatatcttccgtgctgatcttccaggggtgaagaaagaggatctgaagtgcaggt

SEQ ID NO: 139518 - DNA, 243 bp, Glycine max
ttctcttcaacctaacgcagcatcgctatactcttcattccatggctttgcccaatcagcaaaccgtggattaccctagtttcaaactcgttatcgtcggtgatggtggcacaggaaagacaacctttgtgaaaaggcatctcaccggagaattcgagaagaaatatgagccaaccatcggtgtggaggttcacccattggattttttcacaaactgtggaaagatcgatctactgctgggat

SEQ ID NO: 139519 - DNA, 242 bp, Glycine max
gaaaaatttgcaaatgtcgaatttcctgagcaacactaatccgaaccctaacaagtcctttgaggtgaatcagcctcccactgattccgtgtccagtctcagcttcagtcccaaagccaacttcctcgtcgccacttcttgggacaatcaggttcgttgttgggaggtagcacagaatggagttaatgttgccactgttcccaaggcttctataacgcacgatcatccggtttgtgctctac

SEQ ID NO: 139520 - DNA, 239 bp, Glycine max
cagggactgccattctttccttggtgaacaacgacgacagagactcctacagacttcaatctggtgattccctgagagtcccctcaggaaccacatactatgtggtcaaccctgacaacaacgaaaatctcagattaataacactcgccatacccgttaacaagcctggtagatttgaggtactgccctttctttataaataattaattattcttctaatttgtttccaatttgaagat

SEQ ID NO: 139521 - DNA, 246 bp, Glycine max
ccgggtgcggttgtggttgacatttgatggtgatgggagttttataatgaatgttcaggagctggccactatcaaggtagagaagctcccggttaagatattgttgttgaataatcaacacttgggtatggttgttcagtgggaggatcggttctataagtctaacagggctcacacgtatctgggagacccctctaatgagaatgccatatttcctgatatgttgaagtttgtgatgcttgcggg

SEQ ID NO: 139522 - DNA, 246 bp, Glycine max
gtctaataaggtggactagctctttaacatgatttgctctgttttcaacctggaaatatcttttattacagctagtccaccttattagacaatcatattctgcagcatacaatactatatcttcacactacgtacagtacatatgattgacctcttcaggagataactttcagaactaaggaaaaccaaagaggagatgcaataaaagatatttccaggttgaaaacagagcaatcatgttaaaga

SEQ ID NO: 139523 - DNA, 197 bp, Glycine max
ggcgaaagaggggaaagatacgacgttggggaagcttggggagctgaaggacacggcttcggatgcggcgaagagggccgtgggttacttgagcggcaagaaagaggaaactaaagagatggcttcggagaccgccgaggcgacggcgaataaggcaggggagatgaaggaggcaaaaaaaaaaaaaagggcggccc

SEQ ID NO: 139524 - DNA, 244 bp, Glycine max
gctatctctcccattctctcgcatctcaatacccttttgatttgtgaaaggaaagcaaacatgcttgatcaggtccaacaccctacaatcatggacaaggttgctggccagctccatctccgttctggtgtttctggtattaggagttatgaaggagcctactgccaccccacaatgtaccaaagaccctcttttgggaattcactcgaatgctgcattgcagtatcctgtgatgccctcatgc

SEQ ID NO: 139525 - DNA, 243 bp, Glycine max
gaggcttttccccacaagctggtgcagtttggagagattcaggaaaaagttgtattgaaattttcacaagaggaatttcttacagcttggtcaactcaggtgcgtcctgcaacaactctgttggctgatgggtgtccatatttgtatgctatggtgcatgatagttcggtgtctacaataccaggtgattttgtcattggtgttaagttgacaaccataaacaatatgtgtgcatatgggctc

SEQ ID NO: 139526 - DNA, 157 bp, Glycine max
ttcaaaccttgctctatactacacagtacacacactagaagaataatggcttccatcctccactactttatagccctctctctttcttgctcttttcttttcttcttatccgactcagtcacccctacaaaaccaataaaccttgttgttctacccg

SEQ ID NO: 139527 - DNA, 237 bp, Glycine max
gcaagagccagttctggaacaagtggagctcgtagcagcagcactgagagtgggggaccaaaactagtgatgttcaacaccaaaattacacttgctgagaccattgaagcaacaagacaattcgacgaagagaatgtgctgagcagaacaaggcatggattagtgttcaaggcccgctacaacgatggaatggtcctttccattcgcaggctccaagatggatcattggatgagaac

SEQ ID NO: 139528 - DNA, 242 bp, Glycine max
ctccttcaaaatcgttgtcaatttcgcctctttctttctcaactcccttagattctctcaatcgggtcttcaaaaatgcggatgagctgcaatggatgtcgagttctcagaaaaggttgcagtgaaaattgcagcatcagaccctgtttacaatggatcaaaagcccagaatctcaagccaatgctactgtgtttcttgccaagttctacggccgtgctggtctaatgaactggttaacgca

SEQ ID NO: 139529 - DNA, 240 bp, Glycine max
gacacaactactacaagtacttccttacaatcaaaaccaccaacaactatggcaagttatcaaaagcactacgatgatcagggtcgcaaggttgacgagtatggcaacgttgagaagcaaaccgacgaatacggcaaccctgttcatgctgctagtgtcacctatgtagccaccagaactgctgctggtggttacagtgatgacattaataagcaacatgataccacaatgcctacggcg

SEQ ID NO: 139530 - DNA, 240 bp, Glycine max
caagcgcttctcctctttgtgttctggctatgcttcttggcaagagttagatcggacgaggattgcgtgtacacggtgtacgttcggacgggttcgatcatcaagggaggcaccgattcagtaattggtctgaagctatacgacaagtccggctacggcatatacatcaccaacctcgaggcatggggcgggttaatggatccgggtcacaactactacgagcggggcacctcgacatat

SEQ ID NO: 139531 - DNA, 230 bp, Glycine max
ttcatctttctttggcggtgggagtccctttggatcaggtggaagtagtcgaggtaggaggcagaggcgcggagaagacgtggttcaccctctcaaggtctctttggaggacctttatcttggaacttccaagaagctctccctctccagaaatgttatatgctccaagtgcagtggcaagggttctaagtctggtgcttcgatgaagtgtgctggttgtcaaggaatgg

SEQ ID NO: 139532 - DNA, 232 bp, Glycine max
gcttctttctgtctgaaactattatccacagtagctaagcctgcaagcttcgccgtttgaaacagtgcctcaaccatggcagaacaaacagagaaggcttttctgaagcaaccaaaagtgtttctatgctctaagaaaggtgggaagggaaagaggcctgggaaaggtgggaatcgcttttggaagtcaattgggcttggattcaagactcccagagatgccattgaaggaa

SEQ ID NO: 139533 - DNA, 244 bp, Glycine max
gttaccaagagaagcaaagaggcttctaatgatcatgccaatgacatggctcagaagaccaaagactacgccagtgacactgctcagagaaccaaggaaaaactccaagacattgcatctgaagctggtcaatacagtgcagagaaagctagagaaatgaaggatgcagcagcagagaaggcaagtgacatagcaaaggctgcaaagcaaaaatcacaagaggtgaaagagaattaggtggaca

SEQ ID NO: 139534 - DNA, 222 bp, Glycine max
aggtgctaaacccaacccttgaccttgcatggagtcaaatgtgctgacctcttcaactttgccaatgcatgatgagccaagatcgcgagactttttataatatgcttatttataattaagcaagcatctactacatgttatggttaataaaagtaataatgtaagaataaagactttgaactaaataataatatgaacgattctctttcgttgttcaatgag

SEQ ID NO: 139535 - DNA, 238 bp, Glycine max
gggaaatactaccggggatttgagtgtccagactatttcgttgtaggttatggactggatttcgctgaactctatagaaatttgccttacattggtgttttgaagcctgaactttacaagtgatcttatatttcctagtgaaacctgtcacacgtggaatcttaaagcattaaacatggttctacaagtttgtctgccacacattcttccaagagtagcatatagaaactagaagaaa

SEQ ID NO: 139536 - DNA, 240 bp, Glycine max
ctcgagccgattcggctcgaggcaaagagagagggagatggagagtatagagcacaggacagttgaagtaaatggcataaaaatgcacattgcagagaaaggagaaggccctgtggtgttgtttctccacggcttccccgaactctggcactgttggcacaaccagattgtggctcttggttccctcggataccatgcggtggcaccagatctccgaggctacggtgacaccgatgcacc

SEQ ID NO: 139537 - DNA, 226 bp, Glycine max
cttccctgttgctggttcagaggatgatgcacagaagcttatatctgttgctagtcatattaatgacagcttaagggatgggaaattagaagacataaatacaaaacttttgcgatactttgcctttggttctagggcagtattgaatcctatggctgccatgtttggtggaattgttggacaagaggttgtcaaagcatgctctgggaagttttacccacttttt

SEQ ID NO: 139538 - DNA, 237 bp, Glycine max
ataccaccacctggtactatgcatcaagtgagttggataagcttcaaactgctaactttgatcaaaagataggggtccagatcatccaaaatgctttgaagactcctgtgcacacaattgcttcaaatgccggagttgagggtgctgttgttgttggtaaactattggaacagaatgatcctgatcttggatatgatgcagccaaaggtgaatatgttgatatggttaagctggaat

SEQ ID NO: 139539 - DNA, 244 bp, Glycine max
cagcttttgcttctttgtgaacatggagatgaggaaatcatgtggcttcttcttcttgctcctcctccttgtctttgcttcccaggtggtggtgcagacgggtgtgtgtgagtcacaaagccacgggttccatggtttgtgtaatagagaccacaactgtgctttggtctgcaggaacgaaggtttctccggtggcaggtgcaaaggcttccgccgccgctgcttttgcaccaggatttgtgga

SEQ ID NO: 139540 - DNA, 253 bp, Glycine max
agataccaacaagaaaagaaaaaaagaagagttgagattcccttacaagaaaagatggcatcccataggcaaagctatgaagctggtcaaactaagggccgaactgaggaaaagacgaaccagacgatgggcaatattggagagaaggctcaagctgcaaaggagaagacccaggaaatggcccaagctgcaaaggagaagacccaacaaacagcccaagctgccaaggacaagacttgcgacacttcccaag

SEQ ID NO: 139541 - DNA, 252 bp, Glycine max
cacacaactactacaagtacttccttacaatcaaaaccaacaacaactatggcaagttatcaaaagcactacgatgatcagggtcgcaaggttgacgagtatggcaacgttgagaagcaaaccgacgaatacggcaaccctgttcatgctgctagtgtcacctatgtagccaccagaactgctgctggtggttacagtgatgacattaataagcaacatgataccaccaatgcctacggcgtagacactggt

SEQ ID NO: 139542 - DNA, 248 bp, Glycine max
ccaaatggttgaacaagttaagaaaaccatgagtgagaaccaacatgttgaggttaagaaaattctacactttagttcgttgaacaatgtgatgatgacggtgtttggtaagtcttatgagttttacgagggtgagggtttggagcttgagggtttggtgagtgaagggtatgagttgttgggtgtttttaactggagtgaccattttccggttttggggtggttggatttgcagggtgtgaggaaga

SEQ ID NO: 139543 - DNA, 248 bp, Glycine max
gtcttccatagccccccaaaaatgaagagcaccatcttctttgctctctttctcttttgtgccttcaccacctcatacctaataacagccatcgctgatttcgtgctcgataatgaaggtaaccctcttgaaaatggtggcacatattatatcttgtcagacataacagcatttggtggaataagagcagccccaacgggaaatgaaagatgccctctcactgtggtgcaatctcgcaatgagctcga

SEQ ID NO: 139544 - DNA, 248 bp, Glycine max
  unsure (1)..(248): unsure at all n locations
tttaaatacgacagtgttcatggacactggaagcatcacgatgtcaccgttaaggacgagaagacccttctcttcggtgacaagccagtcactatttttggacacagaaaccctgaagagatcccatgggggtcaactggagctgacatcattgttgagtccaccgganttttcaccgataaggacaaggccgccgcanntttgangggtggtncaaagaaggttattatttctncccccagnaggnc

SEQ ID NO: 139545 - DNA, 251 bp, Glycine max
caaggttcccgtggcagtggtaaaactgcactttcagctactgttggtatcgacagcgacttcccatacgtcaagatagtttcagctgaatcaatgattggtctacatgagagcaccaaatgtgcacagattattaaggtttttgaggatgcatacaagtcaccattgagtgtcatcattcttgatgacattgagagattattggagtatgtgcccattggtcctcgattgtcaaacttgatttctcagac

SEQ ID NO: 139546 - DNA, 104 bp, Glycine max
ggttaccataacatgatcttcagttggatagacactttaaatgaaaactatccaccccccttggatgctaatgtggttgcttgcgttatgacaatttggagtca

SEQ ID NO: 139547 - DNA, 103 bp, Glycine max
gttgcagatcgagctagctagctagcaagcaagcacagagatggaggtaaagcgaggccatgccctcatgtgcttggcacgtgtttcactcttcctctgcgct

SEQ ID NO: 139548 - DNA, 253 bp, Glycine max
tccacttgagtgaaaagtagtgtgttaagaactaaacaatttttcaatggcgtccaagaaacaagaggagcgagctgaggcagctgcgaaagttgctgccaaagaactcgaacaagtcaacagagaaagaagagcccgtgatttcggtcttgttgctgaacaacaacaacaacatcatcaggaagatcaacaaaaacgtggtgtaatcgggtccatgtttaaggcggtgcaagacacctacgagaacgccaag

SEQ ID NO: 139549 - DNA, 215 bp, Glycine max
ccgatagctgataagagagataccaacaagaaaagaaaaaaagaagagttgagattccctttgaagaaaagatggcatcccataggcaaagctatgaagctggtcaaactaagggccgaactgaggaaaagacgaaccagacgatgggcaatattggagagaaggctccaactgcaaagaagaagacccaggaaagggcccaagctgcaaagggg

SEQ ID NO: 139550 - DNA, 246 bp, Glycine max
catgagagtgcggtttcctttgttggtgttgctgggaactgttttcctggcatcagtttgtgtctcattaaaggtgagagaggatgagaataaccctttctactttagaagctctaacagcttccaaactctctttgagaaccaaaacggtcgcattcgtctcctccagagattcaacaaacgctccccacaacttgagaaccttcgagactaccggattgtccagtttcagtcaaaacccaacac

SEQ ID NO: 139551 - DNA, 235 bp, Glycine max
cggtggctataatgatgacaccaatagacatcatggaactaccggtgtctatggtatagacaccgataggcaacaacatgggactactggtggctatgccggtgacactggtaggcaacatgggaacatcggtggcccttactatggaaccaacaccgcagccaccggtactggtcccagaagtggaaccacgggcggcaccggttatggaggcactggtggcactgattatgga

SEQ ID NO: 139552 - DNA, 248 bp, Glycine max
cctaaacctaaacataaactgaatttcccaaatccccttcccaattttcaccaaaacctaatactcccaaaccaatcttcgatcatggccgccgaatcacaacctcaactaatcgaagagagaagagaggagcaagaacttaagtacctggaatttgtgcaattcgcgaccatccaggccctgatgcgctgcgccatcctctactcctacgccaaggagcgcgcgggtcctctgaagcccggcgtcaa

SEQ ID NO: 139553 - DNA, 243 bp, Glycine max
gccttgtgccgtttgtgttgttttcgggacgaagaagaagatggtgtcaggttctggaatctgcgcaaagcgggtggtggtggacgcgcgccaccacatgctgggtcgtctagcctccatcgtggcgaaggagcttctgaacggccagaaagtggtggtcgttcgctgtgaagagatttgcatctcgggcgggctggtgaggcagaagatgaaatacttgaggttccttcgcaaacgcatgaa

SEQ ID NO: 139554 - DNA, 246 bp, Glycine max
gccttgtgccgtttgtgttgttttcgggacgaagaagaagatggtgtcaggttctggaatctgcgcaaagcgggtggtggtggacgcgcgccaccacatgctgggtcgtctagcctccatcgtggcgaaggagcttctgaacggccagaaagtggtggtcgttcgctgtgaagagatttgcatctcgggcgggctggtgaggcagaagatgaaatacttgaggttccttcgcaaacgcatgaacac

SEQ ID NO: 139555 - DNA, 244 bp, Glycine max
ctttttcttctctctcaacaacttcaccttcttcctcctcgatcatgtctcacttcaagggcaagtaccatgatgagcttattgccaatgctgcgtacattggcactcctggaaagggtattcttgctgctgatgagtcaacagggacaattggcaagcgtttggccagcatcagtgtagagaacattgaatccaacaggcgagctcttagggagctgcttttcactgctcctggtgttcttca

SEQ ID NO: 139556 - DNA, 241 bp, Glycine max
cgctaatatctcaaaccaggcaaacttcatgcgtttgatgttcgacaccatgaacgaaatagcagatgaagcagctattggtgccaagaaatacgccacgaagcaagcaaacatatctgggtttcagaccctctattgtctggttcagtgcacgccggacttgtcaacccagggttgcagaagttgtcttagtgatgccatagggctccttccatggtgttgtgaaggaaaacaaggaggg

SEQ ID NO: 139557 - DNA, 249 bp, Glycine max
gtcaccgtcttctctgccgccatgaagctcgtcaggtttctgatgaagctgaacaacgaaaccgtatcaatcgagctcaagaacggcacagttgttcacggcaccattacaggtgttgatatcagtatgaatacacatttgaaaacagttaaactaactctgaaagggaaaaacccagttactttggatcatctcagtgtgagaggcaacaacattcgatattatatccttcctgacagcttgaatctt

SEQ ID NO: 139558 - DNA, 246 bp, Glycine max
cacaactactacaagtacttccttacaatcaaaaccaacaacaactatggcaagttatcaaaagcactacgatgatcagggtcgcaaggttgacgagtatggcaacgttgagaagcaaaccgacgaatacggcaaccctgttcatgctgctagtgtcacctatgtagccaccagaactgctgctggtggttacagtgatgacattaataagcaacatgataccaccaatgcctacggcgtagacac

SEQ ID NO: 139559 - DNA, 241 bp, Glycine max
caactacaagaaagaacttccttataaccaaaaccaacaacaactatggctagttatcagaagcactacgatgatcagggtcgcaaggtcgacgagtatggcaatgttgagaggcaaactgacgaatatggcaacccggttcatgccactagtgtcacttatgtagccactaaaagtgttggtggctacaatgatgacactaataagcaacatgataccaccggtgtctatcctgagaaag

SEQ ID NO: 139560 - DNA, 184 bp, Glycine max
ggtgaactgcagagcattctgtcacgttctgttcaagatttgttggctgtcactgaacagatttatgccatcactgaccgcacaaaactcgtggatgccattaagtgcttaaaggctgctatgttaaatgctgttcctattgttagagcctctgatgttgatcaagatgatcacgggcagcata

SEQ ID NO: 139561 - DNA, 243 bp, Glycine max
aggaatataagaactaagatggattggatcggagcgtaccgcggaggccagagaagcagggactggtgcgacccttcatcaccattcactgatttgtgggaccctcgtcgtgtcggtgacgctgatgatatcacctcctctctcgcccatgctcacgttgactggcgtgagactgataaagctcatatcttccgtgctgatcttccaggggtgaagaaagaggatctgaaggtgcaggtggag

SEQ ID NO: 139562 - DNA, 242 bp, Glycine max
cggctcgagagaaaacctaagcttagaattagaaacaaagaaaagaagaaaggaaagaattgatcgttgaaaatgcagggaggaaagaaagcgggagagtccattaaggaaacagctacaaacattggtgcttctgccaaggctggcatggagtagaccaaggccactgtccaagagaaggcagaaagaatgacagcacgtgatccggtgcaaaaggagttggcaacccaaaagaaagaggc

SEQ ID NO: 139563 - DNA, 254 bp, Glycine max
ttcggctcgagtgcagaccgagctagctagctagcaagcaagcacagagatggaggcaaagcgaggccatgccctcatgtgcttggcacgtgtttcactcttcctctgcgctctaaccctatccgctgctcacggaagcaccacggttcaagacatcgcgagaaagttgaaactcggggacaccgagcttctgcgcacggagaagaagttcacggttttcatggagaattacgggaggagctactccacagagg

SEQ ID NO: 139564 - DNA, 235 bp, Glycine max
cgggatgaaggtcctattgtgactgaagctgacatacagcatattgtctcatcctggactggtattcctgttgagaaagtctcaacagatgaatctgatcgcctcctgaagatggaagagactttacataagcgagtcattggtcaggatgaagcagttaaagccattagtcgggctatccgtcgagctcgggttggactaaaaaatcctaatcgtcccattgccagcttcatct

SEQ ID NO: 139565 - DNA, 244 bp, Glycine max
tatcttaccactttcaattccaaattcactctcagaaattagaatggctagccaatcaaacactaaatcagttcacgatttcacagttaaagatgccaggggaaatgatgttaatctcgccgattacaaaggaaaggtccttctccttgtcaatgttgcctcacaatgcggcttgactaattcaaactacacagagcttaatcaattgtatgagaaatacaaagggaaaggacttgaaattctg

SEQ ID NO: 139566 - DNA, 233 bp, Glycine max
gtaaccataaaggcaaaccctccacaactgcactcaaatctactgtacatacagaggtttagacatcaatctcgattggttgcagaagcagcatattattttacaaacatgctctctgctgagtcattcatctcaaacatcgatgcaaaagccatttcaatggaggaagctgattttgatgggaaacatggaatttgctcgtgctatgctttcgggtatgtcacctgatacac

SEQ ID NO: 139567 - DNA, 237 bp, Glycine max
gcaccagtttcaccgcacgaatatcttgttgtttggagcgatccgagaaaaactctgtaaacatgttggtttaccaggacctccttacaggtgatgagcttctctctgactccttccgttacaaggaaattgagaatggaatgctgtggtttgttgaggggaagtgggttgttaaaggagcagttgatgtagacatggtgcaaaccctgctggtgagggtggaggagaatatgaggg

SEQ ID NO: 139568 - DNA, 241 bp, Glycine max
cttaacgggactgccattctttccttggtgaacaacgacgacagagactcctacagacttcaatctggtgatgccctgagagtcccctcaggaaccacatactatgtggtcaaccctgacaacaacgaaaatctcagattaataacactcgccatacccgttaacaagcctggtagatttgagagtttcttcctatctagcactgaagctcaacaatcctacttgcaaggattcagcaggt

SEQ ID NO: 139569 - DNA, 179 bp, Glycine max
ctggggatgaacatggtttccaaaggggtgcaaaacgttcttgattttcttctgaatgatttccccgacatggatgttattggcatttctggaaattattgttcggacaagaaacctgctgcagtaaattggatcgagggacgtgggacatcagttgtttgtgaagcatttatcaaaga

SEQ ID NO: 139570 - DNA, 244 bp, Glycine max
ctcgagccgtgcagcgcctccaaatggcagcaccagcaagatagctgccgcaagcagctcaccggggtgaacctcacgccctgcgagaagcacatcatggagaagatccaaggccgcggcgatgacgatgatgatgatgacgacgacaatcacattctcaggaccatgcggggaagaatcaactacataaggaggaacgaaggaaaagacgaagacgaagaagaagaaggacacatgcagaagt

SEQ ID NO: 139571 - DNA, 227 bp, Glycine max
catgattagcacctcaactcctcacatggttctccagcaatccgtgtaccaggctttcactcaggtgtttgctcagcagctaccaaagcaagcacaggtgaaatctgtggcaccatttgggttatgcttcaactccaacaagatcaatgcatatcctagcgtggaccttgtgatggacaagcccaatggtcctgtttggagaatctctggtgaggacttgatggtgc

SEQ ID NO: 139572 - DNA, 266 bp, Glycine max
tagagacctccttccatagcgaattcgaggagataaacagggttttgtttggagaggaagaggagcagaggcagcaagagggagtgatcgtggaactctcaaaggaacaaattcggcaactgagcagacgtgccaaatctagttcaaggaaaaccatttcctccgaagatgaaccattcaacttgagaagccgcaaccccatctattccaacaactttggaaattctttgagatcacccctgagaaaaacccacagcttcgggact

SEQ ID NO: 139573 - DNA, 271 bp, Glycine max
tcggctcgagattttaatcctaattctgcacttcttgatcattcgattcttctcctcaagatgcagatattcgtaaaaactttgaccggcaagaccatcacccttgaggtggaatcctccgacaccattgacaacgtaaaagctaagattcaagacaaggaagggatcccacctgaccagcagagacttatctttgcgggtaaacaacttgaggatggtcgcacccttgccattacaacatccaaaaggaatcaaccctccatctcgtgct

SEQ ID NO: 139574 - DNA, 259 bp, Glycine max
gggaattgatggtgtcaagattgatgtcacgcatattctagagatgctatcggaggaatatggtggtcgtgtcgaactcgctaaagcatattacaaagcactcactgcttccgtgaggtcagcatttcaaaggcaatggtgtcatttcaagcatgcagcagtgcaatgatttcatgttccttggtacggaaaccatatcacttggacgagtcggtgatgattttggtgcacggacccagctggagatccaaacggtacc

SEQ ID NO: 139575 - DNA, 259 bp, Glycine max
gcgaaacgctcttcgttatctttttcagactccgcggcgtagatccgaggagttcgggaaatcctaactcatcatctcaactcaagtcatggctggacttgcacctgagggatcacagttcgatgctcgtcaatatgattctaaaatgagtgacttactttcatctgatggacaggacttcttcacatcctatgacgaggtttatgatagttttgacgtatgggtttgcaggaaaatcttctcaggggaatttacgcat

SEQ ID NO: 139576 - DNA, 260 bp, Glycine max
gtttcccaagtctctcgaagcatcttctttctcttcctgcagaagctatccgtgttacttgttcccaagtctccaacaagcaaagtacatggttgatttggaaatccaggtccccagcgcattcgacccgtttgccgaggcgagagaatcagatgcccccggggcaaaggagtatgtgcacatacgaattcagcagaggaatggaaagaagagtctgacacagtgcaagggatgaagaaggagttcagctacgagaagat

SEQ ID NO: 139577 - DNA, 261 bp, Glycine max
agcaggaatagcaccaaggaaaggaagtgaagaagaagaagaagaccaagacgaggatgaggagcaagacaaagagagccaagaaagtgaaggttctgagtctcaacaagaaccacgaagacataagaataagaacccttttcacttcaactctaaaaggttccaaactctcttcaaaaaccaatatggccacgttcgcgtcctccagaggttcaacaaagctcccaacagcttcagaatctccgagactaccgcattttg

SEQ ID NO: 139578 - DNA, 260 bp, Glycine max
cacacacaactactacaagtacttccttacaatcaaaaccaacaacaactatggcaagttatcaaaagcactacgatgatcagggtcgcaaggttgacgagtatggcaacgttgagaagcaaaccgacgaatacggcaaccctgttcatgctgctagtgtcacctatgtagccaccagaactgctgctggtggttacagtgatgacattaataagcaaatgataccaccaatgcctacggcgtagacactggtagacagc

SEQ ID NO: 139579 - DNA, 258 bp, Glycine max
ggacgaagatgccttcttcgctgatacgctgaggctcaccaaaagctttctgagcttgggtttgctgaagcctaagcaacgttttggggattgttggagaggcacggtgcccataatatttctctcataaattctatggtcatggtttctaatgcgccactgtgggttcctcaaatttttagatagcttttgaatgtattttgctggacgtggtgatgagattggagttgggttgtttttatttgtggtcgatccttt

SEQ ID NO: 139580 - DNA, 259 bp, Glycine max
agacaatggaaaaggctggagcgtacactgattatgcttcgcagaaggcgaaggaaacgaaggacaagacaatggagaaggctggagagtacacagattatgcttcgcagaaggcgaaagaagccaaggacaagacaatggagaagggaggggaatataaagactatgctgcagagaaggctaaagaaggaaaagatgctactgtgaataagatgggaagtataaagattatacggcggagaaggctaaagaggggaaa

SEQ ID NO: 139581 - DNA, 254 bp, Glycine max
aagaacctaagtgagatacaagaaaggaaataattgatctttgaaaatgcagggaggaaagaaagctggagagtccatcaaggaaacagctgcaaacattggtgcttctgccaaggctggcatggagaaaaccaaggccactgtccaggagaaggcagaaagaatgacggcacgtgatccgatgcaaaaggagttggcaacccagaagaaagaggaaagatgagccaggcagagctggacaagcagcggcgcgt

SEQ ID NO: 139582 - DNA, 257 bp, Glycine max
ctcactgacctcaccatggcgccagagccaagctttctttagctatcttccttttctttcttttagccttgatttcaaacctagccttgggcaaacttaaagaaaccgaggtcgaagaagatcccgagctcgtaacatgcaaacaccagtgccaacagcaacggcaatacactgagagtgacaagcgaacatgcttgcaacaatgtgacagtatgagcaagagcgagagaaacaagtcgaagaggaaactcgcgaga

SEQ ID NO: 139583 - DNA, 252 bp, Glycine max
gccattgcttacggtcttgaaagaaggccaccagtgtgggtgagaagaacgtgttgatttttgacttgggtggcggtacctttgatgtctctcttctcaccattgaggagggtatttttgaggtcaaggccactgccggagatactcatcttggaggtgaagattttgataacaggatggttaaccattttgttcaggaattcaagaggaagccaagaaggacatcaatggaaaccctagggctcttaggag

SEQ ID NO: 139584 - DNA, 245 bp, Glycine max
gcgctgtctttcgaggatttttggggcagcagcagctttaggatgcacttataggcatggacttggtgatcatccctgctggtgttcctcgtaaacctggaatgacaagagatgatctcttcaatataaatgctggaattgttaaaacattgtgtgaagcaattgcaaagtgccatgctaaagccattgtcaatgtgataagcaatccagttaactcacagtcccgattgcaaacgaagttttca

SEQ ID NO: 139585 - DNA, 257 bp, Glycine max
cacccttcttctcccccacctgctgacgctgattacctcatcgttatccttaacgggactgccattcttaccttggtgaacaacgacgaccgagactcttacaaccttcaatctggcgatgccctaagagtccctgcaggaaccacatactatgtggttaaccctgacaacgacgataatctcagaatgataccactcgccatacccgttaacaaaccgctagatttgagagtttcttcctatctagcactcaagct

SEQ ID NO: 139586 - DNA, 254 bp, Glycine max
aactcaataagaatcaacagcacagtgtgttcccactgaacaagatatcatccaccatcgtagggtcgacctctggaggaaccatgattagcacctcaactcctcacatggttctccagcaatccgtgtaccaggctttcactcaggtgtttgctcagcagctaccaaagcaagcacaggtgaaatctgtggcaccatttgggttatgcttcactccaacaagatcaatgcatatcctagcgtggaccttgtga

SEQ ID NO: 139587 - DNA, 251 bp, Glycine max
gtgacttactctctctacgtgttgcaaccctgaaagggttggctttggctgctatgtgtttatggggtgcctttgctcattgtgaacggttttcttgtgactatcacatatttgcagcacacagtctttgccttgcctcattacgattcatcagaatgggactggctgaagggagctttggcaactatggacagagattatgggattctgaacaggtgtttcatcacataactgatactcatgtggctcac

SEQ ID NO: 139588 - DNA, 254 bp, Glycine max
ggagattggatcacacttatacaaaattctccaattagtaacttgttgagagttgctgcttggaagaaaggctgtttaatggttaagattgtgatgtctgggaatgcagcagtcaaaaggagtgattgggcctcattggtacaagtgtttttaacaaacagcaacagtacagagcattttgatgcatgtaagtggacaaaatcggaaccacattctgggagttgatcttcccaatagaggtatgtggtcctaat

SEQ ID NO: 139589 - DNA, 253 bp, Glycine max
acaaaattgaactgtattgtagtagtagacagtagcaccatgagccaggaacagctcaagaaacctcaaggggagcaggaccccatcaaatacggcgacgttttcaaagtctccgacgaactcgctttcaaacccatcgcgccaagagacgcagctctcatgcaagccacggagaaccaagcattgggccaaactcaaaaaggaggtcccgctcggtgatgcaatccgccgcaaccgaaaacctccgcgccgg

SEQ ID NO: 139590 - DNA, 252 bp, Glycine max
ttagctgtaaatctttctgtgacattggaagactctctatggctgctagctatttaaagtatactaagttatctgaatccctattaacatgttttaactgggttcactattttatacacaggaaattgctgaattgtacgagggtgaacagaatattgagcaggctcttgtttactatgaaaaatcagctgatttttttcaaaatgaagagtgacaacttctgcgaaccaatgcaaacaaaaagttgcccag

SEQ ID NO: 139591 - DNA, 129 bp, Glycine max
agtacacacactagagaataatggcttccatcctccactactttttagccctctctctttcttgctcttttcttttcttcttatccgactcagtcacccctacaaaaccaataaaccttgttgttctac

SEQ ID NO: 139592 - DNA, 250 bp, Glycine max
gcgatagctgataagagagataccaacaagaaaagaaaaaaagaagagttgagattccctttgaagaaaagatggcatcccataggcaaagctatgaagctggtcaaactaagggccgaactgaggaaaagacgaaccagacgatgggcaatattggagagaaggctcaagctgcaaaggagaagacccaggaaatggcccaagctgcaaagagaagacccaacaaacagcccaagctgccaaggacaag

SEQ ID NO: 139593 - DNA, 251 bp, Glycine max
actaacacctcgcctctccctcggtgatgtgttgggagcagtaggtgaaaccgttgctgagattggacagaacatgatgaagccaacggagatagttcaggaacgcgctcacgttcgacaagcgggtggggtcttggatgccattggtgaaaccattgctgagattgctgaaacgactcgagtcatggtttctggagaggacgagagagtgtgaggcagagcgtggtgttggagactcgcgtaactggtcg

SEQ ID NO: 139594 - DNA, 254 bp, Glycine max
tagagccaacacccacaatgcctcagttgccccgcggcatcaaggccagggtgccacaaaaacacgtgtggcctcatgtccactaatcccatcacccaacaaaccggtttaggtgaactaggagaagacgttcttgcaatccacgccacacaagggtcgacccaacaacttggcccattggtcacagtcccacaattcctcttttcttgtgcacttccttccttgttcaaaagggtcttcctagaaacactcaa

SEQ ID NO: 139595 - DNA, 249 bp, Glycine max
taagatagtctctgctatgccggtgatgctgctcagaaatcaaaagactatgctgcagagaaggctaaagaaggaaaagatgctactgtgaataagatgggagagtataaagattatacggcggagaaggctaaagaggggaaagatacgacgttggggaagcttggggagctgaaggactctgcggctgatgcggcgaagagggcagtggttacttgagcggcaagacagaggaaaccaaagagaaag

SEQ ID NO: 139596 - DNA, 250 bp, Glycine max
gcaaaggattctaccgccgctcgatgggaattgcgcttcaaggcgtctcgtagggctaatccgcctcacgagggtcaccaacggcacgtgcctttggggggccgaggccccctactgctggtcggcaaacggacggcgggcgcacgcgtcgcttctagcccggattctgactctaaggcgttcagtcataatccaacgcacggtagcttgcgccactggcttttcaagcaagcgcgatgaccaattgtgc

SEQ ID NO: 139597 - DNA, 250 bp, Glycine max
cagaaggagaatcggaattagagtttgttctggatatgcatggcctggagaattatgataaaagatattcggaagtaagagaatctgaaagtaaagctcactctcaagctgaaatgctgaaaaatgctttagatgagcatagcctagagttgagagtaaaagctgctaatgaagctgaagctgcttgtgaacaaaggctttctgccgcaaagctgaaatagaggacttgaggtccaagctggatgcatct

SEQ ID NO: 139598 - DNA, 248 bp, Glycine max
taaaccttgctcttactacacagtacacacactagaagaataatggcttccatcctccactactttttagccctctctctttcttgctcttttcttttcttcttatccgactcagtcacccctacaaaaccaataaaccttgttgttctacccgttcaaaatgatggttccaatcggctccattgcaccaacctccaaaaaagaaccctctaatgcaagtaccagtcctggtggacctcaatggaaat

SEQ ID NO: 139599 - DNA, 247 bp, Glycine max
ccctacctctccttcaagatgcagatcttcgtcaagaccctcaccggaaagaccatcacccttgaggtgaaaagctctgacaccatcgacaacgtcaaggccaagatccaggacaaggaaggaattcccccggatcagcaacgtctcatcttcgccggaaagcagctcgaggacggccgtaccctcaccgactacaacatccagaagggtcaacccttcaccttgtccttcgtctccgtggtggcat

SEQ ID NO: 139600 - DNA, 250 bp, Glycine max
gctggagtgggtaaacggtactgattatggaattgatcaataacattgccaaagctcatggaggtgtatctgtatttggcggagtaggtgaacgtactcgtgagggaaatgatctttatatggaaatgaaagaatctggagtaattaatgaacaaaatattgcagaatcaaaagtagctctagtatatggtcaaatgaatgaaccgcccgagctcgtatgagagttggtttaactgccctgactatggcg

SEQ ID NO: 139601 - DNA, 250 bp, Glycine max
gagataggcatgagtggaagaatattacaagaaaatggttaaggaaaatcctggggatccattgtttctgaggaattatgctaattttttgtatcagtacaaacaagactgtgaaggagcagaggagtattattcccgcgccatacttgcagacccggatgacggagaagttctatcacagtatgggaagttagtttgggagctacatcatgaccaagaacgtgcctccagctattttgaaagagcagtc

SEQ ID NO: 139602 - DNA, 255 bp, Glycine max
aaagatgaaaggtgctggaacgtgagcagtaaggatatgattttcagagctgataagattgatctcaagagtttggatgcacagctggaaaagcacttgagcagggtttggtcgaggagcattgagactaaacggcctagagaagagtgggagattgatttggccaaattggatctgcgatatgttgtggctcatggggcatatggtactgtatcaggggtacatatgatacccaagacgttgcagtgaaagtgt

SEQ ID NO: 139603 - DNA, 249 bp, Glycine max
ctacaagaaagacttccttataaccaactccaacaacaactatggcaagttatcagaagcactacgatgatcagggtcgcaaggtcgacgagtatggcaatgttgagaggcaaactgacgaatatggcaacccggttcatgccactagtgtcacttatgtagccactaaaagtgttggtggctacaatgatgacactaataagcaacatataccaccggtgtctatcctgagaaagataccggtaggca

SEQ ID NO: 139604 - DNA, 248 bp, Glycine max
cacccaacgtaccttcattgctggtcattggctgttaccagtcattggagttgtggaacatgagcgagaacaagacgatgactctgtctgctcatgatggtctcattacttccttggctgtttcaattgtaaatggtttggttgcttcagctagtcatgacaagttcctcaagctctggaagtgagtgtgtgtctcctccaagtgaccaaatggcaatacattaggtcttttgtcaatgctgttcaca

SEQ ID NO: 139605 - DNA, 249 bp, Glycine max
tcacacacaatactacaagtacttccttacaatcaaaaccaacaacaactatcggcaagttatcaaaagcactacgatgatcagggtcgcaaggttgacgagtatggcaacgttgagaagcaaaccgacgaatacggcaaccctgttcatgctgctagtgtcacctatgttgccaccagaactgctgctggtggttacagtgatgacataataagcaacatgataccaccaatgcctacggcgtagaca

SEQ ID NO: 139606 - DNA, 242 bp, Glycine max
gtggagagaggaagcctggggagtataattggggagggtacgtggaactcatggaaatggcgaagaagcatggcctcaaggtgcaggctgttatgtcatttcaccaatgtggcggtaacgtcggagactcttgcactattcctttgcccaaatgggttgtggaggagattgataatgaccacgatcttgcatatactgatcaatgggaagaagtactatgaatatatatccttggatgtgat

SEQ ID NO: 139607 - DNA, 249 bp, Glycine max
caaaatctttactcaaattgtccagccggcgttcgaatctgcgttcgatttgaaatccacgccaattgagtttcatagcttccaagatgtgcatgacttgtatgaaggtggaattaagcttcctagagatgtaattagcacaattatccccttaccagtgatcaaagaactctatcgtaccgatggtcaacacatcctcaagtttccaaacctctcgtcctaaaagtgagtcagtctgcatggatgact

SEQ ID NO: 139608 - DNA, 245 bp, Glycine max
caaaggattcacccgccgctcgatgggaattgcgcttcaaggcgtctcgtagggctaatccgcctcacgagggtcaccaacggcacgtgcctttggggggccgaggccccctactgctggtcggcaaacggacggcgggcgcacgcgtcgcttctagcccggattctgacttagaggcgttcagtcataatccaacgcacggtagttcgcgccactggcttttcaaagtagcgcgatgaccaatt

SEQ ID NO: 139609 - DNA, 247 bp, Glycine max
cacaactactcaagtacttccttacaatcaaaaccatcaacaactatggcaagttatcaaaagcactacgatgatcagggtcgcaaggttgacgagtatggcaacgttgagaagcaaaccgacgaatacggcaaccctgttcatgctgctagtgtcacctatgtagccaccagaactgctgctggtggttacagtgatgacattaaaagcaacatgataccaccaatgcctacggcgtagacactgg

SEQ ID NO: 139610 - DNA, 247 bp, Glycine max
gcggtttccttgttggtgttgctgggaactgttttcctggcatcagtttgtgtctcattaaaggtgagagaggatgagaataaccctttctacttgagaagctctaacagcttccaaactctctttgagaaccaaaacggtcgcattcgtctcctccagagattcaacaaacgctccccacaacttgagaaccttcgagactaccgattgtccagtttcagtcaaaacccaacacaatccttctccc

SEQ ID NO: 139611 - DNA, 251 bp, Glycine max
tgaaaaacatgcaagtgctgccaaggaacaagtcgacatctataaagccaaaatagacgagaaggcagagaaagcaacggcaagaacagaagaggagagggtgatagcccatgagcacgcaaaggcaaaggaagctggagcaaagatggagctgcatgaagctaaagcaaggcatgcagcagagaagctaagcgccaaccaatcacatttggtctccaccatggccacaacaaccctcccttagtaggaac

SEQ ID NO: 139612 - DNA, 275 bp, Glycine max
gtggattggatgatggaaaaaccagcaagcccctttcattgaaagggcgcagtgaactgtaattgtgaaaaggttggaagatctggccaaagaaggtgatagccctgtagattcgttcccatggttcgatccttcccagtaaaacgcggcgtgttcgaattctgatcgcttttacgcgagaaagggggaccaccctctaagcctaagtattcctcaatgaccgatagcgtacaagtaccgtgagggaaaggtgaaaagaaccctatttagggagt

SEQ ID NO: 139613 - DNA, 269 bp, Glycine max
gacaggttcaaaccggagcaaaaaaacttgttacgatggtttcttccgacaaggatccacgagaggaagtccttcaagcatggtacatggatgatagtgatgaagatcaaagactcccccaccacaaagaacccaaggagtttgtctcgttggaccaacttcctgaacttggagtccttagctggaaattagatgctgttaaccatgaaaatgatccagagctgaaaaagattcgtgaagagcgtggctacacctacatggatgtttgt

SEQ ID NO: 139614 - DNA, 266 bp, Glycine max
  unsure (1)..(266): unsure at all n locations
agggcaaccacctgtttgaaccgcaaaagggattcttgccagcaatatgctcattacctattccgggttatatgtttggcaaagctattgtctgttctgatgctgcagcagaggctgcaagatatggttttactgctgtggacaggccagaaggattcttggttttggccattgcttctctaggaaatgagattaccgagttgaaaaccccacctgaggatgcatcatctttgganggaaagaaggttggagtgaagggaccgggg

SEQ ID NO: 139615 - DNA, 269 bp, Glycine max
cccggaatagacattggtagagatcatgagactaccggtgtttatggcctaaacaccgatagacatcatggaacgactggtgtcaatcccggaatagacacccataaccaacaacatgggactaccggtggttatgctggtgacactggaaggcagcatgggaatacaggtggcctttactatggaaccgacaccgcggacacaggaaccggtcctagaagtggaaacaccggtggcaccggttatggaggcactggtggtactgatta

SEQ ID NO: 139616 - DNA, 277 bp, Glycine max
cgagcgaggtgcaaagcgagcccaagtggaacgagtgggagaaaagcctcgaatttccatttaattacgtggatgccactctcaacaacagcttcatggcccaattccagggcaataatcagatgttgtcgccgctgcaggacatgttcatgtactggcccaacaagtccttttgagcacatcatgatggttttaaattacgatccgcaattgctcttaagattttctgactcaccatgcgaccacaatcgtaatttaaaaccatgtcacataaaat

SEQ ID NO: 139617 - DNA, 273 bp, Glycine max
  unsure (1)..(273): unsure at all n locations
agaaaacctaagcttagaattagaaacaaagaaaagaagaaaggaaagaattgatcgttgaaaatgcagggaggaaagaaagcgggagagtccattaaggaaacagctacaaacattggtgcttctgccaaggctggcatggagaagaccaaggccactgtccaagagaaggcagaaagaatgacagcacgtgatccggtgcaaaaggagttggcaacccaaaagaaagaggcaaagatgaaccaggcggactnggacaagcaggcggcgcgt

SEQ ID NO: 139618 - DNA, 183 bp, Glycine max
attcaaaccttgctctatactacacagtacatacactagaagaatattggcttccatcctccactactttttagccctctctctttcttgctcttttcttttcttcttatccgactcagtcacccctacaaaaccaatataccttgttgttctacccgttcaaaatgatggttccacacaaca

SEQ ID NO: 139619 - DNA, 273 bp, Glycine max
atcgatttaatcgccgatgggttgatgctttatctgacccacgggtcacccatgaaatccgcagtgtctggatatcttactggtctcaggctgaccgttctctaggccaaaagatagcatctcgtctgagcatgaggccaaatatttaatgttgttgccaaccccagaatgattgttagagttgcagacgtgcaaagagtacatgactcaattattaggcatagtctgacatgattggctggaatttagattagaagctcaatgggtccaatg

SEQ ID NO: 139620 - DNA, 278 bp, Glycine max
ttttgtctcccctgcaatcaacggcaccccccacaaaaatgacaggagagacagtgaacccaaaagcttaccctttggccgatgcgcaactcgcaataacaatcttggatcttgtgcaacaagctgccaactacaagcaactaaaaaagggtgctaatgaagcgactaagacactgaacagaggcatttctgagttcgttgtgatggccgcagacactgagcctcttgagattcttctccatcttcctctccttgctgaggataagaatgttccctat

SEQ ID NO: 139621 - DNA, 275 bp, Glycine max
aactactacaagtacttccttacaatcaaaaccaacaacaactatggcaagttatcaaaagcactacgatgatcagggtcgcaaggttgacgagtatggcaacgttgagaagcaaaccgacgaatacggcaaccctgttcatgctgctagtgtcacctatgtagccaccagaactgctgctggtggttacagtgatgacattaataagcaacatgataccaccaatgcctacggcgtagacactggtagacagcattctagtggtggctacgatg

SEQ ID NO: 139622 - DNA, 270 bp, Glycine max
aaagaacagcttcagaggcatatgaggaaatgtgatcttaagcatccccctggtgatgagatatacagaagtggtacactgtcaatgtttgaggtcgatggcaaaaagaacaaggtttatgggcagaatctttgttatttggccaagttatttcttgatcacaagaccctctattatgatgtagacctgtttctgttctatgttttatgtgaatgtgatgatcgaggttgtcacatggttggctatttctccaaggaaaaacattctgag

SEQ ID NO: 139623 - DNA, 269 bp, Glycine max
gccaaatctgagaggcaaagcggttgttggtgttggttccagaatgataaggtgcatggctaaccccagaagagttcaaatggtggccaagcaaattaggagagagctttctcatatgcttctcaccgataaagtcttgcagtatgctgttcttcccgaagcctccttaggagccgaccgttgcctctcttctctcaccaccatcaccgacgtccaagtctccgccgacttgctaggttgttaaggtgtatgtttctgtttttggagat

SEQ ID NO: 139624 - DNA, 106 bp, Glycine max
ctttttggtttgcttctttacaaaaaatgtgtatgtgtatggttttgaagattggttctagactcgtgggaaccatttcagcaataaaaattttgcgcgttcttgt

SEQ ID NO: 139625 - DNA, 268 bp, Glycine max
cagacttcaatctcgtgatgccctgagagtcccctcaggaaccacatactatgtggtcaaccctgacaacaacgaaaatctcagattaataacactcgccatacccgttaacaagcatggtagatttgagagtttcttcctatctagcactgcagctcaacaatcctacttgcaaggattcaccaggaacattttagaggcctcctacgataccaaattcgaggagataaacaaggttctgtttagtagagaggaagggcagcagcaa

SEQ ID NO: 139626 - DNA, 274 bp, Glycine max
gccagtagtcatatgcttgtctcaaagattaagccatgcatgtgtaagtatgaactaattcagactgtgaaactgcgaatggctcattaaatcagttatagtttgtttgatggtatctactactcggataaccgtagtaattctagagctaatacgtgcaacaaaccccgacttctggaagggatgcatttattagataaaaggtcaacacaggctctgcctgttgctttgatgattcatgataactcgtcggatcgcacggcctttgtgccgg

SEQ ID NO: 139627 - DNA, 268 bp, Glycine max
gctaacttcaacacctttaattttctaaaagtaattcagcggctgaataccaagcggagaagatgagtcaggagcagccacggcgtcccaaaggccaaaaccccatcaaatacggcgacgtttttgtcgtctccggcgaccttgcacagaagcccgtcgcaccggaagatgctgccatgatgcaaagcgcggaagctcgagtgctcggacaaacccaacccggcggacagcttccgtcatgcaatctgccgccaccaggaatgaacag

SEQ ID NO: 139628 - DNA, 267 bp, Glycine max
ctcaaaatcaaaacctttttctttctagctatttcccttttcaaatcatgccacctaacatcaccaccgttgttgccaatgtcaccaccgagcaattacccaaggctcgtggaggaagtgggcgtgccttcgtgacctttcttgctgggaacggtgattacgtaaagggtgtcgtgggtttggccaaaggactgagaaaggccaaaagcatgtaccctttggtggttgctgtgttaccagatgttcctgaagaacatcgtgagattc

SEQ ID NO: 139629 - DNA, 263 bp, Glycine max
ctcttcttctcttgcggctagggtttagcgagctcttctagatttaaggaagatgggtaaggaaaaggttcacatcagtattgtggtcattggccatgtcgactctgggaaatccactaccactggtcacctgatttacaagcttggaggcattgacaagcgtgttattgagaggtttgagaaggaagctgctgagatgaacaagaggtctttcaagtatgcctgggtgctggacaaacttaaggctgagcgtgaaagaggaa

SEQ ID NO: 139630 - DNA, 269 bp, Glycine max
gtaactgcactagtgttggccacatgccttcaaccaaagaggaaggtcacgattttcaggagtctaaagccaagaccacacaaacggcgagctaggccatggtaactggtaaagagggacaagaagccgcagagtcatgtacagaatgggctaaagagaaactcagtaaaggtcttggcttcaaacatgatcaggaatccaaagaatccaccactaacaaagtctctgattatgccactgacactgcacagaaatccagaggattatgg

SEQ ID NO: 139631 - DNA, 271 bp, Glycine max
aaacaattcaattcaatctgcctcgatcatggagaggaaaacatttgtgtttttgttcttgctcctccttgtcttagcttctgatgtgacggtgaagagagcagaggcgaaagattgcttgacaaggaggcacgggtttcagggtagatgcttattcgacaggcaatgtgcacatgtgtgcaggagcgatggtttcatcggtggtcagtgccgaggccctcttcgcaaatgcttttgcagcaggccatgttgatcgacattactactgcca

SEQ ID NO: 139632 - DNA, 268 bp, Glycine max
ctggctctgtgttttcccatcagtacacatctttgcaccaagaagcatttgttagttttttgcgatcaaagtaaaatcaaagctatgcaggaggcgaactcggtggcgaaatcaacatgcaacgcagtgtaagtatgcaactaaaggagaagaaggtgagggatttgatggtggacaagaataggctagtggaggtgccgtacatggcgtcgctggcccacacaatgactacactggtagcgaacaaggttgtggcggtgccggtggc

SEQ ID NO: 139633 - DNA, 265 bp, Glycine max
ggcacttcaagcagaggttggcttgcctgttgacaggaatatccctctgataggcttcattggtaggcttgaagagcagaaaggttctgatattcttgtggaagctatcccaatgttcattgaccagaatgttcagattatgattcttggaactggcaaaaaggtcatggagaagcaaatagagcaactagaggaaatttatcctgacaaggttagaggggtagcaaaattcaacggtcccttggctcacaagattattgctggg

SEQ ID NO: 139634 - DNA, 265 bp, Glycine max
aaagaagctgctgataaatatcaaggcgcaaacttgtatgtaaaaaatttagatgatagcattggtgatgaaaaacttaaggagctgttctccccttttggtaccattacctcttgcaaggttatgagagacccaaatggcttaagtcgtggatcgggttttgttgcattctcgactcccgaggaggcatctagaatcatcctggagatgaatggcaaaatggtggtaagcaaacctctgtatgtgactctagcccaaaggaaag

SEQ ID NO: 139635 - DNA, 266 bp, Glycine max
gtctgctggcagcccaagaggtggtcctaggcgtgttgattttggtgactactttatgggtcctggactggaagaacttattgagcaactcaccatgaatgatcagcgtggtccagccccagctgcacgatcttcaattgatgcaatgcctactattaagataacacaggcgcatcttcgctcggattcacactgtccagtttgtaaggaaaaatttgaattgggcactgaagccagagagatgccatgcaaccatatttaccatt

SEQ ID NO: 139636 - DNA, 261 bp, Glycine max
agaaggttgaggccaaaaacgctttggaaaactatgcatacaacatgaggaacaccgtgaaggatgacaagattggtgagaaacttgacccggctgacaagaagaagattgaggatgcaattgagcaagcaatccagtggttagacagcaaacagcttgcagaagcagatgagtttgaggacaaaatgaaggaattggaaagcatctgcaatccaatcattgccaagatgtaccaaggtggtgctggtccagacgtgggtg

SEQ ID NO: 139637 - DNA, 266 bp, Glycine max
ctcattttagctttctcttccttcataatttctcacctttcaaatctccattcagcttcattttctgcatagaaaaaacccttttctggagaaagaatatagtcttcagctggacaaggatcattcatcttgaaagaagagtttgtgtgtgacaatctttatagttctaaggagggtgcaagagagaactgaatttgctgtgatggcaactcgtagatatgcttttggaagagctgatgaggccactcatccagactccatgaggg

SEQ ID NO: 139638 - DNA, 264 bp, Glycine max
cgttgccattctcatcctcttctttctctctctaccattgccatggatccctacaagcaccggccatccagcgccttcaattctcccttctggactacaaattctggtgctcctatttggaacaacaactcctctttaaccgttggagctagaggtccaattctgctggaggattatcatcttgtggagaagcttgcaaattttgatagggaacgtatcccagaacgtgttgtccatgccaggggcgctagtgcaaagggtttc

SEQ ID NO: 139639 - DNA, 262 bp, Glycine max
caaaaaagccggggccatgaatgcattggttcgagcctcagctataatgtctaatggcccttttatacttaatcttgactgtgatcactatatctacaactcaaaggcaatgagggaaggcatgtgctttatgatggatcgtggaggtgaccgcctttgttatgtccagttcccccagaggtttgaaggaattgatccctctgatagatatgctaaccataatactgttttctttgatgtcaatatgcgagcccttgatggg

SEQ ID NO: 139640 - DNA, 167 bp, Glycine max
caaaccttgctctatactacacagtacacacactagattaataatggcttccatcctccactactttttagccctctctctttcttgctcttttcttttcttcttatccgactcagtcacccctacaaaaccaatataccttgttgttctacccgttcaaaatgatg

SEQ ID NO: 139641 - DNA, 113 bp, Glycine max
gcaaggaccaagccccgatgagtaggagggcgcggcggtcgctgcaaaatccagggcgcgagccggtgcggacgtgtcgtcggtgcagatcttggtggtagtatcaaatattt

SEQ ID NO: 139642 - DNA, 261 bp, Glycine max
  unsure (1)..(261): unsure at all n locations
agaaggcgacgctcgaannccgcggcgnggcggctaggnggaggaaaagaagccatgaagcagttnctgaagctgattnttgagtgggttcaaaccagccatcttcagaataagcgccgaaaggagaataatggtagtagtattngcagtgtacttcaggcacagtttcaggatcctagtggccngaacacacaaagtggttccatttgcncctgaatcaaacacttgtttcaacaaccaaacaccatggttgagttctca

SEQ ID NO: 139643 - DNA, 257 bp, Glycine max
gagctgaagaaaacctaagcttagaattagaaacaaagaaaagaagaaaggaaagaattgatcgttgaaaatgcagggaggaaagaaagcgggagagtccattaaggaaacagctacaaacattggtgcttctgccaaggctggcatggagaagaccaaggccactgtccaagagaaggcagaaagaatgacagcacgtgatccggtgcaaaaggagttggcaacccaaaagaaagaggcaaagatgaaccaggcgg

SEQ ID NO: 139644 - DNA, 259 bp, Glycine max
tacattttggcattgcagtgggattctaccagggggatagtatgaaattaatggatgacatagctgctctaagacctactgtcttttgtagtgttcctcggctatataacagaatatatgctggtattactaatgctgttaaaacatctggtggtctgaaggagagactatttaatgctgcctacaatgctaaaaggcaggctttattgcatgggaagaacccatctccaatgtgggacagattagttttcaacaagat

SEQ ID NO: 139645 - DNA, 260 bp, Glycine max
agaaggttgaggccaaaaacgctttggaaaactatgcatacaacatgaggaacaccgtgaaggatgacaagattggtgagaaacttgacccggctgacaagaagaagattgaggatgcaattgagcaagcaatccagtggttagacagcaaccagcttgcagaagcagatgagtttgaggacaaaatgaaggaattggaaagcatctgcaatccaatcattgccaagatgtaccaaggtggtgctggtccagacgtgggt

SEQ ID NO: 139646 - DNA, 259 bp, Glycine max
ggcaagatgtcgaagagaggacgcggtggttcggcggggaacaagttccggatgtcgctgggtctgccggtggcggcgacggtgaactgcgccgacaatacgggggcgaagaacctctacatcatatcggtgaaagggatcaaagggcgtttgaaccgtctcccctcggcttgcgttggcgacatggtgatggccaccgtgaagaaggggaaacccgatctgaggaagaaggttttgccagctgtcattgttcgccagc

SEQ ID NO: 139647 - DNA, 263 bp, Glycine max
agaaggttgaggccaaaaactctttggaaaactatgcatacaacatgaggaacaccgtgaaggttgacaagattggtgagaaacttgacccggctgacaagaagaagattgaggatgcaattgagcaagcaatccagtggttagacagcaaccagcttgcagaagcagatgagtttgaggacaaaatgaaggaattggaaagcatctgcaatccaatcattgccaagatgtaccaaggtggtgctggtccagacgtgggtggt

SEQ ID NO: 139648 - DNA, 263 bp, Glycine max
gtacgggcagatcttccgccccgacaacttcgtgttcgggcagtccggcgccggcaacaactgggctaaggggcactacaccgagggcgccgagctcatcgactccgtcctcgacgtcgtgcgtaaggaggccgagaactgcgactgcctccaggggttccaggtctgccactcgctcggcggcggaacgggctccgggatggggacgcttcttatttccaagatcagagaggagtatcctgacaggatgatgcttactttct

SEQ ID NO: 139649 - DNA, 266 bp, Glycine max
cttaaaggagttacagagtaaaagcaccgtctccgtctccactctcggcttcttcttcgttgcgctttttcccaaaaccaattgcatcactctcgtccgttaccgccgctgccctagaccaccgcaagcgacgtcgcacaccgccttcatccgttagggcaaaaatgagtcgaggaagtggaggtggatacgatcgtcacatcactattttctcccctgaaggacgtctctttcaagtggagtatgctttcaaggctgtgaaggct

SEQ ID NO: 139650 - DNA, 268 bp, Glycine max
tcaaaaagactgtgaaaaatccaaaagagagcagtgatagttccgaagaagacagtgaggatgaaactgaggatgaaccctccaaaactcctcagaaaagagacagggatgtggagatggttgatgctgcctcgtctggagagaaagcgcctaagaccccagttacacccaaagaagaaactggcgcttcaaagacactatttgttgggaacttgccatttagtgttgaacgagctgacgtggaagatttcttcaaggatgctggaga

SEQ ID NO: 139651 - DNA, 263 bp, Glycine max
tggacttatatattcattccccgtcacttgtgccaatggggaatgggcaatagttcaaggactttccattgatgagttctcaaggaagaagttggacttgactgcagaagagctttctgaggagaaggcattggcttactcatgcctaaattagacaccattgctttttgtctactgtccttgttagtaggttcccatgttttgcctatagaagtgtagcttcaattttgaataatgctccttctaagatacaaaggaactat

SEQ ID NO: 139652 - DNA, 267 bp, Glycine max
gattgatgaagctggttcacgagtccggcttcaacatgcacagttacctgaagaagcaagagaacttgacaaggaggtgaggcagattattaaggacgaaagaagaagctgttcgcaaccaagactttgaaaaggctggagagctacgtgatagagagatggatcttaaggcacagatctcaacacttgtagagaaaggcaaggagatgagcaaggcagagactgaggcaggggatgaaggtcctattgtgactgaagctgacatac

SEQ ID NO: 139653 - DNA, 267 bp, Glycine max
acttttcgtacccaaaaagagagagggactattcaaggtggccagacacgccagaagggtggagatcggtgactgaggaatacagcgacaaagtaatgggtctagctgggaagctcatggaggtgttgtccgaagcaatggggttagagaaagaggctttaagcaaagcatgtgttgacatggaccagaaggtggtggttaattactaccccaaatgccctcaacctgacctcactcttggcctgaagcgccacacggatccgggca

SEQ ID NO: 139654 - DNA, 266 bp, Glycine max
gtggcactttgatttcttacgaaggaagggttcagctcctggaaattgcacaagtccccgatgaacatgtcaatgagttcaagtcaatagagaagttcaaaattttcaacacaaataatttgtgggtgaacttaaacgcagttaaaaggcttgttgaagctgatgctcttaagatggaaattattcccaatccaaaggaagttgacggaataaaagttcttcagctggaaactgcagctggtgctgcaataaggttctttgacaag

SEQ ID NO: 139655 - DNA, 260 bp, Glycine max
gtcgcaaggctgaaacttaaaggaattgacggaagggcaccaccaggagtggagcctgcggcttaatttgactcaacacggggaaacttaccaggtccagacatagtaaggattgacagactgagagctctttcttgattctatgggtggtggtgcatggccgttcttagttggtggagcgttttgtctggttaattccgttaacgaacgagacctcagcctgctaaatagctatgtggaggtaaccctccacggccagc

SEQ ID NO: 139656 - DNA, 261 bp, Glycine max
agcgatagctgataagagagataccaacaagaaaagataaaaagaagagttgagattccctttgaagacaagatggcatcccataggcaaagctatgaagctggtcaaactaagggccgaacggaggaaaagacgaaccagacgatgggcaatattggagagaaggctcaagctgcaaaggagaagacccaggaattggcccaagctgcaaaggggaggacccaccaaacagcccaagctgccaaggacaagacttgcgac

SEQ ID NO: 139657 - DNA, 262 bp, Glycine max
ggctacttacatgatggatgaccctctaactgaaggaccaagtccaacttcaaagcttgtgggaagatctcagggaatatacgctttggcttcacaacatgagcctgggttgctcatggtgacaaattttctcttcactttgggcatttacaatggcagcaccctcagcattcttggcagaaaccctacatttataaaagttagagaaatgccaattgttgggggtactgggatcttcaaatatgcaaggggttctgctgtg

SEQ ID NO: 139658 - DNA, 266 bp, Glycine max
cacaactactacaagtacttccttacaatcaaaaccaacaacaactatggcaagttatcaaaagcactacgatgatcagggtcgcaaggttgacgagtatggcaacgttgagaagcaaaccgacgaatacggcaaccctgttcatgctgctagtgtcacctatgtagccaccagaactgctgctggtggttacagtgatgacattaataagcaacatgataccaccaatgcctacggcgtagacactggtagacagcattctagtg

SEQ ID NO: 139659 - DNA, 197 bp, Glycine max
gtgattgtctgttgttgtaactcgttcttctacttttgttgttctgtgtttgtgtttgttttgtctctcacctgaaaatgtcttgctgcggtggtaactgtggttgcggaagctcctgcaagtgcggcaacggctgcggaggctgcaagatgtacccagacttgagctacactgagtcaaccaccaccgagaccttg

SEQ ID NO: 139660 - DNA, 256 bp, Glycine max
gcagtgggcggaggctcgggactctgaccgcgtgcctgttgaagaatgagccggcgactcataggcagtggcttggttaagggaaaccaccggagccgtagcgaaagcgagtcttcacagggcaattgtcactgcttatggacccgaacctgggtgatctatccatgaccaggatgaagcttgggtgaaactaagtggaggtccgaaccgactgatgttgaagaatcagcggatgagttgtggttaggggtgaaat

SEQ ID NO: 139661 - DNA, 258 bp, Glycine max
  unsure (1)..(258): unsure at all n locations
ttttacttcctaagtctaatcaaccacatacctttgtcattatnagtcttgntccccctattcganagggacaaactttgtacccncatattgtgatgcagtttgaaactgattatgtngtnnaaagtgaatnggcaataaatgaagatctttataacacaaagttcaaggacaagttggagctgtcttanaagggtcntattcatgaagtgttcaccacaatattacgtggtttgtctggtgccaaagtgaccaagc

SEQ ID NO: 139662 - DNA, 260 bp, Glycine max
tgtaattgtagtagtagacagtagcaccatgagccaggaacagctcaagaaacctcaaggggagcaggaccccatcaaatacggcgacgttttcaaagtctccgacgaactcgctttcaaacccatcgcgccaagagacgcagctctcatgcaagccacggagaaccaagcattgggccaaactcaaaaaggaggtcccgcctcggtgatgcaatccgccgcaaccgaaaacctccgcgccggcgtcgtgggccgccaag

SEQ ID NO: 139663 - DNA, 259 bp, Glycine max
cacatactatgtggttaaccctgacaacgacgagaatctcagaatgataacactcgccatacccgttaacaaacccggtagatttgagagtttcttcctatctagcactcaagctcaacagtcctacttgcaagggttcagcaagaatattctagaggcctcatacgacaccaaattcgaggagataaacaaggttctgtttggtagagaggaggggcagcaacaaggggaggagaggctgcaagagagtgtgattgtg

SEQ ID NO: 139664 - DNA, 253 bp, Glycine max
cgatgcggatgaggcgccactcgatgtttccatttgcctgcatgcctttggtattgtggggtgtggttcgtttagtggtgtcaagtcttgcgaacgtgagggtgcatgagtggtaatcgggatgtttttgttgcacggctccatgcttgcgcatgcaacgtgtgacatgcatccttttcattgtcaccttagccttcgtggcttaggtgctgacgattggttcctgtgttgcctacctaccaaacggtattcg

SEQ ID NO: 139665 - DNA, 257 bp, Glycine max
tgagaaagctgaatcctggtaaattgttggcagttgcacttgcacatggatttgctctacttgctgctgtttctgcaagcatgcatgtatcaggtggccatgtcaacccagctgtgacatttggtgctctcattggaggcagaatttctgttctccgtgccgtatactactggattgctcaaattctaggtgctatagtggctgccctcgttctcaggcttgtcactaataacatgagaccatcagggttccacgtg

SEQ ID NO: 139666 - DNA, 261 bp, Glycine max
tccaaagctcgtctcctcggggtggagtacatcgttcctgctgatgtctttgaagcctttcctccggaggagcagaaactttggcattctcatgcttatgagattaaatcaggcctgttggtgaatcctagagttcctgaggttgttgccatgccagagctcgaaaaccttgcccaaacttacggcaaattctggtgtacatggcaggttgacagaggggataggcttcctatgggtgcacctgccctgatgatgtctcca

SEQ ID NO: 139667 - DNA, 256 bp, Glycine max
ggtatggtcagccgcatagagcaccagatttgcagaaagaagctatatatggattaacagaggttttaagggaggaaataaagaatgcacgtctagttgctaatcctggttgttatccaacttctgttcaacttcctcttgtcccattgataaaggctagtcttattgagcttaaaaatattatcattgatgctaaatctggtgtgagtggagcagggcgcagtgccaaagaaaatttattgttcactgaagtaac

SEQ ID NO: 139668 - DNA, 250 bp, Glycine max
tacaccgaactagtttaataagtctcagaaacactcactcactcgattcttctcaaaccgtcaccgtcgaggctatgcccaccaacgaagacttccagagtgtttcaaattgctatgtgttcaagagccgattgcaggagtatgcacagaaggcggggctgcccacgcctgtctatgaaactattaaggaagggccttcccatgaaccttctttcaggtcaacagtgatagtgaacgacgttcggtatga

SEQ ID NO: 139669 - DNA, 253 bp, Glycine max
ctgtaattgtactagtatacagtagcaccatgaggtacgacccgctcaagaaacctcaacgggagcaggacgccatcaaatacggcgacgtgttcaaagtctccgacgaactcgctttcaaactcatcgcgccatgagactcagagctcatgctagtcacggagaacccatcattgggccagactcaaaaaggaggtcccgtctcggtgataccatccgccgcaatcgaaaacctcctcgcctgcgtcgtggg

SEQ ID NO: 139670 - DNA, 130 bp, Glycine max
tgttgctgttcgagctagctagctagcaagcaagcttagagatggatgcaaagcgaggccatgccctcatgtgcttggcacgtgtttcactcttcctctgtgctctaactctatccgctgctcatggtag

SEQ ID NO: 139671 - DNA, 252 bp, Glycine max
caaagctggcttcagcgtttcaataatcgacaatttcgataactccgtcatggaagcagtggaccgcgtccgccaagtggttggccctctgctttctcagaacctccaattcacccagggcgatctccggaatagggatgacttggagaaactcttctccaaaacaacatttgatgccgtgatccactttgctggcttgaaagcggttgctgaaacgttgcgaagcccgtcgctattttgattttaatttgg

SEQ ID NO: 139672 - DNA, 254 bp, Glycine max
cagtgaaagagaatccgaggcgaagagaagagaaaaattaagatggaggggaaggagcaggatgtgtcgctgggagcgaacaagttcccggagagacagccgattgggacggcggcgcagagccaagacgacggcaaggactaccaggagccggcgccggcgccactggttgacccgacggagtttacgtcatggtccttttacagagcagggatagcagagtttgtggccacttttctgtttctatacatcac

SEQ ID NO: 139673 - DNA, 251 bp, Glycine max
gtctctccgcagcagccttcttcgccgtttcagctcaagagccaccagcaggtaagatatggttaagcataacaacgttatccccaatgggcacttcaggaaacactggcaaaactatgtgaagacttggtttaatcaaccagcacggaagaccagaaggcgtttagctcggcagaagaaggctgtcaagattttcccaaggcctactgctggacctctcaggccaattgttcatggccagactctgaaat

SEQ ID NO: 139674 - DNA, 253 bp, Glycine max
agtggatgatgctggattggcagccgcggcgccccgacatgctcattgacccctttgggattgggaagatcgtgcaggatgggcttgtgttcaggcagaacttccccattaggtcctatgagattggcgccgataaaaccgcgtctatcgagactttaatgaatcatttgcaggagactgcacttaatcatgttaagactgctgggcttcttggtgatggatttggttccacgcctgaaatgtgcccaaagaa

SEQ ID NO: 139675 - DNA, 247 bp, Glycine max
caatatcctagtataccttaataaataatttaagatactattatgagagcacggttcccattactgttgctgggacttgttttcctggcttcagtttctgtctcatttggcattgcttactgggaaaaagagaaccccaaacacaacaagtgtctccagagttgcaatagcgagagagactcgtacaggaaccaagcatgccacgctcgttgcaacctccttaaggtggagaaagaagaatgtgaag

SEQ ID NO: 139676 - DNA, 256 bp, Glycine max
gaaagaacttccttataaccaaaaccaacaacaactatggcaagttatcagaagcactacgatgatcagggtcgcaaggtcgacgagtatggcaatgttgagaggcaaactgacgaatatggcaacccggttcatgccactagtgtcacttatgtagccactaaaagtgttggtggctacaatgatgacactaataagcaacatgataccaccggtgtctatcctgagaaagataccggtaggcatcattttggtc

SEQ ID NO: 139677 - DNA, 274 bp, Glycine max
tgaagcttggattcgtgtgtgggtcaagaaaggaggaatgatcatcttacctgccggaatttatcatcgctttacgctagatgagagcaactacattaaggctttgcgtttttttgttggtgagccagtttggactccatacaatcgtccaaatgaccatctccctgcaagacaacaatatgtcaaggattttgtggaaaaggatgttagcaaccatgctgttgatgccgccgcgtaagatctggttctgcctaatcatagtaccacatgaagc

SEQ ID NO: 139678 - DNA, 268 bp, Glycine max
caagcacccttctgccactccacccaatgctctagaaccaacacccaccaatgcctcagttgccccgcggcatcaaggccagggtgccacaaaaacacgtgtggcctcatgtgcactaatcccatcacccaacaaaccggtttaggtgaactaggagaagacgttcttgcaatccacgccacacaagggtcgacccaacaacttggcccattggtcacagtcccacaattcctcttttcttgtgcaccttccttccttgttcaaaagg

SEQ ID NO: 139679 - DNA, 266 bp, Glycine max
tcattaacaagtctttcggaaaaggttcacttctatcagttctaagacaattttctcgattgaaacgtgataagcaagcaatatctgttggatttgttggatacccaaatgttgggaagtcatcagtaatcgacacattgcgtactaagaatgtctgcaaggttgctccaattccaggggaaacgaaagtatggcagtatataaccctaacaaagaggatcattctgattgattgtccaggtgttgtctaccacaacaatgatact

SEQ ID NO: 139680 - DNA, 211 bp, Glycine max
gagagatgctgaagtagaaatcggtgcaagatattctccactttatctaaaaaaattcggtgagtttgtgaagacaaaaaatcactagctactcaaaaatggccacagtaggaaggaacgttgcagctcctttgctgtttcttaacttgatcatgtattttgttgttcttggctttgctagttggtgcctcaacaggttcatcaatggcaa

SEQ ID NO: 139681 - DNA, 183 bp, Glycine max
tatgtaggagaatagggtttcgttccgtttcaatggggagcgaagagcagaacggcgaattctacctgcgttactacgtcggtcacaagggcaagtttggtcacgagttcctggagttcgagttccgcccagacggcaagctccgctacgccaacaactccaactacgaaaacgacaccatca

SEQ ID NO: 139682 - DNA, 254 bp, Glycine max
ctgtgcctttctctgtgcgtgaaattggaggcgatggaagtagcttcctggactatggcttgagtgaagctgatcctgatgttcgtgcaattattgacaaggaaaaggaccgacaatttgaaagtcttgagcttgttgcttctgagaattttacatctagagcagtgatggaagcagttgggtcgtgcctcacaaacaagtactcggagggattgccgggtaaaaggtactatggtggcaatgagtacattgat

SEQ ID NO: 139683 - DNA, 153 bp, Glycine max
aaatgacaagcatgatggtgtgaggatgagtccatcttatgaaatggtgacaaatgagtggattttgtatgataataaaaagtatggcccatgtaccatcccagcgagcctatgtttatatctgagtggcgttgtacctttcaatcgccttaa

SEQ ID NO: 139684 - DNA, 239 bp, Glycine max
tttcgaagctgatcgctgaatcgaagtacgtccagaacaacccgccggagctcattccccaagaggacagagtggtgaagcacgtcttggacgttctgttaccgttcagcaccaccaccggcggtggacccttgctcgtaaaccacgtcacctaccacgccggcagagggaacctcatcgtggagcaccccggcaccgttcccggaacaatcctctcgttcgtcggatgccacatggac

SEQ ID NO: 139685 - DNA, 168 bp, Glycine max
acaaaaaataaaacgtgattcgctcttgtcttcgaataaaccacgaattcgacaaacgagaagagtagtgagagaagatggggttgtcgttcacgaagctgttcagcaggttgtttgcgaagaaggaaatgagggttctgatggtaggtctcgatgctgctggaaaga

SEQ ID NO: 139686 - DNA, 152 bp, Glycine max
catcgatgcggatgaggcgccactcgatgtttctatttgcctgcatgcctttggtattgtggggtgtggttcgtttagtggtgtcaagtcttgcgaacgtgagggtgcatgagtggtaatcgggatgtttttgttgcacggctccatgcttg

SEQ ID NO: 139687 - DNA, 249 bp, Glycine max
cgaaggaagtgagccagcagaggaaggactgcgtagaccctccgcctgcccccctcatcgacttggccgagattaagctctggtccttctgcagagccctcatcgccgagtttgtcgccacactcctcttcctctacgtcggcgtcgccaccgtcattggccacaaaaaacagaccggaccatgtgacggcgttggccttctcggcatcgcatgggccttcggtggcatgatgtttgtgctcgtctact

SEQ ID NO: 139688 - DNA, 261 bp, Glycine max
cagcattctagtggtgactacgatggtgacactagtaaacatcatggaattactggtggctgtggtgatgacaccaatagacatcatggaactaccggtgtctatggtgtagacaccgataggcaacaacatgggactactggtggctatgccggtgacactggtaggcaacatgggaacatcggtggcccttgctatggaaccaacaccgcagacaccggtactggtcccagagttggaaccacgggcggcaccggttat

SEQ ID NO: 139689 - DNA, 243 bp, Glycine max
ggttgcccactgcaggcatatattgtcatgggtccgatttactaccagaaagtggaacatatggtgcttgataagatgcatgctcgtggtagtggccctcgtgtcatgttgactagacagcctacggaagggagagctgcaagtggaggtcttcgtgttggagaaatggaacgtgattgcttgattgcatgtggtgctagtgtgttggtttatgagcgactcgtgttgtctagtgatcctttt

SEQ ID NO: 139690 - DNA, 263 bp, Glycine max
acaaaattgaactgtggttgtggtagtagacagtatcaccatgagccaggaacagctcaagaaacctcaaggggagcaggaccccatcagatacggcgacgttttcgaagtctccgacgaactcgctttcagacccatcgcgccaagagacgcagctctcatgcaagccacggagaaccaagcattgggccaaactcagaaaggaggtcccgcctcggtgatgcaatccgccgcaaccgaaaacctccgcgccggcgtcgtgg

SEQ ID NO: 139691 - DNA, 263 bp, Glycine max
cgaccccatctgttccaacaagcttggcaagtcgtttgagatcaccccagagaaaaaccctcagcttcgggacttggatgtcttcctcagtgttgtggatatgaacgatggagctctttttctgccacacttcagttcaaaggccatagtggtactagtggttaatgaaggataagcaaacattgagcttgttggcattaaagaacaacaacagaggcagcaacaggaacagcaacctttggaagtgcggaaatatagagctg

SEQ ID NO: 139692 - DNA, 262 bp, Glycine max
agtgggagctggaaacagcgaaagtggaataccactacttttaacgttattttgcttgttccgtgaatcggaagctgggcactgcccctctttttggacccaaggtcggcttcggccggtcgatccgggcggaagacattgtcaggtggggagtttggctggggcggcacatctgttagaagatgacgcaggtgtcgtaagatgagctcgacgagaacacggatctcgtgtggaacaaaagggtagaagctcgtttgattct

SEQ ID NO: 139693 - DNA, 273 bp, Glycine max
tttcattcattcttaatctttgtgaacaatgatgttcatcgagaattttgaggttgagtgtcctaatgtgaagtacaccgagactgagattcagtccgtgtacaactacgaaaccaccgaacttgttcacgagaacaggaatggcacctatcagtggattgtcaaacccaaatctgtcaaatacgagtttgaaaccagcatccatgttcctagattaggggtaatgcttgtgggttggggtggaaacaacggctcgaccctcaccggtggtgt

SEQ ID NO: 139694 - DNA, 219 bp, Glycine max
gattttgtccatccaaaccttgaaaagagtcagtgaagatcaacgttaatggcatctcttggtgtgcaagcagttcatcctcctccattaacatccacctccgacccacctcctctttttgatggtaccaccaggttgtacatcagttattcttgcccctatgcacaacgtgtatggatcgctcggaacttcaagggactaagagacaggatcaatttg

SEQ ID NO: 139695 - DNA, 261 bp, Glycine max
ggaaggagcaggatgtgtcgctgggagcgaacaagttcccggagagacagccgattgggacggcggcgcagagccaagacgacggcaaggactaccaggagccggcgccggcgccactggttgacccgacggagtttacgtcatggtccttttacggagcaaggatagcagagtttgtggccacttgtctgtttctatgcatcgatgtcttagacgtcatgggagtcgccggggctaagtctaagtgcagtaccgttggga

SEQ ID NO: 139696 - DNA, 253 bp, Glycine max
aaaacagtaaagctaacttcagcacctttgattttctaaaagtagttcagcggctgaataccaagcggagaagatgagtcaggagcagccacggcgtcccaaaggccaaaaccccatcaaatacggcgacgtttttgtcgtctccggcgaccttgcacagaagcccgtcgcaccggaagatgctgccatgatgcaaagcgcggaagctcgagtgctcggacaaacccaacccggcggagcagcttccgtcatg

SEQ ID NO: 139697 - DNA, 264 bp, Glycine max
gctggtattactgtcatccagattgatgaggctgctctaagagaaggtttacctctgaggaagtctgaggaggctttctatctaaactgggctgttcactcatttaggattaccaactgtggtgtggaggacactactcagattcacactcacatgtgctactccaacttcaatgacatcattcactcaatcatagacatggatgctgatgtgatcaccattgagaactccagatcagatgagaagttactttcggtcttccgt

SEQ ID NO: 139698 - DNA, 113 bp, Glycine max
tgtcaatgaacaagatgtacttctatttatcgacaatgtctttcgcttcgtccaagcaggatctgaagtatctgccttattgggtcgaatgccttctgctgtgggttatcaac

SEQ ID NO: 139699 - DNA, 257 bp, Glycine max
attctgaagaagtgccctgatgccattccagaccctaaggccgtgcagtacgtgagaaacgaccgtggcacccccatgattctagacaacaattactacagagatatattggacaacaagggcttgttgatagtggatcaccaactagccaatgacaagaggaccaagccttatgtgaagaaaatggccaagagccaggactatttcttcggggagttttctggagccattgctttgctctctgagaacaaccctct

SEQ ID NO: 139700 - DNA, 100 bp, Glycine max
ggcgacaaaggaaggcagagccataggcatcgatctcggcacgacctacagctgcgtgggcgtgtggcaaaacgaccgcgtcgagatcatcgccaacgac

SEQ ID NO: 139701 - DNA, 263 bp, Glycine max
ctagcgatactgataagagagataccaacaagaaaagaccaaaagaagagttgagattccctttgaagaaaagatggcatcccataggcaaagctatgaagctggtcaaactaagggccgaactgaggaaaagacgaaccagacgatgggcaatattggagagaaggctcaagctgcaaaggagaagacccaggaaatggcccaagctgcaaaggagaagacccaacaaacagcccaagctgccaaggacaagacttgcgaca

SEQ ID NO: 139702 - DNA, 133 bp, Glycine max
tcgtctgatagcgctctttgcgcgtactccgagagggattcgggttaaaattcctggaccggtgactggcggctgacggcatcgttagtgagtcctgatatgtctgcgggggccccgggaagagttatcttgg

SEQ ID NO: 139703 - DNA, 249 bp, Glycine max
cttataaattctattctggttgacgcttctctcaccatccccatttcgcgttggtgcaaagcatccttcgtttcaatttctctctctcagcgctttctgcaatcgaacctttcatctccaaagggatccacaggccgaaggagaaatggggctgacattcacaaagcttttcagtcggcttttcgcgaagaaggaaatgcgaattctgatggttggtcttgatgctgctggtaagaccactatcctgta

SEQ ID NO: 139704 - DNA, 249 bp, Glycine max
atctacacaaaagtgttccacgtgagtgaaaagtcgtgtgttaagaactaaacaatttttcaatggcgtccaagaaacaacaggagcgcgctgaggcagctgcgaaagttgctgccaaagaactcgaacaagtcaacagagaaagaagactccgtgatttcggtgttgttgctgaacaacaagaacaacatcatcaggaagatcaacaaaaacgtggtgtaatcgggtccatgtttaaggcggtgcaag

SEQ ID NO: 139705 - DNA, 248 bp, Glycine max
  unsure (1)..(248): unsure at all n locations
cacagatttcattatcaccagtaccttccaggagattgctggaagcaaggacactgttggacagtatgagtctcacacagcctttacccttcctggactctaccgtgttgtgcacggcattgatgnctttgatccaaaattcaacattgtctcccctggagctgatcaaaccatttacttcccccccaccgaaactagccgtaggttgacctccttccaccccgaaatcgaagnacttctttacagct

SEQ ID NO: 139706 - DNA, 244 bp, Glycine max
gcaaaggattctacccgccgctcgatgggaattgcgcttcaaggcgtctcgtaggaccaatccgcctcacgagggtcaccaacggcacgtgcctttggggggccgaggccccctactgctggtcggcaaacggacggcgggcgcacgcgtcgcttctagcccggattctgacttagaggcgttcagtcataatccaacgcacggtagcttcgcgccactggcatttcaaccaagcgcgatgacc

SEQ ID NO: 139707 - DNA, 247 bp, Glycine max
agagaatataggaatataagaactaagatggattggatcggatcgtaccgcggaggccagagaagcagggactggtgcgacccttcatcaccattcactgatttgtgggaccctcgtcgtgtcggtgacgctgatgatatcacctcctctctcgcccatgctcacgttgactggcgtgagactgataaagctcatatcttccgtgctgatcttccaggggtgaagaaagaggatctgaaggtgcagg

SEQ ID NO: 139708 - DNA, 249 bp, Glycine max
ctgatgaaagattggtaggcacagaacatgagtgatatgatccttttcttggtggaattcaaaaatatgccactcccatgatgcccctagatgaagaaattctttctaaggttgcacaagatatggttgaggaatggtttgattgtgttgatgaggaggattcctttgaggaagtttctttaagtgcagcactcaatggtgttgagggtttggactatatggaaagaattcctcttgccacatctgagg

SEQ ID NO: 139709 - DNA, 250 bp, Glycine max
gtgagaaacaaagaaaggaaataattgatctttgaaaatgcagggaggaaagaaagctggagagtccatcaaggaaacagctgcaaacattggtgcttctgccaaggctggcatggagaaaaccaaggccactgtccaggagaaggcagaaagaatgacggcacgtgatccgatgcaaaaggagttcgcaacccagaagaaagaggcaaagatgagccaggcagagctggacaagcaggcggcgcgtcag

SEQ ID NO: 139710 - DNA, 247 bp, Glycine max
gttaccatttgctcccagtacagagcttaaccgagcttcacaaagatgaatcgggaaaagttgatgaagatggccggttcggttagaactgggggaaagggtaccatgagaagaaagaagaaggctgtccacaagacaacaaccacagatgacaaaaggcttcagagcaccctgaagagaataggggtgaatgccatcccggctattgaggaggtcaatatctttaaggatgacgtattatccagtt

SEQ ID NO: 139711 - DNA, 246 bp, Glycine max
gattaataacactcgccatatccgttaacaagcctggttgatttgagagtttcttcctatctagcactgaagctcaacaatcctacttgcaaggattcagcaggaacattttagaggcctcctacgataccaaattcgaggagataaacaaggttctgtttagtagagaggaagggcagcagcaaggggagcagaggctgcaagagagcgtgattgtggaaatctcgaaggaacagattcgggcac

SEQ ID NO: 139712 - DNA, 257 bp, Glycine max
gctcgtcatgcaacactccaccactaacaaagtctcagattatgccactgacactgcacagaaatccaaggattatgcaactgacactgctcagaaatcaaaggactatgcaggtgatgctgctcagaaatcaaaggactacgccggtgatgctgctcagaaaaccaaagactatgccagtgacactgcacagacatcaaaggactatgctggtgatgctgctcagcaatcaaagggctatgttggtgatgctgcac

SEQ ID NO: 139713 - DNA, 247 bp, Glycine max
tgagaaagctgaatcctggtaaattgttggcagttgcacttgcacatggatttgctctatttgctgctgtttctgcaagcatgcatgtatcaggtggccatgtcaacccagctgtgacatttggtgctctcattggaggcagaatttctgttctccgtgccgtatactactggattgctcaaattctaggtgctatagtggctgccctcgttctcaggcttgtcactaataacatgagaccatcagg

SEQ ID NO: 139714 - DNA, 247 bp, Glycine max
cgtccacttgatctcatcatagtcgtcagcgtcaattgaagaagatgccgatcagacacatcgccgtcggaaggcctgaagaggcgactcaccccgacacgttgaaggcggctttggctgagttcatctcaaccttcatcttcgtgttcgccggctcaggctccggcatcgcctacaacaagctcaccgacaacggcgctggcacccctgccggcctcatctccgcctccatcgcccatgcattcgc

SEQ ID NO: 139715 - DNA, 141 bp, Glycine max
gcaccgaaatcggcgcgattgcagagcgaagaagcaagcgagcaagcaaacgcagacatgcggtcaaagcgaggccatagccgcaggtgctgtgcacgtgtagcactcttcctctgcgcgctaacccgatccgctgcacac

SEQ ID NO: 139716 - DNA, 247 bp, Glycine max
ctccgctttcgcccactgtgccgcttccgctgtctgagacatctgaatttgctaggagatgggttccattgtgtaagacatacaatattgagccccaggcaccggaatggtactttggtcagaagatgggctatctgaaaaataaagtatatccagcatttgtaagggaaaggagagcaacgaagagggattatgaagaatttaaggtgaggattaacagtttggtggcaacaacacaaaaggttcc

SEQ ID NO: 139717 - DNA, 244 bp, Glycine max
ctacaatgctactctctctgttcaccagcttgttgaaaacgcagacgagtgcatggtgcttgacaatgaagctttgtatgacatttgcttccgtaccctcaagctaaccaccccaagctttggtgacttgaaccatctgatctcagctacaatgtctggtgtcacttgttgtttgaggttccctggtcaacttaactctgatctgcgaaagcttgcagtgaaccttattcccttccctcgcctc

SEQ ID NO: 139718 - DNA, 250 bp, Glycine max
aacgaaaggcagaagggcacgccttggactgaagaggaacacaggctgtttctcattgggcttagtaagtttgggaagggagattggagaagcatttcaagaaatgttgttgtgacaagaacaccaactcaagtagctagccatgcccagaaatactttctgcgccagaattcggtgaagaaagagaggaagagatcaagcattcatgacataacgactgtggacagtaactcagcgcctatgcccattg

SEQ ID NO: 139719 - DNA, 250 bp, Glycine max
cttgaggatcctctcattataatccatgaaaagaaaatgtcaagcataaatgctattgttaaagtattagagttggctttgaagagacaaaggcctttactgattgtcgctgaggatgtggaaagtgatgcccttgcaactcttattctaaataaacttcgtgctggaatcaaggtatgtgccatcaaagctcctggttttggtgaaaaccgtaaatctggtctccaggatcttgctgttcttacaggag

SEQ ID NO: 139720 - DNA, 248 bp, Glycine max
ttgttgaacaagggtttctctgtctgcttcttcactttctctcgtttcaatcgaaaccaaaacaaaatcatgggcagaaaattcttcgttggtggcaactggaaatgcaatgggaccactgaggaggtaaagaagattgttactactttgaatgaggctaaagtccctggagaagatgtcgtagaagttgttgtgagccctccttttgtgttccttcctgttgtaaaaagtttgctgcgccctgattt

SEQ ID NO: 139721 - DNA, 239 bp, Glycine max
ctcacgcactaatcactactacacaaatcacacaaacacacagttctgagagatagagagcgagattccgatggcgactctggattccgccttgcctatggttcccgccggcgagccctcgagcagcgccggtccttcttccaagaagcccaagcgcttcgagatcaagaagtggaacgccgtcgctctctgggcttgggacatcgtgtcgataactgtgctatctgccggaaccacat

SEQ ID NO: 139722 - DNA, 175 bp, Glycine max
cttgctctatactacacagtacacacactagtagaataatggcttccatcctccactactttttagccctctctctttcttgctcttttcttttcttcttatccgactcagtcacccctacaaaaccaatataccttgttgttctacccgttcaaaatgatggttccacacaaca

SEQ ID NO: 139723 - DNA, 238 bp, Glycine max
attaagactacaaattttcaatttttcaatggtgtcgaggcaacaaaaagaggatcgagctgaggtagctgcgaaagttgctgcgaaagaactcgaacaactcaaccgagaaaaagaccgtgattgcagtgttggtgttgcagaccatcaccaagaagaagaacatcagttagatcaacattagcgtggtgtattcggatccatgttcaaggcggtgcaagacacctatgcaaacgcc

SEQ ID NO: 139724 - DNA, 248 bp, Glycine max
aaacaattcaattcaatctgcctcgatcatggagaggaaaacatttgggtttttgttcttgctcctccttgtcttagcttctgatgtgacggtgaagagagcagaggcgaaagattgcttgacaaggaggcacgggtttcagggtagatgcttattcgacaggcaatgtgcacatgtgtgcaggagcgatggtttcatcggtggtcagtgccgaggccctcttcgcaaatgcttttgcagcaggccat

SEQ ID NO: 139725 - DNA, 245 bp, Glycine max
aaaaaaaggttctcatcgttgtcatcccccttcaagtcattgccaacattgctcaggtcgttattgacgagaatgggccctacggccatgactgggctacctggaaacaggtcttcctccttgttgacgtcgtctgttgctgcgctgtgcttttccccattgtctggtccatcaagaacctccgtgaggccgctaggaccgacggcaaggccgctgttaatttgatgaagcttactctcttcagg

SEQ ID NO: 139726 - DNA, 239 bp, Glycine max
ctggaggacacagtgacaagtagatgcatcgtgcatcatgcatgcatgcatatatataatattgttgtctttgaataaatttgctgcatatgtacttacgtacgtacagtgtcttgtcatgtatgtggaggatatagtatatggttatagtttatgtagaagaataaaaaatgtatgcatgtagtaatgtaagggtcttatatatgtggctgaaatataaaccataataaaggcagaga

SEQ ID NO: 139727 - DNA, 117 bp, Glycine max
atcccatcacccaacaaaccggtttaggtgaactaggagaagacgttgttgcaatccacgccacacaagggtttacccaacaacttggcccattggtcacagtcccacaattcctct

SEQ ID NO: 139728 - DNA, 241 bp, Glycine max
attgggcccaactcaaaaaggaggtcccgcctcggtgatgcaatccgccgcaaccgaaaacctccgcgccggcgtcgtgggccgccacgacatctccgacgtggcgaggaacgaaggcgtgagcgtgaccgaaaccaaagtgggctgccaccgcgtcatcacggagttcgtgggaagacacgtggtggggcacttcgtggagcccgacgtccccatgaacaccccaggcaccgcgctggag

SEQ ID NO: 139729 - DNA, 240 bp, Glycine max
ggggaatccgactgtttaattaccacaaagcattgcgatggtccctgcggatgttgacgcaatgtgatttctgcccagtgctctgaatgtcaaagtgaagaaattcaaccaagcgcgggtaaacggcgggagtaactatgactctcttaaggtagccaaatgcctcgtcatctaattagtgacgcgcatgaatggattaacgagattcccactgtccctgtctactatccagcgaaacca

SEQ ID NO: 139730 - DNA, 240 bp, Glycine max
cttcttctcttgcggctagggttttagcgcagttcttctagatttaaggatgatgggtaaggaaaaggttcacatcagtattgtggttattggccatgttgactctgggaagtccactaccactggccacctgatctacaagcttggaggcattgacaagcgtgttattgagagatttgagaaggaagctgctgagatggagaagaggtctctcaagtatgcctgggtgcgtgataagct

SEQ ID NO: 139731 - DNA, 232 bp, Glycine max
aagagctaacgcgctttacttaaccaaggctttctctgataggggctcgttagccgttgtttgggtcgagctcaaaccttcgccacttgagccgtatgcgggggaactcgcacgtgcggttcttaggggggagagctagtaggaaccatcctatcccaatagcgaatatttggagctcaatatgaaatcctattttcttgcaagaaaaaaaaaaaaaaagggcggccgccga

SEQ ID NO: 139732 - DNA, 240 bp, Glycine max
catatcttccgtgctgatcttcgaggggtgaagaaagaggatctgaaggtgcaggtggaggagaataagatcctgcagataagcggggagagggtgaaggagaaggaggaccagaacgacaagtggcaccgcgtcgagaggcagtgcggaagcatcctccgccgcttccggctgccggaggatgccaaccccaaccagatcagctgcacgctcgaaaacggggtgctgaacgtcaccgtg

SEQ ID NO: 139733 - DNA, 239 bp, Glycine max
ggcgcatgagttgtacgaggggcttcactctcatctggaatcggtgggaattgatggtgtcaagattgatgtcacgcatattctagagatgctatcggaggaatatggtggtcgtgtcgaactcgctaaagcatattacaaagcactcactgcttccgtgaggaagcatttcaaagtcgatggtgtcatttcaagcatgcagcagtgcaatgatttcatgttccttggtacggaaacca

SEQ ID NO: 139734 - DNA, 238 bp, Glycine max
gaggtcttatgacaaatgcctacaattatttgctcgagtctggtgggttggaggaggagtcttcatatccctacactggggagagaggtgaatgcaagtttgatccagagaaaatagcagttaagatcacaaatttcaccaatatccctgctgatgagaaccaaattgccgcatatttagtaaaaaatggtccacttgctatgggcgtgaatgcaattttcatgcaaacatacattgg

SEQ ID NO: 139735 - DNA, 239 bp, Glycine max
caaagtttcagacccttattgacctttctgttatagaaatcttgtcaaggcatgcatctgatgaggtgtaccttggggagagggacaatccaaattggacatctgatacaagagcgttagaggcttttaaaaggtttggaaataaactggcacaaattgagaataaactctcagagagaaacaacgatcagaaactgagaaaccgttgtggaccagttcaaatgccttatactctgctt

SEQ ID NO: 139736 - DNA, 243 bp, Glycine max
tcgagaggcagtgcggaagcttcctccgccgcttccggctgccggaggatgccaaccccaaccagatcagctgcacgctcgaaaacggggtgctgaacgtcaccgtgccgcaggtggagaagaagccggagaacaagaacgtgaggcagattgatgtggtttgatgatgatggagcatcatgaggacttgtaatgtttgaatgagttttatgttatgtgtgtgtgcgcaactgtgcatattac

SEQ ID NO: 139737 - DNA, 237 bp, Glycine max
ctactctacaaacacaacaaaactctccaattctgaagattttcttatctcttgtctttgaaactagaagctccgtgattgatcaatggcgacaaaagaaggcaaagccataggcatagacctcggcacgacctacagctgcgtgggcgtgtggcaaaacgaccgcgttgagatcatccccaacgaccaaggcaaccgaaccaccccctcctatgtcgccttcaccgacaccgagag

SEQ ID NO: 139738 - DNA, 122 bp, Glycine max
aagaaagaacttccttataaccaaaaccaacaacaactatggcaagttatcagaagcactacgatgatcagggtcgcaaggtcgacgagtatggcaatgttgagcaggcaaactgtacgaat

SEQ ID NO: 139739 - DNA, 237 bp, Glycine max
gttcaatatcctagtataccttaataaataatttaagatactatgatgagagcacggttcccattactgttgctgggacttgttttcctggcttcagtttctgtctcatttggcattgcttactgggataaagagaaccccaaacacaacaagtgtctccagagttgcaatagcgagagagactcgtacaggaaccaagcatgccacgctcgttgcaacctccttaaggtggagaaa

SEQ ID NO: 139740 - DNA, 259 bp, Glycine max
attcaaaccttgctctatactacacagtacacacactagaagaataatggcttccatcctccactactttttagccctctctctttcttgctcttttcttttcttcttatccgactcagtcacccctacaaaaccaataaaccttgttgttctacccgttcaaaatgatggttccacagggctccattgggccaacctccaaaaaagaacccctctaatgcaagtaccagtcctggtggacctcaatggaaatcacttg

SEQ ID NO: 139741 - DNA, 262 bp, Glycine max
ttcggctcgagacaaaacagagcaaagagagagtgtgtgaaaagtgaaacaaaaaacagaacaacaatggcgacacttaaggttcctcagcctcttccccccgttgcagatgattgtgagcagctccgaaaagccttctcaggttggggaactaacgaggagctgattgtatcgatcttggctcataggaatgctgctcagaggaagcttatcagagaaacttatgcccagacctatggaggatatctcctcaaggccttgg

SEQ ID NO: 139742 - DNA, 242 bp, Glycine max
aaaccgatttggaaagcggttctcggcctctgtatccgatgatgctcgagagccctgaactgcggtggtcgttcatcagataagtgtactccataatcgccatccagttgctcgtaaccatcgtcgtcggcgccgtcgtcgtcaccgtccgcccaatcagtgtcttcttcgccaccaccggcgccggactggctctctacatcgtcctcatttttgttccctttataacgttgtgtccactt

SEQ ID NO: 139743 - DNA, 237 bp, Glycine max
tatagttttacggtcaaagtttgatatccaattttcttactacgcaggaattgtttgctgaagttggtgacctgaaacggcatgcggttcattatgacaggagtggcagatcaaagggtacagcatcagtagtattttcacgacgagctgatgctgtagctgctgtaaagagatacaacaatgttcagttggatgggaaaccaatgaagattgagattgtgggaaccaacatttcca

SEQ ID NO: 139744 - DNA, 234 bp, Glycine max
gtctgttgcccttggttctccattcacttttgccactacattagagcaggaatacaggagtgatatctttggggagagaggcattttacttggtgctgttcatggggttgtggagtccctgtttaggagatacactgaaaatggaatgaacgaagatctggcctataagaatactgttgagtctataacaggaattatatctaaaaccatctcaactaagggcatgctagctgt

SEQ ID NO: 139745 - DNA, 237 bp, Glycine max
gttcaaaaggatgaggcgattgaaaattctgcgttccgcgttccgagtgatggaggaaagttgggacgcaatatctggagttctcgaaattcagagcacttctatggatgcagcaattccagcaacaagtttcaagaagctcaagtgattacacagccgaatcggtatttgatgatcacaacaagtggaggcttgaatcaacaaagaactgggattacagatgctgttgttgctgcg

SEQ ID NO: 139746 - DNA, 237 bp, Glycine max
gtgcggtttcctttgttggtgttgctgggaactgttttcctggcatcagtttgtgtctcattaaaggtgagagaggatgagaataaccctttctacttgagaagctctaacagcttccaaactctctttgagaaccaaaacggtcgcattcgtctcctccagagattcaacaaacgctccccacaacttgagaaactagcatactaccggattgtccagtttcagtcataacccaac

SEQ ID NO: 139747 - DNA, 236 bp, Glycine max
aaaaggtgaacagaacgtgcttattttcgaccttggtggtggcacttttgatgtttcaatattgaccatcgaggaggggattttcgaagtgaaagccactgctggtgatactcatcttggaggtgaagattttgataacagaatggtgaatcactttgtttctgaattcagaaggaagaacaagaaggacatcagtgggaatgctagagcgttgagaaggttgaggacagcgtgtg

SEQ ID NO: 139748 - DNA, 243 bp, Glycine max
tggagagaaagagtggtacttcttttcaccacgggaccggaaatacccaaacggttcgaggccgaaccgggcggctggcaccggttactggaaggcaaccggggcggataagcccattggtcagcccaaaccggttgggattaaaaaagctttggtgttttacgcagggaaagctcctaaaggggacaaaagcaattggatcatgcacgagtatcgtctcgcagacgtagatcgctccgttcg

SEQ ID NO: 139749 - DNA, 243 bp, Glycine max
cacacattttctgtgcgctctaacaaacattctcgttcacactttcagattgtcagaagatgggggcgggtggccgaactgatgttcctcctgccaacaggaagtcagaggttgaccctttgaagcgggtgccatttgtaaaacctccatttagtctcagccaaatcaagaaggtcattccacctcactgtttccatcgttctgttttccgctcattctcctatgttgtttacgacctcacca

SEQ ID NO: 139750 - DNA, 248 bp, Glycine max
ccatgagccaggaacagctcaagaaacctcaaggggagcaggaccccatcaaatacggcgacgttttcaaagtctccgacgaactcgctttcaaacccatcgcgccaagagacgcagctctcatgcaagccacggagaaccaagcattgggccaaactcaaaaaggaggtcccgcctcggtgatgcaatccgccgcaaccgaaaacctccgcgccggcgtcgtgggccgccaagacatctccgacgtg

SEQ ID NO: 139751 - DNA, 241 bp, Glycine max
gagattgtgaagtagaaatcggtgcaagaaattctccactttatctaaaaaaattcggtgagtttgtgtagacaaaaaatcactagctactcaaaaatggccacagtaggaaggaacgttgcagctcctttgctgtttcttaacttgatcatgtattttattgttcttggctttgctagttggtgcctcaacaggttcatcaatggccaaacttaccaccctagttttggtggaaatggtg

SEQ ID NO: 139752 - DNA, 234 bp, Glycine max
cgacgaccgagactcttacaaccttcaatctggcgatgccctaagagtccctgcaggatccacatactatgtggttaaccctgacaacgacgagaatctcagaatgataacactcgccatacccgttaacaaacccggtagatttgagagtttcttcctatctagcactcaagctcaacagtgcctacttgcaagggttcagcaagaatattctagaggcctcatacgacacca

SEQ ID NO: 139753 - DNA, 235 bp, Glycine max
gaaagaacttccttataaccaaaaccaacaacaactatggcaagttatcagaagcactacgatgatcagggtcgcaaggtcgacgagtatggcaatgttgagaggcaaactgacgaatatggcaacccggttcatgccactagtgtcacttatgtagccactaaaagtgttggtggctacaatgatgacactaataagcaacatgataccaccggtgtctatcctgagaaagata

SEQ ID NO: 139754 - DNA, 241 bp, Glycine max
aaaaagtttacgttacaaatcgcataataaccgtcctaagtttattgagagaattttgcaagtgtgagaaacatggcatctcgtcaaaacaacaagcaagagcttgatgaaagagcaaggcaaggagagactgttgtcccgggtggaactggtggcaagagcctggaggctcagcaacaccttgctgaaggaaggagcaagggagggcaaacaaggaaggaacagctgggtacagaagggt

SEQ ID NO: 139755 - DNA, 243 bp, Glycine max
aaaagccagactataatgggctaagtcaccttaaaattgtgaccatgattttatacgaggttcttaggttatacccacctttaatttattttgctcgagcgatcaagaatgatgtgaaacttggaaacctttccctacctgcgggagtgcaagtttccttaccaatactattgattcaccaggatcgtgatatttggggtgatgatgctacagagttcaacccagaaagatttgctgaaggag

SEQ ID NO: 139756 - DNA, 232 bp, Glycine max
cttcttctcttgcggctaggttttagcgcagttcttctagatttaaggaagatgggtaaggaaaaggttcacatcagtattgtggtcattggccatgtcgactctgggaaatccactaccactggtcacctgatttacaagcttggaggcattgacaagcgtgttattgagaggtttgagaaggaagctgctgagatgaacaagaggtctttcaagtatgcctgggtgctgg

SEQ ID NO: 139757 - DNA, 249 bp, Glycine max
  unsure (1)..(249): unsure at all n locations
gatctatatgaatacagcaccaaatgacccacttgcataacatctgcaagangtcttctccttcaccatgccaccaaagcctttagactatgggtcaataaatgaaaacgtgaagaagagtcaatatgctgtcagaggtgaattataccttcgagcttctgagcttcagaaagngggnaaaangattatatttactaatgttggcaacccacatgcattgggacagaaaccactgagcttccctcgtcg

SEQ ID NO: 139758 - DNA, 245 bp, Glycine max
gcgtcgtttttcagcttccgaggtccttgtgaagagcttggatttatatgggaagttggatggtcatgaagggtgtgtgaatgcagtggaatttaactccaccggtgacattcttgtttctggttctgatgaccgacaaattatgttttggaattgggaatccaaaactaaattgtttgcatacccttctggccacacagacaacattacacagacatagattatgacattcatcgatgactgcc

SEQ ID NO: 139759 - DNA, 242 bp, Glycine max
aacaataattccttcacttgcagaacttagttctctgttgcatcatcatcatcttcattagtgttagccctaaacttcaccttcaaccatgaccacagtgccaccacacagtgtccaagtgcacacaacaacacacacatacgaagccggcgtcgtcccgccggctcgttttgaggcgccgcgttacgaagccggcatcaaggcgccctcttccatttaccattccgagagaggtccgacga

SEQ ID NO: 139760 - DNA, 237 bp, Glycine max
gaggaatccaaaagaggttacagaagaagaatacaccaaattctaccactctcttgccaaggatttcagtgatgagaaacctttagcatggagtcatttcactgctgagggtgatgttgagttcaaggcagtcctgtttgtaccacctaaggcacctcaagatttatatgagagctattataacgcaaacaaatcgaacctgaagttgtatgttagacgtgtgttcatttcagatga

SEQ ID NO: 139761 - DNA, 233 bp, Glycine max
ctttgcctgcaactttaggcacagatgaagagaaagacaagactagtaccattctggaatgtgatcaatataacaaagctgattttccagaagaatatactgatgccaaattttttgtcatcaagccttacagcgaggatgatatccacaagagtattaagtataatgtgtgggctagtacacaaaatggcaacaagaagcttgatgctgcatatcaggaggcacagcagaaa

SEQ ID NO: 139762 - DNA, 233 bp, Glycine max
atttggtaccgccagctaaatttgcttttttgacagtttgccagtgcgttgataaatatttggttgtcttatatttcaatcatagattttctgttaaaaaaaaaaaaaaaaaaaaaaaaaaaaaaaaaaaaaaaaaaaaaaaaaaaaaaaaaaaaaaacacacaaaaaaaaaaaaaggcccccccccacaaaaaacccccccccccacccgtaataaaccccccaccatcacc

SEQ ID NO: 139763 - DNA, 233 bp, Glycine max
ctagtacaccgtattaaagaatttaagatatactatgatgagagcgcggttcccattactgttgctgggagttgttttcctggcatcagtttctgtctcatttggcattgcgtattgggaaaagcagaacctcagtcacaacaagtgcctccgaagttgcaatagcgagaaagactcctacaggaaccaagcatgccacgctcgttgcaacctccttaaggtggaggaagaag

SEQ ID NO: 139764 - DNA, 229 bp, Glycine max
cgcgccgtttctgtgcttttactctgctaccttgtgacaatggtgagggttagtgtgttgaatgatgctcttaagagcatgtacaatgctgagaaacgggggaagcgccaggtcatgattaggccatcctcaaaagtgattataaaattccttttggtgatgcaaaagcatgggtacattggagagtttgtgtacgttgatgatcacagagctggaaaaattgttgttg

SEQ ID NO: 139765 - DNA, 234 bp, Glycine max
cgaagacataagaataagaacccttttcacttcaactctaaaatgttccaaactctcttcaaaatccaatatggccacgttcgcgtcctccagaggttcaacaaacgctcccaacagcttcagaatctccgagactaccgcattttggagttcaactccaaacccaacacccttcttctcccccaccatgctgacgctgattacctcatcgttatccttaacgggactgccatt

SEQ ID NO: 139766 - DNA, 236 bp, Glycine max
cccaagtctctcgaagcatctttctttctcttcctgcagaagctatccgtgttacttgttcccaagtctccaacaagcaaagtacatggttgatttggaaatccaggtccccagcgcattcgacccgtttgccgaggcgagagaatcagatgcccccggggcaaaggagtatgtgcacatacgaattcagcagaggaatggaaagaagagtctgacaacagtgcaagggctgaaga

SEQ ID NO: 139767 - DNA, 236 bp, Glycine max
cttttggaagaggaggtggcttttgagggaaaggagggaacttttagtgtgggagggtggaaactggaattgggtttggttgggggtaaagagaatgaagattcagtgtaacgtgtgtgaggctgcggaggccaaggttctgtgttgtgctgacgaggctgcgctgtgttgggagtgtgatgagaaggttcatgcggctaacaagcttgccagcaagcaccagagagtgcctcttt

SEQ ID NO: 139768 - DNA, 246 bp, Glycine max
gagaatggctcccaagggtttaacctttctggctgtgttaatatgcgtttcagcactgtcactgagtccttctgttgcgggggaagggcaaaataatggccttgttatgaacttctacaaggaatcatgccctcaggctgaagacatcatcacagaacaagtcaagcttctctacaagcgccacaagaacactgctttctcctggctcaggaacatcttccatgactgtgctgttcagagttgtga

SEQ ID NO: 139769 - DNA, 247 bp, Glycine max
  unsure (1)..(247): unsure at all n locations
cacacacacacacactaagaataatggcttctatcctccactactttttagccctctctctttctttctctttccttttcttcttatccgactccgtccccattccccaacaccacactaaccctacaatacctataaaccttctggttctacccgttcaaaatgatgcttccacagggctccatttatcacaanctccaaaaaaggacccctctaatgcaagtaccagtcctggtggacctcaatg

SEQ ID NO: 139770 - DNA, 240 bp, Glycine max
gcattttcagaggaaaatggcgggtacggtttcgacttgtttcttcttcgtgtttcttctttctctccttcttccttttcagatctccgctgaggaatcctcggagaaggagttcgtactcacattggatcactctaactttcacgacactgtcagcaagcacgatttcatcgtcgtcgagttctacgccccatggtgtggtcactgtaagaagcttgctccggagtatgagaaagctgc

SEQ ID NO: 139771 - DNA, 229 bp, Glycine max
cagtggtgttagatctgtacctgcctagccattgatttggaaaagtccaagcttcaaagatgagtaagcttcagagtgatgctcttagagaagctatctcaggaatcatgactgattccaaggaaaagaacaggaaatttgtggagaccattgaactccaaattgggctgaaaaactatgatccccagaaggacaagcgttttagtggctctgttaagttgcctcacat

SEQ ID NO: 139772 - DNA, 168 bp, Glycine max
tgttttcaaagggagaaggtgttgaatgctaatctcaatgttactgagattttgggcattcgtgttcttcgttatgaattgtggatgtactgggctattttagtttgtcctgccatttatacgcgtttctgaactgactattttcttaatgacactgaaatttccatt

SEQ ID NO: 139773 - DNA, 233 bp, Glycine max
aagacacctacgagaacgccaaggaagctgtcgttggcaagaaagaagctactaataacgcgtacagtaatacagaggttattcacgatgttaacattcagcccgatgacgtgtcggcaacgggggaagtaagggacatatcagccacaaagactcatgatatctacgattctgccacggacaacaacaacaacaaaaccggttccaaggtcggagagtacgcagattacgct

SEQ ID NO: 139774 - DNA, 236 bp, Glycine max
ttccaattctctgtgtagaagccatgtcaaagggtcctggtctctactctgacattggcaagaaagcccgagatctcctcttcaaggactaccacagtgaccagaagttcaccatcactacctactcacccactggagttgctataacatcctcagggaccaagaaaggtgatctttttgtggctgatgttaacacccagttgaagaacaagaacatcaccactgatatcaaatta

SEQ ID NO: 139775 - DNA, 241 bp, Glycine max
tttcagcttgtgccttgttctcaaaaacatggattgaagtctctggttcatctgctagagatgttgccaagcagctgaaggaacaacaaatggtaatgcccggataccgtgagtcaaacttgcagaaagagctgaatcgatacattcccactgccgcagcatttggaggcatctgtattggtgccctgacagtgttggcagatttcatgggggccatcggttcaggaacaggaatattgct

SEQ ID NO: 139776 - DNA, 240 bp, Glycine max
gagaaaggtggtattgtgacgcaggtcaaacaaccaaaggtattgaactttaagccactcaaggaagcaatcactgatcctggtgattttcttctgagtgatttttcgaagtttgatcgcccacctctccttcacttagcattccaggctttggataaattcatttctgagttaggtcgcttccctgttgctggttcagaggatgatgcacagaagcttatatctgttgctagtcatatt

SEQ ID NO: 139777 - DNA, 241 bp, Glycine max
ggattagttgatccctcctttgaaaacaaaacgatgccgattttcaaaaccccgttcaacggctactccgtaaagttcagccccttctacgagaaccgcctggccgtggccaccgcccagaacttcggcatcctgggcaacggccgcctccacgtcctcgacctctccccggagccttccctccccatctctgagctggtcgcctacgacaccgccgacggctactacgacgtggcctggt

SEQ ID NO: 139778 - DNA, 236 bp, Glycine max
ggaagatcaacttgagtatcttgaggaacgccgtctgaaggatttgataaagaagcattctgaattcattagctatccaatttctctctggattgagaagactactgaaaaggagatttctgatgatgagggtgaggaagagaagaaggatgaggagggtaaagttgaagatgtggatgaagataaggagaaggaggagaagaactagaagaccattaaggaggtatctcacgagt

SEQ ID NO: 139779 - DNA, 231 bp, Glycine max
gaactatataataatatgaacgattctctttcgttgatcaacaaatatagcaagttatcaaaagcactacgatgatcaaggtcgcactcttgacgacgtatggcacgttgagaagcaatccgacgaatacggcaaccctgttcatgctgctagtgtcacctaatgtggccaccagaactgctgctggtggttacagtgatgacattaataagcaacatgataccaccaatg

SEQ ID NO: 139780 - DNA, 225 bp, Glycine max
aattaacctcactcaaactctggattacagaaaccaacaacagttcttgcactgaggtttcacgatgttgctggaacttgcacttggtttgtttgtgttagctttgtttctgcacttgcgtcccacaccaagtgcaaaacaaaaagcacttcgccacctcccaaaccctccaagcccaaagcctcgtcttcccttcattggccaccttcacctcttaaaagataa

SEQ ID NO: 139781 - DNA, 231 bp, Glycine max
attcaaaccttgctctatactacacagtacacacactagaagaataatggcttccatcctccactactttttagccctctctctttcttgctcttttcttttcttcttatccgactcagtcacccctacaaaaccaataaaccttgttgttctacccgttcaaaatgatggttccacagggctccattggtccaacctccaaaaaagaacccctctaatgcaagtaccagt

SEQ ID NO: 139782 - DNA, 194 bp, Glycine max
ttgagtatgacttttgttgtggttatcttcttgtttggttatctttttgtttgtgtctccttttctctccatttttgttgtggagaattgggtgtggttacacgacagtgctttcacttctactaggtgcaagcattctgtgtcgtgatgttgtattccttcgtttcaatgaataaataaaatcgtggttgtgc

SEQ ID NO: 139783 - DNA, 226 bp, Glycine max
ccaaggttcagcaactcttgcaggatttcttcaatgggaaagagctttgcaagagcattaaccccgatgaagctgttgcatacggtgcttcagttcaagctgccatcttgagcggtgaaggagacgagaaggttcaggatttgttgctgctggatgttacacctctcagtctcgggctcgaaactgcgggtggtgttatgactgtactaattccgcggaacactac

SEQ ID NO: 139784 - DNA, 237 bp, Glycine max
caaaacagtaaagctaacttcaacacctttaattttctaaaagtaattcagcggctgaataccaagcggagaagatgagtcaggagcagccacggcgtcccaaaggccaaaaccccatcaaatacggcgacgtttttgtcgtctccggcgaccttgcacagaagcccgtcgcaccggaagatgctgccatgatgcaaagcgcggaagctcgagtgctcggacaaacccaacccggcg

SEQ ID NO: 139785 - DNA, 240 bp, Glycine max
tcaaaccctgcttaccattttcacttctctctctctctttagggttttggctctctctctctctctccctccttattcctttctacctctcacatccttctcaatgactaacaacaacgacaacatcgccgtgacagatctcacttccgccctcaatgaagagaatcgcgccgacctagtctatgctctcaagagcaagattcagagtctggctggggctcattctgatgttctggagac

SEQ ID NO: 139786 - DNA, 233 bp, Glycine max
gaaaccggtagcgttgccagcttcgccgcttccttcaacttcaccttctatgcccctgacacaaaaaggcttgcagatgggcttgccttctttctcgcaccaattgacactaagccacaaacacatgcaggttatcttggtcttttcaacgaaaacgagtctggtgatcaagtcgtcgctgttgagtttgacactttccggaactcttgggatccaccaaatccacacatcgg

SEQ ID NO: 139787 - DNA, 225 bp, Glycine max
gtaaagctaacttcaacacctttaattttctaaaagtaattcagcggctgaataccaagcggagaagatgagtcaggagcagccacggcgtcccaaaggccaaaaccatatcaaatacggcgacgtttttgtcgtctccggcgaccttgcacagaagcccgtcgcaccggaagatgctgccatgatgcaaagcgcggaagctcgagtgctcggacaaacccaacc

SEQ ID NO: 139788 - DNA, 226 bp, Glycine max
aaaacactcaagttaacttcaacacctttaattttctgaacgaaattcagccacagaatatcaaagggagcgaagatgagtcaggagcagccaaggcgcccccaaggccaagaccccatcaaatacggcgacgtttttgacgtctacggtgaccttgcacagatgcccattgcaccggaagatgctgccatgatgcaaagcgcggaagctcgagtactcggaaaaa

SEQ ID NO: 139789 - DNA, 228 bp, Glycine max
ccatgagccaggaaaagccagagagacctcaagcggagaaagaccccatcaaatacggcgacgagagaagatgcagaaggagtgattggagctgagcttaggaacaacttggacatgagaacaacccctggtggggtcgctgcatccatcaaaaagctatgtttcttaatatattaaataatactacctcttatttttattgctatcttataatataatcaagttttc

SEQ ID NO: 139790 - DNA, 237 bp, Glycine max
cagctacattacaatacctcgccccttatacagtagcagctctggctgaatattttatgtaccgtgaacgtcacactttaatcatttatgacgatctctccaaacaagcacaggcatatcgccaaatgtctcttctattacgaagaccacctggtcgcgaagttattccaggggatgttttttatttacatccacgtcttttggaaagagccgctaaattaagttctcagttggggg

SEQ ID NO: 139791 - DNA, 238 bp, Glycine max
cagagaatgggaacttgtgggagggatgttcctctggagactcaattcatgcttattgagagcaaagagagtgaaactgatggggagaattctccaatcatctacactgtcttgcttcctctcctcgaaggtcaattccgagctgttcttcaaggcaatgataagaacgagatagagatttgcctcgagagtggggataatgcagttgagactgaccaaggccttcacatggtttaca

SEQ ID NO: 139792 - DNA, 244 bp, Glycine max
gcttgatgaaagagcaaggcaaggagagactgttgtcccgggtggaactggtggcaagagcctggaggctcagcaacaccttgctgaaggaaggagcaagggagggcaaacaaggaaggaacagctgggtacagaagggtaccaggaaatgggacgcaaaggagggttgagcactgtggacaaatcaggagaagaacgtgctcaaatgcagcattcacaaccacaaattcaacaaccggttcag

SEQ ID NO: 139793 - DNA, 239 bp, Glycine max
ggcaggtttgtcattggagggccgcatggcgatgctggtctcaccggccgcaagatcatcatcgacacctatggaggatggggtgcacatggtggtggtgccttctctgggaaggatcctaccaaggttgataggagtggtgcctacattgtgaggcaagctgcaaagagcattgttgcaaatggacttgctaggagggcaattgtgcaagtttcctatgccattggtgtgcctgagcc

SEQ ID NO: 139794 - DNA, 238 bp, Glycine max
ttcgtccatggccttggctgggacgccactgccgatactctaaccgccgtgttcgggaaatacggcgagatcgaggattgcaaggccgtcaccgacaaggtctccgggaaatcaaagggttacgcttttatcctcttcaagcacagggacgatgctcgcaaggcgctgaaacaccctcaaaagaagatcggaaaccgcaccacctcgtgccagctggcctccgccggccccgttccgg

SEQ ID NO: 139795 - DNA, 233 bp, Glycine max
gaaggttttcaatttctacaacgagctccatgcttactttgcctcttgtggagtagatggagtgaaggttgatgtgcagaacattattgagacccttggtgcgggacatggtggccgagtgtcacttactcgcagctatcatcacgcgcttgaggcttccattgctagcaattttactgataacggatgcattgcgtgtatgtgtcacaacactgatggactttatagtgcta

SEQ ID NO: 139796 - DNA, 233 bp, Glycine max
acaaaaccaagttaacgttgcaatcgcataataataaccatccgaagtttattgagagaaatttgcaagtttgaaaagaaacatggcatctcatcaacaaaacaagcaagagcttgatgaaagggcaaggcaaggagagactgttgttccgggtggcactggtggcaagagccttgaggcccagcaacatcttgctgaaggaaggagcaggggagggaaaacaaggaaggagc

SEQ ID NO: 139797 - DNA, 233 bp, Glycine max
ctcgaagaacaatttaattctagtttccactctccttatgatacctcaactccacttcaccccatcaaaagccgccatcaaaggaggctactggtactccgaaagtggccttgcagtttccaacattaacccctctcatttcacccacctcttctgtgcatttgcccacctcgaccccaacaccaacaaagtcaccatttcctcgtcagactcatctcagttctcaaccttca

SEQ ID NO: 139798 - DNA, 233 bp, Glycine max
gcggtttcctttgttggtgttgctgggaactgttttcctggcatcagtttgtgtctcattaaaggtgagagaggatgagaataaccctttctactttagaagctctaacagcttccaaactctctttgagaaccaaaacggtcgcattcgtctcctccagagattcaacaaacgctccccacaacttgagaaacaacaagactaccggattgtccagtttcagtcaaaaccca

SEQ ID NO: 139799 - DNA, 237 bp, Glycine max
cattactcgatttttatttctccaaaatgatcaattttataagattgaatcgactaaaaaatgaaatgaatcatttcatattgatagtattgctatgcttagtccccaaagaaccagatttcgtaaacaacatagaggcagaatgaaaggaatatcctatcgagggaatcatatttgcttcggcagatatgctcttcaagcacttgagccagcttggataacatctagacaaataga

SEQ ID NO: 139800 - DNA, 235 bp, Glycine max
catggctcaaccctccaagtgttccatgtgttcagcccttgttccccattcaggccctcagaaccaatgtcatgggaagagagtgtcctacagcttcaagccaaggaccaagccaggatgcagtacctttctaacttggtggctagaagatccattgtcccaattgcctcagggagacaaatcacacagagccctacatacatagtgagggccaagtttggtaccccagcacaga

SEQ ID NO: 139801 - DNA, 237 bp, Glycine max
caaaaccaaaacactcaagttaacttcaacacctttaattttctgaacgaaattcagccacagaatatcaaagggagcgaagatgagtcaggagcagccaaggcgcccccaaggccaagaccccatcaaatacggcgacgtttttgacgtctacggtgaccttgcacagatgcccattgcaccggaagatgctgccatgatgcaaagcgcggaagctcgagtactcggaaaaaccca

SEQ ID NO: 139802 - DNA, 236 bp, Glycine max
cggctcgacttctcatcctcctctgtctctctctctccaccattgccatggccccttacaagctccggccctccagcgccttcaattctcccttctggactacaaattctggtgctcctgtttggaacaacaactcctctttaaccgttggagctagaggtccaattctgcttgaggattatcatcttgtggagaagcttgcaaactttgacagggaacgtatcccagaacgtgtt

SEQ ID NO: 139803 - DNA, 221 bp, Glycine max
tgttctagatcgcgagcggccgctcgatctagaactagcaatccttgctctatactacacagtacacacactagaagaataatggcactctatcctccactactttttagccctctctctttcttgctcttttcttttcttcttatccgactcagtcacccctacaaaaccaataaaccttgttgttctacccgttcaaaatgatggttccacagggctcc

SEQ ID NO: 139804 - DNA, 234 bp, Glycine max
caactactacaagtacttccttacaatcaaaaccaacaacaactatggcaagttatcaaaagcactacgatgatcagggtcgcaaggttgacgagtatggcaacgttgagaagcaaaccgacgaatacggcaaccctgttcatgctgctagtgtcacctatgtagccaccagaactgctgctggtggttacagtgatgacattaataagcaacatgataccaccaatgcctacg

SEQ ID NO: 139805 - DNA, 233 bp, Glycine max
cgatagaccccaccggagccaaggtcaccaaggccgccgccaagatgaagtgattgcatttgggcaattttgctagcacatgtgatcatcatcgtggttactcctttatagtagttttatccttgcagagtcttaggtgttttgtttaagttatatttttaagtttctgccgatttcatgtagccgtaactttcaaaactaggttcttgatcggcggtggtcaattttcattg

SEQ ID NO: 139806 - DNA, 233 bp, Glycine max
  unsure (1)..(233): unsure at all n locations
ctagttcagtgtgtcgtttaaaaatgtcgcagttgctggataaagccaagaacttcgtgtcggagaaggtaaatgatatggccaagccggagggangtgtcactgacgtggacttcaagcgcgtgagcaaagataatgtcgagtacttggccaaggtctctgttcgtaacccttattcaacttccacacccatttgtgagatcaactactctttcaaaagcgcatccagggag

SEQ ID NO: 139807 - DNA, 237 bp, Glycine max
  unsure (1)..(237): unsure at all n locations
ttcatagttcagtgtgtcgtttaaaaatgtcgcagttgctggataaagccaagaacttcgtgtcggagaaggtaaatgatatggccaagccggagggangtgtcactgacgtggacttcaagcgcgtgagcaaagataatgtcgagtacttggccaaggtctctgttcgtaacccttattcaacttccatacccatttgtgagatcaactactctttcaaaagcgcatccagggaga

SEQ ID NO: 139808 - DNA, 247 bp, Glycine max
caccttctttctctgcgattttttcttcaatttccagatcacgaaactaaagaagatggagaaagcgatcagcagacagaagattttgcttcatcatctcaacccttcatcgtctacccacgtcaacgaatcatcctccctctatgcttcagcatgtgtggcgggggacagcgctgcttatcaaaggacatcgacattcagggatgatgttgtgatcgtggcggcttatcggactgctcattgcaaa

SEQ ID NO: 139809 - DNA, 240 bp, Glycine max
gaaagaacttccttataaccaaaaccatcaacaactatggccagttatcagaagcactacgatgatcagggtcgcaaggtcgacgagtatggcaatgttgagaggcaaactgacgaatatggcaacccggttcatgccactagtgtcacttatgtagccactaaaagtgtcggtggctacaatgatgacactaataagcaacatgataccaccggtgtctatcctgagaaagataccggt

SEQ ID NO: 139810 - DNA, 237 bp, Glycine max
ccttctcgctctttcagctttgacttttgttggaaactaaggcctaatcaaaatggtgaagttcacagctgaagagctacgtcgtattatggactataagcataatatccgtaatatgtctgtcattgctcatgttgatcacggaaaatcaaccctcactgattctcttgtggctgctgctggtattattgctcaagaagttgccggtgatgtccgtatgactgatacccgtgcaga

SEQ ID NO: 139811 - DNA, 235 bp, Glycine max
cggctgtcggtggactgctcgagctgcttccgcggcgagagcgggtcgtcgcgtgccggtcgggggacggattaggaacgggcccttcggggcctcttccccgggcgtcgaacagtcaactcagaactggtacggacaaggggaatccgactgtttaattaaaacaaagcattgcgatggtccctgcggatgttgacgcaatgtgatttctgcccagtgctctgaatgtcaaagt

SEQ ID NO: 139812 - DNA, 234 bp, Glycine max
catggctacttcaaagttgaaaacccagaatgtggttgtatctctctccctaaccttaaccttggtactggtgctactgaccagcaaggcaaactcagcggaaactgtttctttcagctggaacaagttcgtgccgaagcaaccaaacatgatcctccaaggagacgctattgtgacctcctcgggaaagttacaactcaataaggttgacgaaaacggcaccccaaaaccctc

SEQ ID NO: 139813 - DNA, 231 bp, Glycine max
gtggaggacatagacgagcctaggcttgagagggtctttcgtacaaatatcttctcctatttcttcatggcgaggcatgccttgaagcacatgaaggaaggaagcagcattatcaacacgacatcagtgactgcatacaagggacatgcgaaactattggactacacgtccaccaagggggcaattgtggcctatacaaggggtcttgcccttcagctggtgagtaaggga

SEQ ID NO: 139814 - DNA, 238 bp, Glycine max
ccgctcgagtattgtcagtggggatccgattcgtactgatggtgaacaagcaaggccaaactcgtcttgctcaatactacgaatatctcaccctcgaagagcgatgtgccctcgaaggcgaaatcgttcgcaaatgcctcgcccgcaacgaacagcagtgttccttcgttgagcatcgcaactacaaaattgtatatcgtcgctacgcctctttgtttttcctcgttggagttgacga

SEQ ID NO: 139815 - DNA, 237 bp, Glycine max
gtagacagtagcaccatgagccaggaacagctcaagaaacctcaaggggagcaggaccccatcaaatacggcgacgttttcaaagtctccgacgaactcgctttcaaacccatcgcgccacgagacgcagctctcatgcaagccacggagaaccaagcattgggccaaactcaaaaaggaggtcccgcctcggtgatgcaatccgccgcaaccgaaaacctccgcgccggcgtcgtg

SEQ ID NO: 139816 - DNA, 244 bp, Glycine max
acaagtacttccttacaatcaaaaccaacaacaactatggcaagttatcaaaagcactacgatgatcagggtcgcaaggttgacgagtatggcaacgttgagaagcaaaccgacgaatacggcaaccctgttcatgctgctagtgtcacctatgtagccaccagaactgctgctggtggttacagtgacaacattaataagcaacatgataccaccaatgcctacggcgtagacactggtagac

SEQ ID NO: 139817 - DNA, 241 bp, Glycine max
tgaagatgctgaaggacaatggcattcagaaggtgaagctttttgatgctgatgctggtatcttggatgctctcaagaagtctgggatacaggtcatggtggggattccgaatgacatgctttatactctggctaacagtgtggaagcggctgaaaaatgggtttccaagaatatctccaaacatgtctcttctggaggagtggacatcaggtacgttgcagtggggaatgaaccattctt

SEQ ID NO: 139818 - DNA, 240 bp, Glycine max
ataggcggccggatcagtttgaaacaaatgaggcattgtttggtgtgaacagcacattcaatgaggaactttatacaacaaagcttgaaaaagggcctcagacaagagaattagaaaaacaagctttaagaatagcaagagaaattgagggtgaggaaacccaagatcttcatcttgcagaggaaagaggccttcacttacatgaagcctttgatattgatgaagaaactagattctctt

SEQ ID NO: 139819 - DNA, 236 bp, Glycine max
ctcctcgagacaccaggggttcaccaggggccagcctgtttcgacgctctgggtgcgaacccatagaatccgctggcttcccctactgcatcaccagtggcttctccatcgccgcttccaggttggctctgcccgacaccggcttcatctcctacggcgaaatgctggagcagggccaactcatcacccaagccgtttccattcccgtcattggcgacgccgacaacggctacggc

SEQ ID NO: 139820 - DNA, 232 bp, Glycine max
tcttcgccctcgcgcacgactacgtcctcatgcgcgccgaccgcggtgtgatctactttccggaggtggacctgggaatcactcttccagaatacttcgccgccgtcgccggggcgaagatcccggcggcggcgctgcgtgacgttgtgttggccggaaggaaggttagggcggagggggcggtggagatggggatcgtgcactcggcgcacgatagcgcggagggcaccgt

SEQ ID NO: 139821 - DNA, 233 bp, Glycine max
  unsure (1)..(233): unsure at all n locations
gaagaatgaaatctatctatcttcttatccgaagcccgngaggccaataagaagcacgtcagctgctatgaatggtgaataaaacacaaaagaaacaaattgctacatagcacacactccctcttctcttctacggttatggcgtccacgttgggcacttcttcaattgcggttcttccttcgcgctgcatctcttctttttcttccaagccttccattcacacactctctct

SEQ ID NO: 139822 - DNA, 232 bp, Glycine max
tgacttgagaggtgtaggataagtgggactagagtcaagctcaacagggtcttctttccccgctgattccgccaagcccgttcccttggctgtggtttcgctggatagtagacagggacagtgggaatctcgttaatccattcatgcgcgtcactaattagatgacgaggcatttggctaccttaagagagtcatagttactcccgccgtttacccgcgcttggttgaattt

SEQ ID NO: 139823 - DNA, 244 bp, Glycine max
  unsure (1)..(244): unsure at all n locations
caaaccttgctctatactacacagtacacacactagaagaataatggcttccatcctccactactttttagccctctctctttcttgctcttttcttttcttcttatctgactcagtcacccctacaaaaccaataaaccttgttgttctacccgttcaaaatgatggttccacagggctccataactacaanctccaaaaaagaacccctctaatgcaagtaccagtcctggtggacctcaat

SEQ ID NO: 139824 - DNA, 239 bp, Glycine max
aaaagatcatacatagtagtgttggtgggttgcaaagatgcttgggggtcttctccataggggtcataagataaaagggacagtggtgttgatgcgcaagaatgtgttggacgtgaatagcgtaaccagcgttgggggaattattggtcaaggtctcgacttagttggctcaacactcgatactcttactgccttcttgggccgatccgtgtctctccagcttattagtgctaccaaag

SEQ ID NO: 139825 - DNA, 238 bp, Glycine max
ctaggcactcacgtcttctcaggagtgccgtgcaacatgaaactcctacatcacagctttctgaaatatggtcacctctggaaagccaaggatggaaaccttatgttgaatcaaataagccaacattaccagagaagtccgagggatatatccaggtctttcttgatggaggtttgaaccaacaaaggatggggatatgtgatgcagttgctgtggcaaagatactgaatgctactct

SEQ ID NO: 139826 - DNA, 224 bp, Glycine max
tgttcatgctgctagtgtcacctatgtagccaccagaactgctgctggtggttacagtgatgacattaataagcaacatgataccaccaatgcctacggcgtagacactggtagacagcattctagtggtggctacgatggtgacactaataaacatcatggaattactggtggctataatgatgacaccaatagacatcatggaactaccggtgtctatggta

SEQ ID NO: 139827 - DNA, 234 bp, Glycine max
cccgaaccccatcgcctcctcgccgagctccattccacaacgacgccgtttcacagttccacttccaccaccaattccaaacacaacgacatcaacaccatctcggtcgacgaaacagaagacgagaaccgcgagaaagttaacccacacgaggcgtatcgtctcggccccaaaatatcgatctgggacgaacagagatctcgctggcttcgcgagaatcccaatttctcgaat

SEQ ID NO: 139828 - DNA, 229 bp, Glycine max
gtgttgagagaagagtgcgtttgtttgtttgaaattaagtagtaaagatgtttggaatcatcggaggaaacaagggtcacaagataaaggggaacttggtgattatgcgatagaatgtgttggatatcaacagcatcaccagtgttaagggtgtcattggaaccggcattaacatcattggaggtgtcgtcgacaccgttactgctttggcgtcccacatcttcatcca

SEQ ID NO: 139829 - DNA, 229 bp, Glycine max
cctaatagccatgaataatgctgattttatcatcaccagtacataccaggagattgcaggaacgaaaaatactgttggccagtatgagagccacgctggttttactcttcctgggctctatagggttgtccatggcattgatgtttttgatcccaagttcaatattgtctctcctggagctgatatgtcaatatatttcccctactctgaaaagcagaacagacttaca

SEQ ID NO: 139830 - DNA, 230 bp, Glycine max
caaattagttcattctctttgcgcagttccctacctctcctttcaagatgcagatcttcgtcaagaccctcaccggaaagaccatcacccttgaggtggaaagctctgacaccatcgacaacgtcaaggccaagatccaggacaaggaaggaattcccccggatcagcaacgtctcatcttcgccggaaagcagctcgaggacggccgtaccctcgccgactacaacatc

SEQ ID NO: 139831 - DNA, 231 bp, Glycine max
aattgagaatggggatccgattcgtactgatggtgaacaagcaaggccaaactcgtcttgctcaatactacgaatatctcaccctcgaagagcgacgtgccctcgaaggcgaaatcgttcgcaaatgcctcgcccgcaacgaacagcagtgttccttcgttgagcatcgcaactacaaaattgtatatcgtcgctacgcctctttgtttttcctcgttggagttgacgatg

SEQ ID NO: 139832 - DNA, 232 bp, Glycine max
gcggtttcctttgttggtgttgctgggaactgttttcctggcatcagtttgtgtctcattaaaggtgagagaggatgagaataaccctttctactttagaagctctaacagcttccaaactctctttgagaaccaaaacggtcgcattcgtctcctccagagattcaacaaacgctccacacaacataaaaaattacaagactaccggattgtggagtttcagtcaaaaccc

SEQ ID NO: 139833 - DNA, 235 bp, Glycine max
cagaaatccaaggattatgcaactgacactgctcagaaatcaaaggactatgcaggtgatgctgctcagaaatcaaaggactacgccggtgatgctgctcagaaaaccaaagactatgccagtgacactgcacagacatcaaaggactatgctggtgatgctgctcagaaatcaaagggctatgttggtgatgctgcacaatagaccaaagaatatgttggtgatgcagcacaga

SEQ ID NO: 139834 - DNA, 235 bp, Glycine max
aaagaaacagtcagaatcagaatcagaagaagcgagcaaagatgtcgggtcgtggaaagggaggcaagggtttgggtaagggaggagccaagaggcacaggaaggtgctccgcgataacatccagggaatcacaaaacccgccattcgccgtttggctcgcagaggcggcgtcaagagaatcagtggcctcatctatgaagaaacccgcggcgtccttaagatcttcctcgagaa

SEQ ID NO: 139835 - DNA, 229 bp, Glycine max
gtcccgcaatgcaaacgttgagtacttacggcgacacggtgtcaatggccaaaccgtcgaccctgacaccttcaagaggcttctccctgtcattacatacgaggacatccaaccagacatcaaccgcatcgccaatggtgacaaatctccaatccttacctcaaaacctgtcacagaatttctcaccagctctggcacatcagggggtgagagaaagttgatgccaaca

SEQ ID NO: 139836 - DNA, 236 bp, Glycine max
atcgagaagtgatcgaagcgaaaagagagaaattcatcgtcgcagtaatcatgggtaaggttcatggatcacttgcacgtgctggtaaggttagagggcaaaccccgaaggtggccaagcaggataagaagaagaagccacgtggccgcgcccacaagaggatgcagtacaatcgccgattcgtcaccgccgtggtgggattcggcaagaagaggggacccaactcgtctgagaag

SEQ ID NO: 139837 - DNA, 258 bp, Glycine max; identical to SEQ ID NO: 135960

SEQ ID NO: 139838 - DNA, 255 bp, Glycine max
caacttgctctatactacacagtacacacactagaagaataatggcttccatcctccactactttttagccctctctctttcttgctcttttcttttcttcttatccgactcagtcacccctacaaaaccaataaaccttgttgttctacccgttcaaaatgatggttccacagggctccattggttcaacctccaaaaaagaacccctctaatgcaagtaccagtcctggtggacctcaatggaaatcacttgt

SEQ ID NO: 139839 - DNA, 254 bp, Glycine max
tggaactgcaacaatggtgccgcaacccattttgcatctaacccttttgtcattaataatctctctgaccactctttccttggtcgatgccgccgatcccacatttggcttcacccctcttggattatctagtagctcaaacttgcaaatccaaaagccttacgacgttgcagtcaacgagcgctacagcttttcaaatggagtgcacagattttgggtatactccacggacaagcctcatatgcaaggcagca

SEQ ID NO: 139840 - DNA, 250 bp, Glycine max
ctcttcttctcttgcggctagggttttagcgctcttcttctagatttaaggaagatgggtaaggaaaaggttcacatcagtattgtggtcattggccatgtcgactctgggaaatccactaccactggtcacctgatttacaagcttggaggcattgacaagcgtgttattgagaggtttgagaaggaagctgctgagatgaacaagaggtctttcaagtatgcctgggtgctggacaaacttaaggctg

SEQ ID NO: 139841 - DNA, 252 bp, Glycine max
acaaaattgaactgtaattgtagtagtagacagtagcaccatgagccaggaacagctcaagaaacctcaaggggagcaggaccccatcaaatacggcgacgttttcaaagtctccgacgaactcgctttcaaacccatcgcgccaagagacgcagctctcatgcaagccacggagaaccaagcattgggccaaactcaaaaaggaggtcccgcctcggtgatgcaatccgccgcaaccgaaaacctccgcgc

SEQ ID NO: 139842 - DNA, 247 bp, Glycine max
caagaaagaacttccttataaccaaaaccaacaacaactatggcaagttatcagaagcactacgatgatcagggtcgcaaggtcgacgagtatggcaatgttgagaggcaaactgacgaatatggcaacccggttcatgccactagtgtcacttatgtagccactaaaagtgttggtggctacaatgatgacactaataagcaacatgataccaccggtgtctatcctgagaaagataccggtaggc

SEQ ID NO: 139843 - DNA, 241 bp, Glycine max
gctgtggttatcatcttcttcttcctctttcttagatctcttctttctctacgccgcacgccgaaaccatggccggaaaaggagagggtcctgctatcggaatcgatctcggaaccacctactcttgcgtcggtgtgtggcaacatgaccgcgttgaaatcatcgccaacgaccaagggaacagaaccacgccgtcttacgtcggattcactgacaccgagcgtctcatcggtgatgcggc

SEQ ID NO: 139844 - DNA, 246 bp, Glycine max
  unsure (1)..(246): unsure at all n locations
gcgagcaatatcaggtctcctttgacgcctaggtaagcatcccagttgcccgttggtcgtggttcgtggtcgcgcactggagagtccttgtcttgtcgtttcgggttcccaggatccatcgttctaaccacattacaaagacaaaaacacgtcggcgactatnttgacgtcaaggttaacggtgccgttcacaagggaatgccccacaaattctaacatggccgtaccggacgcgtctggaatgtc

SEQ ID NO: 139845 - DNA, 243 bp, Glycine max
ctggaaacggctcagccggaggtagggtccagcggctggaagagcaccgcacgtcgcgtggtgtccggtgcgcccccggcggcccttgaaaatccggaggaccgagtgcctcccacgcccggtcgttgctctaaccgcatcaggtctccaaggtcaacagcctctggtcgatggaacaatgtaggcaaggtgaagtcggcaaaatggatccgtaacctcgggaaaaggattggctctgagggc

SEQ ID NO: 139846 - DNA, 244 bp, Glycine max
atttctactccactgttactcgtgccagatttgaggagctcaacatggatctcttcaggaaatgtatggagccggtggagaaatgtttgagggatgctaagatggacaaaagaagtgttgatgatgtagtccttgttggtggttctaccagaattcccaaggttcaacaactgctgcaggacttctttaatggaaaagagctttgcaagagcattaatcccgatgaggctgttgcatatggtgc

SEQ ID NO: 139847 - DNA, 243 bp, Glycine max
aaaccctactcattctccatacctcaacgaagaggttaaagagacggcaacactttgctgtccgccttgaccgagcagagcttcgtcttggccctcgattttgccctaaagtactctcagtcacaatagacaccgtcgtcgtcgtcgtcgtcatcaatggcaccgaagcagaccaaggctgagaagaagatcgcttacgatgcgaactgtgcgacctaatggaggagtacggccagatcctcg

SEQ ID NO: 139848 - DNA, 256 bp, Glycine max
ctctcgttgattcggatctagagtcttttttcactcttcagttctcgttgttgttcttcgctttcctgaaactagggttttcaatttcgattcattcgttaataattaaagatgtttgggagggcaccgaagaagagcgataatacgaggtactacgaaatcctcggcgtctcgaagaacgcttcgcaggatgatctgaagaaggcttacaagaaagccgccatcaagaatcaccctgacaatggcggtgatcccg

SEQ ID NO: 139849 - DNA, 250 bp, Glycine max
aagaacttccttataaccaaaaccaacaacaactatggcaagttatcagaagcactacgatgatcagggtcgcaaggtcgacaagtatggcaatgttgagaggcaaactgacgaatatggcaacccgcttcatgccactagtgtcacttatgtagccactaaaagtgttggtggctacaatgatgacactaattagcaacatgataccaccggtgtctatcctgagaaagataccggtaggcatcatttt

SEQ ID NO: 139850 - DNA, 245 bp, Glycine max
aaccttgctctatactacacagtacacacactagaagaataatggcttccatcctccactactttttagccctctctctttcttgctcttttcttttcttcttatccgactcagtcacccctacaaaaccaataaaccttgttgttctacccgttcaaaatgatggttccacagggctccattgggccaacctccaaaaaagaacccctctaatgcaagtaccagtcctggtggacctcaatgga

SEQ ID NO: 139851 - DNA, 246 bp, Glycine max
cttagatctaaagaagcacatggattcatctccagaatttgcaaaagatccacgacaagtaaaaatgttcctgtaccaaattctctgtggcattgcatactgtcattcacatagagttcttcatcgagacttaaaaccacagaatttgttgatagatcgcagcactaatgcactgaaacttgcagattttggattggccagggcttttggaattcctgttaggacatttacacatgaggtggtaac

SEQ ID NO: 139852 - DNA, 245 bp, Glycine max
aagagagagagagggagtcagagaaaccctaggtaagaagaaaagatgccggctggtcatggtttgagatcccgcaccagagattccttctctcgtctatacaggaagaagggaaccatcgccctcaccacatacctgagaacctaccacgtcggcgactatgttgacgtcaaggttaacggtgccgttcacaagggaatgccccacaaattctaccatggccgcaccggacgcgtctggaatgt

SEQ ID NO: 139853 - DNA, 245 bp, Glycine max
ctcgagccgataaatatggagaggaagcagcacatgttacaaatgaaggccttgacgcagcagggcatgcgattgggacagcttgggccgtgttcaaacttgggaaggcactcaaccccaagagcgcaatcaagccaacaacactagctaaagctgctgctgaagcaagttcagctagactgaaggctaagaaataaggcacggcaacaaaagaatcaggatccccccagcaatctccatataga

SEQ ID NO: 139854 - DNA, 243 bp, Glycine max
gtccaagcagcctccaattcgtgccactctcttcaaaatggccgttaccttctcaaatctccacacagaatcaggtctcaagtccctcgacgacttcctctctgggaaggtctacgtttctggggatcagttcacaaaggacgacatcaaagtgtatggtgctgttttggagaagccaggtgactcttttcccaatgctgccaagtggtacgaggttgtctcatctcagcttgctgcaagctt

SEQ ID NO: 139855 - DNA, 246 bp, Glycine max; identical to SEQ ID NO: 113697

SEQ ID NO: 139856 - DNA, 252 bp, Glycine max
  unsure (1)..(252): unsure at all n locations
ctcggttctgccttcacacaacaatcaacaacaaacaacttttactcctaagaaaagccatggctaagggtcccggtctctactctgacatcacgcaccaaagncagggatctgctgttcaaggactaccacagtgaccagaagttcaccatcaccacctactcacccactggagttgctataacagcatcaggaaccaggaaaagtgaactgtttgtggctgatgtcaacacccagttgaagaacaaaaac

SEQ ID NO: 139857 - DNA, 244 bp, Glycine max
ctcgagccgataaatatggagaggaagcagcacatgttacaaatgaaggccttgacgcagcagggcatgcgattgggacagcttgggccgtgttcaaacttgggaaggcactcaaccccaagagcgcaatcaagccaacaacactagctaaagctgctgctgaagcaagttcagctagactgaaggctaagaaataaggcacggcaacaaaagaatcaggatccccccagcaatctccatatag

SEQ ID NO: 139858 - DNA, 245 bp, Glycine max
gtgagggccttccatggcttccgcttgtgcttcctctgcaattacagctgttgccatctctacgccgagttccgggcagaagaatggatcaggaggttgttttcttagtggaaggaaattgagggtgaaaaaggagagagcagcaattggaggacgatcgatgggcactacagtgtgcgcagttgctgagcctgacagacctctatggttcccaggcagcacccctcctccatggcttgatggca

SEQ ID NO: 139859 - DNA, 243 bp, Glycine max
cttgtctcaaagattaagccatgcatgtgtaagtatgaactaattcagactgtgaaactgcgaatggctcattaaatcagttatagtttgtttgatggtatctactactcggataaccgtagtaattctagagctaatacgtgcaacaaaccccgacttctggaagggatgcatttattagataaaaggtcaacacaggctctgcctgttgctttgatgattcatgataactcgtcggatcgc

SEQ ID NO: 139860 - DNA, 244 bp, Glycine max
ctggatcacatctctgagctctttgactgctcccataccagctccaagctcaagaagaagcgcaaacaattccagacggtggaggtgaaagtgaagcccggactgcgaagggtgtgagagaaaggtgaagaaatcggtgaacggaatgaaaggggtgacagaggtggaggtggatagaaaggccagcaaggtaactgtttccggctatgtggaaccctcaaaggtggtttctcgcatcgctcac

SEQ ID NO: 139861 - DNA, 119 bp, Glycine max
gtgatctgcagctacgatgggtaagggaacggggagtttcggtaagaggaggaacaagacccacaccctctgtgtgacgtgtggccgccgcagcttcgacctccagaagagtcgttgct

SEQ ID NO: 139862 - DNA, 245 bp, Glycine max
ttcaaaccttgctctatactacacagtacacacactagaagaataatggcttccatcctccactactttttagccctctctctttcttgctcttttcttttcttcttatccgactcagtcacccctacaaaaccaataaaccttgttgttctacccgttcaaaatgatggttccacagggctccattggtccaacctccaaaaaagaacccctctaatgcaagtaccagtcctggtggacctcaa

SEQ ID NO: 139863 - DNA, 253 bp, Glycine max
cttgtctcaaagattaagccatgcatgtgtaagtatgaactaattcagactgtgaaactgcgaatggctcattaaatcagttatagtttgtttgatggtatctactactcggataaccgtagtaattctagagctaatacgtgcaacaaaccccgacttctggaagggatgcatttattagataaaaggtcaacacaggctctgcctgttgctttgatgattcatgataactcgtcggatcgcacggcctttg

SEQ ID NO: 139864 - DNA, 254 bp, Glycine max
ctcaaaccctaacctaactcctctcgtcgtcacaaaaagttttcttctccgatcgttacgatgttggaactccgtctcgtgcaaggttcccttctgaagaaggttctggaatcgatcaaggagctcgtaaacgacgcgaacttcgactgctcctccaccgggttctccctccaggccatggattccagccacgtcgccctcgttgcgctcctcctccggtccgagggctttgagcactaccgctgcgaccgcaa

SEQ ID NO: 139865 - DNA, 119 bp, Glycine max
tgaagaatgagccggcgactcataggcagtggcttggttaagggaaaccaccggagccgtagcgaaagcgagtcttcacagggcaattgtcactgcttatggacccgaacctgggtgat

SEQ ID NO: 139866 - DNA, 184 bp, Glycine max
gtgcggtttcctttgttggtgttgctgggaactgttttcctggcatcagtgtgtgtctcattaaaggtgagagaggatgagaataaccctttctacttgagaagctctaacagcttccaaactctctttgagaaccaaaacggtcgcattcgtctcctccagagattcaacaaacgctccacac

SEQ ID NO: 139867 - DNA, 189 bp, Glycine max
ttctcaccgtgctctatgctatacagtacattcactctacgtttaatggcttgcatactatactaattgtcatcactctctctttcgagttctttgctattcttcttatccgactcagttactcctatatcaccaatataccgtgttcttctaatcgttcaaaatgatcagttccacagggctccattg

SEQ ID NO: 139868 - DNA, 244 bp, Glycine max
gcttcgcaaatctcaatcgaatctcagaaaaatgagagaaatcatcagcattcacataggtcaggccgggatccaggtcggaaactcctgctgggaactctactgcctcgaacatggcatccagcccgacggcatgatgccttctgactccaccttcggtgtagcccacgacgccttcaacaccttcttcagcgaaaccggatctggcaagcacgtcccccgtgctgtcttcgtcgacctcgaa

SEQ ID NO: 139869 - DNA, 253 bp, Glycine max
accgcaaagaagaaagaggaggcacagcgggaattggaggccaaaaaaccatctcaacctcaggaagctgaagagaggccatcagaaggaattggcgaaactgtgaggcagtatgcacaaaaaccaaagccaagtgaaagaaaccctcagaaggagggaaccggaagcatcgtgtttacagcaataggcgaaacagtaagcagtgccggtgagaaggtaaagaaaccgtttaaaaacactatgggaggagaaa

SEQ ID NO: 139870 - DNA, 252 bp, Glycine max
aaaacaaaaagtttacgttacaaatcgcataataaccgtcctaagtttattgagagaattttgcaagtgtgagaaacatggcatctcgtcaaaacaaggagcaagagcttgatgaaagagcaaggcaaggagagactgttgtcccgggtggaactggtggcaagagcctggaggctcagcaacacattgctgaaggaaggagcaagggagggcaaacaaggaaggaacagctgggtacagaagggtaccagg

SEQ ID NO: 139871 - DNA, 246 bp, Glycine max
gctgaagaaaacctaagcttagaattagaaacaaagaaaagaagaaaggaaagaattgatcgttgaaaatgcagggaggaaagaaagcgggagagtccattaaggaaacagctacaaacattggtgcttctgccaaggctggcatggagaagaccaaggccactgtccaagagaaggcagaaagaatgacagcacgtgatccggtgcataaggagttggcaacccaaaagaaagaggcaaagatga

SEQ ID NO: 139872 - DNA, 245 bp, Glycine max
catttttgtactaagaagcatttgttacatttatgtaaccaaaggaaaatcaaaagtacgcaggaggtgaagctcggtggcgaaatcaacatgcaacgcagtgaaagcatgcgactaaaggagaagaaggtgaaggatttgatggttgacaagaagaggctagtggaggtgccgtacatggcgtccctggcccacacaatgactacactggtggcgaacaaggttgtggcggtgccggtggctgc

SEQ ID NO: 139873 - DNA, 241 bp, Glycine max
gcctccgccgatcctcccccggaggagaaggaggagaccaaacctgaagccaaggctaagaaaaccaaggagcccaaacctaaaaaggtttccagacctcgcaaccctcccactcatccttcctacgaagagatggttaaagatgcaattacctcgctgaaggagaaaaccggttcgagccaatacgcgattgcgaagttcatcgaggagaagcacaagcagcttccaccgaacttcaaga

SEQ ID NO: 139874 - DNA, 243 bp, Glycine max
tatgtagccaccagaactgctgctggtggttacagtgatgacattaataagcaacatgataccaccaatgcctacggcgtagacactggtagacagcatactagtggtggctacgatggtgacactaataaacatcatggaattactggtggctataatgatgacaccaatagacatcatggaactaccggtgtctatggtatagacaccgataggcaacaacatgggactactggtggctat

SEQ ID NO: 139875 - DNA, 238 bp, Glycine max; identical to SEQ ID NO: 136607

SEQ ID NO: 139876 - DNA, 236 bp, Glycine max
gaacttccttataaccaaaaccaacaacaactatggcaagttatctgaatcactacgatgatcagggtcgcaaggtcgacgagtatggcaatgttgagaggcaaactgacgaatatggcaacccggttcatgccactagtgtcacttatgtagccactaaaagtgttggtggctacaatgatgacactaataagcaacatgataccaccggtgtctatcctgagaaagataccggt

SEQ ID NO: 139877 - DNA, 246 bp, Glycine max
ttccttacaatcaaaaccaacaacaactatggcaagttatcaaaagcactacgatgatcatggccgcaaggttgacgagtatggcaacgttgagaagcaaaccgacgaatacggcaaccctgttcatgctgctagtgtcacctatgtagccaccagaactgctgctggtggttacagtgatgacattaataagcaacatgataccaccaatgcctacggcgtagacacttatagacagcattctag

SEQ ID NO: 139878 - DNA, 243 bp, Glycine max
caagaactaaccgtgcaacacaagctggatactggaaagctacagggaaagataggccagtgcactctcaaaagaagcaagttggcatgaagaagacattggtgtactatagaggtagagcatcacatgggattagaaccaactgggttatgcatgaataccgtttaattgaatcagttcctggtactgctctctcatctttgaaggattcctattcgctgtgtcgcattttcaagaagacga

SEQ ID NO: 139879 - DNA, 246 bp, Glycine max
caaaacagtaaagctaacttcaacacctttaattttctaaaagtaattcagcggctgaataccaagcggagaagatgagtcaggagcagccacggcgtcccaaaggccaaaaccccatcaaatacggcgacgtttttgtcgtctccggcgaccttgcacagaagcccgtcgcaccggaagatgctgccatgatgcaaagcgcggaagctcgagtgctcggacaaacccaacccggcggagcagctt

SEQ ID NO: 139880 - DNA, 241 bp, Glycine max
tttgacctctatatgcagacagttcatggagtcgcttttttcgcaatgcagagatggagaggatggttgatcaggatttatcacgtttataccccgaacatggcaactatttccagacgccaggttgcctaggactattgagaagaattttattactatggtgtctcacacacccagagtgtggttatagacaaggaatgcatgaattacttgctccggtgctttatgttctccaatttga

SEQ ID NO: 139881 - DNA, 238 bp, Glycine max
gaaaagccatttccatagcagcctaagaaaatgaagagcactagcttgttcgctatctttctactttgcgccttcacctcatacctaccttccgccaccgcccaggacgtgctcgacgtggatggcgatccgattccgaacggtttcatatactacgttttgccggcaataagaggaaacggtggcggaatagaacgagccgcactcgggaaagacacttgccctatcactgtagtgc

SEQ ID NO: 139882 - DNA, 240 bp, Glycine max
gaaaagaaagaatatcttttatgtatccaccaaatttatcaacttttcataaaatgatggaaaccaaattttatctcttcacaaaagataaaatttcctatgatgaattgtctaattattggagctatactaatgaagaaaaaagaaacaaattgagcaatgaatttgtaaatagggcaaaagtaatggataaggaattaatttctctggatacattagaaaaccgaattcgattgtcta

SEQ ID NO: 139883 - DNA, 240 bp, Glycine max
gcaagacatacttggaagtgaagggaactggaactgctaatcagtgcccaaccattgaaggtggagtggactcatttgccttcaaggcagggaaatacaaggcccagaagttgtgcctggaaccaacttccttcacggtgaaggcagagggtgtggccaagaatgccccgctcgaatttcagaacaccaagctcatgactcgtctgacctacaccctggacgagatcgagggtcccttcg

SEQ ID NO: 139884 - DNA, 240 bp, Glycine max
ggagatttgtttctggggatggtgaagagatgacactgattccgggaaccagtgttgaagaggcttacaacaagctaatagttgaacttgagaaaagtgttcctacattggtcggcattgaatgtcccaaggatgagaaacttcctcgtcgcaaaatttttgacaaacctaagacgcgctgcttcactattctccctatggagtttaatcttgtggtccgtcagaagtttttaaattttg

SEQ ID NO: 139885 - DNA, 272 bp, Glycine max
ttcggctcgagcctcttcagtgatctttgattagtactaagctaaaccatttcttattccctcaaaatcaaaacctttttctttctagctatttcccttttcaaatcatgccacctaacatcaccaccgttgttgccaatgtcaccaccgagcaattacccaaggctcgtggaggaagtgggcgtgccttcgtgacctttcttgctgggaacggtgattacgttcagggtgtcgtgggtttggccaaaggactgagaaaggccaaaagcatg

SEQ ID NO: 139886 - DNA, 261 bp, Glycine max
aattccttcacttgcagcactgttgcatcatcatcttcattggaaaaccctaaacttcaccttcaaccatgagcacacaagtaccaccacacagtgtccaagtccacacaacaacacatacatacgaagctggcgtcgtcccacccggagcccgtttcgaaccgccgcgttatgaagccggcgtcaaagcgccctccatttaccattcccgagaagggtccaacgacttcccaggtcctcgacgtcctcgacggcctccca

SEQ ID NO: 139887 - DNA, 255 bp, Glycine max
gagcactatttgcctcctcatatgctcaacctctcacgcgatgttaagcttcactacatcaggaacattcttcttcgctatttgcctgagaatgaccgcaactggattcaaaagctgagggaatacaggctaaagatcatattgaattatccatcgttgcataaggagatatttactatggatgctgagaactttttcgtaccatcatttctcagagcaattaaagaaaacacagaagcgaattttagaagtata

SEQ ID NO: 139888 - DNA, 258 bp, Glycine max
atttactaacataacagaaaacattgtaaaaatacttttacgcgagggttttgttgacaacgtcagataacatagagaaaacgacaaatattttttagttttaactctatggtatagaagaaatagaaaaggatcatataaaagttttttaaatttaaaacggatcagtacacccggtctacgaatatattctaattatcaacgaatccctcgaattttagggggcatggggattgtaattctttcaattctagaggt

SEQ ID NO: 139889 - DNA, 257 bp, Glycine max
catttcttgatcggcacggaaagtatgtacaaactttcctgactgcacataagagggttaacatggagggtcagatcataggagctttttgctttttgcaaatcatgagtccggaagcttcagcaggctcttaaggcacagagacaacaagaaaagaattcctttggtaggatgaaagagttagcttatatttgtacaaggagttaagaatcctttgagtggcatacgctttacaaactctcttttggaggctacaa

SEQ ID NO: 139890 - DNA, 254 bp, Glycine max
aaatcagaaaagcttatgaggagatttaccaagaggatctcatcaaacgccttgagtccgagatctctggtgactttgagagagctatgtaccggtggatgttgcagcctgcggatcgtgatgctgttttggtgaatgtggcaatcaagaatggcaccaaagactaccatgtgattgcagagattgcttgtgtcctatcagctgaagagctcttggcagtgaggcgggcctaccaccgccgctacaatgttcct

SEQ ID NO: 139891 - DNA, 256 bp, Glycine max
ccggaaatcgttcctatcatcacttctcaaatctcgaaccctctcgttcgtgccgatcactaggtcacacttcatcaatggcgggtagaggcaaaaccctaggatccagcgccgctaagaaggccacctcaaggagcagcaaagccggcctccaattccccgtcggtcgtatcgccaggttcctcaaggccggaaagtacgccgagcgcgtcggcgccggagcccccgtctacctcgccgacgttctcgaatatct

SEQ ID NO: 139892 - DNA, 255 bp, Glycine max
acagcctttctgactcggcctggcccggtcgccctacgcgactggcgcttcaaaaggtagttgacttgcttactcgttagagtaggggtcgcgagagagcagagcgtaccgccctgccatagtcgcgagtctgtttatagtcgcgactgttgtcatagtcaacaaggttgaaacttccaggaaaaaacttcgaattgggagggcgatcctcccggtgaactgaccgtaccccaaaccgacacaggtgaacaagta

SEQ ID NO: 139893 - DNA, 254 bp, Glycine max
aacttcaacacctttaattttctaaaagtaattcagcggctgaataccaagcggagaagatgagtcaggagcagccacggcgtcccaaaggccaaaaccccatcaaatacggcggcgtttttgtcgtctccggcgaccttgcacagaagcccgtcgcaccggaagatgctgccatgatgccgcgcgcggaagctcgagtgctcggacaaacccaacccggcggagcagcttccgtcatgcaatctgccgccacc

SEQ ID NO: 139894 - DNA, 257 bp, Glycine max
cgaagaatgacagcacgtgatccggtgcaaaaggagttggcaacccaaaagacagaggcaaagatgaaccaggcggagctggacaagcaggcggcgcgtcagcataacacggcggccaaacagtccgccaccacggactgggcacatgggacatggccaccacaccaccggaaccgggactggaaccgccacgtattccaccaccggggaatatggtcagcccatgggggcccaccagacgtcggcaatgcctggcc

SEQ ID NO: 139895 - DNA, 244 bp, Glycine max
gtgagaaacaaagacaggaaataattgatctttgacaatgcagggaggaaagacagctggagagtccatcaaggaaacagctgcaaacattggtgcttctgccaaggctggcatggagaaaacccaggccactgtccaggagaaggcagaaagaatgacggcacgagatccgatgcaaaaggagttggcaacccagaagaaagaggcacagatgagccaggcagagctggacaagcaggcggcg

SEQ ID NO: 139896 - DNA, 254 bp, Glycine max
ccaggattgggtttttacagatcaagcattgcgtgctgatcttataagaagcggaatggcaattgaggatccatcgtgccctcatggcattcgccttgtgatagaggactacccatatgctgttgatggacttgagatatgggatgctatcaagacatgggtccatgaatacgttttcttgtactacaaaatcctacaaacacttagagaagatcctgaactccaagcctgctggaaagaactcgtagagtggg

SEQ ID NO: 139897 - DNA, 262 bp, Glycine max
tgttactccttctctcgttgattcggatctagagtcttttttcactcttcagttctcgttgttgttcttcgctttcctgaaactagggttttcaatttcgattcattcgttaataattaaagatgtttgggagggcaccgaagaagagcgataatacgaggtactacgaaatcctcggcgtctcgaagaacgcttcgcaggatgatctgaagaaggcttacaagaaagccgccatcaagaatcaccctgacaaggcggtgat

SEQ ID NO: 139898 - DNA, 259 bp, Glycine max
cttgcccatcatcaaagtttcttcctttctctgctctttgtcttctctgacacatttggggccttgttgagtgtgtttttgcaagagggtatggcgaaggacgttgaggttgctgagcgtggctccttctctgggaaggactaccaggaccctccaccagcaccactcattgatgctgaggagctcacaaagtggtccttttacagggctcttattgctgagttcattgccactttgctcttcctctacattactgtgc

SEQ ID NO: 139899 - DNA, 254 bp, Glycine max
ttttgacttaatgacttatccatcccaatcccttacaccctataaactcaccaactctctcccacactctctcgaacacacaatctgcttcttatctccaaagctttatatttctttttctttttctgcgtttcacaatggaacaacctccttcgtcctcaatcgccgcgggaattcaattcgggtggcccctacagctctctcttttgacaccctacgtccagaccctgggcgtcccccacgcatgggcctcc

SEQ ID NO: 139900 - DNA, 253 bp, Glycine max
  unsure (1)..(253): unsure at all n locations
tgtggtttcacactcacaggatttccttaatggtgtctgcacaaatatcatcccgatgaaatacaacacacaaaaanactacaatggaaattatgattaatatgtacagacacgtcctgaactggaggagcaccagatgaagcagtacaaatgggagcagacgcaaattgcctcgatgaaggaatacattgcccgaattggtcatggatcagcaaaactagcccgacaagctcagagtaaagagaaaactctt

SEQ ID NO: 139901 - DNA, 255 bp, Glycine max
  unsure (1)..(255): unsure at all n locations
cacacaactactacacgtacttccttacgatcaaaaacaacaaanaactctagctagttctcacaagcactacgatgatcagggtcgcaaggttgacgagtatggcaacgttgagaagcaaaccgacgaatacggcaaccctgttcatgctgctagtgtcacctatgtagccaccagaactgctgctggtggttacagtgatgacattaataagcaacatgataccaccaatgcctacggcgtagacactggtag

SEQ ID NO: 139902 - DNA, 252 bp, Glycine max
cacacaactacaagaatgaacttccttataaccaaaaccaacaacaactatggcaagttatcagaagcactacgatgatcagggtcgcaaggtcgacgagtatggcaatgttgagaggcaaactgacgaatatggcaacccggttcatgccactagtgtcacttatgtagccactaaaagtgttggtggctacaatgatgacactaataagcaacatgataccaccggtgtctatcctgagaaagataccgg

SEQ ID NO: 139903 - DNA, 243 bp, Glycine max
cgggaagtccatgcgaacggtgcgctccaaactattccaacacgaacgagacacgtacgtctccgacaacttaaccggttcgctaatggagctcgcctcgcgaaacaacaaatccgttaaatcttccattacggaggagcactctctcgagctctctcaagctctgagcgatttctccgcctgtagtagcgatatctccggcgagctccagaggctcgccaccgtttcctcctcccaacctcc

SEQ ID NO: 139904 - DNA, 253 bp, Glycine max
atcgcccatggatcagccgaagcgagtggttgtctgcggcggcggagtaatcggagtctgcaccgcctactttctggcggagaagggcgccgctgtcacgctcatcgagaaatccgacgtggcgtgcgccgcgtccggaaaagccggcggattcctcgccctcgattggtgtgacggaggaccgttggaagagctagctcgcgccagcttcaatctccaccgttcgctctccgaagaactcgagggtccgcga

SEQ ID NO: 139905 - DNA, 243 bp, Glycine max
acgattaacaatggcttcaaccgacaagtcaccggacccaacgccggcgaagggtccggatccaactccggggaagccgatgagtgttggtcagcacgtgatcgacaagagtgcaatgatggtgcagtcgctggaccccattaagcagatgagtcagcacgtgtgctccttcgctatctacagccatgacatgtctcgccagatagagacacatcactactgctccagactccaccagaactt

SEQ ID NO: 139906 - DNA, 253 bp, Glycine max
gaaaagtagtgtattaagactacaaattttcaatttttcaatggcgtcgaggcaacacaaagaggatcgagctgaggcagctgcgaaagttgctgcgaaagaactcgaacaactcaaccgagcaaaagaccgtgatttcagtgttggtgttgcagaccaacaccaacaagaagaacatcagttagatcaacaaaagcgtggtgtaatcggatccatgttcaaggcggtgcaagacacctacgagaacgccaag

SEQ ID NO: 139907 - DNA, 256 bp, Glycine max
gtcggatacaaccctgacaagattccttttgttcctatctctggtattgagggagacaacatgattgagaggtccacaaaccttgactgacacaagggtccaactctgcttgatgcacttgaccagattagtgagcccaagaggccctctgacaagcccctcaggcttccccttcaggatgtgtacaagattggaggtattggaactgtgccagtgggacgtgttgagaccggagtcttgaagcctggaatggtgg

SEQ ID NO: 139908 - DNA, 255 bp, Glycine max
ctatgatgagagtgcggtttcctttgttggtgttgctgggaactgttttcctggcatcagtttgtgtctcattaaaggtgagagatgatgagaataaccctttctactttagaagctctaacagcttccaaactctctttgagaaccaaaacggtcgcattcgtctcctccagagattcaacaaacgctccccacaacttgagacgcgtcgagactaccggattgtccagtttcagtcaaaacccaacacaatcc

SEQ ID NO: 139909 - DNA, 254 bp, Glycine max
cgtcaaactgttgctgtgggagtcatcaagaacgttgagaagaaggatcctaccggagccaaggtcaccaaggctgcccagaagaagaagtgaatcgtgcgggctggttcatcaggggatgttggttacaataaatgttggtttcttttctgtactcttgtgtcttcttttctaggtagcttgtttttcggacaaagtttgaagtctccaccatcatctcgcaactgttgttcccagaactgggttcttgatcg

SEQ ID NO: 139910 - DNA, 251 bp, Glycine max
ctcattttcattatcttaccactttcaattccaaattcactctcagaaattagaatggctagccaatcaaacactaaatcagttcacgatttcacagttaaagatgccaggggaaatgatgttaatctcgctgattacaaaggaaaggtccttctccttgtcaatgttgcctcacaatgcggcttgactaattcaaactacacagagcttaatcaattgtctgagacatacaaagggaaaggacttgaaat

SEQ ID NO: 139911 - DNA, 249 bp, Glycine max
ccagcctggtgtgcttatccaggtctttgagggtgaaagagcaaggaccagagataacaatttgttgggcaaatttgagctatctggcattcctcctgcacccaggggtgttcctcagattacagtgtgctttgacattgatgccaatggtatcttgaatgtctctgccgaagataaaaccactggccagaaaaataagatcactatcaccaatgacaagggtagattgtcaaaggaagatttgagaag

SEQ ID NO: 139912 - DNA, 251 bp, Glycine max
ttcttctcttgcggctagggttttagcgcagttgcttctagatttaaggaagatgggtaaggaaaaggttcacatcagtattgtggtcattggccatgtcgactctgggacatccactaccactggtcacctgatttacaagcttggaggcattgacaagcgtgttattgagaggtctgcgaaggaagctgctgagatgaacaagaggtctttcaagtatgcctgggtgctggacaaacttaaggctgagc

SEQ ID NO: 139913 - DNA, 250 bp, Glycine max
ctcaaatctcttcgttccttcgattcgttccatttcttccaaaatggccaaagacccagttcgcgttctcgtcactggagctgcagggcaaattgggtatgctcttgtccctatgattgctaggggagtgatgttgggtcctgaccagcccgtgatcctccacatgcttgacattcctccggcagcagagtcattgaatggggttaaaatggaattggtggatgctgcattccctcttcttaaaggtgtt

SEQ ID NO: 139914 - DNA, 248 bp, Glycine max
ctcactcatctcttacaacgaaaccctcttcatcttgttctatctgtgacgagcatcatggcctcaagagcagtgttattgttggctatgtgtgtgcttccggcgatggttgtggccattcgcccagcaaagaaccctttttgcgtgaagggtcgtgtctactgtgacccttgccgtgctggttttgagacctcagctaccacctacattgctggtgctgagattatgttgcaatgcaaagcagggtt

SEQ ID NO: 139915 - DNA, 233 bp, Glycine max
ctctgttcactcttcttctcttgcggctagggttttagcgcagttcttctagatttaaggcagatgggtaaggaaaaggttcacatcagtattgtggtcattggccatgtcgactctgggaaatccactaccactggtcacctgatttacaagcttggaggcattgacaagcgtgttattgagcggtttgagaaggccgctcgctgagatgcataagcaggtctttcaagtat

SEQ ID NO: 139916 - DNA, 247 bp, Glycine max
ttctaacaacagcagaatgggaagacgaccggcgaggtgttaccggcagatacagaacaaaccgtacccgaaatcccgtatctgccgcggcgagccggagccgaagatccgaatctacgacgtgggaatgaagaagaaaggcgtggacgagttcccgttctgcgtgcacctggtctcgtgggagaaggagaacgtctccagcgacgctttggaggcggcgcgcatcgcgatgcgataagtcactggc

SEQ ID NO: 139917 - DNA, 250 bp, Glycine max
ggtaggacggtgcggctgctctgttgagccgcgctatggaatcctgagctccaagtgggccatttttggtaagcagaactggcgatgcgggctgaaccggaagctgggttacggtgcccaactgcgcgctaacctagaccccacaaagggtgttggtcgattaagacagcaggacggtggtcatggaagtcgagatccgctaaggagtgtgtaacaactcacctgccgaatcaactagcccctaaaatgg

SEQ ID NO: 139918 - DNA, 249 bp, Glycine max
actcaatatagtgcaacctttgctgtggtagtggaagcacactaagagcacaacgttacatatagtaactatggcgagagtgggtagaatgagacttggttcagaagggtttgaagtgtctatgcagggacttgggtgcatgggcatgtctgcattctatggtcctcctaagccagagcccgatatgattgcactcatccaccacgccgtccaaagaggtgtcactttacttgacacttctgatgtcta

SEQ ID NO: 139919 - DNA, 249 bp, Glycine max; identical to SEQ ID NO: 136638

SEQ ID NO: 139920 - DNA, 248 bp, Glycine max
gaagcatctaagtgagatacacagtagttaggtagcaagcataagtgtctaaccttagaaacatatctgctacatatcgtgtgcattttggaattgtgccactaaaattctattcatctatggctgcctcatcttatgctatgcaatcaatccttgcaaaccctatgatccgcatttccagcgggtctagggagaaccattttggtgttcctgcttatcacatgagaaggaatgttggcctgagagtt

SEQ ID NO: 139921 - DNA, 252 bp, Glycine max
cgtaccgcaagcttcgccgtttgaaacagtgcctcaaccatggcagaacaaacagagaaggcttttctgaagcaaccaaaagtgtttctatgctctaagaaaggtgggaagggaaagaggcctgggaaaggtgggaatcgcttttggaagtcaattgggcttggattcaagactcccagagatgccattgaaggaacatatattgacaagaagtgctccttcactggcaatgtttccattcggggtcgtatc

SEQ ID NO: 139922 - DNA, 257 bp, Glycine max
ctcggctcttgcatcgatgaagaacgtagcgaaatgcgatacttggtgtgaattgcagaatcccgtgaaccatcgagtctttgaatcgcaagttgcgcccgaagccatttggccgagggcacgcctgcctgggtgtcacacatcgtttccccaacgcaaacatgtaacaatgttgctgcgcggggtgtatgctgacctcccgcgagcacccgcctcgtggttggttgaaatctgggttcatggccgacttcgccgtg

SEQ ID NO: 139923 - DNA, 250 bp, Glycine max
gcagcatcgacatctattcctcccggtacctgtattgtatcataatgaacgtgatatcatgatgctgtatagagagagagatatgagatagttcacaattcctcctatatcttgatttatagcagtgaagaaaaaaacagagaaagcataggcgtggacttctacaagattctacaggtagatagaggcgccaaatatgatgatctcaagaaagcatatcgtaggctagctatgaattggcaccctgata

SEQ ID NO: 139924 - DNA, 248 bp, Glycine max
ctaaacaattcaattcaatctgcctcgatcatggagaggaaaacatttgggtttttgttcttgctcctccttgtcttagcttctgatgtgacggtgaagagagcagaggcgaaagattgcttgacaaggaggcacgggtttcagggtagatgcttattcgacaggcaatgtgcacatgtgtgcaggagcgatggtttcatcggtggtcagtgccgaggccctcttcgcgaatgcttttgcagcaggcc

SEQ ID NO: 139925 - DNA, 245 bp, Glycine max
tctttatagttctaaggagggtgcaagagagaactgaatttgctgtgatggcaactcgtagatatgcttttggaagagctgatgaggccactcatccagactccatgagggccactttggctgaatttgtttctactttcatctttgtctttgctggagaaggctctggcctcgctttggttacaatttaccaggattcagctttctcagctggtgacatgttggcagttgcacttgcacatgga

SEQ ID NO: 139926 - DNA, 246 bp, Glycine max
caaaccttgctctatactacacagtacacacactagaagaataatggcttccatcctccactactttttagccctctctctttcttgctcttttcttttcttcttatccgactcagtcacccctacaaaaccaataaaccttgttgttctacccgttcaaaatgatggttccacagggctccattgtcccaacctccaaaaaagaacccctctaatgcaagtaccagtcctggtggacctcaatgg

SEQ ID NO: 139927 - DNA, 208 bp, Glycine max
gccattgccgcaaaaatcgccgcaaccgccaccacgaaccgccaccatcctcgggaactcccaactgacgcgcttcctcggccgcggaagcttcaccaaggtctaccaggggagatccctcgtcgacggctccgcgtcgccgtgaaaataatcgacaaatcgaaaaccgtggacgccggcatggagccacgtataatccgcgagatcg

SEQ ID NO: 139928 - DNA, 254 bp, Glycine max
gcaaaggattctacccgccgctcgatgggaattgcgcttcaaggcgactcgtagggctaatccgcctcacgagggtcaccaacggcacgtgcctttggggggccgaggccccctactgctggtcggcaaacggacggcgggcgcacgcgtcgcttctagcccggattctgacttagaggcgttcagtcataatccaacgcacggtagcttcgcgccactggcttttcaaccaagcgcgatgaccaattgtgcga

SEQ ID NO: 139929 - DNA, 256 bp, Glycine max
aaactgacgaatatggcaacccggttcatgccactagtgtcacttatgtagccactaaaagtgttggtggctacaatgatgacactaataagcaacatgataccaccggtgtctatcctgagaaagataccggtaggcatcattttggtcgtggttacgatggtgacactaataagcaacaacatgatgctattggtgtttatcccggaatagacattggtagagatcatgagactaccggtgtttatggcctaaa

SEQ ID NO: 139930 - DNA, 135 bp, Glycine max
  unsure (1)..(135): unsure at all n locations
tacaattcttccacccagcgttcgatcactctntgttggtnctttgctcccgcttaggtttctcttctggtaccttgataacaagtcatcgttccatattggaccttgacctaacccagtttaccacacagaaac

SEQ ID NO: 139931 - DNA, 259 bp, Glycine max
caactatgcctaaccctaaggtcttcttcgacatgaccatcggcggtcaacctgccggccgcatcgtgatggagctctacgccgacgtgactccgagcaccgccgagaacttccgcgcgctctgcaccggcgagaagggcgccgggcggagcggcaagcccctccactacaaaggctcgtccttccaccgcgtgatcccgaacttcatgtgccagggcggcgacttcaccgccggaaacggcaccggaggcgagtcgat

SEQ ID NO: 139932 - DNA, 254 bp, Glycine max
gaaaacatggccactatcaagccaactggaaagaaggcatgtgtgattggagggagtggatttatggcctctttgttgatcaagcagttgcttgaaaagggttatgctgtcaataccacagttagagacccagataatactaaaaaaatacctcaccttttggcactgcaaagtttgggcgaattgaacatatttggagcagatttaactggtgaaaaagattttgatgctcctatagcaggctgtgaacttgt

SEQ ID NO: 139933 - DNA, 252 bp, Glycine max
tattcgttatgagctgagagagttatatggaataggaagttcaacagtagcagattttgatgataatgatcctgggaaggagtgtgtaatatgcatgactgaacccaaggacactgctgtcttaccctgccgacatatgtgtatgtgcggtgattgtgccaaagctttgcggcttcaatcaaataaatgccctatatgtcgtcaaccaattgaggaactaatagagatcaagataaacaatggcaacgagtg

SEQ ID NO: 139934 - DNA, 261 bp, Glycine max
ttcggctcgagcacacacaactacaagacagaacttccttataactatcaccatcaacgactatggcaagttatcagaagcactacgatgatcagggtcgcaaagtcgacgagtatggcaatgttgagaggcaaactgacgaatatggcaacccggttcatgccactagtgacacttatgtagccactaaaagtgttggtggctacaatgatgacactaatgagcagcatgataccaccggtgtctatcctgagaaagata

SEQ ID NO: 139935 - DNA, 253 bp, Glycine max
cgcgtcgctccgcaccagtttcaccgcacgaatatcttattgtttggagcgatccgagaaaaactctgtaaacatgttggtttaccaggacctccttacaggtgatgagcttctctctgactccttccgttacaaggaaattgagaatggaatgctgtgggaagttgaggggaagtgggttgttaaaggagcagttgatgtagacattggtgcaaacccttctgctgagggtggaggagaagatgagggagtt

SEQ ID NO: 139936 - DNA, 253 bp, Glycine max
ctattttcatagacctgctggaaggttctctgatggtcgactcattattgatttcttagcacagagttttggactcccttatctgagtccatatcttgattcgctggggaccaacttctcccgtggcgcaactttgcaacagcaggatccacaatcataccccaaaaaagttttagatccagtcctttctcccttggagttcagtactcgcaattccaacgttttaaacccactacacagttcattagagagc

SEQ ID NO: 139937 - DNA, 258 bp, Glycine max
tctctttcagttttgtgtgcttctgtgccaagagattccatgtctggttcacaaatctccataattcaatacgccctgaccggtatctgattggccggaggttgcataactttggagaacatgctgagaaagcaaatgtagcagaaacttctacaggggagcaggaagctattttactaggtacaggtttaaaccaacaagatcacgaagcagatgttggactacggttgaggcacgtaaatcaacaggtgggctgaa

SEQ ID NO: 139938 - DNA, 247 bp, Glycine max
tgagttcccaccagagaatctgaagaagcgacttgaccagttggagaaggtgaagacggtgaagaccgagaaaaggaaaccggttgctgttcctgccaataagagaactcgagcaagcaacagcaatggaggtccaatgccaccagccaaagctgggcgtttgactaatgcatatgtatcatctttccctgctgctcctacatttgtcaggtctccatcacacgggcaatacccagctgctcttcca

SEQ ID NO: 139939 - DNA, 261 bp, Glycine max
tgggttgccaaaccgggatgacgtgaaggctggcgttatagcttacaagattgcggctcatgctgctgatttagccaaaggccatccatatgctcaagcttgggatgatgaattgagcaaggcaagatttgagttccgatggatggaccagtttgctttgtcattggatccgatgacagccacgtccttccatgacgaaaccctaccggcagatggtgcgaaagtggcccatttctgctcaatgtgtggccctaaattctg

SEQ ID NO: 139940 - DNA, 261 bp, Glycine max
gccggaaacatgggagttccagcgttctaccggtgactcgcggatcggtacccactctcgatcgccgacgtcgtggaggaggagccatctgtcggctccggcgccgttgatgtgtctaaacctaatccaaatggcatggagttcgacaacttgtacttggacatgaacggcatcattcacccctgttttcaccctgatggcaagtcagcacctgatacctacgaagatgtattcaaatcaatctttgacttatattgacca

SEQ ID NO: 139941 - DNA, 261 bp, Glycine max
ctcgcatcttgttcctccgctcaacaactataataacatctttctctctccgaacagatcaaactatggccacctcaagcgccaaatcagtccatgatttcaccgttaaagatgccaagggaaatgatattaatcttggtgactacaaaggaaaggtccttatcattgtcaatgttgcctcacaatgtggcttgactaattcaaattacactgagctcagtcagttgtatgagaaatacaaacagaaaggtctggaaattc

SEQ ID NO: 139942 - DNA, 260 bp, Glycine max
ctcattttcattatcttaccactttcaattccaaattcactctcagaaattagaatggctagccaatcaaacactaaatcagttcacgatttcacagttaaagatgccaggggaaatgatgttaatctcgccgattacaaaggaaaggtccttctccttgtcaatgttgcctcacaatgcggcttgactaattcaaactacacagagcttaatcaattgtatgagaaatacaaagggaaaggacttgaaattctggcatt

SEQ ID NO: 139943 - DNA, 261 bp, Glycine max
caaaaataagacattgtttggtttggttacttgctcgaatttcctcgaatcgcttaatttgtatttgattagttaaaccgcaacgcggaatctcttttctcgaactggctaactctcaggcaagtggttcggacgctgattccagcaacaagcggctggtgctcgcactgtatgacgccctaaactccggcgactccgacgccgtcgtcaagatcgtcgccgccgacctcgagtggtggttccatggtccaccctcacacc

SEQ ID NO: 139944 - DNA, 253 bp, Glycine max
cccaaattcattttaatcctaattctgcacttcttgatcatacgattcttctcctcaagatgcagatattcgtaaaaactttgaccggcaagaccatcacccttgaggtggaatcctccgacaccattgacaacgtaaaagctaagattcaagacaaggaagggatcccacctgaccagcagagacttatctttgcgggtaaacaacttgaggatggtcgcacccttgccgattacaacatccaaaaggaatc

SEQ ID NO: 139945 - DNA, 261 bp, Glycine max
tgccaagacttatgcgtcaaggactatcctttttttgagagaagatggaactttaaagccagtggccatcgaattaagtttgccacattctgctggggatctgtcagctgccgtcagtcaagtcgttttacctgctaaggaaggtgttgagagcacaatttggctactagccaaagcttatgtcatcgtaaatgactcttgctaccatcaactcatgagccattggttaaatactcatgcggcgatggagccattcgtcat

SEQ ID NO: 139946 - DNA, 258 bp, Glycine max
gcaaataagagggctgaagaagaaagaagaaaagcagaaagtggtaggggtgttcatgtggataagtttgaagagaagaaggattcagtgctgaggcagaactcgagagaagaacaagagaggtagagggaagagagtggaacaaagaggagaaacaaagaagttgtccaagagggaaagtagaggcagagaaagcaaggccaatggaagaaacaaaactggaagctaaaggaagagaaaaagctgaaaccaaagagg

SEQ ID NO: 139947 - DNA, 259 bp, Glycine max
cagaaagttaaggagagaaacgagagagcaaaacaagcagcagaagctgccaaagagagaggtgttgggagctgtaggtgaaactgtggttgagattggtgaaaacatggtgaaaaaaccagcacagaaagtgcagcagcatcaaggtgaaggtggaggaggggtgctgaatgccattggtgaaaccatagcagagatagcagagacaactaaggtgattgttgctggagagggagaaaaggagataatagtaaaaaca

SEQ ID NO: 139948 - DNA, 258 bp, Glycine max
tgcctgcacaatttgcagatatagtggttaagtccaaagaggccattgatattcctagtgaggagctgcaaagttctgaaacctacgcgtagaagaaaggaaagatgatgaagtggaagcagttgctaaaaagaatggaacagatgaacgttccattgaggatgagcaacaagagttgcctgagccagtaccataaccaccaaaattggttcgtatggcaaatctgtgtgttgcagtggttcatgcagtgaatggggt

SEQ ID NO: 139949 - DNA, 256 bp, Glycine max
ctttgtgcatagtgtggcacctgtataggagacgcgctttgtagtagttgcagacatgcacggtattgctctgatccacaccaggctatgagttggcgcacagggcatataactgcttggccaacagatgaaagtttcttcacctgtttttggacccaacaaaagtggattcacctccttggagtctcataaagttggaaacaagaatctgtggcctggatttgagatcagcattgaagatgaaagtgaatatcat

SEQ ID NO: 139950 - DNA, 250 bp, Glycine max
ggaatataagaactaagatggattggatcggagcgtaccgcggaggccagagaagcagggactggtgcgacccttcatcaccattcactgatttgtgggaccctcgtcgtgtcggtgacgctgatgatatcacctcctctctcgcccatgctcacgttgactggcgtgagactgataaagctcatatcttccgtgctgatcttccaggggtgaagaaagaggatctgaaggtgcaggtggaggagaataa

SEQ ID NO: 139951 - DNA, 249 bp, Glycine max
aaaggattctacccgccgctcgatgggaattgcgcttcaaggcgtctcgtagggctaatccgcctcacgagggtcaccaacggcacgtgcctttggggggccgaggcccctactgctggtcggcaaacggacggcgggcgcacgcgtcgcttctagcccggattctgacttagaggcgttcagtcataatccaacgcacggtagcttcgcgccactggctattcaaccaagcgcgatgaccaattgtgc

SEQ ID NO: 139952 - DNA, 251 bp, Glycine max
gcggcaccggttatggaggcactggtggcactgattatggaacaactggtggcactggttatggaagtggaactgggtatggagtcaacactgggggtgcgcacactgaagcaggatataggaaggaacatcgtcagcatgaccaatctcatggtgatcagaacgagaagaaagggattatggacaagattaaggagaagcttcctggaggacacagtgacaagtagatgcatcgtgcatcatgcatgcat

SEQ ID NO: 139953 - DNA, 242 bp, Glycine max
cggcaaccctgttcatgctgctagtgtcacctatgtagccaccagaactgctgctggtggttacagtgatgacattaataagcaacatgataccaccaatgcctacggcgtagacactggtagacagcattctagtggtggctacgatggtgacactaataaacatcatggaattactggtggctataatgatgacaccaatagacatcatggaactaccggtgtctatggtatagacaccg

SEQ ID NO: 139954 - DNA, 265 bp, Glycine max
ctttcactctttcgcttctgaatcttcaacaatggtgctcgaggcgacgatgatctgtatcgacaattctgaatggatgcgtaacggtgattactctccttctcgatttcaagctcaagcagacgctgtgaatctcatttgcggtgctaaaacgcagtctaatcaagaaaatacagtgggagttctcataatggcagggaaaggcgttcgtgttttggtcacccctaccagtgatctgggcaagatcttagcctgcatgcatggg

SEQ ID NO: 139955 - DNA, 255 bp, Glycine max
ctcagtgcatggttccgtcttaagtttccccatttaacatgtggaagtctggctagttctgcagttgttcttgctgtttataactacacagtatttgatcagcagattggtgagtcggcaggtcctgaatgtaaagaagcgctgcaagaaactactcaactcattgaacacaaacttgcaaccagtggaaaggaattgaaggcctcttttgatgctgctgatcttgaaatagatgaagacttttttcatttcttg

SEQ ID NO: 139956 - DNA, 250 bp, Glycine max
ctctgatgctgatgctcctaccatatttgacaagatcatcaataaggagattccttctactgtggtttatgaggatgacaaggtgcttgccttcagggacataactcctcaagctcctacacatattcttatcattcctaaattcaaagacgggttaagtggtctatccaaggctgaggagaggcactttgagattctgggccgtcttctgtacactgacaagctggttgcgaagaagggatcactcgac

SEQ ID NO: 139957 - DNA, 255 bp, Glycine max
  unsure (1)..(255): unsure at all n locations
tgagttcccaccagagaatctgaagaagcgacttgaccagttggagaaggtgaagacggtgaagaccgtgaaaaggaaaccggttgctgttcctgccaataagagaactcgagcaagcaacagcaatggaggtccaatgccaccagccaaagctgggcgtttgactaatgcatatgtatcatctttccctgctgctcctacatttgtcaggtctccatcacacgggcactagncagctgctcttccaccttaccc

SEQ ID NO: 139958 - DNA, 252 bp, Glycine max
gtttgatcctggctcagaaggaacgctagctatatgcttaacacatgcaagtcgaacgttgttttcggggagctgggcagaaggataagaggctcctagcgtgaaggttgcttgtctcgcccaggaggtgggaacagttgagaacaaagtggcgaacgggtgcgtaatgcgtgggaatctgccgaacagttcgggccaaatcctgaagaaagcgaaaaagcgctgtttgatgagcctgcgtagtattaggta

SEQ ID NO: 139959 - DNA, 247 bp, Glycine max
atcccaagctgactgtgctgttcttatcattgattcgaccactggtggttttgaagctggtatttccaaggatggacagactcgtgaacatgctctgctttcattcacccttggtgtgaaacagatgatttgctgctgtaacaaaatggatgctactacacccaagtattccaaggccaggtatgatgaaattgtgaaggaagtctcttcctacttgaagaaagtaggatacaaccctgacaagatt

SEQ ID NO: 139960 - DNA, 246 bp, Glycine max
gatctaatgatcattgcccgaggaacaccggggttctctggtgctgaccttgcaaacttgattaacattgctgctatcaaggcggcaatggatggtgctaaagctgtgagcatggctgatttagagcatgcaaaagacaagatccagatgggaagtgaacgcaagtcagctgtcatatctgaggagtcacggaagttgactgctttccacgagggtggccatgcccttgtggccatacatactgat

SEQ ID NO: 139961 - DNA, 239 bp, Glycine max
aaaaggagttggcaacccagaagaaagaggcaaagatgagccaggcagagctggacaagcaggcggcgcgtcagcataacacggcggcgaacaggctgccacggcagggcacatgggacaacccatggggacccatcagacgtcagctatgcccggtcatggaaccggacagcccacgggccatgtcaccgagggagtggtgggctcacaccctattggaaccaacagaggcccgggtg

SEQ ID NO: 139962 - DNA, 265 bp, Glycine max
  unsure (1)..(265): unsure at all n locations
tgggactgcttttatttttggcaaagatatatgttcccatccgaaggctgctcgccgatatattggatattgtccacaatttgatgctctattggaattcttaactgtccgagaacatcttgagctcttatgctagaataaaaggtgttccagattttgcaatagacaatgttgttcatggaaaagcttgacagaatagctgacttattagaagncatgnctnaatgacaaccatgcatgtttcacttgnagtggaggggaataa

SEQ ID NO: 139963 - DNA, 249 bp, Glycine max
gggtcgacctctggaggaaccatgattagcacctcaactcctcacatggttctccagcaatccgtacagcaggctttcactcaggtgtttgctcagcagctaccaaagcaagcacaggtgaaatctgtggcaccatttgggttatgcttcaactccaacaagatcaatgcatatcctagcgtggaccttgtgatggacaagcccaatggtcctgtttggagaatctctggtgaggacttgatggtgcag

SEQ ID NO: 139964 - DNA, 262 bp, Glycine max
ctcaatcctctgtaacttcaaaacatacacctcttctctctgtttctcttcactctctctctccctccctcttcaactaacatggcaattgaaaatcaagacaccgctgtcagagaaatcaagcccaagaacaggagaatcatgggtgctggagggcctgatgatgaggacaataggtggccaccgtggttgaagccactgctgaaagagagcttctttgttcaatgcaagttgcatgctgattctcacaagagcgaatgca

SEQ ID NO: 139965 - DNA, 222 bp, Glycine max
  unsure (1)..(222): unsure at all n locations
taaaattcttccacccagttatcgagtcccntgtgttgcttcttttctccctcttaggtctctcttctagacccagcataacaactcatcgttccatattggaccttgacctaaccaagtttaccacacagcatcaggttccatnantgttnnaantatggaagagtgagnatggangtgtatangataangaagaagaagaggtaaagagnattgagattt

SEQ ID NO: 139966 - DNA, 254 bp, Glycine max
  unsure (1)..(254): unsure at all n locations
atcacacacaacttctacttccacttcctnacaatnaaanntacagnnanntaaggcangnnaagaanagnantatgatgatgagggtcggaaggttgacgagtatggcaacgttgagaagcaaaccgacgaatacggcaaccctgttcatgctgctagtgtcacctatgtagccaccagaactgctgctggtggttacagtgatgacattaataagcaacatgataccaccaatgcctacggcgtagacactg

SEQ ID NO: 139967 - DNA, 245 bp, Glycine max
gcagttgcagaccgagctagctagctagcaagcaagcacagagatggaggcaaagcgaggccatgccctcatgtgcttggcacgtgtttcactcttcctctgcgctctaaccctatccgctgctcacggaagcaccacggttcaagacatcgcgagaaagttgaaactcggggacaacgagcttctgcgcacggagaagaagttcaaggttttcatggagaattacgggaggagctactccacag

SEQ ID NO: 139968 - DNA, 243 bp, Glycine max
cgccactcgatgtttccatttgcctgcatgcctttggtattgtggggtgtggttcgtttagtggtgtcaagtcttgcgaacgtgagggtgcatgagtggtaatcgggatgtttttgttgcacggctccatgcttgcgcatgcaacgtgtgacatgcatccttttcattgtcaccttagccttcgtggcttaggtgctgacgattggttcctgtgttgcctacctgaccaaacggtattcgtgt

SEQ ID NO: 139969 - DNA, 245 bp, Glycine max
caattccttcacttgcagcactgttgcatcatcatcttcattgcaaaaccctaaacttcaccttcaaccatgaccacacaagtaccaccacacagtgtccaagtccacacaacaacacacacatacgaagctggcgtcgtcccacccggagcccgtttcgaaccgccgcgttatgaagccggcgtcaaagcgccctccatttaccattccggaaagggtccaacgacttcccaggtcctcgccgt

SEQ ID NO: 139970 - DNA, 240 bp, Glycine max
gctttgatgaagttcatggactctattcaggcggaattaagctgccaacagatataatcagcaagattagtccactacccgtgcttaaggaaatcttccgaactgatggtgaacaggcccttaagtttcctcctcctaaagtaattcaagtgagtaagtctgcatggatgactgatgaagaatttgcaagagaaatgcttgctggtgtaaatccaaacttgattcgttgtcttaaggagt

SEQ ID NO: 139971 - DNA, 245 bp, Glycine max
ctccgccacttctgaatctattgaatcaacaatcatgtcggacgaagagcaccatttcgagtccaaggccgacgccggagcctccaaaacctaccctcagcaagccggtaccatccgcaagaacggctacatcgtcatcaaaggccgcccctgcacagttgtggaagtttcgacttccaaaactggaaagcacggtcacgctaagtgtcactttgttggaattgatattttcactgccaagaaac

SEQ ID NO: 139972 - DNA, 243 bp, Glycine max
caagaaagaacttccttataaccaaaaccaacaacaactatggcaagttatcagaagcactacgatgatcagggtcgcaaggtcgacgagtatggcaatgttgagaggcaaactgacgaatatggcaacccggttcatgccactagtgtcacttatgtagccactaaaagtgttggtggctacaatgatgacactaataagcaacatgataccaccggtgtctatcctgagaaagataccggt

SEQ ID NO: 139973 - DNA, 271 bp, Glycine max
caaaaacaaagtaagagttcactcaatctcactgtgttgtgagttgtgtgtgagcaccaaccaacaatggtgtctctgactccgttatgtttctttattaccttgttgatcgctggtgcagacgtgggcggagccccaaacggtgcgttttgacaccggggggttgagcagagacacctttcccaaaggattcttattcggaacggccacgtctgcgtaccaagtggagggtatggcccacaaagacggtcgcggcccaagcatttgggac

SEQ ID NO: 139974 - DNA, 276 bp, Glycine max
  unsure (1)..(276): unsure at all n locations
ggcttccatcctccactactttttagccctctctctttcttgctcttttcttttcttcttatccgactcagtcacccctacaaaaccaataaaccttgttgttctacccgttcaaaatgatgttcacagggctccatggttttaanctccaaaaaagaacccctctaatgcaagtaccagtcctggtggacctcaatggaaatcacttgtgggttaactgtgagcacatattccataccaaaacgtaccaagcacccttctgccactccacccaat

SEQ ID NO: 139975 - DNA, 273 bp, Glycine max
ccgcagggtagcatagaagccttgcaagctggagagagggtcaaagatcatgcaggaaacgccatgggagatattggtggacgtgggaaagccagagagactcacgagctgggtgcacacttgatccctggctgacaaagtaactgaccatgcagcagccaatgtagttggaaacaaagagagtcaaagagaagctcgtggtggcgttcgtgatgttgggaagttcgaaatgagaactgaagggggagaaaaaggaaacaaggatagaccaga

SEQ ID NO: 139976 - DNA, 277 bp, Glycine max
agcaaagcaatggctacttcaaagttgaaaacccagaatgtggttgtatctctctccctaaccttaaccttggtactggtgctactgaccagcaaggcaaactcagcggaaactgtttctttagtggaacaagttcgtgccgaagcaaccaaacatgatcctccaaggagacgctattgtgacctcctcgggaaagttacaactcaataaggttgacgaaaacggcaccccaaaaccctcgtctcttggtcgcgccctctactccacccccatccac

SEQ ID NO: 139977 - DNA, 277 bp, Glycine max
agacacctttccatactttgtgtctggtgtacttcacttaatttcctctgcagtattgggctttggcggtatttatcatgcacttttgggacctgagactcttgaagaatcttttccattctcggtatgtatggaaagatagaaataaaatgactacaattttgggtattcacttaatcttgttaggtataggtgcgtttcttctagtattcaaggctctttattttggaggtatatatgatacgtgggctccggggggcggagatgtaagaaaaat

SEQ ID NO: 139978 - DNA, 274 bp, Glycine max
gaaagcattctcagaatgcaacatgctgtgactcatagtaatgacccatatgtagatgactattaccaccaagcttgtctggcaaaaaaaacttctgtggctaagttaaaacatccattttgagagccaaataagggaatatcctccacgatcccgtgctaatactgagccacatacatttgttcagattgatgccctagggagagtttcattttcttctattcgtcgtcctcgccctcttcttgaggttgaccctccaaacacttctgctagc

SEQ ID NO: 139979 - DNA, 275 bp, Glycine max
gaagatatatacatatatacgagagagtgagtaatcgagaaagagaagaagcatatatatcaaaatggctgcagagatggagagggagtcattgataactgaagctcctaatgcaccagttatcacagagaagggtcagaaatgacttagaaaattctctaccaaaaccatacttggcaagagcattgaaagctcctgatacgggtcacccaaatggaacagcaggccacaggcaccacaacttatctgttcttcagcagcattgtgcttctttt

SEQ ID NO: 139980 - DNA, 268 bp, Glycine max
caagagcatgtgatcaagcctgtgatcccagagaagtaccttgatgagaagaccattttccacttgaacccttcaggccgttttgtcattggtggccctcatggcgatgctggtctcaccgcccaagatcattatcgatacttatggaggatggggtgctcatggtggtggtgctttctccgggaaggaccctaccaaggttgataggagtggtgcttacattgtgagacaggctgctaagagcattgtggcaagtggacttgccaga

SEQ ID NO: 139981 - DNA, 271 bp, Glycine max
ccaccaccacccaacaacagcgttctccagaagctccaaaattctacaactcccccacgtgcgccactctccgccaccacccgaacccaaaccacacgtgccccgacaacgctgtccacgtgcatgaccctcgacgtttcctacctccgaggttccatggccgcaatcctctccgttctgcaacacacctcatgccccgaaaatgtgatcttccacttcgtcaccgcagcttctaaatctttctccgccgcaaagctaaaccaaacgctaa

SEQ ID NO: 139982 - DNA, 275 bp, Glycine max
caaatcaacaaccctgaaaacccacataatgagaggaccatgaagagcttattcaattggtactatgcttcggttggcatttcagtaactgtttcaatgacatttatagtgtacattcaagtaagcagggtgggttgtgggttttggtatccctgtggcgcttatgacattttctgctatcatgtttttcttgggttcttgcttatataagaaagtgaagccaaacaagagcttgctcactagcttagctcaagtgattgtagcagcctggaaaa

SEQ ID NO: 139983 - DNA, 276 bp, Glycine max
gttcaatatcctagtacaccgtattaaagaatttaagatatactatgatgagagcgcggttcccattactgttgctgggagttgttttcctggcatcagtttctgtctcatttggcattgcgatgggaaaagcagaaccccagtcacaacaagtgcgtccgaagttgcaatagcgagaaagactcctacaggaaccaagcatgccacgctcgttgcaacctccttaaggtggaggaagaagaagaatgcgaagaaggtcaaattccacgaccacga

SEQ ID NO: 139984 - DNA, 275 bp, Glycine max
ctcaatcctctgtaacttcaaaacatacacctcttctctctgtatctcttcactctctctctccctccctcttcaactaacatggcaattgaaaaccaagacaccgctgtcagagaaatcaaccaagaacaggagaatcatgggtgctggagggcctgatgatgaggacaataggtggccaccgtggttgaagccactgctgaaagagagcttctttgttcaatgcaagttgcatgctgattctcacaagagcgaatgcaacatgtattgcttgg

SEQ ID NO: 139985 - DNA, 271 bp, Glycine max
gttcaggattacaaaggtcctcgtgaagcagatggcatcgttgactatttgaagaaacaaagtggtcctgcttcaactgaaattaaatctgctgatgaagctactgcttttattggtgtaatgagttgctattgttggagttttcccgaaattttctggagaggagtttgacaacttttctgccttagcagagaagttgcgttctgattatgactttggtcacactctgaatgccaaactccttccaagaggagagtcatcagtttctggg

SEQ ID NO: 139986 - DNA, 272 bp, Glycine max
caagagcatgtgatcaagcctgtgatcccagagaagtaccttgatgagaagaccattttccacttgaacccttcaggccgttttgtcattggtggccctcatggcgatgctggtctcacggcgcaagatcattatcgatacttatggaggatggggtgctcatggtggtggtgctttctccgggaaggaccctaccaaggttgataggagtggtgcttacattgtgagacaggctgctaagagcattgtggcaagtggacttgccagaaggt

SEQ ID NO: 139987 - DNA, 273 bp, Glycine max
agggtttcgaggggaaaacaaaatactgtacgttgaatggtggtgccaactttgttgcccctggttacaccaagggtgatggtcttggtgctgagattgttggcactttcgtccttgttacccgttttctccgccaccgatgccaaacgtaacgccagagactctcacgtccccattttggcacctttgcctattgggttcgcggtgttcttggttcacttggcaaccatccctatcaccggcactggtatcaaccctgctcgtagtcttggt

SEQ ID NO: 139988 - DNA, 270 bp, Glycine max
gtgtagagttaacatgaccagcgagagagacgaagccgaacgaaacataagtaaaaccttgactcttttttcacgccctagctcattttcttctccgttctcttctctctgttcctcactactgcatttcttcaccatgactaagcaacaagctaattggtctccatacgataacaacggaggatcatgtgttgcaatttctggagcagattactgcgtcatcgccgcggatacgaggatgtccaccggttacaatatcctcactcgcga

SEQ ID NO: 139989 - DNA, 270 bp, Glycine max
acaagcttccaaagcactgcgacaacaacgaggtcctgaaagctctctgcgccgaagctggctggatcgtggaagaagatggcacaacttatcgaaagggatgtaagagacccacgagtaattggaggaacaccactgaacttaagcgcgtgttcttccattcaggcaagtccacaatcctcgtcatacccgagtcctgtaccatcctaccatgctagcccaacctcttcctcgttcccaagccccacgcgcattgacggaaaccaccct

SEQ ID NO: 139990 - DNA, 270 bp, Glycine max
ctcattttccaactacatttcttccaccaactcatcgacttctcatatctgttcccaaaagcttgtttgtgagaatggcttcgggtgaaaagaaattcccacctcaacaacaacaaacaacctgggaaggagcatgctatgaatccagtaccccaattcactagccctgactacaagccttcaaataaacttcaaggaaagatagcattagtgactgggggtgactctgggattggacgagcggtgtgtaacttgtttgccttagaaggt

SEQ ID NO: 139991 - DNA, 271 bp, Glycine max
acacaactacaagaaagaacttccttataaccaaaaccaacaacaactatggccagttatcagaagcactacgatgatcagggtcgcaaggtcgacgagtctggcaatgttgagaggcaatgacgaatatggcaacccggttcatgccactagtgtcacttatgtagccactaaaagtgttggtggctacaatgatgacactaataagcaacatgataccaccggtgtctatcctgagaaagataccggtaggcatcattttggtcgtggt

SEQ ID NO: 139992 - DNA, 257 bp, Glycine max
  unsure (1)..(257): unsure at all n locations
atttcttcggcctcaaggacatcccttcatcctccacacaacatacgactccggngntacnaatgggncttngccatcgtcgccgccggcatcaccaccggaagcatcgccgaacgcacccatggtggcctatctcaactactcctccttcctcaccggcttcgactcccnggtggtctcccactggttctggtccccagacggctgggcctctgcctttaagatcaccgaccggctattttccaccggcgtaatag

SEQ ID NO: 139993 - DNA, 278 bp, Glycine max
gggagaaggtacgtggatgcgtttggagggattgctacggtgtgctgcgggcactgtcaccctgatgtggtcgaagccatagtcaaccaaaccaaaaagttgcagcactccacagttctctacctaacaacgccatcgccgatttcgctcaagctttgacttccaagcttcccggtaatctcaaggtggtgtttttcacaaactctggaacagaagcaaacgaattggcgatactgattgcaaggttatacacagggtgtcatgacataatatctcta

SEQ ID NO: 139994 - DNA, 292 bp, Glycine max
gcgtacgtgagctcgggttcaatatcctagtacaccgtattaaagaatttaagatatactatgatgagagcgcggttcccattactgttgctgggagttgttttcctggcatcagtctctgtctcattgggcattgcgtattgggaaagtgaaccccagtcacaacaagtgcctccgaagttgcaatagcgagaaagactcctataggaaacaagcatgccacgctcgttgcaagctccttaaggtggaggaagatgtagcatgcgaagacggtctaattccacgagtatga

SEQ ID NO: 139995 - DNA, 271 bp, Glycine max
gtagatcgtgtgaataggcttccgaacattaacccaaaggtagagacctttgcagaagcccgggattgtcttcttccaatgggaatcacttctgagaatgtagcacaacgttatggttgcaaggctagagcaagatcaggctgctgttgagtctcacaagcgagctgcagctgcaacagcagctggcaagttcaaagaagaaatcattccagtttctacaaagtttgtggaccctaaaactggagtggagaagaaaattattgtttctgtc

SEQ ID NO: 139996 - DNA, 262 bp, Glycine max
aagaaaatcattccaatacacatggcttccgaaaggcaagcgttgatgcttattctcttaacaacattcttcttcaccataaagccttcacaggccagtactactggtggcataacatcgctggggccaaaacattgacgacggcaccttgacttccacatgcgacactgaacacttcgagattgtcaacctagctttcctcaatgcgtttggttgcggcataactccatcatggaacttcgctggccactgtggggactgg

SEQ ID NO: 139997 - DNA, 270 bp, Glycine max
tgggcatgacagagtttgggtattagatggtggcctgccgagatggcgtgcatcaggttatgatgttgaatccagtgcttcaagtgatgctattcttaaggccagtgctgctagtgggtatagagaaagtatataagggacagacagttggcccactcacatttcagactaaatttcagccacatcttgtttggaacattgatcaggtaaagaaaaatatagaggacaaaactcaccaacacatagatgctcgatcaaagcctaggtttg

SEQ ID NO: 139998 - DNA, 268 bp, Glycine max
aaaacgtgcaaagaaggaacattttgatagtttgagaacagaattcagcagtgaaattgaacttttggccaaaattgatcatcgaaacctggtgaagctactaggttatattgacaagaaatgaacgccttcttattacagagtttgtgccaaatggtacccttagagaacatttggatggtatgcgtggaaaaatcctagacttcaatcaacgcctcgaaattgcaattgatgttgctcatggcttgacctatctgcatctgtatgc

SEQ ID NO: 139999 - DNA, 268 bp, Glycine max
tactagcgatactgataagagagataccaacaagaaaagaaaaaaagaagagttgagattccctttgaagaaaagatggcatcccataggcaaagctatgaagctggtcaaactaggccgaactgaggaaaagacgaaccagacgatgggcaatattggagagaaggctcaagctgcaaaggagaagacccaggaaatggcccaagctgcaaaggagaagacccaacaaacagcccaagctgccaaggacaagacttgcgacacttcc

SEQ ID NO: 140000 - DNA, 270 bp, Glycine max
ctacaatggccactattccagttaaccccaagcctttcttgaacaatttgactgggaagcccgtaattgtgaaactcaagtggggaatggagtacaagggctatctcgtttccgttgtcctacatgaacttgcagctggccaacactgaagagtacattgagggacagtatactggaaatttgggagagattttaatcagatgtaacaatgttctctaccttcgaggagtaccggaggatgaggaaatcgaagatgttgcagaagactag

SEQ ID NO: 140001 - DNA, 273 bp, Glycine max
  unsure (1)..(273): unsure at all n locations
cttgacattgtttctaatgctagctgcactaccaattgccttgctcccctcgccaaggttatcaacgaccgntttggaattgtggagggtcttatgaccactgttcacgccatcacagtatcagaagactgttgatggtccttcaaacaaggactggagaggtggaagagctgcttcgttcaatataattcctagcagcactggagctgctaaggctgtaggaaaagttcttccagcgctgaatggtaaattgactggaatgtccttccgagt

SEQ ID NO: 140002 - DNA, 267 bp, Glycine max
ccaaagggaaaatttattgcatttgtatcaaccgaggcagagacagatcagccggcaattgaactgaaacctggaattgaccttctaggacctgttgatgagatattttttgatattagacagatatgaaccagtcaacgaacccactttggacaactgctttatatcaacaagttatgatgctactactcactttgagtcgactgtggatgacgttctcaacatgtatacattgataactggaaaggttattgacctcagtgtgga

SEQ ID NO: 140003 - DNA, 255 bp, Glycine max
gaacagtagtgtgttaagaactaaacaatttttcaatggcgtccaagaaacaagaggagcgagctgaggcagctgcgaaagttgctgccaaagaactcgaacaagtcaacagagaagagagaccgtgatttcggtgttgttgctgaacaacaacaacaacatcatcaggaagatcaacataaacgtggtctaatcgggtccatgtttaaggcggtgcaagacacctacgagaacgccaaggaagctgtcattggc

SEQ ID NO: 140004 - DNA, 269 bp, Glycine max
gacaccgacgaggtgaaccgggttcagcgcgacattaggttgggtcacgccaagaccgtggagaacacgctgagcatgttgaaggacgaagggtcccttcagggaattacggtttcgcgctgggtgcggtacgggctcgctctctattcctcttgctaaagagggcgctgttgtgttcgccagtgatatctccgccgctatggttgctgaagcagagaaacaggcaaaagaacagcttgtaaccagtgaagatggttccgggcctgtga

SEQ ID NO: 140005 - DNA, 266 bp, Glycine max
cttcttcagcttggatttttggcgtaacgaggaaggggttattgttgagaaaccctagcctaaacctaaaccatggcgcataggttgctgagagaccacgaggccgacggctggggcttcagatttccccatcatctgcgaatcctgcctcggcgacagcccctacgttcgaatgacaaaagcagagtatgacaaggagtgcaagatttgtacacggccattcactgtttttagatggagacctggtcgagatgccagatataaga

SEQ ID NO: 140006 - DNA, 269 bp, Glycine max
caatttcattgctcagagttcccaaattccccccaagagataaaatgtctctaatcccaaacttcttcggtggccggagaaacaatgtgttcgatccttttatcctggacgtgtggtcccttcaaggatattcctttcccaaatacgctttcttcagcttccttccctgaattttctcgggaaaattcagcatttgtgagcacccgtgtggactggatagagaccccagaggcgcacgtgttcaaggcagatattccaggactgaagaa

SEQ ID NO: 140007 - DNA, 267 bp, Glycine max
ccgagactcattcttcaccaaaacttcgcaaaaaaacactacacatccatggcaactgctggcgtgcaagaagttcgtgttccccctctaacttccacctctgagccaccttcttcttgacggaaccactaggttgtacatcagttatatttgtccctatgcgcacgtgtttggatcactcggaactataagggtctacaagacaagatcaaactggttcctattgacctacaaaacaggcctgcttggtataaggagaaagtctac

SEQ ID NO: 140008 - DNA, 267 bp, Glycine max
ggcttcaaataatgactgtggagttagagactttgacatggaaagatttcagctttccaagcatttctccttctcatggcccgtaaatcacacttcattgagcccagatgggaacggttgtgattgttggagacaacccagaagggatactagtggattctcaaactggaaagactgtcaagcctttatgtggacacttggattactcatttgcatctgcgtggcatcctgatggccgtatttttgctactgggaaccaagacaaaa

SEQ ID NO: 140009 - DNA, 264 bp, Glycine max
ccaaaaccaacaacaactatggcaagttatcagatgcactacgatgatcagggtcgcaaggtcgacgagtatggcaatgttgagaggcaaactgacgaatatggcaacccgttcatgccactagtgtcacttatgtagccactaaaagtgttggtggctacaatgatgacactaataagcaacatgataccaccggtgtctatcctgagaaagataccggtaggcatcattttggtcgtggttacgatggtgacactaataagc

SEQ ID NO: 140010 - DNA, 262 bp, Glycine max
aggcaagccccactcaaccaccacactcctcctcgtttacgctacccctttcttctcttcttctacctttctcgttttaaaagtataaagatggcagagacattcctatttactagagtcggtgaacgagggacaccctgacaagctctgcgaccaaatctccgatgctgtcctcgacgcttgcctcgagcaggacccagacagcaaagttgcctgcgaaacatgcaccaaaaccaacttggtcatggtcttcggagaaatc

SEQ ID NO: 140011 - DNA, 260 bp, Glycine max
  unsure (1)..(260): unsure at all n locations
ggcttccatcctccactactttttagccctctctcttcttgctcttttcttttcttcttatccgactcagtcacccctacaaaaccaatataccttgttgttctacccgtcaaatgatggttccacacagctccatagtttcaanctccaaaaaagaaccccccaaatgcaagtaccagtcctggtggacctcaatggaaatcacttgtgggttaactgtgagcagcatttcaatccaaaacgtaccaagcacccttctg

SEQ ID NO: 140012 - DNA, 265 bp, Glycine max
tggtgattctgatgttcaaatggctgatttatctgattctgatctagatgaagatgaggatgagtatgaccagctcccaccatttaagcctatgaagaaatctcaggttgctacttactaaagaacagcagaaagcatattttgatgagtacgattatcgggtgaaacttctacagaaaaagcaatggagagaggagttgagaaggatgagagagatgaagaaaaaaggtaacacaaaagaaaatgactatggttacatggaaga

SEQ ID NO: 140013 - DNA, 269 bp, Glycine max
cacacacaactactacaagtacttccttacaatcaaaaccagcaacaactatggcaagttatcaaaagcactacgatgatcagggtcgcaaggttgacgagtatggcaacgttggagcaaaccgacgaatacggcaaccctgttcatgctgctagtgtcacctatgtagccaccagaactgctgctggtggttacagtgatgacattaataagcaacatgataccaccaatgcctacggcgtagacactggtagacagcattctagtgg

SEQ ID NO: 140014 - DNA, 259 bp, Glycine max
actcaataagaatcaaccagcacagtgtgttcccactgaacaagatatcatccaccatcgtatggtcgacctctggaggaaccatgattagcacctcaactcctcacatggtcccagcaatccgtgtaccaggctttcactcaggtgtttgctcagcagctaccaaagcaagcacaggtgaaatctgtggcaccatttgggttatgcttcaactccaacaagatcaatgcatatcctagcgtggaccttgtgatggaca

SEQ ID NO: 140015 - DNA, 259 bp, Glycine max
gaaagcatctgcaaccctatcattgccaagatgtaccagggtggtgctggtccagacgtgggtggtgcaatggacgatgatgttcctgctgctggaagcggtgctgggccaaattgaggaagtagactaaatttagtttatttctgcttttgatttactatttatttttaaatgtctgatttcatgtcctttggttggatttagtttctcaagaaagacaatatttggtagtatgtcatgtcgatttatgttttcagta

SEQ ID NO: 140016 - DNA, 263 bp, Glycine max
atttacaacaacaatggcttctgtgcctcaaccaaaaatctcccttctaaccttattcttcttctcgtccttcaccatcattgcgcatgcaattgttcctcaaaacgaaactcaaatttgagaactcaggtgaacttggaccctacatcgttgagtacggtgcagattacagaatgataagcatcttcaactctccattccaagttggtttctacaacaccaccccaaatgccttcactctagctttgcgtgtagggctccaa

SEQ ID NO: 140017 - DNA, 260 bp, Glycine max
cacacacaactactacaagtacttccttacaatcaaaaccaacaacaactatggcaagttatcaaaagcactacgatgatcagggtcgcaaggttgacgagtatggcaagtgagaagcaaaccgacgaatacggcaaccctgttcatgctgctagtgtcacctatgtagccaccagaactgctgctggtggttacagtgatgacattaataagcaacatgataccaccaatgcctacggcgtagacactggtagacagca

SEQ ID NO: 140018 - DNA, 262 bp, Glycine max
cacacaactacaagaaagaacttccttataaccaaaaccaacaacaactatggcaagttatcagaagcactacgatgatcagggtcgcaaggtcgacgagtatggcaatgttagaggcaaactgacgaatatggcaacccggttcatgccactagtgtcacttatgtagccactaaaagtgttggtggctacaatgatgacactaataagcaacatgataccaccggtgtctatcctgagaaagataccggtaggcatcatt

SEQ ID NO: 140019 - DNA, 264 bp, Glycine max
ttcaaaccttgctctatactacacagtacacacactagaagaataatggcttccatcctccactactttttagccctctctctttcttgctcttttcttttcttcttatcgatcagtcacccctataaaaccaataaaccttgttgttctacccgttcaaaatgatggttccacagggcttctttgggccaacctccaaaaaagaacccctctaatgcaagtaccagtcctggtggacctcaatggaaatcacttgtgggttaa

SEQ ID NO: 140020 - DNA, 270 bp, Glycine max
caaaaccaaaacagtaaagctaacttcaacacctttaattttctaaaagtaattcagcggctgaataccaagcggagaagatgagtcaggagcagccacggcgtcccaaaggccaaaaccccatcaaatacggcgacgtttttgtcgtctccggcgaccttgcacagaagcccgtcgcaccggaagatgctgccatgatgcaaagcgcggaagctcgagtgctcggacaaacccaacccggcggagcagcttccgtcatgcaatctgccg

SEQ ID NO: 140021 - DNA, 264 bp, Glycine max
ccaaggttcagcaactcttgcaggatttcttcaatgggaaagagctttgcaagagcattaaccccgatgaagctgttgcatacggtgcttcagttcaagctgccatcttgagcggtgaaggagacgagaaggttcaggatttgttgctgctggatgttacacctctcagtctcgggctcgaaactgcgggtggtgttatgactgtactaattccgcggaacactacaattcccaccaagaaggagcagattttctcaacctatt

SEQ ID NO: 140022 - DNA, 258 bp, Glycine max
ccaatgcctcagttgccccgcggcatcaaggccagggtgccacaaaaacacgtgtggcctcatgtccactaatcccatcacccaacaaaccggtttaggtgaactaggagaagacgttcttgcaatccacgccacacaagggtcgacccaacaacttggcccattggtcacagtcccacaattcctcttttcttgtgcaccttccttccttgttcaaaagggtcttcctagaaacactcaaggtgtggctgggttagg

SEQ ID NO: 140023 - DNA, 258 bp, Glycine max
cgatgatcagggtcgcaaggtcgacgagtatggcaatgttgagaggcaaactgacgaatatggcaacccggttcatgccactagtgtcacttatgtagccactaaaagtgttggtggctacaatgatgacactaataagcaacatgataccaccggtgtctatcctgagaaagataccggtaggcatcattttggtcgtggttacgatggtgacactaataagcaacaacatgatgctattggtgtttatcccggaat

SEQ ID NO: 140024 - DNA, 256 bp, Glycine max
ttcgatctctgaaaatgagagagtgcatttcaatccacatcggtcaggccggtattcaggtcggaaacgcctgctgggagctctactgcctcgaacacggcattcagcctgatgggcagatgccaagtgataagactgttggtggaggtgatgatgctttcaacaccttcttcagtgaaactggggctggaaagcacgtgcctcgtgcgatttttgtagatctcgagcctactgtgattgatgaagttaggactgg

SEQ ID NO: 140025 - DNA, 259 bp, Glycine max
ctccgattcctggatttccacgcgcctctcttcctcttcacgccgccaccattatcgatctgatctgtacgcggaggagagtgaagggaacgatgatttcagggcggagtttctatgccctttctgcgccgaggattacgacgtcgtttccctctgttgccacattgacgaccaccaccctatccaagccaaaaacggggtgtgtcccatttgtgggaagaaggtgggagtggatctcgttggacattttactacacaa

SEQ ID NO: 140026 - DNA, 259 bp, Glycine max
tacccgttcaaaatgatggttccacagggctccattgcagacaacctccaaaaaagaacccctctaatgcaagtaccagtcctggtggacctcaatggaaatcacttgtgggttaactgtgagcagcagtactcatccaaaacgtaccaagcacccttctgccactccacccaatgctctagaggcaacacccaccaatgcctcagttgccccgcggcatcaaggccagggtgccacaaaaacacgtgtgggctcatgt

SEQ ID NO: 140027 - DNA, 258 bp, Glycine max
ctttgtgattggtgtggcacctggaaaggagacaagctttgtagtagttgcagacaagcacggtattgctctgagaaacaccaggctatgagttggcgcacagggcataaaactgcttgccaacagatgaaagtttcttcacctgtttttggacccaacaaaagtggaaccacctccttggagtctcataaagttggaagcaagaatctgtggcctgaatttgagatcagcattgaagatgaaagtgaatataatagg

SEQ ID NO: 140028 - DNA, 140 bp, Glycine max
  unsure (1)..(140): unsure at all n locations
gcaaaattgttgagggacaacgatatacaaaaaggttgaatgtgnagcaaatcactgctctcttgaaagttacttgtcaaagacctcgcgatcgagaaaatgacattttgcagaccattcagcaaaatgcttatgaccaa

SEQ ID NO: 140029 - DNA, 254 bp, Glycine max
attcaaaccttgctctatactacacagtacacacactagaagaataatggcttccatcctccactactttttagccctctctctttcttgctcttttcttttcttcttatccgactcagtcacccctacaaaaccaataaaccttgttgttctacccgttcaaaatgatggttccacagggctccattgggccaacctccaaaaaagaacccctctaatgcaagtaccagtcctggtggacctcaatggaaatc

SEQ ID NO: 140030 - DNA, 257 bp, Glycine max
ggaaaggttcaaaaagtggaactgctggtaggtgttttggatgcaaaggcactggtatgaaaattacaagaaggcagattggactaggcatgattcaacaaatgcaacatgtctgtcctgactgcagaggatctggtgaggtcattaacgagagagataaatgtcctctgtgcaaaggaaacaaggtttcccaggaaaagaaggtgctggaagtgcatgttgagaagggcatgcagcagggtcagaagattgttttt

SEQ ID NO: 140031 - DNA, 253 bp, Glycine max
taaccgtcatgggagtcgccggggctaagtctaagtgcagtaccgttgggattcaaggaatcgcttgggccttcggtggcatgatcttcgccctcgtttactgcaccgctggcatctcagggggacacataaacccggcggtgacatttgggctgtttttggcgaggaagttgtcgttgcccagggcgattttctacattgtaatgcaatgcttgggtgctatttgtggcgctggcgtggtgaagggtttcga

SEQ ID NO: 140032 - DNA, 254 bp, Glycine max
caacgacggtggcgttatagaacaaacattttagtggggaaggtattctgtggaaatgtctgctgtagtttacaaggattgggtttttacagatcaagcattgcctgctgatcttataaaaagaggaatggcaattgaggatccatcgtgccctcatggcattcgccttgtgatagaggactacccttatgctgttgatggacttgagatatgggatgctatcaagacatgggtccatgaatacgttttcttgt

SEQ ID NO: 140033 - DNA, 252 bp, Glycine max
ctttgccaagcaccttgcggatcaagccaagggtgtgattcagaaagtgacttgtgaggcagggaaagttgcaagtgaagctcaatctggggggtcaagagctgctgttcattttgttgctacagagtcaaagcattttgtgttgataaattcggtgaagttgtggaatggactcacccactatccaccattccatgcattggcagagatagcagttcccactgctgctcactggtcagagaagtacaacca

SEQ ID NO: 140034 - DNA, 253 bp, Glycine max
gcagaccgagctagctagctagcaagcaagcacagagatggaggcaaagcgacgacatgccctcatgtgcttggcacgtgtttcactcttcctctgcgctctaaccctatccgctgctcacggaagcaccacggttcaagacatcgcgagaaagttgaaactcggggacaacgagcttctgcgcacggagaagaagttcaaggttttcatggagaattacgggaggagctactccacagaggaggagtatttg

SEQ ID NO: 140035 - DNA, 251 bp, Glycine max
ctgcaaaggattctacccgccgctcgatgggaattgcgcttcaaggcgtctcgtagggctaatccgcctcacgagggtcaccaacggcacgtgcctttggggggccgatgccccctactgctggtcggcaaacggacggcgggcgcacgcgtcgcttctagcccggattctgacttagaggcgttcagtcataatccaacgcacggtagcttcgcgccactggcttttcaaacaagcgcgatgaccaattg

SEQ ID NO: 140036 - DNA, 250 bp, Glycine max
agaataataaccaaatttggaatgcccatggggcctttcagattggctgaccttgttgggtttggtgtggcgattgctactggcacccaatttattcagaattttcctgagcgaacttataaatcaatgcttattccacttctgcaagaagataatagagctggcgaaacaactcgcaaagggttttatttgtatgatgataaacgcaaggctagtcctgatcctgaattgaagaactatattgagaagg

SEQ ID NO: 140037 - DNA, 247 bp, Glycine max
tttacttcccctatggctcgtcactccttgctcttagccctcctcctcttcgccgccgtggccacgccgcgatggcggtggcgcgtccgacgccgacgacatcctgatccgtcaggtggtgccagatgttggcgaagcgaagaggaggacaacctgctgaacgccgagcaccacttcgcgagcttcaaggccaacttcgccaagacctacgccaccaaggaggagcacgatcatcgcttcggcgtct

SEQ ID NO: 140038 - DNA, 252 bp, Glycine max
gccgcgtcgtccgtacgagaaggagcgtctcgacgcggagttgaagctggttggtgagtacgggcttcggtgcaagagagagctgtggagggtgcagtacgcgctcagccgcatccgcaacaacgcgcggaacctcctcaccctcgacgagaagaacccgcgccggatcttcgagggagaggcgctgctccgaggatgttccgttacggtctcctcgatgagacacagaacaagcttgattacgtcctcgcc

SEQ ID NO: 140039 - DNA, 135 bp, Glycine max
atcacacacaactacaagacagagattccttataaccacgaccaacaacaactatggcaagttatcagaagcactacgatgatcagggtcgcaaggtcgacgagtatggcaatgctgagaggcaaactgacgcat

SEQ ID NO: 140040 - DNA, 252 bp, Glycine max
  unsure (1)..(252): unsure at all n locations
cttgacattgtttctaatgctagctgcactaccaattgccttgctcccctcgccaaggttatcantgaccgatttggaattgtggagggtcttatgaccactgttcacgccatcacagctactcagaagactgttgatggtccttcaaacaaggactggagaggtggaagagctgcttcgttcaatataattcctagcagcactggagctgctaaggctgtaggaaaagttcttccagcgctgaatggtaaa

SEQ ID NO: 140041 - DNA, 245 bp, Glycine max
accgagtcttaaggcctggcggatactggattttgtctgggcccccaattaattggaaaacatactaccaaacatggaagcggtccaaggaagatctgaaggcagaacagacaaaacttgaggagttagctgacagtctttgttgggaaaagaagtacgaaaagggtgatattgctatttggagacagtaataaatgatacatcctgcaatagaaagtctcccaattcatgtgaattagataatg

SEQ ID NO: 140042 - DNA, 245 bp, Glycine max
cgtgagagagattgtgaagtaagtagaaatcggtgcaagaaattctccgctttatctacaaatttaagtgagtttgtgaagacaaaaaatcactagctactaaaaaatggccacagttggaaggaacgcagcagctccattgctgtttcttaacttgatcatgtattttattgttcttggctttgctagttggtgcctcaacaagttcatcaatggccaaacttaccaccctagctttggtggaa

SEQ ID NO: 140043 - DNA, 247 bp, Glycine max
atcggcgcaggaggcattcgagaagcttgaaaaggtgggagaagggacatatgggaaggtgtacagagcaagagagaaggcaactgggaagatcgtggctctgaagaagactcgtctccacgaggacgaagaaggtgtccctcccaccactctccgtgaggtttccattctgcgaatgctctctcgcgatccccatgtcgttaggttaatggatgtcaaacaaggtcagaacaaggaagggaagaca

SEQ ID NO: 140044 - DNA, 247 bp, Glycine max
ctttgttcactcttcttctcttgcggctagggttttagcgcacttcttctagatttaaggaagatgggtaaggaaaaggttcacatcagtattgtggtcattggccatgtcgactctgggaaatccactaccactggtcacctgatttacaagcttggaggcattgacaagcgtgttattgagaggtttgagaaggaagctgctgagatgaacaagaggtctttcaagtatgcctgggtgctggaca

SEQ ID NO: 140045 - DNA, 248 bp, Glycine max
gaatataggaatataagaactaagatggattggatcggagcgtaccgcggaggccagagaagcagggactggtgcgacccttcatcaccattcactgatttgtgggaccctcgtcgtgtcggtgacgctgatgatatcacctcctctctcgcccatgctcacgttgactggcgtgagactgataaagtcatatcttccgtgctgatcttccaggggtgaagaaagaggatctgaaggtgcaggtggag

SEQ ID NO: 140046 - DNA, 251 bp, Glycine max
gtgtagagttaacaagaccagagagagagacgaagccgaacgaaacataaataaaaccttgctcttttttcacgccctagctcattttcttctccgttctcttctctctgttcctcactcactcgcatttattcaccatgactaagcaacaagctaattggtctccatacgataacaacggaggatcatgtgttgcaattgctggagcagattactgcgtcatcgccgcggatacgaggatgtccaccggt

SEQ ID NO: 140047 - DNA, 249 bp, Glycine max
caaagcagtaaggtttatgaaaaatataagagagttcatgaatttgatggggactttcacggtggcagatggggttccttgtttgaggtggttggatttggggggttatgagaaggccatgaagggaaccgctaaggaaattgataaattattgagtgagtggttggaggagcaccttcagaagaagcttttgggtgaaaaggttgaaagtgatagagactttatggacgtgatgatttcagcacttaa

SEQ ID NO: 140048 - DNA, 247 bp, Glycine max
attagataaaaggtcaacacaggctctgcctgttgctttgatgattcatgataactcgtcggatcgcacggcctttgtgccggcgacgcatcattcaaatttctgccctatcaactttcgatggtaggatagtggcctaccatggtggtgacgggtgacggagaattagggttcgattccggagatggagcctgagaaacggctaccacatccaaggaaggcagcaggcgcgcaaattacccaatcc

SEQ ID NO: 140049 - DNA, 247 bp, Glycine max
gaaacaaagaaaggaataattgatctttgaaaatgcagggaggaaagaaagctggagagtccatcaaggaaacagctgcaaacattggtgcttctgccaaggctggcatggagaaaaccaaggccactgtccaggagaaggcagaaagaatgacggcacgtgatccgatgcaaaaggagttggcaacccagaagaaagaggcaaagatgagccaggcagagctggacaagcaggcggcgcgtcacat

SEQ ID NO: 140050 - DNA, 246 bp, Glycine max
ctgaggacaaggcgagtttatggtcacaacttcattatgtttcgtgtaataatctggaaatgcaagaagcttatcttgtcaatctcgtaaatgtgttacgagaattgtatttgcacagtccagaggaagctcgccaattgagaaggaaagctctctctcgtattgaatggctgcagaaagctgatgtgcctaccatagcacagattgaagagttccattcgatgcagaggataatgaatgctcctg

SEQ ID NO: 140051 - DNA, 244 bp, Glycine max
tggtgattctgatgttcaaatggctgatttatctgattctgatctagatgaagatgaggatgagtatgaccagctcccaccatttaagcctatgaagaaatctcaggttgctaagcttactaaagaacagcagaaagcatattttgatgagtacgattatcgggtgaaacttctacagaaaaagcaatggagagaggagttgagaaggatgagagagatgaagaaaaaaggtaacacaaaagaa

SEQ ID NO: 140052 - DNA, 247 bp, Glycine max
gggtgtactttcttgcgaaaccgagagagcgaaggggcaaacacaattttttttatcttcttttttattttttgtagagagagagagagagaaaatgttggggatcttcagcagttcagtggtgtcgccgccggaggagctggtggccgctggcagcagaacgccgtcgccgaagacgacggcggggaagctgctgaaccggttcgtggagagcaaggcgtcggcggtgtcgctgcaggtgggggaa

SEQ ID NO: 140053 - DNA, 276 bp, Glycine max
tcggctcgagctctattagtctgcatgctctgcaaactgagcatggctcctctcgcattttccttcttcttcatccttatcacattctcatcttcatcatctgaagctggatccgttggaataaactatggaagggttgcgaacgacctacctacaccagcgaaagttgtggagcttctgaaggcacaaggtctgaaccgtgtgaagctctacgacaccgacgccaccgtcttaaccgcgtttgcagactcgggaatcaaggtcgtagttgccatg

SEQ ID NO: 140054 - DNA, 266 bp, Glycine max
ctcttcttctcttgcggctagggttttagcgcacttcttctagatttaaggaagatgggtaaggaaaaggttcacatcagtattgtggttattggccatgttgactctgggaagtccactaccactggccacctgatctacaagcttggaggcattgacaagcgtgttattgagagatttgagaaggaagctgctgagatgaacaagaggtctttcaagtatgcctgggtgcttgataagcttaaggctgagcgtgaaagaggaat

SEQ ID NO: 140055 - DNA, 218 bp, Glycine max
  unsure (1)..(218): unsure at all n locations
tgcatttcgttactttcatttgttgtgcaatcttacaagttccaaacttctctattttgttattatttgttctcacttctacgccacatacgacacagacacnggggtcatcgtggcttcttcggtggcttcggtttctgttctggctatgatgttgtttgtcatgaactgtgcgtgcactactgttgtccacatgccttctacctgagtggctcgtc

SEQ ID NO: 140056 - DNA, 269 bp, Glycine max
gtagtcatatgcttgtctcaaagattaagccatgcatgtgtaagtatgaactaattcagactgtgaaactgcgaatggctcattaaatcagttatagtttgtttgatggtatctactactcggataaccgtagtaattctagagctaatacgtgcaacaaaccccgacttctggaagggatgcatttattagataaaaggtcaacacaggctctgcctgttgctttgatgattcatgataactcgtcggatcgcacggccattgtgccg

SEQ ID NO: 140057 - DNA, 271 bp, Glycine max
gcagagtcatggacagaatgggctaaagagaaactcagtgaaggtcttggcttcaaacatgatcaggaatccaaagaatccaccactaacaaagtctctgattatgccactgacactgcacagaaatccaaggattatgcaactgacactgctcagaaatcaaaggactatgcaggtgatgctgctcagaaatcaaaggactacgccggtgatgctgctcagaaaaccaaagactatgccagtgacactgcacagacatcgaaggactatg

SEQ ID NO: 140058 - DNA, 270 bp, Glycine max
atcgactaaaaatgaaatgaatcatttcatattgatagtattgctatgcttagtgtgcgactcgttagttttttagaacggttccaatttaacaaatttataaaccggttcatcgtataaatgaattaaaaaagaactaataaccaacgcatcgcttcggattatctagatctaaagaactagtcaaaacaaaaaaaaatataaaaaaagatatattatagcaactgaactattgtgaagcataaaagaacaaaaatcttatttagttgt

SEQ ID NO: 140059 - DNA, 267 bp, Glycine max
agaccctcttcatcttgttctatctgtgacgagcatcatggcctcaagagcagtgttattgttggctatgtgtgtgcttccggcgatggttgtggacattcgcccagcaaagaaccctttttgcgtgaagggtcgtgtctactgtgacccttgccgtgctggttttgagacctcagctaccacctacattgctggtgctgagattatgttgcaatgcaagagcagggttagcaacgaggttgtgtacacgaagaaggggtacaccga

SEQ ID NO: 140060 - DNA, 260 bp, Glycine max
ctcgagccgattcggctcgaggtccgttagttgccaagaagcagacttcaaacggcgagcttaggcaggcgcggcttagagaatttcttagatcaagtgacacagtaagactaatgttaaaagcttcaactgtgaagctatcttcgtatcgagcatggccaaatatgcatgacagtcggtttgcgctttacaagttgccattgcgggttcccaaagatgaccaagaatatgctggtttatggggaggaattttggttggc

SEQ ID NO: 140061 - DNA, 268 bp, Glycine max
ggtcaacaattattttatagccaaggccctcctgctatcattccttcccagataggagagctagactgcaggctcagtttgctcaaatgcgacctgttggaatgccaccatctgttggtcctcgtgtgccaatgtatcccccaggtggtccaggtattggtcaacaattattttatagccaaggccctcctgctatcattccttcccagcctggatttggctatcaacaacaacttatgcctggtatgaggccaggtgcagctcctgt

SEQ ID NO: 140062 - DNA, 267 bp, Glycine max
gttgaaattttctatactcaggaacctgaaagggattacttggaggctggcattaggacagtggtacagatacacatgtgtgagcctccaggagatatacttgtatttttgactggagaggaagagatagaagatgcttgccgcaaaataacaaaagaaatttctaatctgggagatcaggtgggccctgttaaagttgtacccctgtattctacacttcctcctgctatgcagcagaagatttttgagccagctccacctccactg

SEQ ID NO: 140063 - DNA, 266 bp, Glycine max
tctaaatcccttaacgaggatccattggagggcaagtctggtgccagcagccgcggtagttggaccttgggttgggtcgatcggtccgcctccggtgtgcaccggtcggctcgtcccttctgccggcgatgcgctcctgtccttaactggccgggtcgtgcctccggtgctgttactttgaagaaattagagtgctcaaagcaagcctacgctctgtatacattagcatgggataacaccacaggattctgatcctattgtgttgg

SEQ ID NO: 140064 - DNA, 266 bp, Glycine max
gctgaagctcaactacgagatcagcatggcatccctgtcccactcaccgatcaatctggtaatccggttatcttaactgacgagcgcggtaatcccgtccaactcactggtgtcgctaccaccgctaccggcacagcaggttctgggtttgggtcctatggtaccggtgcttacggtggtggtgcaagtgcaaccaccgttgcagatcttttggcaacccaaccaaggagtggcagggaggctagagagcttcgtcgttcctccag

SEQ ID NO: 140065 - DNA, 234 bp, Glycine max
gtttcaaaccaacttggttccttacccaaggatccatttcatgctttcctcgtatgcccctgttatctctgccgagaaagcataccatgagcagctttccgatctcagatcaccaacaggccttcgagccatctccatgatggcaaagtgtgacctcgccacggcaagtcatggcgtgttttgatgacgggcgagcggccaagatggaatctgcgagcacatagacagagacat

SEQ ID NO: 140066 - DNA, 263 bp, Glycine max
  unsure (1)..(263): unsure at all n locations
ggnagatttgtttcaatgagactgctaagggctgtgtgatgcagttgctgaattttggtgaggctatcgcgatttgtaagcgctcgcccgagaagttgtttcggattttggacatgtatgaggctttgagggatgctatgcctgatttgcaggccatggtttcggatgagtttgtgattggtgaggccaatggcgtgctgagtgggcttggtgaggctgccaaagggacttttgctgagtttgagaatgtattaggaaganac

SEQ ID NO: 140067 - DNA, 267 bp, Glycine max
gtatgctggtgatgctaccaagagaagcaaagaggcttctaatgatcatgccaatgacatggctcagaagaccaaagactacgccagtgacactgctcagagaaccaaggaaaaactccaagacattgcatctgaagctggtcaatacagtgcagagaaagctagagaaatgaaggatgcagcagcagagaaggcaagtgacatagcaaaggctgcaaagcaaaaatcacaagaggtgaaagagacattaggtggacaacaccggga

SEQ ID NO: 140068 - DNA, 262 bp, Glycine max
cacacaactactacaagtacttccttacaatcaaaaccatcaacaactatggcaagttatcaaaagcactacgatgatcagggtcgcaaggttgacgagtatggcaacgttgagaagcaaaccgacgaatacggcaaccctgttcatgctgctagtgtcacctatgtagccaccagaactgctgctggtggttacagtgatgacattaataagcaacatgataccaccaatgcctacggcgtagacactggtagacagcatc

SEQ ID NO: 140069 - DNA, 268 bp, Glycine max
agaaaacctaagcttagaattagaaacaaagaaaagaagaaaggaaagaattgatcgttgaaaatgcagggaggaaagaaagcgggagagtccattaaggaaacagctacaaacattggtgcttctgccaaggctggcatggagaagaccaaggccactgtccaagagaaggcagaaagaatgacagcacgtgatccggtgcaaaaggagttggcaacccaaaagaaagaggcaaagatgaaccaggcggagctggacaagcaggcgg

SEQ ID NO: 140070 - DNA, 269 bp, Glycine max
gtcttgctgcggtggtaactgtggttgcggaagcgcctgcaagtgcggcaacggctgcggaggctgcaagatgtacccagacttgagctacaccgagtcaaccaccaccgagaccttggtcatgggagtggcaccagttaaggctcaattcgagagtgctgaaatgggtgttcccgctgagaacgatggctgcaaatgtggagctaactgcacctgcaacccctgcacttgcaagtgaggtgttggagagctaaagcttcaagcagaaa

SEQ ID NO: 140071 - DNA, 269 bp, Glycine max
gtgatttcagtgagtgatcggtgttcacttgatctcatcataatcgtcagcgtcaattgaagaagatgccgatcagaaacatcgccgtcggaaggcctgaagaggcgactcaccccgacacgttgaaggcggctttggctgagttcatctcaaccttcatcttcgtgttcgccggctcaggctccggcatcgcctacaacaagctcaccgacaacggcgctgccacccctgccggcctcatctccgcctccatcgcccatgcattcgcc

SEQ ID NO: 140072 - DNA, 267 bp, Glycine max
agcgaaggcagctctctgggtccctaccgacgctggagtgcgaaagcagtggggagcgaacgggattagataccctggtagtccatgccgtaagcgatgagtgttcgcccttggtctacgtggatcaggggcccagctaacgcgtgaaacactccgcctggggagtacggtcgcaagaccgaaactcaaaggaattgacgggggcctgcacaagcggtggagcatgtggtttaattcgatactacgcgcaaaaccttaccagccctt

SEQ ID NO: 140073 - DNA, 263 bp, Glycine max
agaaagctggagagtccatcaaggaaacagctgcaaacattggtgcttctgccaaggctggcatggagaaaaccaaggccactgtccaggagaaggcagaaagaatgacggcacgtgatccgatgcaaaaggagttggcaacccagaagaaagaggcaaagatgagccaggcagagctggacaagcaggcggcgcgtcagcataacacggcggcgaacaggctgccacggcagggcacatgggacaacccatggggacccatc

SEQ ID NO: 140074 - DNA, 266 bp, Glycine max
cttacctctgtccaagacacagccacatcggtagtgaaaacaatttcaagtaggcctcccttgaagatcccaatttccaacagtgatgctcagctctggttactcaccacatacctcgacgaagaattgcgtatctcaaggggcgatggtggcagtgtgtttgtacttatcaaagaaggaagctctcttttgacaagataaacaaaacaaactagtttactttggtggtcaatatcaggcttatgtttataaataagtaaagggtc

SEQ ID NO: 140075 - DNA, 261 bp, Glycine max
aacaaaatgcttggagagtttgaccttgttggtattcctcctgctcccagaggtctgcctcagattgaggtcacatttgacattgatgctaatgggattgttactgtctctgccaaagacaagtccactggtaaagaacaacaaataactattcggtcatccggtggactctcggatgatgagattgaaaagatggtcaaagaagcagaattgcatgctcagaaagaccaagagagaaaggctctcattgacattagaaac

SEQ ID NO: 140076 - DNA, 262 bp, Glycine max
gcagcagtactcatccaaaacgtaccaagcacccttctgccactccacccaatgctctagatccaacacccaccaatgcctcagttgccccgcggcatcaaggccagggtgccacaaaaacacgtgtggcctcatgtccactaatcccatcacccaacaaaccggtttaggtgaactaggagaagacgttcttgcaatccacgccacacaagggtcgacccaacaacttggcccattggtcacagtcccacaattcctcttt

SEQ ID NO: 140077 - DNA, 264 bp, Glycine max
cccagatggaaaggagaatctcttcgagagagcatcaaaagacatgaacacttccttgcttcacaacttggactgaagccagggcagaaggttttggatgttggatgtggaattgggggaccattaagagaaatttctcgattcagcttaacttcaattaccgggttgaataacaatgagtaccagataacaagaggaaaggaactcaatcgcattgctggagtggacaagacttgcaattttgtcaaggctgacttcatgaaa

SEQ ID NO: 140078 - DNA, 264 bp, Glycine max
gtctgaagagctttcttacaagattaaagaattgcctggagttcggtgggtgcttcctgattcttacttgaatgttaaggaaaaggattatggaggtgagccctttattaacgggcaagctgctccctatgatcccaagtatcacgaagagtgggttagaaacaatgctcgtgccaatgagagaaacaggcgcaatgacaggcctcgtaatgctgacaggtcaagaaactttgagaggaggagggaaaatgtggtaaacagaga

SEQ ID NO: 140079 - DNA, 259 bp, Glycine max
ctttgctttctctcctttgcactttcctcctcttccttgtgctttttgtttgcatcatagggagaaactgagacacagaagatgagagagataattagtattcatattggacaagctggaattcaggtggggaattcatgctgggagttgtattgccttgagcatggaattaaccctgatggtaccatgcctagtgatacctcagttggtgtagcacatgatgctttcaacaccttcttcagctagacgggatccggca

SEQ ID NO: 140080 - DNA, 261 bp, Glycine max
ttaatttctcttccaaaccaactcgcttctcactttgctctacaacgccaattcaccacttgcctttctcgctaccctacttcaaagggtgctataatattcggggatgcacctaacaacatgcgacagtttcaaaaccaagatattttccacgatttggccttcaccccattaaccatcaccctgcagggagagtacaacgtgagagtcaactcaataagaatcaaccagcacagtgtgttcccactgaacaagatcatc

SEQ ID NO: 140081 - DNA, 261 bp, Glycine max
actcaataagaatcaaccagcacagtgtgttcccactgaacaagatatcatccactatcgtagggtcgacctctggaggtaccatgattagcacctcaactgctcacatggttctccatcaatccgtgtaccaggctttcactcaggtgtttgctcagcagctaccaaagcaagcacaggtgaaatctgtggcaccatttgggttatgcttcaactccaacaagatcaatgcatatcctagcgtggaccttgtgatggaca

SEQ ID NO: 140082 - DNA, 260 bp, Glycine max
aacaattccttcacttgcagcactgttgcatcatcatcttcattgcaaaaccctaaacttcagcttcaaccatgaccacacaagtaccaccagacagtgtccaagttcacacaacataagattgtaaagaagctggcgtcgtcccacccggagcccgtttcgaaccgccgcgttatgaagccggcgtcaaagcgccctccatttaccattccgaagaaggtccaacgagttcccaggtcatcgccgtcctcgccggcctc

SEQ ID NO: 140083 - DNA, 259 bp, Glycine max
gtagctagctagctagcaagcaagcacagagatggaggcaaagcgaggccatgccctcatgtgcttggcacgtgtttcactcttcctctgcgctctaaccctatccgctgctcacggaagcaccacggttcaagacatcgcgagaaagttgaaactcggggacaacgagcttctgcgcacggagaagaagttcaaggttttcatggagaattacgggaggagctactccacagaggaggagtatttgcgccgtttgggg

SEQ ID NO: 140084 - DNA, 218 bp, Glycine max
cacaactactacaagtacttccttacaatcaaaaccctcaacaactctggcaagttatcaaaagcactacgatgatcagggtcgcaaggttgacgagtatggcaacgttgagcagcgaaacgacgaatacggtaaccctgatcgtgcagttagtgtcacctatgtagctaatagaaatgatgatggtggttacagagatgaacatataggcatcatga

SEQ ID NO: 140085 - DNA, 264 bp, Glycine max
ttcaaaccttgctctatactacacagtacacacactagaagaataatggcttccatcctccactactttttagccctctctctttcttgctcttttcttttcttcttatccgactcagtcacccctacaaaaccaataaaccttgttgttctacccgttcaaaatgatggttccacagggctccattggtcccaacctccaaaaaagaacccctctaatgcaagtaccagtcctggtggacctcaatggaaatcacttgtgggt

SEQ ID NO: 140086 - DNA, 259 bp, Glycine max
aaccaagcttctctgttaaaacctcattaggcgtctaaagggccaaagcttagaaagttgaagcttttttgttgaggtgaaagtgaaatggttgggaaggatattcctgtggagcttctgatgctaattctgtcccttgtggatgatcagacggtgatcatagcttctggagtttgtcgtggatggagagatgctatttactgtggccttgctcgtttatcactctcatggtgtagcaagaacatgaataacttggtcc

SEQ ID NO: 140087 - DNA, 258 bp, Glycine max
tatcgagccgattcggctcgaggtccgttagttgccaagaagcatagttcaaacggcgagatataggcaggcgcggcttcaaaggtttcttagatcaagtgacacagtaagactaatgttaaaagcttcaactgtgaagctatcttcgtatcgagcatggccaaatatgcatgacagtcggtttgcgctttacaagttgccattgcgggttcccaaagatgaccaagaatatgctggtttatggggaggacttttggt

SEQ ID NO: 140088 - DNA, 258 bp, Glycine max
cacacacaactactacacgtacttccttacaatcaaaaccacaaacaactcgggcaagttatcaaaagcactacgatgatcagggtcgcaaggttgacgagtatggcaacgttgagaagcaaaccgacgaatacggcaaccctgttcatgctgctagtgtcacctatgtagccaccagaactgctgctggtggttacagtgatgacattaataagcaacatgataccaccaatgcctacggcgtagacactggtagac

SEQ ID NO: 140089 - DNA, 258 bp, Glycine max
tgtgcatccatcgttaagctagtggcgatcggatccagctacagcatagagatcaaggaaggaaggaaggaagatgttgggtgttataaggcacaagagtattcgccctgccttctccgcaatcagacacttgtcttctgcagctaaagagattactgtcagggaggctctgaactccgcactcgatgaggaaatgtcagctgatcctaaagtgttcttgatgggtgaagaggttggggaatatcagggtgcatacaa

SEQ ID NO: 140090 - DNA, 258 bp, Glycine max
  unsure (1)..(258): unsure at all n locations
gcaaagataatgtcgagtacttggccaaggtctctgttcgtaacccttattcaacttccatacccatttgtgagatcaactactctttcaaaagcgcatccagggagatagcatcagggaaaattccagacccaggatcgttgaaggcanaggacacaacaatggtggatgtgccaagttaaagttccatacagcatattgatgagcttggcaaaggacattggtgctgattgggacatagactatcattggatcttg

SEQ ID NO: 140091 - DNA, 253 bp, Glycine max
ctggacttggaagcagtgaagaggtactcagagaaaggaggagaaacagcatcggcggtggatgggttgcctccgaggtttctggaaccgttaataatgaacgctcttaaggtcgatctcatcgaaactggtcgcgttgtctgctccatgaagatacctccgcgtttactcaatgctgccaactcgttatacggtggcgccatcgctgctctggtcgacgtggtggggtccgctgcgattcccaccgttggat

SEQ ID NO: 140092 - DNA, 258 bp, Glycine max
cttcttctcttgcggctagggttttagcgcagtatcttctagatttaaggaagatgggtaaggaaaaggttcacatcagtattgtggtcattggccatgtcgactctgggaaatccactaccactggtcacctgatttacaagcttggaggcattgacaagcgtgttattgagaggtttgagaaggaagctgctgagatgaacaagaggtctttcaagtatgcctgggtgctggacaaacttaaggctgagcgtgaaa

SEQ ID NO: 140093 - DNA, 256 bp, Glycine max
tcttgtgcaagttatttcttatattcattagtaagatgctctattttgtcactattgcagtttcattatgctgtgttcttcgcatatatgaggttaagggaacaggagatcaggaacttaatgtggatttcagaatgtgttgctcagaatcagaagtccagagttcatgacagtgttgtcttcatattttagttggatggctcgttatagtttgtatgttcgttgggacaatttgtatactttctgcattctccat

SEQ ID NO: 140094 - DNA, 254 bp, Glycine max
attcaaaccttgctctatactacacagtacctacactagaagaataatggcttccatcctccactactttttagctctctctctttcttgctcttttcttttcttcttatccgactcagtcacccctacaaaaccaataaaccttgttgttctacccgttcaaaatgatggttccacagggctccattgtcgcaacctccaaaaaagaacccctctaatgcaagtaccagtcctggtggacctcaatggaaatc

SEQ ID NO: 140095 - DNA, 254 bp, Glycine max
aaaatatttgctgaggcagatgtcattgtctcaccaacaacgggtgtgactgcatatccaattcaagacgatgcccttcagactggtgaacttgactatgtgaatggagctgcacttgttcgttattccatagcaggaaactttcttggacttcctgctgtcactgttccggttggattcgatagattgggtttgcctattgggcttcagtttattggaaggccttggtctgaagccacattgatccatttggc

SEQ ID NO: 140096 - DNA, 253 bp, Glycine max
aaaattcttccaccaagttatgggtatgacttgtgttgcttcttttctccctcttaggtctctcttctagtgccagcatatcaactcatcgttccatattggaccttgacctaaccaagtttaccacacagaaacaggtggcttcactgttccaactatggaagagtgagcatggacgtgtctaccataaccacgaagaagaggcaaagagacttgagattttcaagaataacttgaactatatcagggacat

SEQ ID NO: 140097 - DNA, 259 bp, Glycine max
aacccaaccaacaccgtttttgatgctaagcgtttgattggaaggcgtttttccgatgcatcagtacaaggtgacatgaaattgtggccgttcaaggtgattcctggccctgctgagaaacctatgattgtggtgaactacaagggggaggagaaacagttttccgcggaagagatatcctccatggttcttatgaagatgaaggagattgcggaggcgtatctaggttccaccataaagaatgcggttgtcactgtgc

SEQ ID NO: 140098 - DNA, 254 bp, Glycine max
caaaaacattgcccctgttctctcaaagttaccaaacacaagtacacaacacaacagccacatatggcctctgcacaattggctcgcagagagaacaccaccaccgagaaggacattcacgttgagaaacacagggttcccaagatggccacccagctcgagtcccctgcggagcaggctaaagaatctgacatcaccgctgggaaggatactccgcagggtatcataccagccttgcaagctggagagagggt

SEQ ID NO: 140099 - DNA, 256 bp, Glycine max
gcaaatcaagtttatgccattgactttgcacgcctccccaaacccattaggaagttgtctggcttgatgtccctatgtaaaaatgatttggaatgaataaactcaactcgatttatcatctgatcagcaagcatgagaacagttttgagagacaatttccgggtacagaaattgaataaatcctcaagactaggtcccagtaaatccatcacaaggacattgtaatctccttcaatgccaaaccatctcacatttg

SEQ ID NO: 140100 - DNA, 255 bp, Glycine max
cacacaactactacaagtacttccttacaatcaaaaccagcaacaactatggcaagttatcaaaagcactacgatgatcagggtcgcaaggttgacgagtatggcaacgttgagaagcaaaccgacgaatacggcaaccctgttcatgctgctagtgtcacctatgtagccaccagaactgctgctggtggttacagtgatgacattaataagcaacatgataccaccaatgcctacggcgtagacactggtaga

SEQ ID NO: 140101 - DNA, 252 bp, Glycine max
  unsure (1)..(252): unsure at all n locations
ctttttcttctctctcaacaacttcaccttcttccttctcgatcatgtctcacttcaagggcnagtaccatgatgagcttattgccaatgctgcgtacattggcactcctggaaagggtattcttgctgctgatgagtcaacagggacaattggcaagcgtttggccagcatcagtgtagagaacattgaatccaacaggcgagctcttagggagctgcttttcactgctcctggtgttcttcaatatctca

SEQ ID NO: 140102 - DNA, 253 bp, Glycine max
cacacacaactactacaagtacttccttacaatcaaaaccatcaacaactatggcaagttatcaaaagcactacgatgatcagggtcgcaaggttgacgagtatggcaacgttgagaagcaaaccgacgaatacggcaaccctgttcatgctgctagtgtcacctatgtagccaccagaactgctgctggtggttacagtgatgacattaataagcaacatgataccaccaatgcctacggcgtagacactgg

SEQ ID NO: 140103 - DNA, 251 bp, Glycine max
ctatggaaccacgtatgagaccaacaccagcattaacaacccaccttcacgccaaacagtgaagttcataactgctgccactattggcatcacactcttgctcctgtctgggttgaccctcacaggcactgtcataggtttgatcattgcaacccctcttcttgttatcttcagccccatccttgtccctgctgcgtttgtgctgttcctagttgcttctggctttttgttctctgggggctgtggtgtgg

SEQ ID NO: 140104 - DNA, 252 bp, Glycine max
gaaatgaagagtactatcttctttgctctctttctagtttgtgccttcaccatctcatacctgccttcagccaccgctcagttcgtgctcgacactgatgatgatcctcttcaaaacggtggcacatactatatgttgccagttatgagaggaaagggcggtggaatagaagtagattcaactggaaaagaaatatgccctctcactgttgtgcaatcacccaatgagctcgataaggggattggactagtc

SEQ ID NO: 140105 - DNA, 251 bp, Glycine max
aaaatgaaatgaatcatttcatattgatagtattgctatgcttagtccccaaagaaccagatttcgtaaacaacatagaggcagaatgaaaggaatatcctatcgagggaatcatatttgcttcggaagatatgctcttcaagcacttgagccagcttggataacatctagacaaatagaagcgggacggcgggcaatgtcacgaaatgttcgccgaggtggacaaatatgggtacgcatatttccagaca

SEQ ID NO: 140106 - DNA, 156 bp, Glycine max
attcaaaccttgctctatactacacagtacacacactagaagaatcttggcttccatcctccactactttttagccatctctctttcttgctcttttctttatttcttatccgactcagtcacccctacaaaaccaataaaccttgttgttctacc

SEQ ID NO: 140107 - DNA, 255 bp, Glycine max
gcaaagataatgtcgagtacttggccaaggtctctgttcgtaacccttattcaacttccatacccatttgtgagatcaactactctttcaaaagcgcatccagggagatagcatcagggaaaattccagacccaggatcgttgaaggcaaaggacacaacaatggtggatgtgccagttaaggttccatacagcatattgatgagcttggcaaaggacattggtgctgactgggacatagactatcaattggatc

SEQ ID NO: 140108 - DNA, 251 bp, Glycine max
tggtggtcctcaaggattgctcattgctgaaaactggattcaaaggattgctgtggaactcaagatgagtcctgaaatgataagggaaattaattttcaaggagaaggatccattctgcattatggccagatagttcagtacagcacactagccccactgtggaatgaacttaagttatcctgtgactttgcaaaggcacgcaaagaagttgacgaattcaatagtcacaaccgctggaggaagcgtggca

SEQ ID NO: 140109 - DNA, 249 bp, Glycine max
ctcaagatcattaagcaggcggagtattatttcagcgatgaaaacctgcctactgataagtatctgttgggtttcgtcaagaggaacaaggaagggtttgttcctgtatcagtaattgcttcttttagagaaataaagaagctcacgcgagaccatgcatttattgttgctgcactgaaggagtcttcactgcttgttgttagtggtgatgggagaagggtcaagcggctcaatccacttcgtttcaat

SEQ ID NO: 140110 - DNA, 249 bp, Glycine max
ggaaagacaaccttcgtgaagaggcatctcactggtgaattcgagaagaaatatgaacgtgagattctttctctattattttattattattaatcttttatttgggtttatctcattcttttgtcgattatgcttaatctgaatcagcgatcattggtgtgtaggttcatccgttggattttttcacgaactgtggaaagattcgcttctattgttgggatactgctgggcaagagaagtttggtggcc

SEQ ID NO: 140111 - DNA, 249 bp, Glycine max
cacacacaactactacaagtacttccttacaatcaaaaccacaaacaactatggcaagttatcaaaagcactacgatgatcagggtcgcaaggttgacgagtatggcaacgttgagaagcaaaccgacgaatacggcaaccctgttcatgctgctagtgtcacctatgtagccaccagaactgctgctggtggttacagtgatgacattaataagcaacatgataccaccaatgcctacggcgtagaca

SEQ ID NO: 140112 - DNA, 247 bp, Glycine max
gagaaagaccctccccgtttggcaccagaaagaagagtttttgcaagttctcaaagataaccagactttgattctcgtcggtgaaactggtagtggcaaaaccactcagattcctcagtttgttttggatgctgtcgaattagagacaccggataaacgtaggaagatgatggtagcctgcactcagcctcggagagtagctgcgatgtctgtttcgcgtcgtgtggctgaagagatggatgtaact

SEQ ID NO: 140113 - DNA, 253 bp, Glycine max
ctagccccgaaaatggatggcgctaaagcgcgcgacctatacccggccgtcggggcaaggaccaagccccgatgagtaggagggcgcggcggtcgctgcaaaacccagggcgcgagccggagcggagcggtcgtcggtgcagatcttggtggtagtagcaaatattcaaatgagaactttgaaggccgaagaggggaaaggttccatgtgaacggcacttgcacatgggttagtcgatcctaagggacggggg

SEQ ID NO: 140114 - DNA, 249 bp, Glycine max
gtaattcagcggctgaataccaagcggagaagatgagtcaggagcagccacggcgtcccaaaggccaaaaccccatcaaatacggcgacgtttttgtcgtctccggcgaccttgcacagaagcccgtcgcaccggaagtcgctgccatgatgcaaagcgcggaagctcgagtgctcggacaaacccaacccggcggagcagcttccgtcatgcaatctgccgccaccaggaatgaacaggctggccttg

SEQ ID NO: 140115 - DNA, 246 bp, Glycine max
  unsure (1)..(246): unsure at all n locations
aattctccagggagtanatgtaattccaaatgtcagatggtttggagtggagggagattacaatgttttagtgatggacctgcttggaccgagtcttgaagatctttttaacttctgcagtagaaagctatcactaaagacagttctcatgcttgctgatcaaatgatcaaccgtgttgagttcattcattcaaaatcgtttctgcatcgggatatcaaaccggataattttctaatgggattagg

SEQ ID NO: 140116 - DNA, 253 bp, Glycine max
ctgcacataaaaaaccactctacaaaactctccagtaattctgaaaattttattttcttttggtgaaattaacagctctgtgattgatcaatggcgacaaaggaaggcaaagccataggcatcgatctcggcacgacctacagctgcgtgggcgtgtggcaaaacgaccgcgtcgagatcatccccaacgaccaaggcaaccgaaccaatccctcttatgtagccttcaccgacaccgagaggctcatcggag

SEQ ID NO: 140117 - DNA, 248 bp, Glycine max
  unsure (1)..(248): unsure at all n locations
gcgttcttcctccaaagcgattcatggagttcgtggcactgtctagcgctacccaacttgggagcttcaaccccgttagaaccaacgttcaaagttcgacacaacatacgagggacagctcaagggcgngagcanagataatggcgagtacttggccggtggcctgttcgtaacccttattcgacttccatacccatttgtgagatcaactactgtttcaaaagcggatgcagggagatagtctgagg

SEQ ID NO: 140118 - DNA, 250 bp, Glycine max
cacacacacacacactaagaataatggcttctatcctccactacttttcagccctctctctttctttctctttccttttcttcttatccgactccgtccccattccccaacaccacactaaccctacaatacctataaaccttctggttctacccgttcaaaatgatgcttccacagggctccattgacccaacctccaaaaaaggacccctctaatgcaagtaccagtcctggtggacctcaatggaaa

SEQ ID NO: 140119 - DNA, 245 bp, Glycine max
tttggttttaaacatttaggttaggcggggcgtggcggactgaatcggaggcatgaagctcaccgtgaagactctgaaaggcagccatttcgaaatcagggttcagccctcagacactattatggcagtcaagaagaatatcgaagatgtacaaggcaaagacaattacccatgttcacagcaattgctcattcacaatggtaaggttttgaaagatgaaactactttatccgacaataaggtct

SEQ ID NO: 140120 - DNA, 252 bp, Glycine max
cttctgagaagatcgaattgtgttttgcaaaaatgggagttccagagaaagaccctctttcccaattgagtttgcctcctggttttcggttttaccccaccgacgaggagcttctcgttcagtatctgtgccgcaaggtcgctggccaccatttctctcttccaatcattgccgaaattgacttgtacaagttcgacccatgggttcttccaagtaaagcgattttcggtgaaaaagagtggtactttttca

SEQ ID NO: 140121 - DNA, 244 bp, Glycine max
ctagtttagtaaataataaatatgactaacttttcttggtgtaatctactcggtgtgtgaagggcccaattggatagggctgaccttcaatgggccgggctctacggactcttggtcttgttgccgtgagtgatcatatcagtatagcaggtcccacagagctccctgttgcctgaagttcctgggggaacacacttgcacctcactcaacacgtgccacaagccctgttgcacacgtttggcc

SEQ ID NO: 140122 - DNA, 249 bp, Glycine max
tggtggtcctcaaggattggtcattgctgaaaactggattcaaaggattgctgtggaactcaagatgagtccagacaagataagggaaattaattttcaaggagaaggatccattctgcattatggccagatagttcagtacagcacactagccccactgtggaatgaacttaagttatcctgtgactttgcaaaggcacgcaaagaagttgacgaattcaatagtcacaaccgctggcggaagcgtgg

SEQ ID NO: 140123 - DNA, 244 bp, Glycine max
gtgaaaagtgatataagatggccatcacgttgggatgcttatttgaagatggagggttcccgagttcattggttctcaatcttaaattcacttatggttatttctttcctggctggtattgtttttgttattttcctaagaactgtgagaatggacttgacgaggtatgaggaactggacaaagtgactcaagatcagatgaacgaggagctctctggatggaaacttgttgtgggtgatgtgt

SEQ ID NO: 140124 - DNA, 249 bp, Glycine max
cgttcttgcaatccacgccacacaagggtcgacccaacaacttggcccattggtcacagtcccacaattcctcttttcttgtgcactttccttccttgttcaaaagggtcttcctagaaacactcaaggtgtggctgggttaggccatgcaccaatttctcttccaaaccaactcgcttcccactttggcctacaacgccaattcaccacttgcctttctcgctaccctacttcaaagggtgctataat

SEQ ID NO: 140125 - DNA, 246 bp, Glycine max
cttgcgtgtggagtgaagaagattaacgaaggatggaatctgggtatagcgaaggagaagaggtgcagcaacgcgtgccgttgagggagagagtggagtggtcagatgttactccggttcctcaaaacgacggccataatcctgtcgttccgatccagtacactgaagagttttccgaagttatggattactttcgcgccgtttacctcaccgatgaacgctcccctcgtgccctcgctctcacag

SEQ ID NO: 140126 - DNA, 247 bp, Glycine max
atacaataccatagcatagactgagaagtgagaagagaaaaatggcaatctccatacccagtagacaacttttcatagatggagagtgaaaagtccctcttctcaacaatcggtttccgatcatcaaccccgctactgaagacatgctagggcatattccagccgctactaaggacgatgttgaccttgcggtggatgctgctaaaagagccttttcccataacaaaggcaaaacttggtcttcagc

SEQ ID NO: 140127 - DNA, 246 bp, Glycine max
ggcaaggttatcagggtgataacaaatccttccttgtttgcaaaaagaagatgggaacatctcctgagatgctatgctgttttcgccctgctccttttaggcagttccttgagattgtagtaaacatgaagtttgatgaagaacctaactattccaggctaatatctttgtttgatggtatgcttggaccgaatcctgcattgaggccaattaacactgaaggtgctcaaaaggttgggcagaaga

SEQ ID NO: 140128 - DNA, 248 bp, Glycine max
ttcatagttcagtgtgtcgtttaaaaatgtcgcagttgctggataaagccaagaacttcgtgtcggagaaggtaaatgatatggccaagccggaggcaggtgtcactgacgtggacttcaagcgcgtgagcaaagataatgtcgagtacttggccaaggtctctgttcgtaacccttattcaacttccatacccatttgtgagatcaactactctttcaaaagcgcatccagggagatagcatcaggg

SEQ ID NO: 140129 - DNA, 246 bp, Glycine max
ctgcgacaaaggatgggaatgtaagggctggtcaatttactgttgtaacctcactattactgattatttccagacctaccagttcgagaatctcttctccaagcggaactcgccggtggcgcacgccgtcggattttgggactaccactcgttcatcgccgctgccgcgcttttcgagccgcaagggttcggcactaccgggaacaagacgatgcagatgatggagattgcggcgttcctcggaca

SEQ ID NO: 140130 - DNA, 246 bp, Glycine max
cagtagtcatatgcttgtctcaaagattaagccatgcatgtgtaagtatgaactaattcagactgtgaaactgcgaatggctcattaaatcagttatagtttgtttgatggtatctactactcggataaccgtagtaaattcagagctaatacgtgccacaaaccccgacttctggaagggatgcatttattagataaaaggtcaacacaggctctgccttctgctttgatgattcatgataactc

SEQ ID NO: 140131 - DNA, 249 bp, Glycine max
gagaaaggaaaggttaactaagaagcaatacttcaatggccacccttgttgttcataaccaaacttcttctgctcaagatgctgaggctctccaacaggctttcaaaggatggggggctgatgacaaggccattatagcaatactgggtcacagaaatgttcatcagaggcaagaaatcagaaaagcttatgaggagatttaccaagaggatctcatcaaacgccttgagtccgagatctctggtgact

SEQ ID NO: 140132 - DNA, 249 bp, Glycine max
gacccacaaaaatggagaaccaacaaccggcacctatctccgtgacactgctacatctgctatccaaaacttcgctcccatcaacaaaatccaccaacatctctgcgcgtttcacttttactcatatgacatgagccggcaagtggaggcacaccatttttgcgcgcaccagaacgaggagatgaggcagtgccttatctacgacagccccgagaagaaagccaggctcatagggctggaatacatcat

SEQ ID NO: 140133 - DNA, 248 bp, Glycine max
gacaagatctccatatctgttcccaaaagcttgtttgtaagaatggcttccggtgaacagaaattccctcctcaacaacaacaaacacagcctgggaaggagcatgctatgactccagtaccccaattcactagccctgactacaagccttcaaataaacttcaagggaagattgcattagtcactgggggtgattctgggattggacgagcggtgtgtaacttgtttgccttagaaggtgctaccgt

SEQ ID NO: 140134 - DNA, 246 bp, Glycine max
gccctcaacacctgtgaataagtgtgacattttcactggtgattgggtgccaaattcagaggcaccatattacacaaacacaacatgctgggaaattcatgagcaccaaaattgcatgaagtatgggagacctgacactgatttcatgaagtggagatggaagccaaatgagtgtgaactccccatattcaaccctttccagttcctacaaattatgaggggaaaatctttggcttttgttggaga

SEQ ID NO: 140135 - DNA, 247 bp, Glycine max
ctcagattcaagagaacatgaaagcaatcgatgtcattccattactgactcctgttgtgatggagaagattgaagctgttgttcaaagcaagccaaagcgccctgaatcataccgatgaattgaagtttttccatggtggacacatatatgcattagatgggaggctctgtcatccccgtgcacttgagtgaaaattcttgttgaaaattattggtgtggttgatgtgatttcttgggacttctttt

SEQ ID NO: 140136 - DNA, 251 bp, Glycine max
  unsure (1)..(251): unsure at all n locations
attcaaaccttgctctatactacacagtacacacactagaagaataatggcttccatcctccactactttttagccctctctctttcttgctcttttcttttcttcttatccgactcagtcacccctacaaaaccaataaaccttgtagttctanccgttcaaaatgatggttccacagggctccattgcttcaanctccaaaaaagaacccctctaatgcaagtaccagtcctggtggacctcaatggaa

SEQ ID NO: 140137 - DNA, 259 bp, Glycine max
atgaaccttgcttgagtcatcaaagcctttctgactcggcctggcccggtcgccctacgcgactggcgcttcaaaaggtagttgacttgcttactcgttagagtaggggtcgcgagagagcagagcgtaccgccctgccatagtcgcgagtctgtttatagtcgcgactgttgtcatagtcaacaaggttgaaacttccaggaaaaaacttcgaattgggagggcgatcctcccggtgaactgaccgtaccccaaaccg

SEQ ID NO: 140138 - DNA, 258 bp, Glycine max
gagaaaggcaataatagtgagggacagtcgacgttgctgcacggcaagtacgagcttggtcgtgtgctggggcacggaacgttcgccaaggtgtaccacgcgcggaacctgaatacagggcagcacgttcccatgaaggtggtgggaagcgaaaaggtgataaaggtcggaatgatggagcaggtgaagagggagatctcggtgatgaagatggtgaagcaccaaaacatcgtcgaactccacgaagtcatggccagc

SEQ ID NO: 140139 - DNA, 254 bp, Glycine max
gtccattccggttcgcaaggacgacgaggtgcaggtggtgaggggaacctacaagggccgcgagggcaaagtggtccaggtctatcgccgcaagtgggtcatccacatcgagcgcatcacccgcgagaaggttaacggctccaccggcaacgttggcattcacccttccaaggttgtcgtcaccaagcttcgaatggacaaggaccgcaaatccttgctcgatcggaaggccaagggtcgcgccgccgccgaca

SEQ ID NO: 140140 - DNA, 209 bp, Glycine max
ttcagcaatggtgaaactggtgaagctgaagaaggacgacctcgaagagcatttgatcgtcgcagtgggactggacgaggaaatgaattcaaacgtgaaggttcaggacgtggtaactggggagcccaaactgatgaacttgctcaggtaactgatgaggttgcgaatgaaactgaaaagaatttgggtgatgagaagcctgcagttga

SEQ ID NO: 140141 - DNA, 257 bp, Glycine max
ggatagtggcctaccatggtggtgacgggtgacggagaattagggttcgattccggagagggagcctgagaaacggctaccacatccaaggaaggcagcaggcgcgcaaattacccaatcctgacacggggaggtagtgacaataaataacaataccgggctcattgagtctggtaattggaatgagtacaatctaaatcccttaacgaggatccattggagggcaagtctggtgccagcagccgcggtaattccag

SEQ ID NO: 140142 - DNA, 260 bp, Glycine max
agaatatcaaagattatgcaaatgatgcagcgcacaagagcaaagattatgctggtgatgcttctcacaagagcaaagaagcttctgattatgccagtgagacggctcagaagaccaaagactatgttggtgatgctgctcagaaaagcaaagaggcttctgaatatgctagtgatgcggctcagaggaccaaagagtatgctggtgatgccaccaagagaagcaaagaggcttctgatcatgccaatgacatggctcgg

SEQ ID NO: 140143 - DNA, 248 bp, Glycine max
cgacaacatcaacccgcaagacgacatcagattcaatccttcggagcccccggaagggttcgtggcgcctccctcctttgacgacggccctctggagaccgaggacgaaatcgccgctgcctacgaggagctctacggccccggctacagcgatgtctcggtcctcggcaacgacgtgtaggtgatggacgcgaaggtgaataaagagagcgggttcgggtacggcgccaacaaggagaaggtgaggg

SEQ ID NO: 140144 - DNA, 259 bp, Glycine max
gacccgaagcagccatggggatcgatctcaaggccggaggtaagagcaaaaagaccaaaagaacagcacccaagtccaatgatatctatctcaagctcttggtcaagctttatcgcttccttgttcggagaactggcagcaacttcaatgctgttatacttaagagattgttcatgagcaaggttaacaaacccccattgtctttgtcaaggttgattaagtatacgaaggggaaggaagataagattgcagtggtggt

SEQ ID NO: 140145 - DNA, 255 bp, Glycine max
caagcccaatggtcctgtttggagaatctctggtgaggacttgatggtgcaggcacaacctggggtcacgtgtttgggtgttatgaatggaggaatgcaacctagagctgaaattaccttaggggcacgtcagttggaagagaacctggtggtgttcgatcttgcaaggtcaagggttgggtttagcacctcatcactgcactcgcatggagtcaaatgtgctgacctcttcaactttgccaatgcatgatgagc

SEQ ID NO: 140146 - DNA, 253 bp, Glycine max
aagaaagtcttccatagccccccaaaaatgaagagctccatcttctttgctctctttctcttttgtgccttcaccacctcatacctaccttcagccatcgctgatttcgtgctcgataatgaaggtaaccctcttgaaaatggtggtccatattatatcttgtcagacataacagcatttggtggaataagagcagccccaacgggaaatgaaagatgccctctcactgtggtgcaatctcgcaatgagctcg

SEQ ID NO: 140147 - DNA, 254 bp, Glycine max
agaagctcgtgttttcatcttcagcaactgtatatggttggccaaaggaggttccatgcacagaagagttccctctgtcagcaatgaacccatatggacgaactaagcttatcattgaagaaatttgccgtgatgtccactgtgcagagccagattgtaaaataattttgttaagatacttcaacccagttggtgcacaccccagtggttatattggggaggatcctcgtggaattccaaacaatctcatgcca

SEQ ID NO: 140148 - DNA, 253 bp, Glycine max
gcacggcgtcgccgatgccggcttcggcatcagattcaacggcaccatcaaatccgccaccagtttcccccaagtcattctcaccgccgcttccttcgacccaaacctctggtaccaaatcagcaagactattgggaaggaagcgagggcggtgtacaatgcggggcaagcgacggggatgacgttctgggctccgaacataaacgttttcagggatccacggtgggggagagggcaagagactgcaggggaa

SEQ ID NO: 140149 - DNA, 251 bp, Glycine max
ccttcttcctttttctgtgagcctttctttcaggttcttaacttgatcagtgtgcagtgtccaaatcataagggtagttgcaaattgcaatggctaagcatgatgttgagggtggttccttctctgcaaaggactaccatgatcctcctccagcaccgttgattgatgctgaggaactcacacagtggtccttctacagggctttgattgctgagttcattgccacaatgctcttcctttacatcacagtg

SEQ ID NO: 140150 - DNA, 257 bp, Glycine max
aaacactcaagttaacttcaacacctttaattttctgaacgaatttcagccacagaatatcaaagggagcgaagatgagtcaggagcagccaaggcgcccccaaggccaataccccatcaaatacggcgacgtttttgacgtctacggtgaccttgcacagatgcccattgcaccggaagatgctgccatgatgcaaagcgcggaagctcgagtactcggaaaaacccaacccggcggagcttcttccgtcatgcat

SEQ ID NO: 140151 - DNA, 258 bp, Glycine max
gtaaagctaacttcaacacctttaattttctaaaagtaattcagcggctgactaccaagcggagaagatgagtcaggtgcagccacggcgtcccaaaggccaaaaccccatcaaatacggcgacgtttttgtcgtctccggcgaccttgcacagatgcccgtcgcaccggaatgcgctgctatgatgcaaagcgcggaagctcgagtgctcggacaaacccaacccggcggagcagcttccgtcatgcaatctgccgc

SEQ ID NO: 140152 - DNA, 261 bp, Glycine max
gctatgaggatacaacagaagctccaagtaatccaattgataaagtggtttggaccttttctcagaaggctacaattgaactgacacataattggggtactgaaagtgatcctgagttcaaaggctaccacaatggcaattctgaacctcgtggctttggacacattggtataactgttgatgacacatacaaggcatgtgaaagatttcagaatctgggagttgagtttgttaagaagccagatgatgggaaaatgaaag

SEQ ID NO: 140153 - DNA, 255 bp, Glycine max
attcaaaccttgctctatactacacagtacacacactagaagaataatggcttccatcctccactactttttagccctctctctttcttgctcttttcttttcttcttatccgactcagtcacccctacaaaaccaataaaccttgttgttctacccgttcaaaatgatggttccacagggctccattgttcccaacctccaaaaaagaacccctctaatgcaagtaccagtcctggtggacctcaatggaaatc

SEQ ID NO: 140154 - DNA, 248 bp, Glycine max
gcgagaagacttggagccacacccctcagttccagattgggtactgccaacagtgccctgataaggttcaatggccctctcactttggttccaaacctcctctatatttcaatgctggcatgtttgtttatgagcctaatctcgacacctaccgtgatcttctccaaactgtccaactcaccaagcccacttcttttgctgagcaggactttctcaacatgtacttcaaggacaagtacaagccaata

SEQ ID NO: 140155 - DNA, 253 bp, Glycine max
cacgcatattctagagatgctatcggaggaatatggtggtcgtgtcgaactcgctaaagcatattacaaagcactcactgcttccgtgaggaagcatttcaaaggcaatggcgtcatttcaagcatgcagcagtgcaatgatttcatgttccttggtacggaaaccatatcacttggacgagtcggtgatgatttttggtgcacggacccagctggagatccaaacggtacctattggctgcaagggtgtcac

SEQ ID NO: 140156 - DNA, 253 bp, Glycine max
cacaactactacaagtacttccttacaatcaaaaccaccaacaactataatcaagttctcaaaagcactacgatgatcagggtcgcaaggttgacgagtatggcaacgttgagaagcaaaccgacgaatacggcaaccctgttcatgctgctagtgtcacctatgtagccaccagaactgctgctggtggttacagtgatgacattaataagcaacatgataccaccaatgcctacggcgtagacactggtag

SEQ ID NO: 140157 - DNA, 254 bp, Glycine max
cgacaacatcaacccgcaagacgacatcacattcaatccttcggagcccccggaagggttcgtggcgcctccctcctttgacgacgtccctctggagaccgaggacgaaatcgccgctgcctacgaggagctctacggccccggctacagcggtgtctcggtcctcggcaacgacgtgtacgtgatggacgcgaaggtgaagaaagagaccgggttcgggtccggcgccaagaaggagaaggtgagggacgggt

SEQ ID NO: 140158 - DNA, 256 bp, Glycine max
cggctcgagcacaactactacaagtacttccttacaatcaaaaccaacaacaactatggcaagttatcaaaagcactacgatgatcagggtcgcaaggttgacgagtatggcaacgttgagaagcaaaccgacgaatacggcaaccctgttcatgctgctagtgtcacctatgtagccaccagaactgctgctggtggttacagtgatgacattaataagcaacatgataccaccaatgcctacggcgtagacact

SEQ ID NO: 140159 - DNA, 252 bp, Glycine max; identical to SEQ ID NO: 139541

SEQ ID NO: 140160 - DNA, 102 bp, Glycine max
atcatatgtactgtacgtagtgtgaagatatagtattgtatgctgcagaatatgattgtctaataaggtggactagctgtaataaaagatatttccaggttg

SEQ ID NO: 140161 - DNA, 245 bp, Glycine max
  unsure (1)..(245): unsure at all n locations
cttcctgggccagtgagtgatcctgcaaaacttccgaagtggaactatgatgggtctagcacagatcaagctccaggggatgacagtgaagtcattctatacgcacaagctattttcaaggacccctttaggagaggaaacaatattcttgtcatttgtgatgtgtacaccccagctggtgagccacttccagacaacatgcgatccctgtgntgccaaaattttcagtcaccctgatgttgctg

SEQ ID NO: 140162 - DNA, 250 bp, Glycine max
acgccctcgacctattctcaaactttaaataggtaggacggtgcggctgctctgttgagccgcgccatggaatcgagagctccaagtgggccatttttggtaagcagaactggcgatgcgggatgaaccggaagctgggttacggtgcccaactgcgcgctaacctagaccccacaaagggtgttggtcgattaagacagcaggacggtggtcatggaagtcgaaatccgctaaggagtgtgtaacaact

SEQ ID NO: 140163 - DNA, 252 bp, Glycine max
ggaaataattgatctttgaaaatgcagggaggaaagaaagctggagagtccatcaaggaaacagctgcaaacattggtgcttctgccaaggctggcatggagaaaaccaaggccactgtccaggagaaggcagaaagaatgacggcacgtgatccgatgcaaaaggagttggcaacccagaagaaagaggcaaagatgagccaggcagagctggacaagcaggcggcgcgtcagcataacacggcggcgaac

SEQ ID NO: 140164 - DNA, 251 bp, Glycine max
caccaactcataaaatcctcatatctgttcccaaaagcttgtttgtgagaatggcttcgggtgaaaagcaattcccacctcaacaacaacaaacacattctgggaaggagcatgctatgaatccagtaccccaattcactagccctgactacaagtcttcaaataaacttcaaggcaagatagcattagtgactgggggtgactctgggattggacgagcggtgtgtaacttgtttgccttagaaggtgct

SEQ ID NO: 140165 - DNA, 249 bp, Glycine max
gccaatcctaattcctattctcctatccttttacataactctaaagtaagaaaaaatagagcaatttcacaacacaactcttagaattgtgagttaagtatgggaaggtccccttgctgtgagaaagctcacacaaacaaaggtgcatggactaaagaagaagatgacagactcatatcttatattcgagctcacggagaaggctgctggcgttcactccccaaagccgccggccttctccggtgcggc

SEQ ID NO: 140166 - DNA, 247 bp, Glycine max
gagattgtgaagtagaaatcggtgcaagaacttctccactttatctaaaaaaattcggtgagtttgtgaagacaaaaaatcactagctactcaaaaatggccacagtaggaaggaacgttctagctcctttgctgtttcttcacttgatcatgtattttattgttcttggctttgctagttggtgcctcaacaggttcatcaatggccaaacttaccaccctagttttggtggaaatggtgcaacca

SEQ ID NO: 140167 - DNA, 114 bp, Glycine max
cacacacagacacactaagagtaatggcttctatcctccactactttttagggcgctctctttctttctctttccttttcttcttatccgactccgtccccattccccaacacc

SEQ ID NO: 140168 - DNA, 242 bp, Glycine max
gaggttgctaagctatatacgtctccggtggggcctcctcggtgttgcttagggatggtatgaccagagcacccgttgttcggtttccctccgcccagcgcgctcggagttgaaattcttcttggaggatcctctcaacttcgattctcttgctgtcgttttcaataagtcaagcagatttgccaggttgcagaatattcagtgtgctattgcgggcaagaatttgtacatgagattccgat

SEQ ID NO: 140169 - DNA, 251 bp, Glycine max
cgcttaacctctctcattccccatttcctcacctccttcaaccgctgctaattctagggttccgaaatggacgctggcggaaagatcaagaagggcgccggaggtagaaagggcggcggcccaaagaagaagccggtttcaaggtccgtcaaagccggtctccaattccccgtcggaagaattggccgttatttgaagaaaggaaggtacgctcagcgtgtcggtaccggtgctctcgtatacttggctgc

SEQ ID NO: 140170 - DNA, 196 bp, Glycine max
ctcagcccttcaagggggcccgcatcaccggctcccttcacatgaccatctagaccgctgtcctcatcgagaacctcaacgttcttggcgccgtggttcgctggtgctcctgcaacatcttctccattcaggatctcgacgccgtcgccatcgctcgtgacagctccgtcgtctacgactgtaatggtgataccct

SEQ ID NO: 140171 - DNA, 255 bp, Glycine max
agagagagagggagtcagagaaaccctaggtaagaagaaaagatgccggctggtcatggtttgagatcccgcataggagattccttctctcgtcctttcaagaaggagggaaccatcgaccttcacagataccttgagaacctacacgtcggcgactatgttgacgtcaaggttaacggtagcgttcacaaggggatgcccccacaattctaccatggccgcacggacgcgtctggaatgtcacgaacgtgctgt

SEQ ID NO: 140172 - DNA, 251 bp, Glycine max
gaaattgatccagcaaagctgaaagagatgaaaagagaggaggaaattgtgaaggcaaagcaggccttggaaagaaagaagaagttagcagagaaagctgcagccaaagcagccatcagagcacaaaaggaagctgagaagaagcttaaggaccgtgagaagaaagcaaagaagaaatcaggcactgcagccgtggccaaccctgaggacgaaccgaaggatgaagttgtcgaggctacagagccagaaaa

SEQ ID NO: 140173 - DNA, 244 bp, Glycine max
ctgtgccagtgggacgtgttgagaccggtgtcttgaagcctggaatggtggtgacttttgcaccaactggactgacaactgaagtcaagtctgtggagatgcaccatgaatctcttacagaggcacatcctggtgacaatgtgggattcaatgttaagaatgttgctgttaaggatttgaagcgtggttatgttgcctcaaactcaaaggatgaccctgcaaaggaggctgctaacttcacagc

SEQ ID NO: 140174 - DNA, 244 bp, Glycine max
ctccccttgctgcggttgctccatcacctaatcacttccccacttcccctgtaactcacgtttagttcgcacaaggttttaaaaaatggctgatgctgaggacattcaacctcttgttgttgataatggaactggaatggtcaaggcgggttttgcaggtgatgacgctcctagggccgtgttccccagtattattgggcgaccacgccataccggtgtaatggttgggatgggtcagaaggat

SEQ ID NO: 140175 - DNA, 246 bp, Glycine max
ggaagaaccaccactaccttatccatttccactcctcaccaagccccaccatggcctcaaccaacgccctctcttcagcttccattctacgctctcccaaccgccagtctctgaccagaagagcgaaccacaacggaagagtaaattaccgtcaaccgaatagccgtttctccgtcaaagcctccgccaaagagattgcctttgaccagcattcccgctctgctatgcaggccggcattgacaagc

SEQ ID NO: 140176 - DNA, 244 bp, Glycine max
gtgaggtagaacccttccactgtggtgactctgcgatgggtgcctacaagtatgtttcagagctatggcgcaagaagcagtctgatgtcatgcgcttcttgcagcgggtgaggtgctgggagtataggcagcaaccttcgattgttcgtttgacaaggtctacccgccctgacaaggctcgtcgcttgggcttcaaggctatgcagggctatgtgatttaccgtgttcgtgttaggaggggtgg

SEQ ID NO: 140177 - DNA, 246 bp, Glycine max
atttccaaatcacgaaactcacgaagatggagaaagcgatcaacagacagaagattttgcttcatcatctcaacccttcatcatccacccaccccaacgaatcatcctccctccatgcttcagcatgtgtggcgggggatagcgctgcttatcaaaggacatcgacattcggggacgatgttgtgatcgtggctgcttatcggactgctcattgcaaagctaaacgaggtggtttcaaagacactc

SEQ ID NO: 140178 - DNA, 246 bp, Glycine max
tgttacaggactttccatgtcaaaggccactgccaagaaaattgtgaaagctgatgcttatgttgctgcttgtgatgtccctggaattaagagattacttccatcagagtggagggaacaggagtttttcaataatatctatgaactagttggagttcctgtagtcacagtgcaactcagatacaatggttgggttacagagttgcaggatctagaaaagtcaaggcgactggggaaagctgttgg

SEQ ID NO: 140179 - DNA, 249 bp, Glycine max
caacataacaatgtcgttgattccaagtttcttcggcaccgggcgaagaaccaacgtcttcgaccccttctccctcgacgtgtgggacccattccatggcttccccggcaccaccgccctctccgctccgcgctccgagacggcggccttcgccaacacgcgcatcgactggaaggagacggcggaggcgcacgtgttcaaggcagacctgccggggctgaagaaggaagaggtgaaggtggagatcga

SEQ ID NO: 140180 - DNA, 249 bp, Glycine max
taagtgcctaacacctgcagtgaacaatggcctctgcatcagcatctcttctcaagtcttcacttgttcttgacaagtctgagtgggtgaagggacaaacacttcgccaaccttctgctgcatcagttgtgagatgcaaccccaccaccccatcaggcctcaccatcagagctggttcctatgctgatgagctcgttaagaccgcgaaaacagtggcttcaccagggcagggtattttggccatggatg

SEQ ID NO: 140181 - DNA, 264 bp, Glycine max
gaagaagaacaacaagagcagcatgaggaacaagatgaaaatccctacatttttgaggaagataaggattttgagaccagagtcgaaactgaaggtggcagaattcgggttctcaagaagttcactgaaaaatccaagcttcttcagggcattgagaacttccgtttggccattttggaagctagagcacacacgttcgtgtctcctcgccactttgattccgaggttgtttttttcaacatcaaggggcgagccgtacttggg

SEQ ID NO: 140182 - DNA, 262 bp, Glycine max; identical to SEQ ID NO: 119079
  unsure (1)..(262): unsure at all n locations

SEQ ID NO: 140183 - DNA, 259 bp, Glycine max
gattgagtctgccttcatctcaccactcaccaactgcatttcctttctttcttcttcgttgcgttttgctttctttctttttcgttgcctttgtttcttcttcattttgctttctccgtttctttcctttattttttttttggtgttttccatgtcagatctgggttttgttttctttatgcttaaatacttaaagttgtttttttactaccctttggtttttcccctttgtgaatcttgagactttgtgcatgggtat

SEQ ID NO: 140184 - DNA, 259 bp, Glycine max
caacgttgtgctgactccaggttctggaaggggtattgtgactggtgcttttgttggtgccacagcttcacacagcaaaagtctccatgtgtttccaatgggtgttttagaggggctccggttcatgtgttgtttccggttcaagttatggtggatgactcagagaatgggaacttgtgggagggatgttcctctggagactcaattcatgcttattgagagcaaagagagtgaaactgatggggagaattctccaatc

SEQ ID NO: 140185 - DNA, 257 bp, Glycine max
agcaaagcaatggctacttcaaagttgaaaacccagaatgtggttgtatctctctccctaaccttaaccttggtactggtgctactgaccagcaaggcaaactcagcggaaactgtttctttcagctggaacaagttcgtgccgaagcaaccaaacatgatcttccaaggagacgctattgtgacctcctcgggaaagttacaactcaataaggttgacgaaaacggcaccccaaaaccctcgtctcttggtcgcgc

SEQ ID NO: 140186 - DNA, 261 bp, Glycine max
tctggacgtgtgggacccattggaagggtttccgttttccacagacaacgctggcgaaagtagtgcaatagccaacactcgcgtggactggaaggagacaccgcaggctcacgtgttcagcgttgaccttcccgggttgaagaaggaggatgtcaaggtcgaagttgaagacggaagggtgctgcagattagtggtgagaaaaccatagaacaagaacagaaagatgataggtggcaccgcattgaaagtagcactgggaa

SEQ ID NO: 140187 - DNA, 130 bp, Glycine max
ggctgggttaggccatgcaccaatttctcttccaaaccaactcgcttcccactttggcctacaacgccaattcaccacttggcattatcggtacactacttcacagggagctataacgattaggggaagt

SEQ ID NO: 140188 - DNA, 162 bp, Glycine max
ggtcgcaaggtcgacgagtatggcaatgttgagaggcaaactgacgaatatggcaacccggttcatgccactagtgtcacttatgtagccactaaaagtgttggtggctacaatgatgacactaataagcaacatgataccaccggtgtctatcctgagaaa

SEQ ID NO: 140189 - DNA, 262 bp, Glycine max
caaagatgggctcgcaatgggcctagcgttcaaccatgctgtcttggacgggactgccacgtggcagttcatgacctcatgggccgagatctgcagcggttcaccttccacgtcagcaccacccatcctggaccggaccaaggcccggaacacacgcgtgaagctggacctttcgctaccagagcccaaacgcccaccaacttccaacggtgaagcaaagcccgcgccagcacttagggaaaaaatcttcaaattctctgag

SEQ ID NO: 140190 - DNA, 259 bp, Glycine max
cggagagagagagagaggttttgacgcaacacactttcactgagaaaggatctctatctaccaaggagcagaataaaacccttctctctggtaagtgaataagagaatggcttcagatcggaaacttcacactttcgaggaggtggcaaagcacgaccagaccaaggattgctggctcatcatttctggcaaggtgtatgatgtcacccctttcatggaggatcatcccggaggtgatgaggttttgttatctgcaaca

SEQ ID NO: 140191 - DNA, 262 bp, Glycine max
gaaagagagagaagaagaaaagaagaacaaagatgcaatcctcaaaggacgaagatgaaaaacatggcaagtgctgccaaggaacaagtcgacatctataaagccaaaatagacgagaaggcagagaaagcaacggcaagaacagaagaggagagggtgatagcccatgagcacgcaaaggcaaaggaagctggagcaaagatggagctgcatgaagctaaagcaaggcatgcagcagagaagctaagcgccaaccaatcac

SEQ ID NO: 140192 - DNA, 256 bp, Glycine max
tgggtatcccttggtgataaattctgccgtctatcggtttgcatggttgggatgcctctctttcagtttcgtgtgcttctgtgccaagagattccatgtctggttcacaaatctccataattcaatacgcgatgaccgatatctgattggccggaggttgcataactttggagaacatgctgagaaagcaaatgtggcagaaactaattcaggggagaaggacactattttactaggtacaggtttaaaccaacaa

SEQ ID NO: 140193 - DNA, 257 bp, Glycine max
gaccatcacccttgaggtggagagctctgacactattgacaatgtcaaagctaagattcaagacaaagaaggtatcccaccagaccaacagaggctcatatatgctggaaaacagcttgaagatggccgaaccttggcagattacaacatccagaaagaatctaccctccacttggtgctccgtcttcgcggtggtatgcaaatctttgtgaagacccttactgggaagaccattactttggaggtagagagctctg

SEQ ID NO: 140194 - DNA, 259 bp, Glycine max
gtgagaaacaaagaaaggaaataattgatcattgaaaatgcagggaggaaagaaagctggagagtccatcaaggaaacagctgcaaacattggtgcttctgccaaggctggcatggagaaaaccaaggccactgtccaggagaaggcagaaagaatgacggcacgtgatccgatgcaaaaggagttggcaacccagaagaaagaggcaaagatgagccaggcagagctggacaagcaggcggcgcgtcagcataacacg

SEQ ID NO: 140195 - DNA, 257 bp, Glycine max
aaaggattctacccgccgctcgatgggaattgcgcttcaaggcgtctcgtagggctaatccgcctcacgagggtcaccaacggcacgtgcctttggggggccgaggccccctactgctggtcggcaaacggacggcgggcgcacgcgtcgcttctagcccggattctgacttagaggcgttcagtcataatccaacgcacggtagcttcgcgccactggctttacaaccaagcgcgatgaccaattgtgcgaatcaa

SEQ ID NO: 140196 - DNA, 257 bp, Glycine max
tgctaaagctggttacactggaaaggttgtaattgggatggatgttgctgcttcagaattttacgataacaaggataaaacctatgacttgaattttaaggaagagaataatgatggatcacagaaaataaacaatccagcctggaagagatttctaagtgcagagctgaagctgaagagaaagttaaggagagaaaggagagatcaaaacaagcagcaagtaatgaagctgccaaagagagaaacaagcaggcaaa

SEQ ID NO: 140197 - DNA, 255 bp, Glycine max
accaaatcccagggagccaccaaccatggcttccaagctctgcgactcatgcaaatcagccactgctaccttgtactgccgccccgacgcggccttcttctgcggcgcctgtgactctaaggttcatgccgccaacaagctcgcatcgcgccacccgcgcgtcgtgctctgcgaggtgtgcgagcaggcgcccgcgcatctgacctgtaaagccgacgccgccgcgctctgccttgcctgcgatcgcgatatcca

SEQ ID NO: 140198 - DNA, 255 bp, Glycine max
gaaaacctaagcttagaattagaaacaaagaaaagaagaaaggtaagaattgatcgttgaaaatgcagggaggaaagaaagcgggagagtccattaaggaaacagctacaaacattggtgcttctgccaaggctggcatggagaagaccaaggccactgtccaagagaaggcagaaagaatgacagcacgtgatccggtgcaaaaggagttggcaacccaaaagaaagaggcaagatgaaccaggcggagctgga

SEQ ID NO: 140199 - DNA, 256 bp, Glycine max
aaaacctaagcttagaattagaaacaaagaaaagaagaaaggaaagaattgatcgttgaaaatgcagggaggaaagaaagcgggagagtccattaaggaaacagctacaaacattggtgcttctgccaaggctggcatggagaagaccaaggccactgtccaagagaaggcagaaagaatgacagcacgtgatccggtgcaaaaggagttggcaacccaatagaaagaggcaaagatgaaccaggcggactggtac

SEQ ID NO: 140200 - DNA, 255 bp, Glycine max
gaaaaaatcaccctagaacctggagacatgatacacataccagcaggcacaccactgtacatcgttaacagagatgagaatgagaagctcctccttgccatgctccatatacctgtctctactcctggaaaatttgaggaatttctcgggcctggaggacgagacccagaatcggtcctctcagcattcagctggaatgtgctgcaagctgcgctccaaaccccaaaaggaaagttagaaaggctttttaatcaa

SEQ ID NO: 140201 - DNA, 253 bp, Glycine max
agcgaaaccacagccaagggaacgggcttggcggaatcagcggggaaagaagaccctgttgagcttgactctagtccgactttgtgaaatgacttgagaggtgtaggataagtgggagctggaaacagcgaaagtgaaataccactacttttaacgttattttacttattccgtgaatcggaagcggggcactgcccctctttttggacccaaggtcggcttcggccggtcgatccgggcggaagacattgtc

SEQ ID NO: 140202 - DNA, 254 bp, Glycine max
cggcataacctaaacctatctttcttctctctctgtgtgtgcgcatcaacggcaaccagaagcagccatggccactgcaaggactgtgaaggatgtttcacctcatgagttcgttaaggcgtactcctctcacctcaagcgatccggcaagatggagctgccagagtggactgatattgtgaaaactgcaagatttaaggagttggctccttatgatcctgactggtactatgtcagagctgcttccatggcaa

SEQ ID NO: 140203 - DNA, 252 bp, Glycine max
gtccctgcggatgttgacgcaatgtgatttctgcccagtgctctgaatgtcaaagtgaagaaattcaaccaagcgcgggtaaacggcgggagtaactatgactctcttaaggtagccaaatgcctcgtcatctaattagtgacgcgcatgaatggattaacgagattcccactgtccctgtctactatccagcgaaaccacagccaagggaacgggcttggcggaatcagcggggaaagaagaccctgttga

SEQ ID NO: 140204 - DNA, 247 bp, Glycine max
cgattggtcaaccaattggggcaagtcgtgtccgttaggggtcgcatggatttgaccagccggagatcgctcggttattgttatgtcaactttagcaacccgcaagacgctgctagagcattggatgttctgaacttcactcctctcaatgacaggcccatccgtattatgtattcgcatcgtgatcccagtatccgtaagagtggacaaggaaatatatttattaagaactcgttagggcaattga

SEQ ID NO: 140205 - DNA, 255 bp, Glycine max
aaacagtatagctaacttcaacacctttaattgtcttttaagtaattcagcggctgaataccaagcggagaagatgagtcaggagcagccacggcgtcccaaaggccaaaaccccatcaaatacggcgacgtttttgtcgtctccggcgaccttgcacagaagcccgtcgcaccggaagatgctgccatgatgcaaagcgcggaagctcgagtgctcggacaaacccaacccggcggagcagcttccgtcatgca

SEQ ID NO: 140206 - DNA, 255 bp, Glycine max
cctcgagccgattcggctcgagacaaaattgaactgtaattgtagtagtagacagtagcaccatgagccaggaacagctcaagaaacctcaaggggagcaggaccccatcaaatacggcgacgttttcaaagtctccgacgaactcgctttcaaaccctccgcgccaagagacgcagctctcatgcaagccacggagaaccaagcattcggccaaactcaaaaaggaggtcccgcctcggtgatgcaatccgccg

SEQ ID NO: 140207 - DNA, 252 bp, Glycine max
ggaagaagaaaaggaggctaaataaagagagtgaagaagaagagagggtttgggttttggtgtttgttgttgaatcgtgaaaatgttcagaaaccagtacgacacggacgtgaccacatggagccctgcggggaggctgttccaggtggagtacgctatggaggcggtgaagcagggctcggcggcgatagggctccgatcgaagacccacgtggtcctcgcatgcgtcaacaaggccaactccgaactctc

SEQ ID NO: 140208 - DNA, 118 bp, Glycine max
ggatgctgtggctgggaccataagcttgcatgacaaagcaagaaacagggtttacaagctcaatgatcaaacagcaaagctttttgtgcgaccaagaggttggcacctaccggaggca

SEQ ID NO: 140209 - DNA, 247 bp, Glycine max
aacacacaactacaagaaagaacttccttataaccaaaaccaacaagaactatggaaagttatcagaagcactacgatgatcagggtcgcaaggtcgacgagtatggcaatgttaagaggcaaactgacgaatatggcaacccggttacatgccagtagtgtcacttatgtagccactaaaagtgttggtggctacaatgatgacactaataagcaacatgataccaacggtgtctatcctgagaaa

SEQ ID NO: 140210 - DNA, 253 bp, Glycine max
tgccctcaacacctgtgaataagtgtgacattttcactggtgattgggtgccaaatccagaggcaccatattacacaaacacaacatgctgggaaattcatgagcaccaaaattgcatgaagtatgggagacctgacactgatttcatgaagtggagatggaagccaaatgagtgtgaactccccatattcaaccctttccagttcctacaaattatgaggggaaaatctttggcttttgttggagactccat

SEQ ID NO: 140211 - DNA, 254 bp, Glycine max
cattacacaagaactctccaaggatcctccttcccacgaaattctttggagggaaaatccaagaagagggtggaatttcaagccagggaagatggattatttcaatgcaccaggaagaaaccatctctttgttccggggccggttaacatcccggaccagatcattcgggccatgaacagaaacaatgaggactaccgttctccagcaattccagctatgaccaaaacactgcttgaggatgtcaagaagattt

SEQ ID NO: 140212 - DNA, 253 bp, Glycine max
acacgaatggcatcgcaaggaggaaaaacacggaggaaagggaagtgaagaggaacaagatgaacgtgaacacccacgcccacaccaacctcaactcaaggaagaggaaaagcacgaatggcaacacaagcaggaacaaccccaaggaaaggaaagtgaagaagaagaagaagaccaagacgaggatgaggagcaagacaaagagagccaagaaagtgaaggttctgagtctcaaagagaaccacgaagacat

SEQ ID NO: 140213 - DNA, 249 bp, Glycine max
gaggttgccaagctatatacgtctccggtggggcctcctcggtgttgcttagggatggtatgaccagagcacccgttgttcggtttccctccgcccagcgcgccgcgaccttgaaattcttcttggaggatcctctcaacttcgattcccttgctgtcgttttcaataagtcaagcagatttgccaggttgcagaatattcagtgtgctattgcgggcaagaatttgtacatgagattccgatgcagca

SEQ ID NO: 140214 - DNA, 250 bp, Glycine max
ataccttaataaataatttaagatactatgatgagagcacggttcccattactgttgctgggacttgttttcctggcttcagtttctgtctcatttggcattgcttactgggaaaaagagaaccccaaacacaacaagtgtctccagagttgcaatagcgagagagactcgtacaggaaccaagcatgccacgctcgttgcaacctccttaaggtggagaaagaagaatgtgaagaaggtgaaattccac

SEQ ID NO: 140215 - DNA, 249 bp, Glycine max
aaaggattctacccgccgctcgatgggaattgcgcttcaaggcgtctcgtagggctaatccgcctcacgagggtcaccaacggcacgtgcctttggggggccgaggccccctactgctggtcggcaaacggacggcgggcgcacgcgtcgcttctagcccggattctgacttagaggcgttcagtcataatccaacgcacggtagcttcgcgccactggcttttcaaccaagcgcgatgaccaattgtg

SEQ ID NO: 140216 - DNA, 247 bp, Glycine max
ctcagaaggaacgctagctatatgcttaacacatgcaagtcgaacgttgttttcggggagctgggcagaaggaaaagaggctactagcgtgaaggttgcttgtctcgtccaggaggtgggaacagttgaaaacaaagtggcgaacgggtgcgtaatgcgtgggaatctgccgaacagttcgggccaaatcctgaagaaagctaaaaagcgctgtttgatgagcctgcgtagtattaggtagttggtc

SEQ ID NO: 140217 - DNA, 249 bp, Glycine max
tagctagcttcaattcctcccatggcagacccacagcaacaagacaattacatgaagcgaaagccttccaattccaatgttctcgtcctcgccgccctcgtgcctttcggcgtctctcttctcatcctcgtcggcctcaccctctccgccaccgtcatcagcctcaccgtcgtcaccccactcttcgtcattttcagccccgtcttgctccccgcggccctattcatcgctctcgccgtcgccggcttc

SEQ ID NO: 140218 - DNA, 251 bp, Glycine max
ggagaagacgttcttgcaatccacgccacacaagggtagacccaacaacttggcccattggtcacagtcccacaattcctcttttcttgtgcaccttccttccttgttcaaaagggtcttcctagaaacactcaaggtgtggctgggttaggccatgcaccaatttctcttccaaaccaactcgcttcacactttggcctacaacgccaattcaccacttgcctttctcgctaccctacttcaaagggtgc

SEQ ID NO: 140219 - DNA, 138 bp, Glycine max
gtctgagcggggcgtagcagactgaaattccggtggatgcccgcagggagagtgacgtgcaaatcgttcgtcggactttgggatacttccgcaagactaatcgtaccgttctagtacctggatccctccgaaggtgcc

SEQ ID NO: 140220 - DNA, 249 bp, Glycine max
ctagttctagatcgcgatcttagaactagaaaacagtaaagctaacttcaacacctttaattttctaaaagtaattcagcggctgaataccaagcggagaagatgagtcaggagcagccacggcgtcccaaaggccaaaaccccatcaaatacggcgacgtttttgtcgtctccggcgaccttgcacagaagcccgtcgcaccggaagatgctgccatgatgcaaagcgcggaagctcgagtgctcgga

SEQ ID NO: 140221 - DNA, 249 bp, Glycine max
  unsure (1)..(249): unsure at all n locations
cttttcttcagcccatagcttacctgattctcacgcatggtctcactctcaacccaacgatgatgattatgtctcattcaatgatgatgnnnnnnnnnnnnnnntcatacccatcatagacctcatggatccaaatgccatggaacaaataggccatgcatgtgagaaatggggtgctttccaattgaagaaccatggcatacccttttgtgttattgaagatgtagaagaagaggctaaaaggctctt

SEQ ID NO: 140222 - DNA, 245 bp, Glycine max
gaaagagagagaagaagaaaagaagaacaaagatgcaatcctcaaaggagaagatgaaaaacatggcaagtgctgacaaggaacaagtcgacatctataaagccaaaatagacgagaaggcagagaaagcaacggcaagaacagaagaggagagggtgatagcccatgagcacgcaaaggcaaaggaagctggagcaaagatggagctgcatgaagctaaagcaaggcatgcagcagagaagcta

SEQ ID NO: 140223 - DNA, 243 bp, Glycine max
aattctctctactactgctagctgtgacttgtgttgagttcaatcaaatcgcattggtatcgaaatcagaagatggttagcgtactgagatcaggcaggcacaaagggcagaaggcccagcaaccatccttgccattggaactgcaaacccaccaaaccgtgttgatcagagcacctatcctgattactacttcagaatcaccaacagtgaccacatgaccgagctcaaagagaaatttcagc

SEQ ID NO: 140224 - DNA, 246 bp, Glycine max
cacacacaactacaagaaagaacttccttataaccaaaaccaacaacaactatggcaagttatcagaagcactacgatgatcagggtcgcaaggtcgacgagtatggcaatgttgagaggcaaactgacgaatatggcaacccggttcatgccactagtgtcacttatgtagccactaaaagtgttggtggctacaatgatgacactaataagcaacatgataccaccggtgtctatcctgagaaa

SEQ ID NO: 140225 - DNA, 248 bp, Glycine max
gtaaaggctgaccaagccaatgatgcttagctggtcttttcggatgatcagccacactgggactgagacacggcccggactcccacggggggcagcagtggggaatcttggacaatgggcgaaagcccgatccagcaatatcgcgtgagtgaagaagggcaatgccgcttgtaaagctctttcgtcgagtgcgcgatcatgacaggactcgaggaagaagccccggctaactccgtgccagcagccgg

SEQ ID NO: 140226 - DNA, 251 bp, Glycine max
gtgagtttgttgttcctcactgacctcaccatggcgaccagagccaagctttctttagctatcttccttttctttcttttagccttgatttcaaacctagccttgggcaaacttaaagaaaccgaggtcgaagaagatcccgagctcgtaacatgcaaacaccagtgccaacagcaacggcaatacactgagagtgacaagcgaacatgcttgcaacaatgtgacagtatgaagcaagagcgagagaaaca

SEQ ID NO: 140227 - DNA, 261 bp, Glycine max
atcggctcgagggtgaaggtaggcatgatggagcagatcaagagagagatctcagccatgaacatggtgaagcacccaaacatcgtgcagcttcacgaggtcatggcgagcaagtccaagatctacatcgccatggagctcgtccgcggcggcgagctcttcaacaagatcgccagaggccgtctccgggaggagatggccagactttacttccaacaactcatctctgctgtggacttctgccacagccgcggcgtctac

SEQ ID NO: 140228 - DNA, 245 bp, Glycine max
gctgttgttgctgctgctgcttctgcctttgctccaccaccgaacaacttcccctgtaaatcgcgtttcgtttgcgcaaggttttaaaagatggctgatgctgaggacattcaacctcttgttgttgataatggaactggaatggtcaaggctggttttgcaggtgatgatgctcctagggccgtgttccccagcattattgggagaccacgccatactggtgtaatggttgggatgggtcagaa

SEQ ID NO: 140229 - DNA, 245 bp, Glycine max
ggggaagctggcagctgaaattttgatgcagaactgggacatcgctcttgaagagctcaaccgcttgaaggaaatcattgactcaaagaattttgcatcacctttgaaccaggtgcaaagcagaatatggctgatgcattggagtctgttcatcttttttaatcatgacaatgggagaacacaaataattgatctgttcaatcaggacaagtatctaaatgctatccaaactagtgctccacacc

SEQ ID NO: 140230 - DNA, 245 bp, Glycine max
ggagcaaggaggaaaatataaagactatgctgcagagaaggctaaagaaggaaaagatgctactgtgaataagatgggagagtataaagattatacggcggagaaggctaaagaggggaaagatacgacgttggggaagcttggggagctgaaggactctgcggctgatgcggcgaagagggcagtgggttacttgagcggcaagacagaggaaaccaaagagaaagtctcggagacggcagagg

SEQ ID NO: 140231 - DNA, 243 bp, Glycine max
aaggattctacccgccgctcgatgggaattgcgcttcaaggcgtctcgtagggctaatccgcctcacgagggtcaccaacggcacgtgtctttggggggccgaggcccctactgctggtcggcaaacggacggcgggcgcacgcgtcgcttctagcccggattctgacttagaggcgttcagtcataatccaacgcacggtagcttcgcgccactggcttttcaaccaagcgcgatgaccaat

SEQ ID NO: 140232 - DNA, 248 bp, Glycine max
cggggatgcacctaacaacatgcgacagtttcaaaaccaagatattttccacgatttggccttcaccccattaaccatcaccctgcagggagagtacaacgtgagagtcaactcaataagaatcaaccagcacagtgtgttcccactgaacaagatatcatccaccatcgtagggtcgacctctggaggaaccatgattagcacctcaactcctcacatggttctccagcaatccgtgtaccaggctt

SEQ ID NO: 140233 - DNA, 263 bp, Glycine max
agcagaggcatgggaagaagagtctgaccacagtgcaagggctgaagaaggagttcagctacgagaagatcctcaaggacctcaagaaggagttctgctgcaacggaaccgtggtgcaggacaaggagcttggcaagatcatccaactccaaggcgaccagcgtaagaacgtctcccacttcctcgttcaggctggccttgtcaggaaggaccagatcaagattcatggtttttgaccaattggtcttgtttttgttagtagt

SEQ ID NO: 140234 - DNA, 249 bp, Glycine max
cacaaaacttccacttgagagaaaagtagtgtattaagactacaaattttcaatttttcaatggcgtcgaggcaacaaaaagaggatcgagctgaggcagctgcgaaagttgctgcgaaagaactcgaacaactcaaccgagaaaaagaccgtgatttcagtgttggtgttgcagaccaacaccaacaagaagaacatcagttagatcaacaaaagcgtggtgtaatcggatccatgttcaaggcggtg

SEQ ID NO: 140235 - DNA, 246 bp, Glycine max
caatcgtgaagttttttctttgagaagtaaaagatcttagtgcaagtaattaacatggaatctcagcaagcaaaccgtgaagaacttgatgagaaggcaaggcaaggtgaaactgttgttcctggaggaactggtgggaagagtcttgaggctcaagaacatcttgctgaaggaaggagccgtggagggcagacgaggaagcagcagctagggtcagaggggtatcatgaaatggggaccaaagga

SEQ ID NO: 140236 - DNA, 244 bp, Glycine max
gaagcttctcggatattttctgaaatgaaagattctgcacttgttcctgatgttgtaacttacaacacatttattgcaacttatgctgctgactcgatgtttgctgaggctattgacgtagttcgatacatgatcaagcaaggatgtaagccagaccagaatacttataactccattgttgattggtattgtaagctcgaccagcggcatgaggccaacagttttgttaaaaaccttagtaatc

SEQ ID NO: 140237 - DNA, 239 bp, Glycine max
gtcagagcggcggacatcaggcgctggaccccaccgccgtccacggcgtcacgcagttctccgatctcaccgaggacgagtttgagaagctctacactggcgtcaatggcggcttcccgtcatcgaataatgccgccggcggtattgcgccgccgttggaggtggacgggctgccggagaattttgattggagagagaaaggagctgtcaccgaagttaagttacagggtagatgtgga

SEQ ID NO: 140238 - DNA, 239 bp, Glycine max
gtttctcgtcccgacaaaatcagtgctgctgagatatcagctatttgtcaagaagctggaatgcatgctgttcgcaagaatagatatgtcatactgcccaaggacttcgagaagggttacaggacaaacgtgaagaagcctgatactgacttcgaattttacaagtgatgatgttgtagcttttagattggtgtgtgctcgcgaagttaatatacagtgcagggtacatttctagaggg

SEQ ID NO: 140239 - DNA, 241 bp, Glycine max
cacacacactctctctctctctctagtacctcctcctcctcctccttcttcttcttccctggcatcggatccagatccaaatccagtttaacaaagaaaatgcagtacaagaacctgggccgatcgggactgaaggtgagccagctctcctacggggcgtgggtgagcttcggtaaccagctagacgtgaaggaggccaaggccctcctccagtgctgccgcgaccacggcgtgaacttct

SEQ ID NO: 140240 - DNA, 243 bp, Glycine max
ggcggcagtaactctaactgtcctaaggtagcgaaattccttgtcgcataagtagcgacctgcacgaatggtgtaacgactgccccgctgtctccgacatggacccggtgaaattgaattctccgtgaagatgcggagtaccaacggctagacggtaagaccccgtgcaccttaactatagcttcgcagtgacaaccttgatcgaatgtgtaggataggtgggaggtgatgacacagaacgac

SEQ ID NO: 140241 - DNA, 242 bp, Glycine max
gcaacagtgagaacaccattgaattttgattctagcaagcagagcttttgtcaattttctattgaccttctcggtggaggaattttagtggacaaaactggagattggatcacacttatacaaaattctccaattagtaacttgttgagagttgctgcttggaagaaaggctgtttaatggttaagattgtgatgtctgggaatgcagcagtcaaaaggagtgattgggcctcattggtaca

SEQ ID NO: 140242 - DNA, 247 bp, Glycine max
cttctgaatctattgaatcaacaatcatgtcggacgaagagcaccatttcgagtccaaggccgacgccggagcctccaaaacctaccctcagcaagccggtaccatccgcaagaacggctacatcgtcatcaaaggccgcccctgcaaggttgtggaagtttcgacttccaaaactggaaagcacggtcacgctaagtgtcactttgttggaattgatattttcactgccaagaaacttgaggatat

SEQ ID NO: 140243 - DNA, 247 bp, Glycine max
gtttctccactttcattctcactcatcgcaccctcttgcaaagttaccatgaatttcttcaactgggttcatactttcatcgtttttcatgtctttgctgcaacaccccacttcttcttattagcagattcctccgaacaactccccaccaactttctagatgctgccaagaagcctgaggtatttgattggatggtcagaatcagaaggaagattcatgagaatcctgaattgggttatgaagaat

SEQ ID NO: 140244 - DNA, 252 bp, Glycine max
tgagcatcactgagtttctgaagcctgctgagggggaagcatactataacccagggcgtggtaggggtcgtggccgtggttcacgaggtggaggcggaggcggaggtgtttaccgtggaagttccaccaacaatgcacctgctccatccattgaagatcctgggcatttcccaaacttgggcgccaagtgaggccttgctagaacccttttgtcatatccctgtcctattttcaattttgggttctcttatt

SEQ ID NO: 140245 - DNA, 254 bp, Glycine max
actacaagtacttccttacaatcaaaaccaacaacaactatggcaagttatcaaaagcactacgatgatcagggtcgcaaggttgacgagtatggcaacgttgagaagcaaaccgacgaatacggcaaccctgttcatgctgctagtgtcacctatgtagccaccagaactgctgctggtggttacagtgatgacattaataagcaacatgataccaccaatgcctacggcgtagacactggtagacagcattc

SEQ ID NO: 140246 - DNA, 244 bp, Glycine max
agaaaagttagggttcacaacttttccttttccttttgcttgcgaatctgaatcaaataatcaatcatccattcattattcatcaacgtcgtcggcgaagaaaatcacgctgaagagttcggacggcgaggctttcgaggtggaggaggcggtggcgctggagtcgcagacgataaagcacatgatcgaggacgactgtgccgacagcggcatccctctgccgaacgtgacgagcaagatcctg

SEQ ID NO: 140247 - DNA, 221 bp, Glycine max
ctttgttcactcttcttctcttgcggctagggtttgagcgcagtttcttctagatttaaggaagatgggtaaggaaaaggttcacatcagtattgtggtcattggccatgtcgactctgggagatccactaccactgggcactcggtttacatgcttggcggcattgacaagcgtgttattgagaggtttgagaaggaagctgctgagatgaacaagaggt

SEQ ID NO: 140248 - DNA, 236 bp, Glycine max
tatggtaggtcatcctcagcgccaagacatattcataggactccggtagctgttcaggccctcccagttcaatctcaggcattgggaccacaggaaaattcaataactaatttgaatagttccttgctacctagcaattcctctgctgctcctcatatttctttgtccaaccctgcctctgtagatactttgaatgccatactaagtgatacggaaagacaacaacatttttctcg

SEQ ID NO: 140249 - DNA, 240 bp, Glycine max
tctcgagcgaatcggctcggaggctacttaaagggcttggaatgaagaaaggaaataattgatcaccaatctgcctggaggagagttgtttgccttgctatcaattccggtattagcactccaggttatttcagggataggattttgttcctgactgtattgcagtcaccgaatatggagcaactaaggacggatatttgggggtatattatgggcaacgagaggttggatgcgaattac

SEQ ID NO: 140250 - DNA, 243 bp, Glycine max
attcaaaccaaccatccgcactgtgcatccctttcttccttcttcgtcttattattctccaaaacttccttcttactcttcttctttctgtttcgcaccctccaaacgacgttgtttctcgtcgttcagccatgtcgtacgactacctcttcaagtacatcatcatcggtgacacaggtgtagggaaatcttgcctgctcctgcagttcaccgataagaggttccaaccggttcatgatctca

SEQ ID NO: 140251 - DNA, 246 bp, Glycine max
gttcatttgactctcacaaaccttgcatccatccacacatggctggcatgaactctagcgtattggcctgtagctatgccatatctggtgcagcatgctccgagctcaatgggaaggtcacttccgtggcctctgttgcatcctctggctacaagttgccattgatcaaatgtgaggccagagttcccaaagccaaagaatctgaaggaaggagaggtgcccttgttctcttggcagctacccttt

SEQ ID NO: 140252 - DNA, 245 bp, Glycine max
ttatgatttggcagctctgaagtactggggtcccactgctaccaccaacttccctgtttccaattattcaaaggaagtggaggagatgaaacatgtaacaaagcaggaatttatcgcatcattgcgaaggaaaagtagtggtttctccaggggagcttccatatacagaggtgttacaaggcatcatcaacagggtaggtggcaagcaagaattggccgtgtagctggaaacaaagatctttact

SEQ ID NO: 140253 - DNA, 250 bp, Glycine max
gtggtgccttatcgctgtggttttcatcgtcttccttctcttatatttcttttttttttgtcttcgccgcacgccgaaacaatggccggaaaaggagagggtcctgctatcggaatcgatctcggaaccacctactcttgtgtcggtgtgtggcaacatgaccgagttgaaatcatcgccaacgaccaagggaacagaacgacgccgtcttacgtcggcttcactgataccgagcgtctcatcggtgatg

SEQ ID NO: 140254 - DNA, 244 bp, Glycine max; identical to SEQ ID NO: 122483

SEQ ID NO: 140255 - DNA, 238 bp, Glycine max; identical to SEQ ID NO: 136607

SEQ ID NO: 140256 - DNA, 234 bp, Glycine max
tgaaatctgataatcttttgatttttggtgacaagtcaattaaaattgctgactttggagttgctcgtattgaggtgcaaactgaaggaatgacacccgagactggaacataccgttggatggctccggagatgatccagcataggccttacacacaaaaagtggatgtatatagctttgggattgttctatgggaactcattaccggtatgcttccatttcagaacatgacag

SEQ ID NO: 140257 - DNA, 225 bp, Glycine max
cacctttgttcactcttcttctcttgcggacagggttttagcgcagttacttctagatttaaggaagatgcgcctggcgtaagtgcataataccatcggcggcattgggccgccgtacgctgtgaaagggactaccactgattttgtagtggaacaagcaaggaggtgtcaccgaacgtgaggtacaggggagatatagatcatgctcggctttcagcaccacag

SEQ ID NO: 140258 - DNA, 239 bp, Glycine max
gtgcggtttcctttgttggtgttgctgggaactgttttcctggcatcagtttgtgtctcattaaaggtgagagaggatgagaataaccctttctacttgagaagctctaacagcttccaaactctctttgagaaccaaaacggtcgcattcgtctcctccagagattcaacaaacgctccccacaacttaagaaatacaaagactaccggattgtccagtttcagtcaaaacccaacac

SEQ ID NO: 140259 - DNA, 241 bp, Glycine max
gttcccaccgtggatgtctctgttgttgacctcacagtgaggctggagaaagaagcttcctacgatgaaattaaaaatgctatcaaggaggaatcagagggcaagttgaagggaattcttggttacactgaagatgatgtggtctccactgactttatcggcgatagcagatcaagtatttttgatgcaaaggctggaattgcattgaataagaactttgtaaagcttgtttcttggtacg

SEQ ID NO: 140260 - DNA, 252 bp, Glycine max; identical to SEQ ID NO: 139541

SEQ ID NO: 140261 - DNA, 241 bp, Glycine max
gcgctagctagctagcaagcaatcacagagatggaggcaaagcgaggccatgccctcatgtgcttggcacgtgtttcactcttcctctgcgctctaaccctatccgctgctcacggaagcaccacggttcaagacatcgcgagaaagttgaaactcggggacaacgagcttctgcgcacggagaagaagttcaaggttttcatggagaattacgggaggagctactccacagaggaggagt

SEQ ID NO: 140262 - DNA, 239 bp, Glycine max
gaaaaccaacataacaatgtcgttgattccaagtttcttcggcaccgggcgaagaaccaacgtcttcgaccccttctccctcgacgtgtgggacccattccatggcttccccggcaccaccgccctctccgctccgcgctccgagactgcggccttcgccaacacgcgcatcgactggaaggagacggcggaggcgcacgtgttcaaggcagacctgccggggctgaagaaggaagagg

SEQ ID NO: 140263 - DNA, 122 bp, Glycine max
gcccttgtactttcaaagtgaccaaacacaagtacacaacacaacagcaagaaaaggagactgaacaattggctcgcagagagaacaccaccaccgagaaggagattcacgttgagaaacac

SEQ ID NO: 140264 - DNA, 236 bp, Glycine max
cggcgtcacgcagttctccgatctcactgaggacgagtttgagaagctctacactggcgtcaatggcggcttcccgtcatcgaataatgccgccggcggtattgcgccgccgttggaggtggacgggctgccggagaattttgattggagagagaaaggagctgtcaccgaagttaagttacagggtagatgtggatcatgctgggctttcagcaccacaggatctatagaaggag

SEQ ID NO: 140265 - DNA, 235 bp, Glycine max
ctcagaaggaacgctagctatatgcttaacacatgcaagtcgaacgttgttttcggggagctgggcagaaggaaaagaggctcctagcgtgaaggttgcttgtctcgcccaggaggtgggaacagttgaaaacaaagtggcgaacgggtgcgtaatgcgtgggaatctgccgaacagttcgggccaaatcctgaagaaagctaaaaagcgctgtttgatgagcctgcgtagtatt

SEQ ID NO: 140266 - DNA, 239 bp, Glycine max
aatatacctaaaaaaatgcatctattctttaatcatctaggaaaaatatatctacagatacttaaatagatattcagacaaatgaatcatgtgccaggaaccagatttgaactggtgacacgaggattttcagtcctctgctctaccaactgagctatcccgaccattcttgacgcataagactcatttttattttaaaagattactggagtatatgtcaatgaatctatatcaactaa

SEQ ID NO: 140267 - DNA, 238 bp, Glycine max
gatcagggtcgcaaggttgacgagtatggcaacgttgagaagcaaaccgacgaatacggcaaccctgttcatgctgctagtgtcacctatgtagccaccagaactgctgctggtggttacagtgatgacattaataagcaacatgataccaccaatgcctacggcgtagacactggtagacagcattctagtggtggctacgatggtgacactaataaacatcatggaattactggtg

SEQ ID NO: 140268 - DNA, 239 bp, Glycine max; identical to SEQ ID NO: 140238

SEQ ID NO: 140269 - DNA, 242 bp, Glycine max
gctgtggagaagggtcatggtgacttaaaagaaaagccttggtggcctaaaatgcagacaactgaagatctcattcaatcatgctctattatcgtttggacagcttcggctctccatgctgctgttaattttggacaatatccttatgggggcttaatcctgaaccgtccaactctagccagaaggtttatcccagctgaaggaaccccagagtatgatgagatggtgaagaatcctcaaaa

SEQ ID NO: 140270 - DNA, 237 bp, Glycine max
gcgaagagaaaactgcacaggcaaaggagaacaccaaggaaaatgtgagtggtgcaggtgaaactgcaaggaggaaaatggaagagccaaagcttcaaggtaaagaagggtatgggggccgtggagacaaggtggtggtgaaagtggaagagagtcgaccaggggcaattgcggaaacgctgaaagccgccgaccagattgcgggacagaccttcaacgatgtaggacgcttcgatg

SEQ ID NO: 140271 - DNA, 227 bp, Glycine max
  unsure (1)..(227): unsure at all n locations
ctggtaaagagggacaagaagccgcagagtcatggacagaatgggctaaagagaaactcagtgaaggtcttggcttcaaacatgatcaggaatcgaaagaatccaccactaacaaagaagatgattatgncactgacactgcagagaaatccaaggattatgcaactgacactgctcagaaatcaaaggactatggcaggtgatgctgctcagaaatcaaaggacta

SEQ ID NO: 140272 - DNA, 234 bp, Glycine max
tccgaattagggttttccaattcgcagagcaactcaacacaacgaaccaaaccaacaatgtcgcagccgcagcctcagtcgcagccgcaacacgggcaagcggcgctggagcaggtgcagtgcttcggtcgcaagaagacggcggtggccgtgacctactgcaagcgcgggcgcggcctcatcaagatcaacggctgccccatcgagctcgtcgagccggagatcctccgcttt

SEQ ID NO: 140273 - DNA, 235 bp, Glycine max
  unsure (1)..(235): unsure at all n locations
gatggattgcatatggtgtccgaaagttactcttctagacagccaaggccattgaccaccgttggctggcagaacaataatagaaatggaaggtcaagaatacctagtgacagatatcggtcattggatgatgagggtttcatgattgttgatcgcacttcactgtatngacctaggaatatgcttgatcgacatagagacatgaggatggacatagacaacatgagttatgagg

SEQ ID NO: 140274 - DNA, 234 bp, Glycine max
ttttataatcactagtacataccaagaaattgcaggaagcaagaataatgttggacaatatgagagctacactgccttcactcttccaggactgtatcgtgttgttcatggcattgatgtttttgatcccaagtttaatatcgtgtctcctggtgcggacatgtgcatatattttccatactcggacagagaaaggagactaacttctctacatggttcaattgaaaaactggt

SEQ ID NO: 140275 - DNA, 242 bp, Glycine max
gctgctgctgcgttagagggggtgagagacataacccaggcttctcacctcataggagatatgactggctcaaccattgatgacccgttatcagagacatacaagaaattgggttgctcaatttctgccttggacaaaagttcagatgattacgagatgattgtgaaataccttgaaaaaacttatgagccggtcaaagttggtgacattgaatatggggtgtcagtggaaaacatttttgc

SEQ ID NO: 140276 - DNA, 246 bp, Glycine max
ggcggcagtaactctaactgtcctaaggtagcgaaattccttgtcgcataagtagcgacctgcacgaatggtgtaacgactgccccgctgtctccgacatggacccggtgaaattgaattctccgtgaagatgcggagtaccaacggctagacggtaagaccccgtgcaccttaactatagcttcgcagtgacaaccttgatcgaatgtgtaggataggtgggaggtgatgacacagaacgaccaa

SEQ ID NO: 140277 - DNA, 252 bp, Glycine max
aaaacagtaaagctaacttcaacacctttaattttctaaaagtaattcagcggctgaataccaagcggagaagatgagtcaggagcagccacggcgtcccaaaggccaaaaccccatcaaatacggcgacgtttttgtcgtctccggcgaccttgcacagaagcccgtcgcaccggaagatgctgccatgatgcaaagcgcggaagctcgagtgctcggacaaacccaacccggcggacagcttccgtcatg

SEQ ID NO: 140278 - DNA, 248 bp, Glycine max
cctgttcctgtgtgtgtgagtgaccgagtgagtttgtttttctcagctgatatatatggcgcttgatcgctccattataagcaaaacgacgtggtacagcgtcgtattatggatgatggtggtgctggtgagagtgcacggtgcagccgcgaggccgaaccggaaggagtgggactcagtcataaagttaccgactgaaccggtggatgctgactcggatgaagtgggaacacgatgggcggttctcg

SEQ ID NO: 140279 - DNA, 241 bp, Glycine max
tatggtaggtcatcctcagcgccaagacatattcataggactccggtagctgttcaggccctcccagttcaatctcaggcattgggaccacaggaaaattcaataactaatttgaatagttccttgctacctagcaattcctctgctgctcctcatatttctttgtccaaccctgcctctgtagatactttgaatgccatactaagtgatacggaaagacaacaacatttttctcgaactc

SEQ ID NO: 140280 - DNA, 242 bp, Glycine max
cacaaaacaaaaagtttacgttacaaatcgcataataaccgtcctaagtttattgagagaattttgcaagtgtgagaaacatggcatctcgtcaaaacaacaagcaagagcttgatgaaagagcaaggcaaggagagactgttgtcccgggtggaactggtggcaagagcctggaggctcagcaacaccttgctgaaggaaggagcaagggagggcaaacaaggaaggaacagctgggtaca

SEQ ID NO: 140281 - DNA, 251 bp, Glycine max
cgcccgctcgaggctgcttgtgggatccccctgtgggttgcaccgccgaccgaccctgatcttctgtgcagggttcgagtgagagcatacctgtcgggacccgaaagatggtgaactatgcctgagcggggcgaaccagaggaacctctggtggcggcccggcgcgatactgacgtgcaaatcgttcgtctgacttgggtataggggcgaaagactaatcgaaccgtctagtagctggttccctccgaagt

SEQ ID NO: 140282 - DNA, 239 bp, Glycine max
ctttctttctcccctacacaaaacatggctttgcccaatcagcaaaccgtcgattaccccagcttcaagcttgtcatcgtcggcgacggtggcacaggaaagacaaccttcgtgaagaggcatctcactggtgaattcgagaagaaatatgaaccgaccattggtgtggaggttcatccgttggattttttcacgaactgtggaaagattcgcttctattgttgggatactgctgggca

SEQ ID NO: 140283 - DNA, 242 bp, Glycine max
atcacacacaactactacaagtacttccttacaatcaaaaccaacaacaactatggcaagttatcaaaagcactacgatgatcagggtcgcaaggttgacgagtatggcaacgttgagaagcaaaccgacgaatacggcaaccctgttcatgctgctagtgtcacctatgtagccaccagaactgctgctggtggttacagtgatgacattaataagcaacatgataccaccaatgcctacg

SEQ ID NO: 140284 - DNA, 242 bp, Glycine max
tgggacgcttcgcttgaccaccaggcagacgtttcagctccatggtgttctcaagaaggaccttaaaacagtcatgggtaccattattaggaacatgggctcgactcttggtgcttgtggcgacctaaacaggaatgtgcttgctcctgcagctccccttgcaagaaaagattacctctttgctcaacaaactgctgagaacattgctgcgctcctcgctcctcagtctggtttctactatg

SEQ ID NO: 140285 - DNA, 235 bp, Glycine max
cagatgggcttgccttctttctcgcaccaattgacactaagccacaaacacatgcaggttatcttggtcttttcaacgaaaacgagtctggtgatcaagtcgtcgctgttgagtttgacactttccggaactcttgggatccaccaaatccacacatcggaattaacgtcaattctatcagatccatcaaaacgacgtcttgggatttggccaacaataaagtagccaaggttct

SEQ ID NO: 140286 - DNA, 250 bp, Glycine max
gtactttcttgcgaaacagaagggcgaaggggcaaacacaacttttttgtttttttgtagagcgagagagaaaaaaatgttggggatcttcagcagttccgtggtgtcgccgccggaggagctggtggctgccggcagcagaacgccgtcgccgaagacgacggcggggaagctgctgaaccggttcgtggagaacaaggcgtcggcggtgtcgctgcaggtgggagaacacgtgcagttggcttacacg

SEQ ID NO: 140287 - DNA, 238 bp, Glycine max
caatatcctagtacaccgtattaaagaatttaagatatactatgatgagagcgcggttcccattactgttgctgggagttgttttcctggcatcagtttctgtctcatttggcattgcgtattgggataagcagaaccccagtcacaacaagtgcctccgaagttgcaatagcgagaaagactcctacaggaaccagcttgccaggttggtggaatcttcttaaaggggaggaagaag

SEQ ID NO: 140288 - DNA, 240 bp, Glycine max
cacctttgttcactcttcttctcttgcggctagggttttagcgcacatcttctagatttaaggaagatgggtaaggaaaaggttcacatcagtattgtggtcattggccatgtcgactctgggaaatccactaccactggtcacctgatttacaagcttggaggcattgacaagcgtgttattgagaggtttgagaaggaagctgctgagatgaacaagaggtctttcaagtatgcctgg

SEQ ID NO: 140289 - DNA, 239 bp, Glycine max
atgcttgtctcaaagattaagccatgcatgtgtaagtatgaactaattcagactgtgaaactgcgaatggctcattaaatcagttatagtttgtttgatggtatctactactcggataaccgtagtaattctagagctaatacgtgcaacaaaccccgacttctggaagggatgcatttattagataaaaggtcaacacaggctctgcctgttgctttgatgattcatgataactcgtc

SEQ ID NO: 140290 - DNA, 237 bp, Glycine max
gaaaacccttccttccagttccagcagctcccactaaaaatgttcggagagtggttcagtgcggtgtgtggtgacggaagaaggagatacacccgcaattccacgaggaagcgaaggtgtactgcaacggggagctggtgctgacgacaggtgggacccagaaggagtacgtggtcgacgtgtggtcggggaacaccctttctacctcggaagccggtcggcgtctatggtcagcga

SEQ ID NO: 140291 - DNA, 239 bp, Glycine max
ggaaaaggggtgctttggattgggagtaatcactagtgatagggcaaaaatagggaggaaggacaaaggaaagagcgatgcctacattaaatcaattgattcgtcatggtagagaagaaaaacggcgcacggaccgtactcgagctttggatcaatgtccccagaagcaaggagtatgcctgcgtgtttcaacgagaacaccgaaaaaaccaaattcagctctacgtaagatagccaaa

SEQ ID NO: 140292 - DNA, 238 bp, Glycine max
ccaccacacaattcctacactattctactctatagtttctccaattttctttctcaattctcaacaatggccactacaacacaacttcacttaccccctggattcagattccatccaacagatgaagacactcgtcatccactacctttgtcgcaaatgcgcttcgcaacatatcgcggttcccataatcgccgaaattgatctgtacaagtacgacccttgggaccttccaggaatg

SEQ ID NO: 140293 - DNA, 238 bp, Glycine max
gaggaagagcacgagcagaaggaggatcacgaatggcatcgcaaggaggaaaaacacggaggaaagggaagtgaagaggaacaagatgaacgtgaacacccacgcccacacgacacacaatagaaaaaagtggaaaagcacgaatggcaacacaagcaggaatggcaccaaggacaggtaagtgaagaggatgtagaagacctagacgaggatgaggagcaagacagtgtgagccaag

SEQ ID NO: 140294 - DNA, 247 bp, Glycine max
gagcaaagcaagcagcaagcgagacactgaacaccacaacacaaaccgcagaagagaaaagcggacacgcaaagaatcttgcagcacaagcaaaggacgcaacgttagagaagggtcagcaaggctatgctgtgacaaaggacaccatttcaagtgcagcgaaaaccgcttcggagaaaactgcgccagtggcagagaaggccaaagactacactcttcaggctgcggagaaggccaagagtgcggg

SEQ ID NO: 140295 - DNA, 247 bp, Glycine max
ggcttatggtggatacctaggcacccagagacgaggaagggcgtagtaagcgacgaaatgcttcggggagttgaaaataagcgtagatccggggattcccgatataggtcaacctttcgaactgctgctgaatccacgggcaggcaagagacaacctggtgaactgaaacatcttagtagccagaggaaaagaaagcaaaagcgattcccgtagtagcggcgagcgaaatgggagcagcctaaaccg

SEQ ID NO: 140296 - DNA, 243 bp, Glycine max
cacccagagacgaggaagggcgtagtaagcgacgaaatgcttcggggagttgaaaataagcgtagatccggggattcccgatataggtcaacctttcgaactgctgctgaatccacgggcaggcaagagacaacctggtgaactgaaacatcttagtagccagaggaaaagaaagcaaaagcgattcccgtagtagcggcgagcgaaatgggagcagcctaaaccgtgaaaacggggttgtgg

SEQ ID NO: 140297 - DNA, 237 bp, Glycine max
cttactctagactcttccttttctcttctctgtctaaggggtgccctgagatcacattgaacaatggtgaaggctgtggccgttcttggcagcagtgagggtgtcactggaactattcacttcgttcaggagggaagtggtccaaccaccgtaactggatctcttgctggtcttaagcctggtctccatggtttccatgtccatgccttgggggacactaccaatggttgcctctca

SEQ ID NO: 140298 - DNA, 237 bp, Glycine max
ctcgtaaatgtgttacgagaattgtatttgcacagtccagaggaagctcgccaattgagaaggaaagctctctctcgtattgaatggctgcagaaagctgatgtgcctaccatagcacagattgaagagttccattcgatgcagaggataatgaatgctcctgattcaaatgataatattgatctactgttgagcattgatttgttgggtttacaaggagcaggtaaggcttttcca

SEQ ID NO: 140299 - DNA, 237 bp, Glycine max
  unsure (1)..(237): unsure at all n locations
gattggcattaggttgatctgaaatacgcaattgacatggcgagcgcgatggtanaggacgcgaacttcgaagatgaccaactagccaatatgaccaccgacgacatcgtcagagcttctcgtcttctcgacaacgagattcgcatcctcaaggaagagttgcagaggaccaatttggaattggaatcgtacaaggacaagatcaaggagaatcaggagaagattaagctcaataag

SEQ ID NO: 140300 - DNA, 235 bp, Glycine max
cctttccactcattctcttcttgagcacactgatgtggttgtgcttttggacaacgaagctatatatgatatctgcagaagatcattagatatagaaaggccaacttacactaacttgaaccgtctgatatctcaaattatctcttccttgaccacttccctgagatttgatggcgcgattaatgtggacattaccgagttccagactaatctcgtgccatatcctcgtattcac

SEQ ID NO: 140301 - DNA, 237 bp, Glycine max
gtgatgttgggaagttcgaaatgagaactgaagggggagaaaaaggaaacaaggatagaccagaactgaaaacacgaaccagagaggtaataggaagaacggagaaagaaagaggaagagaaagtggaggacaagtagtggcagagaaaggaagagaaacagaaactgcaaggggaagggttggtgctgaaaatgaaggtgcaagaacaaccgctgttataacttgcacgttggaaa

SEQ ID NO: 140302 - DNA, 239 bp, Glycine max
caaaacagtaaagctaacttcaacacctttaattttctaaaagtaattcagcggctgaataccaagcggagaagatgagtcaggagcagccacggcgtcccaaaggccaaaaccccatcaaatacggcgtcgtttttgtcgtctccggcgaccttgcacagaagcccgtcgcaccggaagatgctgccatgatgcaaagcgcggaagctcgagtgctcggacaaacccaacccggcgga

SEQ ID NO: 140303 - DNA, 243 bp, Glycine max
tagagcagttgtagagcttgtctggcttttgggatgtgctcccatcctaccttccagctgtctacctcattagctcaaggctaacatcgctaaacttgatttatgctattattcaaagctctgatcttattaagcttatcagtcaatgcccaaatttgttcgcgattatgggtgctggattacatagaagatgctggtctttatgcccttgctgcatcatgtaaggatctaagagagttaagg

SEQ ID NO: 140304 - DNA, 242 bp, Glycine max
aacaaaaagtttacgttacaaatcgcataataaccgtcctaagtttattgagagaattttgcaagtgtgagaaacatggcatctcgtcaaaacaacaagcaagagcttgatgaaagagcaaggcaaggagagactgttgtcccgggtggaactggtggcaagagcctggaggctcagcaacaccttgctgaaggaaggagcaagggagggcaaacaaggaaggaacagctgggtacagaagg

SEQ ID NO: 140305 - DNA, 240 bp, Glycine max
aaaacttatgtgatggaaataaagggaaatcgtgtttacagtaaattgaaatatgaatctggggtccaccgagttcaacgggttcccctaacagaaactcagggccgggtacatacttctactgcaacagtggccatcatgccagaggctgatgaagttgaagtcgtaattgacccaaaagatattgaactgacaacggcacgttctgggggtgctggaggccagaatgttaacaaggtt

SEQ ID NO: 140306 - DNA, 236 bp, Glycine max
aggagattgaagacaggggacttgtacatgattccatctggttcagcattctatttggtgaacataggagaaggtcagagacttcacgttatctgcagcattgacccctctacaagcttgggattagagaccttccagtccttctatattgggggaggagccaattcgcactcggtgctttctggattcgaacctgccatccttgaaactgcatttaatgaatcaagaacggtggt

SEQ ID NO: 140307 - DNA, 236 bp, Glycine max
agtgtggaagtattcgcagaactttgtttcccaatttccattgcctccgcttccacctcgcaaccatgatcatcccggagaagaaccgcaaggagatctgcaaatacctcttccaagagggagtttgcttcgcgaagaaggacttcaatttggccaagcaccctgagatcgacgtgccgaatctgcaggtgattaagctgatgcagagtttcaagtctcgcgagtacgtgagagaa

SEQ ID NO: 140308 - DNA, 230 bp, Glycine max
  unsure (1)..(230): unsure at all n locations
gttcccaaaagcttgtttgggagaatggcttccggtgaacagaaattccctcctcaacaccaacgaacgcagcgtnngaaggagcatgctatgactccagtaccccaattcactagccctgactacaagccttcaaataaacttcaagggaagattgcattagtcactgggggtgattctgggattggacgagcggtgtgtaacttgtttgccttagaaggtgctaccgt

SEQ ID NO: 140309 - DNA, 235 bp, Glycine max
cacaactactacaagtacttccttacaatcaaaaccaacaacaactatggcaagttatcaaaagcactacgatgatcagggtcgcaaggttgacgagtatggcaacgttgagaagcaaagagattgtggaatttgtgatcacacaacataagcatatatatagaaagatgtcaggggcacaaggagcacaaccaaaggagtcaaaaacagcaacaacatatgagtcagtagaagg

SEQ ID NO: 140310 - DNA, 233 bp, Glycine max
cttggatttgccccataccttcctccagttgaggagggtgcaaattctgcattgaagagagcatttgaggccttgaacactcatcttgcttccaatacatacctggttggccattctgttacccttgctgatatcataacgacatgcaacttgtatttaggattcagccagctcttagttaagagcttcacctccgagttccctcacgtcgagagatacttttggacattggt

SEQ ID NO: 140311 - DNA, 233 bp, Glycine max
ctgcttcactacatctatgttggctggacccagattccccaggaacaactcggttctttgagggatttaagtctacagtttgaagtgacaccactggtgaagcagtgtgaagagactatggaacggtttaagctagataagaagttgtttgacacgggcaagaatgtggagttaacatatgcctctatccgacctcattgttcaactttgccctcacttcctgtcagcactca

SEQ ID NO: 140312 - DNA, 237 bp, Glycine max
gtttcatcttttaaaggcgcttccgttaaggttgagccagacaccttgagttttaccagaaaataccagaaattatcttacaaagttaccttcacaacacaatctcgccaaacagaagctgaatttggaggtctggtgtggaaggatggtgtgcagaaggtgaggagtgcaattgttataacgtatctgccaccaatatgaaaacttcacttgggactacgtataacttaagcagta

SEQ ID NO: 140313 - DNA, 241 bp, Glycine max
  unsure (1)..(241): unsure at all n locations
tanaaaacattgcccttgttctttcaaagttaccaaacacaagtacacaacacaacagcaatctatggcgtctgaacaattggctcgcagagagaacaccaccaccgagacggagattcacgttgagaaacacagggttcccaagatggccacccacttcgagcaccctgcggagcagctaaagaatctgacatcaccgctgggaaggatacttccgcaggtagcatagaagccttgcaag

SEQ ID NO: 140314 - DNA, 227 bp, Glycine max
ctcgatattattttttctgacagagccaccgacagagaatggccgacaagtacaacccgaagaaccccgccgtgaagcggatcctccaggaggttaaggagatgcagtccaacccttccgacgatttcacgagcctccctctcgaggaaaatatatttgagtggcaatttgcgattagaagggctcgtgatacggaatttgaaggtgggaattaatcatggaaggat

SEQ ID NO: 140315 - DNA, 241 bp, Glycine max
aaatgaaatagaaatgcttggaacagtgggccctcctgtaccaaatgtggatgtttgcctggaatctgttcctgaaatgggatacgatgccctagcaagtacaccaagaggagaaatttgtgtaaagggaaaaaccttgtttgcagggtactacaaacgtgaagacctcactaaagaggttctgattgatgaatggttccatacaggggatattggagagtggcaacctaatggaagcatg

SEQ ID NO: 140316 - DNA, 236 bp, Glycine max
ttgacattcaacccgatgacgcggctgcagcgagggaagtgagagacaaatcagcctcaaagtcaccaggtatctacaattctgccactgctgacaacaaaaccggttccaaggtcggagagtacgcagattatggttctcagaaggcgaaagaaacaaaagatgcaacgaaggaaaaagctggagagtacacagattatgcttcgcagaaggcgaaggaaacgaaggacaagaca

SEQ ID NO: 140317 - DNA, 232 bp, Glycine max
gttcttcatagttcagtgtgtcgtttaaaaatgtcgcagttgctggataaagccaagaacttcgtgtcggagaaggtaaatgatatggccaagccggaggcgagtgtcactgacgtggacttcaagcgcgtgagcaaagataatgtcgagtacttggccaaggtctctgttcgtaacccttattcaacttccatacccatttgtgagatcaactactctttcaaaagcgcat

SEQ ID NO: 140318 - DNA, 237 bp, Glycine max
ctcgagccgattcggctcgagaaggaaatggctgaagcacaactaccgagaccagcatggcacaccctgtcccactcaccgatcaatacggtaatccggttatcttaactgacgagcgcggtaatcccgtccaactcactggtgtcgctaccaccgctaccggcacagcaggttctgggtttgggtcctatggtaccggtgcttacggtggtggtgcaagtgcaaccaccgttgcag

SEQ ID NO: 140319 - DNA, 235 bp, Glycine max
tccatatctgttcccaaaagcttgtttgtaagaatggcttccggtgaacagaaattccctcctcaacaacaacaaacccagcctgggaaggagcatgctatgactccagtaccccaattcactagccctgactacaagccttcaaataaacttcaagggaagattgcattagtcactgggggtgattctgggattggacgagcggtgtgtaacttgtttgccttagaaggtgcta

SEQ ID NO: 140320 - DNA, 241 bp, Glycine max
acaaaattgaactgtaattgtagtagtagacagtagcaccatgagccaggaacagctcaagaaacctcaaggggagcaggaccccatcaaatacggcgacgttttcaaagtctccgacgaactcgctttcaaacccatcgcgccaagagacgcagctctcatgcaagccacggagaaccaagcattgggccaaactcaaaaaggaggtcccgcctcggtgatgcaatccgccgcaaccgaa

SEQ ID NO: 140321 - DNA, 244 bp, Glycine max
  unsure (1)..(244): unsure at all n locations
gtccgttacacgcctgagcaggttgaagccctagaaaggctctannaggantgnaccanacctgnntccattcggncgccagcagntcagtcgcgagtggcccattctctcnaacatcgaacngccagcaaatcaaggtttggttccagaacagaagatgtagagagaagcagagnaaggagtcgtcgcggctccaagctgtcaataggaagctgnctgctatgaacaagctgctgatggaaga

SEQ ID NO: 140322 - DNA, 240 bp, Glycine max
cttcacaagattctcacaaacaactcttgagaaagaaagaatggctgccaacacattgatgagttctgccatctcagccttcccatctctcctttcctcctcaaaatccagatttgccgcagcagttcctctttccagctttgttgtcaccaatgcctcttcttctcgcttttccatgagtgctgactggatgcctggccagcctagacccccctaccttgatggttcagcacctggtga

SEQ ID NO: 140323 - DNA, 235 bp, Glycine max
aagaaagaacttccttataaccaaaaccaacaacaactatggcaagttatcagaagcactacgatgatcagggtcgcaaggtcgacgagtatggcaatgttgagaggcaaactgacgaatatggcaacccggttcatgccactagtgtcacttatgtagccactaaaagtgttggtggctacaatgatgacactaataagcaacatgataccaccggtgtctatcctgagaaaga

SEQ ID NO: 140324 - DNA, 233 bp, Glycine max
gaaaagaagaacaaagatgcaatcctcaaaggagaagatgaaaaacatggcaagtgctgccaaggaacaagtcgacatctataaagccaaaatagacgagaaggcagagaaagcaacggcaagaacagaagaggagagggtgatagcccatgagcacgcaaaggcaaaggaagctggagcaaagatggagctgcatgaagctaaagcaaggcatgcagcagagaagctaagcg

SEQ ID NO: 140325 - DNA, 231 bp, Glycine max
aacctctcaagtccaacctacccctttttcttctcccaccaacttcaccgtcttcttcctcgatcatgtctcacttcaagggcaagtaccatgatgagcttattgccaatgctgcttacattggcactcctggaaagggtattcttgctgctgatgagtcaacagggacaattggcaagcgtttggccagcatcagtgtagagaatgttgaatccaacaggcgtgctctta

SEQ ID NO: 140326 - DNA, 228 bp, Glycine max
  unsure (1)..(228): unsure at all n locations
atttcgtttgttgttcaatctaacaaacttctctatatcgtttactttttccacacaacttactaaactancaancngtgnnnnncanatanatatcatggattcgagggngttttcggttttggtgatagcgctgatgttgtttgccatgaactgtaactgcactagtgttggccacatgccttcaaccagagaggcaggtcacgattttcaggtggctaaagccaa

SEQ ID NO: 140327 - DNA, 230 bp, Glycine max
gcatttattagataaaaggtcaacacaggctctgcctgttgctttgatgattcatgataactcgtcggatcgcacggcctttgtgccggcgacgcatcattcaaatttctgccctatcaactttcgatggtaggatagtggcctaccatggtggtgacgggtgacggagaattagggttcgattccggagagggagcctgagaaacggctaccacatccaaggaaggcag

SEQ ID NO: 140328 - DNA, 228 bp, Glycine max
cacgtccaccaagggggcaattgtggcctatacaaggggtcttgcccttcagctggtgagtaagggaattcgggttaatggggtggctccagggcccatttggacccctttgataccagcctctttcaaggaggaagaaacggcccaatttggagcgcaggtcccaatgaagagagctggtcaacctattgaggttgctccttcctatgtttttcttgcttccaacca

SEQ ID NO: 140329 - DNA, 229 bp, Glycine max
gagaaaagttagggttcacaacttttccttttccttttgcttgcgaatctgaatcaaataatcaatcatccattcattattcatcatgtcgtcggcgaagaaaatcacgctgaagagttcggacggcgaggctttcgaggtggaggaggcggtggcgctggagtcgcagacgataaagcacatgatcgaggacgactgtgccgacagcggcatccctctgccgaacgtg

SEQ ID NO: 140330 - DNA, 233 bp, Glycine max
cccagagatcatcaattcaggggggtgaacttttttcaggggtgtgttggaaagtatgcaatctgtttacttgaacagaaatcgtactgctaaggccatattggaccttgttcactctgctgagaataactcattatgctatgatcatcttgcattcaggacatttggggtgaatggttatggaattgattccatggctagtttttttctggattatggctatacacaaaggg

SEQ ID NO: 140331 - DNA, 236 bp, Glycine max
ctcacctgttgttcgtgttgctgttcaatgtaaggttgcatcagatcttcccaagcttgttgaaggtcttaagcggttggccaagtcagatcctatggttgtttgtaccattgaggagtctggtgaacacattgttgctggtgcaggagagcttcatcttgagatctgtttgaaggacttgcaggatgatttcatgggtggagctgagatcattaaatctgaccctgttgtgtcat

SEQ ID NO: 140332 - DNA, 255 bp, Glycine max
actatgatgagagtgcggtttcctttgttggtgttgctgggaactgttttcctggcatcagtttgtgtctcattaaaggtgagagaggatgagaataaccctttctacttgagaagctctaacagcttccaaactctctttgagaaccaaaacggtcgcattcgtctcctccagagattcaacaaacgctccccacaacttgagaaccctcgagactaccggattgtccagtttcagtcaaaacccaacacaatc

SEQ ID NO: 140333 - DNA, 250 bp, Glycine max
ggctgacggcaacgttagggcgtccggagacgtcggcgggggccccggaaagagttatcttttctgtttaacagcctgcccaccctggaaacggctcagcggaggtagggtccagcggctggaagagcaccgcacgtcgcgtggtgtccggtgcgcccccggcggcccttgaaaatccggaggaccgagtgcctcccacgcccggtcgtactcataaccgcatcaggtctccaaggtgaacagcctctgg

SEQ ID NO: 140334 - DNA, 249 bp, Glycine max
ttcgcaaatctcaatcgaatctcagaaaaatgagagaaatcatcagcattcacctaggtcaggccgggatccaggtcggaaactcctgctgggaactctactgcctcgaacatggcatccagcccgacggcatgatgccttctgactccaccttcggtgtagcccacgacgccttcaacaccttcttcagcgaaaccggatctggcaagcacgtcccccgtgctgtcttcgtcgacctcgaacccaccg

SEQ ID NO: 140335 - DNA, 251 bp, Glycine max
agagaatccgaggcgaagagaagagaaaaattaagatggaggggaaggagcaggatgtgtcgctgggagcgaacaagttcccggagagacagccgattgggacggcggcgcagagccaagacgacggcaaggactaccaggagccggcgccggcgccactggttgacccgacggagtttacgtcatggtccttttacagagcagggatagcagagtttgtggccacttttctgtttctatacatcactgtc

SEQ ID NO: 140336 - DNA, 250 bp, Glycine max
taacaacacaggcgcagacgcaaacgcaaacgcagaggtgatccattgacgaagatggtgcagcgtctcacctaccgcaagcggcacagctatgccaccaagtccaaccaacacagggtcgtcaaaacccctggtgggaagctcgtttatcagactaccaagaagagggccagcggacccaagtgccccgtcactggcaagaggattcaggggattccacacttgaggcctgcagagtacaagaggtcaa

SEQ ID NO: 140337 - DNA, 251 bp, Glycine max
tcttctttctctacgccgcacgccgaaaccatggccggaaaaggagagggtcctgctatcggaatcgatctcggaaccacctactcttgcgtcggtgtgtggcaacatgaccgcgttgaaatcatcgccaacgaccaagggaacagaaccacgccgtcttacgtcggattcactgacaccgagcgtctcatcggtgatgcggccaagaatcaagtcgccatgaaccccatcaacaccgtcttcgatgccaa

SEQ ID NO: 140338 - DNA, 252 bp, Glycine max
gagagagtgagtaatcgagaaagagaagaagcatatatatcaaaatggctgcagagatggagagggagtcattgataactgaagctcctaatgcaccagttactgcacagagaagggtcagaaatgacttagaaaattctctaccaaaaccatacttgccaagagcattgaaagctcctgatacgggtcacccaaatggaacagcaggccacaggcaccacaacttatctgttcttcagcagcattgtgctt

SEQ ID NO: 140339 - DNA, 251 bp, Glycine max
gtcagcaaaggcgttgaatcaacattggtccagcttcttgaaacaggcttattacatgctgatccacatcctggtaactttcgttacacttcctcaggacaaatagggtttctggattttggtttgctctgtcaaatggaaaaaaggcatcagtttgctatgctggcttcaataattcatatagtaaatggtgactgggcatcccttgtccgtgctctggttgatatggatgttgtgaggccagggacaaa

SEQ ID NO: 140340 - DNA, 135 bp, Glycine max
gcggtttcctttgttggtgttgctgggaactgttttcctggcatcagtttgtgtctcattaaaggtgagagaggatgagaataaccctttctactttagaagctctaacagcttccaaactctctttgagaacca

SEQ ID NO: 140341 - DNA, 264 bp, Glycine max
cgaaaacccgcatccatgatacatctcctggtacactcaccgcctctgtctgcgcctctgatgttgacctcatcacacaagtagcaggtgctgaatggcttggagatacaattgtttatgcttacagatcaggtgaggtgattcggctaccaaaaggggtttcaattccagtgacactaaaagttctggagtttgagcttttccacttctgtccaatccaagacaggaaatagctccaagtatatcatttgcagcaatagggct

SEQ ID NO: 140342 - DNA, 248 bp, Glycine max
cacacacacagctagcagatattacatacacgtgaatcactaattaagccatggagaagaaatcaatagctgggttgtgcttcctcttccttgttctctttgttgctcaagaagttgtggtgcaaactgaggcaaagacttgcgagaacctggctgatacatacaggggtccatgcttcaccactggcagctgcgatgatcactgcaagaacaaagagcacttgctcagaggcagatgcagggacgat

SEQ ID NO: 140343 - DNA, 250 bp, Glycine max
ttaagagtgaagagtgaagagtgagagagagagagagagaggcacttggaatccaaaaatgagagaaatcatcagcattcacataggtcaggccgggatccaggttggcaactcctgctgggaactctactgcctggaacatggcatccagcccgatggcatgatgccaagtgactcctccttcggtgtagcccacgacgccttcaacaccttcttcagcgaaaccggatccggcaagcacgtccctcgc

SEQ ID NO: 140344 - DNA, 247 bp, Glycine max
gagagattgtgaagtaagtagaaatcggtgcaagaaattctccgctttatctacaaaatttaagtgagtttgtgaagacaaaaaatcactagctactaaaaaatggccacagttggaaggaacgcagcagctccattgctgtttcttaacttgatcatgtattttattgttcttggctttgctagttggtgcctcaacaagttcatcaatggccaaacttaccaccctagctttggtggaaatggtg

SEQ ID NO: 140345 - DNA, 249 bp, Glycine max
taacttcaacacctttaattttataaaagtaattcagcggctgaataccaagcggagaagatgagtcaggagcagccacggcgtcccaaaggccaaaaccccatcaaatacggcgacgtttttgtcgtctccggcgaccttgcacagaagcccgtcgcaccggaagatgctgccatgatgcaaagcgcggaagctcgagtgctcggacaaacccaacccggcggacagcttccgtcatgcaatctgccg

SEQ ID NO: 140346 - DNA, 250 bp, Glycine max
aggcggggctaccgctgagtttaagcatatcaataagcggaggaaaagaaactaacaaggattcccttagtaacggcgagcgaaccgggaaaagcccaccatgaaaatcggtcgccctcggcgtccgaattgtagtctggagaagcgtcctcagtggcggaccgggcccaagtcccctggaagggggcgccagagagggtgagagccccgtcgtgcccggaccctgtcgcaccacgaggcgctgtcggcg

SEQ ID NO: 140347 - DNA, 261 bp, Glycine max
cacaactatggcaagttatcaaaagcactacgatgatcagggtcgcaaggttgacgagtatggcaacgttgagaagcaaaccgacgaatacggcaaccctgttcatgctgctagtgtcacctatgtagccaccagaactgctgctggtggttacagtgatgacattaataagcaacatgataccaccaatgcctacggcgtagacactggtagacagcattctagtggtggctacgatggtgacactaataaacatcatgg

SEQ ID NO: 140348 - DNA, 261 bp, Glycine max
ccaaaacagtaaagctaacttcaacacctttaattttctaaaagtaattcagcggctgaataccaagcggagaagatgagtcaggagcagccacggcgtcccaaaggccaaaaccccatcaaatacggcgacgtttttgtcgtctccggcgaccttgcacagaagcccgtcgcaccggaagatgctgccatgatgcaaagcgcggaagctcgagtgctcggacaaacccaacccggcggacagcttccgtcatgcaatctg

SEQ ID NO: 140349 - DNA, 251 bp, Glycine max
gatctgactaccttggaaagggtgtatcaaaggctgttgacaatgtgaacaccgtcattggccctgctttgattggcaaggacccaactgagcagactgctattgacaacttaatggttcaacagcttgatggaactgttaacgaatggggttggtgcaagcaaaagctaggagcaaatgccatattggcagtgtctcttgcagtctgcaaagctggtgctagcgtcctgaaaattcctctttacaagcat

SEQ ID NO: 140350 - DNA, 249 bp, Glycine max
cacaccaggcgcacgttagcacaaactatcatggccacggcaacagcagctgccacctcgtcctttatggggacgcgtctcctggaggctcactccggggcggggcgagtgcacgcccgattcggcttcggcaagaaaaaggctcccgccccaaagaaagcctccaggggatcgggccgagacaccgacagacccctttggtatccgggcgccaaagcgcccgaatacctcgatgggagtcttgtcgga

SEQ ID NO: 140351 - DNA, 245 bp, Glycine max
gtgaatagaaagaaagcctcgtctagtaaacccagtttttacaaagttcacataacaaaataaatcaccaaccatgtctatcatcccaaacttgttcggtggtcgacgaagcaacgtcttcgacccagtttctctggacgtgtgggacccattggaagggtttccgttttccacagccaacgctggcgaaagtagtgccatagccaacactcgcgtggactggaaggagacaccgcagctcacgt

SEQ ID NO: 140352 - DNA, 247 bp, Glycine max
cacacacaactactacaagtacttccttacaatcaaaaccaacaacaactatggcaagttatcaaaagcactacgatgatcagggtcgcaaggttgacgagtatggcaacgttgagaagcaaaccgacgaatacggcaaccctgttcatgctgctagtgtcacctatgtagccaccagaactgctgctggtggttacagtgatgacattaataagcaacatgataccaccaatgcctacggcgtaga

SEQ ID NO: 140353 - DNA, 245 bp, Glycine max
tgatgcccttagatgttctgggccgcacgcgcgctacactgatgtattcaacgagtctatagccttggccgacaggtccgggtaatctttgaaatttcatcgtgatggggatagatcattgcaattgttggtcttcaacgaggaattcctagtaagcgcgagtcatcagctcgcgttgactacgtccctgccctttgtacacaccgcccgtcgctcctaccgattgaatggtccggtgaagtgtt

SEQ ID NO: 140354 - DNA, 248 bp, Glycine max
caatcacgaaactcaagaagttggagaaagcgatcaacagacagaagattttgcttcatcatctcaacccttcatcatccacccaccccaacgaatcatcctccctccatgcttcagcatgtgtggcgggggatagcgctgcttatcaaaggacatcgacattcggggacgatgttgtgatcgtggctgcttatcggactgctcattgcaaagctaaacgaggtggtttcaaagacactcttcctgat

SEQ ID NO: 140355 - DNA, 246 bp, Glycine max
ctcgagcgaatcggctcaggtgggaggaggctcgggactacgaccgcgtgcctgacgaagaatgagccggcgaatcataggcagtggcttggttaagggaaaccaccggagccgtagcgaaagcgagtcttcacagggcaattgtcactgcttatggacccgaacctgggtgatctatccatgaccaggatgaagcttgggtgaaactaagtggaggtccgaaccgactgatgttgaagaatcagc

SEQ ID NO: 140356 - DNA, 255 bp, Glycine max
ctaagcttagaattagaaacaaagaaaagaagaaaggaaagaattgatcgttgaaaatgcagggaggaaagaaagcgggagagtccattaaggaaacagctacaaacattggtgcttctgccaaggctggcatggagaagaccaaggccactgtccaagagaaggcagaaagaatgacagcacgtgatccggtgcaaaaggagttggcaacccaaaagaaagaggcaaagatgaaccaggcggagctggacaagc

SEQ ID NO: 140357 - DNA, 245 bp, Glycine max
atcatctcgtccccatatcgaatccgttttatcgccgaagcgcatcctttgagccttaagttcgattcatttgcagttataatgctgggtgttggaattcctaccgagtggtctgttgtggaggatctaccagaaggacctgctgttaaaattggtgagaacaaagatgcaatggatggttggtttagacttgagagagtttctgatgatgaattcaataactataagcttgtgttctgtccaca

SEQ ID NO: 140358 - DNA, 246 bp, Glycine max
aagaacctaagtgagaaacaaagaaaggaaataattgatctttgaaaatgcagggaggaaagaaagctggagagtccatcaaggaaacagctgcaaacattggtgcttctgccaaggctggcatggagaaaaccaaggccactgtccaggagaaggcagaaagaatgacggcacgtgatccgatgcaaaaggagttggcaacccagaagaaagaggcaaagatgagccaggcagagctggacaagc

SEQ ID NO: 140359 - DNA, 247 bp, Glycine max; identical to SEQ ID NO: 133994

SEQ ID NO: 140360 - DNA, 247 bp, Glycine max
gttaagatcacaaatttctccaatatccctgctgatgagaaccaaattgccgcatatttagtaaaaaatggtccacttgctatgggcgtcaatgcaattttcatgcaaacatacattcgtggtgtctcatgccctctcatatgtagcaagaaaaggctgaaccatggtgtgttacttgtgggatatggtgcaaaaggcttctcaattcttaggcttggcaacaaaccatactggatcatcaagaatt

SEQ ID NO: 140361 - DNA, 250 bp, Glycine max
cgatgatgaacacaaatgttggttccttcaagattcctcctgcttccctctcaagttttgatgtgataagtgttattgtctgggtccctgtctatgacaggattattgttcccattgcaaggaaatttacaggcaatgagaggggcttttcagagttgcaaagaatgggaattggcctttttatttcagtcctgtgcatgtcagcagctgctatagtggagattgtgcgtctgcagcttgcgaaagagca

SEQ ID NO: 140362 - DNA, 247 bp, Glycine max
cttaccaggtccagacatagtaaggattgacagactgagagctctttcttgattctatgggtggtggtgcatggccgttcttagttggtggagcgatttgtctggttaattccgttaacgaacgagacctcagcctgctaaatagctatgtggaggtaaccctccacggccagcttcttagagggactatggccgcttaggccacggaagtttgaggcaataacaggtctgtgatgcccttagatgt

SEQ ID NO: 140363 - DNA, 244 bp, Glycine max
gaaactgcgaatggctcattaaatcagttatagtttgtttgatggtatctactactcggataaccgtagtaattctagagctaatacgtgcaacaaaccccgacttctggaagggatgcatttattagataaaaggtcaacacaggctctgcctgttgctttgatgattcatgataactcgtcggatcgcacggcctttgtgccggcgacgcatcattcaaatttctgccctatcaactttcga

SEQ ID NO: 140364 - DNA, 245 bp, Glycine max
aggcaatggctgaagcacaactacgagaccagcatggcaaccctgtcccactcaccgatcaatacggtaatccggttatcttaactgacgagcgcggtaatcccgtccaactcactggtgtcgctaccaccgctaccggcacagcaggttctgggtttgggtcctatggtaccggtgcttacggtggtggtgcaagtgcaaccaccgttgcagatcttttggcaacccaaccaaggagtggcagg

SEQ ID NO: 140365 - DNA, 242 bp, Glycine max
cggaactttaagaccacttgccatagagttgagtttgccacatcctcagggagatcaatctggtgcttttagtcaagtttttctgcctgcagatgaaggtgttgaaagttctatttggctgctagcaaaggcttatgtagttgtgaatgactcgtgctatcatcaacttgtcagccattggttaaacactcatgcagttgttgagccattcatcatagcaacaaacaggcatctcagtgttg

SEQ ID NO: 140366 - DNA, 242 bp, Glycine max
ggaacaatggcgggtagggtttcgacgtgcttcttcttcgtgtttgctctttctctccttcttccttttcagatctccgctgaggaatcatcggagaaagagttcgtactcacattggatcactctaactttcacgacactgtcagcaagcacgatttcatcgtcgtcgagttctacgctccatggtgtggccactgtaagaagcttgctcccgagtatgagaaagctgcttctatcttgag

SEQ ID NO: 140367 - DNA, 243 bp, Glycine max
gattgaaaataaagcaaaggatgctactgaatgtttggtacaagaaggagcacagtttgctactaggttgactggtattaaagagaatactaaatttcaaaagaaattacagaacaatgagcagatgtcaggtctgaagcatctagtacatggagcaaagcagcatcacaatgtgaaaaatgtatatgtatggcatgcactagctggttattggggtggagtgaagccagcagcaaccggcat

SEQ ID NO: 140368 - DNA, 246 bp, Glycine max
aatcactaccaattgctaaagatatttcactcactggtcacactactaatacagctttctggagatggcttcaactgtctcttacatgcttctacttccccttctagtgatggttgcctttgctggggacttaaacaaagactttgacatcacatggggagatggccgctccaagatactaaaccatggagagttactcactctttcattggacaaagcatctggctcaggttttcaatcaaagaa

SEQ ID NO: 140369 - DNA, 252 bp, Glycine max
gtcaaatcaggctactcaatcacctttaatttcaatcccaatccctattttgagaatacaaagcttacaaagacttttaccttccttgaagaaggcacaacaaagataactcgctacccccataaaatggaaagagggcaagggattacccaatggacttgatcatgacaagaatgggaacaagcgggctcgtattgatatcagtctctttagttggtttagtgactgtgagcagaaagatgatgtggatga

SEQ ID NO: 140370 - DNA, 255 bp, Glycine max
  unsure (1)..(255): unsure at all n locations
cacaggaggagcttcctgtttccatttcctctcacaaaaatcacntattatgaacanacgaaaagacatggaccggatcaaaggcccatggngcccggaggaggacgaggctctgcagaagctggtggagaaacacgggcccaggaactggtnccctcatcagcaagtccatcccgggccgctccggcaagtcctgcaggctccgctggtgcaaccactgtccccccaggtggagcaccgggccttcacccacga

SEQ ID NO: 140371 - DNA, 257 bp, Glycine max
atttacaacaacaatggcttctgtgcctcaaccaaaaatctcccttctaaccttattcttcttctcgtccttcaccatcattgcgcatgcaattgttcctcaaaacgaaaccttcaaatttgagaactcaggtgaacttggaccctacatcgttgagtacggtgcagattacagaatgataagcatcttcaactctccattccaagttggtttctacaacaccaccccaaatgccttcactctagctttgcgtgtag

SEQ ID NO: 140372 - DNA, 243 bp, Glycine max
ctttcatttgttgtgcaatcttacaagttccaaacttctctattttgttattatttgttctcacttctcacacatacaaattatagacttttatattatcatggcttctaaggtggtttcggtttttgttatagcgatgatgttgtttgccatgaactgtaactgcactagtgttggccacatgccttcaaccaaagaggaaggtcacgattttcaggagtctaaagccaagaccacacaaac

SEQ ID NO: 140373 - DNA, 242 bp, Glycine max
cgccaacacgcgcatcgactggaaggagacggcggaggcgcacgtgttcaaggcatacctgccggggctgaagaaggaagaggtgaaggtggagatcgaggaggagggaagggtgctgcagataagcggacagagaacaaaggagaaggaggacaagaacgacacgtggcaccgcctcgaacgctccagcggcagctttctccgccgcttccgcctgccggagaacgcgaaactcgatcagg

SEQ ID NO: 140374 - DNA, 239 bp, Glycine max
tggaaacaaccttcccgtcttctttgtacgtgacggcatgaaatttccagatatggttcatgctcttaaacccaatcccaagaaccacatccaagagaattggaggatccttgacttcttctctcactttccagaaagccttcacatgttcacctttttatttgatgatttgggtgttccacaagattacaggcatatggatggttttggagttaacacatatacgctgatcaacaagg

SEQ ID NO: 140375 - DNA, 121 bp, Glycine max
actacacagtacacacactagaagaataatggcttccatcctccactactttttagccctctctctttcttgctcttttcttttcttcttatccgactcagtcacccctacaaaaccaata

SEQ ID NO: 140376 - DNA, 242 bp, Glycine max
ccttgctctatactacacagtacacacactagaagaataatggcttccatcctccactactttttagccctctctctttcttgctcttttcttttcttcttatccgactcagtcacccctacaaaaccaataaaccttgttgttctacccgttcaaaatgatggttccacagggctccattgggccaacctccaaaaaagaacccctctaatgcaagtaccagtcctggtggacctcaatgg

SEQ ID NO: 140377 - DNA, 235 bp, Glycine max
cacacacaactactacaagtacttccttacaatcaaaaccaacaacaactatggcaagttatcaaaagcactacgatgatcagggtcgcaaggttgacgagtatggcaacgttgagaagcaaaccgacgaatacggcaaccctgttcatgctgctagtgtcaactatgtagcccacagaactgctgctggtggttacagtgatgacataataagcaacatgataccacaatgcct

SEQ ID NO: 140378 - DNA, 246 bp, Glycine max
gcgagaacttgccgctaatttgcatcgtcggtgggcccaactccaacgactacggcaccagtcggatcctccatcacaccatcgggtcacccgatttcagccaggagctgaggtgctttcagaccattacttgcttccaggctgtggtgaataacttggaagatgctcatgagttgattgatacagcaatctcaactgcgctgaaagaaagcaaacctgtgtatataagcattagctgtaacttgc

SEQ ID NO: 140379 - DNA, 250 bp, Glycine max
gagaaacaaagaaaggaaataattgatctttgaaaatgcagggaggaaagaaagctggagagtccatcaaggaaacagctgcaaacattggtgcttctgccaaggctggcatggagaaaaccaaggccactgtccaggagaaggcagaaagaatgacggcacgtgatccgatgcaaaaggagttggcaacccagaagaaagaggcaaagatgagccaggcagagctggacaagcaggcggcgcgtcacat

SEQ ID NO: 140380 - DNA, 130 bp, Glycine max
attcgggttctcaagaagttcactgaaaaatccaagcttcttcagggcattgagaacttccgtttggccattttggaagctagagcacacacgttcgtgtctcctcgccactttgattccgaggttgttt

SEQ ID NO: 140381 - DNA, 279 bp, Glycine max
aaagcaatggctacttcaaagttgaaaacccagaatgtggttgtatctctctccctaaccttaaccttggtactggtgctactgaccagcaaggcaaactcagcggaaactgtttctttcagctggaacaagttcgtgccgaagcaaccaaacatgatcctccaaggagacgctattgtgacctcctcgggaaagttacaactcaataaggttgacgaaaacggcaccccaaaaccctcgtctcttggtcgcgccctctactccacccccatccacatt

SEQ ID NO: 140382 - DNA, 272 bp, Glycine max
gcaaatcataagcgcattacaccactattgaggttttacacttccaaaagtgaggaggagcttaaaagcctagatgattatgttgaaaatatgggtgaaaaccaaaaggctatcttttatctagcaactgacagcttgaagagtgcaaagactgctccatttttggagaaattggttcaaaaagatattgaggttctttatttggtcgaacctattgatgaggttgccattcagaacctacagacatacaaagaaaataaatttgttgatat

SEQ ID NO: 140383 - DNA, 272 bp, Glycine max
taattattcacacttccttagttcaatatagggaagcccttcactctctctctttcttccctttgcttgctactcttgtcgagtgcatgctttgctattagctccagcaagctcaacgagtgccaactcaacaacctcaacgcgttggaacccgaccaccgcgttgagtccgaaggtggtttgattcaaacatggaactctcaacaccctgagctgaaatgcgccggtgtcactgtttccaaactcaccctcaatcgcaatggcctccactt

SEQ ID NO: 140384 - DNA, 272 bp, Glycine max
gtcagtttgtgtgaatttgaagttggcattgaaggggattaatcgcgtgttggagagcagaggggttgcagggaagcttgatttcagaggttggagggaagaactgaatgaacagaagcgaaggtttcctttgagttataagacttttgaaaaagagatttctcctcggtatgctgtacaggttcttgatgagttaaccaatggggaagctattgtgagtactggagttggacaacaccagatgtgggctgctcagttttacaagtacaaga

SEQ ID NO: 140385 - DNA, 271 bp, Glycine max
gttagaggcaaaatggtggtctgcgatcgaggcatcaacggaagagcagaaaagggacaagtggtgaaggaggcgggtggtgtcgctatgatcctcacaaacacggagataaacttgggagaggattcagttgatgttcatgtcttgcctgcaactttggtaggatttgatgaagcagtcaccctgaaggcttacataaactccacaaaaaggcctattgcaaggatcgaattcggaggaactgtgatagggaagtctagagctccatcag

SEQ ID NO: 140386 - DNA, 273 bp, Glycine max
cccaactaacaataattccttcacttgcagaacttagttctctgttgcatcatcatcatcttcattagtgttagccttaaacttcaccttcaaccatgaccacagtgccaccacacagtgtccaagtgcacacaacaacacaccgctacgaagccggcgtcgtcccgccggctcgttttgaggcgccgcgttacgaagccggcatcaaggcgccctcttccatttaccattccgagagaggtccgacgacctctcaggttctcgcagttgtcg

SEQ ID NO: 140387 - DNA, 271 bp, Glycine max
ccggtcaacattccactcttcagctgttttttggcctaaagtttgctcatggtgcacatagtcgactttaccatggtgtatataaggatgaggctgttgctgttaaaatcattatggtacccgaggatgatggaaatggagctttggcttctcgattagagaaacagttcattagagaagtcacccttttatctcgtcttcaccatcaaaatgttataaagttctcagcagcatgtagaaagccaccggtttattgtattatcacagaata

SEQ ID NO: 140388 - DNA, 271 bp, Glycine max
cctgaagtcatgaaccagttcctttggggtcttggccttccactggacgaggcagagtgctgtgatgtgtttggcttagatgaagagcttctggaaatggttccgaagcccgtcctcgccgtgctttttctttatccaattaccgcaaagtccgaagaagaaaggttgcaacaggaaaacgaaaaaaaggattatagcagcaaagtgtattttatgaagcaaaccgtgggtaatgcttgtggtacaatagggttgcttcatgcacttggga

SEQ ID NO: 140389 - DNA, 269 bp, Glycine max
gcgttgccattctcatcctcttctttctctctctaccattgccatggatccctacaagcaccggccatccagcgccttcaattctcccttctggactacaaattctggtgctcctatttggaacaacaactcctctttaaccgttggagctagaggtccaattctgctggaggattatcatcttgtggagaagcttgcaaattttgatagggaacgtatcccagaacgtgttgtccatgccaggggcgctagtgcaaagggtttctttg

SEQ ID NO: 140390 - DNA, 129 bp, Glycine max
aagcagttgcagaccgagcttgctagctagcaagtaaacacagagatggaggcaaagcgaggccatgccctcatgtgcttggcacgtgtttcactcttcctctgcgctctaaccctatccgctgctcac

SEQ ID NO: 140391 - DNA, 270 bp, Glycine max
cacaactactacaagtacttccttacaatcaaaaccattaacaactatggcaagttatcaaaagcactacgatgatcagggtcgcaaggttgacgagtatggcaacgttgagaagcaaaccgacgaatacggcaaccctgttcatgctgctagtgtcacctatgtagccaccagaactgctgctggtggttacagtgatgacattaataagcaacatgataccaccaatgcctacggcgtagacactggtagacagcattctagtggtgg

SEQ ID NO: 140392 - DNA, 276 bp, Glycine max
tgcttttcaaagtaggaggggattgccccaaaactaactatttgtttctgggggattttgtttgtagacggttttactcggttgaaacgtttctgcttctgctcgctcttaaggtgaggtatccggatcggataacactcatttgcgggaaaccatgaaagccgtcagatcacccaggtgtatggattctatgatgagtgccttcgaaaatatggttcagtcaatgtctggagatattgtaccgatatattcgactacttaagcttgtccgctcta

SEQ ID NO: 140393 - DNA, 270 bp, Glycine max
agaagagttgcataatttaagaggagatggaactggagaacgcaaagagtgggaaaggatctatgattatgatgtctacaatgatttaggtgatccggataaaggtgaaaatcatgcccgtcctgttcttggaggaaatgacacctttccttatcctcgtagggggagaactggtagaaaaccaacaaggaaagatcctaatagtgagagtaggagcaatgatgtttatcttccaagagatgaggcttttggacacttgaagtcatctga

SEQ ID NO: 140394 - DNA, 267 bp, Glycine max
tgatctttgaaaatgcagggaggaaagaaagctggagagtccatcaaggaaacagctgcaaacattggtgcttctgccaaggctggcatggagaaaaccaaggccactgtccaggagaaggcagaaagaatgacggcacgtgatccgatgcaaaaggagttggcaacccagaagaaagaggcaaagatgagccaggcagagctggacaagcaggcggcgcgtcagcataacacggcggcgaacaggctgccacggcagggcacatgg

SEQ ID NO: 140395 - DNA, 271 bp, Glycine max
cacacacacagctagcagatattacatacacgtgaatcactaattaagccatggagaagaaatcaatagctgggttgtgcttcctcttccttgttctctttgttgctcaagaagttgtggtgcaaactgaggcaaagacttgcgagaacctggctgatacatacaggggtccatgcttcaccactggcagctgcgatgatcactgcaagaacaaagagcacttgctcagaggcagatgcagggacgattttcgctgttggtgcaccaaaaa

SEQ ID NO: 140396 - DNA, 279 bp, Glycine max
cggctcgagtcaatatcgacacagaagtgttccacttgagtgaaaagtagtgtgttaagaactaaacaatttttcaatggcgtccaagatacaagaggagcgagctgaggcagctgcgaaagttgctgccaaagaactcgaacaagtcaacagagaaagaagagaccgtgatttcggtgttgttgctgatcaacaacaacaacatcatcaggaagatcaacaaaaacgtggtgtaatcgggtccatgtttaaggcggtgcaagacacctacgagaacgc

SEQ ID NO: 140397 - DNA, 264 bp, Glycine max
gatttttagttgtgcctttatgtgtcgattatagccccaagcggcatacgaggtggatatcctttggtatatagttgaggttaatttcattgccactgcctacaaatcgaccaaatagcattgaccctgcattgaaaaggtctggtagatttgatagtgagattgatattggtgttcctgatgaagttggaagacttggagtccttcgcgtacataccaaaaacatgaagctttcagatgctgtaaattcagcatgcttaactt

SEQ ID NO: 140398 - DNA, 266 bp, Glycine max
taacttcaacacctttaattttctaaaagtaattcagcggctgaataccaagcggagaagatgagtcaggagcagccacggcgtcccaaaggccaaaaccccatcaaatacggcgacgtttttgtcgtctccggcgaccttgcacagaagcccgtcgcaccggaagatgctgccatgatgcaaagcgcggaagctcgagtgctcggacaaacccaacccggcggagcagcttccgtcatgcaatctgccgccaccaggaatgaaca

SEQ ID NO: 140399 - DNA, 267 bp, Glycine max
tcgcaagcaaaaagaaagaatcccaggcgaggagaaagatggaggggaaggagcaggatgtgtcgttgggagcgaacaagttccccgagagacagccaattgggacggcggcgcagagccaagacgacggcaaggactaccaggagccggcgccggcgccgctggttgacccgacggagtttacgtcatggtcgttttacagagcagggatagcagagtttgtggccacttttctgtttctctacatcactgtcttaaccgttatgg

SEQ ID NO: 140400 - DNA, 267 bp, Glycine max
ctaagtgagacacaaagaaaggaaataattgatctttgaaaatgcagggaggaaagaaagctggagagtccatcaaggaaacagctgcaaacattggtgcttctgccaaggctggcatggagaaaaccaaggccactgtccaggagaaggcagaaagaatgacggcacgtgatccgatgcaaaaggagttggcaacccagaagaaagaggcaaagatgagccaggcagagctggacaagcaggcggcgcgtcagcataacacggcgg

SEQ ID NO: 140401 - DNA, 265 bp, Glycine max
cggaaatggcgtggccaaagctgttaaaaatatcaatgacaagatatctgaggcgttgattggtatggatcctacgcttcagtcgcagtgcgatcaggccatgattgacctcgacaaaactgagaagaagggggaacttggagccaatgctatattagctgtgtccattgctgcctgtaaagctggtgctgcagaaaaggaggttccactttacaagcacattgctgacctgtctggaaaaaccagcccaacacttcctgttcct

SEQ ID NO: 140402 - DNA, 264 bp, Glycine max
ctcagaaggaacgctagctatatgcttatcacatgcaagtcgaacgttgtgctcggggagctgggcagaaggaaaagaggcttctagcgtgaaggttgcttgtctcgcccaggaggtgggaacagttgagtacaatgtggcgaacgggtgcgtaatgcgtgggggtctgccgaacagttcgggccaagtcctgaagaaagctaaaaagcgctgtgtgagttgcctgcgtagtattaggtagttggtcaggtaaaggctgacaac

SEQ ID NO: 140403 - DNA, 267 bp, Glycine max
gagaaaaggaaaccagtggcagttcctgccaataagagaactagagcaagcaacggcaatggaggtccaatgccaccagccaaagctgggcgtttgactaatgcgtatgtatcatctttccctgctgctcctacatttgtcaggtctccatcacacgggcaatacccagctgctcttccaccatacccttccccaccccacatgtacggcagcagaagtcccccagcaaatccttatgctgcttattcacccgagccggcaccagct

SEQ ID NO: 140404 - DNA, 266 bp, Glycine max
gctaaattggctaagggaatgggtcataattattatggagaacctgcatggcccaacgatcttttatatatttttccagtagtaattctaggtactattgcctgtaacgtaggcttagcggttctagaaccatccatgattggggaacccgcggatccatttgcaactcctttggaaatattacccgaatggtatttctttcccgtatttcaaatacttcgtacagtgcccaataagttattgggcgttcttttaatggtttcggt

SEQ ID NO: 140405 - DNA, 276 bp, Glycine max
tgcttttcaaagtaggaggggatttccccaaaactaactatctgtttctgggggattatgtttctagagggttttactcggttgaaacgtttctgcttctgctcgctcttaaggtgaggtatccggatcggataacactcattcggggaaaccatgaaagccgtcagatcacccaggtgtatggattctatgatgagtgccttcgaaaatatggttcagtcaatgtctggagatattgtaccgatatattcgactacttaagcttgtccgctctaa

SEQ ID NO: 140406 - DNA, 267 bp, Glycine max
atatatattatctattttctttgttgcatgctgtagattggaagtaggctgagttcgagcagaaactatgcggctaaagacattagatttggtgtggaggctcgggcactgatgcttaagggtgttgaagagctagctgatgctgtcaaagtaaccatgggtcccaaggggcgtaatgttgtgattgagcaaagttttggtgcccctaaagtaaccaaagatggagtaactgttgcaaagagcattgaattcaaggataaagttaag

SEQ ID NO: 140407 - DNA, 264 bp, Glycine max
tgcttggccaccattccatttgacatggaagtggaagcttattttttggcaaaggaggatggcatcattgctggaatagctcttgcagagatgatatttcatgaggttgatccttctctgaaggtggagtggagtaaaaatgatggagattttgtccataaagggctacagtttggaagagttcgtggacgggctcataacattgttgtagctgaaagagttgtgctaaactttatgcagaggatgagtggcattgcaacttta

SEQ ID NO: 140408 - DNA, 262 bp, Glycine max
gcggcgaagagggcagtgggttacttgagcggcaagacagaggaaaccaaagagaaagtctcggagacggcagaggcgacggctaataaggcggcggagatgaaggaggccaccagggagaaggctgccgggactgcggaggcggccaagaacaaggccgcagaggtaaaggacagagctgcagaaaccgcggaggcggccaagaacaagactgccgagactgctgaggcagcgaacacgaaaaccgcacaggcaaaggaca

SEQ ID NO: 140409 - DNA, 265 bp, Glycine max
caattccttcacttgcagcactgttgcatcatcatcttcattgcaaaaccctaaacttcaccttcaaccatgaccacacaagtaccaccacacagtgtccaagtccacacaacaacacacctctacgaagctggcgtcgtcccacccggagcccgtttcgaaccgccgcgttatgaagccggcgtcaaagcgccctccatttaccattccgagagaggtccaacgacttcccaggtcctcgccgtcctcgacggcctcccagtcg

SEQ ID NO: 140410 - DNA, 267 bp, Glycine max
gagggagggagccgtagcagcggaagtctagcttgggtagcgaatcacaatggcgagaggattaaagaagcatctgaagaggcttaatgccccaaagcattggatgcttgacaaactgggtggtgcatttgctcctaagccctcatctggaccacacaaatcgagggaatgcctgccactcatactcattttgcgaaaccggctgaagtatgctctaacataccgtgaagtcattgctattctgatgcagcgacatgtccttgttga

SEQ ID NO: 140411 - DNA, 270 bp, Glycine max
cacacaactactacaagtacttccttacaatcaaaaccaagaacaactatggcaagttatcaaaagcactacgatgatcagggtcgcaaggttgacgagtatggcaacgttgagaagcaaaccgacgaatacggcaaccctgttcatgctgctagtgtcacctatgtagccacccccgctgctgctggtggttacagtgatgacattaataagcaacatgataccaccaatgcctacggcgtagacactggtagacagcattctagtggt

SEQ ID NO: 140412 - DNA, 263 bp, Glycine max
aagcccttcatcagagataacttgacaaataaaatcaccatgtctatcatcccaaacttgttcggtggtagacgaagcaacgtcttcgacccattctctctggacgtatgggaccctttcgaggggtttcctttttccacaggtcacgtgccttcctctggtggggaaagcagtgccatagccaacactcgcgtggactggaaggagactccggcggctcacgtgttcaacgttgatcttcccgggttgaagaaggaggaagt

SEQ ID NO: 140413 - DNA, 261 bp, Glycine max
ggaatgatcgcctaaagatagctcttggttctgcccagggtttggcatacctgcaccatgaatgcagcccaaaagttgttcattgtaacataaaatccagcaacatactgcttgatgaaaacatggagcctcatatatctgattttggtcttgcaaagcttttggttgatgaaaatgcccatgttaccacagtggttgcaggcacatttggttatttggcacctgagtatctacaaagtgggagagcaactgagaagtcag

SEQ ID NO: 140414 - DNA, 254 bp, Glycine max
ggagtcagcttctctgcaaactgcatacaggatcgcaacatgggagtttgtttgagcgcccaaattaaagctgaaagcccatttaacactgtgttcaattcaaagtatgtgagtacagatggaaatgatctcggtagcacaaacgataaggtttcagcaaactcagttcctcagactcctcggagtgagggtgagatcttgcagtcatccaatttaaagagctttaccttgtcagaacttaagacggccactag

SEQ ID NO: 140415 - DNA, 260 bp, Glycine max
aacaaatacaatcaaagaatcttctttgctttctctcctttgcactttccttctcctccttgtgattttttgtgtgcatcaaagggagaaactgggagacacagaagatgagagagataattagtattcatattggacaagctggaattcagtgacacctctgttggcattgcacacgatgctttcacgaacttcttcagcgggaccggattcggcaagcatgtgccaagggctttatttgttgatttggaacctagtgt

SEQ ID NO: 140416 - DNA, 261 bp, Glycine max
cttctcagcctcggtgctcgcatccctccccaacccaaaacggaaccaggtgattttgatgacaagtcagatcctcctttatccgcacaaaatgacattgtagaatctgatatagagttggataatgctgatgttgttgaacctgataatgaccctcctcaaaagatgggagatccttctgctgcaataacggaagaacaaagggatgctgcacaactagcaaaatcaaaagcagtcgatgctatgtcacaaggtaatttg

SEQ ID NO: 140417 - DNA, 264 bp, Glycine max; identical to SEQ ID NO: 122024

SEQ ID NO: 140418 - DNA, 268 bp, Glycine max
gaaagaacttccttataaccaaaaccaacaacaactatggcaagttatcagaagcactacgatgatcagggtcgcaaggtcgacgagtatggcaatgttgagaggcaaactgacgaatatggcaacccggttcatgccactagtgtcacttatgtagccactaaaagtgttggtggctacaatgatgacactaataagcaacatgataccaccggtgtctatcctgagaaagataccggtaggcatcattttggtcgtggttacgatg

SEQ ID NO: 140419 - DNA, 268 bp, Glycine max
caaaggattctacccgccgctcgatgggaattgcgcttcaaggcgtctcgtagggctaatccgcctcacgagggtcaccaacggcacgtgcctttggggggccgaggcccctactgctggtcggcaaacggacggcgggcgcacgcgtcgcttctagcccggattctgacttcgaggcgttcagtcataatccaacgcacggtagcttcgcgccactggcttttcaaccaagcgcgatgaccaattgtgcgaatcaacggttcctctc

SEQ ID NO: 140420 - DNA, 258 bp, Glycine max
attttatgtatagtagtggggaattatgggacaaaaaataaatccgcttggtttcagacttggtacaactcaaagtcatgattctatttggtttgctcaaccaacaaattattccgagaatatacaagaagataaaaaatacgagattgtatcaaaaattatatacaaaaaaatataagaatatcctctggtgttgagggaattggacagataaagattcaaaaaagaattgatcttattcaagttataatatatatg

SEQ ID NO: 140421 - DNA, 256 bp, Glycine max
attcttgctgaacccttgcaagtaggactgttgcacttgagtgctagaggcctcatacgacactaaattcgaggagataaacaaggttctgtttggtagagaggaggggcagcaacaaggggaggagaggctgcaagagagtgtgattgtggaaatctcaaagaaactaattcgggaactgagcaaacatgccaaatctagttcaaggaaaaccatttcttctgaagataaacctttcaacttgagaagccgcgac

SEQ ID NO: 140422 - DNA, 256 bp, Glycine max
agcctctgtggatgctgtccactttgttttaaaagaacttgtgcggaagtcaatttcagaaactgaggaactaaaaagatttccgacactgtcaaatgatagagcttcatttgcagcagtagctatatcatttgaagtgtcggaaatgaagctctggaaaaattccgagaagaaagcaggaaaacagtcttacggttggtcgatatggagtctagctatttaacagtggaatttttcaggaagattcattttgaac

SEQ ID NO: 140423 - DNA, 176 bp, Glycine max
actcttttttgttctttgctcacttcccttgttcgtttcactctcacaatggactctctctctctcttttgcaccggagtccttctcgtcggtggcctctactggttcgtctgtgttctgggccccgccgtgctaagggcaaacgcgtcaccgatctatccggcggctccatctcc

SEQ ID NO: 140424 - DNA, 256 bp, Glycine max
tgatactacaagccactaggcatgggtctagcaaaggaaacaataatgggaggtggaggccgtgtggccaaagttgaaattcagcagaagaagcctctctcaagggttccaaacacaaagccaccgttcactgtggccaactcaagaaagccattccaccgcactgctttcagcgttccctcctcacttcattgtcctatgttgtttatgacctttcattggctttcattttctacattgccaccacctacttcca

SEQ ID NO: 140425 - DNA, 254 bp, Glycine max
ctatgatgagagtgcggtttcctttgttggtgttgctgggaactgttttcctggcatcagtttgtgtctcattaaaggtgagagaggatgagaataaccctttctacttgagaagctctaacagcttccaaatctctttgagaaccaaaacggtcgcattcgtctcctccagagattcaacaaacgctccccacaacttgagaagcatcgagactaccggattgtccagtttcagtcaaaacccaacacaatcc

SEQ ID NO: 140426 - DNA, 158 bp, Glycine max
gatactacaagccactaggcatgggtctagcaaaggaaacaataatgggaggtggaggccgtgtggccaaagttgaaattcagcagaagaagcctctctcaagggttccaaacacaaagccaccattcactgttgccaactcaagaaagccattccac

SEQ ID NO: 140427 - DNA, 262 bp, Glycine max
aaaggattctacccgccgctcgatgggaattgcgcttcaaggcgtctcgtagggctaatccgcctcacgagggtcaccaacggcacgtgcctttggggggccgaggcaccctactgctggtcggcaaacggacggcggcgcacgcgtcgcttctagcccggattctgacttagaggcgttcagtcataatccaacgcacggtagcttcgcgccactggcttttcaaccaagcgcgatgaccaattgtgcgaatcaacggttc

SEQ ID NO: 140428 - DNA, 263 bp, Glycine max
gaaaacctaagcttagaattagaaacaaagaaaagaagaaaggaaagaattgatcgttgaaaatgcagggaggaaagaaagcgggagagtccattaaggaaacagctacaaacattggtgcttctgccaaggctggcatgagaagaccaaggccactgtccaagagaaggcagaaagaatgacagcacgtgatccggtgcaaaaggagttggcaacccaaaagaaagaggcaaagatgaaccaggcggactggacaagcaggc

SEQ ID NO: 140429 - DNA, 256 bp, Glycine max
atccagctatgatgaagttaactggatggaagcgagaggaggtgatggataaaatgcttttgggagagatttttggcacccagatggctgcttgtcgcctaaagaatcaagaagcttttgttaatttgggcgtcgtacttaataaagccatgactggttcagaaacagagaaggttccttttggtttctttgctcggaatggcaagtatgtagaatgcctgctttctgtgagtaagaaattggacgtagagggcct

SEQ ID NO: 140430 - DNA, 255 bp, Glycine max
ctccgctctaaattctctgtttctctctctctctctcgatcaatcatggctttgcccaatcagcaaaccgtcgattaccctagtttcaaactcgtcatcgtcggtgacggtggtacaggaaagacaacgttcggaaaaggcatcttaccggtgaatttgagaagaaatacgaaccgaccattggagtggaggttcacccattggatttcttcacaaactgtggaaagattcgcttctactgttgggatactgccg

SEQ ID NO: 140431 - DNA, 256 bp, Glycine max
  unsure (1)..(256): unsure at all n locations
ctcagccagaacaagctctaaagtgccccagatntgaactccaccaacactcaattcngctactacaacaattacagcctttcccagccaaggtacttctgcaagtcatgcaggagatattggaccaaaggaggacacttaggaatgtccctgtgggaggagggtgcaggaagaacaaaaggnnnnnnnnnnnnnnnnnnnnnnnnaagagagttcaagatcaagcattcacaccaaatgttaaccctctcactgg

SEQ ID NO: 140432 - DNA, 253 bp, Glycine max
gtttttgactcagggaaaacttaaaaatgctcaactgaaaacgaacacaagagataactttgaacataattgacagccagagggatacacctataagtacagaaaacttactatcgagagttaataataattcggttctaatgatagaactgtggaggatgagaatggtttttgcgaaaataaaccaaactctggtgcaaagctgcatcaactactggacacaagtcctagagctgatgctgtggcagctggt

SEQ ID NO: 140433 - DNA, 252 bp, Glycine max
gtgcaggcacaacctggggtcactgtttgggtgttatgaatggaggaatgcaacctagagctgaaattgacttaggggcacgtcagttggaagagaacctggtggtgttcgtgcttgcaaggtcaagggttggtttagcacctcatcactgcactcgcatggagtcaaatgtgctgacctcttcaactttgccaatgcatgatgagccaagatcgcgagactttttataatatgcttatttataattaagca

SEQ ID NO: 140434 - DNA, 252 bp, Glycine max
cacaactactacaagtacttccttacaatcaaaaccaacaacaactatggcaagttatcaaaagcactacgatgatcagggtcgcaaggttgacgagtatggcaacgttgagaagcaaaccgacgaatacggaaccctgttcatgctgctagtgtcacctatgtagccaccagaactgctgctggtggttacagtgatgacattaataagcaacatgataccaccaatgcctacggcgtagacactggtaga

SEQ ID NO: 140435 - DNA, 260 bp, Glycine max
cgcgctcgagggcccatcagccccagacatgggaaggatgagcatgaggaagaccgtcaccaagcaggtctcctcaggaagcccatggtacggcccagaccgagtcaagtacttgggcccattctctggcgagccccgtcctacctaaccggtgagttcccaggcgactacggctgggacactgctgggctttccgcagacccagaaaccttcgccaagaaccgtgaactcgacgtgatccactccaggtgggccatgct

SEQ ID NO: 140436 - DNA, 254 bp, Glycine max
agagattgtgaagtaagtagaaatcggtgcaagaaattctccgctttatctacaaaatttaagtgagtttgtgaagacaaaaaatcactagctactaaaaaatggccacagttggaaggaacgcagcagctccttgctgtttcttaacttgatcatgtattttattgttcttggctttgctagttggtgcctcaacaagttcatcaatggccaaacttaccaccctagctttggtggaaatggtgcaactatgt

SEQ ID NO: 140437 - DNA, 252 bp, Glycine max
ggatccttgacttcttctctcactttccagaaagccttcacatgttcacctttttatttgatgatttgggtgttccacaagattacaggcatatggatggttttggagttaacacatatacgctgatcaacaggctgggaaagcagtgtatgtgaaatttcactggaagaccactagtggtataaagtgtctattggaggaagaggccattaaggtgggaggagccaaccacagccatgccactcaagacct

SEQ ID NO: 140438 - DNA, 252 bp, Glycine max
cctcgctctatttctcagtctctgtgtttgcggctgaggattccgaacgagtgaccttcttcgtttctcgcaaagtttaagtactcatgggtaaggaaaaggttcacatcaacattgtcgtcattggacattcgactctgggaagtcaactaccactggtcacttgatctacaagcttggaggtattgacaagcgtgtgattgagaggttcgagaaggaggctgccgagatgaacaagaggtcattcaagta

SEQ ID NO: 140439 - DNA, 251 bp, Glycine max
ctgtacttgttggagtgccaaacaaagatgaagaattcaaaactcatccagtgaatttcttgaacgagagaactctaaagggtaccttctacggaaactacaaaccccgcactgatcttccttctgttgtgagaagtacatgaatggggaattggaactggagaaattcatcactcacacagttccattctcagagattaacaaggcttttgattacatgctgaaaggggagtccatcagatgcatcattc

SEQ ID NO: 140440 - DNA, 252 bp, Glycine max
tctctctcttctttttactctctctctgtctctctctgcgctttctcgttcgagatccctcaagggatccactaactgaaggagaaatggggttgacattcaccaagcttttcagccggcttttcgccaaaaggaaatgcgaattctgatggtgggtctcgatgcagctggtaagaccaccatcctgtacaagctcaaacttggagagatcgttaccacaattcccaccattgggttcaatgtggagactgt

SEQ ID NO: 140441 - DNA, 251 bp, Glycine max
cgatgatgaacacaaatgttggttccttcaagattcctcctgcttccctctcaagttttgatgtgataagtgttattgtctgggtccctgtctatgacaggattattgttcccattgcaaggaaatttacagcaatgagaggggcttttcagagttgcaaagaatgggaattggcctttttatttcagtcctgtgcatgtcagcagctgctatagtggagattgtgcgtctgcagcttacgaaagagcatg

SEQ ID NO: 140442 - DNA, 252 bp, Glycine max
cttcgacccgtcggattcaatcccgaagctgcacacggactcgagctgttcggagcacgtggtatcgccggaattcgcgagcgaggtgcagagcgagccaaagtggaaggagtgggagaaaagcctcgagttccgtttaattacgtggatgccactctgaacaacagcaacagcttcacgacgcaattccagggcaataatcagatgatgtcgccgctgcaggacatgttcatgtactggcccaacaagccc

SEQ ID NO: 140443 - DNA, 259 bp, Glycine max
gaaggaatggggggatgaggctcgtttcatagtccatttggatatatttggaatcattttttcggtggagcaagcttcggtggtggtggtagttcccgaggtagaagacagaagcatcgtgaagatgtggtgcatctttaaaggtttccttggaggacgtctataacggtacaacaaagaaactatctctttctagaaacgtattctgctcaaaatgtaaagggataggttcagtaagttgaacagctggtaggtgttt

SEQ ID NO: 140444 - DNA, 175 bp, Glycine max
tccaaaaaaatggctttggaagctctcaactcaccaacaacaaccgccccatctttccccttcgacgacccaactattccatgggccaaaagaaaacgttcaaagcgttgttcacgcgaccacccttcagaggaagagtacctcgctctctgcctcatcatgctcgctcgcggcg

SEQ ID NO: 140445 - DNA, 251 bp, Glycine max
aagcgataagcaatagaattcagagagagagagaaagagagtctcttgctctgtatctttgatttgatcattccaatcttcaatttttctatatatccatcaatccgcagagtgcaaagttctaatcttcgcctattgggttctactcctttctctcttcgtttccgatcgatccaattttcttcccatggctacgatcggacacaacaatctcaatgccaaattggttcttctcggggacatgggtgctg

SEQ ID NO: 140446 - DNA, 250 bp, Glycine max
ctcgtgtcggagtatcagcagtaccaggatgccactgctgatgaggatgagtatgaagaggaagaggaggaggaggagtttgcccaacatgatatgtgaatttgaacttgggtgtacgtgtattgcggtgctttagacaagaagatggataacaagctgcaacttcctgttgccggttgatgattgtctcttttgaggggatggttttgttccggctagatctagtttctattactgttctataaaactg

SEQ ID NO: 140447 - DNA, 250 bp, Glycine max
cgaaaaagtagcgaagatggagagggagaagaagagacgtttggtattggttcatggagcctgccatggggcgtggtgttggtacaaggtggctgctttgttgaaatccaatggacaccaagtcacagctctagacatggctgcatcaggcatccatccaaagcaggtacacgacctcaattcaatttcagaatattttgagccattaatgtactttctagggtctttgccaacagaggagcgtgtaatc

SEQ ID NO: 140448 - DNA, 248 bp, Glycine max
cgaaaaagtagcgaagatggagagggagaagaagagacgtttggtattggttcatggagcctgccatggggcgtggtgttggtacaaggtggctgctttgttgaaatccaatggacaccaagtcacagtctagacatggctgcatcaggcatccatccaaagcaggtacacgacctcaattcaatttcagaatattttgagccattaatgtactttctagggtctttgccaacagaggagcgtgtaat

SEQ ID NO: 140449 - DNA, 255 bp, Glycine max
cacaactactacaagtacttccttacaatcaaaaccataaacaactatggcaagttatcaaaagcactacgatgatcagggtcgcaaggttgacgagtatggcaacgttgagaagcaaaccgacgaatacgcaaccctgttcatgctgctagtgtcacctatgtagccaccagaactgctgctggtggttacagtgatgacattaataagcaacatgataccaccaatgcctacggcgtagacactggtagacag

SEQ ID NO: 140450 - DNA, 259 bp, Glycine max
cacaaaacaaaaagtttacgttacaaatcgcataataaccgtcctaagtttattgagagaattttgcaagtgtgagaaacatggcatctcgtcaaaacaacaagcaagagcttgatgaaagagcaaggcaagagagactgttgtcccgggtggaactggtggcaagagcctggaggctcagcaacaccttgctgaaggaaggagcaagggagggcaaacaaggaaggaacagctgggtacagaagggtaccaggaaatg

SEQ ID NO: 140451 - DNA, 270 bp, Glycine max
atctcgggattcacaaggtgcaacaactcctgcaagatttctttaatgggaaggagctctgcaagagcatcaatccagatgaggctgtggcatatggtgctgcagttcaagctgctatcttgagtggtgagggtaatgagaaggttcagatcttctccttcttgatgtcacccctctctctcttgggttggaaactgctggtggggtgatgacagtcttgatccccaggaacactactatcccaacaaagaaagaacaggttttctcaac

SEQ ID NO: 140452 - DNA, 250 bp, Glycine max
cacaaaagtgttccacttgagtgaaaagtagtgtgttaagaactaaacaatttttcaatggcgtccaagaaacaagaggagcgagacgaggcagctgcgaaagttgctgccaaagaactcgaacaagcaacagagaaagaagagaccgtgatttcggtgttgttgctgaacaacaacaacaacatcatcaggaagatcaacaaaaacgtggtgtaatcgggtccatgtttaaggcggtgcaagacaccta

SEQ ID NO: 140453 - DNA, 247 bp, Glycine max
aatcactaccaattgctaaagatatttcactcactggtcacactactaatacagtattctggagatggcttcaactgtctcttacatgcttctacttccccttctagtgatggttgcctttgctgggacttaaacaaagactttgacatcacatggggagatggccgctccaagatactaaaccatggagagttactcactctttcattggacaaagcatctggctcaggttttcaatcaaagaatg

SEQ ID NO: 140454 - DNA, 249 bp, Glycine max
cacacacacacacacactaagaataatggcttctatcctccactactttttagccctctctctttctttctctttccttttcttcttatccgactccgtccccattccccaacaccacactaaccctcaaaacctataaaccttctggttctacccgctcaaaatgatgcttccacagggctccattggtccaacctccaaaaaaggacccctctaatgctagtaccagtcctggtggacctcaatgga

SEQ ID NO: 140455 - DNA, 248 bp, Glycine max
cgtatgggcaatgtgttcaccattggcaagggaacaaaaccatggatatctcttcccaagggtaaaggtattaaactatcaatcattgaggaagctaggaaaaggattgccgcccaacaagcaactgtgcttaaatctttaggaaatgaatagactttgagtgtttggtagtttttatttaatggttttggtttctaatttattttgtcttgaaattttaaacactgaatttcgtctcttaaatgctc

SEQ ID NO: 140456 - DNA, 251 bp, Glycine max
ggcccatcagccccagaagtgggaagggtgagcatgaggaagaccgtcaccaagcaggtctcctcaggaagcccatggtacggcccagaccgagtcaagtacttgggcccattctctggcgagccccgtcctacctaaccggtgagttcccaggcgactacggctgggacactgctgggctttccgcagacccagaaaccttcgccaagaaccgtgaactcgaagtgatccactccaggtgggccatgctc

SEQ ID NO: 140457 - DNA, 253 bp, Glycine max
aagaagaagaagaagaagaagatggagaagtatcagatctggagcaggagaatagcgttggcagcgtttgcgtttgctctgctgttccaatcggcctcagcagacgacgtcgttgtgctctctgaagaaacttcgagaaggaagttggtcaggacagaggagctctcgttgagttctatgctccttggtgtggacactgcaaaaagcttgctccagaatatgaaaagcttggtagcagcttcaagaaagccaa

SEQ ID NO: 140458 - DNA, 254 bp, Glycine max
cgaagaggggaaaggttccatgtgaacggcacttgcacatgggttagtcgatcctaagggacgggggaagcccgtctgatagcgctctgtgcgcgtactccgaaagggaatcgggttacacttcctgaacgggacgtggcggctgacggcaacgttagggagtccggagacgtcggcgggggccccggaaagagttatcttttctgtttaacagcctgcccaccctggaaacggctcagccggaggtagggtcc

SEQ ID NO: 140459 - DNA, 246 bp, Glycine max
gtgatatctttggggagagaggcattttacttggtgctgttcatggagttgtggaatccttgtttaggagatacactgataatggaatgaacgaagatctggcctataagaatactgttgagtcataacagggattatatctaaaaccatctcaactaagggcatgctagctgtatacaatgctttatctgaagatgagaaaagggaatttgagaaggcttatagtgcttcttattatccttgcat

SEQ ID NO: 140460 - DNA, 246 bp, Glycine max
gcggtggcgggcggcgcgctcctgtcggctcgtcggtgatctcgctggtgaaccggctccaggacatcttcagtcgcgtggggagccactccgtcatcgacctccctcaggttgcggtggtcgcagccagagcagcggcaagtccagcgtcctcgaagccctcgtcggccgtgacttcctccctcgcggcaacgacatttgcacgcgccgccccgtcgtcctccagctcgtccaaaccaaaccccc

SEQ ID NO: 140461 - DNA, 246 bp, Glycine max
ctcgagccgaatcggctcgagaagaacgatgactccgatttgtaccggaagcttgttattgcatccgcttggaggaaacagatcccgaagctcgcgctttcgcttggtctcgctcagcaaatgccgatatgattgaagagttgatcagcaaagggcagcagcttgatgcggttcactttacctatgaagtgggtctggtggaaaagttccctcctgttcccttgttgaagtcttttctcaaggatg

SEQ ID NO: 140462 - DNA, 242 bp, Glycine max
tcttcttctcttgcggctagggtttagagagttcttctagatttaaggaagatgggtaaggaaaaggttcacatcagtattgtggtcattggccatgtcgactctgggaaatccactaccatggtcacctgatttacaagcttggaggcattgacaagcgtgttattgagaggtttgagaaggaagctgctgagatgaacaagaggtctttcaagtatgcctgggtgctggacaaacttaag

SEQ ID NO: 140463 - DNA, 236 bp, Glycine max
  unsure (1)..(236): unsure at all n locations
ccgactcagtcacccctacaaaaccaataaaccttgttgctctacccgttcaaaatgatggctcagacagggcatcagagatacaancnccaaaaaagaaccccncnaatgcaaggaccagagccgaggaccgcaacggaaaacacccgcggggcaaccgagagcagcaggacgcaaccaaaacggaccaagcacccagcggccacgccacccaacgcacgagtcgcaacacccac

SEQ ID NO: 140464 - DNA, 247 bp, Glycine max
tgcagaccgagcttactagctatcaagcaagcacagagatggaggcaaagcgaggccattccctcatggccttggcacgtgtttcactcttcctctgcgctctcttccctatccgctgctcacggagcaccacggttcaagacatcgcgagaaagttgaaactaggggacaacgagcttctgcgcacggagaagaagttcaaggttttcatggagaattacgggaggagctactccacagaggagga

SEQ ID NO: 140465 - DNA, 245 bp, Glycine max
gttcaatatcctagtacaccgtattaaagaatttaagatatactatgatgagagcgcggttcccattactgttgctgggagttgttttcctggcatcagtttctgtctcatttggcattgcgtatgggaaaagcagaaccccagtcacaacaagtgcctccgaagttgcaatagcgagaaagactcctacaggaaccaagcatgccacgctcgttgcaacctccttaaggtggaggaagaagaag

SEQ ID NO: 140466 - DNA, 244 bp, Glycine max
gaagggcaagctcaatggaatagcgctccgtgtgcctacacccaatgtttcagttgttgaccttgttgtgaatgttgagaagaagggtcttactgctgaagatgtgaatgcagcattcagaaagcagctgaggggccgctcaaaggtgtattggacgtgtgtgatgttccacttgtgtctatcgacttccgctgctctgatgtttcctctactattgactcctccttgactatggtcatgggag

SEQ ID NO: 140467 - DNA, 243 bp, Glycine max
gcaacatctgggactgggtttgtcttggggagtggtagtgctgttgatctttcggcactttcttgcacttgcttgggtaccatgatggttgctgcatctgctaactctttgaatcaggtgttgagatcaataatgatgctaaaatgaagagaacaagtcgcaggccactaccctcaggacgcatcacaatacctcatgcagttggctgggcatcctctgttggattagctggtacggctctac

SEQ ID NO: 140468 - DNA, 244 bp, Glycine max
gatgagagtgcggtttcctttgttggtgttgctgggaactgttttcctggcatcagtttgtgtctcattaaaggtgagagaggatgagaataaccctttctactttagaagctctaacagcttcaaactctctttgagaaccaaaacggtcgcattcgtctcctccagagattcaacaaacgctccccacaacttgagaaccttcgagactaccggattgtccagtttcagtcaaaacccaaca

SEQ ID NO: 140469 - DNA, 250 bp, Glycine max
tcttcttctcttgcggctagggttttagcgcaggtcttctagatttaaggaagatgggtaaggaaaaggttcacatcagtattgtggtcattggccatgtcgactctgggaaatccactaccactgtcacctgatttacaagcttggaggcattgacaagcgtgttattgagaggtttgagaaggaagctgctgagatgaacaagaggtctttcaagtatgcctgggtgctggacaaacttaaggctgag

SEQ ID NO: 140470 - DNA, 252 bp, Glycine max
tgcaaaaatggcatcattcacaatgacagcttccatccttggcagcccagccgtcaccaaccggtcggcagtagcaacgcagaggagatcactcgtagtgaatgctgccaaagctgttgaagcagaaaggtcagttatgacaatgacatggatggtagcaatggaaggaggaacttgatgttcgccgcggcggcggctgctgtttgctctgttgctgggatggcagtggcagatgagcctaaaccaggaacc

SEQ ID NO: 140471 - DNA, 253 bp, Glycine max
cagcaacaaggtttagtgacaccaaacagacgggaaattggtcgtagggtcagtgctggtggtggacagagttccttggattatctctttggcagtggggtacctgccatcagtgcaaatggtgctcgagtctgaatgcaagtgctccttcaccaccggttgataagcagagtccagcaccagcaccagcagcagcacctgcacctgcagcagcagcagcaccagcatctgcaccagcaccagcaccagcatc

SEQ ID NO: 140472 - DNA, 269 bp, Glycine max
cagttcgatccggaatttctacacatttgtactctttagtttctccgattttctttctcaattctcaacaatggccactacaacacgacttcacttaccccctggattcagattccatccaacagatgagcaactcgtcatccactacctttgtcgcaaatgcgcttcgcaacatatcgcggatcccataatcgccgaaattgatctgtacaagtacgacccttgggacgttccaggaatggcattgtacggagagaaagagtggtatt

SEQ ID NO: 140473 - DNA, 257 bp, Glycine max
taataaatgaagagtactatcttctttgctctctttctagtttgtgccttcaccatctcatacctgccttcagccaccgctcagttcgtgctcgagactgatgatgatcctcttcaaaacggtggcacatgctatatgttgccagttatgagatgatagggcggtggaatagaactacattcaactggaaaagagatatgccctctcactgttgtgcaatcacccaatgagctcgataaggggattggactagtctt

SEQ ID NO: 140474 - DNA, 221 bp, Glycine max
cggaacagtgtcattggtaaaagtttgaccagcattggtgagaagctgggtgatgcaaaacagagagaggagctgttagacaacgtcactggcaacatcaccgagggatgaggcgaggtgttgggagcagtaggtgaaaccgttgctgagattggacagaacatgatgaagccagcggagatagttcaggaacgcgctcacgttcgacaagcgggtggggt

SEQ ID NO: 140475 - DNA, 256 bp, Glycine max
gaagaagaatacaccaaattctaccactctcttgccaaggatttcagtgatgagaaacctttagcatggagtcatttcactgctgagggtgatgttgagttcaaggcagtcctgtttgtaccacctaaggcacctcaagatttatatgagagctattataacgcaaacaaatcgaacctgaagttgtatgttagacgtgtgttcatttcagatgaatttaatgaactgttgcccaagtacctaaactttttgctgg

SEQ ID NO: 140476 - DNA, 254 bp, Glycine max
gaatcatggtcacatctgtagtatatatagtttatagaagcggaatgccaatcgacactggtagccatcgggattgagttcagctgcttttgacgatactgacgaatgagtaaacggaagaatgaatcagatgagctccagtctggactctcattggtcaaacaggcgcaacgggccgagagagaataaaaggacaccagaagagcaagaaaaagagctgtatgataagagtccttatcctacccaccccattt

SEQ ID NO: 140477 - DNA, 257 bp, Glycine max
tccccttgggctccccggaacaacagccaccgccgtgctcgtgacggtggtggtggtgatggtgatgatggtggtgctgcttccccttgagctgcttcctcatgtcgtaagcatcctccccgtccgcataatacttggcctccacatcatgaatcttgtaccctagagtctccgtgtacaaattgaaggccgcgcggttgctcttgcgcacgtgcagggacacgtactcggcaccaaacacctgcgtcagtgagaga

SEQ ID NO: 140478 - DNA, 257 bp, Glycine max
gtcacaaccatggataattccaaccttcaacgtctcttcactctcttccttttttccctaattgcaccctctttggctcaacaatccttcagacccagagccttcgttgtcccagttaaaaaagacgcttccaccctccaatatattactcaaatcaaacaaagaacaccactcgtcccagaaaagctagtacttgacatcggtggccaattcctgtgggtcgattgcgacaacactacgtctccctcacttaccgc

SEQ ID NO: 140479 - DNA, 258 bp, Glycine max
ggaagctgcagaatggaggacgtgccgttgccggcgctctttgagcaagcccgcaagatccacaactcagccaccgccaccgcctccgccgccgaccaggttgtgaagaaggggtgcgaggctctgcatagatgcgaggacatggtcaataacctaggtttgttctctcccaacgagaccaaagaagatatcagcaccaccaatctcaagtacattctggtgccattttatcttgcggagttgacagaaaaattagca

SEQ ID NO: 140480 - DNA, 242 bp, Glycine max
cagagtttgtggccacttttctgtttctatacatcactgtcttaaccgtcatgggaatcgctgaagatgcagggaagaaagatagcgggagagtccattaaggaaacagctacaaacattggtgcttctgccaaggtctggcatggagacgaccaaggccactgtccaatagaaggcagagagaatgacagcacgtgatccggtgcaaaaggagttggccacccctaagagagatgtctaga

SEQ ID NO: 140481 - DNA, 252 bp, Glycine max
cacaaaaccaagttaacgatgcaatcgcacaacagtaaccatccgaagtttattgagagacatttgcaagtttgaaaagaaacatggcatctcatcaacaaaacaagcgatagcttcatgacatggcaaggcaacgagagactgatgttccgggtggcactggtggacaagatccttgaggcccagcaacatctaggtgaaggaaggagcaggggacctaaatcaaggaaggcgcagctggggacagaaggg

SEQ ID NO: 140482 - DNA, 255 bp, Glycine max
agaagatggagatgtatcagatctggagcaggagaatagcgttgggagcgttcgcgtttgttctgcttttcctatcggcctcagcagacgacgtcgttgtgctctctgaagataacttcgagaaggaagttggtcaggacagaggagctctcgttgagttctatgctccttggtgtggacactgcaaaaagcttgctccagaatatgaaaagcttggtagcagcttcaagaaagccaaatctgttttaatcggca

SEQ ID NO: 140483 - DNA, 256 bp, Glycine max
aagcgataagcaatagaattcagagagagagagaaagagagtctcttgctctgtatctttgatttgatcattctaatcttcaatttttctatatatccatcaatccgcagagtgcaaagttctaatctttcgcctattgggttctactcctttctctcttcgtttccgatcgatccaattttcttcgtatggctacgatcggacacaacaatctcaatgccaaattggttcttctcggggacatgggtgctgggaa

SEQ ID NO: 140484 - DNA, 258 bp, Glycine max
cgagatgctccatcgcattaagcaacaaggattggacattgtacctcgtattctcattatccacccgtcttctccccgatgcaatcggaactacttgtggccaacgtcttgagaaggtgttcggaaccgagcactcccacattcttcgagttccctttagaactgagaagggaattgttcgtcagtggatctcaagattcgaagtctggccatacttggaaacttacactgaggatgttgctcatgagcttgccaaag

SEQ ID NO: 140485 - DNA, 251 bp, Glycine max
gcaatactagcgatactgataagagagataccaacaagaaaagaaaaaaagaagagttgagattccctttgaagaaaagatggcatcccataggcaaagctatgaagctggtcaaactaagggccgaactgaggaaaagacgaaccagacgatgggcaatattggagagaaggctcaagctgcaaaggagaagacccaggaaatggcccaagctgcaaaggagaagacccaacaaacagcccaagctgcca

SEQ ID NO: 140486 - DNA, 254 bp, Glycine max
taaagagaggaaataattgatctttgagaatgcagggacgaaagaaagctggagagtcgatcaaggaaacagctgcaaacattggtgcttctgccaaggctggcatggagaaaaccaaggccactgtccaggagaaggcagaaagaatgacggcacgtgatccgatgcagaaggagttggcaacccagaagaaataggcaaagatgagccaggcagagctggacaagcaggcggcgcgtcagcataacacggcg

SEQ ID NO: 140487 - DNA, 258 bp, Glycine max
gaaacataccgaatgagagcatcaaactcttcttcttcgatttccattgcgaacgttactttttcttcttctttctcttcattttcttcgctcttcgatcttcgtccggggactgctccgaataccaccaccaccactcgccgatggccacgatcggaggcttacacgactcccaaggctctcaaaacagcgtcgaaaccgaagcccttgctcgattcgccgtagacgaacacaacaagaagcagaattcgcttctgg

SEQ ID NO: 140488 - DNA, 262 bp, Glycine max
attacctgctactgctcttgggttggctgcacagagtgcagtatccaaggggcatgaaaatgccaccgctgagaatgggccatggataattacattagatgctcctagttttattgctgttatgcaacatgctcgcaaccgttctttgcgtgaagaaatctaccgtgcatatgtatcacgtgcatctagtggagatttggataatacaggaataattgatcaaattttaaagctaaggttggaaaaggccaagcttctaaac

SEQ ID NO: 140489 - DNA, 250 bp, Glycine max
ccgctccctgaacacctacgtaactatcaagctcgcacacatctggaggcaaagcgacgccatgccctcatgtgcttggcacgtgtttcactctgcctctgcgctctaaccctatccgctgctcaccgtcgtaccacggctcaagacatcgcgagaaacttgaaactccgggataacgatcttctgcgcacggagcagaagttcaaggtttccatggagcattacgggagtagctactccacagaggagg

SEQ ID NO: 140490 - DNA, 255 bp, Glycine max
gcaatactagcgatactgatggagacagatgccgacattggcacgtgaactctgctgatgagagaacctcgcagagttgggttgcgtcgacaactctcagaccaagcgcgctcgcatcatcgaattgtctcgcaggttgcggcatagaggtcctgattggagtggcatacattgctatgaggattgttaccttgctcatcgacgccttgctattgttgaccctacttcgggggatcaacctttgtacaacgaaga

SEQ ID NO: 140491 - DNA, 260 bp, Glycine max
  unsure (1)..(260): unsure at all n locations
atcactcaagtatagctctgtaattaatgtgacttcacttacaatttgaaacacgacctgcanncnnnnattcgnaanttttgaacanaacatggcatctcatcaacaaaacaagcaagagcttgatgaaagggcaaggcaaggagagactgttgttccgggtggcactggtggcaagagccttgaggcccagcaacatcttgctgaaggaaggagcaggggagggaaaacaaggaaggagcagctggggacagaagggt

SEQ ID NO: 140492 - DNA, 253 bp, Glycine max
gaaattttaattgacttttctcccctcataaaaaaaacctaccaatggctcccgcaaaggcagagaagaagcccgcggagaagaagccggcagagaaggccccagcggagaagaagccgaagggaacgaagaagatatcgaaggaaggaggaagcgagaagaagaagaagagaacaaagaagagcgttgagacctacaagatctacatcttcaaggtgttgaagcaagtgcaccccgacatcgggatctccag

SEQ ID NO: 140493 - DNA, 253 bp, Glycine max
cttgtccgaagggttcacctagattacctcgatgcaggagcaaacataatattaacagcatcttatcaggccactattcaaggttttgaggccaaagggttctctagagaagaaggtgaaactatgcttagaagaagtgtggagattgcacgtgaggcacgagacatttattatgataggtgcaccaaagattcttctgactttatgagagatgaaagatataggaaacgtcccattttaattgcagcttctg

SEQ ID NO: 140494 - DNA, 256 bp, Glycine max
gcagcggcggcaacagggagagaagatgaagttcaatccacgtgtgtcgagcagccgccgcaagagccgaaaggctcatttcacggcgccatcgagcgtgcggcgggtgcttatgagcgcccctctgtcggcggagctgcggtctaagtacaacgtgaggtcgatcccagtacggaaggaggacgaggtgcaggtgatgcgaggaacatacaagggtcgcgaggggaaggtgactcaggtctaccgtcgaaagtgg

SEQ ID NO: 140495 - DNA, 259 bp, Glycine max
cggcgtagacactggtagacagcattctagtggtggctacgatggtgacactaataaacatcatggaattactggtggctataatgatgacaccaatagacatcatggaactaccggtgtctatggtatagacaccgataggcaacaacatgggactactggtggctatgccggtgacactggtaggcaacatgggaacatcggtggcccttactatggaaccaacaccgcagacaccggtactggtcgcagaagtgga

SEQ ID NO: 140496 - DNA, 250 bp, Glycine max
ctgtgctgaagattggtcccaacgagccatctgagctggctatccatgagaatgcctatggcttggccagatacgctgtcatattccaggagaatggcctggttcccattgttgagcctgagatccttgttgatggatctccatgacattcacaagtgtgctgccgtcaccgagcgtgtccttgcagcatgctacaaggctatgaatgatcaccacgtccttcttgagggtagctaatgaggccaaacat

SEQ ID NO: 140497 - DNA, 253 bp, Glycine max
  unsure (1)..(253): unsure at all n locations
acctacctctttttcttctctctcaacaacttcnncttnttcctcctcnatccatgtctnacttcaagggcaagtnccatgangagcttattgccaatgctgcgtacattggcnctcctggaaagggtattctngcngctgatgagtcancagggncanttngcaancgtntgnccacaatnagtgnagagncacatngnatccaacaggcgagctcttanggagtgctnttcactgctcctggtagtgnnca

SEQ ID NO: 140498 - DNA, 165 bp, Glycine max
ccttgctctatactacacagtacatacactataagaactacggcttccatcctccactactttttagttctctctcggtcttgctattttctctccttcatatccgactcagtcacccctacatgaccaataaacctagatgctcaacccgttcataatgatggt

SEQ ID NO: 140499 - DNA, 194 bp, Glycine max
tgagaaagagagagagagagagaaaaatggctgatacaagtggacgagatgcagtgagcacggtggtactatgtgataacaagtgtggctgcacagttccctgcactggtggttccacttgcaggtgcacaagtgtcggcatgacaactggatgcggtaatcacgtgacatgctcgtgccgagagcactgtagg

SEQ ID NO: 140500 - DNA, 249 bp, Glycine max
gcagaaaaccccttttcggatcggtggagcgaacctcgccggcgagacccccgaggctgttcaatcggcgatcgagcaacggcgaaaagcgacgaagatgaaggttttcgtgaagactctcaagggcacgcacttcgaaattgaagtgaacccttcggaacacgctttctgaagtgaagaaaaatatagaaactgttcagggtgcagatgtctatcctgctgcacagcaaatgcttattcatcaaggaa

SEQ ID NO: 140501 - DNA, 249 bp, Glycine max
caagtacttccttacaatcaaaaccaacaacaactatggcaagttatcaaaagcactacgatgatcagggtcgcaaggttgacgagtatggcaacgttgagaagcaaaccgacgaatacggcaaccctgttcatgctgctagtgtcacctatgtagccaccagaactgctgctggtggttacagtgatgacattaataagcgacatgatatcaccaatgcctacggcgtagacactggtagacagcatt

SEQ ID NO: 140502 - DNA, 251 bp, Glycine max
cacaactactacaagtacttccttacaatcaaaaccaacaacaactatggcaagttatcaaaagcactacgatgatcagggtcgcaaggttgacgattatggcaacgttgagaagcaaaccgacgaatacggcaaccctgttcatgctgctagtgtcacctatgtagccaccagaactgctgctggtggttacagtgatgacattaataggcaacatgataccaccaatgcctacggcgtagacactggta

SEQ ID NO: 140503 - DNA, 255 bp, Glycine max
aaagaaaggaaataattgatctttgaaaatgcagggaggaaagaaagctggagagtccatcaaggaaacagctgcaaacattggtgcttctgccaaggctggcatggagaaaaccaaggccactgtccaggagaaggcagaaagaatgacggcacgtgatccgatgcaaaaggagttggcaacccagaagaaagaggcaaagatgagccaggcagagctggacaagcaggcggcgcgtcagcataacacggcggc

SEQ ID NO: 140504 - DNA, 258 bp, Glycine max
agaaagtcttccatagccccccaaaaatgaagagcaccatcttctttgctctctttctcttttgtgccttcaccacctcatacctactttcagccatcgctgatttcgtgctcgataatgaaggtaaccctcttgaaaatggtggcacatattatatcttgtcagacataacagcatttggtggaataagagcagccccaacgggaaatgagagatgtcctctcactgtggtgcaatctcgcaatgagctcgacaaag

SEQ ID NO: 140505 - DNA, 267 bp, Glycine max
ggctcgatccgatacctcaacaccaacgagagcgtcgccatcaaagtcatcaagaaagagaagctcaagaaagagcgactcgtgaagcagatcaagcgcgaggtgtcggtgatgagactcgtccgccatccccacatcgttgaactcaaggaagtcatggccacaaagggaaaaatcttcctcgtcatggcatacgttaaaggcggtgaactcttcgccaaagtcaacataggaaaactcaccgtagatctcgccagaaagtacttc

SEQ ID NO: 140506 - DNA, 253 bp, Glycine max
ttttgaaggggggctgaaatatgctacactatcctaaacggtcatgggagtcgccggggctaagtctaagtgcagtaccgttaggattcaatgaatcgcttgggaccttacgagtggcatgatcttcgacgtcggttactgcaccgctcggcgtctcagggggacacatggacccggcggtgacatttcggcatcctgtggcgaggaagttgtcgttccccagggcgattttctacattgtcatgcaatagct

SEQ ID NO: 140507 - DNA, 250 bp, Glycine max
gttgtgttgtgtgtcttcgcttggtgttccagtttttatttgcagtcggcatctgttctagttccagcatatcaactcatcgttccatattggaccttgacctgaccaagtttaccacacagaaacaggtgtccttcactgttccaactatggaagagtgagcatggacgtgtctaccataaccacgaagaagaggcaaagagacttgagattttcaagaataacttgaactatatcagggacatgaatg

SEQ ID NO: 140508 - DNA, 252 bp, Glycine max
cacaaaaccaagttaacgttgcaatcgcataataataaccatccgaagtcagttgagagaaatttgcaagtttgaaaagaaacatggcatctcatcaacaaaacaagcaagagcttgatgaaagggcaaggcaaggagagactgttgttccgggtggcactggtggcaagagccttgaggcccagcaacatcttgctgaaggaaggagcaggggagggaaaacaaggaaggagcagctggggacagaagggt

SEQ ID NO: 140509 - DNA, 247 bp, Glycine max
  unsure (1)..(247): unsure at all n locations
gggtggttctggtgtgcatggctagttttactaagttggcatgggtggttctggtgtgcatggttgtgatgggtgcacacaacactgtccaaggcatcacgtgtgggcaagagaanggttacctagcaccgtgcctagggtttctccataacggtggagctgttaccagaggatgctgcaacggggtcaggagtattgtgagcaatgctaggaccactgctgatcgccgtggtgtgtgcaatgcttg

SEQ ID NO: 140510 - DNA, 239 bp, Glycine max
aaagaaaggaaataattgatctttgaaaatgcagggaggaaagaaagctggagagtccatcaaggaaacagctgcaaacattggtgcttctgccaaggctggcatggagaaaaccaaggccactgtccaggagaaggcagaaagaatgacggcacgtgatccgatgcaaaaggagttggcaacccagaagaaagaggcaaagatgagccaggcagagctggacaagcaggcggcgcgtc

SEQ ID NO: 140511 - DNA, 247 bp, Glycine max
cttagatagagttgttaccatttgctcccagtacagagcttaaccgagcttcacaaagatgaatcgggaaaagttgatgaagatggccggttcggttagaactgggggaaagggtaccatgagaagaaagaagaaggctgtccacaagacaacaaccacagatgacaaaaggcttcagagcaccctgaagagaataggggtgaatgccatcccggctattgaggaggtcaatatctttaaggatgac

SEQ ID NO: 140512 - DNA, 178 bp, Glycine max
ggaagcttggggagctgaaggactctgcggctgatgcggcgaagagggcagtgggttaccccagcggaagacagatgaaaccaaagagcaagtctcggagacggcaatggacggctataagggcggagatgaagagccacaggagaagctgcggatgggagcgcaaaacagccgaagg

SEQ ID NO: 140513 - DNA, 255 bp, Glycine max
accaagtgttggattgttcacccaccaatagggaacgtgagctgggattagaccgtcgtgagacaggttagttttaccctactgatgacagtgtcgcaatagtaattcaacctagtacgagaggaaccagagattcgcacaattggtcatcgcgcttggttgaaaagccagtggcgcgaagtaccgtgcgttggattatgactgaacgcctctaagtcagaatccgggctagaagcgacgcgtgcgcccgccgtc

SEQ ID NO: 140514 - DNA, 250 bp, Glycine max
  unsure (1)..(250): unsure at all n locations
agcagagnngttcgacgacaacgaaagcgatcgcaacgacgacgacgttttgagcgagagcaaggactcgggagtgacgacggctcacgcagtgaaagaagagatggatgacggcgccgctaactgnnnnnnnnnnnnnnnnnnnnnncccaaaccgatggaagggttgcacgaggtgggcccccctccgttcctgaagaagacgtttgaaatggtggaggaccctcacaccaaccccattgtgtcgtgg

SEQ ID NO: 140515 - DNA, 252 bp, Glycine max
cttataaccaaaaccaacaacaactatggcaagttatcagaagcactacgatgatcagggtcgcaaggtcgacgagtatggcaatgttgagaggcaaactgacgaatatggcaacccggttcatgccactagtgtcacttatgtagccactaaaagtgttggtggctacaatgatgacactaataagcaacatgataccaccggtgtctatcctgagaaagataccggtaggcatcattttggtcgtggtta

SEQ ID NO: 140516 - DNA, 251 bp, Glycine max
  unsure (1)..(251): unsure at all n locations
aaggagaaattgccgcagttttcctcgaacctgttgttggaaacgctggtttcattgttcctaagcctgattttcatagtttcttgcgcaagatcaccaaggagaacaatacccttcttgtgtttgatgaagtcatgactggatttcgtttgtcatatggaggtgctcaagagtattntggcataactccagatataacaactctaggaaagnccattggtggaggtctgccggtagngcttatggaggga

SEQ ID NO: 140517 - DNA, 246 bp, Glycine max
caaaccttgctctatactacacagtacacacactagaagaataatggcttccatcctccactactttttagccctctctctttcttgctcttctcttatcttcttatccgactcagtcacggctacgtgaccaatatgccttgttgttctacccgttcgaaatgatcgttccacagtgctccattgcggctgcctcccagaaagaacccctctgatgctagtaccagtcctggtggacctcaatgg

SEQ ID NO: 140518 - DNA, 247 bp, Glycine max
ccaatctcattacattttcaactatgattagctgtgcttccgtgtgttctttgccgcataaggctgtgaagtggtttgagatgatgccctctttcgggtgtgaaccggataacaatgtgtgctcgtctatgatatatgcttatacaagaactggcaatactgatatggctttgagactgtatgatcgtgcaaaagcagggaaatggcatgttgacacggcagtgttctcggggttgattaagatgta

SEQ ID NO: 140519 - DNA, 243 bp, Glycine max
ggtaggatgcagcggctcggagaagacgtggttcaccctctcaaggtctctttggaggacatttatgttggaacttccaagaagctctccctctccagaaatgttatatgatccaagtgcagtggcaagggttctaagtctggtgcttcgatgaagtatgctggttgtcaaggaactggtatgaaggtttctataagacatctaggcccatccatgattcagcagatgcagcattcctgcaat

SEQ ID NO: 140520 - DNA, 247 bp, Glycine max
caagcttcttcagggcattgagaacttccgtttggccattttggaagctagagcacacacgctcgtgtctcctcgccactttgattccgaagttgtgtatttcaacatcaaggggcgagtcgtacttgggttggtgagtgatagtgatacagaaaaaatcacccttgaacctggggacatgatacacataccagctggcaccccactgtacatcgttaacagagatgagaatgataagctcctcctt

SEQ ID NO: 140521 - DNA, 247 bp, Glycine max; identical to SEQ ID NO: 136391

SEQ ID NO: 140522 - DNA, 251 bp, Glycine max
caaggtactagatgcttcgtggtacatgccggatgagcagaggaatccaattcaagaatatcaggttgctcacattcctggtgcccttttctttgatgtagatggaatagcagatcggactacaaaattaccacacatgctgccatcagcggaagcgcttgctgctgctgtttctgctcttggcatagagaacaaagatgatttggttgtttatgatgggaaaggattatttagtgcagctcgtgtttggt

SEQ ID NO: 140523 - DNA, 242 bp, Glycine max
tgcatttcgttactttcatttgttgtgctatcttacaagttccaaacttctctattttgttattatttgttctcacttcttacagatacaaaatatagacttttatattatcatggcttctaaggtggtttcggtatatgttatagagatgatgttgtttgcaatgaactgtgactgcactagtgtttgacaacatgcgttcaatcatataggaaggtcacgattttcacgagtctaaagcc

SEQ ID NO: 140524 - DNA, 270 bp, Glycine max
attcggctcgagcgtccccattccccaacaccacactaagcctacaaaacctataaaccttctggttctacccgttcaaaatgatgcttccacagggctccattgggccaacctccaaaaaaggacgcctctaatgcaagtaccagtcctggtggtcctcaatggaaaccactagttggataactgtgagcaacactatcattccaaaacataccaagcacccttctgccactccacccaatgctccagagccaacactcaccaatgcct

SEQ ID NO: 140525 - DNA, 267 bp, Glycine max
gagagtttgtgatcgaactgctctcatccttgatatatttaatcaacgagcagcaacacatgaagcgtctttacaggtttcattagcacaaatggaataccaactacctcgtctaacaaaaatgtggactcatcttgagcgtcaagcaggaggaaaggtgaagggaatgggtgaaaaacaaatagaagtggacaaacgtattctgcgcaaccaaattggtattcttaaaaaagagctagaatctgttaggaaacatcgaaagcagta

SEQ ID NO: 140526 - DNA, 267 bp, Glycine max
gctagctagctagcaagcaagcacagagatggaggcaaagcgaggccatgccctcatgtgcttggcacgtgtttcactcttcctctgcgctctaaccctatccgctgctcacggaagcaccacggttcaagacatcgcgagaaagttgaaactcggggacaacgagcttctgcgcacggagaagaagttcaaggttttcatggagaattacgggaggagctactccacagaggaggagtatttgcgccgtttggggattttcgccca

SEQ ID NO: 140527 - DNA, 261 bp, Glycine max
cacacacaactactacaagtacttccttacaatcaaaaccaacaacaactatggcaagttatcaaaagcactacgatgatcagggtcgcaaggttgacgagtatggcaacgttgagaagcaaaccgacgaatacggcaaccctgttcatgctgctagtgtcacctatgtagccaccagaactgctgctggtggttacagtgatgacattaataagcaacatgataccaccaatgcctacggcgtagacactggtagacagc

SEQ ID NO: 140528 - DNA, 261 bp, Glycine max
caaaagagcaaagaatatgcgggtgatgtagcacagaatgccaaagattatgctcaaaagagcaaagattatgcgggtgatgctgtacagaatatcaaagattatgcaaatgatgcagcgcacaagagcaaagattatgctggtgatgcttctcacaagagcaaagaagcttctgattatgccagtgagacggctcagaagaccaaagactatgttggtgatgctgctcagaaaagcaaagaggcttctgaatatgctagt

SEQ ID NO: 140529 - DNA, 215 bp, Glycine max
tcacaatgataggaagagccgacatcgaaggatcaaaaagcaacgtcgctatgaacgcttggctgccacaagccagttatccctgtggtaacttttctgacacctctagcttcaaattccgaaggactaaaggatcgataggccacgctttcacggttcgtattcgtactggaaatcagaatcaaacgagcttttacccttttgttccacacaac

SEQ ID NO: 140530 - DNA, 258 bp, Glycine max
ttgatgtcaagaagaagggagtcattgacttcgaagactttgttagatctctgaatgttttccacccaaatgcatcattagaagacaagatagctttttcatttaggctctatgatttgcacaatactggctttatagagcgccctgaggtcaagcaaatgttaattgcacttctttttgagtcggatatgaagttggcagatgatgtcatagaaacaattcttgacaagactttcgtggaagctgacctaaaccaag

SEQ ID NO: 140531 - DNA, 261 bp, Glycine max
ggagagccatacttaccttggtgaacaacgacgacagagactcctacaaccttcaccctcgcgatgcccagagaatcccagctggaaccacttactatttggttaaccctcacgaccaccagaatctcaaaataatcaaacttgccatacccgtcaacaaacctggcagatatgatgatttcttcttatctagcactcaagcccaacagtcctacttgcaaggcttcagccataatattctagagacctccttccatagcg

SEQ ID NO: 140532 - DNA, 260 bp, Glycine max
ggatagggatggagaaagtgaaggtgcttcggcgactcctcgagacaccaggggttcaccaggggccagcctgtttcgacgctctgggtgcgaagtcatagaatccgctggcttcccctactgcatcaccagtggcttctccatcgccgcttccaggttggctctgcccgacaccggcttcatctcctacggcgaaatgctggagcagggccaactcatcacccaagccgtttccattcccgtcattggcgacgccgaca

SEQ ID NO: 140533 - DNA, 265 bp, Glycine max
cttctttgaaggctctttctctatggaatgttgctaccgttggtgatgagggcctaattgagattgctaatggatgccaccagctagagaagcttgacctttgcaagtgccctgcaattactgataaggctttggttgcaattgcaaagaactgccagaatctgactgagttgtcatttgaatcttgccctaacattggtaatgaaggtctacgagctattgggaagttatgctccaatctgaagtccatatccatcaaggactg

SEQ ID NO: 140534 - DNA, 264 bp, Glycine max
gtccactctgcatttggtgttgaggcttcgtggaggtatgcagatatttgtgaagactctgacagggaagaccattaccttggaggtggaaagctctgatactattgacaatgtgaaagctaagattcaggacaaggaaggtatccctccagatcagcagaggctcatttttgctgggaagcaattggaagatggtcgtaccttggcagattacaatattcagaaggaatccactttgcatcttgtccttcgccttcgtggtgg

SEQ ID NO: 140535 - DNA, 262 bp, Glycine max
gcaaagcaatggctacttcaaagttgaaaacccagaatgtggttgtatctctctccctaaccttaaccttggtactggtgctactgaccagcaaggcaaactcagcggaaactgtttctttcagctggaacaagttcgtgccgaagcaaccaaatctgatcctccaaggagacgctattgtgacctcctcgggaaagttacaactcaataaggttgacgaaaacggcaccccaaaaccctcgtctcttggtcgcgccctcta

SEQ ID NO: 140536 - DNA, 251 bp, Glycine max
cgtgccaatggttcagcagggacaacagggacagcgtcccggtggaaggcgtccaggtgcagttcagcagtcccagcagccagttcctatgatgccacatcagatgcttcctaggggacgtgtctatcgttatcctcctggtaggggtattcctgatgttcctatacctggggttgctggaggtatgttttctgttccatatgatgtgggtgggatgccgctgcgtgatgcatcaatctcccagcaaatac

SEQ ID NO: 140537 - DNA, 257 bp, Glycine max
gggcaatgtattccttggcacaaagcaaagtgaacaacaggatgtggggttctatgaaaggtggtggaaataatgatgataatgatgatggactaagaactttgaacattagccaatgcacagcactcaccccttctgctgtgcaagctgtgtgtgactcatgcccttccctccacacctgttctggaagacactcactcatcatgagtggttgtctgaatctgacttctgtgcattgtgcttgtgctggccaagca

SEQ ID NO: 140538 - DNA, 259 bp, Glycine max
tggagaacggattcgctcgcatggacgacgaggttaatcgcaggagccagagcaaccagaccttcacctgcaggtgcgagctccagactccccactgcgacgccgtcggatccaccgccgtcgtcgccatcgtcacgccggacaaactcgtcgtttccaactgcggcgactcccgcgccgtcctctgccggaaaggcgtagcagtccctctctcctccgatcacaagccggatcgacccgacgaactgctccgagtcca

SEQ ID NO: 140539 - DNA, 265 bp, Glycine max
gtttgatccagagaaaatagcagttaagatcacaaatttcaccaatatcccttctgatgagaaccaaattgccgcatatttagtaaaaaatggtccacttgctatgggcgtgaatgcaattttcatgcaaacatacattggtggtgtctcatgccctctcatatgtagcaagaaaaggctgaaccatggtgtgttacctgtgggatatggtgcaaaaggcttctcaattcttaggcttggcaacaaaccatactggatcatcaag

SEQ ID NO: 140540 - DNA, 265 bp, Glycine max
cactagcttagtttctatatatgcgtgatttgtctctgagtactttttctctcttgtgcattacctttgtggtcatggcagcctccgtggatcccctagtggttggtcgcgtgatcggcgatgtggtagacatgttcattccttcagtcaacatgtccgtttactttgggtcgaagcacgtcacaaatggctgtgacatcaagccatccattgccatcagccctcctaagctcaccctcaccggcaacatggataacctctacac

SEQ ID NO: 140541 - DNA, 255 bp, Glycine max
ggcagataatcttgttctccgtggcaccatgcgcgcccacaccgacgttgtgacggcgattgccactcccatcgacaactccgacatgatcgtcaccgcctcatcgcacaaatccatcatcctctggcatcttaccaaggaggacaagacttacggtgtcccccgccgccgcctcaccggccattctcattttgtccaggacgtcgtcctctcttctgacggccagtttgccctatccggctcctgggacggcga

SEQ ID NO: 140542 - DNA, 271 bp, Glycine max
atgcaacctgactgggacatgtttcatagtttacacccagcagcagattatcatgctgcagctcgtgcaattggtggatgtcctatttatgttagtgacaagccaggcaatcacaattttgatcttcttaagaagctggttctcccggatggttcggttctccgtgctcagttacctggcaggccaactcgtgattctctatttgtggatccagccagagataggactagcttgctcaaaatatggaacctgaacaaatgctctggagttg

SEQ ID NO: 140543 - DNA, 256 bp, Glycine max
cgacagaggcatccatgtcgagtcaactgcttctctctaccctctctctgttgccaagattttgagaaaactcgtcgagattgagaaacccggtcttctcatccttggtaaacaggccattgatgacgattgcaatcaaacaggccagatgatagcaggactcctcaactggcctcaaggcacttttgcttctaagtaggtggtccttgacaaagagaaacaggttgccacagttgacagagaggttgacgatggt

SEQ ID NO: 140544 - DNA, 253 bp, Glycine max
  unsure (1)..(253): unsure at all n locations
tttcttccaacctctcaagtccancctacccctttttnttctcccaccaacttcaccgtncncttcctcgatcatgtctcacttcaagggcaagtaccatgatgagcttattgccaatgctgcttacattggcactcctggaaagggtattcttgctgctgatgagtcaacagggacannggcaagcgtttggccagcatcagtgtagagaatgttgaatccaacaggcgtgctcttagggagctgcttttca

SEQ ID NO: 140545 - DNA, 81 bp, Glycine max
tgctcttttcttttcttcttatccgactcagtcacccctacaaaaccaataaaccttgttgttctacccgttcaaaatgat

SEQ ID NO: 140546 - DNA, 252 bp, Glycine max
ctgcaaaggattctacccgccgctcgatgggaattgcgcttcaaggcgtctcgtagggctaatccgcctcacgagggtcaccaacggcacgtgcctttggggggccgaggccccctactgctggtcggcaaacggacggcgggcgcacgcgtcgcttctagcccggattctgacttagaggcgttcagtcataatccaacgcacggtagcttcgcgccactggcttctcaaccaagcgcgatgaccaattgt

SEQ ID NO: 140547 - DNA, 255 bp, Glycine max
gccaggcaagccccactcaaccaccacacttctcctcgttcacgctacccctttcttctcttcttctacctttcaagttttaaaagtataaagatggcagagacattcctatttacctcagagtctgtgaacgagggacaccctgacaagctctgcgaccaaatctccgatgctgtcctcgacgcttgcctcgagcaggacccagacagcaaagttgcctgcgaaacatgcaccaaaaccaacttggtcatggtc

SEQ ID NO: 140548 - DNA, 259 bp, Glycine max
ggcgtcgaacagtcaactcagaactggtacggacaaggggaatccgactgtttaattaaaacaaagcattgcgatggtccctgcggatgttgacgcaatgtgatttctgcccagtgctctgaatgtcaaagtgaagaaattcaaccaagcgcgggtaaacggcgggagtaactatgactctcttaaggtagccaaatgcctcgtcatctaattagtgacgcgcatgaatggattaacgagattcccactgtccctgtct

SEQ ID NO: 140549 - DNA, 259 bp, Glycine max
  unsure (1)..(259): unsure at all n locations
caacaacttctgctacttcctactccaaccgcacttctgttccgcaattatcatgggcaaggtcaagatcggaatcaacggatttggaagaattggccgtttggtagccagagtggctctgcagagatccnatgttgaactcgttgccgttaacgaccctttcatcaccaccgattacatgacatacatgtttaaatacgacagtgttcatggacatggaagcatcacgatgtcaccgttaagacgagaagacccttct

SEQ ID NO: 140550 - DNA, 258 bp, Glycine max
caaaataatcaaacttgccatacccgtcaacaaacctggcagatatgatgatttcttcttatctagcactcaagcccaacagtcctacttgcaaggcttcagccataatattctagagacctccttccatagcgaattcgaggagataaacagggttttgttgggagaggaagaggagcagaggcagcaagagggagtgatcgtggaactctcaaaggaacaaattcggcaactgagcagacgtgccaaatctagttc

SEQ ID NO: 140551 - DNA, 256 bp, Glycine max
gaagaatgtctgaaatggccaagtaccaaggttgacaacagggatgcagatgaaaattattctgtcaaaccacccatgttgcagaggggggtgctcaggaccaactgcatagactgcttggatcgcacaaatgttgcacaatatgcatatgggttggctgctcttggccaccagctccatgctctgggggttattgaccacccaaaaattgatcttgatgagcctgtagcagatgatttgatggggttttatgagc

SEQ ID NO: 140552 - DNA, 257 bp, Glycine max
acccgttcaaaatgatggttccacagggctccattggacaccaacctccaaaaaagaacccctctaatgcaagtaccagtcctggtggacctcaatggaaatcacttgtgggttaactgtgagcagcagtactcatccaaaacgtaccaagcacccttctgccactccacccaatgctctagacccaacacccaccaatgcctcagttgccccgcggcatcaaggccagggtgccacaaaaacacgtgtggcctcat

SEQ ID NO: 140553 - DNA, 253 bp, Glycine max
ctgaatcatgtcgtggcaagcgtatgtcgacgatcaccttctgtgtgacatcgaaggtaaccacctcactcacgctgctatcatcggccaagacggcagcgtttgggctcagagtaccgacttccctcagttcaaacctgaggagataactgccatcatgaatgactttaatgagcctcgatcacttgctccaactggattgtatctcggtggcaccaaatacatggtcatccagggtgaacccggtgctgtc

SEQ ID NO: 140554 - DNA, 250 bp, Glycine max
gcaaaaagaaagaatcccaggcgaggagaaagatggaggggaaggagcaggatgtgtcgttgggagcgaacaagttccccgagagacagccaattgggacggcggcgcagagccaagacgacggcaaggactaccaggagccggcgccggcgccgctggttgacccgacggagtttacgtcatggtcgttttacagagcagggatagcagagtttgtggccacttttctgtttctctacatcactgtctt

SEQ ID NO: 140555 - DNA, 249 bp, Glycine max
ggcgctggtgtggaccctaatcttccactcgagcgtcaagaagaagcgaaacaacttctcacgcactgtctcaatcttggaatctctgctctaaattctaatcttcccgccatagatgtcgttgaacttgtggtgagggaattggaaacggatccgctgttcaattcgggccgtggatctgccctgacagaaaaaggaacggtggagatggaggctagcatcatggatggtccaaaacgacgatgcggc

SEQ ID NO: 140556 - DNA, 247 bp, Glycine max
agaaaatgatgcaagaccaagaggaggatgaggaggagaagcaaacaagtaggtcatggaggaagctcttggaaaccgtatttgggaaggtgaatgagaagatagagaacaaagacactgctggttcccctgcctcttacaacctctacgatgacaaaaaagccgatttcaaaaacgcttatggttggagcaaggcactgcatggaggcgagtatcctccactcagcgaaccggatattggagtttt

SEQ ID NO: 140557 - DNA, 252 bp, Glycine max
gtgcggtttcctttgttggtgttgctgggaactgttttcctggcatcagtttgtgtctcattaaaggtgagagaggatgagaataaccctttctactttagaagctctaacagcttccaaactctctttgagaaccaaaacggtcgcattcgtctcctccagagattcaacaaacgctccccacaacttgagaatcgtcgagactaccggattgtccagtttcagtcaaaacccaacacaatccttctcccc

SEQ ID NO: 140558 - DNA, 254 bp, Glycine max
gggtttgacgttgttcacaatcactttctgcgcttcactcactcccttcgtgcggttttctttctttgtcgaactcgtgcgaaaatgcgtgagattcttcacatacagggagggcaatgcggaaaccagatcggagcgaagttctgggaggtggtgtgcgcggagcacgggatcgattccacggggaggtaccagggggacaacgagttgcaactcgagcgagtcaacgtctattacaatgaagcgagttgcgg

SEQ ID NO: 140559 - DNA, 252 bp, Glycine max
cacaaggcagaaagcaagctcatcctagagttttaaaaatggcagcagcctcctccatggctctctcttccccatccttggctggcaaggccgtgaagctgggcccatcagcccccgaagtcgggagggtcagcatgaggaagaccgtcaccaagcaggcctcctccggaagcccatggtacggcccagaccgcgtcaagtacttgggcccattctctggcgagcccccgtcctacctcactggcgagttcc

SEQ ID NO: 140560 - DNA, 253 bp, Glycine max
cttccttataaccaaaaccaacaacaactatggcaagttatcagacgcactacgatgatcagggtcgcaaggtcgacgagtatggcaatgttgagaggcaaactgacgaatatggcaacccggttcatgccactagtgtcacttatgtagccactaaaagtgttggtggctacaatgatgacactaataagcaacatgataccaccggtgtctatcctgagaaagataccggtaggcatcattttggtcgtgg

SEQ ID NO: 140561 - DNA, 253 bp, Glycine max
gatggcacaagttgaacttcgtgacgaccatgggaacccagttgaactaacagatgcatatgggaatccggtttggttaacggaccagtcaggtaacccggtgcacctcacggctgtggcaaccaatgcacacaaatctatgcttcagaatgagaccccacaagagcttcctcactccaatagttcaagctcgtctgaggatgaaaggcatggagagaggatcaagaagggactgaaggataacatagaagac

SEQ ID NO: 140562 - DNA, 248 bp, Glycine max
gatggcacaagttgaacttcgtgacgagcatgggaacccagttgaactaacagatgcatatgggaatccggtttggttaacggacgagaaaggcaacccggtgcacctcacggctgtggcaaccaatgcacacaaatctatgcttcagaatgacaccccacaagagcttcctcactccaagagttcaagctcgtctgaggatgaagggcatggagagaggatcaggaagggactgaaggataacatag

SEQ ID NO: 140563 - DNA, 249 bp, Glycine max
aaccaaaacagtaaagctaacttcaacacctttaattttctaaaagtaattcagcggctgaataccaagcggagaagatgagtcaggagcagccacggcgtcccaaaggccaaaaccccatcaaatacggcgacgtttttgtcgtctccggcgaccttgcacagaagcccgtcgcaccggaagatgctgccatgatgcaaagcgcggaagctcgagtgctcggacaaacccaacccggcggagcagctt

SEQ ID NO: 140564 - DNA, 245 bp, Glycine max
caggcggaattaagctgccaacagatataatcagcaagattagtccactacccgtgcttaaggaaatcttccgaactgatggtgaacaggcccttaagtttcctcctcctaaagtaattcaagtgagtaagtctgcatggatgactgatgaagaatttgcaagagaaatgcttgctggtgtaaatccaaacttgattcgttgtcttaaggagttccctccacgaagcaagctagatagccaagtc

SEQ ID NO: 140565 - DNA, 249 bp, Glycine max
cacacacaaaaaaaagctttagtttaggatgacccaagtgaggaacaagcaagtggttctaagagattatgtcaccggattccctaaagaatccgacatgaacattgttgaaggcaccataatattgaaggttccagaaggttccaatgatgtccttctaaaaaatctctacttgtcatgtgatccatacatgcgactcctcatggccaaggaccgttctttcggagatggctccttcacccttgcctc

SEQ ID NO: 140566 - DNA, 249 bp, Glycine max
attcttccaccaagttatgggtttccttgtgttgcttcttttctccctcttaggtctctcttctagttccagcatatcaactcatcgttccatattggaccttgacctaaccaagtttaccacacagaaacaggtgtcttcactgttccaactatggaagagtgagcatggacgtgtctaccataaccacgaagaagaggcaaagagacttgagattttcaagaataacttgaactatatcagggacat

SEQ ID NO: 140567 - DNA, 249 bp, Glycine max
acacacaactacaagaaagaacttccttataaccaaaaccaacaacaactatggcaagttatcagaagcactacgatgatcagggtcgcaaggtcgacgagtatggcaatgttgagaggcaaactgacgaatatggcaacccggttcatgccactagtgtcacttatgtagccactaaaagtgttggtggctacaatgatgacactaataagcaacatgataccaccggtgtctatcctgagaaagata

SEQ ID NO: 140568 - DNA, 273 bp, Glycine max
agaagacaagcctcatcctcaggaggaggtcatcgccaccgagtttcaaaaagtcactgtctcagaccaaggagagaacaagcacagcctcttagaaaagcttcaccgatctgacagcagctctagcgcttcaagtgaggaggaaggacaagatggagagaaaaggaacaggacgaccaaggaatagacagggctgaaagagaagatcgaggagataatagagggtgagtcatcatcatcgacagggtgaggacacaaggtccctgttgagaa

SEQ ID NO: 140569 - DNA, 171 bp, Glycine max
tcgtaagtacggttcgaactccgtcgtcgatgatcgtgtgtgtcgcaacttcgtaggtgcatctgcagtggtgaagggacgcaaggagaacgtgtgacactctacgtaacgggtacaatccttggatacaaaaggtccaagtcaaaccagtatccaaatacatccctgatc

SEQ ID NO: 140570 - DNA, 268 bp, Glycine max
caataagcggaggaaaagaaactaacaaggattcccttagtaacggcgagcgaaccgggaaaagcccaccatgaaaatcggtcgccctcggcgtccgaattgtagtctggagaagcgtcctcagtggcggaccgggcccaagtcccctggaagggggcgccagagagggtgagagccccgtcgtgcccggaccctgtcgcaccacgaggcgctgtcggctagtcgggttgtttgggaatgcagccccaatcgggcggtaaattccgtc

SEQ ID NO: 140571 - DNA, 267 bp, Glycine max
atttgttccagcatctgcttcgccacctacacgttttgtcttttctcgtgtaccatttggtgttggcaacagaaactatcctcagtctgcagccaatgatgattcagagacacgtgctgacccaaatggagacctggctggagatggcttgacagctttagttgggctaagcctgggagggagtaatggaacaaatgtacatacagagctaacacaaaggggatatgaaatgggcttgcaaagcagcatgtctggaactactgctgg

SEQ ID NO: 140572 - DNA, 265 bp, Glycine max
cacagcagcacacacagacaaagacaaccttgtttgtctccaatcaaaacctttcaagctggcgttcgaaaaccaagacaaccctgtccgagaaatcaagcccaagaataggagaatcatgggtgctggaggccctgatgatgaggacaacaacaggtggccaccgtggctgaagcctctgctaaaagaaagtttctttgttcaatgcaagcttcacgctgattcgcacaagagcgattgcaacatgtactgcttggattgtatg

SEQ ID NO: 140573 - DNA, 264 bp, Glycine max
tcgcgagatatactcctacacgtacctctcattccacgctcgttgcgacctccttaacgctgagttgctatcaggttgctcagtcggttgtgttcctcgaccacgacctcggcacccgtggtggtgtcgtcggccctgcggttcgttgcctgccttcgatgtcttggcgtccacgattgttcgcattctgtcgctgactctgcagtcatttggtgttcgatcaggagccgaaggccgagcacgatttccatctcactgtggttg

SEQ ID NO: 140574 - DNA, 265 bp, Glycine max
caaggaccattgctgataatctgtgtccaaaatacaacgagcagtacacttgggacgtttttgatcatgccacggttcttactgttggtgtcgttgacaacagccagctcggggaaaagggtaatggttcttcaaaggacttgaaaattgggaacgtcagaattcgcatcgctacactggaaacaggaaggatttacactcactcatatccattgttggttcttcacccaaccgtggttaagaagatgggtgaacttcacttggc

SEQ ID NO: 140575 - DNA, 244 bp, Glycine max
ctcttatttgcttcttcgagtttcacagccaagtcgtaaaagggtttcaagggatggaaaacatgcagagcttctggcaattgggtgatgaactccgtgggcactcaaaagcatcggaggatcacaagtggttaatggttgcctcgaaactggccgaacagacaagattgaagggggagcgtgtgaacaaccttgatctttcaaagggacccattgaaacaaggtcaaaggatagatttgggtt

SEQ ID NO: 140576 - DNA, 275 bp, Glycine max
cgttacagttttgtagattcaacctcaatttgcagagttacgttctaatatatttacacaagactgataagagaaaatgtctctgattccaagtttcttcggtggccgaaggagcagtgttttcgaccctttctctgctcgatgtgtgggaccccttcaaggattttccatttcccagttctctttctgctgaaaattcagcgtttgtgagcacacgagtggattggaaggagacaccagaagcacacgtgttcaaggctgatattccagggctg

SEQ ID NO: 140577 - DNA, 269 bp, Glycine max
agttcagtgtgtcgtttaaaaatgtcgcagttgctggataaagccaagaacttcgtgtcggagaaggtaaatgatatggccaagccggagggaggtgtcactgacgtggacttcaagcgcgtgagcaaagataatgtcgagtacttggccaaggtctctgttcgtaacccttattcaacttccatacccatttgtgagatcaactactctttcaaaagcgcatccagggagatagcatcagggaaaattccagacccaggatcgttgaa

SEQ ID NO: 140578 - DNA, 268 bp, Glycine max
gctggaatatttggcaatggtacagagtccaattgcaccctactccacacagcatccaaaacgcctatgctagtgagaatcaacacactcctccaaggctactcaggaatcaggtttgaacttttggaggcaatcacaaagcttctgaacaacaagattaccccatgtttgccacttaggggaacaatcacagcatctggtgatcttgttcctttgtcctacattgctggtttgctaactggtagaccaaactccaaggctgttggac

SEQ ID NO: 140579 - DNA, 265 bp, Glycine max
cagcagttcaatctgttgttgatggaggtatgctgatgtgtactgcaacagacatggctgtgctctgtgggggaaatggggaggtctgctattcaaaatatggatcatacccattgagagggaaatattgccatgaaatggctttgaggatcgtgctggcttgcattgagagtcatgctaatcggtataagcggtatatcgttcctgtgttatctgttcagatggatttttatcttcgtgtttttgttcgcatatatacttcggc

SEQ ID NO: 140580 - DNA, 267 bp, Glycine max
gaaaagtagtgtattaagactacaaattttcaatttttcaatggcgtcgaggcaacaaaaagaggatcgagctgaggcagctgcgaaagttgctgcgaaagaactcgaacaactcaaccgagaaaaagaccgtgatttcagtgttggtgttgcagaccaacaccaacaagaagaacatcagttagatcaacaaaagcgtggtgtaatcggatccatgttcaaggcggtgcaagacacctacgagaacgccaaggaagctgtcgttgg

SEQ ID NO: 140581 - DNA, 265 bp, Glycine max
caaggctccacagacaagtacagttcccgcttcaacccctccagtgtcagtagcgcctcaagctcctgctcctgctgcaactggggcactgcctgcatctgttactgcacctgtatcttcaccttctccagctccagccccagctcctgctcctatatcttcaggaactgctgtggaagggtctgatatctatgggcaggctgcgtccaatctggttgctggaagcaacttggagggaacaattcagcaaattcttgatatgggt

SEQ ID NO: 140582 - DNA, 260 bp, Glycine max
ctcttaataattttgatggatctgatatttttggtgattttacttctcaatctgattctgtgtcttcacagccctccaataatgttgtcagtgatggcaagcatgataatgtgactggtaaatctttagcagactctaaagtttcccctaaaaaggatgcttttcaggtgaagtctggcgtctgggctgattcactaagccgtggactgattgatctcaatataactgctcctaaaaaagtatcccttgtggatgttgga

SEQ ID NO: 140583 - DNA, 265 bp, Glycine max
cactcgtcccagaaaacctagtacttgacatcggtggccaattcctgtgggtcgattgcgacaacaactacgtctcctccacttaccgccccgcatggtgtggctccgcccagtgctccctcgccagatccgacagctgcggaaactgcttctccgccccaaaacccggctgcaacaacaacacgtgcggcgtcacgccagacaataccgtcaccggcaccgccaccagctgctagctcgcgcaagacgtcgtctccctccaatc

SEQ ID NO: 140584 - DNA, 268 bp, Glycine max
cctaagtgagaaacaaagaaaggaaataattgatctttgaaaatgcagggaggaaagaaagctggagagtccatcaaggaaacagctgcaaacattggtgcttctgccaaggctggcatggagaaaaccaaggccactgtccaggagaaggcagaaagaatgacggcacgtgatccgatgcaaaaggagttggcaacccagaagaaagaggcaaagatgagccaggcagagctggacaagcaggcggcgcgtcagcataacacggcgg

SEQ ID NO: 140585 - DNA, 265 bp, Glycine max
gcctatttgagaatccacttgctgatctaagcctagtgaatcaacttggtagtgaggagcatagacagatagcaagggaagccgtaaggaaatcacttgtgttgctaaagaatggtaaatctgctgagaaacctctgcttccccttcccaagaaagctgcaaagatactggtggcaggaagtcatgctgacaatttgggttatcaatgtggaggatggacaattacctggcaggggcttggtggcaataatctcactgttggtac

SEQ ID NO: 140586 - DNA, 141 bp, Glycine max
gggggccgaggccccctagctgctggtcggcaaacggacggcgggcgcacgcgtcgcttctagcccggattctgacttagaggcgttcagtcataatccaacgcacggtagcttcgcgccactggcttttcaacaaaccgc

SEQ ID NO: 140587 - DNA, 252 bp, Glycine max
ctgcggatgttgacgcaatgtgatttctgcccagtgctctgaatgtcaaagtgaagagattcaaccaagcgcgggtaaacggcgggagtaactatgactctcttgaggtagccgaatgcctcgtcatctaattagtgacgcgcatgaatgggttaacgagattcccactgtccctgtctactatccagcgaaaccacagccatggaagcgggcttggcgggatcagcggggaaagaaaaccctgtggagctt

SEQ ID NO: 140588 - DNA, 231 bp, Glycine max
cgcaacagcccacactatttgtatcggatgactattcttcgtgctatctctctgcttgctcctgtgatgggccctgaaatcacttgttcaaacttgttaccagttgttgttgctgcatcaaaagacagagtgcccaacataaagttcaatgtggcaaaggtattagagtcgctcttccccatcgttgatcggtctgtggtgaagaagatatccgtccatgtctggttaagc

SEQ ID NO: 140589 - DNA, 260 bp, Glycine max
cgatactgataagagagataccaacaagaaaagaaaaaaagaagagttgagattccctttgaagaaaagatggcatcccataggcaaagctatgaagctggtcaaactaagggccgaactgaggaaaagacgaaccagacgatgggcaatattggagagaaggctcaagctgcaaaggagaagacccaggaaatggcccaagctgcaaaggagaagacccaacaaacagcccaagctgccaaggacaagacttgcgacac

SEQ ID NO: 140590 - DNA, 260 bp, Glycine max
tttagctttctcttccttcataatttctcacctttcaaatctccattcagcttcattttctgcatagaaaaaacccttttctggagaaagaatatagtcttcagctggacaaggatcattcatcttgaaagaagagtttgtgtgtgacaatctttatagttctaaggagggtgcaagagagaactgaatttgctgtgatggcaactcgtagatatgcttttggaagagctgatgaggccactcatccagactcaatgagg

SEQ ID NO: 140591 - DNA, 261 bp, Glycine max
ggcaagggaagtcggcaaaatggatccgtaacctcgggaaaaggattggctctgagggctgggcacgggggtcccagtcccgaacccgtcggctgtcggtggactgctcgagctgcttccgcggcgagagcgtgtcgtcgcgtgccggtctgtggactgattgggaacgggcccttcggggcatcttccccgggcgtcgaacagtcgactcagtactggtacggacaaggggaatccgactgtttaattacaacaaagcat

SEQ ID NO: 140592 - DNA, 251 bp, Glycine max
atatattccgttttgcggttctctggctaaaaggattgagcgatgggtcaagcactaggttgctatcaagttgatcagtcatatgtggctatcaaggagcattttggaaaatttgatgatgtcctagaacctggatgtcattgcctgccttggtgtcttgggtacagattgctggtagttgtcactgcgtgtgcagcaacttgatgttcgatgtgagacgagaaccaagaaatgctttgtcactgtggtgc

SEQ ID NO: 140593 - DNA, 262 bp, Glycine max
gttcttcatagttcagtgtgtcgtttaagaatgtcgcagttgctggataaagccaagaacttcgtgtcggagaaggtaaatgatatggccaagccggacgcgcgtgtcactgacgtggacttcaagcgcgtgagcaaagataatgtcgagtacttggccaaggtctctgttcgtaacccttattcgacttccatacccatttgtgatatcgactactctttcaaaagcgcatccagggagatagcatcagggaaaattccag

SEQ ID NO: 140594 - DNA, 229 bp, Glycine max
gaaagatggagaagcaacaacaacaagcaccatctaaggaaacaaaggcacagagtgatgaatcagttaaagaaagcagcactgaagggcttccaatggaggatagtccctatgtgaaatacaaggatttggaggattataagcgtcagggttatggtacacaaggtcatcaagaaccaaagacaggtcgtggagctggagccactgaagaaccactctctctgtgctg

SEQ ID NO: 140595 - DNA, 263 bp, Glycine max
  unsure (1)..(263): unsure at all n locations
ccctncttcttttgcgttcattctgttttcatagtgatgntcttctgaagtaatggcaaatcaccctttgncacactctcactctttccgcgagaggtttgatgnaactctcactggtcacaggaatgaaattttggncctttgtcaangcttgaagccaanggnaagggaatcctgnnanacnaccaggtggatgnagntttgaangnantcgtgnaggagagcagnaannnctccaaggtgnannggggganatnaaggna

SEQ ID NO: 140596 - DNA, 238 bp, Glycine max
  unsure (1)..(238): unsure at all n locations
ggatctggtatggacctcacaagcatatccaggactcttcctgggccactgagtgaccctgcaaaacttccgaagtggaactatggtaggtctagcacagatcaagctccaggggatgacaatgagatcattctatacccacaagcgattctcaaggacccctttagaanaggatacaatattcttgtcatttgtgatgtgtacaccccagctggcgagccacttccaaccatcaaga

SEQ ID NO: 140597 - DNA, 258 bp, Glycine max
ggctttttgctcttcttctacctttcaaggtttacaagtatagagatggcagagactcgcctgttaacctcggagtcggcgaacgattggcaccctgacaaactctgcagccggatctccgatgctgtcctcggcgcttgcctcgggcatgccgcagtcagcatagttgcgtgcgagacgtgcaccagaactaacttggtcgtggtcttcgtagaattcacggccaacgccaacgttggctgcgacagagatagtgcg

SEQ ID NO: 140598 - DNA, 235 bp, Glycine max
tccaagtgatgcaactgatgctgcaaaagagactacagattatgctgctcagaagaccaaggattatgcaagtgatgcacctgatgccgcaaaaagtactaaggattgtgccgcgcactcgaccaacggctatgccagtagtggtgcgcagagcaccaaggactgtgccactggtgctgcgcatataccaaggactatgcaagtaatgctccgcacgaggcaaggaccatgcaag

SEQ ID NO: 140599 - DNA, 256 bp, Glycine max
ctttctcgcatgaattttcgaacattgaacaggaaattaaccatggctcaacctgcaagcctcacaagaataggccttgctggcctggctgtgatgggccaaaaccttgctctcaacattgctgagaaaggctttcccatttctgtctacaaccggaccgcgtccaaggttgatgagacagttgaaagagcaaaacaagaaggaaaccttcctgtgtatggctaccatgaccctaaattctttgtccaatccattc

SEQ ID NO: 140600 - DNA, 263 bp, Glycine max
aaaagagagagtaactccaactccaagtcacattggtgacaaagttagaaacaaggagaaagaaagaagatggcaggaaagaaaatcccagatgtgttgctgaattcaggacacaaaatgccagttataggcatgggaacttcagtggagaatcgtccatcaaatgagacccttgcttctatctatgttgaagccattgaggtgggttaccgtcattttgacactgctgcagtgtatggaacagaggaagccataggcctagc

SEQ ID NO: 140601 - DNA, 264 bp, Glycine max
ggtatcccatggttcgcttatctgaaatacctgctaaacagttggaaaatgataaacctgagaagataaaaattgccataaggcctaggcctaacaaaatcagtttaaatgaagccaatgaagctggaaggaaaagcaatcctcctagaagtgtggaagagagaaaggtggaatatgatcgggcacgagcacgcatttttagtagctccagaagttgtgattcagatgatactctgtcccagacttcaactgatgagagaaatt

SEQ ID NO: 140602 - DNA, 266 bp, Glycine max
ggaataggggatgggatcagtttgaaacaaatgaggcattgtttggtgtaaaaagcacattcaatgaggacctttatacaacagagcttgaaaaagggcctcagacaacaggcttggcaaggcgagctttaagagtagcaagagacattgagggcgacgagacccacgatcttcatcttgcagcggaccgaggccttcacttgcatgcagactttgatactgatgcagaaactagattctcttcagtctataggggacacgtgttg

SEQ ID NO: 140603 - DNA, 260 bp, Glycine max
cacgaatttcattgcagagtgttattttgagtatcagcatcaatggctccaattgcagtgggaaacgtgattccagacggcattttggcttacttggatgaagaaaacaaaccccaaactgtctccattcactctctcgccaccggcaagaaagtcatcatctttggggttcccggtgccttcactcctacttgcagcttgaagcacgttcctggcttcattgagagagcagaagagctgaaagggaagggtgtggacga

SEQ ID NO: 140604 - DNA, 261 bp, Glycine max
gcaaaaagaaagaatcccaggcgaggagaaagatggaggggaaggagcaggatgtgtcgttgggagcgaacaagttccccgagagacagccaattgggacggcggcgcagagccaagacgacggcaaggactaccaggagccggcgccggcgccgctggttgacccgacggagtttacgtcatggtcgttttacagagcagggatagcagagtttgtggccacttttctgtttctctacatcactgtcttaaccgttatgg

SEQ ID NO: 140605 - DNA, 253 bp, Glycine max
ggctggaattgtatggataaattgtgctcaaccaagcttcattcaagctccatggggaggcgttaaacgtagtggttttggtcgtgaactaggagaatggggactcgagaactatttaagtgtgaagcaagtgaccaagtacatatctgatgaaccgtggggctggtatcagtcgccttcaaagctgtgatatgaattgctgttctaaaatctggcatgaataagttgtgggggacattaatttgtgatgatg

SEQ ID NO: 140606 - DNA, 259 bp, Glycine max
aggagagctgataaggagagactgaaggaaggtgaaatggctgatgaggaacagaagcgagtgcagaaagaggttatgatgtaacgctcttcatcttcaaaagatggcactgctaaatccacctcttcagagaagatagcaagtggctactgatgaagaccgcacttcacctactcacagtcaaattgatgagaaagaggatgctccagatgaagatgatggtgatgatgacgtgcaatggctgacagatacatcactt

SEQ ID NO: 140607 - DNA, 257 bp, Glycine max
gcgaaatccaggtgctgctggagttcatggacggatggtctctggaggggaaacacatcacgcaggagcagcagctggcagatctgtctcggcagattcttagggggctggcgtacctgcaccggcggcacatcgtccacagggacatcaagccgtcgaatctgcttatgaactcgcggaagcaggtgaagatcgctgacttcggggtgggtcggatactgaatcagacgatggatccgtgcaattcgtcggtgggg

SEQ ID NO: 140608 - DNA, 264 bp, Glycine max
gaatcatttacccttgggaaacttacatggggctgcgttctattggatttaatgttgttgcatctgttattatggctattgttatcaatgttggattgagttaccccactctacctaattggttcccttctctcctttttcctatctacatacacaacatacacaaggcaaagcatgggagtgactctggagtttatgacacagaaggacgttatgtgccagcaaatattgagaacatattcagtaagtatgctcgtacagtac

SEQ ID NO: 140609 - DNA, 185 bp, Glycine max
gagaagaagaaacttaatcgatcatcacttcacttcactaatacatcatggcagacgagacccagaacaagtatgagagctctgaggttgaggtccaggatcgtggtgtttttgactttctcggtaagaaaaaggatggagaagacaagcctcatcctcaggatgaggtcatcggcaccgagttt

SEQ ID NO: 140610 - DNA, 157 bp, Glycine max
agaaccgtcgtcgtcgacaatctcgacaattcctccgaggtttctatccaccgagtcagggagcttgccggcgaatttgggaacaacctctcctttcacaaggtggacctacgggacagggatgcactagagcacatttttgtttccacacaatttg

SEQ ID NO: 140611 - DNA, 204 bp, Glycine max
gtctttgcttccaccctttgaatctgcggaaatgcgagctttagcagagagcttaagtagggatatcattcgtggaagtccagatgtgaagtgggaaagcatcaaggggttagagaatgccaaacgtttactgaaagaggctgttgtgatgccgattaggtatcccaagtacttcactggtctgtaatcaccatggaagggtat

SEQ ID NO: 140612 - DNA, 252 bp, Glycine max
gcagagtagagcagcacagaagagggaaaacggcaccgccgccgtagaagaaaacaaccatggtgcacgtctccttttacaggaactatgggaagacattcaagaagccgcgtcgtccgtacgagaaggagcgtctcgacgcggagttgaagctggttggtgagtacgggcttcggtgcaagagagagctgtggagggtgcagtacgcgctcagccgcatccgcaacaacgcgcggaacctcctcaccctcg

SEQ ID NO: 140613 - DNA, 255 bp, Glycine max
atatgcttgtctcaaagattaagccatgcatgtgtaagtatgaactaattcagactgtgaaactgcgaatggctcattaaatcagttatagtttgtttgatggtatctactactcggataaccgtagtaattctagagctaatacgtgcaacaaaccccgacttctggaagggatgcatttattagataaaaggtcaacacaggctctgcctgttgctttgatgattcatgataactcgtcggatcgcacggcct

SEQ ID NO: 140614 - DNA, 255 bp, Glycine max
  unsure (1)..(255): unsure at all n locations
ggtttttatttctctcttctctctgcatcgcttcaggttcttctgaaaagatgtctcgcgtgtatgttggtaacttggattcacgagtcaccgagagagatctcgaagacgaattccgtgttttcggagttattcggagtgtttgggttgcacgtagaccacctggtnatgcttttattgactttgatgaccgcagagatgcacaggatgctatccgtgaattggatggcaagaatggttggagggttgagcttt

SEQ ID NO: 140615 - DNA, 259 bp, Glycine max
gggaaaaggcgtcttcataaacgccgcccaaaacttctcatacccttttattcattccattcgcttctagggctttctattctttgccgagaaaatgagagagtgcatttacgatccacattagccaggccggtatccaggttcgaaacgcctgctgggaactctattgccttgaacacggcattcagcccgatggacagatgccgagtgacaagaccgttggcggacgagacgacgccttcaacacatttttcagcgc

SEQ ID NO: 140616 - DNA, 156 bp, Glycine max
cctacacataccagagctgaagttgcagatgtttctgaagcagtcaggcaacgagctgatgctttgatgctttctggtgaatcagccatgggccagtaccctgagaaggccttaactgttttaaggagtgacagtttgagtattgagatatggtag

SEQ ID NO: 140617 - DNA, 251 bp, Glycine max
gcacgttggaaaaaggtggtggtactcagaaaccaataagataagaagagagagatagttaaagtgatagatcagcgtgggaacagatttccaactacagtgatcgagccacacaaggtgtgtaggaaaagtaccagagggcattgcgagcagcgagcgagacactcgacaccttgacgcaaaccgcgccattcaaaagcgcaagggcaaagatttcttgggcaaaactagagggccccccgtctaaaggg

SEQ ID NO: 140618 - DNA, 249 bp, Glycine max
cacacacaactactacaagtacttccttacaatcaaaaccaacaacaactatggcaagttatcaaaagcactacgatgatcagggtcgcaaggttgacgagtatggcaacgttgagaagcaaaccgacgaatacggcaaccctgttcatgctgctagtgtcacctatgtagccaccagaactgctgctggtggttacagtgatgacattaataagcaacatgataccaccaatgcctacggcgtagaca

SEQ ID NO: 140619 - DNA, 151 bp, Glycine max
atcactatcaccaatgacaagggtagactgtcacaggcagatatcgagaagatggttcaagaggctgagaagtacacatctgaggatgaagagcacaaaaagacggttgacgccaagaatgctttggaaaactatgcatacaacatgagga

SEQ ID NO: 140620 - DNA, 192 bp, Glycine max
aaacactcataacacaaagcacaaagcaaagctcatccttgagttaaaaaatggcagcagcttcttccatggctctctcatccccatccttggctggcaaggccgtgaagctgggcccatcagccccagaagtgggaagggtgagcatgaggaagaccgtcaccaagcaggtctcctcaggaagcccatggt

SEQ ID NO: 140621 - DNA, 247 bp, Glycine max
caaaacaaaaagtttacgttacaaatcgcataataaccgtcctaagtttattgagagaattttgcaagtgtgagaaacatggcatctcgtcaaaacaacaagcaagagcttgatgaaagagcaaggcaaggagagactgttgtcccgggtggaactggtggcaagagcctggaggctcagcaacaccttgctgaaggaaggagcaagggagggcaaacaaggaaggaacagctgggtacagaagggt

SEQ ID NO: 140622 - DNA, 159 bp, Glycine max
gtacttccttacaatcaaaaccaacaacaactatggcaagttatcaaaagcactacgatgatcagggtcgcaaggttgacgagtatggcaacgttgagaagcaaaccgacgaatacggcaaccctgttcatgctgctagtgtcacctatgtagccacca

SEQ ID NO: 140623 - DNA, 181 bp, Glycine max
ctactacaagtacttccttacaatcaaaaccaacaacaactatggcaagttatcaaaagcactacgatgatcagggtcgcaaggttgacgagtatggcaacgttgagaagcaaaccgacgaatacggcaaccctgttcatgctgctagtgtcacctatgtagccaccagaactgctgctgg

SEQ ID NO: 140624 - DNA, 249 bp, Glycine max
  unsure (1)..(249): unsure at all n locations
ttgacagtggttgangccatgacttgcggcttgccaacattcgccacatgcaatggtggtcctgctgagatcattgtgcacggcaagtctggcttccacattgacccttaccatggtgaccgtgctgctgatctccttgttgacttctttgagaagtgcaagcttgacccaacccactgggacaaganctcaaaggctggtctccagcgtattgaagagaagtacacatggcaantttactctcagagg

SEQ ID NO: 140625 - DNA, 249 bp, Glycine max
ctcgagccggctcgaggcaggattgctgatgaggatcctgacgagtcaactgacaaagaaaagaaagaagatgcatcctctgacaatgatgagaagaaaggtcaatattctaagttctggaatgagtttggtaaatccattaaacttggtatcatcgaggatgccaccaacagaaatcgtttggcaaaactgctcagatttgagagcaccaagtctgagggtaaattgacatctctggatcagtacata

SEQ ID NO: 140626 - DNA, 245 bp, Glycine max
ggtagatttgagagtttcttcctatctagcactgaagctcaacaatcctacttgcaaggattcagcaggaacattttagaggcctcctacgataccaaattcgaggagataaacaaggttctgtttagtagagaggaagggcagcagcaaggggagcagaggctgcaagagagcgtgattgtggaaatctcgaaggaacagattcgggcactgagcaaacgtgccaaatctagttcaaggaaaac

SEQ ID NO: 140627 - DNA, 253 bp, Glycine max
attaaacgcctggagtctgagctctctggtgactttgagagagctgtgtaccgttggatgctggaacctgcagatcgtgatgctgttttggccaatgttgccatcaagaatggcagcaaaggttaccatgtgattgtggaaattgcttgtgtgctttcagctgacgaggtcttggcagtgaagcgtgcctatcacaaccgttataagagatctttggaagaagatgtggctactaataccactggtgatattc

SEQ ID NO: 140628 - DNA, 243 bp, Glycine max
caattttcacaatcgaggcctgctgcaataacccctaatgtttcacctcgaatgcctctataccctctaggggctcctgcgataggacaacaatttttgtatgggcaagcagctccagccacgatacctcaagctgcatttggttaccagcagcattttgttcctggaatgaggccaggtggtgctccaaacttctatgttccactggttcagcagggtcaacagggacaacgcccaggagga

SEQ ID NO: 140629 - DNA, 243 bp, Glycine max
ctgaaatgaatggtgtttattgttctagtaggcccatgcgaataggtgttgcaactcccaagaaaacttatggctaccaacaacaatattcttctcaagctgtgctattggccggtggacacgcagctaatggtgctgtggcccaaggttcccattctgaaggggatttaaacaacaccactatatttgttggagggcttgattctgacaccagtgatgaggatctcagacaaccatttttgc

SEQ ID NO: 140630 - DNA, 166 bp, Glycine max
aagaaaatcattccaatacacatggcttccgaaaggcaagcgttgatgcttattctcttaacaacattcttcttcaccataaagccttcacaggccagtactactggtggcataacaatctactggggccaaaacattgacgacggcaccttgacttccacatgcg

SEQ ID NO: 140631 - DNA, 239 bp, Glycine max
gtgggttaactgtgagcagcagtactcatccaaaacgtaccaagcacccttctgccactccacccaatgctctagagccaacacccaccaatgcctcagttgccccgcggcatcaaggccagggtgccacaaaaacacgtgtggcctcatgtccactaatcccatcacccaacaaaccggtttaggtgaactaggagaagacgttcttgcaatccacgccacacaagggtcgacccaac

SEQ ID NO: 140632 - DNA, 169 bp, Glycine max
ggcgaggattcttgtcattgggaacaaagttgcttgagaatttggcacaagatgacttccggcagactctgcctagatttcaacctgaaaatttggagcagaacaagataatattcgcaagggttaatgaactggctgcaaagaagagatgtacacgatctcagcttgc

SEQ ID NO: 140633 - DNA, 250 bp, Glycine max
ccgctacgaagctggcgtcgtcccacccggagcccgtttcgaaccgccgcgttatgaagccggcgtcaaagcgccctccatttaccattccgagagaggtccaacgacttcccaggtcctcgccgtcctcgccggcctcccagtcggtggcatcctgctcctcctggcgggattgaccctggcaggaaccctcaccggactggcagttgccacgccgctcttcgtcctcttcagcccggtgctggttcca

SEQ ID NO: 140634 - DNA, 239 bp, Glycine max
cttttccttttttggtcgcttgctttcagctggaccagactacattcggaataagatctactttgcaaggactggttggctatcaattgcacttataccaaccccagttgcgttcttcctccttgctgcatcagacagtcttctggcacttcagacaggcaccgcactgattggattgagctctggttttatatttgcagctgctgtgtcagttacatctgagttgtttggacctaaca

SEQ ID NO: 140635 - DNA, 195 bp, Glycine max
atgacgatggcgtttagggtgcgaaaccctgacctccgctttctcattcttctctctctcttgtccatcacttccgccaaggtcttcttcgaggagcgtttcgatgacggatggggaaatcgttgggttaaatcagattggaaaaaagatgagaacctggctggggagtggaaccacacctctggccaatggaat

SEQ ID NO: 140636 - DNA, 234 bp, Glycine max
ctcggaagaacgtgtacagaggaatcaggcaaaggccgtggggcaagtgggccgcggaaataagggacccacataagggcgtccgcgtctggctcggcaccttccccaccgccgaggaagccgcccgagcctacgacgacgccgccaagcgcatccgcggcgacaaggccaagctcaacttcccggccaccgctccgccaccctccaaaaaacaacgctgcctcagccctgaca

SEQ ID NO: 140637 - DNA, 247 bp, Glycine max
cggcgcggcacccacacacacagttcgtcggaatgggaagggtgattcgcgctcagcgtaagggtgctgggtcggtgttcaagtctcacactcaccaccgcaagggtccggcgaggttccgcagcctcgacttcggcgagcgcaacggctacctcaagggcgtcgtcaccgacatcatccacgaccccggtcgcggcgcccctctcgccaaggtggcattccgccaccccttccgctacaagaagca

SEQ ID NO: 140638 - DNA, 242 bp, Glycine max
  unsure (1)..(242): unsure at all n locations
ctcgaacctggatgcgctattttgatgcataacaaggttctctcngttgttgggcttcttcaagatgaagttgatccaatggtctctgttatgaaggtcgaaaaggcccctttggaatcatatgctgatattggtggtttagatgctcagatacaggaaattaaagaagcagttgagcttcccctgacacatcctgaactgtatgaagacattggtatcaagcctcctaagggagttatttt

SEQ ID NO: 140639 - DNA, 230 bp, Glycine max
agatcatgcaggaaaagccatgggagatattggtggacgtgggaaagccagagagactcacgagctgggtgcacactttgaatccctggctgacaaagtaactgaccatgcagcagccaatgtagttggaaacaaagagagtcaaagagaagctcgtggtggtgttcgtgatgttgggaagttcgaaatgagaactgaagggggagaaaaagggaacaaggataggccag

SEQ ID NO: 140640 - DNA, 206 bp, Glycine max
cctcactcaaactcgggatcacagataccaacaacagttcttgcactgaggtttcacgatgttgctggaacttgcacttggtttgtttgtgttagctttgtttctgcacttgcgtcccactccaagtgcaaaacaaaaagcacttcgccacctcccaaaccctccaagcccaaagcctcgacttcccttcatgggccatttacacc

SEQ ID NO: 140641 - DNA, 229 bp, Glycine max
ctcttcgccaaagtcaacaaaggaaaactcaccgaagatctcgccagaaagtacttccaacaactcatcagcgccgtcgacttctgtcacagccgcggcgtcacccaccgcgacctcaagccggagaatctcctcttagaccaaaacgaagacctcaaagtctccgacttcggactctccacgctgccggagcacgccgcgccgacggcatgctcgtaccccggtgtgg

SEQ ID NO: 140642 - DNA, 203 bp, Glycine max
gccaaagcttccaagtcgaaaggagcttaagccttatcccacaacatgctatattgagtataaaggccatgaagatgctgttacatcaatttcactcgaagcttcaggacaatggatggcttcaggttcaagtgatggaactgtccgtatctgggaggttgaaactggcagatttcttaggcggtgggaggttggtaaaatct

SEQ ID NO: 140643 - DNA, 231 bp, Glycine max
gagcaaatagctgaggttgtgagccgctggaccggtataccagttacaaggcttggccaaaatgaaaaagaaagattgattggacttggtgacagattgcacagcagagttgtaggacaagaccaagctgttaatgctgttgctgaggctgtgttgagatctagagctgggctaggaagacctcaacaaccaactggttcattcctattccttggtccaactggtgttggt

SEQ ID NO: 140644 - DNA, 242 bp, Glycine max
ttttgaaggggggctgaaatttgctacaaaagcccaaaggctgtttcctgagattcagaacattcttcagatccttgctgtttgtgaggttcactgtgctgcacagaagacatactctgggtcatacatggactggtatggaattcttaagactgaaaagtccgccgatgaagcaaccataaagaaacagtataggaagcttgcactgctacttcatcctgacaaaaataaatctgctggtg

SEQ ID NO: 140645 - DNA, 197 bp, Glycine max
cggctcgagcgccacaatatgctcattacctgttccgggttatatgtttggcaaagctattatctgttctgatgctgcagcagaggctgcaagatatggttttacagctgtggacaggccagaagggttcttagttttggccattgcttctctaggaaatgagattaccgagttgaaaagcccccctgaggatacat

SEQ ID NO: 140646 - DNA, 244 bp, Glycine max
acaggttatgatggcaaagatgtcgttattgaaaatttaaggcagctatgtgttttcaaggtggcaaatgaaaccgaaaagccttgggtgtggtgggactatgtcactgattttcaaattagatgccccatgaaggagaagaagtacaataaggaatgtgcaaatgctgttattaaatcactgggtctcaatacggaaaagattgaaaagtgcatgggagatccagacgccgatactgataatc

SEQ ID NO: 140647 - DNA, 235 bp, Glycine max
cttggagccacacccctcagttccagattgggtactgccaacagtgccctgataaggttcaatggccctctcactttggttccaaacctcctctatatttcaatgctggcatgtttgtttatgagcctaatctcgacacctaccgtgatcttctccaaactgtccaactcaccaagcccacttcttttgctgagcaggactttctcaacatgtacttcaaggacaagtacaagcc

SEQ ID NO: 140648 - DNA, 233 bp, Glycine max
gttttagcgcagttcttctagatttaaggaagatgggtaaggaaaaggttcacatcagtattgtggtcattggccatgtcgactctgggaaatccactaccactggtcacctgatttacaagcttggaggcattgacaagcgtgttattgagaggtttgagaaggaagctgctgagatgaacaagaggtctttcaagtatgcctgggtgctggacaaacttaaggctgagcgt

SEQ ID NO: 140649 - DNA, 200 bp, Glycine max
ggcggagacagagacgtttgctttccaggctgagatcaaccagctcctcagtctcatcatcaacaccttctactccaacaaggagattttccttcgtgaactcatcagcaacgcctccgatgctttggacaagattcgatttgagagtttgacagacaagagcaagctcgatgctcagccagagttgttcattcatatta

SEQ ID NO: 140650 - DNA, 218 bp, Glycine max
gaagcactcatcattcttcgtttgtctaatatccgccttctctgaattgtaaaaatgtcgctcggagaaactgcttgttgcatacgcagctctcatccttcatgaagatggaatcagtgtaactgccgacaagatcagcaccttgttggaaactgcaaaggttcaagtagatacctattggccaacctaatttgcaaaacttgctgagaagaaaatct

SEQ ID NO: 140651 - DNA, 171 bp, Glycine max
ttcagatccgccaggtcctcacccaggctgttagcctcggcatgattgttacctctgcactgataatatggaaggcattgatgtgcattactggcagtgaatctcctgttgttgttgttctttctggaagcatggaacccggattcaagcggggagacatcttattcttgc

SEQ ID NO: 140652 - DNA, 238 bp, Glycine max
ggcgagaaagacaatgtggtaaggcagatagaaagacaagtgcaggagcttgcgttccctgggtctgcacaagatgttgagaggctattaaagaagcagagggaatcctactttgttgatgctcagcctcagcagaaggaggaggggagtaagggaagaaagggtccttttccttcaatcttaggtgctctctactgaataactacgtaaatgtatgctgtaagagctcatcgtgagc

SEQ ID NO: 140653 - DNA, 242 bp, Glycine max
aaaaatgtctcacttcggacgttcgggtcccccagacatttccgacacttactctcttctcgttctcaacatcaccttccgtaccaccgccgacgacctattccctctcttcgacaagtacgggaaggtcgtcgacatcttcatccccaaggatcgaagaactggtgagtcaaggggttttgcattcgtgcgttacaagtatgctgatgaggctcagaaggccgttgagaggctcgacggga

SEQ ID NO: 140654 - DNA, 245 bp, Glycine max
attcttccaccaagttatgggtataccttgtgttgcttcttttctccctcttaggtctctcttctagttccagcatatcaactcatcgttccatattggaccttgacctaaccaagtttaccacacagaaacaggtgtcttcactgttccaactatggaagagtgagcatggacgtgtctaccataaccacgaagaagaggcaaagagacttgagattttcaagaataacttgaactatatcagg

SEQ ID NO: 140655 - DNA, 171 bp, Glycine max
caccgatgaagaactcgtcgttcactatctctgccgcaaatgcgcttcgcaagaaatcgcagttccaataatcgccgaaatcgatctctacaagtacgacccatgggaccttccaggaatggctttgtacggagagaaagaggggtattttttcacgcggagggaccgaaa

SEQ ID NO: 140656 - DNA, 230 bp, Glycine max
ggaaggagccgtagcagcagcggaagctctagcttgggtagcgaatcacaatggcgagaggattgaagaagcatttgaagaggcttaatgccccaaagcattggatgcttgacaaactgggtggtgcatttgctcctaagccctcatctggaccacacaaatccagggaatgcctgccactcatactcattttgcgaaaccggctgaagtatgctctgacataccgtgaa

SEQ ID NO: 140657 - DNA, 150 bp, Glycine max
ccccaactaacaataattccttcacttgcagaacttagttctctgttgcatcatcatcatcttcattagtgttagccctaaacttcaccttcaaccatgaccacagtgccaccacacagtgtccaagtgcacacaacaacacacgttacg

SEQ ID NO: 140658 - DNA, 170 bp, Glycine max
caacaacaactatggcaagttatcaaaagcactacgatgatcagggtcgcaaggttgacgagtatggcaacgttgagaagcaaaccgacgaatacggcaaccctgttcatgctgctagtgtcacctatgtagccaccagaactgctgctggtggttacagtgatgacatt

SEQ ID NO: 140659 - DNA, 241 bp, Glycine max
ctttcaaaagcgcatccagggagatagcatcagggaaaattccagacccaggatcgttgaaggcaaaggacacaacaatggtggatgtgccagttaaggttccatacagcatattgatgagcttggcaaaggacattggtgctgactgggacatagactatcaattggatcttggtctggttattgatgttcctgtcattggcatcttcaccattcctctctctcagaaaggagagatcaa

SEQ ID NO: 140660 - DNA, 276 bp, Glycine max
ctttgttgcaatatcacaaacacctcgtccgtcacaatgcagctagctgtggcggccaacgctgtcgtttcaccgtcgccgttccgacctcatccccttctccggtcatccttctccggcgtctccgttaagctcactccccaatccataacgttttcacgcttgaagcccctcaccgtcttcgccgccaccaagaaggccgtcgctgtcctcaaggggacctccgccgtcgaagcgtcgccactctcatccaagaagacgatggcccgacgacag

SEQ ID NO: 140661 - DNA, 278 bp, Glycine max
caagccccgatgagtaggatggcgcggcggtcgctgcaaaacccagggcgcgagccggtgctggacggtcgtcggtgcagatcttggtggtagtagcaaatattcgcatgagaactttgaaggccgaagaagggaaaggttccatgtgaacggcacttgtacatgggttagtcgatcctaagggacgggggaagcccgtctgatagcgctctgtgcgcgtactccgaacagaatcgggttgaaattcctgaaccgggacgtggcggcttgacggcaag

SEQ ID NO: 140662 - DNA, 266 bp, Glycine max
gtttgtttgtgttagctttgtttctgcacttgcgtcccacaccaagtgcaaaatcaaaagcacttcgccacctcccaaaccctccaagcccaaagcctcgtcttcccttcattggccaccttcacctcttaaaagataaacttctccactatgcactcatcgatctctccaaaaagcatggccccttattctctctctccttcggctccatgccaaccgtcgttgcctcccccctgagttgttcaagctcttcctccaaacccacg

SEQ ID NO: 140663 - DNA, 266 bp, Glycine max
gcctgatacagtcactggggatattgtctttgtcctacaacagaaggaacacccaaagttcaaacgaaaggccgatgacctttttgtagaacacacattgtctcttactgaggcactgtgtggcttccagtttgtgctggctcacttggatggccggcagcttcttatcaaatctaaccctggggaggttgttaagcctgatcatacaaggcaataaatgataggggatgcccaactaccagaggcacttcctgaagggaaagctt

SEQ ID NO: 140664 - DNA, 268 bp, Glycine max
gacgaatacggcaaccctgttcatgctgctagtgtcacctatgtagccaccagaactgctgctggtggttacagtgatgacattaataagcaacatgataccaccaatgcctacggcgtagacactggtagacagcattctagtggtggctacgatggtgacactaataaacatcatggaattactggtggctataatgatgacaccaatagacatcatggactaccggtgtctatggtatagacaccgataggcaacaacatgggac

SEQ ID NO: 140665 - DNA, 268 bp, Glycine max
gctttggacaagattcgatttgagagtttgacagacaagagcaagctcgatgctcagccagagttgttcattcatattattccagacaagactaacaatacactgaccattgttgacagtggtattggcatgaccaaagctgatttggtgaacaacttgggtacaattgctagatctggtaccaaggaattcatggaagccttggctgctggtgctgatgttgtatgattggacagtttggtgtggggttctactctgcatatcttgt

SEQ ID NO: 140666 - DNA, 266 bp, Glycine max
cagtcctggtggacctcaatggaaatcacttgtgggttaactgtgagcagcagtactcatccaaaacgtaccaagcacccttctgccactccacccaatgctctagacccaacacccaccaatgcctcagttgccccgcggcatcaaggccagggtgccacaaaaacacgtgtggcctcatgtccactaatcccatcacccaacaaaccggtttaggtgactaggagaagacgttcttgcaatccacgccacacaagggtcgaccc

SEQ ID NO: 140667 - DNA, 272 bp, Glycine max
gacttaaggaccatccttggctccgttggagctgacgcgaatgatgacaacatcagcaacttcttgtctgaagttaagggcaaagacattgcggacttatcgccgccggtagggaaaagttggcctccgtgccttctggcggtggcgccgcggtttccgtggccgctgctcccggtggtggcgctgctgcaccggctgccgccgaatctaagaaggaggaaaaggggaagagaaggaggaatcggatgacgacatgggattcagtctctttg

SEQ ID NO: 140668 - DNA, 267 bp, Glycine max
gccttgggaattagaatggctctcctcggatcaaacataacaagcgaagttggactccgattgctcctttgtccacttggttccaacgttgtaattagaacagcatgctgtactgtcggagttgctatgcctgtgtacactacgttcaaggcaatagaaagtaaagatcaagatgctcaacataggtgtcttctctactgggcagcctatggttcattcagcttgttgaagtgttcacagacaagcttatttcttggtgtcctatgt

SEQ ID NO: 140669 - DNA, 264 bp, Glycine max
  unsure (1)..(264): unsure at all n locations
aaaaggtaaactttttgcaacaaccatggttgcaatggcagcagcaacagcatccacccagttgattttctcaaagccttgttccccttcacgtctatgccccttccanctatgtgtctttgacactanacaagtgctatcaagtggcaggagaaggcatgtggggggttctggagttaggtgcatggctgtgggggaagcagcaaccactgggacaaaaggagangtggatatgagcttcaaacactcactagctgcttgctg

SEQ ID NO: 140670 - DNA, 257 bp, Glycine max
attgagtttgagatctgattgtgcggcgacgatggagaacaacgacagcatcatatcgcgggagaagatcgaccaggcagcggtgtggctcggctccgccgtctcttccgctttcttttcctcattggaacgcttttcctgcgtcaacgtcgccacctctgaccccgacaacgacgatgacgacgacgattattactccaccaccaccgccactcccactccgcatccaccaccaccatcaccgccctcgccaccac

SEQ ID NO: 140671 - DNA, 264 bp, Glycine max
caattatgtaaaccccatactatggacaaaccctgtgaaccctatggctgattcagattgctacttgtggaacaatgaccagaatcagctatgctacaattgtaatgcgtgcaaggctggtctattgggtaacctcagaaaagaatggaggaaagcaaatatcattctcattgtggcagtggtggtcctcatatgggtctatgtcatagcttgtagtgcttcaggaatgcccaaacagaaaacctcttcgaccgtgacaaacag

SEQ ID NO: 140672 - DNA, 265 bp, Glycine max
  unsure (1)..(265): unsure at all n locations
ggaatctgtccacaaaaattagaatgnccaattcaggtggttgataagatttctatgactataaataagataagggatgaagaactgtggccacagctgaaggaattaatccaggggttgaccagaatgtggaaatccatgcttgaatgtcatcatgatcagtgtgaagcaattagagaagccagaatactgggttccattggatccaggaagaagagcgtgatagtcatctccaggcaaccaagcagctcgaacaagagcttat

SEQ ID NO: 140673 - DNA, 269 bp, Glycine max
cgagaatcagtctttgtgttccaaatggctcgtacgaagcaaacagcaagaaagtccaccggaggaaaagctccaaggaagcagctcgccaccaaggcagcacgcaagtccgctccggcgacgggcggcgtgaagaagccccaccgtttcaggccggggacagtggctctgagggagattcggaagtaccagaagagcacggagcttctcataaggaagcttctttccagaggctcgtaagggaaatcgctcaagacttcaagaccgat

SEQ ID NO: 140674 - DNA, 267 bp, Glycine max
agaaggagtcaacccttcaccttgtccttcgtctccgtggtggcatgcagatcttcgtcaagactctcactggcaaaaccataaccctagaggtcgaaagctctgacaccattgacaacgtcaaggccaagatccaggacaaggagggaatccccccagaccagcaacgtctcatcttcgccggaaagcaacttgaggacgggcgcaccctcgccgactacacatccagaaggaatcaacccttcacctcgtcctccgtctccgtgg

SEQ ID NO: 140675 - DNA, 255 bp, Glycine max
gctcggacctcggctcgaggtcgggacccgaaagatggtgaactatgcctgagcggggcgaaccagaacgaaactctggttcgatgcccgcagcgatactgacgtgcaaatcgttcgtctgacttgggtataggggcgaaatactaatcgaaccgtctagtagctgcttccctccgaagtttccctcaggatagctggagcccgcgggcgagttctatcgggtaaagccaatcattagagtcatctgggcgcaac

SEQ ID NO: 140676 - DNA, 264 bp, Glycine max
gatgagagtgcggtttcctttgttggtgttgctgggaactgttttcctggcatcagtttgtgtctcattaaaggtgagagaggatgagaataaccctttctacttgagaagctctaacagcttccaaactctctttgagaaccaaaacggtcgcattcgtctcctccagagattcaacaaacgctccccacaacttgagaactgtcgagactaccggttgtccagtttcagtcaaaacccaacacaatccttctcccccaccat

SEQ ID NO: 140677 - DNA, 261 bp, Glycine max
cttcttctcttgcggctagggttttagcgcagttcttctagatttaaggaagatgggtaaggaaaaggttcacatcagtattgtggtcattggccatgtcgactctgggaaatccactaccactggtcacctgatttacaagcttggaggcattgacaagcgtgttattgagaggtttgagaaggaagctgctgagatgaacaagaggtctttcaatatgcctgggtgctggacaaacttaaggctgagcgtgaaagagga

SEQ ID NO: 140678 - DNA, 262 bp, Glycine max
gtgaggctttggccacccttgtcgtgaataagctgcgtggtatccttaacgttgctgccattaaagctcctggctttggtgagcggcgaaaggccctgcttcaagacattgctatattgactggtgctgagttccaagctagtgatctgggtctgcttgttgaaaacacctcagtggagcagcttggtttggctaggaaaattaccatctccaaggattctaccactgtcattgctgatgctgcgacaaaggatgagttgca

SEQ ID NO: 140679 - DNA, 258 bp, Glycine max
acaaaattgaactgtaattgtagtagtagacagtagcaccatgagccaggaacagctcaagaaacctcaaggggagcaggaccccatcaaatacggcgacgttttcaaagtctccgacgaactcgctttcaaacccatcgcgccaagagacgcagctctcatgcaagccacggagaaccaagcattgggccaaactcaaaaaggaggtcccgcctcgtgatgcaatccgccgcaaccgaaaacctccgcgccggcgtc

SEQ ID NO: 140680 - DNA, 259 bp, Glycine max
actcgagccgaatcggctcgagtgttcgtgctttattcacacttgacagccaaggtctcccacactataatattcctggaagaggttgatagcatgcttgggcaacggaccagagttggggagcatgaagcaatgaggaaaataaagaatgaatttatgacccattgggatggacttttgacaaagcaaggggagcggatccttgttctcgctgcaccaataggccatttgacttggatgaagctattattaggcgatt

SEQ ID NO: 140681 - DNA, 262 bp, Glycine max
caatactagcgatactgataagagagataccaacaagaaaagaaaaaaagaagagttgagattccctttgaagaaaagatggcatcccataggcaaagctatgaagctggtcaaactaagggccgaactgaggaaaagacgaaccagacgatgggcaatattggagagaaggctcaagctgcaaaggagaagacccaggaaatggcccaagctgcaaggagaagacccaacaaacagcccaagctgccaaggacaagacttg

SEQ ID NO: 140682 - DNA, 262 bp, Glycine max
  unsure (1)..(262): unsure at all n locations
cttgctctatactacacagtacacacactagaagaattatggcttccatcctccactactttttagccctctctctttcttgctcttttcttttcttcttatccgactcagtcacccctacaaaaccaataaaccttgttgttctacccgttcaaaatgatggttccacagggctccattgacacaanctccaaaaaagaacccctctaatgcaagtacagtcctggtggacctcaatggaaatcacttgtgggttaactgt

SEQ ID NO: 140683 - DNA, 263 bp, Glycine max
cgctaccctacttcaaagggtgctataatattcggggatgcacctaacaacatgcgacagtttcaaaaccaagatattttccacgatttggccttcaccccattaaccatcaccctgcagggagagtacaacgtgagagtcaactcaataagaatcaaccagcacagtgtgttcccactgaacaagatatcatccaccatcgtagggtcgacctctggaggaacatgattagcacctcaacttcctcacatggttctcagcaa

SEQ ID NO: 140684 - DNA, 255 bp, Glycine max
  unsure (1)..(255): unsure at all n locations
accanacacaagtacacaacacaacagcaacatatggcgtctgaacaattggctcgcagagagaacaccatcatcgagaaggagattcacgttgaggaacacatggttcccacgatggccacccacttcgagcaccttgcggagcaagctaaagaatctgacatcaccgctgggaaggatactccgcagggtagcatagcagccttgcaagctggagatagggtaaagatcatccaggaaaagccatgggaaata

SEQ ID NO: 140685 - DNA, 269 bp, Glycine max
caaaattgaactgtaattgtagtagtagacagtagcaccatgagccaggaaccgctcaagaaacctcaaggggagcaggaccccatcaaatacggcgacgttttcaaagtctccgacgaactcgctttcaaacccatcgcgccaagagacgcagctctcatgcaagccacggagaaccaagcattgggccaaactcaaaaaggaggtcccgcctcggtgatgcaatccgccgcaaccgaaaacctccgcgccggcgtcgtgggccgcca

SEQ ID NO: 140686 - DNA, 265 bp, Glycine max
ccaaaacagtaaagctaacttcaacacctttaattttctaaaagtaattcagcggctgaataccaagcggagaagatgagtcaggagcagccacggcgtcccaaaggccaaaaccccatcaaatacggcgacgtttttgtcgtctccggcgaccttgcacagaagcccgtcgcaccggaagatgctgccatgatgcaaagcgcggaagctcgagtgctcggacaaacccaacccggcggacagcttccgtcatgcaatctgccgc

SEQ ID NO: 140687 - DNA, 265 bp, Glycine max
caagaaagaacttccttataaccaaaaccaacaacaactatggcaagttatcagaagcactacgatgatcagggtcgcaaggtcgacgagtatggcaatgttgagaggcaaactgacgaatatggcaacccggttcatgccactagtgtcacttatgtagccactaaaagtgttggtggctacaatgatgacactaataagcaacatgataccaccggtgtctatcctgagaaagataccggtacgcatcattttggtcgtggtt

SEQ ID NO: 140688 - DNA, 261 bp, Glycine max
ggagtatgacatttcagaaacaaagatggatccactgcaatcaactgaaggaactggggaagccattcttttggaaggaagagcattaccttggtggcagcagtttcctaagcgctgggttattgtactgctgtgttttacagcatttcttctgtgtaacatggatcgtgtaaatatgagcatagcaatacttccaatgtcacaggaattcaactgaacagtgcaacagttggcctaattcagtcatcttttttctggggt

SEQ ID NO: 140689 - DNA, 259 bp, Glycine max
gcctcaccacgaggaagtttatgcaaaggaaacaaagatgggtgaatattcagattatgcgactcagaaggcgagggaaacgaagcagaaggctggggagtatacagactatgcggctcagaaagcaaaagaaaccaaagactatgctgctgagaaggctaagaatgctaaagataccactgtgcagaaagctggagagtacaaggattataccgtgagaaggctaagaatgctaaagataccactgtgcagaaagctg

SEQ ID NO: 140690 - DNA, 251 bp, Glycine max
cagaggagtttcatcttgtaatcaaaagagtttatcttatagtaagaaatcgatgtcttactccattttaaggaacaaaacaagagaacaatagcctgacaaagggtttagccataaaatcgaatccatcattgatttgagatattgataaggtgaatactcatttctcgtcaatgctaggcataatgcgggtatagggacctaaaaagattatcttttcttcctatcttatgaactttaaggtgtatgaa

SEQ ID NO: 140691 - DNA, 258 bp, Glycine max
tttgaaattggctcaacaagtaaaagtgaggcagagggttgtggccacagcagttacatacatgaggcgtgtttacaccaggaagagtatggctgaatatgatccacgcttggtagctccaacatgcttgtacctggcatcaaaagcagaagaaagcacagtgcaggctcggcttcttgtattttacattaaaaaattatacagtgatgacaatatagatatgaaatcaaggacatacttgaaatggaaatgaagatt

SEQ ID NO: 140692 - DNA, 260 bp, Glycine max
ccgagctagctagctagcaagcaagcacagagatggaggcaaagcgaggacatgacctcatgtgcttggcacgtgtttcactcttcctctgcgctctaaccctatccgctgctcacggaagcaccacggttcaagacatcgcgagaaagttgaaactcggggacaacgagcttctgcgcacggagaagaagttcaaggttttcatggagaattacggaggagctactccacagaggaggagtatttgcgccgtttgggga

SEQ ID NO: 140693 - DNA, 266 bp, Glycine max
ggaattggaaagcatctgcaatccaatcattgccaagatgtaccaaggtggtgctggtccagacgtgggtggtgctggtgcagcagaggatgagtatgctgctcctccttctggtggaagtggtgctggccccaagattgaggaagtggactaaatgtagttgctttcctccagatacctgttttaaaaacttattttactttatgcttttttaattggattttaatcgcatgatttttgttggatgggatcaaactattttccct

SEQ ID NO: 140694 - DNA, 268 bp, Glycine max
tacggatctctcagcttcattatgttttgccaagaattcttcgcacggtcaaataggtggatcagatgacgacgtggtgattgtagctgcatatcgtactgccatctgcaaagcaaagcgtgggggctttaaggatacccttccagatgacctgcttgccacagttctgaaggctgtaatagagaaaacaaatgtgaacccagcagaagttggagacattgtgtgggcactgtactggcacctggatcagatagaggaattgagtgca

SEQ ID NO: 140695 - DNA, 268 bp, Glycine max
cttcatcgtgagaagaaaaggttgccatcttgtcttgactggttaggatggtgcacatgggatgctttctatactgatgtcacagctgagggtgttgaggaaggcctgaaaagtctatcacagggaggtacacctccacgattcctcatcatagatgatggttggcaacagattgaaaataaagcaaaggatgctactgaatgtttggtacaagaaggagccagtttgctactaggttgactggtattaaagagaatactaaatttca

SEQ ID NO: 140696 - DNA, 262 bp, Glycine max
atggggcttcttgggagtccacatatggggacttcttcctctcttggtaattccaatcagctcatagctcatggagattccctcctttcatgggaacctccacttttggggactctggggggaccatctatgggaaactcccacttatgcactctctggtatgggactcgatcccatccttcagagctaactgcagggttctataacacagctaacaaggatgggtatgaaccagttgcacagatgtgtgctcggaactcgt

SEQ ID NO: 140697 - DNA, 257 bp, Glycine max
  unsure (1)..(257): unsure at all n locations
atttcgttactttcatttgttgtgcaatcttacaagttccaaacttctctattttgttattatttgttctcacttctaaaacatataagttatcgccnggtatatgatcatggcttctaaggtggtttcggtttttgttatagcgatgatgttgtttgccatgaactgtaactgcactagtgttggccacatgccttcaaccaaagaggaaggtcagattttcaggagtttaaagccaagaccacacaaacggcgaa

SEQ ID NO: 140698 - DNA, 260 bp, Glycine max
ggccatcaaagaccttgtttgtaattaattttgatacataccataccagaacaagggacttggagaggcactttgaaccatatggaaagattgtcagtgtgaggatcagaaggaattttgcttttgttcaatatgaatcagaggatgatgctagcagagcactggaagctacaaatatgagcaagttactggatcgagttatttctgtcgagttgctgttaaagatgatgatgataggagaaatggatatagccctgaga

SEQ ID NO: 140699 - DNA, 255 bp, Glycine max
  unsure (1)..(255): unsure at all n locations
aaagaaattaagagagttttttttgttcctcactgactaagccttaacnatgagaaccaaactttctttagctatctttttcttggttcttttagccttattttcaaacctagcctttggcaaatgtaaagaaaccgaggtagaagaagaagaccctgagctcgtaacttgcaaacaccaatgccaacagcaacagcaatacactgagggtgcaagcgggtatgcttgcaaagttgtgacaggtatcatcgtatg

SEQ ID NO: 140700 - DNA, 258 bp, Glycine max
gtgagaaacaaagaaaggaaataattgatctttgaaaatgcagggaggaaagaaagctggagagtccatcaaggaaacagctgcaaacattggtgcttctgccaaggctggcatggagaaaaccaaggccactgtccaggagaaggcagaaagaatgacggcacgtgatccgatgcaaaaggagttggcaacccagaagaaagaggcaaagatagccaggcagagctggacaagcaggcggcgcgtcacataacacgg

SEQ ID NO: 140701 - DNA, 257 bp, Glycine max
agttcccaaattcattttaatcctaattctgcacttcttgatcattcgattcttctcctcaagatgcagatattcgtaaaaactttgaccggcaagaccatcacccttgaggtggaatcctccgacaccattgacaacgtaaaagctaagattcaagacaaggaagggatcccacctgaccagcagagacttatctttgcgggtaaacaactgaggatggtcgcacccttgccgattacaacatccaaaaggaatca

SEQ ID NO: 140702 - DNA, 255 bp, Glycine max
ctcagagagaaagagagagagagagagaaaaatggctgatacaagtggaggagatgcagtgagaccggtggtaatatgtgataacaagtgtggctgcacagttccctgcactggtggttccacttgcaggtgcacaagtgtcggcatgacaactggaggcggtaatcacgtgacatgctcgtgcggagagcactgtgggtgcaatccatgccatgtcccaagactgcggcttctggaactggttgcagatgtggc

SEQ ID NO: 140703 - DNA, 255 bp, Glycine max
tcacacacaactactacaagtacttccttacaatcaaaaccaacaacaactatggcaagttatcaaaagcactacgatgatcagggtcgcaaggttgacgagtatggcaacgttgagaagcaaaccgacgaatacggcaaccctgttcatgctgctagtgtcacctatgtagccaccagaactgctgctggtggttacagtgatgacattataagcaacatgataccaccaatgcctacggcgtagacactggta

SEQ ID NO: 140704 - DNA, 258 bp, Glycine max
caccgccgccggtggaacacaacggcgactccgccgctaccgcctctgcctccgcctgccgcctccgcggagtctcagagatcaattcccacgccctttctcaccaaaacctatcaactcgtcgacgaccaatccatcgacgacgttatttcctggaacgacgacgggtcaacgtttatcgtctggaaccctaccgttttcgccagagacttgttcctaaatttttcaaacacaataatttctctagcttcgttcgcc

SEQ ID NO: 140705 - DNA, 258 bp, Glycine max
gaaagcaagaggaagatgaggatgaggagcagcagcgagagagcgaagaaagtgaagattctgagttacgaagacataagaataagaacccttttctcttcggctctaacaggttcgaaactctcttcaaaaaccaatatggtcgcattcgcgtcctccagaggttcaaccaacgctccccacaacttcagaatctccgagactaccgcattttgagttcaactccaaacccaacaccctccttctccccaaccatgc

SEQ ID NO: 140706 - DNA, 263 bp, Glycine max
cccttttcacttcaactctaaaacgttccaaactctcttcaaaaaccaagatgaacgtgaacacccacgcccacaccaacctcatcaaaaggaagaggaaaagcacgaatggcaacacaagcaggaaaagcaccaaggaaaggaaagtgaagaagaagaagaagaccaagacgaggatgaggaccaagacaaagagagccaagaaagtgaaggttcgagtctcaaagagaaccacgaagacataagaataagaacccttttca

SEQ ID NO: 140707 - DNA, 266 bp, Glycine max
tggaaatggaggccaacattgctgatgtggatactgatgatgaagtcaatgaggcagaagaatatgaagcttggaaagtgagagagattggtaggatcaagagggatagggaggatcgggaggcaatgttgaaggaaaaggaagagattgagaaggtgagaaacatgacagaggaagagaggagggagtgggaaaggaggaatcctaaacctgctccacaccaaagcagaaatggagatttatgcagaaatattatcacaaaggtg

SEQ ID NO: 140708 - DNA, 264 bp, Glycine max
gtaattagcacaattatccccttaccagtgatcaaagaactctatcgtaccgatggtcaacacatcctcaagtttccacaacctcacgtcgttcaagtgagtcagtctgcatggatgactgatgaagaatttgctagagagatgattgctggtgtaaatccctgcgtaattcgtggtcttgaagagttccctccaaaaagtaatctggatcctgcaactatggtgatcagagcagtaagataacagcagattcccttgatctag

SEQ ID NO: 140709 - DNA, 262 bp, Glycine max
aaccatgtcaatggcaacaacatcccctcacaccgccctcttccaaaaccgcaccaaccctttcactctctcctccttcaaacccacatccatcaaatgcgccacccaactccatacccaagccccgaccctcacccactcccaagatcgcgtcttcaacttcgccgccggttcccgcaccctcccggaaaacgtcctcctccgtgaccaatccgagtctacaactggcgcggatccgcatgagcgtcatggaaatgagcca

SEQ ID NO: 140710 - DNA, 254 bp, Glycine max
ccgaagcactgcatggtgatatatctcagcatcagagagagagaacattgaatggttttcggcaagggaagttcacagtgcttgttgccactgatgttgcagctcgtggacttgatattcccaatgttgatttggttatacattatgaacttcccaatgatgctgagacttttgtacatcgttctggccgtactgggcgtgcaggaaaagaggtacagccattctgatgtacaccagtagccagaggagaacag

SEQ ID NO: 140711 - DNA, 234 bp, Glycine max
ataccttccgcggccaaacagagcaaaaacccaacacaccacactcttgcaatcaatcaatggcggaaccttcctcctcgaagcccgccgtccctctcctgaaggacgagctggacatcgtgatcccgacgatccgcaacctcgacttcctcgagatgtggcggcccttcttcgagccctatcacctcatcatcgtgcaggacggagacccaataggaccatcaaagtacccga

SEQ ID NO: 140712 - DNA, 251 bp, Glycine max
gagaatccgaggcgaagagaagagaaaaattaagatggaggggaaggagcaggatgtgtcgctgggagcgaacaagttcccggagagacagccgattgggacggcggcgcagagccaagacgacggcaaggactaccaggagccggcgccggcgccactggttgacccgacggagtttacgtcatggtccttttacagagcagggatacagagtttgtggccacttttctgtttctatacatcactgtctt

SEQ ID NO: 140713 - DNA, 245 bp, Glycine max
  unsure (1)..(245): unsure at all n locations
gggacaatcactctattggaagtcatggctgcccatggatgcaagaagctcgtgttctcttcttcagcaactgtatatggttggccaaaggaagttccatgcacagaagagttccctctgtcagcaatgaacccatatggacgaactaagcttatcattgaagaaatttgtcgtgatgtccaccgtgcagagccagattggaaaataatattgttaagcatacttcaacccagatcggntgcaca

SEQ ID NO: 140714 - DNA, 253 bp, Glycine max
gccagttctgatatttacaccatctgctctcaagactgtgaattatggaatcctgcttgcataaaagcaatgactatgtcatttaatccaaacccgtgttctgatgcatggagtttggaatttctgaagcgtaccggatttcattgtgatatcatttgtgtcactggatggactgccaccccaatgcaggatgttcaggttacaattgattggttcatttcctctcaggaatgtgctcccaggacctattgtg

SEQ ID NO: 140715 - DNA, 257 bp, Glycine max
gtgcggtttcctttgttggtgttgctgggaactgttttcctggcatcagtttgtgtctcattaaaggtgagagaggatgagaataaccctttctacttgagaagctctaacagcttccaaactctctttgagaaccaaaacggtcgcattcgtctcctccagagattcaacaaacgctccccacaacttgagaaccttcgagactaccggatgtccagtttcagtcaaaacccaacacaatccttctcccccaccat

SEQ ID NO: 140716 - DNA, 241 bp, Glycine max
caaaccttgctctatactacacagtacacacactagaagaataatggcttccatcctccactactttttagccctctctctttcttgctcttttcttttcttcttatccgactcagtcacccctacaaaaccaataaaccttgttgttctacccgttcaaaatgatggttccacagggctccattggtccaacctccaaaaaagaacccctctaatcaagtaccagtcctggtggacctca

SEQ ID NO: 140717 - DNA, 244 bp, Glycine max
gcctggtatgaggccaggtgcagctcctgtgccgaattttttcgtgccaatggttcagcagggacaacagggacagcgtcccggtggacggcgtccaggtgcagttcagcagtcccagcagccagttcctatgatgccacagcagatgcttcctaggggacgtgtctatcgttatcctcctggtaggggtattcctgatgttcctatacctggggttctggaggtatgttttctgttccatatg

SEQ ID NO: 140718 - DNA, 279 bp, Glycine max
tctcgctcttgcaattattcctcttctcgcaatccgcactaaaattctagggttccgaaatggacgctgacggaaagatcaagaagggcgccggcggaagataggtcggcggcccaaagaagaagccggtttcaaggtccgtcaaagccggtctccaattccccgtcggaagaattggccgttatttgaagaaaggaaggtacgctcagcgtgtcggtaccggtgctcccgtatacttggctgcagttctcgaatacctagctgccgaggtgcttgagt

SEQ ID NO: 140719 - DNA, 276 bp, Glycine max
gcgtcggagctgtctgtgcaaatttgcgttgttcttcgcggcacacctcactcactgaacggtaagtatggcggacaaggctgttacaatccgaacccgaaagttcatgaccaacaggcttctttccaggaagcagtttgtcgttgatgtccttcatccagggagggcaaatgtttccaaggctgaacttaaggagaagctggctaggatgtatgaagtgaaagaccctaatactgtatttgtcttcaaattccgaacacattttggaggtggcaa

SEQ ID NO: 140720 - DNA, 136 bp, Glycine max
gctgactgaaatgaccttacgaggtatcccagacatcaataaggtattcataaaaaatactaaagttcagaagtttgatgagaatcaaggatttaagcctaatgaggaatggatgcttgataccgaggtgtcaacc

SEQ ID NO: 140721 - DNA, 265 bp, Glycine max
cgagaaatttgggaacgacatcgctattgcatttagtggtgctgaagatgttgctttgattgagtatgcacatttgacgggtcgaccctacagagtgtttagtcttgacactggttgactgaatccagaaacctacaaattttttgatgcggttgagaagcattatggaattcacattgagtacatgttccctgatgcggttgaggttcaggcattagtaagaactaaagggctcttctcattttacggggtagggcatcagggg

SEQ ID NO: 140722 - DNA, 166 bp, Glycine max
ggttaactgtgagcagcagtactcatccaaaacgttacaaggaaccttcttgcaattcaaccaattgttctggagcaacaaccaacaattgcttaatttgcccgggggaatcaaggcaagggtgcaaaaaaaccacgtttggcttcatgtcaattattcccttcac

SEQ ID NO: 140723 - DNA, 174 bp, Glycine max
cactgattccgggaaccagtgttgaagaggcttacaacaagctaatagttgaacttgagaaaagtgttcctacattggtaggcattgaatgtcccaaggatgagaaacttcctcgtcgcaaaatttttgacaaacctaagacgcgctgcttcactattctccctatggagttta

SEQ ID NO: 140724 - DNA, 163 bp, Glycine max
aaaaaaaattgaaaaaattaaaaaggggcttgtaatttcagagacaaatattcattcaaacaaaacaacttatgatagtaaaagggtagaattcgaaaaaaaaaaattgcagatattacaaggaagaagaaatgctcgattaactcgtagatcacattctttt

SEQ ID NO: 140725 - DNA, 160 bp, Glycine max
gggtgctgcagataagcggacagagaacaaaggagaaggaggagatcgaggaggagggaagggtgctgcagataagcggacagagaacaaaggagaaggaggacaagaacgacacgtggcaccgcctcgaacgctccagcggcagctttctccgccgctt

SEQ ID NO: 140726 - DNA, 132 bp, Glycine max
gggacaatcactctattggaagtcatggctgcccatggatgcaagaagctcgtgttctcttcttcagcaactgtatatggttggccaaaggaagttccatgcacagaagagtcccctctgtcagaattgccc

SEQ ID NO: 140727 - DNA, 201 bp, Glycine max
caaatctcttcgttccttcgattcgttccatttcttccaaaatggccaaagacccagttcgcgttctcgtcactggagctgcagggcaaattgggtatgctcttgtccctatgattgctaggggagtgatgttgggtcctgaccagcccgtgatcctccacatgcttgacattcctccggaagcagattcatcgaatgggg

SEQ ID NO: 140728 - DNA, 256 bp, Glycine max
caaactttgtaacttcaaaacatactcctctgttctctctgtttctcttcaatcttcctgaaaaaaacaaaaacacgaaaaatcatccaccctctcacattctctctctctctcctttcaactaatatggcaattgaaaaccaagacaacactgtcagagaaatcaagccaaagaacaggagaatcatgggtgctggaggccctgatgatgacgacaataggtggccaccgtggttgaagccactgctgaaagaga

SEQ ID NO: 140729 - DNA, 253 bp, Glycine max
cctgatgtcatcatgggtcagggaacaattggcatggaaattgtccgccaaatgcaaggtccaatttatgcaatctttgtgcctgtgggaggtggtggtctcattgctggtattgctgcttatacgaagagggttaacccagaggtgaagatttttggggttgagcccactgatgcaaatgcaatggcgttgtcactccaccatgaccagagagtgattttggacaaggttgggggatttgcagatggcgtac

SEQ ID NO: 140730 - DNA, 271 bp, Glycine max
tttgctttaccaaattccattttccaattcaaaaccctaactccgttcgaagcaccaaatcgtgatggcaccaaaggcagagaagaagccagcagagaagaagcctgtggaggagaagaaatcgacggtgggagacaaggctccggcggagaagaagccaaaggccggaaagaagcttccgaaggagggaaggcgccggcggagaaggtaagaagaagaagagaaacaagaagatcgtggagacatacaagatctgcgtcttcagggttct

SEQ ID NO: 140731 - DNA, 83 bp, Glycine max
cgtaagctccaagcagtgggaggaggctcgggactctgaccgcgtgcctgttgaagaatgagccggcgactcataggcagtgg

SEQ ID NO: 140732 - DNA, 277 bp, Glycine max
gttcggattgcggcgacgtgagcggttcgctgcccgcgacgttgtgagaagtccactgaaccttatcatttagaggatggaggaggagaagcctaagattagggagaagaagagtaagaaggttaagcataataatggtgatggtgtgagcttggaagggactaggttgagtggtactaagcatggtgttgatgttaagggtgtggagaaggcttcggctaaggtggaacgaaatgggaaggttggtaatgtagctttgaatgataatggtggtggt

SEQ ID NO: 140733 - DNA, 279 bp, Glycine max
gggggtgcgcacacaactactacaagtacttccttacaatcaaaaccaacaacaactatggcaagttatcaaaagcactacgatgatcagggtcgcaaggttgacgagtatggcaacgttgagaagcaaaccgacgaatacggcaaccctgttcatgctgctagtgtcacctatgtagccaccagaactgctgctggtggtaacagtggtgacattaatagccaacatgataccaccgatgcctaaggcgtagacactggtagccagcattctagtggt

SEQ ID NO: 140734 - DNA, 198 bp, Glycine max
gcaatggtgaaaatgctgctattgtgaaaccaactgatgaggagccttatgcaccaaacaatcctaaaggttttgttggcaaagcccttggacaaccaggactgaaacgttcagtgagggttggggagacaggtttcagagaagttgcagcttaccttcttgaccatgatcattttgcaaatgtgcgctctactgccc

SEQ ID NO: 140735 - DNA, 272 bp, Glycine max
attggccctttgagggttcagtcagtggcaacaaccactccaggagtcaccaaggcttcaccagaaggcaagaaaactttgaggaaaggcagtgttattgtcactgggcttcctctggattaggcctggccacggccaaggctttggctgagacaggaaagtggcatgtgattatgacctgcagggatttcctcaaagctgagagggctgcaaaatctgctggcattgctaaggaaattgtgtctcttgatagtgtgaggcaatttgtggat

SEQ ID NO: 140736 - DNA, 108 bp, Glycine max
aaaagatcatacatagtagttactagtgggttgcaaagatgcttgcggggtcttctccataggaggtcatgaagataaacagggcacagtgagtgtatgatgctgcaa

SEQ ID NO: 140737 - DNA, 191 bp, Glycine max
cctgagtacaagggcccatggaaggcaaagaaaatcaagaaccccaactataaaggaaaatggaaggcaccattgattgataacccagatttcaaggatgaccccgacctctatgttttccccaacttgaagtacgtggggattgaattgtggcaggtgaaatctggtactttgtttgacaatgtcttaat

SEQ ID NO: 140738 - DNA, 219 bp, Glycine max
  unsure (1)..(219): unsure at all n locations
tttcttcttatccgactcagtcacccctacaaaaccaataaaccttgttgttctacccgttcaaaatgatggttccacacggcacacgaccccaaanctccagaaaagaacccctctaatgcaagtaccagtcctggtggacctcaatggaaatcacttgtgggttaactgtgagcagcagtactcatccaaaacgtaccaagcacctgtctgccactc

SEQ ID NO: 140739 - DNA, 189 bp, Glycine max
aattcttccaccaagttatgggactccttgtgttgcttcttttctccctcttaggtctctcttctagtttcagcatatctactcatcgttccatattggaccttgacctaaccaagtttaccacacagaaacaggtgtcttcactgttccaactatggaagagtgagcatggacgtgtctacaataccc

SEQ ID NO: 140740 - DNA, 151 bp, Glycine max
  unsure (1)..(151): unsure at all n locations
cgttcattctgttttccagttgnagtctttcctccagccantggccactgntcgtttgncccgggntcacnctctgccgtgagnngcttgatgaaaccctcaatgccaacaggancgaaattttngnccttntgtaaagnntngngagcna

SEQ ID NO: 140741 - DNA, 102 bp, Glycine max
gcatgagctatccgcagctcatcaaggatatcaagcgggccgtcaccatccccgtgatggccaaggcccgcatcggccacttcgtcgaagcccagatcctcg

SEQ ID NO: 140742 - DNA, 270 bp, Glycine max
tgagagtgcggtttcctttgttggtgttgctgggaactgttttcctggcatcagtttgtgtctcattaaaggtgagagaggatgagaataaccctttctactttagaagctctaacagcttccaaactctctttgagaaccaaaacggtcgcattcgtctcctccagagattcaacaaacgctccccacaacttgagaaccttcgagactaccggattgtccagtttcagtcaaaacccaacacaatccttctcccacaccatgctgacg

SEQ ID NO: 140743 - DNA, 279 bp, Glycine max
atttgaggccaggcaagccccactcaaccaccacacctctcctcgttcacgctacccctttctgctcttcttctacctttcaagttttaaaagtataaagatggcagagacattcctatttacctcagagtcggtgaacgagggacaccctgacaagctctgcgaccaaatctccgatgctgtcctcgacgcttgcctcgagcaggacccagacagcaaagttgcctgcgaaacatgcaccaaaaccaacttggtcatggtcttcggagaaatcacgac

SEQ ID NO: 140744 - DNA, 156 bp, Glycine max
aatggaagtcacactttcagcgtgcaagtccattagctcgccttctgttcccgtcgcagctttatttgcggggaaagcaggaactaagagttcgcaatgcagttttttagctggagcaaacaaagtgaggtttcctaggcaagtcggtcaagttag

SEQ ID NO: 140745 - DNA, 197 bp, Glycine max
tgcactcgcatggagtcaaatgtgctgacctcttcaactttgccaatgcatgatgagccaagatcgcgagactttttataatatgcttatttataattaagcaagcatctactacatgttatggttaataaaagtaataatgtaagaataaagactttgaactaaataataatatgaacgattctctttcgttgttc

SEQ ID NO: 140746 - DNA, 185 bp, Glycine max
atgatactcgtcatacgcgttcacagacccggtagatttgagagtatcttcctgtctagcactccagctcaccagtcctacatgctcgggctccgcgggcatattctagtggcctgcatacgtcaccatattccaggaggcatccactgtgctgcatgttgtagatgcctggcagcaacaagggg

SEQ ID NO: 140747 - DNA, 214 bp, Glycine max
gattgtttgttgttgtaactcgttcttcttcttttgttgttctgtgtttgtgtttgttttttctctcacctgaaaatgtcttgctgcggtggtaactgtggttgcggaagctcctgcaagtgcggcaacggctgcggaggctgcaagatgtacccagacttgagctacactgagtcaaccaccaccgagaccttggtcatgggagtggcacctg

SEQ ID NO: 140748 - DNA, 260 bp, Glycine max
aaagcattggaatgaggaccccatagtctggcgttttccatattttcgttctttggagattgagtttacaaagtcgcagatcgttgctgcaatccctggaacctttttttgtgcgtggtatgccttgcggaagcattggctagcaaataatatattgggtcttgctttctgtatacagggaattgaaatgctctctcttgggtctttcaagactggtgctattctcttggctggactctttgtatatgacattttctggg

SEQ ID NO: 140749 - DNA, 268 bp, Glycine max
gcctccctttatcaataaaatgccaaatttgagggcattgataataataaaccacagtacctcacatgcccgccttcaaaatgtttcagtttttaggaatttgaccaacttgaagagtctctggcttgaaaaggtttccatccctcagttatcaggcactgtcttgcaaaacttgggcaaattatttgtagtcctctgcaagattaataatagtttggatgggaaacagttccctaacctctctgagctcactctggatcactgtgtt

SEQ ID NO: 140750 - DNA, 135 bp, Glycine max
atccaattgaaattttaaaaatgactgggataaacttaagaattcaattattgaaattgaataagtaaacaatttaattggattggtcgaatggtatccaaaaaatggagtactaactcccattcctaattcatc

SEQ ID NO: 140751 - DNA, 133 bp, Glycine max
ctcttcttctcttgcggctagggttttagcgcagcttcatctagatttaaggaagatgggtaaggcaaaggttcacatcagtattgtggtcattggccatgtcgactctgggaaatccactaccattggtccc

SEQ ID NO: 140752 - DNA, 149 bp, Glycine max
gtacaacgtgagagtcaactcaataagaatcaaccagcacagtgtgtcaccactgaacaagatatcatccaccatcgtagggtcgacctctggaggaaccatgattagcacctcaactcctcacatggttctccagcaatccgtgtacc

SEQ ID NO: 140753 - DNA, 275 bp, Glycine max
tcacctgctgagcgagaacgtggtggcaggtgaagctaccaaacaagttgacccagttatagagtttgccacctgctgagcgagaacgtggtggcacatccaaacttgcagaagccatggagaggagtataccagtggttagggaggcttggttgattgacagcattgaaaagcaagaaccacaacctttggaagcttatgatcttgtctctgaactttctgtggatggcaagggtatcccctgggacaaacaagatcctggggaagaggctatc

SEQ ID NO: 140754 - DNA, 167 bp, Glycine max
aaaccttgctctatactacacagtacatacactagaagaataatggcttccatcctccactactttttagccctctctctttcttggtcttttcttttattcttatccgactcagtcacccctacaaaaccaataaaccttgttgttctacccgttcaaaatggtgg

SEQ ID NO: 140755 - DNA, 177 bp, Glycine max
caacgctgtcactgagaaaggatctctatctacgaaggagcggaataaaacccttctctctgtgattaagagaatggcttcagatcggaaacttcacacttttgaggaggtggcaaagcacaaccagaccaaggattgctggctcatcatttctggcaaggtgtatgatgtcaccct

SEQ ID NO: 140756 - DNA, 230 bp, Glycine max
ttgctctatactacacagtacacacactagaagaataatggcttccatcctccactactttttagccctctctctttcttgctcttttcttttcttcttatccgactcagtcacccctacaaaaccaataaacctttttgttctacccgttcaaaatgatggttccacagggctccattgggccaacctccaaaaaagaacccctctaatgcaagtaccattcggggggc

SEQ ID NO: 140757 - DNA, 213 bp, Glycine max
ctagggtttacagagaagctaagaggcgcacgttagcaaaagctcgtggaattgctagcaatggcgaggatcaaggtttacgagctgaggcagaagacgaaggctgatctgctgaatcaactgaaggacctgaaggcggagcttgccttgcttcgtgttgctaaggtcaccggtggtgcccctaacaagcttcccaagataaaggtggtgagg

SEQ ID NO: 140758 - DNA, 230 bp, Glycine max
tgttcttcatagttcagtgtgtcgtttaaaaatgtcgcagttgctggataaagccaagaacttcgtgtcggagaaggtaaatgatatggccaagccggaggcgagtgtcactgacgtggacttcaagcgcgtgagcaaagataatgtcgagtacttggcaaaggtctctgttcgtaccccttatgcaaacttccatacccatttgggagaaccaactattctttgaaaag

SEQ ID NO: 140759 - DNA, 185 bp, Glycine max
tgatgatatttcatctaccctctccatcaacagcccagaagtatcgtctggagaacttgtatgagggtcctcttgatgatcaatatgcttctgctatcagaaattgtgatcctgaaggtcctctgatgctctatgtctccaagatgattccagcatctgataaggggaattttttccctttggcc

SEQ ID NO: 140760 - DNA, 220 bp, Glycine max
ccataaggctttcacgacaacattcccacgtgggtttgctttggaaattctgcacgtgtattctggaccaccagtgatcgtgtacaagttcaggcactggggctacatggagggtcctttcaaacgccacgccccaactggagagaaaattgaattctatggaatggcaattttcacgttggatgagatttcaaaagtcgtaaaggtggagtttttttat

SEQ ID NO: 140761 - DNA, 146 bp, Glycine max
tgccactggtgtttctagcccgaggccttgaaaacaagtccatgagttcaatggaaaactttgccatttccaaaggctctggacatgcatgtccatcgcattgcgagaacaggccgtgctgggtgacaaggacggggttgcataca

SEQ ID NO: 140762 - DNA, 257 bp, Glycine max
gtcaagcaattcagatgcagcagcagcgacggtgcatgctcgtggccgtttggccatgctcgctgctcacctcctcccctttgaactcactgatcacgacgccctccgccctatccctctctccgctcagttgccgccgacgaacctcgccggaagtttgaccgtcgtcgacgacagaaccggcaagaagtaccagcttcaggtctccaaagaaggcactgtcaaagcttctgacctcaagaagatatcgactggga

SEQ ID NO: 140763 - DNA, 240 bp, Glycine max
caccaccaatgtatgtttgcatgaaaattgcattcacgcccatagcaagtggaccattttttactaaatatgcggcaatttggttctcatcagcagggatattggtggtgtctcatgccctctcatatgtagcaagaaaaggctgaaccatggtgtgttacttgtgggatatggtgcaaaaggcttctcaattcttaggcttggcaacaaaccatactggatcatcaagaattcgtgggg

SEQ ID NO: 140764 - DNA, 256 bp, Glycine max
ctaatcttgatggattaacacctgatacttttctctcaagagggtatgattctcaaaaggatcttcaaaacttgctgtctaattatggtggtgctccaagagacattgaaactgagctgtccactgctgctcttagtccacagccgtttggggtgccaggcattccttttaagcctggatgctcaagtgatattgccatcaatgatcctggggttttgaataatggcttgtgggctaatcagactcaacgaatgcg

SEQ ID NO: 140765 - DNA, 149 bp, Glycine max
aatgatgatgatgtcatgttgcttgattgggttaaaggacttctcaaagacaggaaattggaaacactagtagatgcagatttacatggtaactacaatgatgaggaggtagagcagttaatccaagtggccttactatgcacacaggg

SEQ ID NO: 140766 - DNA, 251 bp, Glycine max
atgagaatgcacttcttcagctgaaagatgggttaggggatgatgatattgaggtcatttatgttggatgccttaaggaggaggttcatccaagtgaacaagatgaagtttcacagacacttcttgagaccttcaagtgtatcccgacttttctccccgctgaccagtttactaagtactatcatggtttttgcaagcagcagttgtggccactgtccaattaaatgtcgcccttgtcacctgagctcggt

SEQ ID NO: 140767 - DNA, 202 bp, Glycine max
ctcgagccgcacacacaactacaagaaagaacttccttataaccaaaaccaacaacaactatggcaagttatcagaagcactacgatgatcagggtcgcaaggtcgacgagtatggcaatgttgagaggcaaactgacgaatatggcaacccggttcatgccactagtgtcacttatgtagccactaaaagtgttggtggct

SEQ ID NO: 140768 - DNA, 144 bp, Glycine max
cttatttggagaacttggcattaatgatcggttacaatggaatgagcattctatgatttttgctatgccaaataagcctggagagtttagtcgatttgattttcccgatgtccttcccgccccattaaatggaatatgggcaat

SEQ ID NO: 140769 - DNA, 264 bp, Glycine max
caagactctcttagcgacgaaccgtttcgtgtgcgagatatgcaacaaaggattccagagagaccagaatctgcagctccaccgccggggtcacaacctgccgtggaagctgcggcagaggtctagcaaggaggtcagaaagagagtgtacgtgtgccccgagcccacgtgcgtgcaccacgacccttccagagcgttgggggacttgacggggattaagaagcacttctgcagaaagcacggcgagaagaagtggaaatgcga

SEQ ID NO: 140770 - DNA, 193 bp, Glycine max
gcttttcaaccaagcgcgatgaccaattgtgcgaatcaacggttcctctcgtactaggttgaattactattgcgacactgtcatcagtagggtaaaactaacctgtctcacgacggtctaaacccagctcacgttccctattggtgggtgaacaatccaacacttggtgaattctactagttctagttcgcga

SEQ ID NO: 140771 - DNA, 258 bp, Glycine max
aaacaaccaaatcttatccatcacaagatcaaggtcctatgaatgttctgccaacccctcatctgatcttaactacccttcgtttatagttttgtatagtaacaaaacaagatcaacagtccgagagtttaggaggatcgtgaccaatgttggagatggtgctgctacttacaaagtcaaggtgacacaacccaagggctctgttgtcaaggtgtcacctgagacattggcatttggctataagaatgagaagcagag

SEQ ID NO: 140772 - DNA, 254 bp, Glycine max
gcaactgatgttgctgcccgtggtcttgacatcaagtcaattaagtcagtggtaaactttgatattgcaaaagatatggacatgcatgtccatcgcattggaagaacaggccgtgctggtgacaaggacggggttgcatacactcttataactctgaaagaagcacgatttgctggtgaattggtcaatagcttagttgctgctggtcagaatgtgtctgtggcgttgatggatcttgctatgaaggatgggag

SEQ ID NO: 140773 - DNA, 257 bp, Glycine max
tctacccgttcaaaatgatggttccacagggctccattgccccaacctccaaaaaagaacccctctaatgcaagttccagtcctggtggacctcaatggaaatcacttgtgggttaactgtgagcagcagtactcatccaaaacgtaccaagcacccttctgccactccacccaatgctctagagccaacacccaccaatgcctcagttgccccgcggcatcaaggccagggtgccacaaaaacacgtgtggcctca

SEQ ID NO: 140774 - DNA, 258 bp, Glycine max
taaagaatttaagatatactatgatgagagcgcggttcccattactgttgctgggagttgttttcctggcatcagtttctgtctcatttggcattgcgtattgggaaaagcagaaccccagtcacaacaagtgcctccgaagttgcaatagcgagaaagactcctacaggaaccaagcatgccacgctcgttgcaacctccttaaggtggaggaagaagaagaatgcgaagaaggtcaaattccacgaccacgaccac

SEQ ID NO: 140775 - DNA, 257 bp, Glycine max
ttggaatctaatggatactcatcccgaggaaaggagactatttgaccatgttacctgtaatatgtcagcttctgttgatgaagtcactgttcctggtgcccttgctctggatctgattgagcaggctgaagtggaagttgagagacttgatcagctgaaagccagcaggatgaaggaaattgctttcaagaagcaagcagagctcgaagagatatttgcccgtgctcatatagaagtagatccagatgctgcccggg

SEQ ID NO: 140776 - DNA, 256 bp, Glycine max
ctcttcttctcttgcggctagggttttagcgcacttcttctagatttaaggaagatgggtaaggaaaaggttcacatcagtattgtggtcattggccatgtcgactctgggaaatccactaccactggtcacctgatttacaagcttggaggcattgacaagcgtgttattgagaggtttgagaaggaagctgctgagatgaacaagaggtctttcaagtatgcctgggtgctggacaaacttaaggctgagcgtg

SEQ ID NO: 140777 - DNA, 260 bp, Glycine max
ccgaaacaaaacacaaacacaagcacaaggacagtgatctctctttctatctttttgtctgtctctctgaacacgttgatggattccccctctcgcccctccgtcatcatcgtaggtgccggcatctccggtatcgcggcggcgaaggtgttggccgagaacggcatagaggacctggtgatcctggaggcttcggaccgcgtcggcggcaggatccgcaaggagagtttcggcggcgtgtcggtggagctcggtgccgg

SEQ ID NO: 140778 - DNA, 263 bp, Glycine max
gaccgagctagctagctagcaagcaagcacagagatggaggcaaagcgaggccatgccctcatgtgcttggcacgtgtttcactcttcctctgcgctctaaccctatccgctgctcacggaagcaccacggttcaagacatcgcgagaaagttgaaactcggggacaacgagcttctgcgcacggagaagaagttcaaggttttcatggagaattacgggaggagctactccacagaggaggagtatttgcgccgtttgggga

SEQ ID NO: 140779 - DNA, 264 bp, Glycine max
ggtgatgctaccaagagaagcaaagaggcttctaatgatcatgccaatgacatggctcagaagaccaaagactacgccagtgacactgctcagagaaccaaggaaaaactccaagacattgcatctgtgtttggtttttccacatggtgctcatctagaatgtaaatggtgctactacagctcatgaggcacgagctttatttggatgaccctttatctcagtatgagacaaggatgtgttcaggtttaagggggtattaaatc

SEQ ID NO: 140780 - DNA, 285 bp, Glycine max
cacgcgtacgcagacttcggctcgaggccttggacaagattcgatttgagagtttgacagacaagagcaagctcgatgctcagccagagttgttcattcatattattccagacaagactaacaatacactgaccattgttgacagtggtattggcatgaccaaagctgatttggtgaacaacttgggtacaattgctagatctggtaccaaggaattcatggaagccttggctgctggtgctgatgttagtatgattggacagtttggtgtggggttctactctg

SEQ ID NO: 140781 - DNA, 252 bp, Glycine max
ccgccctttgttttttatgacacttttgggtttgagaagtatgttgattacgctcttgatgtgccaatgttgtttgtttatcgaaaaaacaagtacattgactgccggggcatgtcattcagggacttcatggcaggtaaactccctgtcattcctggtcaggtgccaacgcttggtgactgggaaaatcatctaacaactatatttcctgaggtcaggctaaagaggtacatggaaatgaggggtgctgat

SEQ ID NO: 140782 - DNA, 256 bp, Glycine max
cgcgttttccaattccccccccaaatctcacgcctagggtttctatcgcaaaccctccctccctccaaccaggtcgcgtgcaaagggatttcgaagcttcggaagaaaaaaatgaaacctgttttctgtggaaacctggatttcgacgcgcgtcaatctgacgtggagaggctcttcagaagatacggcaaagttgatagagttgacatgaaatccgaagaaataatctgatctgccctagtcctgccattctgca

SEQ ID NO: 140783 - DNA, 256 bp, Glycine max
gcatattctagagatgctatcggaggaatatggtggtcgtgtcgaactcgctaaagcatattacaaagcactcactgcttccgtgaggaagcatttcaaaggcaatggtgtcatttcaagcatgcagcagtgcaatgatttcatgttccttggtacggaaaccatatcacttggacgagtcggtgatgatttttggtgcacggacccagctggagatccaaacggtacctattggctgcaagggtgtcacatggtg

SEQ ID NO: 140784 - DNA, 257 bp, Glycine max
acgaaactactctacaaacacaacaaaactctccaattctgaagattttcttatctcttgtctttgaaactagaagctccgtgattgatcaatggcgacaaaagaaggcaaagccataggcatagacctcggcacgacctacagctgcgtgggcgtgtggcaaaacgaccgcgttgagatcatccccaacgaccaaggcaaccgaaccaccccctcctatgtcgccttcaccgacaccgagaggctcatcggagacg

SEQ ID NO: 140785 - DNA, 260 bp, Glycine max
gtctctcccatggtgtataaccctatggttctcttttactcttgctacggtatcactcaaactcaattcaccatttccgaaaagctgaagaaatctttgtctgatgttttaacccatttctaccctcttgccgggcgagtcaatgggaacagtactttcatagactgcaacgacgagggtatcccctacttagaagcaaaagtgaagtgcaaagttgtcgacgttattcacaaaccagttccaggagaactcaaccattt

SEQ ID NO: 140786 - DNA, 261 bp, Glycine max
tccttctctacttttcaagaagcccattattcgcttcaagattctctagaccagctgtagatcctcagtacaaggatttaaggcattttcagtggcattgggaaaagggggagcctgtcattgtcagcaatgtgcttgaatgtacatctggtttaagctgggaaccgcttgtcatgtggcgtgcattacgtcatgtaactaataccaagcatggccaacatttggcggagaaaacaattgattgcttagattggactgagg

SEQ ID NO: 140787 - DNA, 264 bp, Glycine max
gaagttttgtggtgtggtttagtgtcaaatggcggcgagtagaagcacttttcctctgatgaaatacttgagagtgcgcgtcgacgctcttccccgcaacactcccttaaccctcgctcccaactttttgattcgccgcttctgtgaagaggttaggggttgttttctcgacaagtctgaggtcacagatcgcgtcatttcctgcgtcaaaaacttccagaaagttgatccttcaaaggttaaccctaatgctcacttccagaa

SEQ ID NO: 140788 - DNA, 260 bp, Glycine max
gaaaagattgcaagccagtgatttttcaaccttacctgaggctcatgcgtgcactgcagggttgaagtccttgactacttcagcaactgctgatggaattgaggaatgccgcaaactatgtggtggccatggttacctttgcagcagtggtctccctgagttatttgcagtctacattcctacctgcacatatgaaggagacaacactgtgctgcttttacaggtggctaggcatctcatcaagactatttctcagttgg

SEQ ID NO: 140789 - DNA, 253 bp, Glycine max
ctcttcttcgtctcaaacctcttcgttccttcgattcattccatttcttccaaaatggccaaagacccagttcgcgttctcgtcactggagccgcagggcaaattggatatgctcttgtccctatgattgctaggggagtgatgctgggtcctgaccagcccgtgatcctccacatgcttgacattcctccagcagcagagtcgttgaatggggttaaaatggaattggtggatgctgcattccctcttctta

SEQ ID NO: 140790 - DNA, 254 bp, Glycine max
agacagtcttccatagccccccaaaaatgaagagcaccatcttctttgctctctttctcttttgtgccttcaccacctcatacctaccttcagccatcgctgatttcgtgctcgataatgaaggtaaccctcttgaaaatggtggcacatattatatcttgtcagacataacagcatttggtggaataagagcagccccaacgggaaatgaaagatgccctctcactgtggtgcaatctcgcaatgagctcgac

SEQ ID NO: 140791 - DNA, 246 bp, Glycine max
ggcaaacggacggcgggcgcacgcgtcgcttctagcccggattctgacttagaggcgttcagtcataatccaacgcacggtagcttcgcgccactggcttttcaaccaagcgcgatgaccaattgtgcgaatcaacggttcctctcgtactaggttgaattactattgcgacactgtcatcagtagggtaaaactaacctgtctcacgacggtctaaacccagctcacgttccctattggtgggtg

SEQ ID NO: 140792 - DNA, 256 bp, Glycine max
atatcctagtacaccgtattaaagaatttaagatatactatgatgagagcgcggttcccattactgttgctgggagttgttttcctggcatcagtttctgtctcatttggcattgcgtattgggaaaagcagaaccccagtcacaacaagtgcctccgaagttgcaatagcgagaaagactcctacaggaaccaagcatgccacgctcgttgcaacctccttaaggtggaggaagaagaagaatgcgaagaaggtc

SEQ ID NO: 140793 - DNA, 255 bp, Glycine max
gcattgttagatgtggcttccattgctgcagataagattttgttgctagattcatattttagtgtggttattttccatgggatgacaatagctcaatggcgcaacttgggataccagaaccaacaagaacaccaggcatttgcacaactattacgagctccgcatgacgatgcccaaatgataattagagaacggttcccggtgcctagattggtagtgtgtgaccaacatggttcccaggctagattcttatta

SEQ ID NO: 140794 - DNA, 258 bp, Glycine max
cgacgacgactaactcgtacagtaccagagaggttattcacgacgttgacattcaacccgatgacgcggctgcagcgagggaagtgagagacaaatcagcctcaaagtcaccaggtatctacaattctgccactgctgacaacaaaaccggttccaaggtcggagagtacgcagattatggttctcagaaggcgaaagacacaaaagatgcaacgaaggaaaaagctggagagtacacagattatgcttcgcagaagg

SEQ ID NO: 140795 - DNA, 257 bp, Glycine max
gcgatcgacggggtattgtaagtggcagagtgaccttgctgtgacgatccactgagattcagctcttgtcgctttgattcgtctgtaaatcttgaggcgttcaaagtggtcttatttgagaagtacttgggcgttggtgcaaatgtttgcttcgttaatattctctggaaataagaggtttactgataaaacaatttggacttgcagagatttggacatcttggttgtttattataggatagcagatcaatttagga

SEQ ID NO: 140796 - DNA, 257 bp, Glycine max
ttcttctcttgcggctagggttttagcgcagtgtcttctagatttaaggaagatgggtaaggaaaaggttcacatcagtattgtggtcattggccatgtcgactctgggaaatccactaccactggtcacctgatttacaagcttggaggcattgacaagcgtgttattgagaggtttgagaaggaagctgctgagatgaacaagaggtctttcaagtatgcctgggtgctggacaaacttaaggctgagcgtgaaa

SEQ ID NO: 140797 - DNA, 249 bp, Glycine max
ccgtaacctcgggaaaaggattggctctgagggctgggacgggggtcccagtcccgaacccgtcggctgtcggtggactgctcgagctgcttccgcggcgagagcgggtcgtcgcgtgccggtcgggggacggattgggaacgggcccttcggggcctcttccccgggcgtcgaacagtcaactcagaactggtacggacaaggggaatccgactgtttaattaaaacaaagcattgcgatggtccctg

SEQ ID NO: 140798 - DNA, 254 bp, Glycine max
  unsure (1)..(254): unsure at all n locations
atcagtacccttcttcttcttcttccctcttccctttcacaatctaaccagttttgtngacttggaacttcattcaagctgttgatcaggggcggcaccgttgtgaatgctcaccaccaacaggttgccgatgtctatgtcgaagatggtatcattgttgccatcaatcccactattacggttggagatgcggtgacggtcatagatgccactggcaagtttgtcatgccagggggcattgaccctcacaccca

SEQ ID NO: 140799 - DNA, 253 bp, Glycine max
gtgcggtttcctttgttggtgttgctgggaactgttttcctggcatcagtttgtgtctcattaaaggtgagagaggatgagaataaccctttctactttagaagctctaacagcttccaaactctctttgagaaccaaaacggtcgcattcgtctcctccagagattcaacaaacgctccccacaacttgagaaccttcgagactaccggattgtccagtttcagtcaaaacccaacacaatccttctccccc

SEQ ID NO: 140800 - DNA, 259 bp, Glycine max
caggaaccggtcctagaagtggaaacaccggtggcaccggttatggaggcactggtggtactgattatggaacagctggtggcactggttatggaagtggaactggctatggaatcaacactgggggtgcgcacactgaagcagggtatgggaaggagcatcgtcagcatgagcaatctcatggtggtcagcacgagaagaaagggatactggacaagattaaggagaagcttcctggaggacacagtgacaagtagat

SEQ ID NO: 140801 - DNA, 261 bp, Glycine max
accaaacacaagtacacaacacaacagcaagctatggcgtctgaacaattggctcgcagagagaacaccaccaccgagaaggagattcacgttgagaaacacagggttcccaagatggccacccacttcgagcaccttgcggagcagctaaagaatctgacatcaccgctgggaaggatactccgcagggtagcatagaagccttgcaagctggagagagggtcaaagatcatgcaggaaaagccatgggagatattggtg

SEQ ID NO: 140802 - DNA, 262 bp, Glycine max
agtattttcgcaataagcagagaacaggtgcgtgcgttggcccctaccaagaaaagctcttggcggccattcggtggcgaatccaagcctcaattcaatattttcagcaagcgtcccactatctccaacggatatggtcgtttaactgaagttggtcctgacgatgatgaaaagagttggcttcaaagactcaatctcatgcttacctttaccaacatcacccagagatctatgagtactattcactacaactcacatgcaa

SEQ ID NO: 140803 - DNA, 261 bp, Glycine max
acaagtacttccttacaatcaaaaccaacaacaactatggcaagttatcaaaagcactacgatgatcagggtcgcaaggttgacgagtatggcaacgttgagaagcaaaccgacgaatacggcaaccctgttcatgctgctagtgtcacctatgtagccaccagaactgctgctggtggttacagtgatgacattaataagcaacatgataccaccaatgcctacggcgtagacactggtagacagcattctagtggtggc

SEQ ID NO: 140804 - DNA, 256 bp, Glycine max
ctcgagccgaatcggctcgagggaaaagctgcgccttgtgttgacactactttgctgtgttcattttcatgtccaaagttctcttggatttgaagatggaatcagcagatctcaattcccagaagggttcctcttcggaacatgcacttcctcataccagattgagggagcacctcttgaagatggcaaaggtttaagcaactgggatgtttttagtcatatagcaggaaatataaacaatgatgagaatggtgac

SEQ ID NO: 140805 - DNA, 253 bp, Glycine max
gactcgtacaggaaccaagcatgccacgctcgttgcaacctccttaaggtggagaaagaagaatgtgaagaaggtgaaattccacgaccacgaccacgcgcacaacacccggagagggaacctcagcaacccggtgagaaggaggaagacgaagatgagcaaccacgtccaatcccattcccacgcccaccttctcgtcaagaagaagagcacgagcagagagaggaacaggaatggcctcgcaaggaggaaa

SEQ ID NO: 140806 - DNA, 251 bp, Glycine max
aaaattcttccaccaagttatgggtggccttgtgctgcttcttttctccctcttaggtctctcttctagttccagcatatcaactcatcgttccatattggaccttgacctaaccaagtttaccacacagaaacaggtgtcttcactgttccaactatggaagagtgagcatggacgtgtctaccataaccacgaagaagaggcaaagagacttgagattttcaagaataacttgaactatatcagggaca

SEQ ID NO: 140807 - DNA, 248 bp, Glycine max
attcaaaccttgctctatactacacagtacacacactagaagaataatggcttccatcctccactactttttagccctctctctttcttgctcttttcttttcttcttatccgactcagtcacccctacaaaaccaataaaccttgttgttctacccgttcaaaatgatggttccacagggctccattggcccaacctccaaaaaagaacccctctaatgcaagtaccagtcctggtggacctcaatg

SEQ ID NO: 140808 - DNA, 253 bp, Glycine max
caatatctacacaaaagtgttccacttgagtgaacagtagtgtgttaagaactaaacaatttttcaatggcgtccaagaaacaagaggagcgagctgaggcagctgcgaaagttgctgccaaagaactcgaacaagtcaacagagaaagaagagaccgtgatttcggtgttgttgctgaacaacaacaacaacatcatcaggaagatcaacaaaaacgtggtgtaatcgggtccatgtttaaggcggtgcaag

SEQ ID NO: 140809 - DNA, 254 bp, Glycine max
ctagctagcaagcaagcacagagatggaggcaaagcgaggccatgccctcatgtgcttggcacgtgtttcactcttcctctgcgctctaaccctatccgctgctcacggaagcaccacggttcaagacatcgcgagaaagttgaaactcggggacaacgagcttctgcgcacggagaagaagttcaaggttttcatggagaattacgggaggagctactccacagaggaggagtatttgcgccgtttggggatt

SEQ ID NO: 140810 - DNA, 256 bp, Glycine max
caactaacaataattccttcacttgcagaacttagttctctgttgcatcatcatcatcttcattagtgttagccctaaacttcaccttcaaccatgaccacagtgccaccacacagtgtccaagtgcacacaacaacacaccgctacgaagccggcgtcgtcccgccggctcgttttgaggcgccgcgttacgaagccggcatcaaggcgccctcttccatttaccattccgagagaggtccgacgacctctcagg

SEQ ID NO: 140811 - DNA, 268 bp, Glycine max
gttggtgttagtcttggtgtagtgtagctagggagggatatatatctgagtaagatggcatcagagcttgaattgcccccaggcttcagattccatccaacggacgaggcgctggtgttgcactatctctgccgcaaatgcgcgtcgcagccaatcgccgttcccatcatcgccgaaatcgacctctacaaatacgacccctgggacttacccggattggctacttatggagagaaagagtggtacttcttttcaccacgggaccgga

SEQ ID NO: 140812 - DNA, 258 bp, Glycine max
cacacacaactactacaagtacttccttacaatcaaaaccaacaacaactatggcaagttatcaaaagcactacgatgatcagggtcgcaaggttgacgagtatggcaacgttgagaagcaaaccgacgaatacggcaaccctgttcatgctgctagtgtcacctatgtagccaccagaactgctgctggtggttacagtgatgacattaataagcaacatgataccaccaatgcctacggcgtagacactggtagac

SEQ ID NO: 140813 - DNA, 258 bp, Glycine max
gatctgcagctccccgctttcaaagctctgaaatttccgattcgggatggagaaatacgagctcgtgaaggatataggatctgggaatttcggtgtggccaggctcatgcgacacaaagacaccaaggagcttgttgccatgaaatacattgaacggggtcacaagattgatgagaatgttgcgacggaaatcataaaccatagaagtcttcggcaccccaatattattcggttcaaggaggtggttctgactccaac

SEQ ID NO: 140814 - DNA, 253 bp, Glycine max
ttcaaaccttgctctatactacacagtacacacactagaagaataatggcttccatcctccactactttttagccctctctctttcttgctcttttcttttcttcttatccgactcagtcacccctacaaaaccaataaaccttgttgttctacccgttcaaaatgatggttccacagggctccattgggccaacctccaaaaaagaacccctctaatgcaagtaccagtcctggtggacctcaatggaaatc

SEQ ID NO: 140815 - DNA, 253 bp, Glycine max
cttttctctacagtcatgggcaaggtcaagatcggaatcaacggatttggaagaattggccgtttggttgccagagtcgctctgcaaagagacgatgtggagctcgttgccgttaacgaccctttcattaccaccgattacatgacatacatgtttaaatacgacagtgttcacggacactggaagcatcacgatgtcaccgttaaggacgagaagacccttctcttcggtgacaagccagtcactgtttttg

SEQ ID NO: 140816 - DNA, 170 bp, Glycine max
caacgggcgagtaacccgtaaggcgcaaggaagctgattggtgggatccccctgtgggttgcaccgccgaccgaccctgatcttctgtgaagggttcgagtgagagcatacctgtacggtgacccgaaaatgatcggtgaactactgcgctgagccgggggtcgaagcca

SEQ ID NO: 140817 - DNA, 252 bp, Glycine max
accttgctctatactacacagtacacacactagaagaataatggcttccatcctccactactttttagccctctctctttcttgctcttttcttttcttcttatccgactcagtcacccctacaaaaccaataaaccttgttgttctacccgttcaaaatgatggttccacagggctccattggtccaacctccaaaaaagaacccctctaatgcaagtaccagtcctggtggacctcaatggaaatcactt

SEQ ID NO: 140818 - DNA, 248 bp, Glycine max
  unsure (1)..(248): unsure at all n locations
tgcaatcttacaagttccaaacttctctattttgctattatttgttctcacttctaaaccatatacgactcccccttntatattatcatggcttctaaggtggtttcggtttttgttatagcgatgatcttgtttgccatgaactgtaactgcactagtgttgaccacatgccttcaaccaaagaggaaggtcacgattttcaggagtctaaagccaagaccacacaaacggcgaacacggccatgga

SEQ ID NO: 140819 - DNA, 251 bp, Glycine max
caaaccttgctctatactacacagtacacacactagaagaataatggcttccatcctccactactttttagccctctctctttcttgctcttttcttttcttcttatccgactcagtcacccctacaaaaccaataaaccttgttgttctacccgttcaaaatgatggttccacagggctccattggtccaacctccaaaaaagaacccctctaatgcaagtaccagtcctggtggacctcaatggaaatc

SEQ ID NO: 140820 - DNA, 253 bp, Glycine max
gtcgaaggaagtgagccaagaaggcctgcagaggaaggactacgtagaccctcctccagcccctctcatcgaccttgccgagatcaagctctggtccttctacagagccctcatcgccgagttcattgccacactcctcttcctctacgtcaccgtcgccaccgtcatcggccacaagaaacagaccggaccatgcgacggcgttggccttctcggcatcgcatgggccttcggtggcatgatcttcgtcctc

SEQ ID NO: 140821 - DNA, 260 bp, Glycine max
tttgacactagacaggcatttctgagtctctgccagggaaatcattaccagtatgatacactaaggcgggccaagcattcctcaatgatggttctctatcatcttcataatccaacggctccagcatttgtgacaacttgcaatatatgctatcttgacatagaaactggtcaaggttggcgttgtgaggtttgccctgagtatgatgtatgcaatgcttgttatcaaaaggatggaggtattgatcatcctcataagtt

SEQ ID NO: 140822 - DNA, 255 bp, Glycine max
accgacatcaccggcgaccatggcgtcacagtcacagaaactacattccatggaagacgcataataaccgaggctgttggtggccaggtagtggaacagtatgtggagccaaatccagttgaggctggacgaaccagtgcaattaaggagagtgctataacaataggagaggcattggaggccacggcacagacggtgggtcacaagccggtggatcagagtgatgcctcagcgattcaggcgggaggttagagc

SEQ ID NO: 140823 - DNA, 257 bp, Glycine max
cgatgatattgccaaagctgttagtggggaagctgctgaaatgattatccaagtgtctgatagtgtggttcctgcattcaagtctgctgctgaagagcttttgaacagttctggtttaccagtcattgaattactggcaaaggctcttgccaaggctgttggttataccgatgtaaagcaaagatcacttctcacttccatggagaactatgttacattagtccttgagactgggaaaccaatctatacccaatctt

SEQ ID NO: 140824 - DNA, 258 bp, Glycine max
tttcccatcagtacccatttttgtactaagaagcatttgttacatttatgtaaccaaaggaaaatcaaaagtacgcaggaggtgaagctcggtggcgaaatcaacatgcaacgcagtgaaagcatgcgactaaaggagaagaaggtgaaggatttgatggttgacaagaagaggctagtggaggtgccgtacatggcgtccctggcccacacaatgactacactggtggcgaacaaggttgtggcggtgccggtggct

SEQ ID NO: 140825 - DNA, 241 bp, Glycine max
ggctacgatggtgacactaataaacatcatggaattactggtggctataatgatgacaccaatagacatcatggaactaccggtgtctatggtatagacaccgataggcaacaacatgggactactggtggctatgccggtgacactggtaggcaacatgggaacatcggtggcccttactatggcaccaacaccgcagacaccggtactggtcccagaagtggaaccacgggcggcaccg

SEQ ID NO: 140826 - DNA, 261 bp, Glycine max
aaagacatcaaggcgtttaaggaagccaccaaagtggacaaggtggttgtactgtggactgccaacacagagaggtacagtaatttggttgtgggccttaatgacaccatggagaatctcttggctgctgtggacagaaatgaggctgagatttctccttccaccttgtatgccattgcttgtgttatggaaaatgttcctttcattaatggaagccctcagaacacttttgtaccagggctgattgatcttgccatcgcg

SEQ ID NO: 140827 - DNA, 256 bp, Glycine max
acacaagttgaactgcgagatgagcatgggaacccagttgaactcacagatgcatatgggaatccggtttggttaacggacgagaaaggcaaaccggtgcacctcaccggtgtggcaaccactgcacacaaatgtttgcatgagaatgacacaccacaagagcttcctcactccaagagctcaagctctagctcttctgaggatgaagaacatgaagggaggagcaagaagggactgaaggataaaatataagaga

SEQ ID NO: 140828 - DNA, 251 bp, Glycine max
caggaattgacggaggcattcgaaatcggtgaagatggttgctatgaggtttcatcagtaccaggtggtgggaagggctcttcctaccgaatccgatgagcatcctaagatctaccgcatgaaactctgggcaactaacgaggtccgtgccaaatccaagttctggtattttttgagaaaattgaagaaggttaagaaaagcaatgggcaagtgctagccataaatgagatttttgagaggaatcctacca

SEQ ID NO: 140829 - DNA, 250 bp, Glycine max
atcacacacaactactacaagtacttccttacaatcaaaaccaacaacaactatggcaagttatcaaaagcactacgatgatcagggtcgcaaggttgacgagtatggcaacgttgagaagcaaaccgacgaatacggcaaccctgttcatgctgctagtgtcacctatgtagccaccagaactgctgctggtggttacagtgatgacattaataagcaacatgataccaccaatgcctacggcgtagac

SEQ ID NO: 140830 - DNA, 264 bp, Glycine max
gctcggaattcaccaagtgttggattgttcacccaccaatagggaacgtgagctgggtttagaccgtcgtgagacaggttagttttaccctactgatgacagtgtcgcaatagtaattcaacctagtacgagaggaaccgttgattcgcacaattggtcatcgcgcttggttgaaaagccagtggcgcgaactaccgtgcgttggattatgactgaacgcctctaagtcagaatccgggctagaagcgacgcgtgcgcccgccg

SEQ ID NO: 140831 - DNA, 243 bp, Glycine max
ccaaaacagtaaagctaacttcaacacctttaattttctaaaagtaattcagcggctgaataccaagcggagaagatgagtcaggagcagccacggcgtcccaaaggccaaaaccccatcaaatacggcgacgtttttgtcgtctccggcgaccttgcacagaagcccgtcgcaccggaagatgctgccatgatgcaaagcgcggaagctcgagtgctcggacaaacccaacccggcggagag

SEQ ID NO: 140832 - DNA, 243 bp, Glycine max
ctactacaagtacttccttacaatcaaaaccaacaacaactatggcaagttatcaaaagcactacgatgatcagggtcgcaaggttgacgagtatgacaacgttgagaagcaaaccgacgaatacggcaaccctgttcatgctgctagtgtcacctatgtagccaccagaactgctgctggtggttacagtgatgacaataataagcaacatgataccaccaatgcctacggcgtagacactg

SEQ ID NO: 140833 - DNA, 242 bp, Glycine max
aaaaatgtcgtcgttgataacagatttgctccgtcaaaccggcggcaccgcgtacatcgacgggttactggcgacggagctggagcgccatggcgccgacctcaatgatcctctttggagcgccaagtgcctcttttccttccctcacctcattcgccaagtgcaccttgattacctggaaaatggtgcagacattataatcacagcatcttaccaagccaccattcaagggtttaaagcca

SEQ ID NO: 140834 - DNA, 239 bp, Glycine max
attcaattcaatctgcctcgatcatggagaggaaaacatttgggtttttgttcttgctcctccttgtcttagcttctgatgtgacggtgaagagagcagaggcgaaagattgcttgacaaggaggcacgggtttcagggtagatgcttattcgacaggcaatgtgcacatgtgtgcaggagcgatggtttcatcggtggtcagtgccgaggccctcttcgcaaatgcttttgcagcagg

SEQ ID NO: 140835 - DNA, 238 bp, Glycine max
cgaaaaatggaatcatcggagatcgaagacaggaagccggagattctgaaaagcggaggaggttgtcttctgccgccggttccgccgccgcaagcgaaggcgtcggtgaagaaggattacatgtacttcgacccgtcggattcaatcccgaagctgcacacggactcgagctgttcggagcacgtggtatcgccggaattcgcgagcgaggtgcagagcgagccaaagtggaaggagt

SEQ ID NO: 140836 - DNA, 238 bp, Glycine max
cggctcgaatcgagggtttgggtttctcttcctcccttggagaaaaagaagagccaccgctgcgacgccgttcgtgcatttttgaggtgccgctgtcatgtttgggcgtggtggaccaaggaggagtgataactccaaatattatgatattctcgggatttccaaaaatgccagtgaaaatgagatcaagaaggcctatagaaaggcggctatgaagaaccatccagataagggagga

SEQ ID NO: 140837 - DNA, 247 bp, Glycine max
cacaactactacaagtacttccttacaatcaaaaccaacaacaactatggcaagttatcaaaagcactacgatgatcaggggggcaaggttgacgagtatggcaacgttgagaagcaaaccgacgaatacggcaaccctgttcatgctgctagtgtcacctatgtagccaccagaactgctgctggtggttacagtgatgacattaataagcaacatgataccaccaatgcctacggcgtagacact

SEQ ID NO: 140838 - DNA, 249 bp, Glycine max
ctgctccgtaccagtttcactgcataaatttgagagaaaactctgcaaacatgttggtttatcaggacctccttacaggtgatgagcttctctcggactccttccgttacaatgaaattgagaatggaatgctgtgggaagttgaggggaagtgggttgttaagggagcagttgatgttgacattggtgcaaacccttctgctgagggtggagaagatgagggagtcgatgacgcagctgttaaggttt

SEQ ID NO: 140839 - DNA, 249 bp, Glycine max
caacgttgagaagcaaaccgacgaatacggcaaccctgttcatgctgctagtgtcacctatgtagccaccagaactgctgctggtggttacagtgatgacattaataagcaacatgataccaccaatgcctacggcgtagacactggtagacagcattctagtggtggctacgatggtgacactaataaacatcatggaattactggtggctataatgatgacaccaatagacatcatggaactaccgg

SEQ ID NO: 140840 - DNA, 240 bp, Glycine max
cacacaactactacaactacttccttacaatcaaaaccatcgacaactaaggcaagttatcaaaagcactacgatgatcagggtcgcaaggttgacgagtatggcaacgttgagaagcaaaccgacgaatacggcaaccctgttcatgctgctagtgtcacctatgtagccaccagaactgctgctggtggttacagtgatgacattaataagcaacatgataccaccaatgcctacggc

SEQ ID NO: 140841 - DNA, 238 bp, Glycine max
attctggaggcttccttcaataccaaattcgaggagataaacagggttttgtttggtggagaggggaggcggcaccagcaagagggagtgattttggaactatcaaaggaacagattcgggaactgagcaagcgtgccaaatctagttcaaggagtactaattccttcgattatgaaccattctacttgagaggctcccaaatctcttccaacaactttggaaagttctatgagatca

SEQ ID NO: 140842 - DNA, 242 bp, Glycine max; identical to SEQ ID NO: 134269

SEQ ID NO: 140843 - DNA, 237 bp, Glycine max
gtgcagaagagcgtcgcagtcgcaaccctaatcagaagaagcgcagttcaagcgagtgacagccaccagccatgggtcgtatgcacagccgcggtaagggtatatcctcttctgctttgccctacaaaaggacacctcctagctggctcaagatctcttcgcaagatgtcgaagaaaatatctgcaagtttgcgaagaaaggtttgaccccgtctcagattggtgtcattctcagag

SEQ ID NO: 140844 - DNA, 239 bp, Glycine max
  unsure (1)..(239): unsure at all n locations
gttcttcatagttcagtgtgtcgtttaaaaatgtcgcagttgctggataaagccaagaacttcgtgtcggagaaggtaaatgatatggccaagccggagganngtgtcactgacgtggacttcaagcgcgtgagcaaagataatgtcgagtacttggccaaggtctctgttcgtaacccttattcaacttccatacccatttgtgagatcaactactctttcaaaagcgcatccaggga

SEQ ID NO: 140845 - DNA, 240 bp, Glycine max
ccaaaacactaaagctaacttcaacacctttaattttcggaaagtaattcagcggctgaataccaagcggagaagatgagtcaggagcagccacggcgtcccaaaggccaaaaccccatcaaatacggcgacacttttgtcgtctccggcgaccttgcacagaagcccgtcgcaccggaagatgctgccatgatgcaaagcgcggaagctcgagtgctcggacaaacccaacccggcgga

SEQ ID NO: 140846 - DNA, 245 bp, Glycine max
gttggaacggtcggacaaagtcacatgttgctcctgatgtcactctaacttcacttgaacctattcagcaagggcattgggcgaatttgccgcccgaattgcttctggacataataaggagggtggaagacagtgagactacctggccagcacgagccgttgtggtttattgtggttcagtttgtaaatcgtggagggccgttacgaaagagattgttaagactcctgaacaatgtggaaggctc

SEQ ID NO: 140847 - DNA, 240 bp, Glycine max
cgaatccactggacacaaggagacgaagaaggaatccaaagtagactacgacgacgacgtcgtttcggaaactaagaacgtaactgtttcggaagttgaagaagaatctcccaagttcggcgtgacgtccgtttgcggcaggagaagagacatggaagattccgtctcggtgcggccttgcttcacccaaggcttccactacttcggcgtctacgacggtcacggttgctctcatgttgc

SEQ ID NO: 140848 - DNA, 235 bp, Glycine max
ccggcgaaattcgtgctggaggcgatctcggaggtgtttccggtcgacaagagaggggagaaggccggccacgacttgggctgggcctgcgtccttgtcctggagtcgttaattccggtcgtcgtcgaccccgtcatcggaaaatcgaggttgttggttacccctaccgtgaaggagcatgccacggagatcgcggagacttggaagagcagcctggaggatcgtggcggcgtgg

SEQ ID NO: 140849 - DNA, 187 bp, Glycine max; identical to SEQ ID NO: 123712

SEQ ID NO: 140850 - DNA, 238 bp, Glycine max
cacgacgtgagacagattgtgaagtaagtagaaatcggtgcaagaaattctccgctttatctacaaaatttaagtgagtttgtgaagacaaaaaatcactagctactaaaaaatggccacagttggaaggaacgcagcagctccattgctgtttcttaacttgatcatgtattttattgttcttggctttgctagttggtgcctcaacaagttcatcaatggccaaacttatcaccct

SEQ ID NO: 140851 - DNA, 240 bp, Glycine max
aattcttccaccaagttatgggttccttgtgttgcttcttttctccctcttaggtctctcttctagatccagcatgtgaactcatcgttccatattggaccttgacctaaccaagtttaccacacagaaacaggtgccttcactgttccaactatggaagagtgagcatggacgtgtctaccataaccacgaagaagaggcaaagagacttgagattttcaagaataacttgaactatat

SEQ ID NO: 140852 - DNA, 245 bp, Glycine max
tggtgaagatgtggtgcattctttaaaggtttccttggaggacgtctataacggcacaacaaagaaactatctctttctagaaacgtattctgctcaaaatgtaaagggaaaggttcaaaaagtggaacagctggtaggtgttttggatgccaaggcactggtatgaaaattacaagaaggcagattggactaggcatgattcaacaaatgcaacatgtctgtcctgactgcagaggatctggtg

SEQ ID NO: 140853 - DNA, 246 bp, Glycine max
ccaaaacagtaaagctaacttcaacacctttaattttctaaaagtaattcagcggctgaataccaagcggagaagatgagtcaggagcagccacggcgtcccaaaggccaaaaccccatcaaatacggcgacgtttttgtcgtctccggcgaccttgcacagaagcccgtcgcaccggaagatgctgccatgatgcaaagcgcggaagctcgagtgctcggacaaacccaacccggcggacagctt

SEQ ID NO: 140854 - DNA, 241 bp, Glycine max
  unsure (1)..(241): unsure at all n locations
gagatcccatgggggtcaactggagctgacatcattgttgagtccaccggagttttcaccacgnaaggacaaggccgccgcacatttgaagnngncgtgcaaagaaggttattatttctgcccccagtaaggatgcccccatgtttgttgttggtgtcaacgagcacgagtacaagccagagcttganattatntccaatgctagctgcacaaccaactgccttgccccacttgccaaggt

SEQ ID NO: 140855 - DNA, 237 bp, Glycine max
ctttgttgttcctcactgacctcaccatggcgactagatccaagctttctttagctatcttccttttctttcagtgagccttgatttcaaacctagccttgggcaaacttaaagagaccgaggtcgaagaagatcccgagctcgtaacatgcaaacaccagtgctcaacagcaacggcaatacactgagagtgacaagcgagcatgcttgcaacaatgtgacagtatgcagctcgag

SEQ ID NO: 140856 - DNA, 234 bp, Glycine max
gctagaagcaataagatgaaaatgaaagtgcttgttttgtttgttgctacagttttggtagcatatgaatgccatggctcagactaccagaagttccctctccaaatgaaaactgggtttggtgggcaatacagcaatgaggtggcatgtgccagttggaggcttggcgtggaagcaaacaacgtagtcaagtggcaaactgttcctgcagcttgcggagagtacatagctgac

SEQ ID NO: 140857 - DNA, 235 bp, Glycine max
cgaaaatgggcacagagacctcatcggtggatatttctgaacccttgctcgtggattctcacgggaacgaggaaaaggaggagtatttgcgcgaggaggttccggaatggaaggagcagataacaataagagggttggtggtgagtgctgtgttggggaccttgttctgcatcatcacccacaagctgaacctcaccgttgggatcattccttctcttaatgtggctgctggctt

SEQ ID NO: 140858 - DNA, 233 bp, Glycine max
  unsure (1)..(233): unsure at all n locations
tgttcttcatagttcagtgtgtcgtttaaaaatgtcgcagttgctggataaagccaagaacttcgtgtcggagaaggtaaatgatatggccaagccggaggcangtgtcactgacgtggacttcaagcgcgtgagcaaagataatgtcgagtacttggccaaggtctctgttcgtaacccttattcaacttccatacccatttgtgagatcaactactctttcaaaagcgcat

SEQ ID NO: 140859 - DNA, 234 bp, Glycine max
ggcgaaggaacatacggcgtagtttacaagggtcgcgaccgcgtcaccaacgagaccatcgcgttgaagaagattcgcctcgagcaggaggatgagggggttcccagcaccgccattcgccagatttctctcttgaaagaaatgcagcacaggaacattgttaggttgcaggatgtagtgcacgatgagaagagtttgtatctggtttttcagtaccttgacttagatctaaag

SEQ ID NO: 140860 - DNA, 234 bp, Glycine max
cttcaaagaaaccgactctcccaatttcaccggttctttttacaccaagaccaaggcaatggtagaggatctgctgaagaactatgataatgtgtgcacattgcgagtgaggatgcctatctcatccgatttattgaacccgcgcaattttatcactaagatcactcgatatgagaaggttgtggatattccgaattcgatgactatattggatgaactgcttccaatttcaat

SEQ ID NO: 140861 - DNA, 244 bp, Glycine max
gtgattgaagctagttagaacaagatgttgcagctactctacactgcgattttctccgaaatgcttttgattctcacgctcgtcttcaaaaccccactgagaaaactcgtcatcgtttccctcgatagtgtgaagcgcggtcgcggtcccgtggtggtttccaccgtgggcgccacattgatggtggttctcgcttcgagcctctacagcatggccaagatccagcaacgcaccctcgaggccg

SEQ ID NO: 140862 - DNA, 234 bp, Glycine max
cacaactactacaagtacttccttacaatcaaaaccaacaacaactaaggcaagttatcaaaagcactacgatgatcagggtcgcaacgttgacgagtatggcaacgttgagaagcaaaccgacgaatacggcaaccctgttcatgctgctagtgtcacctatgtagccaccagaactgctgatggtggacacagtgatgacattaataagcaacatgataccaccaatgccta

SEQ ID NO: 140863 - DNA, 235 bp, Glycine max
gtatcaataggattaaagcaaacttacagagccgtgtaaagaaaggtaaattgaccaaggaaaattttgaaaagaccatctctcttctcaaaggttcccttgactatgaaagcttcagggatgtggacttggtgatagaggctgttattgagaatatttccttaaagcaacagatattttctgatcttgaaaagtattgtccacctcattgtatacttgcaagtaacacttccac

SEQ ID NO: 140864 - DNA, 232 bp, Glycine max
gaaagtaacgatgacactaacagtaaagaagtttatatcgtgtacatgggagctgcagattcaacaaaagcttctcttaaaaatgagcacgctcagattctgaattcagtgctaagaaggaatgagaatgccctagtacggaactacaagcatggtttctctgggttcgcagctcgtctatcaaaagaggaggcaaactcaattgctcagaaacctggtgtggtgtctgttt

SEQ ID NO: 140865 - DNA, 227 bp, Glycine max
ggcacagtctgatgtttgccatgcatatcaactactgaggaaaggtggtgtgaaagaggaaaatattgttgtatttatgtatgatgacattgctttcaatgaagagaacccacggcctggagtcattattaacagtccacacggaaatgatgtatacaagggagttcctaaggattacgttggtgaagatgttactgttgacaacttttttgctgctatacttggaa

SEQ ID NO: 140866 - DNA, 233 bp, Glycine max
ctgcacataacttaccactctacaaaactctccagtaattctgaaaattttatattctattggtgaaattaacagctctgtgattgatcaatggcgacaaaggaaggcaaagccataggcatcgatctcggcacgacctacagctgcgtgggcgtgtggcaaaacgaccgcgtcgagatcatcaccaacgaccaaggcaaccgcaccactccctcttatgtagccttcaccga

SEQ ID NO: 140867 - DNA, 233 bp, Glycine max
aaacctaagcttagaattagaaacaaagaaaagaagaaaggaaagaattgatcgttgaaaatgcagggaggaaagaaagcgggagagtccattaaggaaacagctacaaacattggtgcttctgccaaggctggcatggagaagaccaaggccactgtccaagagaaggcagaaagaatgacagcacgtgatccggtgcaaaaggagttggcaacccaaaagaaagaggcaaa

SEQ ID NO: 140868 - DNA, 241 bp, Glycine max
actcgagccgaatcggctcgagcgcagtcgcagtgagtgaaaaggacaaccctaattgcggtattctcagtgcggtcgagagcaagaaaaaatggcagataatcttgttctccgtggcaccatgcgcgcccacaccgacgttgtgacggcgattgccactcccatcgacaactccgacatgatcgtcaccgcctcacgcgacaaatccatcatcctctggcatcttaccaaggaggacaag

SEQ ID NO: 140869 - DNA, 244 bp, Glycine max
accaagtgttggattgttcacccaccaatagggaacgtgagctgggtttagaccgtcgtgagacaggttagttttaccctactgatgacagtgtcgcaatagtaattcaacctagtacgagaggaaccgttgattcgcacaattggtcatcgcgcttggttgaaaagccagtggcgcgaactaccgtgcgttggattatgactgaacgcctctaagtcagaatccgggctagaagcgacgcgtg

SEQ ID NO: 140870 - DNA, 232 bp, Glycine max
gaaaacctaagcttagaattagaaacaaagaaaagaagaaaggaaagaattgatcgttgaaaatgcagggaggaaagaaagcgggagagtccattaaggaaacagctacaaacattggtgcttctgccaaggctggcatggagaagaccaaggccactgtccaagagaaggcagaaagaatgacagcacgtgatccggtgcaaaaggagttggcaacccaaaagaaagaggc

SEQ ID NO: 140871 - DNA, 232 bp, Glycine max
ctgttttcctctcttttcggtaacaaggaagctcgaatcctcgttctcggcctcgacaatgccggcaaaaccactattctctatcggcttcagatgggcgaagttgtctccaccattccaacaattgggtttaatgtcgaaacagtgcagtataacaacattaaatttcaagtctgggatttaggtgggcaaacaagtatcaggccatattggaggtgttactttccaaata

SEQ ID NO: 140872 - DNA, 232 bp, Glycine max
caagatgtggaaccaaccattgggaaaaaccgatttggaaagcggttctcgcccgctgtatccgatgatgcttgagagccccgaactgcgctggtctttcatcagaaaagtatactccataatcgccatacagttgctcgtaaccatcgtcgtcggcgccgtcgtcgtcaccgtccgcccaatcagcgtcttcttcgccaccaccggcgccggattggctctctacatcgtc

SEQ ID NO: 140873 - DNA, 233 bp, Glycine max
cttgctctatactacacagtacacacactagaagaataatggcttccatcctccactactttttagccctctctctttcttgctcttttcttttcttcttatccgactcagtcacccctacaaaaccaataaaccttgttgttctacccgttcaaaatgatggttccacagggctccattggaccaacctccaaaaaagaacccctctaatgcaagtaccagtcctggtggac

SEQ ID NO: 140874 - DNA, 230 bp, Glycine max
caaagaactgtccaaagctggctgagttatcaatagagtcgtgtcctaaacttggcaatgaaggtctacaagctattgggaagtgtcccaatctaaggtctatctcaatcaaggattgctctggagttggtgatcagggagttgctggtgtgttgtcttcagcttcttatgctctaacaaaggtgaagcttgagtcgctgaatgtttctgatctctctctagcagtgatt

SEQ ID NO: 140875 - DNA, 228 bp, Glycine max
caaagagagccaagaaagtgaaggttctgagtctcaaagagaaccacgaagacataagaataagaacccttttcacttcaactctaaaaggttccaaactctcttcaaaaaccaatatggccacgttcgcgtcctccagaggttcaacaaacgctcccaacagcttcagaatctccgagactaccgcattttggagttcaactccaaacccaacacccttcttctccc

SEQ ID NO: 140876 - DNA, 227 bp, Glycine max
gttggaacggtcggacaaagtcacatgttgctcctgatgtcactctaacttcacttgaacctattcagcaagggcattgggcgaatttgccgcccgaattgcttctggacataataaggagggtggaagacagtgagactacctggccagcacgagccgttgtggtttattgtggttcagtttgtaaatcgtggagggccgttacgaaagagattgttaagactcct

SEQ ID NO: 140877 - DNA, 230 bp, Glycine max
tcgacggagacatcgccggaggagttacaaggatcggaagagaggaaggaagtggtggaggagcgttctggggcatactggacgacgttggcgccaaacgtggaggattacagtgggagtttcgcgagatggattgcagcagggtcggggcaagtggttagggggattctgtgggctggggatgtgactgtggacaggttgaagtgggggaatgatttcttgaagaagag

SEQ ID NO: 140878 - DNA, 234 bp, Glycine max
caagaaagaacttccttataaccaaaaccaacaacaactatggcaagttatcagaagcactacgatgatcagggtcgcaaggtcgacgagtatggcaatgttgagaggcaaactgacgaatatggcaacccggttcatgccactagtgtcacttatgtagccactaaaagtgttggtggctacaatgatgacactaataagcaacatgataccaccggtgtctatcctgagaaa

SEQ ID NO: 140879 - DNA, 95 bp, Glycine max
caacaaccatcgcaagttatcaaaagcactacgatgatcagggtcgcaaggttgacgagtatggcaacgttgagaagcaaaccgacgaatccggc

SEQ ID NO: 140880 - DNA, 125 bp, Glycine max
caacgttagagaagggtcagcaaggctatgctgtgacaaaggacaccatttcaagtgcagcgaaaaccgcttcggagaaaactgcgccagtggcagagaaggccaaagactacactcttcaggct

SEQ ID NO: 140881 - DNA, 139 bp, Glycine max
aatcctttctgactcggcctggcccggtcgccctacgcgactggcgcttcaaaaggtagttgacttgcttactcgttagagtaggggtcgcgagagagcagagcgtaccgccctgccatagtcgcgagtctgtttatac

SEQ ID NO: 140882 - DNA, 115 bp, Glycine max
caagaaagtaattccttataaccaaaaccaacaacaactatggcaagttatcagaagcactacgatgatcagggtcgcaaggtcgacgagtatggcaatgttgaaaggcaaactg

SEQ ID NO: 140883 - DNA, 141 bp, Glycine max
gaaaacctaagcttagaattagaaacaaagaaaagaagaaaggaaagaattgatcgttgaaaatgcagggaggaaagaaagcgggagagtccattaaggaaacagctacaaacattggtgcttctgccaaggctggcatgg

SEQ ID NO: 140884 - DNA, 143 bp, Glycine max
ggggtcatggtccatgatgtgaccatatcatctcctggggacagtcctaacacagatggaattcaccttcagaactccaaagatgtgttgatatacagcagctctatggcctgcggagatgactgtatttcgatacaaactgg

SEQ ID NO: 140885 - DNA, 130 bp, Glycine max
cttcttctcttgcggctagggttttcgcgcagctctgtctagaactaaggaagatgggcaaggagaaggttcacatcagtactgtggtcattggccatgtcgactctgggaaatccactaccactggtca

SEQ ID NO: 140886 - DNA, 104 bp, Glycine max
cgtaaatgtatgctgtaagagctcatcgtgagcgtggaatgtatctgcccatgtaactataacgacttgagctccacctatctactatctactacggctaaata

SEQ ID NO: 140887 - DNA, 147 bp, Glycine max
ctcgagccgttttactccagaggttgaaaccttttaactgtaatcttctgtattttgatcgacttaggatcgatcctgaattggagaaagagattggagcaaaatttgaggaggaccttgatgcaatgcttccaaagtgtgatgtaa

SEQ ID NO: 140888 - DNA, 172 bp, Glycine max
cgtgtactttcttgcgaaacagaagggcgaaggggcaaacacaacttttttgtttttttgtagagcgagagagaaaaaaatgttggggatcttcagcagttccgtggtgtcgccgccggaggagctggtggctgccggcagcagaacgccgtcgccgaagacgacggcgggg

SEQ ID NO: 140889 - DNA, 127 bp, Glycine max
ctagaattagggcaattacgtttactagaagtggacaatagagtgctagtgccagctaaaactcatctgcgtgttattataacatcagctgatgtacttcatagttgggcagtaccttccctgggtg

SEQ ID NO: 140890 - DNA, 125 bp, Glycine max
gctactccacagaggaggagtatttgcgccgtttggggattttcgcccagaacatggtcagagcggcggagcatcaggcgctggaccccaccgccgtccacggcgtcacgcagttctccgatctc

SEQ ID NO: 140891 - DNA, 118 bp, Glycine max
gctcgagctttaaataggtaggacggtgcggctgctctgttgagccgcgccatggcctcgagagctcccagtgggccatttttggcaatcagaactggcgatgcgggatgccccggaa

SEQ ID NO: 140892 - DNA, 171 bp, Glycine max
tttcgttcgcatcttctctctctctcagaaagatgaaggtggtcgccgcgtatttgctcgccgtcctcggtggcaacaacagcccctccgccgatgtcatcaaggaaatccttggctccgttggagtagaagcagatgaagataggattgaatcgtttttgtctgaagtta

SEQ ID NO: 140893 - DNA, 133 bp, Glycine max
aaactctccaattctgaagattttcttatctcttgtctttgaaactagaagctccgtgattgatcaatggcgacaaaagaaggcaaagccatgggcatagacctcggcacgacctacagctgcgtgggcgtgt

SEQ ID NO: 140894 - DNA, 133 bp, Glycine max
gatgagggtcatcttctgtttttgatggcagcttctatattacgagcagaaacatttggtattcctattcctgactgggtgaagcatcctaagaagttggctgaagctgttgatagagtgatagtacctgact

SEQ ID NO: 140895 - DNA, 237 bp, Glycine max
gaagctcagatcggaaaaattcacctctccaatcccaatcccatcgttgcaaatgatccgattcattctgttgcagaacaggccgggcaagacccgtcttgccaaatactacgttcctctcgaggactccgagaagcacaaggtcgaatacgaggttcatcggctcgtcgtaaacagagaccctaaatacacaaatttcgtcgagtttcgtacgcacaagataatatacaggcgatc

SEQ ID NO: 140896 - DNA, 167 bp, Glycine max
gaaagaaagaaagccatgcaagcatgttcctcctcagacgctccactctccaagaggttagatggcaaactagcactcataaccggcggagccagtggcatcggtgaagccaccgccaagcttttccttcgccacggtgccaaggtcgtcatcgccgacatccaaga

SEQ ID NO: 140897 - DNA, 141 bp, Glycine max
tgataatgaaccgcccaactgcttctagaaggttgcttcctgagaaaggcaccccagaatatgaagaaatgattaataaccatgaaaaggcttatttgagaacaattacatcaaagttgccgactctcattagcctttcag

SEQ ID NO: 140898 - DNA, 135 bp, Glycine max
gaacttccttataaccaaaaccaacaacaactatggcaagttatcagaagcactacgatgatcagggtcgcaaggtcgacgagtatggcaatgttgagaggcaaactgacgaatatggcaacccggttcatgcca

SEQ ID NO: 140899 - DNA, 247 bp, Glycine max
cgcagaccgagctagctagctagcaagcaagcacagagatggaggcaaagcgaggccatgccctcatgtgcttggcacgtgtttcactcttcctctgcgctctaaccctatccgctgctcacggaagcaccacggttcaagacatcgcgagaaagttgaaactcggggacaacgagcttctgcgcacggagaagaagttcaaggttttcatggagaattacgggaggagctactccacagaggagga

SEQ ID NO: 140900 - DNA, 244 bp, Glycine max
atcatgggcaaggtcaagatcggaatcaacggatttggaagaattggccgtttggtagccagagtggctctgcagagagacgatgttgaactcgttgccgttaacgaccctttcatcaccaccgattacatgacatacatgtttaaatacgacagtgttcatggacactggaagcatcacgatgtcaccgttaaggacgagaagacccttctcttcggtgacaagccagtcactatttttggac

SEQ ID NO: 140901 - DNA, 245 bp, Glycine max; identical to SEQ ID NO: 134054

SEQ ID NO: 140902 - DNA, 245 bp, Glycine max
gtgattttttccgaaaaccctcgtcttcgaaatcagcaacaaaaacgcgaagtgtactaagcgaagcattgcagcgtgagaatggggaagaaggcaaaagggtcaaggaagggtaagaaggcatggagagctaacatcagcaccgaagagatcgaagatttcttcgagaaatcaacgaaggacgctctttctggtggctctctacaagccgtttcttccgattctctcttctatgaagacaagtc

SEQ ID NO: 140903 - DNA, 243 bp, Glycine max
aatgattttgcctttgttgaatttagcgatcctcgggatgctgatgatgctagatatagcttggatggtcgtgatgttgaaggaagtcgtatcattgtggaatttgccaaggggggtcctcgtggttcccgagaaaacttgggtcggggtctacctcctggatctggacgatgctttaactgtggcattgatggtcattgggcccgagattgcaaagctggggattggaaagacaagtgttac

SEQ ID NO: 140904 - DNA, 246 bp, Glycine max
gaatggtggatgagcaacaggcgattgccataggggttccggcagcgcgtgaggaactatagaggcggatgcgttagggctgctcacgcgcggggttgatgaatgccagatgtttagaaatctccctgagggactacgaagggacatcaagtaccatctgtgtttggatttggtgagacaggtgccactctttcagcatatggatgatttggtgctagagaatatttgtgaccgtgtgtagtccct

SEQ ID NO: 140905 - DNA, 242 bp, Glycine max
gaaagaacttccttataaccaaaaccaacaacaactatggcaagttatcagaagcactacgatgatcagggtcgcaaggtcgacgagtatggcaatgttgagaggcaaactgacgaatatggcaacccggttcatgccactagtgtcacttatgtagccactaaaagtgttggtggctacaatgatgacactaataagcaacatgataccaccggtgtctatcctgagaaagataccggtag

SEQ ID NO: 140906 - DNA, 232 bp, Glycine max
  unsure (1)..(232): unsure at all n locations
gctcaggccacaagaaatcttgaaactgcaaatcagatggagatggtcgaaataagtatttttgaaggacaccgatgagagggcatgtgcttatatagcaggaccagcgccaaaccgttggggttttactgttgatggagtagacttgntagagncaanttagtantcantaantantaagtantagcagncaaaagcgtactcacaacagacacaaggctttcagaaaagc

SEQ ID NO: 140907 - DNA, 243 bp, Glycine max
ctacaataacaggtgattttatagaaactgaactatcatgcaccatagcatacaaatatggacacccatcagccaacagagttgttgcaggacgcacctgagttgaccaagctgtatgctatggtgcatgatagttcagtctctacaataccaggtgattttgtcattggtgttaagttgacaaccataaacaatatgtgtgcatatgggctcaatcctggtatttcaggttctcgtcttttg

SEQ ID NO: 140908 - DNA, 244 bp, Glycine max
gaggcagcaagagggagtgatcgtggaactctcaaaggaacaaattcggcaactgagcagacgtgccaaatctagttcaaggaaaaccatttcctccgaagatgaaccattcaacttgtgaagccgcaaccccatctattccaacaactttggaaagttctttgagatcacccctgagaaaaacccacagcttcgggacttggatatcttcctcagttctgtggatatcaacgaaggagctctt

SEQ ID NO: 140909 - DNA, 242 bp, Glycine max
cttatcgctgctgtgcccaaccttgcttgtgtggaaactgtggatgataagaagatagcaaattttcttgatcgtgctgtagcaaatgttggcaggaaaccgttaaaggtttttgttcaagtgaatacaagcggagaaacatccaaatttggtgttgaaccagctctgtgtgtggatcttgtaaaacatattacaaactgcccaaaccttgagttctctggcctaatgacaattggcatgct

SEQ ID NO: 140910 - DNA, 241 bp, Glycine max
acacaactactacaagtacttccttacaatcaaaaccaacaacaactatggcaagttatcaaaagcactacgatgatcagggtcgcaaggttgacgagtatggcaacgttgagaagcaaaccgacgaatacggcaaccctgttcatgctgctagtgtcacctatgtagccaccagaactgctgctggtggttacagtgatgacattaataagcaacatgataccaccaatgcctacggcgt

SEQ ID NO: 140911 - DNA, 240 bp, Glycine max
gaagagaatggctcccaagggtttaatctttttggctgtgttatgcttctcagcactgtcactgagtcgttgtcttgcggaggataatggacttgttatgaacttctacaaggaatcatgccctcaggctgaagacatcatcaaagaacaagtcaagcttctctacaagcgccacaagaacactgctttctcctggctcagaaacatcttccatgactgtgctgttcagagttgtgatgc

SEQ ID NO: 140912 - DNA, 241 bp, Glycine max
caaacacaacaatcgagcttgcaacttcacccaagtctcaaacaaccttttaaacctcatcaaacatgtctctgattccatcattgctaagcaacagaaacatcatggaccccttctccaccaacatctgggcccactctgactccgacagcgaggtttccgccttcgtgaacgcacgtgtggactggaaggaaaccccggagtcgcatgtgttcaaggcggacttgccggtggctgaaga

SEQ ID NO: 140913 - DNA, 239 bp, Glycine max
caccagttaacaccaaaaaaggtgttattcgtgtctccaccgatttgaacatttttttctctgattctgatgaaaggtgtccacaccattccactgtgtggatgcttgatcaatttgatgcctctattggacagacatatgtgaccactggtggtgttgttggaaacccgggtgagcacacaattctgaattggtccaagatcaagagtatgaggatgctaataaccgggtctattgcc

SEQ ID NO: 140914 - DNA, 240 bp, Glycine max
cacacacaactactacaattacttccttacaatcaaaaccaacaacaactatggcaagttatcaaaagcactacgatgatcagggtcgcaaggttgacgagtatggcaacgttgagaagcaaaccgacgaatacggcaaccctgttcatgctgctagtgtcacctatgtagccaccagaactgctgctggtggttacagtgatgacattaataagcaacatgataccaccaatgcctacg

SEQ ID NO: 140915 - DNA, 242 bp, Glycine max
  unsure (1)..(242): unsure at all n locations
cagagatccattcccacgccgtttctcaccaaaacctaccagctncgtcgacgatcacaccatcgacgatgtcatttcgtggaacgattctggatcgtccttcatcgtctggaacaccaccgctttcgccaaggatttgcttcctaaatatttcaagcacaacaacttctccagcttcgttcgccaactcaacacttatggatttagaaaagttgtacctgaccgctgggagttctcgaacg

SEQ ID NO: 140916 - DNA, 243 bp, Glycine max
gcctttacatacgtaaagggccatgaggacagggataaagatgatactctgaagatgctgcttgaagctaagacaagtggtgcagacaatccattggcaatagcagcggatattggctttgatgagaactgcaaacaggtcattgaccttgttgtcaaagaatatggccgccttgatgttctggtcaacaatgcagctgagcagcatttgacaaactctgttgaggaaatcacacaacagcag

SEQ ID NO: 140917 - DNA, 243 bp, Glycine max
ctccaacaacggaacttctaaagatcaagtggacgtttcgtgtaaagtttatgtagcacctgttccaagaacggcaacggaagatgagattcgccctgtattcgaagaacatggaactattgttgagattgttcttttaaaacataagaaaactgggacacggcaaggaagttgttttgtaaaatatgcaacatttgatgaagctgatagggctattaaggttttaaacaataaatatacatt

SEQ ID NO: 140918 - DNA, 241 bp, Glycine max
gcaaaaggttgctaccagagatgatgatgtttaccacttcataagctatctacctgttgatggggtactgtatgagcttgatggattaaaggagggtcccatcagccttggtcagtgctctggtgggcaaggtgatattgaatggttgaagatagtgcagcctgtgatccaggaacgcattgaaaggtattcccaaagtgagataagattcaatctcctggcagtcatcaagaacaggaaa

SEQ ID NO: 140919 - DNA, 240 bp, Glycine max
tgcagaccgagctagctagctagcaagcaagcacagagatggaggcaaagcgaggccatgccctcatgtgcttggcacgtgtttcactcttcctctgcgctctaaccctatccgctgctcacggaagcaccacggttcaagacatcgcgagaaagttgaaactcggggacaacgagcttctgcgcacggagaagaagttcaaggttttcatggagatttacgggaggagctactccacag

SEQ ID NO: 140920 - DNA, 237 bp, Glycine max
atctcctgtgcatggtttccaagtgggaaatatatactttctggcctcagtgacaagagcatttgcatgtgggatttagatgggaaagaagtggagtcttggaaaggacaaagaacccttaagatttctgatttggaaataacaggtgatggggaacacatgctgagtatttgtaaagacaattcaatactgtacttcaacaaagaaacgagggatgagagatatattgatgaggac

SEQ ID NO: 140921 - DNA, 216 bp, Glycine max
  unsure (1)..(216): unsure at all n locations
caactatggcaagttatcaaaagcactacgatgatcagggtcgcaaggttgacgagtatggcaacgttgagaagcaaaccgacgaatacggcaaccctgttcatgctgctagtgtcacctatgtagccaccagaactgctgctggntgntacagntantacacttantagcaacagtagtccaccaagtccgtcggcgnagacacntgnagacagc

SEQ ID NO: 140922 - DNA, 241 bp, Glycine max
aagaaaacctaagcttagaattagaaacaaagaaaagaagaaaggaaagaattgatcgttgaaaatgcagggaggaaagaaagcgggagagtccattaaggaaacagctacaaacattggtgcttctgccaaggctggcatggagaagaccaaggccactgtccaagagaaggcagaaagaatgacagcacgtgatccggtgcaaaaggagttggcaacccaaaagaaagaggcaaagatg

SEQ ID NO: 140923 - DNA, 237 bp, Glycine max
tactcgagccaatcggctcgagcaagaactgaaaggacggttagagcagagtataaaggaagctgctgacaaatatcaaggtgtgaacctgtatctcaagaacttggatgatactatcagtgatgaaaaacttaaggaaatgtttgctgaatatggtacaataacttcatgcaaggttatgcgagaccccactggaatcggtagaggatacagatttgttgcattttcaactcctga

SEQ ID NO: 140924 - DNA, 239 bp, Glycine max
gggagttgcagctgagcatggttactttctaagaatgaaacgagatgaagagtgggaaacacatgttgcagcaacagacactagttggaaacaaattgcagaacctgtaatgaaactttacactgaaacaactgatggatccaccattgaagacaaggagactgcacttgtttggtgctatgaggatgcagatccagactttggatcgtgccaagctaaggaactccttgatcatcttg

SEQ ID NO: 140925 - DNA, 239 bp, Glycine max
gtacttccttacaatcaaaaccaacaacaactatggcaagttatcaaaagcactacgatgatcagggtcgcaaggttgacgagtatggcaacgttgagaagcaaaccgacgaatacggcaaccctgttcatgctgctagtgtcacctatgtagccaccagaactgctgctggtggttacagtgatgacattaataagcaacatgataccaccaatgcctacggcgtagacactggtaga

SEQ ID NO: 140926 - DNA, 239 bp, Glycine max
ccaccctccacctggtgctccgtcttcgtggtggcatgcaaatctttgtcaagaccctcactggaaagaccatcacccttgaggtggagagttctgacaccattgacaatgtcaaggctaagattcaagacaaagagggtatcccacccgaccaacagaggctgatctttgctggaaagcagcttgaggatggccgtacccttgccgattacaacattcagaaagagtctaccctccac

SEQ ID NO: 140927 - DNA, 235 bp, Glycine max; identical to SEQ ID NO: 120703

SEQ ID NO: 140928 - DNA, 236 bp, Glycine max
gtacttccttacaatcaaaaccaacaacaactaaggcaagttatcaaaagcactacgatgatcagggtcgcaaggttgacgagtatggcaacgttgagaagcaaaccgacgaatacggcaaccctgttcatgctgctagtgtcacctatgtagccaccagaactgctgctggtggttacagtgatgacattaataagcaacatgataccaccaatgcctacggcgtagacactggt

SEQ ID NO: 140929 - DNA, 234 bp, Glycine max
gctgagtggttatggtgaactgcatatagggtatccaaacggaagcagagcaatgaaaactaaaatcaaacaaggggacgtgtttgttgtgccaagatacttccccttctgtcaagtagcatcaagggatggacccttagagttctttggcttctccacttctgcaaggaagaacaagccacagtttctggctggtgctgcgtcccttctaaggaccttgatggggccggagct

SEQ ID NO: 140930 - DNA, 247 bp, Glycine max
ggtattcggctcgagcagtcttcagcctcctattgcctttattaaaactgatgttagaggcctttttggttctgtgttctgtgattttgggcctgagtttactgttgttgatgtggatggtgaagaaccccatactggcattattgcatccataagcaatgacaaccctgctctagtatcctgtgttgatgatgagtggcttgagttcaggatggagatcttgttgtattctctgaagttcatggta

SEQ ID NO: 140931 - DNA, 237 bp, Glycine max
ggaggttcgtaggcagttcaacaccattccaggactgatggagggtcatgccaagcctgattatgccacctgcgtcaaaatttctactgatgcatccatcaaggagatgattcctccgggtgcccttgtcatgctcacaccactcattgttggaatcttcttcggggtggaaacactttcaggtgttcttgccggggctctagtttctggtgtacagattgcaatatcagcatccaa

SEQ ID NO: 140932 - DNA, 239 bp, Glycine max
gaaataattgatctttgaaaatgcagggaggaaagaaagctggagagtccatcaaggaaacagctgcaaacattggtgcttctgccaaggctggcatggagaaaaccaaggccactgtccaggagaaggcagaaagaatgacggcacgtgatccgatgcaaaaggagttggcaacccagaagaaagaggcaaagatgagccaggcagagctggacaagcaggcggcgcgtcagcataac

SEQ ID NO: 140933 - DNA, 238 bp, Glycine max
cttccaacaagagattgccttttcaagaaccctctctttgaccaaaaaaccgttctcaaaatttggaacttcaacaagtatggaggagttattggtgctttcaacatgtcaaggggctggttgggaccctaagatgaataagatcaagggtttctctgaatgctacaggccaatttcttgtactgtgcatgtaactgaggttgaatgggaccaaaagaaagaagcagttcacatgggt

SEQ ID NO: 140934 - DNA, 233 bp, Glycine max
ctcgcctcaaggagtcaaagcccgttgttgactttggagctgtaaatgtcatgatgaagagcaacagggtttgcaactgaatgaggctctcacctcgccacgtaatcttttaagcaattaaagaaggaataggataatgattagtgaaaaaagaaaaggctaagcgataattatgtttgggtaaaagaccaaatgcactagcctatgctttctacacatgttgaggttgtgta

SEQ ID NO: 140935 - DNA, 235 bp, Glycine max
  unsure (1)..(235): unsure at all n locations
agaaaacctaagcttagaattagaaacaaagaaaagaagaaaggaaagaattgatcgttgaaaatgcagggaggaaagaagcgggagagtccattaaggaaacagctacaaacattggtgcttctgccaaggcatgcantgagaagaccaaggccacntntcaagagaaggcagaaagaattacagcacgntantcggntcaaaaggagnttgcaacccaaaagaaagaggcaaa

SEQ ID NO: 140936 - DNA, 235 bp, Glycine max
gtaaagggtgtcgtgggtttggccaaaggactgagaaaggccaaaagcatgtaccctttggtggttgctgtgttaccagatgttcctgaagaacatcgtgagattctcaaatcccaaggttgcattgtcagggagattgaacctgtgtaccctcctgagaaccagacccagttcgccatggcctattatgtcatcaattactccaagctacgtatttgggagttcgtggagtaca

SEQ ID NO: 140937 - DNA, 232 bp, Glycine max
acttgctctatactagacagtacacacactagaagaataatggcttctatcctcgattactttttagttctctcgctttcttgctctcgtcttttcttcttatccgactgagtgaaccctataaaactaataaaccttgttgttctacccgttcaaaatgatggttgcacagggcaccattgggtcagccttcagaaaagaactcgtctaatgaaagtacgagtcctggtgg

SEQ ID NO: 140938 - DNA, 233 bp, Glycine max
tacatatatacgagagagtgagtaatcgagaaagagaagaagcatatatatcaaaatggctgcagagatggagagggagtcattgataactgaagctcctaatgcaccagttactgcacagagaagggtcagaaatgacttagaaaattctctaccaaaaccatacttgccaagagcattgaaagctcctgatacgggtcacccaaatggaacagcaggccacaggcaccaca

SEQ ID NO: 140939 - DNA, 235 bp, Glycine max
catggagctcctcgggtacctgaatcagggtcacccttctagaggaacaacacttgttattactctttcattggtgctttcgacacttgtgtccttctccactttcacacatgccttctctcacttctgcgtttccggaactgaatcctataaaacctaggcactcacgtcttctcaggagtgccgtgcaacatgaaactcctacatcacagctttctgaaatatggtcacctct

SEQ ID NO: 140940 - DNA, 232 bp, Glycine max
ggaaataattgatctttgaaaatgcagggaggaaagaaagctggagagtccatcaaggaaacagctgcaaacattggtgcttctgccaaggctggcatggagaaaaccaaggccactgtccaggagaaggcagaaagaatgacggcacgtgatccgatgcaaaaggagttggcaacccagaagaaagaggcaaagatgagccaggcagagctggacaagcaggcggcgcgtc

SEQ ID NO: 140941 - DNA, 231 bp, Glycine max
cacagttggtattcctgagaatacaggtatagcattggcctgtgctatgaatagttcttttagggggcgtgccagttctgatatttacaccatctgctctcaagactgtgaattatggaatcctgcttgcacaaaagcaatgactatgtcatttaatccaaacccgtgttctgatgcatggagtttggaatttctgaagcgtaccggatttcattgtgatatcatttgtgt

SEQ ID NO: 140942 - DNA, 231 bp, Glycine max
agtcaccgaacttagtcaatgagctagaatgggttataaagatatctatagatatatatagatatatttatctatagatatctttagaaaaaaaaaaagaaaataaacaaataagacgtatcattttatgtatagtagtggggaattatgggacaaaaaataaatccgcttggtttcagacttggtagaactcaaagtcatgattctatttggtttgctcaaccaacaaat

SEQ ID NO: 140943 - DNA, 232 bp, Glycine max
tggattctcaacaaaagaagctcaaccttccaatccttccaaccaccactattggatccttccctcagactgtagaactgaggagggtacgccgtgaattcaaggctaacaagatctccgaggaagagtatgtaaagtcaattaaggaggaaattcgcaaagttgttgagcttcaagaagagcttgatattgatgttcttgttcatggagaaccagagagaaatgatatggt

SEQ ID NO: 140944 - DNA, 232 bp, Glycine max
cctcaatggaaatcacttgtgggttaactgtgagcagcagtactcatccaaaacgtaccaagcacccttctgccactccacccaatgctctagaaccaacacccaccaatgcctcagttgccccgcggcatcaaggccagggtgccacaaaaacacgtgtggcctcatgtccactaatcccatcacccaacaaaccggtttaggtgaactaggagaagacgttcttgcaatc

SEQ ID NO: 140945 - DNA, 201 bp, Glycine max
  unsure (1)..(201): unsure at all n locations
cacctttgttcactcttcttctcttgcggctagggttttagcgcattcttctagatttaaggaagatgggtaaggaaaaggttcacatcagtattgtggtcattggccatgtcgactctgggaaatccactaccactggtcaccatgattacaagnctggaggcacttacaagcgntnttattagaggctttagaaggaag

SEQ ID NO: 140946 - DNA, 262 bp, Glycine max
ggcatgtgggctcccgattcgagccgtattgaaacacggaccaagggagtctgcacatcgtgtgcagagtcaacggggcgcactagaccccgtaagggggcaggaagctggttggtaggattcccctgtggggtgcaccgccgaccgaacctgatcttctgtgaagggttcgagtgagagcatacctgtcgggacccgaaagatggtgaactatgcctgagcgagggcgaacaagagggaactctggtggaggccgcagcga

SEQ ID NO: 140947 - DNA, 242 bp, Glycine max
agagaatgcatggcaatatttgagaatttcattgagctgtgcttctaggaatgacatgttggaagcttgtgatagtcgtaatttggaccttctccagaaggagtttccactacagtaagggtgcgtttgagtgaacagcttaatcaagcgcttagtgaataagtacttatcatataagcactattgtataagattttttttttctaataattgaagaggatatagggctaacttcttttcat

SEQ ID NO: 140948 - DNA, 259 bp, Glycine max
attatggggaaaaggtcctaattcagtttgaagactttgcaaaacacaatgctttcaatctgcttgagaaatatagatctacacatctggtctttaatgatgatattcagggaacagcatccgtggttcttgctggactagttgcatctctgaagttggttgggggtaacttacacgatcacagattcttattccttggtgctggagaggctggcaacggcatagcagaactcatagcacttgaaacatcaaaacagac

SEQ ID NO: 140949 - DNA, 260 bp, Glycine max
atttgactgctcgcacgccagctccaagcacaagaagaaacgcaaacaattccagacggcgccccgcgcaccccccagatggactgcgaagggtgtgaaagaaaggtgaagaaatcggtggaaggggtgacagaagtggaggtggatcgacagggtagcaaggtgagtgcttcggggtacgtggaaccctcaaaggtggtttcacgcatcgctcaccgcaccggccttacgtgaaatcgttatgtgaatctgatgtgaac

SEQ ID NO: 140950 - DNA, 257 bp, Glycine max
atgtgtgtgacatttgtggagatcctttacaactcttgcttcaggtttatgcaccaactgacaaggaaaccacatttcaccgaatgttgtttgtttttatgtgtccctccatgaaatgtcttcttagggatcagcatgagcaatggaaacgccatccagagaagccatctagaagtgtgaaggttttccgttgtcaactaccccgcattaatccattttactcacctgaatgccctcagtataatgagagccacgaa

SEQ ID NO: 140951 - DNA, 255 bp, Glycine max
cgtgagatagttgttgctacacctggcagattgatagacatgctgaacgatgctcgcactgacgcctctacgagcaacttacctggtgcttgatgaggctgatcggatgtttgatcttgggtttgagccgcaagtaaggtccattgttgggcagattacgccggaccgccaaaccttactcttttctgcaactatgccttgtaaagttgaaaagttggccagggaaatcctttctgatcctactagagttactgt

SEQ ID NO: 140952 - DNA, 245 bp, Glycine max
gtcgtgtcggttgcggaggatgaactcatgagcacactcattctaatgaggaatttattgcctgggtaccatcaggctgttaagggtgaatggaatgttgctggcattgcacatagagcttatgatcttaaaggcaagacagtaggaaccgttggcgcgggacgaattgggaagcttttactccagaggttgaaaccttttaactgtaatgttctgtattttgatcgacttaggatcgatcctga

SEQ ID NO: 140953 - DNA, 258 bp, Glycine max
attgaaacagaaaatttgaagagtttgtttattgtgaaaaaaagaaaaatgcaggcagcaaagaaagccacagagacctttaaggaaaccgcagccaacattggcgcctctgccaagtctggcttggagaaaaccaaggccactatccaagagaagaatgagaagatgaatgcagaagatcaaactcaaatggatatggctaccaagaggaaagaagagaagatcaaccaggctgagatggagaagcagcaggcccgt

SEQ ID NO: 140954 - DNA, 228 bp, Glycine max
caaccaacgtggctgctgatttgagggacaacgccaccgcggctggggtgcaccgcccccatttttcggcggaaaagacggtggaacggaccaaggccgcagcccatgttgtcgagggaccggccgggcacgccggacacaaggacgcggacttgcttcgatgtcggccggtgctgttaaagggctggctgcttctgctggtgagactgctaaggaatacaccgcaaa

SEQ ID NO: 140955 - DNA, 256 bp, Glycine max
gccggtgctcttggtggatttaatgcccatgctagtaacattgtttctgcaatctttacagccactggccaagatccagctcaaaatgttgagagttcccattgcataaccatgatggaagccgtcaatgacgggagggaccttcacatctcagtgaccatgccttccattgaggtgggtactgttgggggtgggactcaacttgcatcccaatctgcttgcttgaatttacttggtgtgaagggtgcaagcaagg

SEQ ID NO: 140956 - DNA, 257 bp, Glycine max
acgagtgcaagtaccgcatcaagaagctcatgaacgaccacggctgcagcgccttcgacgtcatcttgcacgacggttcccccaacgtcggtggcacctgggcccaggaagctatgagccagaacgccctcgttattgatgctgtcaagttggccactcagttcttagcccccaagggcaagtttgtatccacaattttcaggtcgcaagattacagttctgtggtgtactgtttgaagcagttgtttgagaaggtt

SEQ ID NO: 140957 - DNA, 253 bp, Glycine max
cagcaaccggcatggaacattatgacactgccttggcatatccagtgcagtcaccaggcgtgctaggaaaccaaccagacattgtcatggacagcttggctgtacatggccttggcctagtgcacccacagaaggttttcaatttctacaacgagctccatgattacttagcttattgtggagtagatggagtgaaggttgatgtgcagaacattattgagacccttggtgcgggacatggaggccgagtgtc

SEQ ID NO: 140958 - DNA, 256 bp, Glycine max
acagaacagttctagatcgcacgcactctagaactagctcgctctatttatcagtctctgtgcttgcagctgaggattccgaacgagtgaccttctacgtttctcgcaaagtttaagtaatcatgggtaaggaaaaggttcacatcaacattgtcgtcattggacatgtcgactctgggaagtcaactaccactggtcacttgatctacaagcttggaggtattgacaagcgtgtgattgagaggttcgagaagga

SEQ ID NO: 140959 - DNA, 260 bp, Glycine max
acaactactacaagtacttccttacaaccacaaccaacaacaactatggcaagttatcaaaagcactacgacgatcagggtcgccaacgttgacgagtatggcaacgttgagaagcaaaccgacgaatacggcaaccctgttcatgctgctagtgtcacctatgtagccaccagaactgctgctggtggttacagtgatgacatcaataagcaacatgataccaccaatgcctacggcgtagacactggtagacagcatt

SEQ ID NO: 140960 - DNA, 255 bp, Glycine max
gacaccaaagttagggtccctctggatttgtttggaggttcaggaaactatgcctgtgctttgtatattgcatctgcgaaagccaatgcagtggaaaaggttgagactgagcttctgcaatttgttgaggcagtaaactactagtcccatattttcacagtttataagggacttgtctgtggctaaggatgttagagtgaaagttatccaggacatttgtggggaagccaagttttcggatgttacaagaacttc

SEQ ID NO: 140961 - DNA, 255 bp, Glycine max
cacaactactacaagtacttccttacaatcaaaaccaacaacaactatggcaagttatcaaaagcactacgatgatcagggtcgcaaggttgacgagtatggcaacgttgagaagcaaaccgacgaatacggcaaccctgttcatgctgctagtgtcacctatgtagccaccagaactgctgctggtggttacagtgatgacattaataagcaacatgataccaccaatgcctacggcgtagacactggtagaca

SEQ ID NO: 140962 - DNA, 248 bp, Glycine max
atcggggaccgacaaaatggaaaaacagctattgctatcgataccatattaaaccacaagcagatgaactcaagggccacctcagagagtgagacattgtattgtgtctatgtagcgataggacagaaacgctcaactgtggcacaattagttcaaattctttcagaagcgaatgctttagaatattccattcttgtagcagccaccgcttcggatcctgcacctctgcaatatatggccccatattc

SEQ ID NO: 140963 - DNA, 253 bp, Glycine max
gcacgacgtgagaaagattgtgaagtagaaatcggtgcaagaaattctccactttatcctaaaaaaactcggtgagtttgtgaagacaacaaatcactagctactcaaaaatggccacagtaggaaggaacgttgcagctcctttgctgtttcttaacttgatcatgtattttattgttcttggctttgctagttggtgcctcaacaggttcatcaatggccacacttaccaccctagttttggtggaaatgg

SEQ ID NO: 140964 - DNA, 252 bp, Glycine max
tttcgttcgcatcttctctatatctcagaaagatgaaggtggtccgcagcgtatttgctcgcagtcctcggtggcaacaacagcccctccgccgatgtcatcaaggaaatccttggctccgttggagtagaagcagatgaagataggattgaatcgtttttgtctgaagttaagggtaaggacatagttgagcttattgctgccggtagggaaaagttggcctcggttccttctggtggtggtggtgccgtt

SEQ ID NO: 140965 - DNA, 252 bp, Glycine max
gaagctgatcaggcaattagagcattgcacaatcagcatactcttcctggaggtgttggtccaatccaagtgcgatatgctgatggtgaacgggaacgcctcggtgctgttgagtacaaattatttgtgggctctctgaacaaacaggctaccgtaaaggaagttgaggaaattttctcaaaatatggccgggttgaagatgtttatcttatgcgtgatgagaagaaacaaagtcgtgcaattaatgcgctt

SEQ ID NO: 140966 - DNA, 256 bp, Glycine max
tttcagtgagtgatcggtgttcacttgatctcatcataatcgtcagcgccaattgaagaagatgccgatcagaaacatcgcagtcggaaggcctgaagaggcgactcaccccgacacgttgaaggcggctttggctgagttcatctcaaccttcatcttcgtgttcgccggctcaggctccggcatcgcctacaacaagctcaccgacaacggcgctgccacccctgcaggcatcatctccgcatccatcgcccat

SEQ ID NO: 140967 - DNA, 249 bp, Glycine max
caaacgttggtctgtactacacagtacatgcactagccgcccaatgcgttccatggtcgactactttttagacctctgtgtttcttgctcttttgttttcttgttatccgactcagtcacccctacaaaaccagtcaaccttgttgttgtacccgttcaaaatgatggttccacagggctcccccctccccccctccacaaaagaacccctctagtgcaagtaccagtcctggtggacctcagtggaga

SEQ ID NO: 140968 - DNA, 251 bp, Glycine max
aagaaaacctaagcttagaactagaaacaaagaaaagaagaaaggaaagaactgatcgctgaaaatgcagggaggaaagaaagcgggagagtccattaaggaaacagctacaaacattggtgcttctgccaaggctggcatggagaagaccaaggccactgtccaagagaaggcagaaagaatgacagcacgtgatccggtgcaaaaggagttggcaacccaaaagaaagaggcaaagatgaaccaggcgg

SEQ ID NO: 140969 - DNA, 250 bp, Glycine max
gaacagtcaactcagaactggtacggacaaggggaatccgactgtttaattacaacaaagcattgcgatggtccctgcggatgttgacgcaatgtgatttctgcccagtgctctgaatgtcaaagtgaagaaattcaaccaagcgcgggtaaacggcgggagtaactatgactctcttaaggtagccaaatgcctcgtcatctaattagtgacgcgcatgaatggattaacgagattcccactgtccctg

SEQ ID NO: 140970 - DNA, 247 bp, Glycine max
agaaaacctaagcttagaattagaaacaaagaccagacaccacgacagaattgatcgttgaaaatgcagggaggaaagaaagcgggagagtccattaaggaaacagctacaaacattggtgcttctgccaaggctggcatggagaagaccaaggccactgtccaagagaaggcagaaagaatgacagcacgtgatccggtgcaaaaggagttggcaacccaaaagatagaggcatagatgaaccagg

SEQ ID NO: 140971 - DNA, 248 bp, Glycine max
gagaatacacgaacacaagaactaagatggattggatcggagcgtaccgcggaggccagagaagcagggactggtgcgacccttcatcaccattcactgatttgtgggaccctcgtcgtgtcggtgacgctgatgatatcacctcctctctcgcccatgctcacgttgactggcgtgagactgataaagctcatatcttccgtgctgatcttccaggggtgaagaaagaggatctgaacgtgcaggtg

SEQ ID NO: 140972 - DNA, 251 bp, Glycine max
cgtggcaccatttgggttatgcttcaactccaacaagatcaatgcatatcctagcgtggaccttgtgatggacaagcccaatggtcctgtttggagaatctctggtgaggacttgatggtgcaggcacaacctggggtcacgtgtttgggtgttatgaatggaggaatgcaacctagagctgaaattaccttaggggcacgtcagctggaagagaacctggtggtgttcgatcttgcaaggtcaagggttg

SEQ ID NO: 140973 - DNA, 242 bp, Glycine max
gtttctataagttgaacgtcgatcgcacaccagagagaaaataaagaataatgccacattgttactgcgcaaaggagagaaaaccatgtgtgagatgggtcgagaaatatttcaaagattgcatttgcaatttgaaagatgaaatgtcgttcagcttcggcctcacaagtctaaagctctggggtgtggctgaaattcctcaaataatcaccatttttcgtaccaagaaaagccatggagtt

SEQ ID NO: 140974 - DNA, 249 bp, Glycine max
tttgatgggtggagctgagattatcaaatctgacactgttgtgtcattcagggagactgttttggagagatcatgccgcaccgtgatgagcaaatcacccaacaagcacaaccgtctgtacatggaagcaagaccattggaggaaggtcttgctgaggccattgatgatggcaagattggaccaagggatgaccccaaggttcgttcaaagatcttgtctgaagagttcggttgggacaaggatcttgc

SEQ ID NO: 140975 - DNA, 250 bp, Glycine max
gtgcacaagagcgtcgcagtcgcaaccctaatcagaagaagcgcagttcaagcgagtgacagccaccagccatgggtcgtatgcacagccgcggtaagggtatatcctcttctgctttgccctacaaaaggacacctcctagctggctcaagatctcttcgcaagatgtcgaagaaaatatctgcaagtttgcgaagaaaggtttgaccccgtctcagattggtgtcattctcagagattctcacggtat

SEQ ID NO: 140976 - DNA, 246 bp, Glycine max
acatgtggtagtggacgtagtggtttacccaccactgcttggactagttctgcagttaacaatcgctcctcagatatcaacaaaaggattcgcacagcaattgggaaaggtaagaaaattgtttttcttactagagttgatccttttccagtagctttactggctgttctttttggcgttaagaacgaaattatgagttctaacgccactaaccctatgctgacgcgacttcttgagaactgtaag

SEQ ID NO: 140977 - DNA, 246 bp, Glycine max
aaagcactgcgatggtccctgcggatgttgacgcaatgtgatttctgcccagtgctctgaatgtcaaagtgaagaaattcaaccaagcgcgggtaaacggcgggagtaactatgactctcttaaggtagccaaatgcctcgtcatctaattagtgacgcgcatgaatggattaacgagattcccactgtccctgtctactatccagcgaaaccacagccaagggaacgggcttggcggaatcagcg

SEQ ID NO: 140978 - DNA, 247 bp, Glycine max
cagtcatcagcctcctattgcatttactaaaactgcagttagaggcctttttggttctgtgttctgtgattttgggcctgagtttactgttgttgatgtggatggtgaagaaccccatactggcattattgcatccataagcaatgacaaccctgctctagtatcctgtgttgatgatgagaggcttgagtttcaggatggagatcttgttgtattctctgaagttcatggtatgaaagaattgaat

SEQ ID NO: 140979 - DNA, 248 bp, Glycine max
  unsure (1)..(248): unsure at all n locations
ggcattgatgtatttgatccaaaattcaacattgtntccnntggagctgatcaaaccatttacttcccccccaccgaaactagccgtaggttgacctccttccaccccgaaatcgaanaacttntttacagctctgtggagaatgaagaacacatatgcgtgctgaaggaccgcagcaagccgattatcttcaccatggcaaggttggaccgtgtgaagaacatcacaggactcgtggagtggtacgg

SEQ ID NO: 140980 - DNA, 251 bp, Glycine max
agagcttgcacctattggtatgttctacaatatcctaaagtgctcctattgttcttcatcaccatgtctttactttcagacctacatcaacctcaatctctcagaatccacagaaaagatcattgctgagtacatatgggttggtggatctggtatggacctcagaagcaaagccaggactcttcctgggccagtgagtgaccctgcaaaacttccgaagtggaactatgatgggtctagcacagatcaag

SEQ ID NO: 140981 - DNA, 246 bp, Glycine max
gttgcagaccgagctagctagctagcaagcaaccacagagatggaggcacagcgaggccatgccctcatgtgcttggcacgtgtttcactcttcctctgcgctctaaccctatccgctgctcacggaagcaccacggttcaagacatcgcgagaaagttgaaactcggggacaacgagcttctgcgcacggagaagaagttcaaggttttcatggagaattacgggaggagctactccacagagga

SEQ ID NO: 140982 - DNA, 245 bp, Glycine max
attcatgttgtgttctgatccaggtatggcttgtaaacgcatcttgaaggagctcaaggatttgcagaaggatcctcctacctcatgcagtgcaggccctgtggctgaggacatgtttcactggcaagccacaatcatgggacctgctgatagcccatatgcaggtggtgttttcccagtttcaattcattttcctcctgactatcccttcaagccaccaaaggttgcttttcggactaaggtgt

SEQ ID NO: 140983 - DNA, 243 bp, Glycine max
atcatccaccatcgtagggtcgacctctggaggaaccatgattagcacctgaactgctcacatggttctccagcaatccgtgtaccaggctttcactcaggtgtttgctcagcagaaaccaaagcaagcacaggtgaaatctgtggcaccatttgggttatgcttcaactccaacaagatcaatgcatatcctagcgtggaccttgtgatggacaagcccaatggtcctgtttggagatctct

SEQ ID NO: 140984 - DNA, 244 bp, Glycine max
cgagaagccaggatcaaagcttcacaagaaggaaacttgtgagcctgttacaattattgagacccctccaatggttattgttggtgttgtgggttatgtgaaaactccacgtggtctccgaacattgaacactgtctgggctcagcacttgagtgaggaattgaaacgtaggttctacaagaactggtgcaagtccaagaagaaggccttcaccaagtactctaagcagtatgaaactgaggag

SEQ ID NO: 140985 - DNA, 265 bp, Glycine max
cgcctcagcagcagcccgccagcgccgacgaggtccgaaccctctggatcggggatctgcagtactggatggacgagaactatctctatacctgctttgctcacaccggcgaggttacatcggttaaagtaattcgaaacaagcaaactagtcaatctgaaggttatgggtttattgagtttaatagtcgtgctggagctgagagaactcttcaaacatacaatggggcaataatgccaaatggggggcagagtttcaggttgaa

SEQ ID NO: 140986 - DNA, 261 bp, Glycine max
cggatttagacagggcaaggaaaggaaagcccacttcgaagagttcagatggaaagagaaaaaagaacttgagtcccgaaatgctagagaaaaagatatctcaaaccaatgcaaaaattgagaaaatgcaacgtgatatgaagacaaaagaagatctgaaaactgtggcattaggcacatccaagataaactaccttgaccctaggattacagttgcctggtgcaaaaggcatgaggttcctattgaaaagactttcaaca

SEQ ID NO: 140987 - DNA, 265 bp, Glycine max
  unsure (1)..(265): unsure at all n locations
tggcaactgggaagacattgcttgccgaaggctgtggcaaactccaacatcagcaacattnttgccgtgttgttggtagtgaactgatacaaaagtacttgggagatggcccaaaacttgnaagagaacttttcagagttgctgatgatctttntccttctattgnattcattgatgaaattgatgcagttggtacaaaaaggtatgatgctcactcaggaggagaacgtgaaattcaaaggaccatgctanagttgctgaacca

SEQ ID NO: 140988 - DNA, 286 bp, Glycine max
  unsure (1)..(286): unsure at all n locations
acttgcattgtattctagttatgttagttcaatgctcaacaacactctgatctactatgcgtcttcactattttgcaaccacacccttcacagacatcaaccntatccccacccctctcatataaatattatggcttcgagggtggtttcggttttggtgatagcgatgatgttgtttgccatgaactgtaatcggcactagtgttcggccacatgccttcaaccaaagaggaaggtcacgattttcaggaggctaaagccaagacacaccaaactgcgaacaagg

SEQ ID NO: 140989 - DNA, 263 bp, Glycine max
gtttattgggagagaaaaatgctcgtattgtttgaaacacccgcgggttttgccctgtttaaagtgctggatgaaggcaagctttctaaagttgaggacttgtggaagaacttttccagtgcagatactgctagacaggtggtcaagttgaaagcattttctaaatttgagaacacttcagaagctctagaggcagctactttacttattgatggaaaagctagcaagggtctccgcaagttcctgcgtgttcattgtgaaaa

SEQ ID NO: 140990 - DNA, 266 bp, Glycine max
gtgacctggaatattacctgcacttattctcaattcctggctcaaaaggcaccaagttgctgtgtttccctctcatccttccataatgacacagtagtaaactgcccaacctgcacctgtggttgccgaaacaaaacagaacctggcagctgtgtagatccaaattcgccacatttagcttcagttgtatcagcatcaggcaaaacggcaaacacgccactagtccagtgtaccagccatatgtgtcctattcgagtgcattggca

SEQ ID NO: 140991 - DNA, 260 bp, Glycine max
cacccaccgatcgtatttagcatgagattaaagagaagataggcaatctgtcttttcaaaactatcgtcctacaaaaaaaaatattcttgtggtaggccctgttcctggtcaaaaatacaaagaaataacctttcctattctttccccggatcccactactaagagagatgttcatttcttaaaatatcctatatacgtaggtgggaacaggggaaggggtcagatttatcttgacgggagcaagagcaataataatgtg

SEQ ID NO: 140992 - DNA, 102 bp, Glycine max
aactgaacaggcgggtacaaaaggagttcaagtacaaattgcaggacgtatcgacggcaaagaaatcacgtgttgaatggatcagagaaggtagagttcctc

SEQ ID NO: 140993 - DNA, 259 bp, Glycine max
ttccgttttgcgtttatccacctacaaggactccaacatgggtcaagcaccaggttgctatcacgttgatcagtcaaatgtggctatcaaggagcattttggacaatttgatgatgtcctagaacactggatgtcattgcctgcattggtgtcttgggtaccagattgctggtagtttgtcactgcgtgtgcagcaacttcatgttcgatgtgagacgaaaaccaaggacaatgtctttgtcactgtggttgcatctgt

SEQ ID NO: 140994 - DNA, 265 bp, Glycine max
cgaaagatggagaagcaacaacaacaagcaccatctaaggaaacaaaggcacagagtgatgaatcagttaaagaaagcagcactgaagggcttccaatggaggatagtccctatgtgaaatacaaggacttggaggattataagcgtcagggttatggtacacaaggtcatcaagaaccaaagacaggtcgtggagctggagccactgaagcacccactctctctggtgctgcagtttcatctgatgcacaagtcgctgccactg

SEQ ID NO: 140995 - DNA, 263 bp, Glycine max
gaaaagatgacccaaatcatgtttgagaccttcaatgtgcctgcaatgtatgtggccatccaggctgttctgtccttgtatgcaagtggtcgcacaactggtattgtattggactctggtgatggtgtgagtcacactgtaccaatctatgaggggtatgcactcccccatgccatccttcgtttggatctcgctggtcgtgatctaactgatcatttgatgaagatcctcactgagagaggatacatgttcaccacctctgc

SEQ ID NO: 140996 - DNA, 267 bp, Glycine max
cgcatactatcaggaacttccatggctactccacacatttcacggcctatactgcagtgtcaaaagaaaaaaccccacttggagtgcctcagcaatcaaatctgccatcatgacttcaacaattcaaaatgacaatttgaagggtcccataacaacggattcagggttgatagccacaccttatgactatggagcaggggcaattacaacatctgaaccattgcaaccggggctagtttatgaaaccaacaacgttgactacttgaa

SEQ ID NO: 140997 - DNA, 266 bp, Glycine max
gaaaagggaaatgaacagcccaaacgtgatgcctgcagaccttgttttcatcattgacgaaaaaccgcatggcgtcttcactcgtgacggaaatgaccttgttgtcacccagaagatttctcttgcagaggcactaactggttatacagtgcacctaactacccctagatggtagaaccttaccaatccaatccaccatggtaatcatcccaactatggagaagttctcccaagagaagggatgccacttccaaaagatccatcaa

SEQ ID NO: 140998 - DNA, 259 bp, Glycine max
gaaaagtgttcctacattggttagcattgaatgtctcaaggatgagaaacttcctcgtcgcaaaatttttgacaaacctaagacgcgctgcttcactattctccctatggagtttaatcttgtggttcgtcagaagttttcaaattttgtgaggttcattatgaagaaaagggacaagcttagttgtcaagttggaatcaacccatactccatggaatggactagtttggccaatagattactgagtaagggcaacgat

SEQ ID NO: 140999 - DNA, 260 bp, Glycine max
gtgccggcgacgcatcattcaaatttgtgcactatcaactttcgatggtaggatagtggcctaccatggtggtgacgggtgacggagaattagggttcgattccggagagggagcctgagaaacggctaccacatccaaggaaggcagcaggcgcgcaaattacccaatcctgacacggggaggtagtgacaataaataacaataccgggctcattgagtctggtaattggaatgagtacaatctaaatcccttaacgag

SEQ ID NO: 141000 - DNA, 258 bp, Glycine max
ctgccatgatgcaaagcgcggaagctcgagtactcggaaaaacccaacccggcggagttcttccgtcatgcaatccgccgaccacaaggaatgaacaggctggtcttgtcggtcaccaggacgtcaccgacatcaccggcgaccatggcgtcacagtcacagaaactacattccatggaagacgcataataaccgaggctgttggtggccaggtagtggaacagtatgtggagccaaatccagttgaggctggacgaa

SEQ ID NO: 141001 - DNA, 254 bp, Glycine max
aaaaagtgttccagttgagtgagcagcagtgtgttaagaactaaacaatttttgaatggcgtccaagaaacccacccccacccctgaggcagctgcgaaagttgctgcgaaagaagtcgaacaagtgaacagagaaagaagccaccgtgatttcggtgttgttgctgaacaacaacaacaacatgatcaggaagatcaacaaaaacgtggtgtaatcgggtccatgtttaaggtggtgcaagagacgtacgaga

SEQ ID NO: 141002 - DNA, 257 bp, Glycine max
cacaactactacaagtacttccttacaatcaaaaccaacaacaactatggcaagttatcaaaagcactacgatgatcagggtcgcaaggttgacgactatggcaacgttgagaagcaaaccgacgaatacggcaaccctgttcatgctgctagtgtcacctatgtagccaccagaactgctgctggtggttacagtgatgacattaataagcaacatgataccaccaatgcctacggcgtagacactggtagacagc

SEQ ID NO: 141003 - DNA, 262 bp, Glycine max
tgaaacaacaaagtattattgcacagttattgatgcgcctggacatagggatttcattaagaatatgattactgggacatcccaagctgactgtgctgttcttatcattgattcgaccactggtggttttgaagctggtatttccaaggatggacagactcgtgaacatgctctgctttcattcacccttggtgtgaaacagatgatttgctgctgtaacaaaatggatgctactacacccaagtactccaaggccaggtat

SEQ ID NO: 141004 - DNA, 258 bp, Glycine max
  unsure (1)..(258): unsure at all n locations
tgttgcaaaacttagggttgagcntttttttgaggttttcagcgcttctttctgcacaatggttcttcagaatgatattgatttgctgaatcctccagctgagttggagaagagaaaacacaaactcaagcgtcttgttcagtcaccaaactctttcttcatggatgttaagtgccagggatgcttcaacataacaactgtgtttagccactctcaaactgttgtggtgtgcggaaatgccagactgttttgtgccaa

SEQ ID NO: 141005 - DNA, 252 bp, Glycine max
gggtttagcgcagttgttctacatttaaggaagatgggtaaggaaaaggttcacatcagtattgtggtcattggccatgtcgactctgggaaatccactaccactggtcacatgatttacaagcttggaggcattgacaagcgtgttattgagaggtttgagaaggaagctgctgagatgaacaagaggtctttcaagtatgccttggtgctggacaaacttaaggctgagcgtgaaagaggaatcaccatt

SEQ ID NO: 141006 - DNA, 262 bp, Glycine max
aatgcgaagagggcatcacttgttcaatctacaatcaaggctttggatcgaatgggccatgtggatgaaattgctaatgatcctgactacaaattcgacttccccactccagatgatagacctggtgcaccaacaataagcttcagcgatgcatcatttggttatcctgggggccccattctgtctaagaacttgaactttgggattgatctcggacagtcgtattgcaatggttggaccaaatggtattggcaaatcaact

SEQ ID NO: 141007 - DNA, 253 bp, Glycine max
gcgagtctaccgggcgagtaaacccgtaaggcgcaagcaagctgattggtgggatccccctgtgggctgcaccgccgaccgaccctgatcttctgtgaagggttcgagtgagagcatacctgtcgggacccgaaagatggtgaactatgcctgagcggggcgaagcacaggaaactctggtggaggcccgcagcgacactgacgtgcaaatcgttcgtctgacttgggcatacgggcgaaagactaatcgaac

SEQ ID NO: 141008 - DNA, 255 bp, Glycine max
gaaagaatgacggcacgtgatccgatgcaaaaggagttggcaacccagaagaaagaggcaaagatgagccaggcagagctggacaagcaggcggcgcgtcagcataccaccacggcgagcaggctgccacggcagggcacatgggacaacccatggggacccatcagacgtcagctatgcccggtcatggaaccggacagcccacgggccatgtcaccgagggagtggtgggctcacaccctattggaaccaaca

SEQ ID NO: 141009 - DNA, 258 bp, Glycine max
ttcatctacaatctttcaaagaagaagacacttgcaaacttcaagaatgtgattctgttatgctctcctcaggacggttatgttccatatcattctgccaaaatagaactgtgtccagcagctacattggacttttctaaacaagggaaagtgttcctggagatgttaaacaattgcttggaccaaatgagaactcactctgagcatcgtatagtcatgcgctgtgacattaacttcgaaacctcctcctacggcagg

SEQ ID NO: 141010 - DNA, 260 bp, Glycine max
caaaggagaagacgaaaaacatggcaagtgctgccaaggaacaagtcgacatctataaagccaaaatagacgagaaggcagagaaagcaacggcaagaacagaagaggagagggcgatagcccatgagcacgcaaaggcaaaggaagctggagcaaagatggagctgcatgaagctaaagcaaggcatgcagcagagaagctaagcgccaaccaatcacattatggtctccaccatggccacaacaaccctcccttagta

SEQ ID NO: 141011 - DNA, 261 bp, Glycine max
aaggacgggggtttgtgcttttttgttatatttgtacgttgttctgtgctgagtccttaatttgtggctgagaattaattattattattatcaattatgggtctctcaaatttcccaagtgcatctgaaggggtgctacctgtgcttgtgataaacacggttctctcagtggcagtgttgaagaacatgtttagatccatgctccaagtagtacttggtggcagtgctgctgctaatggttcaaacactgaacatgatgaa

SEQ ID NO: 141012 - DNA, 129 bp, Glycine max
gttgggatgaaatagactatgaatttgttggaaatgtgagtggtgatcgatacatggttcacacaaacgtttacagaaaaggcaagggggacagggaacaacaattctatctatggtttgatccaactg

SEQ ID NO: 141013 - DNA, 250 bp, Glycine max
cgcatactatcaggaacttccatggctactccacatgtctcaccgcctacccccactgtcaaaagaaaaaaccccacttggagtgcctccgcaatcaaatctgccatcatgacttcaacaattcaaaatgacaatttgaagggtcccataacaacggattcagggttgatagccacaccttatgactatggagcaggggcaattacaacatctgaaccattgcaaccggggctagtttatgaaaccaaca

SEQ ID NO: 141014 - DNA, 255 bp, Glycine max
aaaaacccaccacaatccttctcccccaccatgctgacgcagatttcctcctctttgtccttagcgggagagccatacttaccttggtgaacaacgacgacagagactcctacaaccttcaccctggcgatgcccagagaatcccagctggaaccacttactatttggttaaccctcacgaccaccagaatctcaaaataatcaaacttgccatacccgtcaacaaacctggcagatatgatgatttcttcttat

SEQ ID NO: 141015 - DNA, 254 bp, Glycine max
gaaagaacttccttataaccacaaccaacaacaactacggcaagttatcagaagcactacgatgatcagggtcgcaaggtcgacgagtatggcaatgttgagaggcaaactgacgaatatggcaacccggttcatgccactagtgtcacttatgtagccactaaaagtgttggtggctacaatgatgacactaataagcaacatgataccaccggtgtctatcctgagaaagataccggtaggcatcattttgg

SEQ ID NO: 141016 - DNA, 253 bp, Glycine max
atagaatcgcgagcagccgggtatgccggacataaggacgcggagttgcttcgatgtcggccggtgctgttaaagggctggctgcttctgctggtgagagtgctaaggaatacaccgcaaagaagaaagaggaggcacagcgggaattggaggccaaaaaaccatctcacactcaggaagctgaagagaggccatcagaacgaattggcgaaactgtgaggcagtatgcacaaaaaccaaagccaagtgaaag

SEQ ID NO: 141017 - DNA, 105 bp, Glycine max
ccaaaaccaacaacaactatggcaagttatcagaagcactacgatgatcagggtcgcaaggtcgacgagtatggcaatgttgagaggcaaactgacgaatatggc

SEQ ID NO: 141018 - DNA, 269 bp, Glycine max
gagaaaccgggtcacagcccactatttgggtatgacttttggtaccaaccacgtcacaataccatgattagcacatcatggggtgctcctagtgcttttacaaaaggttttaacttacagcatctctctgatggattatacgggaggcatctccatgtatatagctggcctgggggcgaactgagacaaacaatggaccttggtgattcagggcttatacccttagagataaggtttttgcatgatcctgctaaagatacaggttttgt

SEQ ID NO: 141019 - DNA, 269 bp, Glycine max
tgtgcaccttccttccttgttcaaaagggtcttcctagaaacactcaaggtgtggctgggttaggccatgcaccaatttctcttccaaaccaactcgcttctcactttggcctacaacgccaattcaccacttgcctttctcgctaccctacttcaaagggtgcataataatccgggatggcaccaaacaacatgcgacattttcaaaaccaagatattttccacgatttggccttcaccccattaaccatcaccctgcagggagagta

SEQ ID NO: 141020 - DNA, 258 bp, Glycine max
  unsure (1)..(258): unsure at all n locations
cttgttctttcaaagttaccagacacaagtacacaacacaacagcaacatatggcgtctgaacaattggctcgcagagagaacaccaccaccgagaaggagattcacgttgagaaacacagggttcccaagatggccacccacttcgagcaccttgcggagaagctanagaatctgacatcaccgctggtcaggatactccgcagggtagcatagaagccttgcaagctggagagagggtacaagatcatgcagggaa

SEQ ID NO: 141021 - DNA, 102 bp, Glycine max
atggtgcaaccatgtttttcttaaccttctccatactagcagctgttctgggcatcgtgtccaaacttttgggtgggaatcacatgaggacatggtggagtg

SEQ ID NO: 141022 - DNA, 266 bp, Glycine max
  unsure (1)..(266): unsure at all n locations
acaactactacaattnattccttacaatcaaaaccatcaacaactatcggcaagttatcaaaagcactacgatgatcagggtcgcaaggttgacgagtatggcaacgttgagaagcaaaccgacgaatacggcaaccctgttcatgctgctagtgtcacctatgtagccaccagaactgctgctggtggttacagtgatgacattaataagcaacatgataccaccaatgcctacggcgtagacactggtagacagcattctagtg

SEQ ID NO: 141023 - DNA, 256 bp, Glycine max
caaaatcaggaggcctccctattcctgaacctattgctgatagacttggtgtcaattatccatttcctccacatcttgagtatgcttaccctccgcctgatggaaatatattgaccaatattgtgaatgctctaattgctgttccccgcttttacactcaggttctacacttgatgaacaaaatgaacatcccagctccatttcgtatggcactgcccacacctccattacctccagaggtaccagcactgccaca

SEQ ID NO: 141024 - DNA, 100 bp, Glycine max
ggaagaacaagaaggacatcagtgggaatgctagagcgttgagaaggttgaggacagcgtgtgagagagcaaagagaacactctcttctaccgcgcagac

SEQ ID NO: 141025 - DNA, 261 bp, Glycine max
ctctttctctagtcctgttatttctcagcgcgtaaagcatggctttgttggtggagaaaaccacgagtggtcgcgagtacaaggtcaaggacctttcccaggccgacttcggccgcctcgagatcgagctggccgaggttgagatgcccggcctcatggcctgtcggaccgagttcggcccctcccagcccttcaagggggcccgcatcaccggctccctccacatgaccatccagaccgccgttctcattgagaccctca

SEQ ID NO: 141026 - DNA, 98 bp, Glycine max
gaaaggtgttgcgatcaattttgtcacaaaggatgacgagaaaatgctgtttgacatccagaagttttacaacgtgcaagttgaggagctgccttcaa

SEQ ID NO: 141027 - DNA, 184 bp, Glycine max
gaaaggtgttgcgatcaattttgtcacaaaggatgacgagaaaatgctgtttgacatccagaagttttacaacgtgcaagttgaggagctgccttcaaatgttgctgagctcctttgatcagattttgtcctccgtcgtagtagatgaaattagtttgcgtttggaaactgttatgtaatgttt

SEQ ID NO: 141028 - DNA, 100 bp, Glycine max
gacggcacgtgatccgatgcaaaaggagttggcaacccagaagaaagaggcaaagatgagccaggcagagctggacaagcaggcggcgcgtcagcataat

SEQ ID NO: 141029 - DNA, 92 bp, Glycine max
cctttattgtgtgtgaagatgctgatgtagatcaggctgttgagctagcccattttgctttattctttaatcagggacaatgttgctgtgct

SEQ ID NO: 141030 - DNA, 261 bp, Glycine max
gttagtctcaatggctttctcataactggaggacaattcctctcctacctcatcattttggccttcacaaaagcaccaggaacatggagttggatgttaggagcagcagtagtaccagccctgatacaaatcgtattaatgatgatgctgccagaatcaccgcgttggctgttccgaaagggaagagaagaagagggtaaagaaattctaaggaagatttgtccaccccaggaagttgaagcagaaattaatactttgagg

SEQ ID NO: 141031 - DNA, 252 bp, Glycine max
cgcgttacgaagccggcatcaaggcgccctcttccatttaccattccgagagaggtccgacgacctctcaggttctcgcagttgtcgccggccttccggtcggcggcatcctcctgctcctggcaggattaaccctggctggaactctcaccgggctggtggtggcaacaccgctcttcatcatcttcagcccggtgctgattccggccacggtcgcaattggcctggccgtggccgggtacctgacgtcgg

SEQ ID NO: 141032 - DNA, 255 bp, Glycine max
agctggcgtcgtcccacccggagcccgtttcgaaccgccgcgttatgaagccggcgtcaaagcgccctccatttaccattccgagagaggtccaacgacttcccaggtcctcgccgtcctcgccggcctcccagtcggtggcatcctgctctcctggccgggattgaccctggcaggaaccctcaccggactggcagttgccacgccgctcttcatcctcttcagcccggtgatggttccagccacggtcgccat

SEQ ID NO: 141033 - DNA, 257 bp, Glycine max
cgtgaacatgctctgctttcattcacccttggtgtgaaacagatgatttgctgctgtaacaaaatggatgctactacacccaagtattccaaggccaggtatgatgaaattgtgaaggaagtctcttcctacttgaagaaagtaggatacaaccctgacaagattccttttgttcctatctctggttttgagggagacaacatgattgagaggtccacaaaccttgactggtacaagggtccaactctgcttgatgc

SEQ ID NO: 141034 - DNA, 267 bp, Glycine max
tccaaagtttgtatagtgtaggatttgttggtattcgtgataaaaacacctcatcctattcattttgccatgacgggcgaactccagataaaggttttgcaagtaatgagaaattattaattcatccatgttactggcttggtttgaatctaaatcgtaatgcacttgctccagaggaagcagaggagataaatgacgaatatgatattaatattatttcagataattcagccattagaaataaaacaataggtcaaataactactc

SEQ ID NO: 141035 - DNA, 85 bp, Glycine max
atcaaaaccaacaacaactacggcgagttatcaaaagcactacgatgatcagggtcgcaaggttgacgagtatggcaacgttgag

SEQ ID NO: 141036 - DNA, 252 bp, Glycine max
gccatggcgatgagaaccaaactttctttagctatctttttgctatatcttttagccttattttcaaacctagcctttggcaaatgtaaagaaaccgaggtagaagaagaagaccctgagctcgtaacttgcaaacaccaatgccaacagcaacagcaatacactgagggtgacaagcgggtatgcttgcaaagttgtgacaggtatcatcgtatgaagcaagagcgagagaaacaaatccaagaggaaact

SEQ ID NO: 141037 - DNA, 257 bp, Glycine max
tttcagtgagtgatcggtgttcacttgatccttcataagtcgtcatcatcatcatcatcatcaccgttgattgaagaagatgccgatcagaaacttcgccatcggaaggcctgaagaggctactcaccccgacacgttgaaggcggggttggctgagttcatctccaccttgatcttcgtgttcgccggttcacgttccggcatcgcctacaacaagctcaccgacaacggcgccgccactcccgcctccctcatct

SEQ ID NO: 141038 - DNA, 157 bp, Glycine max
cttgctctatactacacagtacacacactagaagaataatggcttccatcctccactactttttagccctctctctttcttgctcttttcttttcttcttatccgactcagtcacccctacaaaaccaagtaaccgtggtgttcgtcccggttaaaa

SEQ ID NO: 141039 - DNA, 250 bp, Glycine max
ctctggttgattcggatctagagtcttcagtttctcctcgttgttcttcgctttcctgttttcaatttcgattctttcgttaatttaataagatgtttgggagggcaccgaagaagagcgataatacgaggtactacgaaatcctcggcgtctccaagaacgcttcgcaggatgatctgaactaggcttacaagaaagccgccatgaagaatcaccccgacaagggcggtgagcccgagaatgtttaaga

SEQ ID NO: 141040 - DNA, 231 bp, Glycine max
gttcactatctctgccgcaaatgcgcttcgcaagacatcgcagttccaataatcgccgaaatcgatctctacaagtacgacccatgggaccttccaggaatggctttgtacggagagaaagagtggtatttttcacgccgagggaccgcaagtacccgaacggttcgcggccgaaccggtccgcggggaccggatactggaaggcaaccggagcggataaaccggttggca

SEQ ID NO: 141041 - DNA, 252 bp, Glycine max
gtcaaagatagagagtcgtcctttgaagcagcgctcattgagggttgtggatcatttaaatgaagggagtgccacgtactttgactacctcttctatattgatattgaagcttctatggcagaacctcgtgcacaatatgctttagcacagttgcaggaatttgctagatttcttcgtgttcttggttgttatcctatggatacagtattatagaagttcagtgtcttaactaggagcaacagtcatgctgt

SEQ ID NO: 141042 - DNA, 248 bp, Glycine max
acgacctgtgacttggtgtgaagtagaaatcggtgcaagaacttctccactttatctaacaaacggcggtgagtttgtgaagacaaaaaatcactagctactcaaaaatggccacagtaggaaggaaccttgcagctcctttgctgtttcttaacttgatcatgtattttattgttcttggctttgcgtgttggtgcctcaacaggttcatcaatggccaaacttaccaccctagttttggtggaaat

SEQ ID NO: 141043 - DNA, 248 bp, Glycine max
ctcaagcttgccgacgttctgaccggagcaaccgccaaattgcccgcggacaaggccgcgacgctgcaagatgctgaaggggtggcgagtgctgaggccaggaacaaccccgatgccaccgccactcccggtggggtagccgcttctgttgcggctgctgctaggctcaatgaaaatgtgaagtaaaaagtagtgttatgtatgttgataatcatacctgtgtttcatgatgtgtgaggagtggcctg

SEQ ID NO: 141044 - DNA, 192 bp, Glycine max
ctctcaattcaattgccttctcccctgcgaatctcttctccacgtatcggagaacatggggaacaagatgaatgcgatcgcgttgtgcttgttagtgtcgaccctgttggtttctgcggtgtattgtgcaccgaatgctgggctccgtaggattgggctgaagaagatgaaattggaccctaaaaacaggct

SEQ ID NO: 141045 - DNA, 248 bp, Glycine max
gttgtcaagttggaatcaacccatactccatggaatggactggtttggccaatagattactgagtaagggcaacgatattctgtgttgcgactatgctagttttgatggtttgattaccaagcaagttatgagctagatggcagaaatgagaaacagtctttgtggtggtgatgaaaaattgatgcgtgaaaggacacacctgctgttggcttgtctgtcaaggatggcaatttgtaagacagatgtt

SEQ ID NO: 141046 - DNA, 253 bp, Glycine max
ccagaccgagctagctagctagcaagcaagcacagagatggaggcaaagcgagaccatgccctcatgtgcttggcacgtgtttcactcttcctctgcgctctaaccctatccgctgctcacggaagcaccacggttcaagacatcgcgagacagttgaaactcggggacaacgagcttctacgcacggagaagaagttcaaggttttcatggagaattacgggaggagctactccacagaggaggagtatttg

SEQ ID NO: 141047 - DNA, 132 bp, Glycine max
gctgggtatgctgccaaggtggctgctgatttgagggacaaggccaccgcggtggggtgggccgcggcccatttttcggcggaaaagacggtggaaggaaccccgccgctaagcgaaaattcgacgacgccg

SEQ ID NO: 141048 - DNA, 252 bp, Glycine max
ctttgttgttcctcactgacctcaccatggcgaccagagccaagctttctttagctatcttccttttctttcttttagccttgatttcaaacctagccttgggcaaacttaaagaaaccgaggtcgaagaagatcccgagctcgtaacatgcaaacaccagtgccaacagcaacggcaatacactgagagtgacaagcgaacatgcttgcaacaatgtgacagtatgaagcaagagcgagagaatacaagtc

SEQ ID NO: 141049 - DNA, 252 bp, Glycine max
caagatcaagtcacagcaatccctatatgtatggattcttcatgaacaagaggattgtcctttatgacacattgaattcaacagtgcatagacgatgaggaaattgttgctgttattgcccatgagttgggacactggatgctcaaccagactgtgtacacatttgttgctatgcagattcttacacttctacaatttggaggatatacactagtgcgaaattcagctgatctgtatcgaagctttgggttt

SEQ ID NO: 141050 - DNA, 248 bp, Glycine max
ctgattggcaagatgaaccagaacccgcaatcaagtgatggaaggaacgatgacgattctgctctctctgatttctccgcttccttaatggtgtagactcccactatacccgatgaattggtggatcattacttggccaagagcggttttcaatgtcccgatgttcgattgactaggttggtagctgttgccactcagaagtttgtagctgaagttgcaggagatgcacttcagcactgcaaagcaag

SEQ ID NO: 141051 - DNA, 245 bp, Glycine max
caacaacatgagaatcagagtgaacaatggccatgactaacttgggtgatgttccctctctggatctcatgactgagctccttcgtcgtttcaagtgctcttccaaacctgacaagcgttggattctcgttggcccacctggatctggaaaaggcacccagtcaccaatcataaaagatgagtactgcttatgccacttagctactggtgatatgttaagagcagctgtagcagctaagacccct

SEQ ID NO: 141052 - DNA, 241 bp, Glycine max
ggcttatgtgggataccgaggcagccagtggcgaggaagggcgtagtaagcgacgaaatgcttcggggagttgaaaataagcctagatccggggattcccgatagaggtcttcctttcgaactgctgctgaatccacgggcaggcaagagtcgagctggtgaactgtgacatcttagtagccagaggaaaagaaagcataagcgattcccgtagtagccgcgagcgacattggagcagcct

SEQ ID NO: 141053 - DNA, 245 bp, Glycine max
aactcaggcggagagaatccgaggcgaacagaagagaaaaattacgatcgaggggaaggagcatcatgtgtcgctgggagcgcacaagttcccggagagacagccgattgggacggcggcgcagagccaagacgacggcaaggactaccaggagccggcgccggcgccactggttgacccgacggagtttacgtcatggtccttttacagagcagggatagcagagtttgtggccacttttctgt

SEQ ID NO: 141054 - DNA, 132 bp, Glycine max
gtttttctgcctgcagatgaaggtgttgaaagttctatttggctgctagcaaaggcttatgtagttgtgaatgactcgtgctatcatcaacttgtcagccattggttaaacactcatgcagttgttgagcca

SEQ ID NO: 141055 - DNA, 130 bp, Glycine max
gaccgcggcagctagcgaggcagcaagcacagagatcgagccaaagcgaggccatgccctcatgtgcttgccacgtgtttcactcttcctctgcgctctaaccccgtccgcgcctcagggaagcaccacg

SEQ ID NO: 141056 - DNA, 249 bp, Glycine max
aacggtttacatagatgctggacccaatgggggcgagttggtctaccgtgtagaaaagaatggaggggttgttaatcctacaactgggcagaagtccgatatcttgattcagatacctaatggacatgcacctaaaactgatgctgttcaagcagtcaagaagatgaagattgaggaaattgatgatgatgaaatggaagagtgaattttatgataaaatgtaattagtttgatggcgcaactcctctt

SEQ ID NO: 141057 - DNA, 238 bp, Glycine max
ttctggttctacccgttcaaaatgatgcttccacagggctccagagatagaacctccaaaaaaggacccctctaatgcaagtaccagtcctggtggacctcaatggaaaccacttgtgggttaactgtgagcaacactactcatccaaaacataccaagcacccttctgccactccacccaatgctccagactgaagactcaccaatgcctctagttcccagcggcagtaaggccagg

SEQ ID NO: 141058 - DNA, 243 bp, Glycine max
ccctgatcttctgtgaagggttcgagtgagagcatacctgtcgggacccgaaagatggtgaactatgcctgagcggggcgaacgcagaggaaactctggtggaggcccgcagcgatactgacgtgcaaatcgttcgtctgacttgggtataggggcgaaagactaatcgaaccgtctagtagctggttccctccgaagtttccctcaggatagctggagcccgcgggcgagttctatcgggta

SEQ ID NO: 141059 - DNA, 241 bp, Glycine max
actatttggatgctcactttaatgagctacatgggcttccaattgcaattgggagactgactaatcttgttgttctcaacctgagcagcaacttcagtgacctcaaagaacttcctgagacatttggtgatttggctaacctcagggaattggatctcagcaataatcagattcatgctcttccagacacatttggtcgccttgataatttaatcaagctcaacttggagcaaaatcctct

SEQ ID NO: 141060 - DNA, 244 bp, Glycine max
  unsure (1)..(244): unsure at all n locations
tctgcttcccctggcaaccttcttcttagttctctccgcttcttatctccagattgctggggcgaaagcacaaccgttgactagtctcaagcttaactctccgatccttcaggagtctattgctaaagagatcaatgaaaatcctgaggcaggatgggaggctgctataaatcctcatgtctccaatgagacangtgaacaagttaagcgcctgtcttgaggcaaaccaacgccgtagaaggaa

SEQ ID NO: 141061 - DNA, 253 bp, Glycine max
ggaagggtttttagcgcgcactgttgtttcttgtggcgatataggtaaactgtgaactcagttggttataacttgctaacaggcagaaagttgttgaagtccctcaattgtgcttccctgcatcctttcccaaagtctctgtctggtgcaatggtttatataactgagtgggacaagtttgtggagcaatccattgagctgttccgtgcagatcctgattctacacggtacgtcatgaagtacaggcactgtg

SEQ ID NO: 141062 - DNA, 251 bp, Glycine max
acagtacagaggaaaatctccttccctccatgctgaaaaggttaggtgagcttgaagagaaggttgacacactccaatctaagccatctgagatgccttatgagaaagaggaattgttgaatgctgctgtatgccgggtggatgctttggaagctgagttaattgctactaaaaaggctctatatgatgcattaatgaggcaagaagagctgcttgcttacattgacagacaagaagaagccaagttgcgg

SEQ ID NO: 141063 - DNA, 153 bp, Glycine max
cagttgcagaccgagctagctagctagcaagcaagcacagagatggaggcaaagcgaggccatgccctcatgtgcttggcacgtgtttcactcttcctctgcgctctaaccctatccgctgctcacggaagcaccacgggtcaagacatcgcg

SEQ ID NO: 141064 - DNA, 251 bp, Glycine max
ctcggttggtttaaaattcagaaagcttccaaatcctgtgactctaatgactacaagcttgtgttctgccagtatgatgagacctggtgtttggatgtcggcatttacgtcgatcgtcaaggaaacaggcgtttggtgcttgctgttactggtgaaccgtttttggttcactttcacaaaattactgcttcatgcagttgaagaactaattttgtgaaagtgaaccaaattagttcttcaactgcatgaag

SEQ ID NO: 141065 - DNA, 250 bp, Glycine max
gctcagctcgatcctctttttgttgcctcgaaagaactcgaacaactcaaccgagaaaaagaccgtgatttcagtgttggtgttgcagaccaacaccaacaagaagaacatcagttagatcaacaaaagcgtggtgtaatcggatccatgttcaaggcggtgcaagacacctacgagaacgccaaggaagctgtcgttggcaagaaagaaccttcgacgacgactaactcgtacagtaccagagaggtta

SEQ ID NO: 141066 - DNA, 250 bp, Glycine max
aaagaaaagaagaaaggaaagaattgatcgttgaaaatgcagggaggaaagaaagcgggagagtccattaaggaaacagctacaaacattggtgcttctgccaaggctggcatggagaagaccaaggccactgtccaagagaaggcagaaagaatgacagcacgtgatccggtgcaaaaggagttggcaacccaaaagaaagaggcaaagatgaaccaggcggactggacaagcaggcggcgcgtcacat

SEQ ID NO: 141067 - DNA, 252 bp, Glycine max
gcttgcacctattggtatcttctacaatatcctaaagtgtttttcttcttcttcatcaccatgtctttactttcagacctcatcaacctcaatctctcagaatccacagaaaagatcattgctgagtacatatgggttggtggatctggtatggacctcagaagcaaagccaggactcttcctgggccactgagtgaccctgcaaaacttccgaagtggaactatgatgggtctagcacagatcaagctcca

SEQ ID NO: 141068 - DNA, 151 bp, Glycine max
gccggatgtagggtccagcggctggaagagcaccgcacgtcgcgtggtgtccggtgcgcccccggcggcccttgaaaatccggaggaccgagtgcctcccacgcccggtcgtactcataaccgcatcaggtctccaaggtgaatagcctct

SEQ ID NO: 141069 - DNA, 149 bp, Glycine max
gttcagtatcctagtataccttagtaaataatgtaagatactatgatgagagcacggttcccattactgttgctgggacttgtttgcctggcttcagtttctgtctcatttggcagtgcttactgggaaaaagagagccccaaacacaa

SEQ ID NO: 141070 - DNA, 249 bp, Glycine max
gtaattgtagtagtagacagtagcaccatgagccaggaacagctcaagaaacctcaaggggagcaggaccccatcaaatacggcgacgttttcaaagtctccgacgaactcgctttcaaacccatcgcgccaagagacgcagctctcatgcaagccacggagaaccaagcattgggccaaactcaaaaaggaggtcccgcctcggtgatgcaatccgccgcaaccgaaaacctccgcgccggcgtcgtg

SEQ ID NO: 141071 - DNA, 248 bp, Glycine max
cgcgttacgaagccggcatcaaggcgccctcttccatttaccattccgagagaggtccgacgacctctcaggttctcgcagttgtcgccggccttccggtcggcggcatcctcctgctcctggcaggactgaccctggctggaactctcaccgggctggtggtggcaacaccgctcttcatcatcttcagcccggtgctgattccggccacggtcgcaattggcctggccgtggccgggtacctgacg

SEQ ID NO: 141072 - DNA, 248 bp, Glycine max
gatggctcttagcagcctttttgtcctaatgacccattatggattggaatacccaaatttctatgaaaaactatatgccctcttagttccatctatcttcatggctaaacatcgagcaaggtttttccagcttcttgattcttgcctcaagtcacctcttcttccggcttacctggctgcttcctttgcgaagaaattgagtaggttgttgctttcagttcctccttcaggggcattagttattacgg

SEQ ID NO: 141073 - DNA, 238 bp, Glycine max
agagctggatcagtgagtgatcggtgttcacttgatcctccataagtcgtcatcatcatcatcatcatcaccgttgattgaagaagatgccgatcagaaacatcgccatcggaaggcctgaagaggctactcaccccgacacgttgaaggcggggttggctgagttcatctccaccttgatcttcgtgttcgccggttcaggttccggcatcgcctacaacaagctcaccgacaacgg

SEQ ID NO: 141074 - DNA, 185 bp, Glycine max
gcggtttcctttgttggtgttgctgggaactgttttcctggcatcagtttgtagttcattaaaggtgagagaggatgagaataaccctttctacttgagaagctctaacagcttccaaactctctttgagaaccaaaacggtcgcattcgtctcctccagagattcaacaaacgctccacacaac

SEQ ID NO: 141075 - DNA, 251 bp, Glycine max
tgcggctgctacttcggctccatcttctccgatctcctcaaactctatcagcgcagaaccaagcctctatcaccatggggaagacacatggaatgggagctgcccgcaagctgaagtctcaccgtaggagacaaaggtgggctgacaagtcatacaaaaagtctcatctgggaaatgaatggaagaagccttttgctggttcatcccatgccaagggtattgttcttgaaaagattggtattgaggctaag

SEQ ID NO: 141076 - DNA, 78 bp, Glycine max
cttccttgttcaaaagggtcttcctagaaacactcaaggtgtggctgggttaggccatgcaccaatttctcttccaaa

SEQ ID NO: 141077 - DNA, 246 bp, Glycine max
gtaggatcgcggcgttccacatgttctctccgatgaggattcagggcctggagggtctccgacagcgcgtgggtgacgacatggtgaagagcgcgtggaaggagatggagatgaaaggcgtggtggaggttcgcggtgtgtttcaggaagggtctctttgtaatattctggaaagtgtttttgggagtaatgataagagtgaggagttgggggatatggttagggaagggtacgagctgattgcga

SEQ ID NO: 141078 - DNA, 246 bp, Glycine max
cgcgtgcatagcagagtcagagacagagacgcagccatggggcggagacctgcgaggtgttataggcaaattaagaacaagccataccccaagtcacgtttctgccgtggtgttcctgatcccaagatcaggatttatgatgttggtatgaagaagaagggtgttgatgagtttcctctctgtgtccatctggttagttgggagaaggaaaatgtttcaagtgaggccctggaagctgctcgcatt

SEQ ID NO: 141079 - DNA, 244 bp, Glycine max
atgaagcggaggagcaactttgcgaggcggccagaaaaggtgacacggagaaagtgaggtctctcatagactccggcgctgacgtcagccacttcgacggcgagggcctcaatcctctgatgcacgccgcaaagcacggccatgcacccgtcctcaccctcctcctctccgccggcgctccctggaacgctctttccccctccaacctctccgccggcgactacgccatgcaagaaggcacaac

SEQ ID NO: 141080 - DNA, 189 bp, Glycine max
cagcgaacttgaaataccactacttttagcgttattttacttattccgtgaatcggaagcggggcactgcccctcttcttggacccaaggtcggcttcggccggtcgatccgggcggaagacattgtcaggtggggagtttggctggggcggcacatctgttaaaagataacgcaggtgtcctaagatg

SEQ ID NO: 141081 - DNA, 243 bp, Glycine max
gtttgctacctaaaccctagtctccatacatcaacttgggaggttaaagagacggcaacgttgtgctgtccgccttgaccgagccagagcttcgtcttggccctcgattttgccctgtaaaactaatcccagtcacaacagaaataatcaatggcaccgaaacagaccaaggctgagaagaagatcgcttacgatgcgaactgtgcgacctaatggaggagtacggccaaatcctcgttgtaa

SEQ ID NO: 141082 - DNA, 242 bp, Glycine max
tagaaatcggtgcaagaaattctccactttatctaaaaaaattcggtgagtttgtgaagacaaaaaatcactagctactcaaaaatggccacagtaggaaggaacgttgcagctcctttgctgtttcttaacttgatcatgtattttattgttcttggctttgctagttggtgcctcaacaggttcatcaatggccaaacttaccaccctagttttggtggaaatggtgcaccatgtttttc

SEQ ID NO: 141083 - DNA, 243 bp, Glycine max
  unsure (1)..(243): unsure at all n locations
tttcttccaacctctcaagtccancctacccctttttnttctccnaccaacttcaccgtntgncttcctcgatcatgtctcacttcaagggcaagtaccatgatgagcttattgccaatgctgcttacattggcactcctggaaagggtattcttgctgctgatgagtcaacagggacaattggcaagcgtttggccagcatcagtgtagagaatgttgaatccaacaggcgtgctcttaggg

SEQ ID NO: 141084 - DNA, 93 bp, Glycine max
agctagctagcaagcaagcacagagatggaggcaaagcgaggccatgccctcatgtgcttggcacgtgtttcactcttcacctgcgctctaac

SEQ ID NO: 141085 - DNA, 245 bp, Glycine max
gtgatgctggtgcagtattaccagaagactacatttctaatatacaaagttcttttgaaaggaattataaatatgatgctgtaagatatagtaccaagcagtataatgtggaacttaagcctctcttctctgcttttgaattaagggcatttgcgttgacttccttaaggtcattcttgatgttctatttgccacttttggagccccgtgtggaaatggaagatgatgagaatttccaggaggag

SEQ ID NO: 141086 - DNA, 243 bp, Glycine max
gccagcatgtttgggatgagggttaggattgcattagctgaaaagggtgttgagtatgaatacaaggaagaaaatctcaggaacaagagtcctttgcttttgcaaatgaacccaattcacaagaaaattccagttctgatccataatggcaaaccaatttgtgaatctgcaattatagtgcagtacattgatgaggtctggaatgataaagctccaatcttgccctctgacccttatgagaga

SEQ ID NO: 141087 - DNA, 241 bp, Glycine max
aaacaacaaaaccaccgcacagggatcgtgttgagtttgagaatggagaagacagcagttaaagttcgatgccagaggattgggtgcgacgccatgttctccgaggacgacaaccccgacggttgctgtcgataccatgattcgggacctatatttcatgacgggacaaaagaatggagttgttgcaagaaaagaagtcatgattttagcttgtttttggaaattccaggatgcaagacag

SEQ ID NO: 141088 - DNA, 242 bp, Glycine max
ctcgaacattgtttgttgtaggaagaggaatcttgagaaatggcaggggacagcaagagcaagattctgttcatcggagggactggttacatcggaaaattcatcgtggaagccagcgccaaagctggccacccaactttccctttggtgagggagtccactctctccaaccccgcaaaatcacccctcatcgacaatttcaaaggcctcggtgtcaatcttgttttaggagatctatacga

SEQ ID NO: 141089 - DNA, 243 bp, Glycine max
cccgtgtgtcgccgccatggccaccgtcaccacccaagcctccgccgcaattttccggccatgtacctcgaaatcgaggtttttgaccggctcttccggtaaacttaaccgggaagtgactatgcggccaatggggtgccctccttctgcctctttcaaggttgaagccaagaagggagagtggttacctggcttggcctccccaacttacctcaatggcactcttcctggtgacaatggatt

SEQ ID NO: 141090 - DNA, 242 bp, Glycine max
taagaaatgaagagtactatcttctttgctctctttctagtttgtgccttcaccatctcatacctgcctttagccaccgctcagttcgtgctcgacactgatgatgatcctcttcaaaacggtggcacatactatatgttgccagttatgagaggaaagggcggtggaatagaagtagattcaactggaaaagaaatatgccctctcactgttgtgcaatcacccaatgagctcgataaggg

SEQ ID NO: 141091 - DNA, 243 bp, Glycine max
gaaatgaagagtactatcttctttgctctctttctagtttgtgccttcaccatctcatacctgccttcagccaccgctcagttcgtgctcgacactgatgatgatcctcttcaaaacggtggcacatactatatgttgccagttatgagaggaaagggcggtggaatagaagtagattcaactggaaaagaaatatgccctctcactgttgtgcaatcacccaatgagctcgataaggggatt

SEQ ID NO: 141092 - DNA, 159 bp, Glycine max
aattcatcaagggaaagttcttagggatgctactaccctggaggagaataaagtagccgaaaatactttcattgtaattatgctatcaaagagtaagagcacatctggtgaaggatctactacttcaactgcattatcaaccaaggctccacacaacat

SEQ ID NO: 141093 - DNA, 235 bp, Glycine max
acaagtacgacctgtcttccatcagagtcttcaagtccggaggagccctctcggtaaggaactcgaagacactctcagagctaaattccccaacgccaaacttggccagggatacggaatgactgaggcagggcctgtgctaacaatgtctttagcttttgctagagaaccgatagacgtaaaaccaggtgcatgtggaaccgttgtaagaaatgcagagttgaagattgtcgat

SEQ ID NO: 141094 - DNA, 239 bp, Glycine max
caaccactcttaatttctctctgccttgctcatttacacacctctccaacctttcactttctgctttatttgaatccctctctctcctttccaaatggccagcgttgaggttgcacatcaaacaccaacaacagttccagataatgaaacaaccgaggtaatcaagacccaggaaacaaccccggaaccagtaccagccactgaggctcctgcaacagaacaagcagcagctgaggttc

SEQ ID NO: 141095 - DNA, 238 bp, Glycine max
gaacagttttgggtgatcggaggtgtatcttctcatctttttgccctatttcagggtttactgaaggtcttggctggtgtgaacacaaacttcactgtgacgtcaaaagcagcagatgatggagaattctcagaactctacatcttcaagtggacatcactcttgatccctccaatgaccctactaatcatgaatattgttggggtggttgttggggtctcagatgccatcaacaatg

SEQ ID NO: 141096 - DNA, 242 bp, Glycine max
gcttatagcacaagatgaaatattcggtcccgtgatagcactgatgaagtttaagacaattgaggaagcaattaaaagtgctaacaacagcagatatggcctagtagcaggtgttgtgaccaagagcttggacacagcaaacacaatgtcaaggtcaattcgtgcaggggttgtttggatcaactgttattttgccttcgaaaatgacattccttatggaggatgtaagatgagtggatttg

SEQ ID NO: 141097 - DNA, 240 bp, Glycine max
tacatccttcacacaaacgttttcagccaaggccagggggacagggaacaacaattctatctatggtttgacccaactgctgatttccacacttactccatcacgtggaacccccagaggattatattctcagttgatggcactcccattagagagttcaagaactcggaggctattggggttcccttcccaaagaatcagccaatgaggatatattctagtttgtggaatgctgatgac

SEQ ID NO: 141098 - DNA, 205 bp, Glycine max
gcggtaattccagctccaatagcgtatatttaagttgttgcagttaaaaagctcgtagttggaccttgggttgggtcgatcggtccgcctccggtctgcaccggtcggctcgtccctttctgccggcgatgcgctcctgtccttaactggccgggtcgtgcctccggtgctgttactttgaagaaattagagtgctcaaagcaag

SEQ ID NO: 141099 - DNA, 238 bp, Glycine max
ctcaactcctcacatggttctccagcaatccgtgtaccaggctttcactcaggtgtttgctcagcagctaccaaagcaagcacaggtgaaatctgtggcaccatttgggttatgcttcaactccaacaagatcaatgcatatcctagcgtggaccttgtgatggacaagcccaatggtcctgtttggagaatctctggtgaggacttgatggtgcaggcacaacctggggtcacgtgt

SEQ ID NO: 141100 - DNA, 221 bp, Glycine max
gaccgagctagctagctatcaagcaagcacagagatggaggcaaagcgaggccatgccctcatgtgcttggcacgtgtttcactcttcctctgcgctctaaccctatccgctgctcacggaagcaccacggttcaagacatcgcgagacagttgaaactcggggacaacgagcttctgcgcacggagaagaagttcaaggttttcatggagaattacggga

SEQ ID NO: 141101 - DNA, 231 bp, Glycine max
cctacccattcagcctgcgacgtggggttgattgtgctctgtcatgtgggtcatggctcaatctggctgacgttgatgctccaacacaagctctcaacccagggcagaggaatttgcgatatgtagatgcagttctgactgttccttcgagagccatggtgcccctgagtggcatcaacattgcctttaaccgtgaaactgttggtccagcattggtcccggctttgaggc

SEQ ID NO: 141102 - DNA, 181 bp, Glycine max
ttcaaaccttgctctatactacacagtacatgcactagaagaattttggcttccatcctccactactttttagccctctctctttcttgctcttttcacttcttcttatccgactcagtcacccctacaaaaccaatagaccttgttgttctacccgttcaaaatgatggttccacagggc

SEQ ID NO: 141103 - DNA, 235 bp, Glycine max
caagaaagaacttccttataaccaaaaccaacaacaactatggccagttatcagaagcactacgatgatcagggtcgcaaggtcgacgagtatggcaatgttgagaggcaaactgacgaatatggcaacccggttcatgccactagtgtcacttatgtagccactaaaagtgttggtggctacaatgatgacactaataagcaacatgataccaccggtgtctatcctgagaaag

SEQ ID NO: 141104 - DNA, 240 bp, Glycine max
atccagagaaaatagcagttaagatcacaaatttcactcaatatccctgctgatgagaaccaaattgccgcatatttagtaaaaaatggtccacttgctatgggcgtgaatgcaattttcatgcaaacatacattggtggtgtctcatgccctctcatatgtagcaagaaaaggctgaaccatggtgtgttacttgtgggatatggtgcaaaaggcttctcaattcttaggcttggcaac

SEQ ID NO: 141105 - DNA, 193 bp, Glycine max
gagagtgcggtttcctttgttggtgttgctgggaactgttttcctggcatcagtttgtgtctcattaaaggtgagagaggatgagaataaccctttctacttgagaagctctaacagcttccaaactctctttgagaaccaaaacggtcgcattcgtctcctccagagattcaacaaacgctccacacaacat

SEQ ID NO: 141106 - DNA, 155 bp, Glycine max
ctgaatgcaagtttgatccagagaaaatagcagttaagatcacaaatttcaccaatatccctgctgatgagaaccaaattgccgcatatttagtaaaaaatggtccacttgctatgggcgtgaatgcaattttcatgcaaacatacatgggtggt

SEQ ID NO: 141107 - DNA, 198 bp, Glycine max
gaaatctgtaagatattatgcaaaaaataattaaggtgtttttctttaaatgggttggttgattggttcaatgaaccgatcaagaccacagcaggttcatggggatgcgaggattaagacgctttgttttttaatcttccgatgtcactcttgtttgttagtttgttttgttattttgtatttcaataagtactgtgc

SEQ ID NO: 141108 - DNA, 181 bp, Glycine max
caagatggtcgtccacgcgcgctccggcggcaccatcgaggtcatgggcctcatgcagggcaagaccgacgccgacgccatcatcgtcatggacgccttcgccctcccagtcggaggcaccgagactcgcgtcaatgctcaggccgatgcctacgagtacatggtcgatcattcccagacc

SEQ ID NO: 141109 - DNA, 192 bp, Glycine max
gagaaaccctaggtaagaagaaaagatgccggctggtcatggtttgagatcccgcaccagagattccgtctctcgtcctctcaggaagaagggaaccatcgccctcaccacatacctgacaacctaccacgtcggcgactatgttgacgtcaaggttaacggtgccgttcacaagggaatgccccacaaatt

SEQ ID NO: 141110 - DNA, 137 bp, Glycine max
ctcacacacaactacaagaacgaacttccttataaccaaaaccaacaacaactatggcaagttatcagaagcactacgatgatcagggtcgcaaggtcgacgagtatggcaatgttgagaggcaaactgacgattat

SEQ ID NO: 141111 - DNA, 188 bp, Glycine max
tttggaagagaaattggtggtgttcgatcttgcaaggtcaagggttgggtttagcacctcatcactgcactcgcatggagtcaaatgtgctgacctcttcaactttgccaatgcatgatgagccaagatcgcgagactttttataatatgcttatttataattaagcaagcatctactacatgttatg

SEQ ID NO: 141112 - DNA, 239 bp, Glycine max
atcgatcctttagtccttcggaatttgaagctagaggtgtcagaaaagttaccacagggataactggcttgtggcagccaagcgttcatagcgacgttgctttttgatccttcgatgtcggctcttcctatcattgtgaagcagaattcaccaagtgttggattgttcacccaccaatagggaacgtgagctgggtttagaccgtcgtgagacaggttagttttacctactgatgacag

SEQ ID NO: 141113 - DNA, 125 bp, Glycine max
caaggattcaattgatcgttgaaaatgccgggagtaaagacagcgggagagtccattaaggaaacagctacaaacattggtgcttctgccaaggctggcatggagaagaccaatgccactgtcca

SEQ ID NO: 141114 - DNA, 231 bp, Glycine max
ctgggtcagcagataattctgttcgcatgtttgatcgccgcaatctcaccactaatggagttgggtctcccatccataaatttgagggtcacaaagctgctgttctttgtgttcagtggtctccagacaaatcatctgtatttggaagttcagctgaagatggtctcttaaacatttgggactatgagaaggttggtaaaaagatagagcgatctggaaaatcaataagtt

SEQ ID NO: 141115 - DNA, 229 bp, Glycine max
  unsure (1)..(229): unsure at all n locations
gtagnagtngatgatagaggtgttcacaatctttacaagcagcttgttgggctctggacntgcatttggtgcaaaacgttgggttgcaaccttagntcgacaatgtgaaagactcgctagtgccatggcnncaaacattcccactgtagatgttggcgtgataacaaaccaagacgggaganagagcatgatgaagctggctgaaagaatggtgataagcttttncnct

SEQ ID NO: 141116 - DNA, 227 bp, Glycine max
ctccgcaccagtttcagcgcacgaatatcttcttgtttggagcgatccgagacaaactctgtaaacatgttggtttaccaggacctccttacaggtgatgagcttctctctgactccttccgttacaaggaaattgagaatggaatgctgtgggaagttgaggggaagtgggttgttaaaggagcagttgatgtagacattggtgcaaacccttctgctgagggtgg

SEQ ID NO: 141117 - DNA, 248 bp, Glycine max
cgcaatgtgatttctgcccagtgctctgaatgtcaaagtgaagaaattcaaccaagcgcgggtaaacggcgggagtaactatgactctcttaaggtagccaaatgcctcgtcatctaattagtgacgcgcatgaatggattaacgagattcccactgtccctgtctactatccagcgaaaccacagccaagggaacgggcttggcggaatcagcggggaaagaagcacctgtgaagcttgactcgagt

SEQ ID NO: 141118 - DNA, 227 bp, Glycine max
gccactccacccaatgctctagagccaacacccaccaatgcatcagttgccccgcggcatcaaggccagggtgccacaaaaacacgtgtggcctcatgtccactaatcccatcacccaacaaaccggtttaggtgaactaggagaagacgttcttgcaatccaggccacacaagggtcgacccaacaacttggcccattggtcacagtcccaatattcctcttttct

SEQ ID NO: 141119 - DNA, 262 bp, Glycine max
gtgattgagaaaggaggccgcaaaattggatttgatctggattatgatgagaaggatagcagttataacagaatcaagagcctggtaaccgaggagctaaaacaatacttcaggccagaatttttgaataggttggatgaaatgatagtcttcaggcagctcacaaaactggaggtgaaggagattgctgacataatgctcaaagaggtgtttgaaagactgaaggtgaaagatattgaacttcaagtgacagaaagatttg

SEQ ID NO: 141120 - DNA, 210 bp, Glycine max
  unsure (1)..(210): unsure at all n locations
actttttagccctctctctttcttgctcttttcttttcttcttatccgattcagtcacccctacaaaaccaatataccttgttgttctacccgttcaaaatgatggttccacagggcttaatagagaggaanctcnaaaaaagaacccctgtaatgcaagtaccagtcctggtggacgtgaatggaaatcacttgtgtgttaactgtgag

SEQ ID NO: 141121 - DNA, 233 bp, Glycine max
tcggaagtttcgcctccttccaagagccctgaaattgactgttaattagggtttctgaagtgaagaaaaatatagaaactgttcagggtgcagatgtctatcctgctgcacagcaaatgctaattcatcaagggaaagttcttagggatgcttctaccttggaggagaataaagtagttgaaaatactttcattgtaattatgctatccaagcgtaagaccccatccggtgaa

SEQ ID NO: 141122 - DNA, 251 bp, Glycine max
ggatggagtttggggtgatcgcatccctgcttggatcaaatatgccactgttgatcctaccagatttgccgcaccatatgatggtgtctactgggatccaccactttcagagaggtatcagtttaaatatcctcgtccaccaaagccaaaggccctgcggatatatgaggctcatgtggggatgagtagctttgaaccccgcataaactcttacagggaatttgcagatgagattttgccccgtattcggg

SEQ ID NO: 141123 - DNA, 235 bp, Glycine max
accgatgaaggagcccttacaagagtggtggccacaagggctgaggttgatttgaaaaacatagcagatgagtatcaaaggaggagcagtgtccctcttgaacgtgctattgttaaggacaccaccggtgactatgagaaaatgcttgtggcgcttttaggacatgatgatgcttgacatactcctttgtgtttgtgtgtgtgtaacttgtggcagaggtactatatagtgtgca

SEQ ID NO: 141124 - DNA, 267 bp, Glycine max
tgctttccaatgctatgacaagtatatgttgagtagcttaaaagctgctgctgaagctcacggtaagcctgaatggggaagcacaggccctactgatgctggccactgtaacaactggccagaagacactcaatttttccgcaaagaaggtggtggatgggatggtccatatggtgagtttttcctcacttggtactctcagatgctgttggaacatggtgacaggattctctcatcagccacgtcgatctttgacaacactggagt

SEQ ID NO: 141125 - DNA, 212 bp, Glycine max
ggactttccatgtcaaaggccactgccaagaaaattgtgaaagctgatgcttatgttgctgcttgtgatgtccctggaattaagagattacttccatcagagtggagggaacaggagtttttcaataatatctatgaactagttggagttcctgtagtcacagtgcaactcagatagtatggttgggttacaggtttgcgggtatcgagaaa

SEQ ID NO: 141126 - DNA, 264 bp, Glycine max
ggatgatgctgagtatcttcttctaaatcagcttggtgggatcctgggattgagtagtcaagaaatagtggaggtgcacaggggtctagctgagcaggcttttaggcaacaggctgaggtaattttagccgatggacagttgacaaaggccagggtggagcagcttaataacctccagaaacaagtaggcttacctcaggaatatgcgcagagatatatcaagagtataacgactacgatataggcagcggccattgaaactgc

SEQ ID NO: 141127 - DNA, 260 bp, Glycine max
caagtacttccttacaatcaaaaccaacaacaactatggcaagttatcaaaagcactacgatgatcagggtcgcaaggttgacgagtatggcaacgttgagaagcaaaccgacgaatacggcaaccctgttcatgctgctagtgtcacctatgtagccaccagaactgctgctggtggttacagtgatgacattaataggcaacatgataccaccaatgcctacggcgtagacactggtagacagcattctagtggtggc

SEQ ID NO: 141128 - DNA, 262 bp, Glycine max
attcaaaccttgctctatactacacagtacacacactagaagaataatggcttccatcctccactactttttagccctctctctttcttgctcttttcttttcttcttatccgactcagtcacccctacaaaaccaataaaccttgttgttctacccgttcaaaatgatggttccacagggctccattggtccaacctccaaaaaagaacccctctaatgaaagtaccagtcctggtggacctcgatggaaatcacttgtgg

SEQ ID NO: 141129 - DNA, 211 bp, Glycine max
  unsure (1)..(211): unsure at all n locations
tgttgttcaatctaacaaacttctctatatcgtttactttttcaacacaacatacgatagagnntanntaggncnnncatatnnatatcatngcttcnanggaagtttcggttataaatnntnggatgatngtgtgtggcataaagtgtaactggcactagtgttggcgagatgccttaaaccaaagaggaaggtcacgattttaaggagg

SEQ ID NO: 141130 - DNA, 156 bp, Glycine max
gtttgggaatgcagccccaatcgggcggtaaattccgtccaaggctaaatactggcgagagaccgatagcgaacaagtaccgcgagggaaagatacgacgttggggaagcttggggagctgaaggacacggcttcggatgcggcgaagagggccgg

SEQ ID NO: 141131 - DNA, 253 bp, Glycine max
tggattatgcaactgacactgctcagaaatcaaaggactatgcaggtgatgctgctcagaaatcaaaggactacgccggttatgctgctcagacaaccaaagactatgccagtgacactgcacagacatcaaaggactatgctggtgatgctgctcagaaatcacagggctatgttggtgatgctgcacaaaagaccaaagaatatgttggtgatgcagcacagaagacaaaggattatgccactgacgcagc

SEQ ID NO: 141132 - DNA, 228 bp, Glycine max
gaatataagtaatatagaatctaagtaattcacggttaggatagatctaaaccagctcattatatatatattacaacttactatgccaactatgaaacaacttattagaaacacaagacagccaatccgaaacgtcacaaaatccccagctcttcggggatgccctcagcgccgatgaacgtgtaccagggtttatgtgtgactcgtgcagatccatatgataagaag

SEQ ID NO: 141133 - DNA, 259 bp, Glycine max
tctttgcagggtctgtgaaaacatcccaattgttctttgcggtaacaaggttgatgtcaagaacaggcaagtgaaggcaaagcaggttactttccacaggaagaagaatttgcagtactacgagatatctgctaagagcaactacaattttgaaaagccatttttgtacttggccaggaaacttgcaggcgatactaacttgcactttgtagaatctcctgcattggctccaccagaagttcaaattgatttagctgcg

SEQ ID NO: 141134 - DNA, 261 bp, Glycine max
gctttaggtctgggaaattcatgacattagttgccacaaatgtggcagctcgaggtcttgatattaatgatgttcagttaattatacagtgtgaacccccacgggatgtagaagcctatatccatcgttctggacgcacaggaagagcaggtaatactggggttgctgttatgctttatgacccaaaaagatcgaacatatctagaatagagagagagtctggtgtaaaatttgaacacgtatctgctcctcagcctgatg

SEQ ID NO: 141135 - DNA, 210 bp, Glycine max
ctcttcttctcttgcggctagggttttagcgcacttcttctagatttaaggaagatgggtaaggaaaaggttcacatcagtattgtggttattggccatgttgactctgggaagtccactaccactggccacctgatctacaagcttggaggcattgacaagcgtgttattgagagatttgagaaggaagctactgagatgaacaagagg

SEQ ID NO: 141136 - DNA, 206 bp, Glycine max
  unsure (1)..(206): unsure at all n locations
aaactcacgacacatctaactgaatatcatgaacaatggcttatgctaggcttgctcctatggctgtctgcttgcttgccacttccaccataatgttcgtgtcgatngtagaagcagcagattgtaagggggcatgttcacctttcgaggtgccaccgtgccgctcacgtggtgggcgtggtgtccctatagggctattggtgggt

SEQ ID NO: 141137 - DNA, 200 bp, Glycine max
gtcttccatagccccccagaaatgaggagcaccatcttctttgcgctctgtctcttgtgtgctttcagcacctcatacggtgtgtcagccatcgctgatttcgtgctcgatagtgaggataaccctcttgaaagtggtcgtagatattatatcgtgtcagacatagcagcatttggtggagtaagagcagctccagcggg

SEQ ID NO: 141138 - DNA, 259 bp, Glycine max
gctaagggactggcgtatcttcatgaagattgtcatcctaagatcatccatcgtgatatcaaagctgccaacatccttctggattttaagtttgaagcaaaggttgcagatttcggtcttgcaaagttttcttctgatgtcaatactcatgtttctactcgagtgatggggacttttgggtatttggctccagaatatgcttctagtggaaaactgacagacaaatcagatgttttctcctacggagtcatgctcctcg

SEQ ID NO: 141139 - DNA, 164 bp, Glycine max
ggtggactagctgtaataaaagatatttccaggttattagacaatcatattctgcagcatacaatactatatcttcacactacgtacagtacatatgattgtatgctgcagaatatgattgtctaataaggtggactagctgtaataaaagatatttccaggtt

SEQ ID NO: 141140 - DNA, 217 bp, Glycine max
catatatacgagagagtgagtaatcgagaaagagaagaagcatatatatcaaaatggctgcagagatggagagggagtcattgataactgaagctcctaatgcaccagttactgcacagagaagggtcagaaatgacttagaaaattctctaccaaaaccatacttgccaagagcattgaaagctcctggtgcgggccacccaaagggaacagcagg

SEQ ID NO: 141141 - DNA, 249 bp, Glycine max
gagagagcgagcgagcgagcagtttcaaagagaggatttgggattgggaaggcgagggattgcgctgcgtctcttcctcttctctttcgattcatccctcattcataatcttccaatccaacaacctcagcctcacactcacacatacacacatctgaacgcgtatcgtccctcccatggcttcaaagcgcatcctcaaggagctcaaggacttgcagaaagacccaccaacttcttgcagcgctggtc

SEQ ID NO: 141142 - DNA, 238 bp, Glycine max
ctcgagccgaatcggctcgagtgatctttgaaaatgcagggaggacaagaaagctggagagaccatcaaggaaacagctgcacacattggtgcttctgccaaggctggcatggagaaaaccaaggccactgtccaggagaaggcagaaagaatgacggcacgtgatccgatgcaaaaggagttggcaacccagaagaaagaggcaaagatgagccaggcagagctggaacaagcaggc

SEQ ID NO: 141143 - DNA, 254 bp, Glycine max
cacgacgtgagagagattgtgaagtagaaatcggtgcaagaaattctccactttatctaaaaaaattcggtgagtttgtgaagacaaaaaatcactagctactcaaaaatggccacagtaggtcggaacgttgcagctcctttgctgtttcttaacttgatcatgtattttattgttcttggctttgctagttggtgcctcaacaggttcatcaatggccaaacttaccaccctagttttggtggaaatggtgc

SEQ ID NO: 141144 - DNA, 254 bp, Glycine max
gaaccaagcaaattcccatgggaagagttggggatgacttttggttccaagaccccaatggggacccaatgggagtgctctggttacaaggggtgcacatgattcactgtgcctacaacagtttgtggatggggcagatgattcagcccgattgggacatgttccaatcggatcatgtgtgtgccaaatttcatgcgggttcgagggctatttgtggcggtcctgtctatgtaagtgacagtgtgggctctcat

SEQ ID NO: 141145 - DNA, 251 bp, Glycine max
gcagacagtggggagaagccatttttattgcggtcagcagaagagcttgaaccttttcttgtaggtacaaatacgaggcaaggatgcaggcaatgaccaagccaacttacactgcaattgttcaacatgccaagaatggaaaacctgccctcgtatttgtacctacaaggaaacatgtccgacttacagctgtggatctgattacatactcaggtgcagacagtggggagaagcctttttattgcggtcag

SEQ ID NO: 141146 - DNA, 236 bp, Glycine max
aaacattggtgcttctgccaaggctggcatggagaaaaccaaggccactgtccaggagaaggcagaaagaatgacggcacgtgatccgatgcaaaaggagttggcaacccagaagaaagaggcaaagatgagccaggcagagctggacaagcaggcggcgcgtcagcataacacggcggcgaagcaggctgccagggcgggcacatgggacaacccatggggacccatcagacgtc

SEQ ID NO: 141147 - DNA, 164 bp, Glycine max
tccagatttggtactgccaacagtgccctgataaggttcaatggccctctcactttggttccaaacctcctctatatttcaatgctggcatgtttgtttatgagcctaatctcgacacctaccgtgatcttctccaaactgtccaactcaccaagcccacttct

SEQ ID NO: 141148 - DNA, 256 bp, Glycine max
ccagagccaaggtaggttaaacactcttcttcatcgtcgtcgcaatgggacgtgtgatccgtgcgcacgtaagggagcaggctcggtcttcaagtctcacacgcaccaccgcatcggccctgcccgcttccggagcctggatttcggagagcgcaacggctacctgaagggtgtcgtcactgacgtcatccacgatcctggccgtggcgcgcctctcgctaaggtcgccttccgccacccgttccgctacaagaag

SEQ ID NO: 141149 - DNA, 262 bp, Glycine max
  unsure (1)..(262): unsure at all n locations
aagaaagacaatcatgacatattcattaaactgggatctgataaagataagcgaaaagaggcttttgagaaggaagaaaaatccaagaagtctgtgagcatcaccgagtttctgaagcctgctgagggggaagcatactataacccaggacgtggtaggggccgtggccgtggttcacgaggcggaggcggttcccatgggangtgcnaccaacaatgcacctgtccatccnnttgangancccggggnttncccaccctng

SEQ ID NO: 141150 - DNA, 218 bp, Glycine max
  unsure (1)..(218): unsure at all n locations
gtagaagtngatgntagaggtgttcacaatctttncaagcagcttgttncnctctggacatgcntttggtgcaaaacgtttggttgcaacctnagatcgacaatgtgnaagnctcgctattgccatggcatcaaacattcccacngtaggtgttngcgtgataanangccanngacgggananagnncntgttgaggntgnctnganagagtggtgat

SEQ ID NO: 141151 - DNA, 256 bp, Glycine max
caaaaccaaaacagtaaagctaacttcaacacctttaattttctaaaagtaattcagcggctgaataccaagcggagaagatgagtcaggagcagccacggcgtcccaaaggccaaaaccccatcaaatacggcgacgtttttgtcgtctccggcgaccttgcacagaagctcgtcgcaccggaagatgctgccatgatgcaaagcgcggaagctcgagtgctcggacaaacccaacccggcggagcatcttccgt

SEQ ID NO: 141152 - DNA, 209 bp, Glycine max
cttatcttgtcaatctcgtaaatgtgttacgagaattgtatttgaccagtccagaggaaggtcgccaattgagaaggaaagctctctctcgtattgaatggctgcaaaaagctgatgtgcctaccatagcacagattgaagagttccattcgatgcagaggacgatgaatgctcctgattacaatgataatattgatctgctgttaagc

SEQ ID NO: 141153 - DNA, 250 bp, Glycine max
attgaaatatttgataagctcttggggaattgaaaagtttagaggcgtagttgagcaatattatggcaagaaatttgaacctttccgtgcattgccagaatgggaatttaaaagttatcttgggtggcatgaacagggcgatggcaagtttttttatggtcttcatgttgataatggtcgtattggtggaaagtatgaaaaagactttgagggaggttattgagatatatgatttgagtgcaagactcac

SEQ ID NO: 141154 - DNA, 233 bp, Glycine max
attcattttaatcctaattctgcacttcttgatcatccgattcttctcctcaagatgcagatattcgtaaaaactttgaccggcaagaccatcacccttgaggtggaatcctccgacaccattgacaacgtaaaagctaagattcaagacaaggaagggatcccacctgaccagcagagacttatctttgcgggtaaacaacttgaggatggtcgcacccttgcggattacac

SEQ ID NO: 141155 - DNA, 262 bp, Glycine max
gttgatgatatggtcaacagcaatgccatcctctatgagcctggtgaacatccagaccatgttgttgttattaagtatgtgccttacgtaggggacagcaagatagccatggatgagtacacttcagagatattcatgggtggaaagagcaccattgttttgcacaacacatgcgaggattccctcttagctgctcctattatcttggacttggtccttcttgctgagctcagcactagaatcgagtttaaagctgaaaatg

SEQ ID NO: 141156 - DNA, 279 bp, Glycine max
cgagcagaggcagcaagagggagtgatcgtggaactctcaaaggaacaaattcggcaactgagcagacgtgccaaatctagttcaaggaaaaccatttcctccgaagatgaaccattcaacttgagaagccgcaaccccatctattccaacaactttggaaagctctttgagatcacccctgagaaaaacccacagcttcgggacttggatatcttcctcagttctgtggatatcaacgaaggagctcttcttctaccacactccaatgcaaaggccat

SEQ ID NO: 141157 - DNA, 278 bp, Glycine max
attcgcagagcaactcaacacaacgaaccaaaacaacaatgtcgcagccgcagcctcagtcgcagccgcaacacgggcaagcggcgctggagcaggtgcagtgcttcggtcgcaagaagacggcggtggccgtgacctactgcaagcgcgggcgcgggcctcatcaagatcaacggctgccccatcgagctcgtcgagccggagatcctccgctttaaggccttcgagcccatcctcctgttgggaaagagccgcttcgccggcgtcgacatgcgcat

SEQ ID NO: 141158 - DNA, 133 bp, Glycine max
gccgtcaccactccaacacaggttctcttgagcgagatgaagtagttgtgccaaagcagaagtccagtatcatgtggtactctagataccttaacaatccaccaggcagagtcctgagtcttgccgtcaccct

SEQ ID NO: 141159 - DNA, 233 bp, Glycine max
gaaagagagagaagaagaaaagaagaacaaagatgcaatcctcaaaggagaagatgaaaaacatggcaagtgctgccaaggaacaagtcgacatctataaagccaaaatagacgagaaggcagagaaagcaacggcaagaacagaggaggagaggttgatagcccatgagcacgcagaggcagaggagtgggagagacaaggtggcgctggggtagggagaagggggtggtgg

SEQ ID NO: 141160 - DNA, 274 bp, Glycine max
tacaagtacttccttacaatcaaaaccaacaacaactaaggcaagttatcagaagcactacgatgatcagggtcgcaaggttgacgagtatggcaacgttgagaagcaaaccgacgaatacggcaaccctgttcatgctgctagtgtcacctttgtagccaccagaactgctgctggtggttacagtgatgacattaataagcaacatgataccaccaatgcctacggcgtagacactggtagacagcattctagtggtggctacgatggtgac

SEQ ID NO: 141161 - DNA, 132 bp, Glycine max
cggctcgagtaactagtcgaggtccgacagttacagacccggatactgaggaacaaggcgaagtattttatgttccaagggatgagaatttagggcacttgaagtctaaggatgctctttggattggaacag

SEQ ID NO: 141162 - DNA, 276 bp, Glycine max
  unsure (1)..(276): unsure at all n locations
caagagaccagagacaatcacatgatccctaacctaaacccctgataaattattgaaattgatgcatggcggaactgaacactcgggtggtgcgaagaccatgttttggccttccaaccggttgcactcaatccctctctgcctacatttatctcaaattcgcccaaattcccttccaattggacttctccgtcangtacgtctgtgctaatcagattccttactttaaggtgggtgactctgtggctgataataatgagaaggaggggatcattg

SEQ ID NO: 141163 - DNA, 276 bp, Glycine max
gtgccggcgacgcatcattcaaatttctggcctatcaactttcgatggtaggatagtggcctaccatggtggtgacgggtgacggagaattagggttcgattccggagagggagcctgagaaacggctaccacatccaaggaaggcagcaggcgcgcaaattacccaatcctgacacggggaggtagtgacaataaatgacaataccgggctcattgagtctggtaattggaatgagtacaatctaaatcccttaacgaggatccattggagggca

SEQ ID NO: 141164 - DNA, 225 bp, Glycine max
tcaaaaccaacaacaactatggcaagttatcaaaagcactacgatgatcagggtcgcaaggttgacgagtatggcaacgttgagaagcaaaccgacgaatacggcaaccctgttcatgctgctagtgtcacctatgtagccaccagaactgctgctggtggttacagtgatgacattaataagcaacatgataccaccaatgcctacggcgtagacactggtaca

SEQ ID NO: 141165 - DNA, 274 bp, Glycine max
tgggaaacaaaactacccttttgcttttgctctttgttctttgccatggagtggccacaacaacaatggccttccatgatgatgagggtggtgataaaaagtcaccaaaaagtttgtttttgatgagcaactccacgagggttttcaagactgatgcaggggaaatgcgtgtgctgaaaagccatggtggtaggatattttataggcacatgcacattggcttcatctctatggaaccaaagtccttgtttgtgcctcagtacctcgactccaa

SEQ ID NO: 141166 - DNA, 232 bp, Glycine max
caaagacgcatcttttgcttcactcgtcatcactacgcagatcgcagcaaaccagactatactccgacgatgcctccagtcgctcctcgatccggtgatgccatattcgccaacgtcgaacgcgtcaatgcggagctgtttactttgacgtatggcgcaattgtgcgtcaattgctcacggacctggaagaggctgaggaggttaacaagcagcttgatcagatgggttaca

SEQ ID NO: 141167 - DNA, 273 bp, Glycine max
ggaacagtatgtggagccaaatccagttgaggctggacgaaccagtgcaattaaggagagtgctataacaataggagaggcattggaggccacggcacagacggtgggtcacaagccggtggatcagagtgatgcctcagcgattcaggcggcggaggttagatcaacgggaagtaacgttataacgcctggaggacttggggctatggctcaatcagctgctgcttataatgctgactgcaagcatgaccaggacaaggtcaagcttgccga

SEQ ID NO: 141168 - DNA, 105 bp, Glycine max
agacagacccaggagataattgatcttggacaatgcagggaggatagacagctggagagtcgatcaaggaaacagctgcaaacattggtgcttctgccagggctg

SEQ ID NO: 141169 - DNA, 235 bp, Glycine max
tatgcaacctcctttgcaacactttgatatggctgaacctgccttccttcaaattgctgaatatagagctggaattgtgcctgtggccttcaggagggttccttgtgggaaaaagggtagaataaggttcacaatcaatggccagtcttacttcaacctagtttggatcaccaattgtggctggagctgtgtgattggaattcagtggccgattaaaggggtcaatagactgggg

SEQ ID NO: 141170 - DNA, 277 bp, Glycine max
caaaacctaagcttagaattagaaacaaagaaaagaagaaatgaaagaattgatcgttgaaaatgcatggaggaaagaaagcgtgagagtccattaaggaaacagctacaaacattggtgcttctgccaaggctggcatggagaagaccaaggccactggtccaatagaaggcagaaagaatgacagcacgtgatccggtgcaaaaggtagtgggcaccccaaaagaggagtggcagagattaagcaggcggagctggacaagcatgcggcgcgtca

SEQ ID NO: 141171 - DNA, 266 bp, Glycine max
ggaagatccagtgcatgctgttaagaaatcatgtaaagccacggatgatgagattgtagaaaacatagctgattcacgtggaggatcaacagctgttgcagcaatactagttaatggagtaaagctactggtagccaacattggtgattctcgatcagtatcgtgcaaaaatggtcgagcaaaaccacttactgtggatcatgaaccagagaaggaaaaagatcttattgagagtagaggaggttttgtgtctaggaggccaggga

SEQ ID NO: 141172 - DNA, 269 bp, Glycine max
cttggttgcagcttcagcagcagcggcaagcaactccatccgcaatgggaatcgatttgaaggcaggaggtaagtccaagaagaccaaacgtacagcccccaaatccaatgatatttacctcaagctcctcgtcaagctgtaccgttttcttgttcggaggactggtagtaacttcaatgccgtcatcctcaaacgccttttcatgagcaaggtcaacaagcccccgctatccctctctagattgattcgttacaccaggggaagggag

SEQ ID NO: 141173 - DNA, 229 bp, Glycine max
agcaaagcaatggctacttcaaagttgaaaacccagaatgtggttgtatctctctccctaaccttaaccttggtactggtgctactgaccagcaaggcaaactcagcggaaactgtttctttcagctggaacaagttcgtgccgaagcaaccaaacatgatcctccaaggagacgctattgtgacctcctcgggaaagttacagctcaataaggttgacgaaaacggca

SEQ ID NO: 141174 - DNA, 264 bp, Glycine max
agaagggattctgtgtactgcagtcggattcactccgcagctgcagcactcaaaaccctagagaggacgagagagcgtgcaactttcggcaaccacagaccatgacattcgagcgcagggatggaggtcgcaacaaacacggccgcggccatgtcaaattcatccgatgctccaactgcggaaaatgctgccccaaggacaaggccatcaagaggtttttggttaggaacattgttgaacaggctgcagtcagagatttgcagg

SEQ ID NO: 141175 - DNA, 263 bp, Glycine max
atccatgtcaaacgcattgctaacgatcctgctgaacagactggggaatctgtgcttctcattaagggtcctcagggaagaataaatagggctatttggggacctctcaacagaaccattattagtgccggtgaagatgctgttattcgtatttgggattctgagacgggaaaactgcttaaagagtcagacaaggaatctggccataaaaagaccgtgacatcacttgctaagtctgcggatggttcgcatttccttactgg

SEQ ID NO: 141176 - DNA, 265 bp, Glycine max
gtggttgccgagcacactgtcagagcccttcagagaaccgtgcctgccgcagttcctgctgtcgttttcttgtctggtggccagagtgaggaggaggcatctgtcaacctcaacgccattaaccaggtcaatgggaagaagccatggtcactctctttctcctttggaagggcacttcaacagagcacccttaaggcatggggcggaaaagaagagaatgtgaagaaggctcaggaagcccttttggtaagagccaaggctaact

SEQ ID NO: 141177 - DNA, 229 bp, Glycine max
  unsure (1)..(229): unsure at all n locations
gctcgagctcgagtgctcggacaaacccaacccgtcggagcagcttccgtcatgcaatctgccgccaccatgaatgaacaggctgtccttgtctgtcaccgggacgtcacctacgttaccngcgaccgtggcgtcacagtcacagagactatagtccctggaagacgcattataaccgaggcatttggtggctaggtgctggatcagtatgttgatgcaactccggttg

SEQ ID NO: 141178 - DNA, 255 bp, Glycine max
gcatcgtcaggcaactccatgcgtgaatgggaatcggtgtgaaggcatgaggtaagtccaagaagaccaaacgtacagcccccaaatccaatgatatttacctcaagctcctcgtcaagctgtaccgttttcttgttcggaggactggtagtaacttcaatgccgtcatcctcaaacgccttttcatgagcaaggtcaacaagcccccgctagccctctgcgagatggagtcggttacccctgggggggggtggg

SEQ ID NO: 141179 - DNA, 177 bp, Glycine max
cacacacaactacaataaagaacttccttataaccaaaaccaacaacaactatggcaagttatcagaagcactacgatgatcagggtcgcaaggtcgacgagtatggcaatgttgagaggcaaactgacgaatatggcaacccggttcatgccactagtgtcagttatgtagccact

SEQ ID NO: 141180 - DNA, 209 bp, Glycine max
gacatagcaaaggctacaaagcaggaatcacaagaggtgaaagaggaattaggtggacaacaccgggatgccgagctttgataattgagatgtttgagtcacttggaagctgttaattaggccagagtagtggtctaaatcgggcagaaatagatgggtgtggagatgtgatatggcagtatctggctgtgggtgatgaaggggttggg

SEQ ID NO: 141181 - DNA, 260 bp, Glycine max
caaagaaggcgtcttcataaacgcctttcttctccgtttccgtttcctcgttcaaattcgctttttgatctgcgaaaatgagagagtgcatctcgatccacattggtcaggctggtatccaggtcggaaatgcttgctgggagctctactgcctcgagcacggcatcgggcccgatgggcaaatgccaagtgacaagacagttggcggtggtgatgatgctttcaatactttcttcagcgagactggtgctggaaacacg

SEQ ID NO: 141182 - DNA, 261 bp, Glycine max
atgtccaccaaccccatcacccaacaaaccggtttgggtgaactaggccaagatgtgcttgcaatccacgccactcaaggctccacccaacaacttggtccattggtcacagtccctcagttcctcttttcttgtgcaccttccttccttcttcaaaagggtctccctagaaacattcaaggagtggctgggttaggccatgcaccaatttctcttccaaaccaacttgcctcccactttggcctacaacaccaattcacc

SEQ ID NO: 141183 - DNA, 215 bp, Glycine max
ctcaaagcaacacaagaacactctcttgaacattcatggatccagtgagcgtgtggggtaacacgcccttggcgacggtggatcccgagatccatgacctcatcgagaaggagaagcaccgccaatgccgcggcatcgagctcatcgcttccgagaactgcacctccttcgcagtcatcgaggccctcgggagcgccgtcaggagcaaatacgcc

SEQ ID NO: 141184 - DNA, 230 bp, Glycine max
tcattgcccttgttctttcaaagttaccaaacacaagtacacaacacaacagcaacatatggcgtctgaacaattggctcgcagagagaacaccaccaccgagaaggagattcacgttgagaaacacagggttcccaagatggccacccacttcgagcaccttgcggagcaagctaaagaatctgacatcaccgctgggaaggatactccgcagggtagcatagaagcct

SEQ ID NO: 141185 - DNA, 262 bp, Glycine max
actctctccattcgtgctttcagctccggcaacctctcttccggcgccgccgctatctcggccgcgcaccagatcttcaatttgattacttgggtcaacgatttctgtcattctcaatcatggcaactagacttcagtttgaaaataattgtgaagttggagtcttctctaaacttaccaatgcctactgtttggttgccattggtggtactgagagcttctacagtgtattggaagccgagttagcaggtgttatccctgt

SEQ ID NO: 141186 - DNA, 258 bp, Glycine max
caagaagcatatatatcaaaatggctgcagagatggagagggagtcattgataactgaagctcctaatgcaccagttactgcacagagaagggtcagaaatgacttagaaaattctctaccaaaaccatacttgccaagagcattgaaagctcctgatacgggtcacccaaatggaacagcaggccacaggcaccacaacttatctgttcttcagcagcattgtgctttttttgatcaagatgacaatggaatcattt

SEQ ID NO: 141187 - DNA, 251 bp, Glycine max
caaattctcaaatccaaatccaattccaattccaattcccaatcttccgcaaccctaattcctcatcttgaaaatgagagaaatcttgcacatccagggagggcaatgcgggaaccagatcggagcgaagttctgggaggtgatatgcgacgagcacggcatcgaccacaccggaaagtacagtggcgactctgaactccaattggaacgcatcaatgtttattacaacgaagcgagtggcggaaggtacg

SEQ ID NO: 141188 - DNA, 253 bp, Glycine max
aagagcgcggcataacctaaacctatctttcttctctctctgtgtgtgcgcatcaacggcaaccagaagcagccatggccactgcaaggactgtgaaggatgtttcacctcatgagttcgttaaggcgtactcctctcacctcaagcgatccggcaagatggagctgccagagctggactgatattgtgaaaactgcaagatttaaggagttggctccttatgatcctgactggtactatgtcagagctgctt

SEQ ID NO: 141189 - DNA, 240 bp, Glycine max
cttggtttggtttcttttttcttccctttttttataaattttttagaggctaacatggaggaggttgagcaagctaatagagtagctgttgaaagctgccatagggttctgagtttgttgtcccaaccaagggatcaggttcagcataggaatttaatggtggaaaccggtgaaactgtggtgaggttcaagaaggttgtctccatgcttcacaatggtttgggtcatgcaagagtgggg

SEQ ID NO: 141190 - DNA, 230 bp, Glycine max
ccctgacaagattccttttgttcctatatctggttttgagggagacaacatgattgagaggtccacaaaccttgactggtacaagggtcctactctgctagatgcacttgaccagatctctgagcccaagaggccttctgacaagcccctcaggctaccccttcaggatgtgtacaagattggaggatttggagctgcgcgtgtgggaggggttgatacgggtgtcggga

SEQ ID NO: 141191 - DNA, 249 bp, Glycine max
cttacatctcacatctcacatcctcttagtctgaaaatggatcacgccccagaagagcttcaattccttaccatccccgacatcctacgagcctcaatctcaatcccaaagcgttctccgaaaacattttacctcattaccctcagcctcatcttccccctctccttcgcgattctagctcattccctcttcacgcacttgcttatttcccagctgcagtcccctttcaacgacccttcccaaacctcc

SEQ ID NO: 141192 - DNA, 242 bp, Glycine max
cccaactaacaataattccttcacttgcagaacttagttctctgttgcatcatcatcatcttcattagtgttagccctaaacttcaccttcaaccatgaccacagtgccaccacacagtgtccaagtgcacacaacaacacacccgtacgatgccggcgtcgtcccgccggctcgttttgaggcgccgcgttacgaagccggcatcaaggcgccctcttccatttaccattccgagagaggt

SEQ ID NO: 141193 - DNA, 255 bp, Glycine max
cgggaatagactccccaaattcactagtgaagaagttaaaatcgtgaagggttcgattgattttgttggaatcaaccagtatactacgttcaccatttatgatcctcatcaatcaaaacctaaagtcccaggctatcaaatggactggaatgcaggatttgcttatgcaaagaatggagtgcctattggtcctagagctaattcttattggctttacaatgtaccatggggcatgtacaaatcattgatatacat

SEQ ID NO: 141194 - DNA, 244 bp, Glycine max
atgaaggagaaaattatatatatggcatgcttgcttttcctttgttggagcttggacggatggaggaagctgaggaagctgccaaaaggggatttgaaatcaataagcaagactgctggtcacagcatgctttatgccatgtccttcagtataagtgctgttttagagaagctgttaagttcatggaagaatgttcatcatcatggggttcttcttcatcttttatgttgacacacaattggtg

SEQ ID NO: 141195 - DNA, 247 bp, Glycine max
gtatccgctgctgtatcgaagacagctgctgctccaattgaacgagtcaaattgcttatccaaaatcaggatgaaatgataaaaagtggtcggctatctgagccatacaagggaattggtgattgttttgctcgaacaatgaaggatgagggtgtgattgctctttggagaggaaatactgctaatgttatcagatatttccctactcaggctctgaactttgcctttaaggattactttaagaggc

SEQ ID NO: 141196 - DNA, 246 bp, Glycine max
ggaacactgttgatctcaaagatcagggaagaataccctgatcgaatgatgctcacattctctgtgttcccatcccctaaggtttctgacactgttgttgagccttacaatgcaaccctatcagtgcaccagctcgttgagaatgcagatgaatgcatggttttggataacgaagctctctatgacatctgcttccgcacgcttaagctcattactccaagctttggggatctgaaccatctaatt

SEQ ID NO: 141197 - DNA, 197 bp, Glycine max
attttctacggttttattcactttccgaccgcttctgcagatgttgagtaccgttgctttgtcggtaggctcgcgtggctgactgacgaccatggcctcgagagagccttctctcagtacggcgaaatcgttgaaacgaagattatcaacgatcgtgagactggcagatccaggggttttggattggtgaccttcgc

SEQ ID NO: 141198 - DNA, 247 bp, Glycine max
gttgagatccaaaccgacgaatacggcaaccctgttcatgctgctagtctcacctatgtagccaccagaactgctgctggtggttacagtgatgacattaatacgcaacattataccaccaatgcctacggcgtagacactggtagacagcattctagtggtggctacgatggtgacactaataaacatcggtggcccttactatggaaccaacaccgcagacaccggtactggtcccagaagtgga

SEQ ID NO: 141199 - DNA, 225 bp, Glycine max
tatagcccaagccctatacaaccaaaccctaacacacacccatttgaactcagtttccatggctagcctcaaggttgcatttttcgctgcagtgctctgcatggttgtggtgagtgcacccatggcacatgcagctatcacgtgcgggcaggtgacgaatagcctgatcaatttcatcggttacctccagaacggaggaacgccgccgtcgggatgctgcaacgg

SEQ ID NO: 141200 - DNA, 248 bp, Glycine max
  unsure (1)..(248): unsure at all n locations
caaganatngagaaggttactgattttaagaaccacagtcttcccctggcaaggatcaagaagattatnaaggctgacgaggatgttaggatgatatcagctgangcaccagtcattttggcnagggcatgtganatgttcntattagagtgaaccctggcgctcttggaatcncactggngngatnannaggcgaacanttcagaanaatgntatttgctgntgctatcacngggtctgnnatcttt

SEQ ID NO: 141201 - DNA, 116 bp, Glycine max
  unsure (1)..(116): unsure at all n locations
gcaagctcctcctagagttttaaaaatgtcagcatcctcctccatggctctctcttccccatcctttgctagggtggctttgacgctgngcccatcagcccccgaagtcgggagtt

SEQ ID NO: 141202 - DNA, 243 bp, Glycine max
gcgatgcggatgaggcgccactcgatgtttccatttgcctgcatgcctttggtattgtggggtgtggttcgtttagtggtgtcaagtcttgcgaacgtgagggtgcatgagtggtaatcgggatgtttttgttgcacggctccatgcttgcgcatgcaacgtgtgacatgcatccttttcattgtcaccttagccttcgtggcttaggtgctgacgattggttcctgtgttgcctacctacca

SEQ ID NO: 141203 - DNA, 230 bp, Glycine max
ccaaattccaattcccaattcccaattcgaaacccttattccttacaaagaaccaaattgagtgatcgtgatggcaccaaaggcagagaagaagccagcggagaagaagcccgcggaggagaagaagtcgacggtgggagacaaggctccggcggagaagaagccaaaggccggaaagaagcttccgaaggagggaggcgccggcggagaagggaagattaagaagagag

SEQ ID NO: 141204 - DNA, 234 bp, Glycine max
agaacacctagagcccaacttagaagggctcactgtagatgaggcaattcaatacaagagattgcgcctactatatcatgatcgcccagtcatgccatatttcaggcgaatacatgcgacctccacaatggcttatgctagcagacccattctgttcctgaaaaatgacgagtctttatgaccacttgccatagtgctgagtgggtcacatcctcagggtgatcaatctggtgc

SEQ ID NO: 141205 - DNA, 246 bp, Glycine max
gggccatccaagttggttagtaggctctcagagaaggaaaatgttgatgggccttatagtttggtcttggagcctaaagggttagccttgtactacaagagcaagaattctcctaagccaattctctattggttttcttctgattggttcaccattcaacgagggtccttggaaaatgtcaccttcacatctgatccagaaacttttgaacttggatttgattaccatgtggccaattcttcatct

SEQ ID NO: 141206 - DNA, 233 bp, Glycine max
agaggaggaaagattgggttgtttggtggtgctggtgtaggaaaaactgtgcttattatggaacttattaacaatgttgcaaaagctcatggtggtttctctgtgtttgctggtgttggagaacgaacccgagagggtaatgacttgtacagagaaatgattgagagtggtgtcattaagcttgatgataagcagagtgaaagcaagtgtgctctggtgtatggtcaaatgaa

SEQ ID NO: 141207 - DNA, 240 bp, Glycine max
  unsure (1)..(240): unsure at all n locations
gtacttcatcatcttccacacaacatacgatatggncaccctaattcctcatgttnaaaatgtgcnaaattggggcacgtnanngacngtcatgcggnaaccagatcggagcgaagttctgggtggtgatatgcgacgagcacggcatcgaccacaccggaaagtacagtggcgactctgaactccaattggaacgcatcagtgtttattacaacgaagcgagtggcggaaggtacgttc

SEQ ID NO: 141208 - DNA, 237 bp, Glycine max
gttcaatatcctagtataccttaataaataatttaagatactatgatgagagcacggttcccattactgttgctgggacttgttttcctggcttcagtttctgtctcatttggcattgcttactgggaaaaagagaaccccaaacacaacaagtgtctccagagttgcaatagcgagatagactcgtacaggaaccaagcatgccacgctcgttgcaacctccttaaggtggagaaa

SEQ ID NO: 141209 - DNA, 236 bp, Glycine max
gacatagcaaaggctgcaaagcaaaaatcacaagaggtgaaagagaaattaggtggacaacaccgggatgccgagctttgagaattgagatgtttgaatcactttgaaccttttaattatgccacaatagttgtctaaatctgccagaaataatgttgtgtgtatatattatatggcagtatctgtctttgtgtgatcaaggggtttggtctgatataatatattagcaactacgt

SEQ ID NO: 141210 - DNA, 176 bp, Glycine max
gctctatactacacagtacacacactagaagaataatggcttccatcctccactactttttagccctctctctttcttgctctattcttttcttcttatccgactcagtcacccctacaaaaccaataaaccttgttgttctacccgttcaaaatgatggttccacagggctccat

SEQ ID NO: 141211 - DNA, 232 bp, Glycine max
gcgataaacagcgcgggcggcggcgaggaatcggcacgcgccgtggagcgagcgttgaaccaggctctgaagaagctaccctgccagtcccctccgccggacgaggtgccggcgagcaccaacctcgtgagggccatcaggagagcacaggcggcgcaaaaatcacgtggcgacacgcatttggccgttgatcagttgatcctcggaatcctcgaagactcccaaatcggag

SEQ ID NO: 141212 - DNA, 231 bp, Glycine max
  unsure (1)..(231): unsure at all n locations
gaaacattctaaaacaaaggacccagttttacatttttttttgttcctgagttccaatggctcttcaggctgcttccgtggtttctgcttctttttctattgctaaagagggaaagtctggtgtatctctcagggacaccacaatgtttggtgtttcattgtcggatactctcaaatcncgacttcagctctccctcatcgacttgcaaaagggaattccaacaaaaattt

SEQ ID NO: 141213 - DNA, 227 bp, Glycine max
ccgccttcttttatctctctctccactaccatgtgagtcacttcttctctctttcgcctttccccctcactcactcctctttttactttaacgtaaataaattctctgtgttcagatcgaaacaaagtcgttttgagttccgccgaaggcaccgtaggttgcagcagctatggatttggcatccaatctcggtggcaagattgacaaagccgaagttctctctgccg

SEQ ID NO: 141214 - DNA, 228 bp, Glycine max
gttgtgagcataataaattgagaagcaaaagcgaaagggtctgtgtcttcactcattcttctattctattccatcatcaatggagaacaccgagggatccggatctgcgacgaacggggtgctggctccgccgcgcaaggtggcattgataaccggaattaccggacaagacggttcgtacctgacggaattcctcctggacaaggggtacgaggtgcacggcctgat

SEQ ID NO: 141215 - DNA, 230 bp, Glycine max
gacgcaatgtgatttctgcccagtgctctgaatgtcaaagtgaagaaattcaaccaagcgcgggtaaacggcgggagtaactatgactctcttaaggtagccaaatgcctcgtcatctaattagtgacgcgcatgaatggattaacgagattcccactgtccctgtctactatccagcgaaaccacagccaagggaacgggcttggcggaatcagcggggaaagaagacc

SEQ ID NO: 141216 - DNA, 233 bp, Glycine max
cccttcacaagattctcacaaacaactcttgagaaagaaagaatggctgccaacacattgatgagttctgccatctcagccttcccatctctcctttcctcctcaaaatccagatttgccgcagcagttcctctttccagctttgttgtcaccaatgcctcttcttctcgcttttccatgagtgctgactggatgcctggccagcctagacccccctaccttgatggttcagc

SEQ ID NO: 141217 - DNA, 224 bp, Glycine max
taggaatataagaactaagatggattggatcggagcgtaccgcggaggccagagaagcagggactggtgcgacccttcatcaccattcactgatttgtgggaccctcgtcgtgtcggtgacgctgatgatatcacctcctctctcgcccatgctcacgttgactggcgtgagactgataaagctcatatcttccgtgctgatcttccaggggtgaagaaagagg

SEQ ID NO: 141218 - DNA, 90 bp, Glycine max
gaagattatcgcacgtcgcgtggtgtccggtgcgcccccggcggccacttaaaaatccggaggaccgagtgcctcacacgcccggtcgta

SEQ ID NO: 141219 - DNA, 226 bp, Glycine max
cacaactacaagaaagaacttccttataaccaaaaccaacaacaactatggcaagttatcagaagcactacgatgatcagggtcgcaaggtcgacgagtatggcaatgttgagaggcaaactgacgaatatggcaacccggttcatgccactagtgtcacttatgtagccactaaaagtgttggtggctacaatgatgacactaataagcaacatgataccaccgg

SEQ ID NO: 141220 - DNA, 220 bp, Glycine max
agcgttgccattctcatcctcttctttctctctctaccattgccatggatccctacaagcaccggccatccagcgccttcaattctcccttctggactacaaattctggtgctcctatttggaacaacaactcctctttaaccgttggagctagaggtccaattctgctggaggattatcatcttgtggagaagcttgcaaattttgatagggaacgtat

SEQ ID NO: 141221 - DNA, 225 bp, Glycine max
gcatcttctcagttgtgaagatgtacacatcaaggaagaaaatccacaaggataaggatgctgaaccaactgagtttgaagagtcagttggacaggcattgtttgatctggaaaataccaaccaggagcttaaaagtgatctgaaggatttatacataaactcagctgtgcaagttgatgtttctgggaaccgcaaggctgttgttattcatgtcccttacagat

SEQ ID NO: 141222 - DNA, 222 bp, Glycine max
agaaaacctaagcttagaattagaaacaaagaaaatctccgaggaaagaattgatcgttgaaaatgcagggaggaaagaaagcgggagagtccattaaggaaacagctacaaacattggtgcttctgccaaggctggcatggagaagaccaaggccactgtccaagagaaggcagaaagaatgacagcacgtgatccggtgcaaaaggagttggcaacccaa

SEQ ID NO: 141223 - DNA, 221 bp, Glycine max
ctttgttcactcttcttctcttgcggctagggttttagcgcattcttctagatttaaggaagatgggtaaggaaaaggttcacatcagtattgtggtcattggccatgtcgactctgggaaatccactaccactggtcacctgatttacaagcttggaggcattgacaagcgtgttattgagaggtttgagaaggaagctgctgagatgaacaagaggtct

SEQ ID NO: 141224 - DNA, 220 bp, Glycine max
gggtgcacgaaatgttacggtagatattttaagattgagttatcgattagagatagagatatcttggaaaggagggcaggtgaagccggctattcaggaatcatggctagggttttggctcagtctattaatgtccctggtctattggctgagcataggcatggtcagcaaaaggaatcaggaaaattaaaaagatcgaccaaaatgatgagtgctttac

SEQ ID NO: 141225 - DNA, 219 bp, Glycine max
gtggcaggtgaaatctggtactttgtttgacaatgtcttaattactgatgatcctgagtatgctaagcagctggttgaagaaacatggggcaagcacaaggatgctgagaaggcagcatttgaggaggccgagaagaagagggaagaggaggaatcaaaggatgacccagttgactctgatgctgatgaggaagaggaagatgctgatgaagctggcaa

SEQ ID NO: 141226 - DNA, 224 bp, Glycine max
caaaatgactcaagcccagattcaaccagttaaacttggaacccaaggctttgaggtttcaaaattgggattcggatgtatgggccttactggagcgtacaatgaccctctccaagagcaggatggcatatctgttatcaagtatgcgttcagtgagggaatcacattttttgatactgcggatgtttatggagccaatgctaatgaacttttggttggaaagg

SEQ ID NO: 141227 - DNA, 232 bp, Glycine max
agaaaacctaagcttagaattagaaacaaagaaaagaagaaaggaaagaattgatcgttgaaaatgcagggaggaaagaaagcgggagagtccattaaggaaacagctacaaacattggtgcttctgccaaggctggcatggagaagaccaaggccactgtccaagagaaggcagaaagaatgacagcacgtgatccggtgcaaaaggagttggcaacccaaaagaaagagg

SEQ ID NO: 141228 - DNA, 220 bp, Glycine max
gcgtcaaactgttgctgtgggagtcatcaagaacgttgagaagaaggatcctaccggagccaaggtcaccaaggctgcctagaagaagaagtgaatcgtgcgggctggttcatcaggggatgttggttacaataaatgttggtttcttttctgtactcttgtgtcttcttttctaggtagcttgtttttcggacaaagtttgaagtctccaccatcatct

SEQ ID NO: 141229 - DNA, 215 bp, Glycine max
cacaagttgaacttcgtgacgagcatgggaacccagttgaactaacagatgcatatgggaatccggtttggttaacggacgagaaaggcaacccggtgcacctcacggctgtggcaaccaatgcacacaaatctatgcttcagaatgacaccccacaagagcttcctcactccaagagttcaagctcgtctgaggatgaagggcatggagagagg

SEQ ID NO: 141230 - DNA, 220 bp, Glycine max
ttgaatttcaatttccctaggggcttaatatctcccctcacttgtgcctagccttatgtcatagtattatcattcattctcatctttctctcttctctctccacccaaaccctaacttacgaccctgttcccctctcgtatccgtcatgaaaggaggaaagtccaagaccgaatctaagagagccgatcccaaacttgctgtgaataagaagggagccgc

SEQ ID NO: 141231 - DNA, 226 bp, Glycine max
attcaaaccttgctctatactacacagtacacacactagaagaataatggcttccatcctccactactttttagccctctctctttcttgctcttttcttttcttcttatccgactcagtcacccctacaaaaccaataaaccttgttgttctacccgttcaaaatgatggttccacagggctccattggtccaacctccaaaaaagaacccctctaatgcaagta

SEQ ID NO: 141232 - DNA, 226 bp, Glycine max
ggaggaggcattgaggacatacctctttaccttctcttcatcttatgaatccttgagcctggatcagctcacaaaattttttgatctccctgtttcttgcactcatagcattgtcagtaggatgatgatcaatgaggagcttcatgcaagctgggaccagccaactgggtgcattcttttccaagatgttgaacactctaggctgcaggcttggcattccagttga

SEQ ID NO: 141233 - DNA, 220 bp, Glycine max
caataattccttcacttgcagaacttagttctctgttgcatcatcatcatcttcattagtgttagccctaaacttcaccttcaaccatgaccacagtgccaccacacagtgtccaagtgcacacaacaacacacctctacgaagccggcgtcgtcccgccggctcgttttgaggcgccgcgttacgaagccggcatcaaggcgccctcttccatttacca

SEQ ID NO: 141234 - DNA, 216 bp, Glycine max
gagaagaagaaaagaagaacaaagatgcaatcctcaaaggagaagatgaaaaacatggcaagttgtgccaaggaacaagtcgacatctataaagccaaaatagacgagaaggcagagaaagcaacggcaagaacagaagaggagagggtgatagcccatgagcacgcaaaggcaaaggaagctggagcaaagatggagctgcatgaagctaaagca

SEQ ID NO: 141235 - DNA, 215 bp, Glycine max
ctatcgatagtgataagagagataccaacaagaaaagaaaaaaagaagagttgagattccctttgatgaaaagatggcatcccataggctaagctatgaagctggtcaaactaagggccgaactgaggaaaagacgaaccagacgatgggcaatattggagagaaggctcaagctgcaaaggagaagacccaggaaatggcccaagctgcaaagg

SEQ ID NO: 141236 - DNA, 203 bp, Glycine max
tgtggacatggagatgaaaattgtcgtgctactactctagagagtgcagtgtgcttcctagctctttaccttattgctcttggcaccggtggcattaagccttgtgtctcatcctatggagcagatcagtttgatgacactgactcggctgagaaggaacgcaagagttctttcttcaattggttctatttttcaatcaacat

SEQ ID NO: 141237 - DNA, 226 bp, Glycine max
gccatgtccatgcatcgctacctgaggaagattattgggaagctgtttggccaaacactcccattcccactgcactgcgagagcttctaaagcctctccctgcaggtgttgaaatcgatgaactccctaagcaaattgatgatacacagtacccaaaaacattcttctataaagaagaccttcatccaggcaaaacaatgaaagtacaattcaccaagcgtcccta

SEQ ID NO: 141238 - DNA, 227 bp, Glycine max
cgcaagcacggggcaacaccagcaggaggaagaggaagaaggtggcagcgtgctcagtggcttcagcaaacacttcttggcacaatccttcaacaccaacgaggacatagctgagaaacttcagtctccagacgacgaaaggaagcagatcgtgacagtggaaggaggtctcagcgttatcagccccaagtggcaagaacaagaagactaagatgaagatgaagacg

SEQ ID NO: 141239 - DNA, 224 bp, Glycine max
atctcggctcttgcatcgatgaagaacgtagcgaaatgcgatacttggtgtgaattgcagaatcccgtgaaccatcgagtctttgaacgcaagttgcgcccgaagccattaggccgagggcacgcctgcctgggtgtcacacatcgtttccccaacgcaaacatgtaacaatgttgctgcgcggggtgtatgctgacctcccgcgagcacccgcctcgtggttg

SEQ ID NO: 141240 - DNA, 229 bp, Glycine max
  unsure (1)..(229): unsure at all n locations
anaagaaaggagccaanccgtgctgtaaatgggtctgctgtccctgtgatanaagattttcaggaagatgaaatgaaagaggctgataagttgataaaggaagaggccctgtatctttgtgcagcaatgggtcatgaagatgaaccncttgatgaatttattgaagcacacagaacctgtctcaatgatcttatgtactttncctaccccgtaatgcatatggtctctc

SEQ ID NO: 141241 - DNA, 256 bp, Glycine max
cacgcgtacgcaagcgcctgatcgagcgcgattacgatccatcccacaagttatgggctcccttgtgttgcttcttttctccctcttaggtctctcttctagttccagcagatgatatcatcgttccatattggaccttgacctaaccaagtttaccacacagaaacaggtgtcttcagcgttgcaactgtggaagagtgagcatggacgtgtctaccataaccacgaagaagaggcaaagagacttgagattttc

SEQ ID NO: 141242 - DNA, 226 bp, Glycine max
gggggtacacccatctctcggcagatgagggaacttgattatggggttgatattgctgtgggaacacctggtcggattattgaccttctcaacagaggtgctctaaatttgaaggatgttcagtttgttgttcttgatgaagctgatcagatgcttcaggtgggctttcaggaagacgtggagaagatcttggagaggttgcccccaaaacgtcagactcttatgt

SEQ ID NO: 141243 - DNA, 223 bp, Glycine max
caattccttcacttgcagcactgttgcatcatcatcttcattgcaaaaccctaaacttcaccttcaaccatgaccacacaagtaccaccacacagtgtccaagtccacacaacaacacacacatacgaagctggcgtcgtcccacccggagcccgtttcgaaccgccgcgttatgaagccggcgtcaaactgccctccatttaccattccgagaggggtccaa

SEQ ID NO: 141244 - DNA, 224 bp, Glycine max
cacaaaattgaactgtaattgtagtagtagacagtagcaccatgagccaggaactgctcaagaaacctcaaggggagcaggaccccatcaaatacggcgacgttttcaaagtctccgacgaactcgctttcaaacccatcgcgccaagagacgcagctctcatgcaagccacggagaaccaagcattgtgccaaactcaaaaaggaggtcccgcctcggtgatg

SEQ ID NO: 141245 - DNA, 218 bp, Glycine max
aaagaaaggggtggtggctgcttcgaaagcttaataatttgtttatttccagaacatcatagttttcgcagcagcaaactaacaaattactcatatcatataataagatggcccgttctctctcgcaagccaaacgtattggtgtccttgttgctcaatctatctccctaattcccgttcatcggcgaggttacgcagtggcatccgatgtatcggta

SEQ ID NO: 141246 - DNA, 217 bp, Glycine max
gatgatttgggtgttccacaagattacaggcagatagatggttttggagttaacacatatacgctgatcaacaaggctgggaaagcagtgtatgtgaaatttcactggaagaccactagtggtataaagtgtctattggaggaagaggccattaaggtgggaggagccaaccagagccatgccactcaagaccgtcatgattcaattgctgctggta

SEQ ID NO: 141247 - DNA, 222 bp, Glycine max
gttaaaaaataatagatactcagcacaaaatattccaacctcgactacgtagttgctaatatattatatcagaccaaaccccttgatcacacaaagacagatactgccatataatatatacacacaacattatttcaggcagatttagacaactattgtggcataattaaaaggttcaaagtgattcaaacatctcaattctcaaagctcggcatcccggtg

SEQ ID NO: 141248 - DNA, 222 bp, Glycine max
gaaaacgttcctaacccaccaaccccttccttcgtagagccgtgtattgtaatccgaacctgcccggagcgagtctcccatagaggcaagtgaagttggtgagccgtatgatgggcaactatctcctgcggttcggagaggactcagctgttagttagtaccccctttcggggtggacctttcactctattttattatatacgcttagtgaaaagaatgttt

SEQ ID NO: 141249 - DNA, 224 bp, Glycine max
gttatgagcaagatggcagaaatgataaacagtctttgtggtggtgatgaaaaattgatgcgtgaaaggacacacctgctgttggcttgttgttcaaggatggcaatttgtaagaaagatgtttggagagttgaatgtggaatcccttctggatttccgctcacagttatttgcaatagcatttttaatgagatgctcattagatatagctatgaaaaattact

SEQ ID NO: 141250 - DNA, 217 bp, Glycine max
gtccaaacttattggttcacctcctggatatgttggttacactgaaggtggtcaattgaccgaggcagttcggcgtcgtccttacactgttgtattatttgatgagattgagaaagcccaatcagatgtgttcaacatgatgcttcagatcctggaagatggaagactaacagacagtaagggcagaacggtggatttcaagaatacacttcttata

SEQ ID NO: 141251 - DNA, 221 bp, Glycine max
taaaattcttccaccaagttatgggttcccttgtgttgcttcttttctccctcttaggtctctcttctagttccagcatatcaactcatcgttccatattggaccttgacctaaccaagtttaccacacagaaacaggtgtcttcactgttccaactatggaagagtgagcatggacgtgtctaccataaccacgaagaagaggcaaagagacttgagatt

SEQ ID NO: 141252 - DNA, 187 bp, Glycine max; identical to SEQ ID NO: 123712

SEQ ID NO: 141253 - DNA, 216 bp, Glycine max
tcacaatgatagtaagagccgacatcgaaggatcaaaaagcaacgtcgctatgaacgcttggctgccacaagccagtactccctgtggtaacttttctgacacctctagcttcaaattccgaaggactaaaggatcgataggccacgctttcacggttcgtattcgtactggaaatcagaatcaaacgatcttttacccttttgttccacacaaca

SEQ ID NO: 141254 - DNA, 216 bp, Glycine max
cttttctcagctgctgttcctgcgcgtgaacaagcctcagccaaagccatggttaagcataacaatgttatccccaacggacacttccgtaagcactggcagaactatgtgaagatctggttcaatcagccagcacggaagacaagaagacggttggctcgtcagaagaaagctgtgaagattttccccagacctacagctggacctcttagaccc

SEQ ID NO: 141255 - DNA, 217 bp, Glycine max
attcaagagttgaaggaaatggctgaagcacaactacgagaccagcatggcaaccctgtcccactcaccgatcaatacggtaatccggttatcttaactgacgagcgcggtaaccccgtccaactcactggtgtcgctaccaccgctaccggcacagcaggttctgggtttgggtcctatggtaccggtgcttacggtggtggtgcaagtgcaacca

SEQ ID NO: 141256 - DNA, 220 bp, Glycine max
aaccaaccctgacactccttcttctccgcttcctcttcgatcatcgcttcagaatgccgccgaagttcgacccctcccagatcgtcgacgtcttcgtacgcgtcaccggcggtgaggtcggcgcggcgagttccctcgccccgaagatcggtcccctcggtctctcccccaagaagatcggagaagatatcgccaaggaaaccgccaaggactggaaggg

SEQ ID NO: 141257 - DNA, 190 bp, Glycine max
ttcaaaccttgctctatactacacagtcaattcactataagaattttggcttccatcctccactactttttagccctctctctttcttgctctattctattctacttatccgactcagtcacccctacaaaaccaatataccttgatgttctacccgttcaaaatgatcgttccacacggctcaataacc

SEQ ID NO: 141258 - DNA, 207 bp, Glycine max
atactcaacattatatattccaacctcgaatacgtattcctaatatattatatcagaccataccccttgatcacacaaagacagatactgccatataatatatacacacaacattatttctggcagatttagacaactattgtggcataattacaaggttcaaagtcattcaaacatctcaattctcaaagctcggcatcccggtgt

SEQ ID NO: 141259 - DNA, 214 bp, Glycine max
aaaatatggtgcattttcaggttctcacatggaaacgaagggcgacagtgctgaaaaagaagaagcttgggctactcatgaagacgaaattcttttgaactatgatcaagtccgtggagaaggaaattggagaaaccttcctaaaagagctggcatgaaacgatgtggtgaaagttgcaaacaacgatggtagaactatcttatgccaaccata

SEQ ID NO: 141260 - DNA, 214 bp, Glycine max
ggataagagggagctggaaacagcgaaagtgaaataccactacttttaacgttattttacttattccgtgaatcggaagcggggcactgcccctctttttggacccaaggtcggcttcggccggtcgatccgggcggaagacattgtcaggtggggagtttggctggggtggcacatctgttaaaagataacgcaggtgtcctaagatgagctc

SEQ ID NO: 141261 - DNA, 215 bp, Glycine max
atgcctttggacagcgtgacggcggggaacgcggtgaaccggaaaaaggcgatgaacgcggcgatggctgcgctgaagagcgcgggggtggagggggtgatgatggacgtgtggtggagcgcggtggagagagagaagcctggggagtataattggggagggtacgtggaactcatggaaatggcgaagaagcatggcctcaaggtgcaggctgt

SEQ ID NO: 141262 - DNA, 211 bp, Glycine max
aaaagaagagttgagattccctttgaagaaaagatggcatcccataggcaaagctatgaagctggtcaaactaagggccgaactgaggaaaagacgaaccagacgatgggcaatattggagagaaggctcaagctgcaaaggagaagacccaggaaatggcccaagctgcaaaggagaagacccaacaaacagcccaagctgccaaggaca

SEQ ID NO: 141263 - DNA, 211 bp, Glycine max
ccaagaaatagaaagtgaagaacatgaagaagaccaagacgaggatgaggagcaagacaaagagagccaagaaagtgaaggttctgagtctcatagagaaccacgaagacataagattaagaacccttttcacttcaactctaaaatgttccaaactctcttcaaacaccaatatggccacgttcgcgtcctccagaggttcaactaacgc

SEQ ID NO: 141264 - DNA, 172 bp, Glycine max
ataatccagatggcttgcacctctttgggtgaccacggcgaacaagtgccttacccactctctgggactctctccccgctatcgccgtcgtcggtggccagtgctcttgaaagtcctcagtattgggcactattgttggcaaggatttctgccctcttggatcggggattgt

SEQ ID NO: 141265 - DNA, 217 bp, Glycine max
tagcaaaacaataatgggagttatgtaaagtgcctggagaggctttccatgtagttgcttatgattttggaatcaagcataatatacttaggcgcctagcatcttatggctgcaaaatcactgttgttccatgtacatggtcagcatcagaaactttgaagatgaagccagacggggttcttttcagcaatggccctggtaatccgtctgctgttcc

SEQ ID NO: 141266 - DNA, 214 bp, Glycine max
aagataagcttgttgtgtccacctcctcctcccttcttcacactgctgttgatctagttaacgagaccaagttggatgatgagatcaagtcatggctagcttttgctgcccaaaaaattgttgaagttaacgcattggctaaagcattgtctggccacaaggatgaggccttcttctctggtaatgctgctgctctggcttcaaggaagtcttc

SEQ ID NO: 141267 - DNA, 214 bp, Glycine max
caactacaagaaagaacttccttataaccaaaaccaacaacaactatggcaagttatcagaagcactacgatgatcagggtcgcaaggtcgacgagtatggcaatgttgagaacaaaactgacgaatatggcaacccggttcatgccactagtgtcacttatgtagccactaaaagtgttggtggctctaatgatgacactaataagcaacatg

SEQ ID NO: 141268 - DNA, 202 bp, Glycine max
  unsure (1)..(202): unsure at all n locations
ctcaactttgccggcgtntcgctttaccgcggtaacgctttgccggattcttctttgcctttggtttatgcagggaatgtgagccatggtgctatgaatgggaacttgtgtatcacgggaacgttgtctcctgagagagtccctgggaagatcactgngtccgccccgtgggttgaccgctagggttcagaaaggctcggtg

SEQ ID NO: 141269 - DNA, 211 bp, Glycine max
atgtttcatagtttacacccagcagcagatttacatgctgcagctcgtgcaattggtggatgtcctatttatgttagtgacaagccaggcaatcacaattttgatcttcttaagaagctggttctcccggatggttcggttctccgtgctcagttacctggcaggccaactcgtgattctctatttgtggatccagccagagataggacta

SEQ ID NO: 141270 - DNA, 213 bp, Glycine max
gccggatcgagtcctcatcggaggcagggaaaccccagagggtcaaaaggctattcattctctgaagagtgtttatgcccattgggttcctgaggacagaatcctttgcaccaatttgtggtctgctgaactctcaaagcttgcagccaatgctttcctggcccagaggatctcctctgtgaatgccatgtcggcgctttgcgaggcaactgg

SEQ ID NO: 141271 - DNA, 208 bp, Glycine max
catatatatcaaaatggctgcagagatggagagggagtcattgataactgaagctcctaatgcaccagttactgcacagagaagggtcagaaatgacttagaaaattctctaccaaaaccatacttgccaagagcattgaaagctcctgatacgggtcacccaaatggaacagcaggccacaggtaccacaacttatctgttcttcag

SEQ ID NO: 141272 - DNA, 210 bp, Glycine max
gaaaattatggactcctcttgtgtttgctatccaatacttccttatcatgaagccaataaaaggactgatcgagaaggacattgcaaatgagagaaagccaacatgggagagacgtgatgccgctttccggaagagagatttatattagctgtgcacttctgtgcccatgaaattccatggatgcttagcttcctttgctagcacattcg

SEQ ID NO: 141273 - DNA, 211 bp, Glycine max
gaaaatttgaagagtttgtttattgtgaaaaaaagaaaaatgcaggcagcaaagaaagccatagagacctttaaggaaaccgcagccaacattggcgcctctgccaagtctggttctgagaaaaccaaggccactatccaagagaagaatgagaagatgaatgcagaagatcaaactcaaatggatatggctaccaagtggaaagaagaga

SEQ ID NO: 141274 - DNA, 213 bp, Glycine max
atgaggccaaggctgatggatttcttcccggtggtgcaagtctccataattgtatgactccccatggtcctgatacaaagtcatatgaggctaccattgcacgaggaaatgatggaggaccttgtaagatcacggacacaatggcttttatgtttgaatcgagtttgataccccgtatcagtcaatgggccctggaatcaccgttcttggatc

SEQ ID NO: 141275 - DNA, 215 bp, Glycine max
cacacacaactactacaagtacttccttacaatcaaaaccaacaacacatatggcaagttatcaaaagcactacgatgatcagggtcgcaaggttgacgagtatggcaacgttgagaagcaaaccgacgaatacggcaaccctgttcatgctgctagtgtcacctatgtagccaccagaactgctgctggtggttacagtgatgacattaataag

SEQ ID NO: 141276 - DNA, 211 bp, Glycine max
gcttaaaccccaaagttgcacagtcctcacgctttctgggtagcaagtagcaacacaaccttaaagttaaaactcatatatggtttggtttcaatgcgaagattgcggagacaacctcaaaaaacccaagttgtctagtcacttccgaacttgctctgcctacaaattgtcgtgcattgactgtggggaaatatttgggcgtgacaccgtt

SEQ ID NO: 141277 - DNA, 266 bp, Glycine max
tgtaaatggaccagaacagttgggaaatattcaagtacctaaaagagccagttatatccgagtaataatgttggagttaagtcgtatagcttctcacctactatggctaggaccttttatggcagatattggtgcacaaacccccttcttctatattttcagagaaagagaattaatatatgatctatttgaagctgcgacgggtatgagaatgatgcataatttttttcgtatcgggggggtagcgactgatctaccttatggtt

SEQ ID NO: 141278 - DNA, 260 bp, Glycine max
cataattccttcacttgcagaacttagttctctgttgcatcatcatcatcttcattagtgttagccctaaacttcaccttcaaccatgatcacagtgccaccacacagtgtccaagtgcacacatcttcacaccgctacgaagccggcgtcgtcccgccggctcgttttgaggcgccgcgttacgaagccggcatcaaggcgccctcttccatttaccattccgagagaggtccgacgacctctcaggttctcgcagttg

SEQ ID NO: 141279 - DNA, 261 bp, Glycine max
cttggatagtaattaacctcactcaaactcgggatcacagaaaccaacaacagttcttgcactgaggtttcacgatgttgctggaacttgcacttggtttgtttgtgttagctttgtttctgcacttgcgtcccacaccaagtgcaaaaccaaaagcacttcgccacctcccaaaccctccaagcccaaagcctcgtcttcccttcattggccaccttcacctcttaaaagataaacttctccactatgcactcatcgatc

SEQ ID NO: 141280 - DNA, 227 bp, Glycine max
cataacacctcaaattctgtgattcgggtaatggccaccagtggaggcgatgaggggcagaacaaccctgccctcgacccggatttggatgctccggatgacccggatcacgagttcgctgagttcgggtcgggttgcttctggggtgctgagttggcctttcagcgagttgtgggtgtggtgaagactgaggttggttacactcagggttcaaactcgggatccga

SEQ ID NO: 141281 - DNA, 260 bp, Glycine max
gggcagaacagtggatttcaagaacacacttcttataatgacatcaaatgttggaagcagtgtgattgagaaaggaggccgcaaaattggatttgatctggattacgatgagaaggatagcagttataacagaatcaagagcctggtaactgaggagctaaaacaatacttcaggccagaatttttgaatagattggatgaaatgattgtcttcaggcagctcacaaaactggaggtgaaggagattgctgacataatgc

SEQ ID NO: 141282 - DNA, 260 bp, Glycine max
cccaaatggaacagcaggccacaggcaccacaacttatctgttcttcagcagcattgtgctttttttgatcaagatgacaatggaatcatttacccttgggaaacttacatggggctgcgttctattggatttaatgttgttgcatctgttattatggctattgttatcaatgttggattgagttaccccactctacctaattggttcccttctctcctttttcctatctacatacacaacatacacaccgcaaagcatg

SEQ ID NO: 141283 - DNA, 132 bp, Glycine max
caaaaaagaacccctctaatgcaagtaccagtcctggtggacctcaatggaaatcacttgtgggttaactgtgagcagcagtactcatccaaaacgtaccaagcacccttctgccactccacacaacatacg

SEQ ID NO: 141284 - DNA, 233 bp, Glycine max
aataatctggaaatgcaagaagcttatcttgtcaatctcgtaaatgtgttacgagaattgtatttgcacagttcagaggaagctcgccaattgagaaggaaagctctctctcgtattgaatggctgcaaaaagctgatgtgcctaccatagcacagattgaagagttccattcgatgcagaggatgatgaatgctcctgattcaaatgataatattgatctactgttgagcat

SEQ ID NO: 141285 - DNA, 268 bp, Glycine max
gttggagggaaatttttcctttgatattaaatctcgctctagattggaaaaagtttcctctacaaaagcacaatttgttagtggaaaaaccttcaaatatgatataattggtgctggttcacattcttcagaagattttcctgaaaaggaagatcaagaaaaacccaaaaagattgatgccagattgagacaaagaatagatcctcaatacaatgaggttcaggctcagatggaaacaaatttgtttaaattgtctcttgatgatgtt

SEQ ID NO: 141286 - DNA, 266 bp, Glycine max
gtgagaaacaaagaaaggaaataattgatctttgaaaatgcagggaggaaagaaagctggagagtccatcaaggaaacagctgcaaacattggtgcttctgccaaggctggcatggagaaaaccaaggccactgtccaggagaaggcagaaagaatgacggcacgtgatccgatgcaaaaggagttggcaacccagaagaaagaggcaaagatgagccaggcagagctggacaagcaggcggcgcgtcagcataacacggcggcga

SEQ ID NO: 141287 - DNA, 258 bp, Glycine max
agcagagccatttctgcttcggcggacaagaacgatggtggtaatggctcgtccagaaacggtataaattggttgatgtttgagttgctatggagggacttctttaggtttataacaaaaaaatacagttctgcaaagaaacagctggaagctgctccggtcactgcatgtgctggagcatatgcttaagctggaagttctagtgggcattaaagagtttgtttcagggtgtgggttggttccctacgcagacatggc

SEQ ID NO: 141288 - DNA, 259 bp, Glycine max
gaatttcctgtttacgatcttattgcaattttgcaactttcaaagcttattagctaaagtaacatcaaaagatgtcattgattccaagtattttcggtggcccaaggagcaacgtgttcgatccattctcactcgatatgtgggatcccttcaaggattttcatgttcccacttcttctgtttctgctgaaaattctgcatttgtgaacacacgtgtggattggaaggagacccaagaggcacacgtgctcaaggctga

SEQ ID NO: 141289 - DNA, 260 bp, Glycine max
cacaaaacttccacttgagagacaagtcgtgtattaagactacaaattttcaatttttcaatggcgtcgaggcaacaaaaagaggatcgagctgaggctgctgcgaaagttgctgcgaaagaactcgaacaactcaaccgagaaaaagaccgtgatttcagtgttggtgttgcagaccaacaccaacaagaagaacatcagttagatcaacaaaagcgtggtgtaatcggatccatgttcaaggcggtgcaagacaccta

SEQ ID NO: 141290 - DNA, 251 bp, Glycine max
  unsure (1)..(251): unsure at all n locations
ggcggattanncgtgagtttaagcatctcaataagcggaggaaaagatagtaacaaggattcccttagtaacggcgatcgcaccgggaaaagcccaccatgaaaatcggtcgccctcggcgtccgaattgtagtctggagaagcgtcctcagtggcggatccctaccaagccacctggaatgcggcgccagagatggtcagagccacgtcgtgcccggacccagtcgnagcacgaggcgctgtcggcgagt

SEQ ID NO: 141291 - DNA, 257 bp, Glycine max
gtcttatgacattacagctgcatgtagtggatttgtgttgggtttaatatcagctgcttgtcacattaggggaggtggatttaataatgttctagttattggggcggatgctctctcacgatatgttgattggacagacagagggacctgtattctttttggggatgctgctggtgctgtactagtacaggcctgcaacagtgaagaagatggtttatttggttttgatttgcatagtgatggcagtggtcaaaggc

SEQ ID NO: 141292 - DNA, 259 bp, Glycine max
caaagaaaggggtggtggctgcttcgaaagcttaataatttgtttatttccagaacatcatagttttcgcagcagcaaactaacaaattactcatatcatataataagatggcccgttctctctcgcaagccaaacgtattggtgtccttgttgctcaatctatctccctaattcccgttcatcggcgaggttacgcagtggcatccgatgtatcggtaagagttggattgggtaatattgggcgaaggaatggaatcg

SEQ ID NO: 141293 - DNA, 254 bp, Glycine max
caaggatttcgtcgagaccagaggtagttgcgccgcctgagattttctacgacgttgctgatgctcgcaagtacacctcttcttcccgtgttgttcaaattcaggcgacgctgtcagagagagctctcgaactacttgctttgcctgatgacagcgttcctaaattactccttgatatcggttgtggatcgggacttagcggtgagacactctccgagaatggacaccattggattgggcttgacatttcagca

SEQ ID NO: 141294 - DNA, 257 bp, Glycine max
gctgaagttaacctaagcttagaattagtgacaaagaaaagaataatggaaagaattgatcgttgaaaatgcagggaggaaagaaagcgggagagtccattaaggagacagctacaaacattggtgcttctgccaaggctggcatggagaagaccaaggccactgtccaagagaaggcagaaagatcgacagcacgtgatccggtgcaaaaggagttggcaacccaaaagaaagaggcaaagatgaaccaggcggag

SEQ ID NO: 141295 - DNA, 253 bp, Glycine max
gaacaatcgtgaagttttttctttgagaagtaaaagatcttagtgcaagtaattaacatggaatctcagcaagcaaaccgtgaagaacttgatgagaaggcaaggcaaggtgaaactgttgttcctggaggaactggtgggaagagtcttgaggctcaagaacatcttgctgaaggaaggagccgtggagggcagacgaggaagcagcagctagggtcagaggggtatcatgaaatggggaccaaaggagggc

SEQ ID NO: 141296 - DNA, 252 bp, Glycine max
caacggagcacctctcttcaggtcgccatctagactgcaatcatggctgatggaccacagcatccatcagttgttcagaagctagctggacagtcttacctggtgtccaggctaagccccaactttaactctgggaattattcctcgactgtttcttacttcaatggaggactgcactcttctgggttggctgttgtgtcgcctggatctccagttactgtgcatgctccagcagagaaaggagtgagtgga

SEQ ID NO: 141297 - DNA, 252 bp, Glycine max
cgcaacaaaaagaaagaatcccaggcgaggagaaagatggaggggaaggagcaggatgtgtcgttgggagcgaacaagttccccgagagacagccaattgggacggcggcgcagagccaagacgacggcaaggactaccaggagccggcgccggcgccgctggttgacccgacggagtttacgtcatggtcgttttacagagcagggatagcagagtttgtggccacttttctgtttctctacatcactgtc

SEQ ID NO: 141298 - DNA, 258 bp, Glycine max
atcgtgaatgcgtataaaaggaaaataaagaaattagcgtcaaaatgttgggtgtgttcagcagctccatagtgtcgccgccggacgagctcgtggccgccggcagccgtactccgtcgccgaagatgacggcggcggcgctgcggaagcggttcgaggagaagaacccctccgccgtgtcggtggaggtcggagagcatgtccagctcgcttatacccaccacaacgagtcgccgtttcagcccagatcctttgctg

SEQ ID NO: 141299 - DNA, 254 bp, Glycine max
gtgtgatcaaggggtttggtctgatataatatattagcaactacgtagtcgaggttggaatattttgtactgaatatcctcatgttttcttcaagtttagttaaaaaataatagatactcagcatgtcatttctctgaaaaaaaaaaaaaaaaaaaaaaaaaaaaaaaaaaaaaaaaaaaaaaaaaaaaaaaaaaaaaaaagggggggcccccaaaaaaaaaacccccccccccggggaaaatttccggggggg

SEQ ID NO: 141300 - DNA, 170 bp, Glycine max
tggctttgaataaaagatagaagagaagggatctgaatttcttcatccaacctgcacatggtaatctagtgtgtttgagtgctttcatgtttggctttaataaaataaaagcagttgttttgtaaaatgttcagaatcaataaaagcatttactgctttgctttgtgcgc

SEQ ID NO: 141301 - DNA, 251 bp, Glycine max
gtttcttatcttgatcatgttttttattgttcttggctttgctagtttgtgcctcaacaggttcatcaatggccaaacttaccaccctagttttggtggaaatggtgcaaccatgtttttcttaaccttctccatactagcagctgttctgggcatcgtgtccaaacttttgggtgggaatcacatgaggacatggaggagtgacagtttagcatctgtaggagccacatcaatggttgcttgggcagtca

SEQ ID NO: 141302 - DNA, 256 bp, Glycine max
  unsure (1)..(256): unsure at all n locations
tccgactctttctcttatctctaagtcaacatggctcaccatgaagattcaagtgtatggnattcgagtatacctcaccctaagctcaatgaaagaattttgtcttctctgtcacggagaactgttgctgctcacccctggcacgatttagagattgggccaggagctccagctgttttcaactgtgtggttgaaattggcaaaggcagtaaggttaagtatgagctggacaagacaagtggacttataaaggttg

SEQ ID NO: 141303 - DNA, 249 bp, Glycine max
cgatctcgaaacccagccgcggtttcgaacctttctctcagatctctctcttcgttctctcactcgctgacacaacaaacgaaatcattacggctggcaaaggagagggtccagccatcggaatcgatctcggaaccacgtactcgtgcgtcggtgtctggcaacacgatcgcgtcgagatcatcgccaacgaccatggtaacagaacgacgccgtcttacgtcgggattaccgacaccgagcgtctca

SEQ ID NO: 141304 - DNA, 253 bp, Glycine max
  unsure (1)..(253): unsure at all n locations
gtcgcggtnggtgcagccgtngcgatgcntgcgaatacgcccatggcgtgttcgaatgctggctgcacccttccaggtacagaacggaggcctgtaaggatggcaggaactgcaagaganaggtgtgtnttttcgnagacacccctcgcnaatgagaatttgccggtaacaacatcttcaccctcttcaaatgacatgccatgcaagaagaaccttaacaagctcttaaaccatgcttcaaagtcaaacaaca

SEQ ID NO: 141305 - DNA, 253 bp, Glycine max
  unsure (1)..(253): unsure at all n locations
cacaaacttgtattattatccttcgaattcannnnattattcataatgggtattttcacatttgaggatgaaaccacctcccctgtggctcctgctaccctttacaaagctctagttacagatgccgacaacgtcatcccaaatgctgtcgaagccttcatgagtgttgaaaaccttgaggggaacggtggccctggaaccatcaagaagatcactttcgttgaggatggagaaagcaagtttgtgttgcaca

SEQ ID NO: 141306 - DNA, 254 bp, Glycine max
ggaaataattgatctttgaaaatgcagggaggaaagaaagctggagagtccatcaaggaaacagctgcaaacattggtgcttctgccaaggctggcatggagaaaaccaaggccactgtccaggagaaggcagaaagaatgacggcacgtgatccgatgcaaaaggagttggcaacccagaagaaagaggcaaagatgagccaggcagagctggacaagcaggcggcgcgtcagcataacacggcggcgaacag

SEQ ID NO: 141307 - DNA, 109 bp, Glycine max
attcctcttttcttgtgcaccttccttccttgttcaaaagggtcttcctagaaacactcaaggtgtggctgggttaggcgatgcaccaatttctcttccacacaacata

SEQ ID NO: 141308 - DNA, 249 bp, Glycine max
cggagtggtacaaagcccgtgatcaattttaagggttacatggttggaaatggtgtcacggacgaaatatttgacggcaatgctcttatcccatttgtgcacgggatgggcctcatatccgacactatctatgagcatttacaatcttcctgcaaaggaaactactacgatgcttactctttggacgaaaatgatgtgtgttacaagaacattgaaaaatttgacagggccattgatgggcttaacgtg

SEQ ID NO: 141309 - DNA, 250 bp, Glycine max
gttgcagaccgagctagctagctagcaagcaagcacagagatggaggcaaagcgaggccatgccctcatgtgcttggcacgtgtttcactcttcctctgcgctctaaccctatccgctgctcacggaagcaccacggttcaagacatcgcgagatagttgaaactcggggacaacgagcttctgcgcacggagaagaagttcaaggttttcatggagaattacgggaggagctactccacagaggaggag

SEQ ID NO: 141310 - DNA, 254 bp, Glycine max
gaaacacttttaggaaataattgatctttgaaaatgcagggaggaaagacagctggagagtccatcaaggaaacagctgcaatcattggtgcttctgccaaggctggcatggagaaaaccaaggccactgtccaggagaaggcagaaagagcgacggcacgtgatccgatgcaaaaggagttggcaacccagaataaagaggcaaagatgagccaggcagagctggacaagcaggcggcgcgtcagcataacac

SEQ ID NO: 141311 - DNA, 253 bp, Glycine max
cattgatgtattgaaggatgatatttctatagttaaagagctgcctaaagagttcagctggagcacaagagagtactatggcttggctattcgagaaacccgaatcaaggctgcgcctgtgcatgcatcagcccattggtatctggagaatgttttgcctgttctacagagttatggtattgctgcaatctctccattttctcacagactgagttttgacaacttgcctatggatattcaacacctacgctgt

SEQ ID NO: 141312 - DNA, 143 bp, Glycine max
gagattggctttcagcgtattggcttggtttcaagtcacctgaacagctttcacgtatccgaaacactggtgtgaaaccagagatcttgaaaaatgttggaaaagcaatcacaaccatccctgaaaattccacacaacatacg

SEQ ID NO: 141313 - DNA, 243 bp, Glycine max
gatgagagtgcggtttcctttgttggtgttgctgggaactgttttcctggcatcagtttgtgtctcattaaaggtgagagaggatgagaataaccctttctactttagaagctctaacagcttccaaactctctttgagatccaaaacggtcgcattcgtctcctccagagattcaacaaacgctccccacaacttgagaccgttcgagactaccggattgtccagtttcagtcaaaacccaa

SEQ ID NO: 141314 - DNA, 245 bp, Glycine max
cggagaattagggttcgattccggagagggagcctgagaaacggctaccacatccaaggaaggcagcaggcgcgcaaattacccaatcctgacacggggaggtagtgacaataaataacaataccgggctcattgagtctggtaattggaatgagtacaatctaaatcccttaacgaggatccattggagggcaagtctggtgccagcagccgcggtaattccagctccaatagcgtatatttaa

SEQ ID NO: 141315 - DNA, 246 bp, Glycine max
gaagaacacatatgcgtgctgaaggaccgcagcaagccgattatcttcaccatggcaaggttggaccgtgtgaagaacatcacaggactcgtggagtggtacggtaagaacgcgaactgagggagttggtgaaccttgtggttgttgccggagacaggaggaaggagtcgaaggacttggaagagaaggccgagatgaagaagatgtacggcctgatcgagacctacaagttgaacgggcaattca

SEQ ID NO: 141316 - DNA, 248 bp, Glycine max
gatgccttctacaggtataagatgcctaggatgattaccaaaattgagggcagaggtaacggcatcaaaactaatgttgtcaatatggttgatattgccaaggcattggcaaggcctgcgtcttacacgaccaagtattttggttgtgaacttggggcccagtcaaaatttgatgagaagaccggcacttctcacgtcaatggagcacatgatactgttaagcttgctggccttcttgagaacttcat

SEQ ID NO: 141317 - DNA, 245 bp, Glycine max
ctctatactacacagtacacacactagaagaataatggcttccatcctccactactttttagccctctctctttcttgctcttttcttttcttcttatccgactcagtcacccctacaaaaccaataaaccttgttgttctacccgttcaaaatgatggttccacagggctccattgggccaacctccaaaaaagaacccctctaatgcaagtaccagtcctggtggacctcaatggaaatcact

SEQ ID NO: 141318 - DNA, 251 bp, Glycine max
aaattatcattgatagtttcgcaagtcctgactgcaacatagttggtgcaatgcttttggttgatacttatcataccaatcctgaaaatgcagttcgtagtatttttgttgcgcctttcagaggcggaaggcccattcgggtggttacatttccgaataccatcgtgcagattgaaccagacatgaattcaaggttccagcttttgagtaccactaccaatggtgattttgttcaaggaaaagatctcgca

SEQ ID NO: 141319 - DNA, 244 bp, Glycine max
cgcccaacttagaagggctcactgtagatgaggcaattcaaaacaagagattgttcctactagatcatcatgacccaatcatgccatatttgaggcgaataaatgcaacctccacaaaggcttagctaccagaaccatccttttcctgaaaaatgacggaactttaagaccacttgccatagagttgagtttgccacatcctcagggagatcaatctggtgcttttagtcaagtttttctgcct

SEQ ID NO: 141320 - DNA, 243 bp, Glycine max
atcttcacaaactagtaatattattcttcgaatccattttattattcataatgggtattttcacatttgaggatgaaaccacctcccctgtggctcctgctaccctttacaaagctctagttaagatgccgacaacgtcatcccaaaggctgtcgaagccttcaggagtgttgaaaaccttgaggggaacggtggccctggaaccatcaagaagatcactttcgttgaggatggagaaagcaa

SEQ ID NO: 141321 - DNA, 240 bp, Glycine max
atcaacagttgttgataaggacgaaggcctaggaaagtttgatgctgccaagttacgcaaacttcggccaagtttcaagtagactggaggatctgttactgctggcaatgcttccagcataatgatggtgccgctgcactagttttggtgagtggagagaaggcactgaagcttgggcttcaagttattgcaaaaatcactggatatgctgatgctgctcaggaaccagagttatttaca

SEQ ID NO: 141322 - DNA, 237 bp, Glycine max
agtcacaatcaggggaagaaattagctctggcatggttggaatgtacatgtcctcttcttcacaccctataacagctccttcaccgctctctggccttccagaattctctcacttgggttgggtcactggtttacactgagggatcttgaacttgctacgaaccgtttttcaaaagaaaatgtaattggtgagggtgggtatggagttgtttaccggggacagttgatcaacgggac

SEQ ID NO: 141323 - DNA, 238 bp, Glycine max
aagacgttcttgcaatccacgccacacaagggtcgacccaacaacttggcccattggtcacagtcccacaattcctcttttcttgtgcaccttccttccttgttcaaaagggtcttcctagaacactcaaggtgtggctgggttaggccatgcaccaatttctcttccaaaccaactcgcttcccactttggcctacaacgccaattcaccacttgcctttctcgctaccctacttca

SEQ ID NO: 141324 - DNA, 238 bp, Glycine max
ttcaaaccttgctctatactacacagtacacacactagaagaataatggcttccatcctccactactttttagccctctctctttcttgctcttttcttttcttcttatccgactcagtcaccctacaaaaccaataaaccttgttgttctacccgttcaaaatgatggttccacagggctccattgatccaacctccaaaaaagaacccctctaatgcaagtaccagtcctggtgga

SEQ ID NO: 141325 - DNA, 236 bp, Glycine max
gtcttgattcagagctttctctcttaaaagagatacaggctgagctgactgaacagtttgagcatgaaaagtctgtaatgactcgtatgcaatcaatcaaagaagagatagacagagtgaacttgagatccaacaggctgaacgggagtatgatcttaatcgtgctgctgaattaaagtatggcagtcttaactccttgcaacggcaacttgaaagtgccgagaaggagttagacg

SEQ ID NO: 141326 - DNA, 236 bp, Glycine max
aaaaaagaaaaatgcaggcagcaaagaaagccatagagacctttaaggaaaccgcagccaacattggcgcctctgccaagtctggcttggagaaaaccaaggccactatccaagagaagaatgaagagatgaatgcagaagatcaaactcaaatggatatggctaccaagaggaaagaagagaagatcaaccaggctgagatggagaagcagcaggcccgtaagtactacgccgct

SEQ ID NO: 141327 - DNA, 235 bp, Glycine max
cgccgttgctcgccaagctcttcgacgtcgtttccttctcccacgtcctccacctcgcagcacaagcgggcgtccgctacgccatgcagaacccccagtcctacgtggcatccaacatcgcggcttcgtcacccttctagaagcttccaaaacctccaacccccagcccgccatcgtttgggcctcttccagttccgtctatgggctcaataatgaaagcccattctccgaactc

SEQ ID NO: 141328 - DNA, 233 bp, Glycine max
attgattgcagttgagttctaatgagtaacgaatacgattacctgttcaagcttctcctaatcggagactcttccgttggaaaatcctgcttgcttctcagattcgctgatgactcctagtcgacagctacataagtaccattggagttgatttcaaaatcagaacggtggagctggaagggaaaaccgtcaagctgcagatttgggatacagctggacaggagcgattcagg

SEQ ID NO: 141329 - DNA, 236 bp, Glycine max
gtggcctcatgtccactaatcccatcacccaacaaaccggtttaggtgaactaggagaagacgttcttgcaatccacgccacacaagggtcgacccaacaacttggcccattggtcacagcccacaattcctcttttcttgtgcaccttccttccttgttcaaaagggtcttcctagaaacactcaaggtgtggctgggttaggccatgcaccaatttctcttccaaaccaactcg

SEQ ID NO: 141330 - DNA, 234 bp, Glycine max
tctgtgtttgcggctgaggattccgaacgagcgaccttcttcgtttctcgcaaagtttaagtcatcatgggtaaggaaaagactcacatcaacattgtcgtcattggacatgtcgactcgggaagtcaactaccactggtcatttgatctacaagcttggaggtattgacaagcgtgtgactgagaggttcgagaaggaggctgctgagatgaacaagaggtcattcaagtatg

SEQ ID NO: 141331 - DNA, 231 bp, Glycine max
caataatatgggtgtcaatatcattaaaggaactgttgctgttggattcacttctaatgctgatggagaggtaaaagaagtcaaactaaaggatggcagggtcctggaagctgatattttgtcgttggtgttggaggaaggcctgaaagagtcttagtcaaagggcaggttgaagaggagaagggtggaatcaagaccgatgcttgcttcataactaatctttccgatgta

SEQ ID NO: 141332 - DNA, 234 bp, Glycine max
agcagagccatttctgcttcggcggacaagaacgatggtggtaatggctcgtccagaaacggtataaattggttcatgtttgagttgctatggagggacttctttaggtttataacaaaaaatacagttctgcaaagaaacagctggaagctgctccggtcactgcatgtgctggagcatatgcttaagctggaagttctagtgggcattaaagagtttgtttcagggtgtggg

SEQ ID NO: 141333 - DNA, 235 bp, Glycine max
ctcgctcggcggcggaacgggctccgggatggggacgcttcttatttccaagatcagagaggagtatcctgacaggatgatgcttactttctccgtttttccttcgcccaaggtctccgcactgttgttgagccttataacgctactctctctgttcaccagttggtggagaatgctgatgagtgtatggtgctggataatgaggcgctctacgatatctgcttcaggactctca

SEQ ID NO: 141334 - DNA, 230 bp, Glycine max
atcaacagttgttgataaggacgaaggcctaggaaagtttgatgctgccaagttacgcaaacttcggccaagtttcaaggagactggaggttctgttactgctggcaatgcttccagataagtgatggtgccgctgcactagttttggtgagtggagagaaggcactgaagcttgggcttcaagttattgcaaaaatcactggatatgctgatgctgctcaggaaccaga

SEQ ID NO: 141335 - DNA, 232 bp, Glycine max
gaactggcaatggaatcaacactgggggtgcgcacactgaagcagggtatgggaaggaacatcgtcagcatgagcaatctcatggtggtcagcacgagaagaaagggatactggaaagattaaggagaagcttcctggaggacacagtgacaagtagatgcatcgtgcatgcatgcatatagtatatatataatattgttgtctttgaataaatttgctgcatatgtacttg

SEQ ID NO: 141336 - DNA, 236 bp, Glycine max
agaacctaagtgagaaacaaagaaaggaaataattgatcttttaaaatgcagggaggaaagaaagctggagagtccatcaaggaaacagctgcaaacattggtgcttctgccaaggctgcatggagaaaaccaaggccactgtccaggagaaggcagaaagaatgacggcacgtgatccgatgcaaaaggagttggcaacccagaagaaagaggcaaagatgagccaggcagagct

SEQ ID NO: 141337 - DNA, 231 bp, Glycine max
gaaaacctaagcttagaattagaaacaaagaaaagaaggaaggaaagaattgatcgttgaaaatgcagggaggaaagaaagcgggagagtccattaaggaaacagctacaaacattgtgcttctgccaaggctggcatggagaagaccaaggccactgtccaagagaaggcagaaagaatgacagcacgtgatccggtgcaaaaggagttggcaacccaaaagaatgaggc

SEQ ID NO: 141338 - DNA, 231 bp, Glycine max
accttggtgaacaacgacgacagagactcctacaaccttcaccctggcgatgcccagagaatcccagctggaaccacttactatttggttaaccctcacgaccaccagaatctcaaataatcaaacttgccatacccgtcaacaaacctggcagatatgatgatttcttcttatctagcactcaagcccaacagtcctacttgcaaggcttcagccataatattctagaga

SEQ ID NO: 141339 - DNA, 231 bp, Glycine max
gaaaattacaagaaggcagattggactaggcatgattcaacaaatgcaacatgtatgtcctgactgcagaggatctggtgaggtcattaacgagagagataaatgtcctctgtgaaaggaaacaaggtttcccaggaaaagaaggtgctggaagtgcatgttgagaagggcatgcagcagggtcagaagattgtttttgaaggacaagctgatgaagctcctgacacaatc

SEQ ID NO: 141340 - DNA, 232 bp, Glycine max
cactccgaaataccgagctccgtgatcgctgtagcaactaggacattgtagcacaaataatatctgctagcattgctggcgatattgttcttgctgcagcatatgcacatgagctgcacgatatggtcttgaagtagggcttacaaattatgctgcagcttattgcactggtctcctgttgtcccgaagagtcctcaaaacacttgaaatggatgaggagtatgaaggaaat

SEQ ID NO: 141341 - DNA, 228 bp, Glycine max
aaacagctcaagagtctggtgttgttgatgaacctaatgcaactgttccaatgagtatatggtggttgattccccaatatttcttgttcggagtctctgaagtttttaccatggtggtctgcaggaatttttctatgaccaggtcccaaatgaactaagaagcatgggtcttgctctctacttgagcatctttggtgttgggagctttataagtggctttctcatttc

SEQ ID NO: 141342 - DNA, 231 bp, Glycine max
ggaaataattgatctttgaaaatgcagggaggaaagaaagctggagagtccatcaatgaaacagctgcaaacattggtgcttctgccaaggctggcatggagaaaaccaaggccctgtccaggagaaggcagaaagaatgacggcacgtgatccgatgcaaaaggagttggcaacccagaagaaagaggcaaagatgagccaggcagagctggacaagcaggcggcgcgtc

SEQ ID NO: 141343 - DNA, 229 bp, Glycine max
gctaattttttccatgttctaaggaggcaggtacatagagattttcgcaaacctctcattgtaatgtcccctaagaacctgcttcgtagcaaggcttgcagatcaaatttatcgagtttgatgatgtccaaggccacccaggctttgacaaacagggaaccagattcaagcgcctcataaaagaccaaaatgcccacaaagatgttgaggagggtattagacgtttagt

SEQ ID NO: 141344 - DNA, 228 bp, Glycine max
gcttatggtggatacctaggcacccagagacgaggaatggcgtagtaagcgacgaaatgcttcggggagttgaaaataagcgtagatccggggattcccgatataggtcaactttcgaactgctgctgaatccacgggcaggcaagagacaacctggtgaactgaaacatcttagtagccagaggaaaagaaagcaaaagcgattcccgtagtagcggcgagcgatat

SEQ ID NO: 141345 - DNA, 228 bp, Glycine max
ctctttccttttcttcttatccgactccgtccccattccccaacaccactctaattctacaaaacctataaaccttctggttctacccgttcaaaatgatgcttccacagggcttatagataaaacctccaaaaaaggacccctctaatgcaagtaccagtcctggtggacctcaatggaaaccacttgtgggttaactgtgagcaacactatcaatccaaaacatac

SEQ ID NO: 141346 - DNA, 227 bp, Glycine max
gacccaaggtcggcttcggccggtcgatccgggcggaagacattgtcaggtggggagtttggctggggcggcacatctgttaaaagataacgcaggtgtcctaagatgagctaacgagaacagaaatctcgtgtggaacaaaagggtaaaagctcgtttgattctgatttccagtacgaatacgaaccgtgaaagcgtggcctatcgatcctttagtccttcggaat

SEQ ID NO: 141347 - DNA, 190 bp, Glycine max
gcagggtgcagaattggcagtggctcaagtatggagtggagctcaatggggatggtcttggagtgaaagtgaacaaagaactttttggtagggttgttgaagaagagatggcaggattgaaaaggaagtggggacagagaagttcaagaacgggaattgtacaagggacggcttgcatcagatccttcac

SEQ ID NO: 141348 - DNA, 227 bp, Glycine max
  unsure (1)..(227): unsure at all n locations
cttcatagttcagtgtgtcgtttaaaaatgtcgcagttgctggataaagccaagaacttcgtgtcggagaaggtaaatgatatggccaagccggaggcangtgtcactgacgggacttcaagcgcgtgagcaaagataatgtcgagtacttggccaaggtctctgttcgtaacccttattcaacttccatacccatttgtgagatcaactactctttcaaaagcgca

SEQ ID NO: 141349 - DNA, 227 bp, Glycine max
cacaattactacaagtacttccttacaatcaaaaccaacaacaactatggcaagttatcaaaagcactacgatgatcagggtcgcaaggttgacgtgtatggcaacgttgaaagcaaaccgacgaatacggcaaccctgttcatgctgctagtgtcacctatgtagccaccagaactgctgctggtggttacagtgatgacattaataagcaacatgataccaccaa

SEQ ID NO: 141350 - DNA, 228 bp, Glycine max
ttgccatggatccttacaagctccggccatccagcgccttcaattctctcttctggactacaaattctggtgctcctgtttggaacaacaactcctctttaaccgttggagtagaggtccaattctgcttgaggattatcatcttgtggagaagcttgcaaactttgacagggaacgtatcccagaacgtgttgtgcatgccaggggagctagtgcaaagggtttctt

SEQ ID NO: 141351 - DNA, 224 bp, Glycine max
cactccgaaataccgatttgttgttcgctttagcaacaaggacattgttgcacaaataatatctgctagcattgctggcgatattgttcttgctgcagcatatgcacatgagctgcacgatatggtcttgaagtagggcttacaaattatgctgcagcttattgcactggtctcctgttgtcccgaagagtcctcaaaacacttgaaatggatgaggagtatga

SEQ ID NO: 141352 - DNA, 278 bp, Glycine max
ataagaatacatattgtattctatatcaaaacaaaatataaaaatttggaatagattctatgaaatctcaaaaaatcccgctattcaattattcattaaacatatgaatattagtgcatattattttatcgattagattaaatagatatctatatatataggtagatatctatttgaattgcttcattggcgaggagccgtatgaggtgaaaatctcatgtacggttctgtaataaagatggaattgagaaacaaccatcaattataacccccaaaga

SEQ ID NO: 141353 - DNA, 180 bp, Glycine max
ttcaaaccttgctctatactacacagtacacacactagaagaatattggcttccatcctccactactttttagccctctctctttcttgctcttttcttttcttcttatccgactcagtcacccctacaaaaccaatataccttttgttctacccgttcaaaatgatggttccacacgac

SEQ ID NO: 141354 - DNA, 270 bp, Glycine max
gctgatgatgctgctagggctgttgaggctctcaatggcaaaaattttgatgacaaagaatggtatgttggaaaagctcagaagaaatctgaaagggagaatgaattgaaacaacgatttgagcagagcatgaaagaagctctgataaatatcaaggcgcaaacttgtatgtaaaaaatttagatgatagcattggtgatgaaaaacttaaggagctgttctccccttttggtaccattacctcttgcaaggttatgagagacccaaatg

SEQ ID NO: 141355 - DNA, 270 bp, Glycine max
cacacacaactactacaagtacttccttacaatcaaaaccatcaacaactatggcaagttatcaaaagcactacgatgatcagggtcgcaaggttgacgagtatggcaacgttgagaagcaaaccgacgaatacggcaacctgttcatgctgctagtgtcacctatgtagccaccagaactgctgctggtggttacagtgatgacattaataagcaacatgataccaccaatgcctacggcgtagacactggtagacagcattctagtgg

SEQ ID NO: 141356 - DNA, 263 bp, Glycine max
gtaagctcccaagcagtgggaggaggctcgggactctgaccgcgtgcctgttgaagaatgagccggcgactcataggcagtggcttggttaagggaaaccaccggagccgtagcgaaagcgagtcttcacagggcaatttcactgcttatggacccgaacctgggtgatctatccatgaccaggatgaagcttgggtgaaactaagtggaggtccgaaccgactgatgttgaagaatcagcggatgagttgtggttaggggtg

SEQ ID NO: 141357 - DNA, 264 bp, Glycine max
tgctcagaagaccaaggactatgccagctctggtgcgcagaagaccaaggattatgccagcggtggtgcgcagaagaccaaggactatgcaagtgatgctgcgcagaagaccaaggactatgcaagtgatggtgctcaaaaagcaaagaatatgcgggtgatgtagcactgaatgccaaagattatgctcaaaaaagcaaagattacgcaagtgatgctgcacagaatgtcaaagattatgcaagtgatgcagtgcagaagaga

SEQ ID NO: 141358 - DNA, 266 bp, Glycine max
gcggcacccacacacacagttcgtcggaatgggaagggtgattcgcgctcagcgtaagggtgctgggtcggtgttcaagtctcacactcaccaccgcaagggtccggcgaggttccgcagcctcgacttcggcgaggcaacggctacctcaagggcgtcgtcaccgacatcatccacgaccccggtcgcggcgcccctctcgccaaggtggcattccgccaccccttccgctacaagaagcaaacggagctcttcgtcgccgccga

SEQ ID NO: 141359 - DNA, 263 bp, Glycine max
gctaaagatgcttggcgaccttatgaacgagagtcatcatagctgcagcgttttatatgaattgagctgtccggagttggaagaacttgtaaatatttgtcgtaacaatggtgctcttggggcaaggcttactggagctgatggggtggttgtgctgttgctttggtgtcagagagcatagttccacaatttatccttaatttgaaggaatgtttctaccagtctagaatagacaagggcgttattatgaagaacgatcttgg

SEQ ID NO: 141360 - DNA, 267 bp, Glycine max
gaagattctggtgaatgcgtagaaaaggaaaataaagaaattagcgtgaaaaatgttgggtgtgttcagcagctccatagtgtcgccgccggaggagctcgttgccgccggcagccgtacaccgtcgccgaagatgaggcggcggcgctgcggaagtggttcgaggagaagaacccctccgcagtgtcggtggaggtcggagagcatgtccagctcgcttatacccaccagaacgagtcgccgtttcagcccagatcctttgctgtg

SEQ ID NO: 141361 - DNA, 287 bp, Glycine max
gtaagctcgggattgtttgttgttgtaactcgttcttctacttttgttgttctgtgtttgtgtttgtgttttctctcacctgaaaatgtcttgctgcggtggtaactgtggttgcggaagctcctgcaagtgcggcaacggctgcggaggctgcaagattacccagacttgagctacactgagtcaaccaccaccgagaccttggtcatgggagtggcacctgttaaggctcaattcgagggtgctgaaatgggtgtgcccgctgagaacgatggctgcaaatgtgg

SEQ ID NO: 141362 - DNA, 269 bp, Glycine max
gggtgctgcagataagcggacagagaacaaaggagaaggaggacaagaacgacacgtggcaccgccacgaacgctccagcggcagctttctccgccgcttccgcctgccggagaacgcgaaactcgatcagcgtgaagccggcatggagaacggagtgctcactgtcactgttcccaaggtggatgtcaagaagcccgatgtcaagcccgttcagatcactgaaggctaagttgtgttctcaatcaatcaaaattcatgtgtctcaata

SEQ ID NO: 141363 - DNA, 149 bp, Glycine max
aaggcgatccgcagctcatcaaggatatcaagcgggccgtcaccatccccgtgatggccaaggcccgcatcagccacttcgtcgaagcccagatcctcgaagccatcagtagcgactacgtcgacgagatcggtgtcctcacctcaccg

SEQ ID NO: 141364 - DNA, 265 bp, Glycine max
aaacaaagtaaggaaataattgatctttgaaaatgcagggaggaaagaaagctggagagtccatcaatgaaacagctgcaaacattggtgcttctgccaaggctggcatggagaaaaccaaggccactgtccaggaaaggcagaaagaatgacggcacgtgatccgatgcaaaaggagttggcaacccagaagagagaggcaaagatgagccaggcagagctggacaagcaggcggcgcgtcagcataacacggcggcgaacagg

SEQ ID NO: 141365 - DNA, 108 bp, Glycine max
ctaacaattccttcacttgcagcactgttgcatcatcatcttcattgcaaaaccctaaacttcaccttcaaccatgaccacacaagtaccaccagacagtgtccaagt

SEQ ID NO: 141366 - DNA, 260 bp, Glycine max
tgaaggtgcattgggaatacgtgagtggctggaatcacagggtcatcagtacattgtcactgatgacaaagaaggacctgattctgaacttgagaaacacattccagatgcacatgtcatcatatctactccttccaccccgcctatgtcatcgcagaaagaattaagacagccaaaaatttggagctgcttttgactgctggcattggttctgatcatgttgatctcaaagctgcagctgctgctggtttaactgtggc

SEQ ID NO: 141367 - DNA, 255 bp, Glycine max
gaacctaagtgagaaacaaagaaaggaaataattgatctttgaaaatgcagggaggaaagaaagctggagagtccatcaaggaaacagctgcaaacattggtgcttctgccaaggctggcatggagaaaaccaggccactgtccaggagaaggcagaaagaatgacggcacgtgatccgatgcaaaaggagttggcaacccagaagaaagaggcaaagatgagccaggcagagctggacaagcaggcggcgcgtc

SEQ ID NO: 141368 - DNA, 258 bp, Glycine max
gcgaagaaggaaaaggggaagccccatcagcagcagaagcacatgccctaccaaggcggaatatcgttccacaaatcaaagggtctacacattctcttgaactccatgctcgtcgattccattgtggagaaggccggctcaagagcaccgacgtcatcctcgagatcggtcccgggaccggtaacttgacgaagaagcttctcgaagccggcaagaaggtcatcgacgtcgagatcgatccccggatggttctcgagc

SEQ ID NO: 141369 - DNA, 260 bp, Glycine max
gacgtgagagagattgtgaagtagaaatcggtgcaagagattctccactttatctaaaaaaattcggtgagtttgtgaagacaaaaaatcactagctactcaaaaatggccacagtaggaaggaacgttgcactcctttgctgtttcttaacttgatcatgtattttattgttcttggctttgctagttggtgcctcaacaggtccatcaatggccaaacttaccaccctagttttggtggaaatggtgcaccatgtttt

SEQ ID NO: 141370 - DNA, 258 bp, Glycine max
aacgcagcatcgctattctcttcattccatggctttgcccaaccagcaaaccgtggattaccctagtttcaaactcgttatcgtcggcgatggtggcacaggaaagacaagcctttgtgaaaaggcatctcacggagaattcgagaagaaatatgagccaaccatcggtgtggaggttcacccattggattttttcacaaactgtggaaagattcgattttactgctgggatactgctggacaggagaaatttggtgg

SEQ ID NO: 141371 - DNA, 251 bp, Glycine max
agttgaaggaaatggctgaagcacaactacgagaccagcatggcaaccctgtcccactcaccgatcaatacagtaatccggtcatcttaactgacgagcgcggtaaccccgtccaactcactggtctcgcaccaccgctaccggcacagcaggttctgggtttgggtcctatggtaccggtgcttacggtggtggtgcaagtgcaaccaccgttgcagatcttttggcaacccaaccaaggagtggcaggg

SEQ ID NO: 141372 - DNA, 256 bp, Glycine max
gtaaagctaacttcaacacctttaatttgcgcagagtaattcagcggctgaataccaagcggagaagatgagtcaggagcagccacggcgtcccaaaggccaaaaccccatcagatacggcggcgttttgtcgtctccggcgaccttgcacagaagcccgtcgcaccggaagatgctgccatgatgcaaagcgcggaagctcgagtgctcggacaaacccaacccggcggagagcttccgtcatgcaatctgccgc

SEQ ID NO: 141373 - DNA, 101 bp, Glycine max
gaccgagctagctagctagcaggcaagcacagagatggaggcaaagcgatgccatgacctcatgtgcttgggacgtgtttcactcttcctctgcgctctaa

SEQ ID NO: 141374 - DNA, 252 bp, Glycine max
gtgcggtttcctttgttggtgttgctgggaactgttttcctggcatcagtttgtgtctcattaaaggtgagagaggatgagaataaccctttctacttgagaagctctaacagcttccaaactctcttgagaaccaaaacggtcgcattcgtctcctccagagattcaacaaacgctccccacaacttgagaaccttcgagactaccggattgtccagtttcagtcaaaacccaacacaatccttctccccc

SEQ ID NO: 141375 - DNA, 254 bp, Glycine max
atcgcataataaccgtcctaagtttattgagagaattttgcaagtgtgagaaacatggcatctcgtcaaaacaacaagcaagagcttgatgaaagagcaaggcaaggagagactgttgtcccgggtggactggtggcaagagcctggaggctcagcaacaccttgctgaaggaaggagcaagggagggcaaacaaggaaggaacagctgggtacagaagggtaccaggaaatgggacgcaaaggagggttgagc

SEQ ID NO: 141376 - DNA, 271 bp, Glycine max
  unsure (1)..(271): unsure at all n locations
gtttcggtggtggaggctatggcaatnnaccagtacccttatcagttttttccatggccctgnncgataggttgatgaggttggggccctccgcgacgaaggaagcgaggaagaagagaatggcaaggcncaagaggtttctgtctcatncacaggcatcatngtggtaatcaccagaatcaagggtctgaccctcatggcaagntctggggggtgataattgcaacactgctttggctgcncctacatcacgcaaatccttcagcnaatt

SEQ ID NO: 141377 - DNA, 249 bp, Glycine max
cgagtgctgcaaaagttgcctcagatttgagggacaaggctttggccacagggtggagtgctgcacattattctactgagataactgtggagggaaccaaggctgcaacaaatgttgttaagggagttgctgagtatgcaggacagaaggcttctgagcttgcagctatgtcagtggatactgcgaaaggtttagctgctgctgcatgctggggagaatgccaaggagtacactgcaaggaagaaggtg

SEQ ID NO: 141378 - DNA, 244 bp, Glycine max
gagatatcaagtcaagttcaagagaagaagagagggaaaaaccgattaccgtgccaggattcggttgattaatcaggacaagaacaaatataacactccgaaataccgatttgttgttcgctttagcaacaaggacattgttgcacaaataatatctgctagcattgctggcgatattgttcttgttgcagcatatgcacatgagctgccacgatatggtcttgaagtagggcttacaaattat

SEQ ID NO: 141379 - DNA, 237 bp, Glycine max
ctcaagaagcctctcactacctccttcttcggcactgcacgagtggaagttctgaaacttcgagtgatgaggattgcgaacctgcgcgcggtggaggtgctctcggtgctcgcatgaacctctttgacagggtcgccagagttgtgaagtaatgcagtcgtacgcaaacgcgtgtctaagcgtcgtttaagatccggagaaaagtatggagcaagctgtgcttaatataacgacgac

SEQ ID NO: 141380 - DNA, 235 bp, Glycine max
cggcttatggtggatacctaggcacccagagacgaggaagggcgtagtaagcgacgaaatgcttcggggagttgaaaataagcgtagatccggggattcccgatataggtcaacctttcgaactgctgctgaatccacgggcaggcaagagacaacctggtgaactgaaacatcttagtagccagaggaaaagaaagcaaaagcgattcccgtagtagcggcgagcgaaatggga

SEQ ID NO: 141381 - DNA, 240 bp, Glycine max
accaagcacccttctgccactccacccaatgctctagagccaacacccaccaatgcctcagttgccccgcggcatcaaggccagggtgccacaaaaacacgtgtggcctcatgtccactaatcccatcacccaacaaaccggtttaggtgaactaggagaagacgttcttgcaatccacgccacacaagggtcgacccaacaacttggcccattggtcacagtcccacaattcctctttt

SEQ ID NO: 141382 - DNA, 227 bp, Glycine max
  unsure (1)..(227): unsure at all n locations
ctcgagcgattcggctcactcccatcctttcgcattcacaataccctttccatttgtgaaaggaaagcgaacctggttgagcaggtgcaacaccctacaatcatgcccaacgtccctcgccccaaccatctcccntctagtcgttcatctggtattacaagtcatgatggagcctaccgccacccagctatgtaccaaagaccctcttttgggaattactctaatgc

SEQ ID NO: 141383 - DNA, 242 bp, Glycine max
cgaaaacctaagcttagaattagaaacaaagaaaagaagaaaggaaagaattgatcgttgaaaatgcagggaggaaagaaagcgggagagtccattaaggaaacagctacaaacattggtgcttctgccaaggctggcatggagaagaccaaggccactgtccaagagaaggcagaaagaatgacagcacgtgatccggtgcaaaaggagttggcaacccaaaagaaagaggcaaagatgaa

SEQ ID NO: 141384 - DNA, 238 bp, Glycine max
cacaagaggaatttcttacagcttggtcaactcaggtgcgtcctgcaacaactctgttggctgatgggtgtccatatttgtatgctatggtgcatgatagttcggtgtctacaataccaggtgattttgtcattggtgttaagttgacaaccataaacaatatgtgtgcatatgggctcaatcctggtatttcaggttctcgtcttttgggcaccattcctcagtctatttcacagca

SEQ ID NO: 141385 - DNA, 235 bp, Glycine max
aaagctaacttcaacacctttaattttctaaaagtaattcagcggctgaataccaagcggagaagatgagtcaggagcagccacggcgtcccaaaggccaaaaccccatcaaatacggcgacgtttttgtcgtctccggcgaccttgcacagaagcccgtcgcaccggaagatgctgccatgatgcaaagcgcggaagctcgagtgctcggacaaacccaacccggcggagcagc

SEQ ID NO: 141386 - DNA, 235 bp, Glycine max
  unsure (1)..(235): unsure at all n locations
attgaataagaactttgtgaagcttgtttcttggtacgacaacgagtggggatacagctcacgtgtcattgatcttcttgtattcgttgccaanaagtctctttaaggtgttacttcaaagtagcttgtcttcacattattaccgtatgtttatgtttagctgcgatttagtgtcttgctcgagcaaaaaatgagaggtctgaataaatcggtttctgaaaccagtggtgttact

SEQ ID NO: 141387 - DNA, 237 bp, Glycine max
tactgaatttgctgtgatggcaactcgtagatatgcttttggaagagctgatgaggccactcatccagactccatgagggccactttggctggatttgtttctactttcatctttgtctttgctggagatggctctggccttgctttggttaaaatttaccaggattcagctttctcagctggtgaattgttggcagttgcacttgcacatggatttgctctatttgctgctgtttc

SEQ ID NO: 141388 - DNA, 240 bp, Glycine max
cttcctagctctttaccttattgctcttggcaccggtggcattaagccttgtgtctcatcctatggagcagatcagtttgatgacactgactcggctgagaaggaacgcaagagttctttcttcaattggttctatttttcaatcaacattggcgctcttattgcatcttctctattggtttggatacaagataatgtgggttggggatggggctttggtattcctgctgtagccatggc

SEQ ID NO: 141389 - DNA, 240 bp, Glycine max
gaatcaaagaaaggggtggtggctgcttcgaaagcttaataacttgtttatttccagaacatcatagttttcgcagcagcaaactaacaaattactcatatcatataataagatggcccgttctctctcgcaagccaaacgtattggtgtccttgttgctcaatctatctccctaattcccgttcatcggcgaggttacgcagtggcatccgatgtatcggtaagagttggattgggtaa

SEQ ID NO: 141390 - DNA, 234 bp, Glycine max
ataaaaaaccactctacaaaactctccagtaattctgaaaattttattttcttttggtgaaattaacagctctgtgattgatcaatggcgacaaaggaaggcaaagccataggcatcgatctcggcacgacctacagctgcgtgggcgtgtggcaaaacgaccgcgtcgagatcatccccaacgaccaaggcaaccgaaccactccctcttatgtagccttcaccgacaccgag

SEQ ID NO: 141391 - DNA, 232 bp, Glycine max
cagaaggaggaccagaacgacaagtggcaccgcgtcgagaggcagtgcggaagcttcctccgccgcttccggctgccggaggatgccaaccccaaccagatcagctgcacgctcgaaaacggggtgctgaacgtcaccgtgcccaaggtggagaagaagccggagaacaagaacgtgaggcagattgatgtggtttgatgatgatggagcatcatgaggacttgtaatgttt

SEQ ID NO: 141392 - DNA, 233 bp, Glycine max
gtgatctctgcaagcaaagatgaatctgtccggttatggaatgttcatactggaatatgcattttaatatttgccggagctggaggacatcgtaatgaagttttaagtgttgattttcacccatcagatatatatcgtattgctagttgtggcatggataatactgtaaaaatatggtctatgaaggagttctggacatatgtagaaaaatcatttacatggacagatcttcc

SEQ ID NO: 141393 - DNA, 175 bp, Glycine max
aaatttgctgcatatgtacttacgtacgtacagtgtcttgtcatgtatgtggaggatatagtatatggttatagtttatgtagaagaataaaaaatgtatgcatgtagtaatgtaagggtcttatatatgtggctgaaatataaaccataataaaggcagagatgttgtgccaat

SEQ ID NO: 141394 - DNA, 229 bp, Glycine max
aattaatctccgatccgaaaccgaatggggattctgtacgcgctggttggtcgtggatcggtggtgctggcggagttcagcggcaccaccaccaacgccagcgcaatcgcgcgtcagatccttgaaaaaatccccggcaacaacgacacgcacgtttcttactctcaggatcgctacatcttccatgttaaacgcaccgatggactcaccgttctctgcatggccgacg

SEQ ID NO: 141395 - DNA, 233 bp, Glycine max
cgattccgggagcttactggcacctatccccaaaatataactgttgtaagttatgatttcaaggaaaaaagatttgcacatctacaccgatctgctatcggctttccagaatcaaggttcttctataccggcactcctgctacatcaaatgcaaaagcaactgctctaaaaggtgaggaattggtcagaactcaattccaaagagatccatttggatgtcgaggttcacttta

SEQ ID NO: 141396 - DNA, 233 bp, Glycine max
gtgagaacaatttaccaggattgactgatgttgagaagccaaggatgagaggcccaaagagagcatccaaaatccgtaaactgttcaacctgtctaaggaggatgatgttaggaagtatgtcaacacctaccgtcgtacatttacgacaaaagctgggaaaaaggtgagcaaagctcccaagatacaaagactggtcatacctcttacgctccaaagaaagcgggcaagaatt

SEQ ID NO: 141397 - DNA, 234 bp, Glycine max
gatgcttctcacaagagcaaagaagcttctgattatgccagtgagacggctcagaagaccaaagactatgttggtgatgctgctcagaaaagcaaagaggcttctgaatatgctagtgatgcggctcagaggaccaaagagtatgctggtgatgccaccaagagaagcaaagaggcttctgatcatgccaatgacatggctcggaagaccaaagactacgccagtgacactgct

SEQ ID NO: 141398 - DNA, 238 bp, Glycine max
gaatccaccactaagaaagtctctgactatgccggtgatgctgctcagaaatcaaaggactatgccggtgacactgctcagaaaaccaaggactatgccggtgacactgctcagaaaaccaaggactatgccggtgacactgcacagacatcaaaggactatgccggtgatgctgctcagaaatcaaagggctatgtcggtgatgctgcacaaaagaccaaagaatatgttggtgatg

SEQ ID NO: 141399 - DNA, 240 bp, Glycine max
cggatctggcaagcacgtcccccgtgctgtcttcgtcgacctcgaacccaccgtcatcgacgaggtccgctgcggcacctaccgtcaactcttccaccccgaacaactcatatccggcaaggaagacgccgccaacaacttcgcccgcggccactacaccgttggcaaagagatcgtagatctgtgcttggatcgcgtccgcaagctcgccgacaactgcaccggcctacaaggcttcct

SEQ ID NO: 141400 - DNA, 237 bp, Glycine max
gaacttggaccctacatcgttgagtacggtgcagattacagaatgataagcatcttcaactctccattccaagttggtttctacaacaccaccccaaatgccttcactctagctttgcgtgtagggctccaacgctcggagcagctatttcgttgggtttgggaggccaatagggccaacccagttggagaaaatgccactttttcacttggcactgatgggaaccttgtgttggca

SEQ ID NO: 141401 - DNA, 230 bp, Glycine max
atcgtgaatgcgtataaaaggaaaataaagaaattagcgtcaaaatgttgggtgtgttcagcagctccatagtgtcgccgccggacgagctcgtggccgccggcagccgtactccgtcgccgaagatgacggcggcggcgctgcggaagcggttcgaggagaagaacccctccgccgtgtcggtggaggtcggagagcatgtccagctcgcttatacccaccacaacgag

SEQ ID NO: 141402 - DNA, 230 bp, Glycine max
aaccaaatcgtgttctcttccattggcaaacatggcaactcaaatgagcaagaagagaaagtttgttgcggacggagtgttctttgccgaactgaacgaggttctgacacgtgaattggcggaggacggttactccggcgtggaagttagggttacgccgatgcgcaccgagatcatcatcagagccaccagaacccaagccgttctaggtgagaagggaaggagaatta

SEQ ID NO: 141403 - DNA, 232 bp, Glycine max
  unsure (1)..(232): unsure at all n locations
ctcaagcaagggctcatagaattggtcaaaagagggatgttcttgttcttccggtttganacggttcaaaccgttgaagaacaagtcagggcttcagctgagcacaaacttggcgttgctaatcagagcattactgctggttttttcgacaataatacaagtgctgaagatcgnagagaatacttggaatcactcctgcgtgagtgtaaganagaagaggttgcacctgttt

SEQ ID NO: 141404 - DNA, 236 bp, Glycine max
ccttattgattcttctctctctctccattctccaattctccatttcaatctgcagctccccgctttcaaagctctgaaatttccgattcgggatggagaaatacgagctcgtgaaggatataggatctgggaatttcggtgtggccaggctcatgcgacacaaagacaccaaggagcttgttgccatgaaatacattgaacggggtcacaagattgatgagaatgttgcgagggaa

SEQ ID NO: 141405 - DNA, 119 bp, Glycine max
ctaacaattccttcacttgcagcactggtgcatcatcatcttcattgcaaaaccctaaacttcaccttcaaccatgaccacacaagtaccaccagacagtgtccaagtccacacaacat

SEQ ID NO: 141406 - DNA, 229 bp, Glycine max
ctcattactagattggaagtttcaaattaggcgatgttgatgattttctactgaaggtaggtacagttaggggcaagctcaagaagggtggaatagttgacattaatgctgctgcaagaaatgttcttcatgattggaatgaaggtaaaattatatattataccatgcccccaaatagggatcaaggggaaccttcagaggccaatatagtttctgatttttcaaaaga

SEQ ID NO: 141407 - DNA, 230 bp, Glycine max
gaaaggaaataattgatctttgaaaatgcagggaggaaagaaagctggagagtccatcaaggaaacagctgcaaacattggtgcttctgccaaggctggcatggagaaaaccaaggccactgtccaggagaaggcagaaagaatgacggcacgtgatccgatgcaaaaggagttggcaacccagaagaaagaggcaaagatgagccaggcagagctggacaagcaggcgg

SEQ ID NO: 141408 - DNA, 238 bp, Glycine max
  unsure (1)..(238): unsure at all n locations
tgctcgtatatgtacgttgtcattggttgntgatgtttggtacaaccaattcatgtgtttccgttatggatggaatttaccccaaagtttttgagaattctgatggtgcacgaacatcaccatctgtggttgctttctaccagaaaggggagcttcttgtaggttccccagctaagcgtcaagctgtaactaacccaacaaacactctctttggtaccaagcgtttgattggtaggcg

SEQ ID NO: 141409 - DNA, 229 bp, Glycine max
  unsure (1)..(229): unsure at all n locations
cccatggttactttgcccaagataatgtctngggataccctgacactggtggccangtngtttacatcttggatcangttcgtgctttngagaacgagatgntccatcgcattaagcaacaaggattggacnttgtaccncgtattctcattatcacccgtctnctccccgatgcaatcggaactactngtggccaacgtcttgagaaggtgttcggaaccgagcactc

SEQ ID NO: 141410 - DNA, 231 bp, Glycine max
gtgcggtttcctttgttggtgttgctgggaactgttttcctggcatcagtttgtgtctcattaaaggtgagagaggatgagaataaccctttctactttagaagctctaacagcttccaaactctctttgagatccaaaacggtcgcattcgtctcctccagagattcaacaaacgctccacacaacttgcgatacatcgagactaccggattgtccagtttcagtcaaat

SEQ ID NO: 141411 - DNA, 230 bp, Glycine max
  unsure (1)..(230): unsure at all n locations
caacaacttctgcnacttcctacnccaaccgcactncctgtnccacanaanacacganagcaaccaanaccggaatcaacggatttggaanaattggccnnnaanacagccagantggctctgcanagagacgacgttgaactcgttgccgtcaacgaccctttcatcaccaccgattacangacatacatgtnaaatanacaggntcatggacatggaagcatcacgat

SEQ ID NO: 141412 - DNA, 180 bp, Glycine max
ctttgaataaatttgctgcatatgtacttacgtacgtacagtgtcttgtcatgtatgtggaggatatagtatatggttatagtttatgtagaagaataaaaaatgtatgcatgtagtaatgtaagggtcttatatatgtggctgaaatataaaccataataaaggcagagatgttgtgcc

SEQ ID NO: 141413 - DNA, 258 bp, Glycine max
caagcgtgtcatcgagagattcgagaaggaagctgctgagatgaataagaggtctttcaagtatgcctgggtgcttgacaagctcaaggctgagcgtgaaagaggaatcaccattgatattgctctgtggaagtttgagaccacaaagtactactgcacagtcattgatgcccctggacatagggatttcatcaagaacatgattactggaacatcccaagctgactgtgctgttcttattattgattccaccactgg

SEQ ID NO: 141414 - DNA, 256 bp, Glycine max
tagaacatggattcggtgccttcgaattcgcatggaaacctcgatgagcagatttctcagctcatgcagtgcaaacccttgtccgagcaagaggtaagggtcttgtgtgataaggcaaaagaaattttgatggaagagagcaatgtccagcctgtgaaaagtcctgttacaatttgtggtgatattcatgggcaattccatgatcttgcagagcttattcgcattggagggaagtgtccagatacaaattacttgt

SEQ ID NO: 141415 - DNA, 252 bp, Glycine max
ctttattcttttttcttcgcttcttctgtacagcacccaagattgaagatgatagaccttgctcgcgtgcagaaggagctcgtggaatgcagcaaggacgcggagggatcgggcatcaaagtctgccccaaaagcgacaaccttgttctcttgatcggcaccattcctggccctgtcggaactccttatgaagggggcattttccagattgatatcacattgccagatgggtacccgtttgaaccccccaag

SEQ ID NO: 141416 - DNA, 250 bp, Glycine max
ggctgaatttgtttctactttcatctttgtctttgctggagaaggctctggccttgctttggttaaaatttaccaggattcagctttctcagctgctgaattgttggcagttgcacttgcacatggatttgctctatttgctgctgtttctgcaagcatgcatgtatcaggtggccatgtcaacccagctgtgacatttggtgctctcattggaggcagaatttctgttctccgtgccgtatactactgg

SEQ ID NO: 141417 - DNA, 245 bp, Glycine max
agcagaccgagctagctagctagcaagcaagcacagagatggaggcaaagcgaggccatgccctcatgtgcttggcacgtgtttcactcttcctctgcgctctaaccctatccgctgctcacggaagcaccacggttcaagacatcgcgagaaagttgaaactcggggacaacgagcttctgcgcacggagaagaagttcaaggttttcatggagaattacgggaggagctactccacagaggag

SEQ ID NO: 141418 - DNA, 243 bp, Glycine max
cacaactacaagaaagaacttccttataaccaaaaccaacaacaactatggcaagttatcagaagcaccacgatgatcagggtcgcaaggtcgacgagtatggcaatgttgagaggcaaactgacgaatatggcaacccggttcatgccactagtgtcacttatgtagccactaaaagtgttggtggctacaatgatgacactaataagcaacatgataccaccggtgtctatcctgagaaag

SEQ ID NO: 141419 - DNA, 237 bp, Glycine max
cacctgcgcgctaacctagaccccacaaagggtgttggtcgattaagacagcaggacggtggtcatggaagtcgaagtccgctaaggcgtgtctaacagctcacctgccgaatcaactagccccgaaaatggatggcgctaaagcgcgcgacctatacccggccgccggggcaaggaccaagccccgatgagtaggagggcgcggcggtcgctgcaaaacccagggcgcgagccggg

SEQ ID NO: 141420 - DNA, 241 bp, Glycine max
cccaaaccatcatatggaatggaccaatgggagtgtttgagtttgacaagtttgctgttggtacagaggctattgcaaagaagctggctgacctcagtggaaagggggtgaccacaattattggaggaggagattctgttgcagctgtggagaaagtaggagttgctagtgtcatgagccacatatctactggtggtggtgccagtttggagttattggaaggcaaagagctccaggagtc

SEQ ID NO: 141421 - DNA, 168 bp, Glycine max
gtgcggtttcctttgttggtgttgctggaaactgttttcctggcatccgtttgtttctcattaaaggtgagtgaagatgagtataaccctttctacttgagaagctctaacagcttccaaactctctttgagaaccaaaacggtcgcattcgtctcctccagagattc

SEQ ID NO: 141422 - DNA, 245 bp, Glycine max
gccggtgacactggtaggcaacatgggaacatcggtggcccttactatggaaccaacaccgcagacaccggtactggtcccagaagtggaaccacgggcggcaccggttatggaggcactggtggcactgattatggaacaactggtggcactggttatggaagtggaactgggtatggagtcaacactgggggagcgcacactgaagcaggatataggaaggaacatcgtcagcatgaccaatc

SEQ ID NO: 141423 - DNA, 196 bp, Glycine max
ctatgatgagagtgcggtttcctttgttggtgttgctgggaactgttttcctggcatcagtttgtgtctcattaaaggtgagagaggatgagaataaccctttctactttagaagctctaacagctttcaaactctctttgagaaccaaaacggtcgcattcgtctcctccagagattcaacaaacgtgccacaca

SEQ ID NO: 141424 - DNA, 237 bp, Glycine max
ggaggcgaggtgttgggagcagtaggtgaaaccgttgctgagattggacagaacatgatgaagccagcggagatagttcaggaacgcgctcacgttcgacaagcgggtggggtcttggatgccattggtgaaaccattgctgagattgctgaaacgactcgagtcatggtttctggagaggacgagagagtgctgaggcagagcgtggtgttggagactcgcgtaactggtcgtgcc

SEQ ID NO: 141425 - DNA, 241 bp, Glycine max
ccactcgatgtttccatttgcctgcatgcctttggtattgtggggtgtggttcgtttagtggtgtcaagtcttgcgaacgtgagggtgcatgagtggtaatcgggatgtttttgttgcacggctccatgcttgcgcatgcaacgtgtgacatgcatccttttcattgtcaccttagccttcgtggcttaggtgctgacgattggttgctgtgttgcctacctaccaaacggtattcgtgtg

SEQ ID NO: 141426 - DNA, 245 bp, Glycine max
agcagatgtggcatctgttgactgcagcattggagacacatacttatccttgtctcgatatgatgaggctgtctttgcatatcagaaagcgctaacagttttcaagaccagcaaaggtgagaatcacccagcagtgggattagtctttgtacgtttggcggacctgtataacaggacagggaagataagggaatcgaaatcatattgcgagagtgcacttaaaatctgtgagaatccaatgcctg

SEQ ID NO: 141427 - DNA, 245 bp, Glycine max
caaggatcattcatcttgaaagaagagtttgtgtgtgacaatctttatagttctaaggagggtgcaagagagaactgaatttgctgtgatggcaactcgtagatatgcttttggaagagctgatgaggccactcatccagactccatgagggccactttggctgaatttgtttctactttcatctttgtcttaactggagaaggctctggccttgctttggttaaaatttaccaggattcagctt

SEQ ID NO: 141428 - DNA, 239 bp, Glycine max
gttgggcatcaaggaatcgcttgggccttcggtggcatgatcttcgccctcgtttactgcaccgctggcatctcagggggacacataaacccggcggtgacatttgggctgtttttggcgaggaagttgtcgttgcccagggcgattttctacatcgtgatgcaatgcttgggtgctatttgtggcgctggcgtggtgaagggtttcgaggggaaaacaaaatacggtgcgttgaatgg

SEQ ID NO: 141429 - DNA, 239 bp, Glycine max
aacccccaaccccaacctcaaccttaacctctcctcactttcttttcaaccagaactatgattaagctttttaaagtaaaggaaaaacagagagaactggcagaaaatgcgagtggcggaccacccgttaagaagcaaagtgccggcgagttgcgtcttcacaaagatataagcgagctgaatctaccaaaatcatgtaccatgcaattccccaatggcaaagatgacctgatgaactt

SEQ ID NO: 141430 - DNA, 137 bp, Glycine max
attcaaaccttgctctatactacacagtacacacactagaagaataatggcttccatcctccactactttatagccctctctctttcttgctcttgtcttttcttcttagccgactcagtcacccctacaaaaccaa

SEQ ID NO: 141431 - DNA, 236 bp, Glycine max
gaaagggattatggacaagattaaggagaagcttcctggaggacacagtgacaagtagatgcatcgtgcatcatgcatgcatgcatatatataatattgttgtctttgaataaatttgctgcatatgtacttacgtacgtacagtgtcttgtcatgtatgtggaggatatagtatatggttatagtttatgtagaagaataaaaaatgtatgcatgtagtaatgtaagggtcttat

SEQ ID NO: 141432 - DNA, 257 bp, Glycine max
  unsure (1)..(257): unsure at all n locations
ctaaaatggaagttgttaaccaaagagatgcagaacttttcttcatgcaccaaatgtatcagagatcaaatcatcagccagaaaagaagattgncatcctcagacacatagcggagacagtgaagcataggaaacacatagatggtagcgtggaattgattggagttttattgtatggaccaggaaaaggttcttctgttctacaatccatgagggctcctggtcttgcccttgttgatgactggacatgcctaaaa

SEQ ID NO: 141433 - DNA, 243 bp, Glycine max
ggcaaaatggtggtaagcaaacctctgtatgtgactctagcccaacggaaagaagataggagagctagactgcaggctcagtttgctcaaatgcgacctgttggaatgccaccatctgtcggtcctcgtgtgccaatgtatcccccaggtggtccaggtattggtcaacaaatattttatgcccaaggccctcctgctatcattccttcccagcctggatttgggtatcaacaacaacttgtt

SEQ ID NO: 141434 - DNA, 235 bp, Glycine max
attcatactgggtgaatgaggactccacttacaaatattttgaggtcattctggtggatgttgcccacactgctgtaagaaatgatccaagaatcaactggctctgcaatccagtccataaacacagggaactgcgtggcctcacttctgctgggaaaagcaataggggtttacgtggcagaggacatctctaccacaaaaatcgtccatcacgcagggcaacctggaagagaaa

SEQ ID NO: 141435 - DNA, 237 bp, Glycine max
gggcaggattgcaaagacttggctcaaagcttactgaaactgaagtgcgacacttatggatgccgctgatgtagatggaaatggcacaattgactacatagaattcatcactgctacaatgcatagacacaggttagaaacagatgagcatctttacaaggccttccaatattttgacaaagatggcagcgggtatatcacaagagatgaactggaaacagccatgaaggagtatgg

SEQ ID NO: 141436 - DNA, 232 bp, Glycine max
gttgctgttaaaagtctttattcttacattattacttttattaaccataacatgtagtagatgcttgcttaattataaataagcatattataaaaagtctcgcgatcttggctcatcatgcattggcaaagttgaagaggtcagcacatttgactccatcagagtgcagtgatgaggtgctaaacccaacccttgaccttgcaagatcgaacatgcaccaatttctcttcca

SEQ ID NO: 141437 - DNA, 235 bp, Glycine max
gttcttcatagttcagtgtgtcgtttaaaaatgtcgcagttgctggataaagccaagaacttcgtgtcgtagaaggtaaatgatatggccaagccggaggcgagtgtcactgacgtggacttcaagcgcgtgagccaagataatgtcgagtacttggccaaggtctctgttcgtaacccttattcaacttccatacccatttgtgagatcaactactctttcaaaagcgcatcca

SEQ ID NO: 141438 - DNA, 237 bp, Glycine max
gcctcggtcaggaggagcactagctaagttcacaatttcaaaatggctaggggactaaagaagcatttgaaaaggctcaatgctcctaagcattggatgcttgacaaactgggtggtgcatttgcgcctaaaccctcatctggaccacacaaatcgagggagtgcctccccctcattcttattctgcgaaaccggctgaagtatgctctgacataccgtgaagtcattgctattctg

SEQ ID NO: 141439 - DNA, 249 bp, Glycine max
ggcactgtttggacttgttcagattgtaatgtcattcataccggatctccataacatggcatgggtttcagttgttgccgcacttatgtcctttacatactcattcattggactaggacttggcatagcaacagtcataaaaaatggaagaattatggggagcttgacaggaataccaactgataaaattgctgacaaattttggttggtcttccaagcacttggtgacattgcctttgcctatccata

SEQ ID NO: 141440 - DNA, 169 bp, Glycine max
tttcctttgttggtgttgctaggaactgttttcctggcatcagtttgtgtctcattaaaggtgagagaggatgagaataaccctttctacttgagaagctctaacagcttccaaactctctttgagaaccaaaacggtcgcattcgtctcctccagagattcaacaaac

SEQ ID NO: 141441 - DNA, 235 bp, Glycine max
tatcgcgagctgccgcccgcgatctagaaccgcgactaccgatccaagatcgagtccgagctctccaacatctgcgacgacattctcaagctcctcgactctcgcctcattccctccgcttcctccggcgattccaaggtcttctacctcaagatgaagggagattaccacaggtacctcgccgagttcaagaccggcgccgagcgtaaggaggctgccgagagcactctctctg

SEQ ID NO: 141442 - DNA, 246 bp, Glycine max
atgtctatatacccatctcctactggggtgatgattggtcttgatttggcatataatttgcattctgcgtttgggaactggttcccagggtcaaaaccactacttcagcaggccatgaataagatcatgaagtcaaatcctgcactgtatctgttgagggaacggataaggaaaggtatgcagttgtactcttctgagcccactgaaccatatttgtcttcccaaaactatggagagatattcagc

SEQ ID NO: 141443 - DNA, 234 bp, Glycine max
gtgaaggcatcgttagcagttttgtagattcaacctcaatttgcagagttacgttctaatatatttacacaagactgataagagaaaatgtctctgattccaagtttcttcggtggccgaaggagcagtgttttcgatcctttctccctcgatgtgtgggaccccttcaaggattttccatttcccagttctctttctgctgaaaattcagcgtttgtgagcacacgagtggat

SEQ ID NO: 141444 - DNA, 230 bp, Glycine max
gcgatgcggatgaggcgccactcgatgtttccatttgcctgcatgattttggtattgtggggtgtggttcgtttagtggtgtcaagtcttgcgaacgtgagggtgcatgagtggtaatcgggatgtttttgttgcacggctccatgcttgcgcatgcaacgtgtgacatgcatccttttcattgtcaccttagccttcgtggcttaggtgctgacgattggttcctgtgt

SEQ ID NO: 141445 - DNA, 271 bp, Glycine max
tgtcgagcgaatcggctcgagcacttgtgggttaactgtgagtaacactactcacccaaaacataccaagcacccttctgccactccacccaatgctccagatccaacactcaccaatgcctcagttgcccagcggcatcaaggccagggtgccacaaaaacacgtgtggcctcatgtccaccaaccccatcacccaacaaaccggtttgggtgaactaggccaagatgtgcttgcaatccacgccactcaaggctccacccaacaacttg

SEQ ID NO: 141446 - DNA, 262 bp, Glycine max
ggagaagacgttcttgcaatccacgccacacaagggtcgacccaacaatttggcccattggtcacagtcccacaattcctcttttcttgtgcaccttccttccttgttcaaaagggtcttcctagaaacactcaaggtgtggctgggttaggccatgcaccaatttctcttccaaaccaactcgcttcccactttggcctacaacgccaattcaccacttgcctttctcgctaccctacttcaaagggtgctataatattcg

SEQ ID NO: 141447 - DNA, 265 bp, Glycine max
ctacacaaaagtgttccacttgagtgaaaagtacatgtgttaagaactaaacaatttttcaatggcgtccaagaaacaagaggagcgagctgaggcagctgcgaaagttgctgccaaagaactcgaacaagtcaacagagatagaagaggccgtgatttcggtgttgttgctgaacaacaacaacaacatcatcaggaagatcaacaaaaacgtggtgtaatcgggtccatgtttaaggcggtgcaagacacctacgagaacgcc

SEQ ID NO: 141448 - DNA, 262 bp, Glycine max
tgggccgtgtgagaacaaagcgcggagagagaaagtagttggatggttcgtggaagcagcccaacccaatcaatgaataaaaataagggaacgtaagaaaggtctcaacgaaaaaccctaagcaaagatggggaacacggagaagctgatgaaccagatcatggaattgaagttcacgtcgaaatcgctgcagcggcaatcgcgtaagtgcgagaaggaggagaaatcggagaagctgaaggtgaagaaggcgatcgagaaa

SEQ ID NO: 141449 - DNA, 240 bp, Glycine max
  unsure (1)..(240): unsure at all n locations
gcagaccgagctagctagctagcaagcaagcacagagatggaggcaaagcgaggccatgccctcatatgcttggcacgtgtttcactcttcctctgcgctctaaccctatccgctactcacagaagcaccaaggatcaacacatcgcgagncacctgnaactcggggacaacgaactactgcgcacggagacgcagttcaagggtttcatcgagcattacgggaggagctactccacaga

SEQ ID NO: 141450 - DNA, 263 bp, Glycine max
  unsure (1)..(263): unsure at all n locations
attcaaaccttgctctatactacacagtacacacactagaagaatattggcttccatcctccactactttttagccctctctctttcttgctcttttcttttcttcttatccgactcagtcacccctacaaaaccaatataccttgttgttctacccgttcaaaatgatggttccacagggctccattactacaanctccaaaaagtaacccctctaatgcaagtaccagtcctggtggacctcaatggaaatcacttgtggg

SEQ ID NO: 141451 - DNA, 268 bp, Glycine max
acaacaacttgctaaaatgggatctcaagtcctagttcctttccgaggctctgaacataatccccgacatctcaaattgatgggggatttgggacagattgtacccatgaaaatcaatccaagggatgaaagttcagtaaaagctgtgatggctaaggccaatgttgttatcaaccttattggaagggattatgagacaagaaactacagctttgaagaagtgcactatcacatggctgagcaactagcaaagatttccaaagagcat

SEQ ID NO: 141452 - DNA, 265 bp, Glycine max
tgaatatctgaactgtaagttgctgttagttgacaaaaagataaccaatgcaagggatcttatcaacatactcgaggatgctattagacgtggataccctatattaactattgctgatgatattgaacaagaagctttagcaactcttgtggtgaacaaacttagaggatcactgaaaattgcagcactcaaggcccctgggtttggagatcgctatagccagtcccttgatgatattgccatcttgactggaggtactgtaatc

SEQ ID NO: 141453 - DNA, 263 bp, Glycine max
aaggttatccatgggagatgggccatgcttggagcactaggatgcatcaccccagaggtgctagagaagtggttgagagtggacttcaaggagccagtgtggttcaaagctggagcccaaatattctcagaaggtgggcttgactatttggggaacccaaaccttgtccatgcacaaagcatcctggcagtgctgggtttccaagttatcctaatgggccttgttgaagggtaccgcatcaatgggcttgatggggtgggaga

SEQ ID NO: 141454 - DNA, 265 bp, Glycine max
aaaacagtaaagctaacttcaacacctttaattttctaaaagtaattcagcggctgaataccaagcggagaagatgagtcaggagcagccatcgcgtcccaaaggccaaaaccccatcaaatacggcgacgtttttgtcgtctccggcgaccttgcacagaagctactcgcaccggaagatgctgccatgatgcaaagcgcggaagctcgagtgctcggacaaacccaacccggcggagcagcttccgtcatgcaatctgccgcc

SEQ ID NO: 141455 - DNA, 248 bp, Glycine max
gacctttttgctgatgctgaacaggatcagaggacccgaggggatgacagtgattttcatgttataatctttgatgaaattgatgctctttccatgtcaagatgttcaactcgagttgttactggagttcatgatagtattgtaattcagcttcttactaagatagatggtgtggagtcactaaataatgttttacttattggaatgactaacagaaaggacatgcttgatgaagctctcttaagacc

SEQ ID NO: 141456 - DNA, 268 bp, Glycine max
ccgccgcgtcctcctcccaaacgccccctccctccgcgccctctccacacgtcccaccacctcctccctcaacgaccccaaccctaactggtccaaccgtcccccgaaaacaaccatcttgctcgacggctgcgacttcgaacactggctcgtcgtcatggagaagcccgagggcgaccctacccgcgatgacatcatcgatagctacattaaaaccttggccaaggtcatcggaagtgaagaggaggcgaggatgaagatatattcg

SEQ ID NO: 141457 - DNA, 262 bp, Glycine max
aaaataatcaaacttgccatacccgtcaacaaacctggcagatatgatgatttcttcttatctagcactcaagcccaacagtcctacttgcaaggcttcagccataatattctagagacctccttccatagcgaattcgaggagataaacagggttttgtttggagaggaagaggagcagagtcagcaagagggagtgatcgtggaactctcaaaggaacaaattcggcaactgagcagacgtgccaaatctagttcaagga

SEQ ID NO: 141458 - DNA, 260 bp, Glycine max
ctgtaattgtagtagtacacagtagcaccatgagccaggaacagctcaagaaacctcaaggggagcaggaccccatcaaatacggcgacgttttcaaagtctccgacgaactcgctttcaaacccatcgcgccaagagacgcagctctcatgcaagccacggagaaccaagcattgggccaaactcaaaaaggaggtcccgcctcggtgatgcaatccgccgcaaccgaaaacctccgcgccggcgtcgtgggccgccaa

SEQ ID NO: 141459 - DNA, 260 bp, Glycine max
gaaaatttctgcatttcgacattatgtagttcattttctacattgtgacttgtagaggagtaatgaacatgctatttgtgtacgtccatgtaagaactgtttaaatattcaatttaatttaagtcctgaatatgaaatgattttggattgaaattggaaagaaatttttgtaacttcagtaatacttaccatatatctatacagcatttagcacgtaagcaaaaaaaaaaaaaaaaaaaaaaaaaaagggggggccgccg

SEQ ID NO: 141460 - DNA, 257 bp, Glycine max
aaatttgctgcatatgtacttacgtacgtacagtgtcttgtcatgtatgtggaggatatagtatatggttatagtttatgtacaagaataaaaaatgtatgcatgtagtaatgtaagggtcttatatatgtggctgaaatataaaccataataaaggcagagatgttgtgccaataaaaataaaaaaaaaaaaaaaaaaaaaaaagggggccccccaaaaagtgacctctcccccccgggattttttccgggacggg

SEQ ID NO: 141461 - DNA, 217 bp, Glycine max
cggctcgagatatactatgatgacagtgcggtttcctttgttggtgttgctgggaactgttttcctgtgatcagtttgtgtctcattaaaggtgagagaggatgagaataaccctttctactttagaagctctaacagcttccaaactctctttgagaaccaaaacggtcgcattcgtctcctccagagattcaacaaacgctccacacaacatacg

SEQ ID NO: 141462 - DNA, 107 bp, Glycine max
gcggtttcctttgttggtgttgctgggaactgttttcctggcatcagtttgtgtctcattaaaggtgagagaggatgagaataaccctttctactttagaagctcta

SEQ ID NO: 141463 - DNA, 84 bp, Glycine max
cgaatttaatactaatcgaaaatactaatagaatagaaatagaactgtcttttcatatagatatcccttccacacaacatacga

SEQ ID NO: 141464 - DNA, 262 bp, Glycine max
tcaaaccttgctctatactacacagtacacacactagaagaatattggcttccatcctccactactttttagccctctctctttcttgctctttactattcttcttatccgactcagtcacccctacaaaaccaataaaccttgttgttctacccgttcaaaatgatggttacacagggctccattgacccaacctccatctaagcacccctctaatgcacgtaccagacctggaggacctcaatggacatcacatgtgggc

SEQ ID NO: 141465 - DNA, 254 bp, Glycine max
ggcctccgaggccactagaccgcagatatagaagatgagtatcggctacatgagacctcaacagagccagatgtatctctagggtccacatggctgtctgattttcctcaggcctgggcggaaaccgggggcatgggactggcagttcgccaagctcctctgatcatacttctgaaagcaacctctacccccgtgtccataaaacaataccccatgtcacaagaagccagactggggatcaagccccacataca

SEQ ID NO: 141466 - DNA, 279 bp, Glycine max
cggaagtcggctcgatgatggagtcttcttggtttaagaaaccggtgccgaggaagcttgctgccgaaaaggtggatttggaggaggagtagattgagagccagctggagaccatcaatgctttccacataatttccttgtcggaggggttcaatttgtcgcccttgttcgaggacaagaggagggaggagatgaggttcgccaccgcggggacgcccagcaccgtcatttcgcggctggaggaggtggccaaggccgggaagttcgacgtcaggagta

SEQ ID NO: 141467 - DNA, 257 bp, Glycine max
agcagatgcttccaaggggacgtgtctatcgttaccctcctggccgcaacatgcaagatgtcccacttcaagttgcagctggtggaatgctgtcggtcccttatgacatgggaggtctgccaatgcgcgatgctgtgggacagccaatgcccattcaagctttggctacagccctcgcaaatgctccaccagaacagcagaggactatgctcggtgaagctttatacccacttgtggatcagctggaacatgattct

SEQ ID NO: 141468 - DNA, 103 bp, Glycine max
cgggagatgcaaacattgaacttgttggcattaaagaacgacaacagaagcagaaacaggaagaggaacctttggaagtgcaaaggtacagagctgcattgtc

SEQ ID NO: 141469 - DNA, 254 bp, Glycine max
gagaggattaggagcagaggcagcaagatggagtgatcgtggaactctcaaaggaacaaattcggcaactgagcagacgtgccaaatctagttcaaggaaaaccatttcctccgaagatgaaccatcctacttgagaagccgcaaccccatctattccaacaactttggaaagttctttgagatcacccctgagaaaaacccacagcttcgggacttggatatcttcctcagttctgtggatatcaacgaagga

SEQ ID NO: 141470 - DNA, 254 bp, Glycine max
tatcaagatgccccttgtcaacaagcacaaacccaaacccgctaagctctgggctagcattactccgggaacagtgttgattcttcttgctggtagatttaagggaaagagggtagtctttttgaagcagcttccttctggattgcttcttgtaactggtcctttcaaggttaatggagttcctttgagacgtgtgaatcaggcgtatgttattggcacatcaaccaaagtagatatctctgctgttaatgttg

SEQ ID NO: 141471 - DNA, 256 bp, Glycine max
tcggagctgtctgtgcaaatttgcgttgttcttcgcggcacacctcactcactgaacggtaagtatggcggacaaggctgttacaatccgaacccgaaagttcatgaccaacaggcttctttccaggaagcagtttgtcgttgatgtccttcatccagggagggcaaatgtttccaaggctgaacttaaggagaagctggctaggatgtatgaagtgaaagaccctaatactgtatttgtcttcaaattccgaaca

SEQ ID NO: 141472 - DNA, 255 bp, Glycine max
ggagaattcatgcaacctgactgggacatgtttcatagtttacacccagcagcagatcttcatgctgcagctcgtgcaattggtggatgtcctatttatgttagtgacaagccaggcaatcacaattttgatcttcttaagaagctggttctcccggatggttcggttctccgtgctcagttacctgtcaggccaactcgtgattctctatttgtggatccagccagagataggactagcttgctcaaaatatgg

SEQ ID NO: 141473 - DNA, 256 bp, Glycine max
cggctcgatagagaaaaacccccagcttcgggacttggatgtcttcctcagtgttgtggatatgaacgagggagctctccatctgccacacttcaattcaaatgccatagtggtactagtgattaatgaaggagaagcaaacattgaacttgttggcattaaagaacaacaacagaggcagcaacaggaagagcaacctttggaagtgcggaaatatagagctgaattgtctgaacaagatataatttgtaatccc

SEQ ID NO: 141474 - DNA, 124 bp, Glycine max
tgttaatgtcatgtttagtctgtgtcaagtttcatgtttcgggtttgttgactttgttctatggaattgtaaccaataagaatctcctttttttgagattatggaaaatagcaaaattgtgttt

SEQ ID NO: 141475 - DNA, 256 bp, Glycine max
gttgagttgaaggagaacatcaccagtttccagggtgtgttggatggcaaatacgatgacctcccagagcagtcgttttacatggttggcggtattgaagaggtcattgctaaggctgagaaaattgctaaggaatctgcagcgtcttaattacatacaacagccatgttctcattttaatcctttttttgtaattgctaaatttaataatttaggaactcttggcaatgccaaacgacaaaattttcaatttttt

SEQ ID NO: 141476 - DNA, 264 bp, Glycine max
aaacaattcaattcaatctgcctcgatcatggagaggaaaacatttgggtttttgttcttgctcctccttgtcttagcttctgatgtgacggtgaagagagcagaggcgaaagattgcttgacaaggaggcacgggtttcagggtagatgcttattcgacaggcaatgtgcacatgtgtgcaggagcgatggtttcatcggtggtcagtgccgaggccctcttcgcaaatgcttttgcagcaggccatgttgatcgaaattact

SEQ ID NO: 141477 - DNA, 257 bp, Glycine max
cgcaatgtgatttctgcccagtgctctgaatgtcaaagtgaagaaattcaaccaagcgcgggtaaacggcgggagtaactatgactctcttaaggtagccaaatgcctcgtcatctaattagtgacgcgcatgaatggattaacgagattcccactgtccctgtctactatccagcgaaaccacagccaagggaacgggcttggcggaatcagcggggaaagaagaccctgttgagcttgactctagtccgactttg

SEQ ID NO: 141478 - DNA, 256 bp, Glycine max
  unsure (1)..(256): unsure at all n locations
gttgccacactacaccgagatacccccctaaacccgtttgcgttgttgtttgcgaagaaatggcgactaagaggagcgtgggaacgttgaaggagggtgatttgaaagggaagagggtgttcgtgagggtcgatntgnacgtgcctttngatgacaaccttaacatcaccgatgacactagagtccgtgctgctgttcccaccatcaagtacttaactggtcatggagccaaagtgatcctttctagccacttggg

SEQ ID NO: 141479 - DNA, 255 bp, Glycine max
aaatggtagtaaccattgtagcttctcattgtgttgttccaaaccaagaaacacccaaggttcgtttatggttatcagatagtgaccaagtagtgcgtttaggtcatacacccactatatatgtttacaaagcaaaacacaactccaaaaccatagagagaatgaaaacctcacttggcaagattttggtgtactactatccagttgctggaagattgaacttatcagatagtggtcgaatggaattggattgca

SEQ ID NO: 141480 - DNA, 247 bp, Glycine max
ataagaactaagatggattggatcggagcgtaccgcggaggccagagaagcagggactggtgcgacccttcatcaccattcactgatttgtgggaccctcgtcgtgtcggtgacgctgatgatatcacctcctctctcgcccatgctcacgttgactggcgtgagactgataaagctcatatcttccgtgctgatcttccaggggtgaagaaagaggagtctaaggatcaggtggaggagaataaga

SEQ ID NO: 141481 - DNA, 254 bp, Glycine max
caacgtgagagtcaactcaataagaatcaaccagcacagtgtgttcccactgaacaagatatcatccaccatcgtagggtcgacctctggaggaaccatgattagcaactcaactcctcacatggttctccagcaatccgtgtaccaggctttcactcaggtgtttgctcagcagctaccaaagcaagcacaggtgaaatctgtggcaccatttgggttatgcttcaactccaacaagatcaatgcatatccta

SEQ ID NO: 141482 - DNA, 256 bp, Glycine max
aagattatgcgggtgatgctgtacagaatatcaaagattatgcaaatgatgcagcgcacaagagcaaagattatgctggtgatgcttctcacaagagcaaagaagcttctgattatgccagtgagacggctcagaagaccaaagactatgttggtgatgctgctcagaaaagcaaagaggcttctgaatatgctagtgatgcggctcagaggaccaaagagtatgctggtgatgccaccaagagaagcaaagaggc

SEQ ID NO: 141483 - DNA, 257 bp, Glycine max
gaaaataatggggtgggagagcttcgtggtggtgcacaacatagcaaagaggcacaacgtgggaacacttgctcgctgtgccaccgcgttcggcgtatcagaactcatcctcgttggtcgaagagatttcaactgtttcgggattcatgggtcctcctcccacctccgatttcgacacttccactccctccaagacgctcgcaaatttctcaaagacaaagactttgatatttgcggcgttgagatcacaaccgatt

SEQ ID NO: 141484 - DNA, 262 bp, Glycine max
aagaaagagcctgaggttatttcgctgccactgccttctcttgtttgttgttgttgttggaagccaaaaccctagcagccggcgagaatggcagacgttgaggttgatgtggcggcggcggcggcggcggcggctgcagggcagccaaagaagagaacgttcaagaagttcagcttcaggggggtggatctggacgcgcttctggacatgtccactgacgaactcgtgaagatgttcagtgctcgcgcacgcagaaggttcc

SEQ ID NO: 141485 - DNA, 254 bp, Glycine max
  unsure (1)..(254): unsure at all n locations
cttttgggtaagatgtcgagtttcacagcagcaatggtgtacgtcaaagaaaaggngtcaaaagcctacttcaagagatatcaagtcaagttcaatagaagaagagagggaaaaaccgattaccgtgccaggattcggttgattaatcaggacaagaacagatatcgcactccgaaataccgatttgttgttcgctttagcaacaaggacattgttgcaccaataatgtctgctagcattgctggcgatattgt

SEQ ID NO: 141486 - DNA, 250 bp, Glycine max
cacaactataagaaagaacttccttataaccaaaaccaacaacaactatggcaagttatcagaagcactacgatgatcagggtcgcaaggtcgacgagtatggcaatgttgagaggcaaactgacgaatatggcaacccggttcatgccactagtgtcacttatgtagccactaaaagtgttgatggctacaatgatgacactaataagcaacatgataccaccggtgtctatcctgagaaagataccgg

SEQ ID NO: 141487 - DNA, 207 bp, Glycine max
gtgatttcagtgagtgatcggtgttcacttgatctcatcataatcgtcagcgtcaattcgaagaagatgacgatcagaaacatcgccgtcggaaggcctacagaggcgagtcaccccgacacgttgaaggtggctttcgcagagttcatctcaaccttcatctacgtgtacgacggatcaggctccggcatcgcctacaacaagctc

SEQ ID NO: 141488 - DNA, 248 bp, Glycine max
caaaaagaaagaatcccaggcgaggtgaaagatggaggggaaggagcaggatgtgtcgttgggagcgaacaagttccccgagagacagccaattgggacggcggcgcagagccaagacgacggcaaggactaccaggagccggcgccggcgccgctggttgacccgacggagtttacgtcatggtcgttttacagagcagggatagcagagtttgtggccacttttctgtttctctacatcactgtct

SEQ ID NO: 141489 - DNA, 250 bp, Glycine max
cccacttcttctgtttctgctgaaaattctgcattcgtgagcactcgtgtggattggaaggaaaccccagaggcacacgtgttcaaggctgatattccagggctgaagaaagaggaagtcaaggttcagattgaagatgatagggttcttcagattagcggagagaggaacgttgagaaggaagacaagaacgacacgtggcatcgcgtggagcgtagcagtggtaagttcgtgagaaggttcagattgc

SEQ ID NO: 141490 - DNA, 250 bp, Glycine max
atcgtgattaccttcggtctggtgtacacggtctacgcaactgccattgttcccaagaagggtaatttgggaattattgctcccatcgccattggtttcattttcggcgctaacattttgttgggtggggccttctctggagcggccatgaaccccgctgtgacatttgggcctgctgtcgtgagctggacctggaccaaccactggatctactgggccgggcctctcatcggtggtggaatcgctggcc

SEQ ID NO: 141491 - DNA, 198 bp, Glycine max
gagtggggaaataaatgatgtatgtacctcttcttgcctatgtagtatgtttgcgtgttttgttgtctagctttgcttatttagtaattagtagaagggacgttcgttcgtgtctcataaaaaggggtactaccactctggcaatgtgatttgtatttgatgaattcaatgtgaaatgtgttttgcgttggtgtatgt

SEQ ID NO: 141492 - DNA, 249 bp, Glycine max
caacgtgatagtcaactcaataagaatctcccagcacagtgtgttcccactgaacaagatatcttccactactctatggtcgacctctggaggaaccatgattagcacctcaactcctcacatggttctccatcaattcgtgtaccaggctttcactcaggtgtttgctcagcagctaccaaagcaagcacaggtgaaatctgtggcaccatttgggttatgcttcaactccaacaagatcaatgcata

SEQ ID NO: 141493 - DNA, 256 bp, Glycine max
gtgaatagaaagaaagcctcgtctagtaaacccagtttttacaaatctaacataacaaaataaatcaccaaccatgtctatcatcccaaacttgttcggtggtcgacgaagcaacgtcttcgacccagtttctctggacgtgtgggacccattggaagggtttccgttttccacagccaacgctggcgaaagtagtgccatagccaacactcgcgtggactggaaggagacaccgcaggctcacgtgttcagcgtg

SEQ ID NO: 141494 - DNA, 250 bp, Glycine max
cacaaaagtgttccacttgagtgaaaagtagtgtgttaagaactaaacaatttatcaatggcgtccaagaaacaagaggagcgagctgaggcagctgcgaaagttgctgccaaagaactcgaacaagtcaacagagaaagaagagaccgtgatttcggtgttgttgctgaacaacaacaacaacatcatcaggaagatcaacaaaaacgtggtgtaatcgggtccatgtttaaggcggtgcaagacacct

SEQ ID NO: 141495 - DNA, 247 bp, Glycine max
cacacaactactacaagtacttccttacaatcaaaaccaacaacaactatggcaagttatcacaagcactacgatgatcagggtcgcaaggttgacgagtatggcaacgttgagaagcaaaccgacgaatacggcaaccctgttcatgctgctagtgtcacctatgtagccaccagaactgctgctggtggttacagtgatgacattaataagcaacatgataccaccaatgcctacggcgtagaca

SEQ ID NO: 141496 - DNA, 246 bp, Glycine max
ctcgagccgttagaattagaaacaaagagaagaagaaaggaaagaattgatcgttgaaaatgcagggaggaaagaaagcgggagagtccattaaggaaacagctacaaacattggtgcttctgccaaggctggcatggagaagaccaaggccactgtccaagagaaggcagaaagaatgacagcacgtgatccggtgcaaaaggagttggcagcccatgagaaagaggcaaagatgaaccaggcgg

SEQ ID NO: 141497 - DNA, 177 bp, Glycine max
  unsure (1)..(177): unsure at all n locations
tgangttgtggtttcctttgttggtgtttgtgggaactgtcttcctggcatcagtttgtgtctcattaaaggtgagagaggatgagaatctccctttctactgtagaagctctaagagcttccagactctctttgagctccataacggtcggatacgtctcctaccagagattcaac

SEQ ID NO: 141498 - DNA, 257 bp, Glycine max
ccaagatattttccacgatttggctttcaccccattaaccgtcacaccacaaggagaatacaacgtgagagtcagctccataagaatcaaccagcacagtgtgttcccaccgaacaagatatcatcaaccatcgtagggtcttctggaggaacaatgattagcacctcaactcctcacatggttctccagcaatctttgtatcaggctttcactcaggtgtttgctcagcagctggaaaagcaagcacaggtgaaat

SEQ ID NO: 141499 - DNA, 243 bp, Glycine max
ctctttctccgagaacaaaaaaaaaaaacgtgattcgctctactcttcgaataaaccacaaaaccaacaaacgagaagaggagtgagagaagatggggttgtcgttcacgaagctgttcagcaggttgtttgcgaagaaggaaatgaggattctgatggtaggtctcgatgctgctggtaagacaaccatcttgtacaagctcaagcttggagaaatcgtcaccaccatccccaccatcggat

SEQ ID NO: 141500 - DNA, 241 bp, Glycine max
tgttcttcatagttcagtgtgtcgtttaaaaatgtcgcagttgctggataaagccaagaacttcgtgtcggagaaggtaaatgatatggccaagccggagggaagtgtcactgacgtggacttcaagcgcgtgagcaaagataatgtcgagtacttggccaaggtctctgttcgtaacccttattcaacttccatacccatttgtgagatcaactactctttcaaaagcgcatccagggag

SEQ ID NO: 141501 - DNA, 239 bp, Glycine max
cgcaatgtgatttctgcccagtgctctgaatgtcaaagtgaagaaattcaaccaagcgcgggtaaacggcgggagtaactatgactctcttaaggtagccaaatgcctcgtcatctaattagtgacgcgcatgaatggattaacgagattcccactgtccctgtctactatccagcgaaaccacagccaagggaacgggcttggcggaattagcggggaaagaagaccctgttgagctt

SEQ ID NO: 141502 - DNA, 239 bp, Glycine max
gagtaatcgagaaagagaagaagcatatatatcaaaatggctgcagagatggagagggagtcattgataactgaagctcctaatgcaccagttactgcacagagaagggtcagaaatgacttagaaaattctctactaaaaccatacttgccaagagcattgaaagctcctgatacgggtcacccaatcggaacagcaggccacaggcaccacaacttatctgttcttcagcagcattg

SEQ ID NO: 141503 - DNA, 237 bp, Glycine max
aaaggattctacccgccgctcgatgggaattgcgcttcaaggcgtctcgtagggctaatcctcctcacgagggtcaccaacggcacgtgcctttggggggccgaggtccctactgctggtcggcaaacggacggcgggcgcacgcgtcgcttctagcccggattctgacttagaggcgttcagtcataatccaacgcacggtagcttcgcgccactggcttttcaaccaagcgcgat

SEQ ID NO: 141504 - DNA, 237 bp, Glycine max
tgctatggttaaagttaatccttctggagctgtaaaagcatcctctatgtcattgatacgagatgatgttgagacagaggatgcttttagaggtctatgtgctatggttaaagctaatccttctggagctctaagttcgctagtttgcatgtgcaaagccattgcaagttggcatgaaataaggagtgaagatttacacaatgaagtctgccaggtcttgcatgggtataagcagat

SEQ ID NO: 141505 - DNA, 233 bp, Glycine max
ttcttctcttgcggctatggtttttgcgctgttcttctagatttaaggcagatgggtaaggacatggttcacatcagtattgtggttattggccatgttgactctgggaagtccactaccactggctacctgatctacaagcttggaggcattgacaagcgtgttatttatagatttgagaaggctgctgctgagatgatcaagaggtctttcaactatgcctgggtgcttga

SEQ ID NO: 141506 - DNA, 240 bp, Glycine max
caaatgtgaaggttgttgtgtctgagagtggttggccatctgaaggtggagttggagcaactgttcaaaacgcaggaacctattaccgcaatttgattaatcatgccaaaggtggaacccccaagaggcctagtggacccatagagacttacctctttgccatgtttgatgaaaaccagaaggatggtcctgaaatcgaacgacactttggtctcttcaggcctgacaaatcacctaaat

SEQ ID NO: 141507 - DNA, 241 bp, Glycine max
agacaaggtaggactggctttcctttggttgatgcaggaatgagagaactttgggcaacaggatggatacacaacagaataagagtaatagtttccagttttgctgtgaaaatgttgcttctaccctggaaatggggaatgaaatatttctgggacacacttctggatgcagaccttgaaagtgatatcttgggttggcaatatatctcaggaggcttaccagatggccatgagcttgagc

SEQ ID NO: 141508 - DNA, 244 bp, Glycine max
atgatatagaaagagagagaagaagaaaagaagaacaaagatgcaatcctcaaaggagaagatgaaaaacatggcaagtgctgccaaggaacaagtcgacatctataaagccaaaatagacgagaaggcagagaaagcaacggcaagaacagaagaggagagggtgatagcccatgagcacgcaaaggcaaaggaagctggagcaaagatggagctgcatgaagctaaagcaaggcatgcagca

SEQ ID NO: 141509 - DNA, 242 bp, Glycine max
  unsure (1)..(242): unsure at all n locations
gagacagagatcacatagcagaatggcttctactcattgtgtcttgcannancatgctcttatcanncctgncagatccccatcacaacgcatcatggttagcacctagcctaaccagcttgtttgctcggcacagaagcaagaggatattgatgtcagcccaatctctcgccggttagctctaaccgtgctcattggtgctgctgctgttggctccaacgtccaacctgctgctgcagctt

SEQ ID NO: 141510 - DNA, 244 bp, Glycine max
cgacgtgagagagattgtgaagtaagtagaaatcggtgcaagaacttctccgctttatctacaaaatttaagtgagtttgtgaagacaaaaaatcactagctactaaaaaatggccacagttggaaggaacgcagcagctccattgctgtttcttaacttgatcatgtattttattgttcttggctttgctagttggtgcctcaacaagttcatcaatggccaaacttaccaccctagctttgg

SEQ ID NO: 141511 - DNA, 238 bp, Glycine max
ggaagacacgtggtggggcagttcgtggagcccgacgtccccatgaacaccccaggcaccgcgctggagcgtgacgccataaccatcggcgaggctctcgaggcatcggcgatagccggagcaagcgacaagccggtggatgaaagcgacgccgccgcgatacaagctgcggagatgagagcgacaggaaagaacgagacagagcctggcgggctgggcgccagggcccagtcagcag

SEQ ID NO: 141512 - DNA, 228 bp, Glycine max
tctaaatgtcaaatgggcttcttgtgctggacctggaggatggaatgatcctgacatgctagaagttggaaatggaggcatgacaacagaagaatatcgcgctcatttcagcatatgggcattagctaaggctcctttattgattggttgttacattagagcattggatgccaccaccaaagaattgctaagcaacaacgagtgattgcagtaaaccaagacaagctt

SEQ ID NO: 141513 - DNA, 233 bp, Glycine max
ccaccatcgtagggtcgacctctggaggaaccatgattagcacctcaactcctcacatggttctccatcaatccgtgtaccaggctttcactcaggtgtttgctcagcagctaccaaagcaagcacaggtgaaatctgtggcaccatttgggttatgcttcaactccaacaagatcaatgcatatcctagcgtggaccttgtgatggacaagcccaatggtcctgtttggaga

SEQ ID NO: 141514 - DNA, 238 bp, Glycine max
gtagacagtagcaccatgagccaggaacagctcaagaaacctcaaggggagcaggaccccatcaaatacggcgacgttttcaaagtctccgacgaactcgctttcaaacccatcgcgccaagagccgcagctctcatgcaagccacggagaaccaagcattgggccaaactcaaaaaggaggtcccgcctcggtgatgcaatccgccgcaaccgaaaacctccgcgccggcgtcgtgg

SEQ ID NO: 141515 - DNA, 239 bp, Glycine max
  unsure (1)..(239): unsure at all n locations
tcgagcaagtacttccttacaatcaaaaccaccaanaantatccgncagttatcaaaagnantangatgatcagggtcgcaaggtctgacgagtatggcaacgttgagaagcaaaccgacgaatacggcaaccctgttcatgctgctagtgtcacctatgtagccaccagaactgctgctggtggttacagtgatgacattaataagcaacatgataccaccaatgcctacggcgtaga

SEQ ID NO: 141516 - DNA, 237 bp, Glycine max
tcgcacggcctttgtgccggcgacgcatcattcaaatttctgccctatcaactttcgatggtaggatagtggcctaccatggtggtgacgggtgacggagaattagggttcgattccggagagggagcctgagaaacggctaccacatccaaggaaggcagcaggcgcgcaaattacccaatcctgacacggggaggtagtgacaataaataacaataccgggctcattgagtctgg

SEQ ID NO: 141517 - DNA, 237 bp, Glycine max
atcagagagaaaagttagggttcacaacttttccttttccttttgcttgcgaatctgaatcaaataatcaatcatccattcattattcatcatgtcgacggcgaagaaaatcacgctgaagagttcggacggcgaggctttcgaggtggaggaggcggtggcgctggagtcgcagacgataaagcacatgatcgaggacgactgtgccgacagcggcatccctctgccgaacgtgac

SEQ ID NO: 141518 - DNA, 239 bp, Glycine max
actatggccagttatgcaaatcactacgatgatcagggtcgcaacgtcgacgagtatggcaacgttgagaagcaaaccgacgaatacggcaaccctgttcatgctgctagtgtcacctatgtagccaccagcactgctgctggtggttacagtgctgacattaataagcaatatgataccaccaatgcctacggcctagacactggtagacagcattctagtggtggctacgatggtga

SEQ ID NO: 141519 - DNA, 240 bp, Glycine max
cttgtctacgaaggaaacagatagaagctttgggctgagaaatctcaggtacattgagaccctcaaagaagctttgcacagggcatgccccggagttgtctcctgtgctgctatcctcgttctctctgccagagctggcattccgtcgctaagaggtccccatatccctcttaacccaggcataacggatggtagccggagcagagccgatgtggtccagcagttcctcccagaccacaa

SEQ ID NO: 141520 - DNA, 237 bp, Glycine max
gtgaatagaaagaaagcctcgtctagtaaacccagtttttacaaagttaacataacaaaataaatcaccaaccatgtctatcatcccaaacttgttcggtggtcgacgaagcaacgtcttcgacccagtttctctggacgtgtgggacccattggaagggtttccgttttccacagccaacgctggcgaaagtagtgccatagccaacactcgcgtggactggaaggagacaccgca

SEQ ID NO: 141521 - DNA, 233 bp, Glycine max
gagaaaatagaggcaatagcaaagtcatatggagccaggggtgttgagtactcagaacaggctgagaagcagattgagatgtatagcaagcaaggattttcaggtcttccaatctgcatggctaagactcagtattctttctcagacaatgctgcagcaaagggagctccaagtgggtttgtcttgcccataagggatgttagagctagtataggcgctggatttatttatcc

SEQ ID NO: 141522 - DNA, 237 bp, Glycine max
ggccatggatcagattggtagatatagatactttccatcaactcaactgcatacagcatctggcgcgtttagagcactcaatgtttatcacagatctgtcatcccaatcccttatccataacctgatggagaatttacttaactcgtcggtgattggtacaacaccaaccacaagaacctctacgacgcacttgatgtccctgatggccaatcaggtgctgtgttagtaaccttaaa

SEQ ID NO: 141523 - DNA, 240 bp, Glycine max
agaaagagagagaagaagaaaagaagaacaaagatgcaatcctcaaaggagaagatgaaaaacatggcaagtgctgccaaggaacaagtcgacatctataaagccaaaatagacgagaaggcagagaaagcaacggcaagaacagaagaggagagggtgatagcccatgagcacgcaaaggcaaaggaagctggagcaaagatggagctgcatgaagctaaagcaaggcatgcagcagag

SEQ ID NO: 141524 - DNA, 237 bp, Glycine max
aaaaaccctcagcttcgggatttggatgtcttcctcagtgttgtggatatgaacgagggagctctttttctgccacacttcaattcaaatgccatagtggtactagtgattaatgaaggagaagcaaacattgaacttgttggcattaaagaacaacaacagaggcagcaacaggaagagcaacctttggaagtgcggaaatatagagctgaattgtctgaacaagatatatttgta

SEQ ID NO: 141525 - DNA, 179 bp, Glycine max
agcggttcgctgcccgcgacgttgtgagaagtccactgaaccttatcatttagaggaaggagaagtcgtaacaaggtttccgtaggtgaacctgcggaaggatcattgtcgatgccaaaaaaaaaaaaaaaagaaaaaaaaaaaaaaaaaaggggggccccccaataagtaacctctta

SEQ ID NO: 141526 - DNA, 237 bp, Glycine max
catatttgtcagccttcttagaggggttttacgtaatggagttttatactttcttcgggaccctgctgatccaaactacaatccgttccgtgatctgatagatgatcctgtgcacaaacatgctcgcagggttctgttatctgttgcagtttatgggagtctgattgtgatgctggtattcttgcctgtcaaacatgccatgcggatggcaccttcgattttcccgcttgacatatc

SEQ ID NO: 141527 - DNA, 228 bp, Glycine max
ggaagagtccacggggtgaaagtcctgcaaatcgtagccgtcatgggcgttctcctacccctcgcagtgtctcaccacgcggtcgccctgatgcttctcgaagccctccccctcgaaattccaatggggatgaataagctatgttcatgaaaaattctggagacgccggactattgcacctgtagctgttttgctattgttggatcttttagtctatgtgaatgatct

SEQ ID NO: 141528 - DNA, 233 bp, Glycine max
ctttcgtgtgtgccattttcattgaatgctaaaaaaaatgttgtggttttgcagatgtggatttctaaaggtgaatatgatgagtctggcccatccattgtccacaggaagtgcttctaacttctaagtacaaaatatgcttcaatggtgaattattttcgctccgggtgtttttatgggtctgtgtcgtgtcatgttaacaatattgccatggataaagaggtgaggaagca

SEQ ID NO: 141529 - DNA, 230 bp, Glycine max
ggcagcagtgagggtgtcactggaactattcacttcgttcaggagggaagtggtccaaccaccgtaactggatctcttgctggtcttaagcctggtctccatggtttccatgtccatgccttgggggacactaccaatggttgcctctcaactggatcacatttcaatcctaataacaaggagcatggtgcccctgaggatgagatcggtacatgctggtgatcttggga

SEQ ID NO: 141530 - DNA, 235 bp, Glycine max
aatcccacacgcttcatactcccctcataacttttctgctccccgttgagaaagatttgaatcccttggaaaaataacgctaatggctccaagagacagccgagccaccgcgctcattgggcccggcccaagcctatcaccggcccacaaagagatccgctacagaggcgtcaggaaacgcccctggggccgctacgccgccgagatccgcgatcccggcaagaaaacccgcgtc

SEQ ID NO: 141531 - DNA, 235 bp, Glycine max
aattccttcacttgcagcactgttgcatcatcatcttcattgcaaaaccctaaacttcaccttcaaccatgaccacacaagtaccaccacacagtgtccaagtccacacaacaacacactcctacgaagctggcgtcgtcccacccggagcccgtttcgaaccgccgcgttatgaagccggcgtcaaagcgccctccatttaccattccgagagaggtccaacgacttcccaggt

SEQ ID NO: 141532 - DNA, 235 bp, Glycine max
gcataggaagaaaccctagcctctcaccctccctgcgtcacgatgcagatcttcgtgaaaaccctaacgggtaagacgatcacccttgaggtggagtcttctgacaccatcgacaacgtgaaggccaagatccaggacaaggaaggcatccctccggaccagcagcgcctcatcttcgccggaaagcagctggaggacggccgcaccctcgccgactacaacatccagaaggagt

SEQ ID NO: 141533 - DNA, 97 bp, Glycine max
gtaccagtcctggtggacctcaatggaaatcacttgtgggttaactgtgagcagcagtactcatccaaaacgtaccaagcacccttctgccattcca

SEQ ID NO: 141534 - DNA, 230 bp, Glycine max
caggtctccaaggtgaacagcctctggtcgatggaacaatgtaggcaagggaagtcggcaaaatggatccgtaacctcgggaaaaggattggctctgagggctgggcacgggggtcccagtcccgaacccgtcggctgtcggtggactgctcgagctgcttccgcggcgagagcgggtcgtcgcgtgccggtcgggggacggattgggaacgggcccttcggggcctctt

SEQ ID NO: 141535 - DNA, 233 bp, Glycine max
agcaaacatgccaaatctagttcaaggaaaaccatttcttctgaagataaacctttcaacttgagaagccgcgaccccatctattccaacaagcttggcaagttgtttgagattaccccagagaaaaaccctcagcttcgggacttggatgtcttcctcagtgttgtggatatgaacgagggagctctttttctgccacacttcaattcaaaggccatagtggtagtagtgat

SEQ ID NO: 141536 - DNA, 232 bp, Glycine max
ctacactggcgtcaatggcggcttcccgtcatcgaataatgcagccggcggtattgcgccgccgttggaggtggacgggctgccggagaattttgattggagagagaaaggagctgtcaccgaagttaagttacagggtagatgtggatcatgctgggctttcagcaccacaggatctatagaaggagccaattttcttgccaccggaaagctcgtcagtcttagtgaacaa

SEQ ID NO: 141537 - DNA, 234 bp, Glycine max
tgacattcaacccgatgacgcggctgcagcgagggaactgagagacaaatcagcctcaaagtcaccaggtatctacaattctgccactgctgacaacaaaaccggttccaaggtcggagagtacgcagattatggttctcagaaggcgaaagaaacaaaagatgcaacgaaggaaaaagctggagagtacacagattatgcttcgcagaaggcgaaggaaacgaaggacaagac

SEQ ID NO: 141538 - DNA, 171 bp, Glycine max
ttcaaaccttgctctatactacacagtacacacactagaagaataatggcttccatcctccactactttttagccctctctctttcttgctcttttcttttcttcttatccgactcagtcacccctacaaaaccaataaaccttgttgttctacccgttcaaaatgatggt

SEQ ID NO: 141539 - DNA, 241 bp, Glycine max
  unsure (1)..(241): unsure at all n locations
tgttcttcatagttcagtgtgtcgtttaaaaatgtcgcagttgctggataaagccaagaacttcgtgtcggagaaggtaaatgatatggccaagccggagggangtgtcactgacgtggacttcaagcgcgtgagcaaagataatgtcgagtacttggccaaggtctctgttcgtaacccttattcaacttccatacccatttgtgagatcaactactctttcaaaagcgcatccagggag

SEQ ID NO: 141540 - DNA, 241 bp, Glycine max
ctttttcagtactctgctgagaggcttggttgggagcctaaaccaggagagagtcatgtagatgcaatgttgagaggagaaattttgactgcccttgctatgtttggtcacgatttaacactggatgaagcaagcaagcgttttcaggcattcttagaaaacagaaatacaccacttcttccacctgatataagaaaggcggcatatgtagctgtaatgcaacgggcaagcaaatctaaca

SEQ ID NO: 141541 - DNA, 198 bp, Glycine max
  unsure (1)..(198): unsure at all n locations
atctctgtgtcaatgatacgagatgatgttgagaaagaggatgcttttagaggtctatgtgctatggttanagctaatccttctggagctctaagttcgctagtttgcatgtgcaaagccattgcaagttggcatgaaataaggagtgaagatttacacaatgaagtctgccaggtcttgcatgggtataagcagatg

SEQ ID NO: 141542 - DNA, 237 bp, Glycine max
ccgaaaccggcatcagatccgattcgaaatgtacgcattcgaagctctcaccttcaacatccacggcggcctcctcgaggccatcgtccgcggccaccgcgccggcctcctcaccaccgccgattacaacaacctctgccaatgcgaaaccctcgacgacatcaagatgcatctctccgctcccgagtacggtccttacccccaaaacgagccttctccgttgcataccaccacgat

SEQ ID NO: 141543 - DNA, 236 bp, Glycine max
ggctgccctaatggttgtgctagaccatacatggctgagcttggactagttggtgatggcccaaatagctatcagatttggcttggaggaaaccataaacaaacatcattagctcgaagtttcatggacagggtgaagcttctagaccttgaaaaagttttggagcctttgttttattattggaagcaaaagcgtcaatctaaagaatcatttggtgacttcacaaacagaatggg

SEQ ID NO: 141544 - DNA, 236 bp, Glycine max
atgaaggagaagcaaacattgaacttgttggcattaaagaacaacaacagaggcagcaacaggaagagcaacctttggaagtgcggaaatatagagctgaattgtctgaacaagatatatttgtaatcccagcaggttatccagttgtggtcaacgctacctcagatctgaatttctttgcttttggtatcaatgccgagaacaaccagaggaacttccttgcaggttcgaaagac

SEQ ID NO: 141545 - DNA, 229 bp, Glycine max
  unsure (1)..(229): unsure at all n locations
gaagtgttaggattacggcgacgtgagcggttcgctgcccgcgacgttgtgagaagtccactgaaccgtatcatttagaggtagaggagcagaggcagcgagagggagtgatcgcggaactctaaacagaagagattcggcaactgagnagacgtgccaaatctagttcaaggaaaaccattacctccgaagatgaaccattcaactcgagatgcccaaccccatctat

SEQ ID NO: 141546 - DNA, 224 bp, Glycine max
tggaccatggaggcaaattcaggtgccagcgaccgaatttcgagaatcgccggccacctccgcactcagagagatgatgatgtttgtttgaagcgtaggggttgccgtgcaaaaggtgggttctccggattcaaggtggccatattgggtgctcgagtagcatatggcaacctctggcgatgttgatgaagatgaatctactcgtttcacttctccacctctac

SEQ ID NO: 141547 - DNA, 239 bp, Glycine max
gcttcttcgagtttcacagccaagtcgtaaaagggtttcaagggatggaaaacatgcagagcttctggcaattgggtgatgaactccgtgggcactcaaaagcatcggaggatcacaagtggttaatggttgactcgaaactggccgaacagacaagattgaagggggagcgtgtgaacaaccttgatctttcaaagggacccattgaaacaaggtcaagggataaatttgggttccag

SEQ ID NO: 141548 - DNA, 234 bp, Glycine max
aaaccctactcattctccatacctcaacgatgttgttaaagagacggcaacactttgctgtccgccttgaccgagcagagcttcgtcttggccctcgatttgccctcaagtactctcagtcacaacagacatcgtcgtcgtcgtcgttctcatcaatggcaccgaagcagaccaaggctgataacatattcgcttacgatgcgaactgtgcgaccttctggaggagtacggcca

SEQ ID NO: 141549 - DNA, 236 bp, Glycine max
aatttgcaaaccaaacacaatataaggagaagaaccagatctctctttctcaaatcaccaagaatagttgaaaatggggctgtctttcacgaagctgttcagccggctctttgcgaagaaggagatgcgtattcttatggtgggtctcgacgccgccggtaagaccaccattctctacatactcaagctaggagagatcgtcacaaccattcccaccattgggtttaatgttgaaa

SEQ ID NO: 141550 - DNA, 235 bp, Glycine max
cttcggccggtcgatccgggcggaagacattgtcaggtggggagtttggctggggcggcacatctgttaaaagataacgcaggtgtcctaagatgagctcaacgagaacagaaatctcgtgtggaacaaaagggtaaaagctcgtttgattctgatttccagtacgaatacgaaccgtgaaagcgtggcctatcgatcctttagtccttcggaatttgaagctagaggtgtcaga

SEQ ID NO: 141551 - DNA, 234 bp, Glycine max
ccccaactaacaataattccttcacttgcagaacttagttctctgttgcatcatcatcatcttcattagtgttagccctaaacttcaccttcaaccatgaccacagtgccaccacacagtgtccaagtgcacactccaacacaccgctacgaagccggcgtcgtcccgccggctcgttttgaggcgccgcgttacgaagccggcatcaaggcgccctcttccatttaccattcc

SEQ ID NO: 141552 - DNA, 221 bp, Glycine max
  unsure (1)..(221): unsure at all n locations
ctttttcagtactctgctgagaggcttggttgggagcctaaaccaggagagagtcatgtagatgcaaacttgagaggagaaattttgactgcccttgctatgtttggtcacgatttaacactggatgaagtccgcaagcgctttcaggcattcttagaaaacagaaatacaccacttactccacacaatatacgatacccngcatatgtagctgcaatgca

SEQ ID NO: 141553 - DNA, 171 bp, Glycine max
ccttgctctatactacacagtacacacactagaagaataatggcatccatcctccactactttatagaccactctctttcttgctctaatcatatcttcttatccgtatcagtcagtcctataaaaccagtaaaccttgtagatctacacgatcataatgatggttccaca

SEQ ID NO: 141554 - DNA, 236 bp, Glycine max
aaaggcttatggtggatacctaggcacccagagacgaggaagggcgtagtaagcgacgaaatgcttcggggagttgaaaataagcgtagatccggggattcccgatataggtcaacctttcgaactgctgctgaatccacgggcaggcacgagacaacctggtgaactgaaacatcttagtagccagaggaaaagaaagcaaaagcgattcccgctatagcggcgtccgaaatggg

SEQ ID NO: 141555 - DNA, 239 bp, Glycine max
gctcagcagctaccaaagcaagcacaggtgaaatctgtggcaccatttgggttatgcttcaactccaacaagatcaatgcatatcctagcgtggaccttgtgatggacaagcccaatggtcctgtttggagaattactggtgaggacttgatggtgcaggcacaacctggggtcacgtgtttgggtgttatgaatggaggaatgcaacctagagctgaaattaccttaggggcacgtca

SEQ ID NO: 141556 - DNA, 255 bp, Glycine max
cgcgaaattcagctcgagtcttcggccggtcgatccgggcggaagacagttgcaggtggggaatttggatggggcggcacatctgttaaaagataacgcaggtgtcctaagatgagctcaacgagaacagaaatctcgtgtggaacaaaagggtaaaagctcgtttgattctgatttccagtacgaatacgaaccgtgaaagcgtggcctatcgatcctttagtccttcggaatttgaagctagaggtgtcagaa

SEQ ID NO: 141557 - DNA, 236 bp, Glycine max
tgggatggggatgggaaatcaaagtgttttggatttgtgaattttgagaatgctgatgatgctgctagggctgttgaggctctcaatggcaaaaattttgatgacaaagaatggtatgttggaaaagctcaaaagaaatctgaaagggagaatgaattgaaacaacgatttgagcagagcatgaaagaagctgctgataaatatcaaggcgcaaacttgtatgtaaaaaatttaga

SEQ ID NO: 141558 - DNA, 230 bp, Glycine max
gccaggaccaaacagcatccgcggcagcgacggtaaccctccaacaacaacacttccgctgcgaaaaatgtctctggtggcgaacgaggatttccagcacattctgcgtgtgctgaacaccaacgtggatgggaagcagaagataatgttcgcaatgacctccatcaagggtattggaaggagattcgccaacatcgcttgcaagaaggctgatgttgacatgaacaaaa

SEQ ID NO: 141559 - DNA, 226 bp, Glycine max
  unsure (1)..(226): unsure at all n locations
tgttgaaatggtctgattatctgattctgatctagatgatgatgaggatgagtaagaccagctnctaccatttaagcttatcatgtggtctcaggtatctaagcttactgacgatcagcagaaagcatattttgattaatacgattatcgggtgtaacttctactgtcaaagctatgtagtgtagatttgagaaggatgcttgagatctagtctggggtatcacaa

SEQ ID NO: 141560 - DNA, 230 bp, Glycine max
cgcacggcctttgtgccggcgacgcatcattcaaatttctgccctatcaactttcgatggtaggatagtggcctaccatggtggtgccgggtgacggagaattagggttcgattccggagccggagcctgacaaacggctaccacatccaaggaaggcagcaggcgcgcaaattacccaatcctgacacggggaggtagtgacaataaataacaataccgggctcattga

SEQ ID NO: 141561 - DNA, 232 bp, Glycine max
  unsure (1)..(232): unsure at all n locations
ctaacttccacatctgatacaacatatctcnntgacggaaccaccaggttgtacatcagttatatttgtctttatgcgcagctgntttggatcactcggaactataagggactacaagacaagatcaaactggttcctattgacctacaaaacaggcctgcttggtataaggagaatgtctaccctgaaaacaaggtgccatcattggagcacaatggaaaggtcttgggtg

SEQ ID NO: 141562 - DNA, 227 bp, Glycine max
ctcaccataagaagccatagggtgggtcagatggacaaaagtcgcgctggcatactcccctttgttttttatgacacttttgggtttgagaagtatgttgattacgctcttgatgtgccaatgttgtttgtttatcgaaaaaacaagtacattgactgccggggcatgtcattcagggacttcatggcaggtaaactccctgtcattcctggtcaggtgccaacgct

SEQ ID NO: 141563 - DNA, 229 bp, Glycine max
tcacacacaactactacaagtacttccttacaatcaaaaccatcaacaactatggcaagttatcaaaagcactacgatgatcagggtcgcaaggttgacgagtatggcaacgttgagaagcaaaccgacgaatacggcaaccctgttcatgctgctagtgtcacctatgtagccaccagaactgctgctggtggttacagtgatgacattaataagcaacatgatacca

SEQ ID NO: 141564 - DNA, 230 bp, Glycine max
gccaaattatgaacagaaaatcaaaagcttctttgaagagcatcttcacactgatgaggagatccgcttttgtgctgctggaagtggctattttgatgttagggatcgcaatgaagcttgtattcgtgtgtgggtcaagaaaggaggaatgatcatcttacctgccggaatttatcatcgctttacgctagatgagagcaactacattaaggctttgcgtttttttgttg

SEQ ID NO: 141565 - DNA, 231 bp, Glycine max
atttaattctagtttccactctccttatgttgtttcaactccacttcaccccatcaaaagccgccatcaaaggaggctactggtactccgaaagtggccttgcagtttccaacattaacccctctcatttcacccacctcttctgtgcatttgcccacctcgaccccaacaccaacaaagtcaccatttcctcgtcagactcatctcagttctcaaccttcactcaaaccc

SEQ ID NO: 141566 - DNA, 231 bp, Glycine max
ggatcactttgcaaggaaggataaaatgcccatcaatcttaaatatatagatccaacttacatgattcgggcaattccaagcaatgcatcagacaatgtctactgtacacttcttgctcagagtgcagtccatggtgcaatggcagggtatactggatttacagttggactggtcaatggcagacagacttatattccattcattagaatcaatgagaggcacaacaaggt

SEQ ID NO: 141567 - DNA, 230 bp, Glycine max
ctttgttcactcttcttctcttgcggctagggttttagctagttcttctagatttaaggaagatgggtaaggaaaaggttcacatcagtattgtggtcattggccatgtcgactctgggaaatccactaccactggtcacctgatttacaagcttggaggcattgacaagcgtgttattgagaggtttgagaaggaagctgctgagatgaacaagaggtctttcaagtat

SEQ ID NO: 141568 - DNA, 279 bp, Glycine max
cttgcagttgactatgtttcaaaatgggtggaagccaagcccactagaactaatgatgctaaagttgtcgcagactttgtcaggtctaatctgttttgcaggtttggagtacctaaagcaattgttagtgatcaagtaacccatttttgcaacagggcaatacatgccctgcttaaaaagtatggggtggtacacagggtatccacaccataccacccccagactaatggacaggcagaaatttctaacagggaaatcaagagattctagagaagattg

SEQ ID NO: 141569 - DNA, 278 bp, Glycine max
gacatcccaagctgactgtgctgttcttatcattgattcgaccactggtggttttgaagctggtatttccaaggatggacagactcgtgaacatgctctgctttcattcacccttggtgtgaaacagatgatttgctgctgtaacaaaatggatgctactacacccaagtattccaaggccaggtatgatgaaattgtgaaggaagtctcttcctacttgaagaaagtaggatacaaccctgacaagattccttttgttcctatctctggttttgagg

SEQ ID NO: 141570 - DNA, 277 bp, Glycine max
gtctgaagtggcttgactcaaaggaaccaaatacagttgtgtacttgtgtttcggtagcatgacagcgttctccgacgcgcaactcaaagaaatcgctttaggtttggaggcttcagggcagaatttcatatgggttgtcaaaaaagggttgaatgaaaaattggaatggttaccagaagggtttgaggagagaattttaggtcaaggaaagggtttgatcataagaggttgggcaccccaagtgatgattttggaccatgaatccgttggagggtt

SEQ ID NO: 141571 - DNA, 270 bp, Glycine max
cacacaactactacaagtacttccttacaatcaaaatcataaacaactattgctagttatcaaaagcactacgatgatcagggtcgcaaggttgacgagtatggcaacgttgagaagcaaaccgacgaatacggcaaccctgttcatgctgctagtgtcacctatgtagccaccagaactgctgctggtggttacagtgatgacattaataagcaacatgataccaccaatgcctacggcgtagacactggtagacagcttctagtggtg

SEQ ID NO: 141572 - DNA, 271 bp, Glycine max
atccaaggtattccttgggatagacttagcattagtcgtgagaagtatagacaaactagactagagcagtacaagaactatgaaaatatacctcattcaggcgaacggtcagaaaaggaatgcacaccaacacatagaggagggaagtattatgatttctggcaaaacactcgatctgtgaaatcaacaatactgtctttccaattgaggaacttggtttgggcaacatcaaagcatgatgtatatcttgtttcgagttactcaattatac

SEQ ID NO: 141573 - DNA, 268 bp, Glycine max
cgctcttgatgcccttctcatcaacgagtatttgtgtttggtgtcacggtgtttgatatggtaccaagagaatgaacagtgcatggtgactggtggtgacgtgttgcagaagagagggctcaaggagagtgaaaggtggaccaacgtgtacttcttgctcgggttctttctgctgtatcgtgtgctttgcttcttggttttggctagaagggtttcaagatcgaaaacttaatagacaccgagaaattatatatggtgataaaacgct

SEQ ID NO: 141574 - DNA, 264 bp, Glycine max
aacccatcgcgccaagagacccagctctcatgcaagccacggagaaccggggcttgggccaaactcaaaaaggaggtcccgcctcggtgatgcaatccgccgcaaccgaaaacctccgcgccggactcgtgggccgccaagacatctccgacgtggcgaggaacgaaggcgtgagcgtgaccgaaaccaaagtgggctaccaccgcgtcatcacggagttcgtgggaagacacgtggtggggcaattcgtggagcccgacgtcc

SEQ ID NO: 141575 - DNA, 274 bp, Glycine max
acaaaattgaactgtaattgtagtagtagacagtagcaccatgagccaggaacagctcaagaaacctcaaggggagcaggaccccatcaaatacggcgacgttttcaaagtctccgatgaactcgctttcaaacccatcgcgccaagagacgcagctctcatgcaagccacggagaaccaagcattgggccaaactcaaaaaggaggtcccgcctcggtgatgcaatccgccgcaaccgaaaacctccgcgccggcgtcgtgggccgccaagac

SEQ ID NO: 141576 - DNA, 272 bp, Glycine max
acaagaacgagattccttataaccaaaaccagcaacaactatggcgagttatcagaagcactacgatgatcagggtcgcaaggtcgacgagtatggcaatgttgagaggcaaactgacgaatatggcaacccggttcatgccactagtgtcacttatgtagccactaaaagtgttggtggctacaatgatgacactaataagcaacatgataccaccggtgtctatcctgagaaagataccggtaggcatcattttggtcgtggttacgatg

SEQ ID NO: 141577 - DNA, 272 bp, Glycine max
agagaacctaagcttagaattagaaacaaagaaaagaagacaggaaagaactgatcgttgaaaatgcagggaggaaagaaagcgggagagtccattaaggaaacagctacaaacattggtgcttctgccaaggctggcatggagaagaccaaggccactgtccaagagaaggcagaaagaatgacagcacgtgatccggtgcaaaaggagttggcaacccaaaagaaagaggcaaagatgaaccaggcggagctggacaagccagcggcgcg

SEQ ID NO: 141578 - DNA, 134 bp, Glycine max
ctgcaaaccttgctctatgctacacagtacacacactagaagaatagtggcttccatcctccaatactgtgtagcactctctctttcttgctcttgtctgttcttcttatccgactcagtcacccctacaaaac

SEQ ID NO: 141579 - DNA, 274 bp, Glycine max
aacggtttacatagatgctggacccaatgggggcgagttggtctaccgtgtagaaaagaatggaggggttgttaatcctacaactgggcagaagtccgatatcttgattcagatacctaatggacatgcacctaaaactgatgctgttcaagcagtcaagaagatgaagattgaggaaattgatgatgatgaaatggaagagtgaattttatgataaaatgtaattagtttgatggcgcaactcctcttgaacttccttctttgtcttttatgt

SEQ ID NO: 141580 - DNA, 268 bp, Glycine max
ccctcccaccatgatgaaattgagctcagtttcactcaggagagcttgaagcaatacgctggggagttacgcatgccctttgagctggagattctgagccttgagtctttaaattctgcttcctggccccagccacttcgtgactgcaaagctgtagtggttaacatgcctattggctctttctcaaattacccatcatatctacctttggtccttcgttttgtgaagcagctcatgccaaaaattgtggttacattggatagaagtt

SEQ ID NO: 141581 - DNA, 272 bp, Glycine max
atgatatagaaagagagagaagaagaaaagaagaacaaagatgcaatcctcaaaggagaagatgaaaaacatggcaagtgctgccaaggaacaagtcgacatctataaagccaaaatagacgagaaggcagagaaagcaacggcaagaacagaagaggagagggtgatagcccatgagcacgcaaaggcaaaggaagctggagcaaagatggagctgcatgaagctaaagcaaggcatgcagcagagaagctaagcgccaaccaatcacatt

SEQ ID NO: 141582 - DNA, 262 bp, Glycine max
gtcctgagccgtatccggaggccaacatggagttcctcaagtcaaatgggatcaagctttttcagtttgggattgagggtcataaggagccttttgtgaacatcccagaggacacaatccgtgaagcactagaagttgttcttgatgtcaggaaccacccagttataattcactgtaagcggggaaagcaccgaacaggttgcttggtaggatgctatagaaaattgcaaaaatggtgcttgtcatccgtctttgatgaata

SEQ ID NO: 141583 - DNA, 263 bp, Glycine max
tgctgaagaggcattgcagaagctaaatgggacaacgattggcaagcaaacggtccgtctttcttggggtcgtaatccagcaaataagcagtttagaatggatttcggcagcccttggactggggcatattacggggcccctatgtatgatggttatgggtatgcattgccccctcgtcatgatcccagcatatatgctgctgcttatggtgcttaccccctttatggaggccaccaacaacaagtaagctgaatgaagtgca

SEQ ID NO: 141584 - DNA, 263 bp, Glycine max
gggagggagccgtagcagcggaagctctagcttgggtagcgaatcacaatggcgagaggattaaagaagcatctgaagaggcttaatgccccaaagcattggatgcttgacaaactgggtggtgcatttgctcctaagccctcatctggaccacacaaatcgagggagtgcctgccactcatactcattttgcgaaaccggctgaagtatgctctaacataccgtgaagtcattgctattctgatgcagcgacatgtccttgt

SEQ ID NO: 141585 - DNA, 180 bp, Glycine max
ataccttgctctatactacacagtacacacactagaagaataatggcttccatcctccactactttttagccctctctctttcttgctcttttcttttcttcttatccgactcagtcacccctacaaaaccaataaaccttgttgttctacccgttcaaaatgatggttcaacagggctc

SEQ ID NO: 141586 - DNA, 260 bp, Glycine max
cagatcaccagcctattaaggaagctgttcttgggaatattcccaccattgctttctgtgacaccgattcacctatgaggtacgtggacattggaattcctgccaacaacaagggcaaacacaccattggttgtctcttctggctccttgcaaggatggtgttgcagatgaggggtaccattcgccctggcctcaaatgggatgtcatggttgatctgttcttctatagagaaccagaggaggctaaacaacaagaggag

SEQ ID NO: 141587 - DNA, 261 bp, Glycine max
tcacacacaactactacaagtacttccttacaatcaaaaccaacaacaactatggcaagttatcaaaagcactacgatgatcagggtcgcaaggttgacgagtatggcaacgttgagaagcaaaccgacgaatacggcaaccctgttcatgctgctagtgtcacctatgtagccaccagaactgctgctggtggttacagtgatgacattaataagcaacatgataccaccaatgcctacggcgtagacactggtagacag

SEQ ID NO: 141588 - DNA, 256 bp, Glycine max
tcgggctacccgctgagtttaagcatatcaataagcggaggaaaagaaactaacaaggattcccttagtaacggcgagcgaaccgggaaaagcccaccatgaaaatcggtcgccctcggcgtccgaattgtagtctggagatgcgtcctcagtggcggaccgggcccaagtcccctggaagggggcgccagagagggtgagagccccgtcgtgcccggaccctgtcgcaccacgaggcgctgtcggcgagtcgggt

SEQ ID NO: 141589 - DNA, 125 bp, Glycine max
aaatcctacatctggcttcaaactgtggatggttctattcagcaagtagaggaagaggtagccatgttttgccccatgatatgccaggaagtacttcaaacaggcatgggatcttccaaaaacta

SEQ ID NO: 141590 - DNA, 278 bp, Glycine max
cgtaactcccaagcagtgggaggaggctcgggactctgaccgcgtgcctgttgaagaatgagccggcgactcataggcagtggcttggttaagggaaaccaccggagccgtagcgaaagcgagtcttcacagggcaattgtcactgcttatggacccgaacctgggtgatctatccatgaccaggatgaagcttgggtgaaactaagtggaggtccgaaccgactgatgttgaagaatcagcggatgagttgtggttaggggtgaaatgccactcgaa

SEQ ID NO: 141591 - DNA, 263 bp, Glycine max
tgaggccactcatccagactccatgagggccactttggctgaatttgtttctactttcatctttgtctttgctggagaaggctctggccttgctttggttaaaatttaccaggattcagctttctcagctggtgaattgttggcagttgcacttgcacatggatttgctctatttgctgctgtttctgcaagcatgcatgtatcaggtggccatgtcaacccagctgtgacatttggtgctctcattggaggcagaatttctg

SEQ ID NO: 141592 - DNA, 263 bp, Glycine max
cgtaaagctaacttcaacacctttaattttctaaaagtaattcagcggctgaataccaagcggagaagatgagtcaggagcagccacggcgtcccaaaggccaaaaccccatcaaatacggcgacgtttttgtcgtctccggcgaccttgcacagaagcccgtcgcaccggaagatgctgccatgatgcaaagcgcggaagctcgagtgctcggacaaacccaacccggcggagcagcttccgtcatgcaatctgccgccacc

SEQ ID NO: 141593 - DNA, 258 bp, Glycine max
ctctgctgtctatggtggaatgtcaaaacttgaacagttcaaagagcttaaggcgggatgtgagatagttgttgctacccctggcagattgatagacatgctgaagatgaaggcattgacgatgatgagagcaacttacctggtgcttgatgaggctgatcggatgtttgatcttgggtttgagccgcaagtaaggtccattgttgggcagattaggccggaccgccaaaccttactcttttctgcaactatgccttg

SEQ ID NO: 141594 - DNA, 257 bp, Glycine max
acaactatggcaagttatcaaaagcactacgatgatcagggtcgcaaggttgacgagtatggcaacgttgagaagcaaaccgacgaatacggcaaccctgttcatgctgctagtgtcacctatgtagccaccagaactgctgctggtggttacagtgatgacattaataagcaacatgataccaccaatgcctacggcgtagacactggtagacagcattctagtggtggctacgatggtgacactaataaacatca

SEQ ID NO: 141595 - DNA, 257 bp, Glycine max
  unsure (1)..(257): unsure at all n locations
agagtgctgaactctatgttcatgtaaaaccagcattgggaggagcctatactgatattgtgatgtgggttttttgccccttcaatggacctgccacccttaaagtggcattgatgaacattgagatgaacaagataggagaacacataggtgactgggagcacttcacccttaggataagcaacttcactggagagctatggtctgtttacttctctcagcatagtggaggtggatgggtanatgcatttgatctg

SEQ ID NO: 141596 - DNA, 253 bp, Glycine max
caagaaagaacttccttataaccaaaaccaacaacaactatggctagttatcagaagcactacgatgatcagggtcgcaaggtcgacgagtatggcaatgttgagaggcaaactgacgaatatggcaacccggttcatgccactagtgtcacttatgtagccactaaaagtgttggtggctacaatgatgacactaataagcaacatgataccaccggtgtctatcctgagaaagataccggtaggcatcatt

SEQ ID NO: 141597 - DNA, 277 bp, Glycine max
cttgagagaaaagtagtgtattaagactacaaattttcaatttttcaatggcgtcgaggcaacaaaaagaggatcgagctgaggcagctgcgaaagttgctgcgaaagaactcgaacaactcaaccgagaaaaagaccgtgatttcagtgttggtgttgcagaccaacaccaacaagaagaacatcagttagatcaacaaaagcgtggtgtaatcggatccatgttcaaggcggtgcaagacacctacgagaacgccaaggaagctgtcgttggcaa

SEQ ID NO: 141598 - DNA, 249 bp, Glycine max
  unsure (1)..(249): unsure at all n locations
tccaaagacaagaaggccatgaggagagctgagaaggagagacagaaggaaggtgaattagctgatgaggaacagaagaaagtgaagaaataggttaagaagaaaggctcttcatcttctaaggatggcactgctaaatcaatctcttctaagaaaaaagcaagtggctctgatgaagaccgcacttcacctactcacagtcaaattgacgagaaagaggaggcatccagatgaagatangacgacgac

SEQ ID NO: 141599 - DNA, 181 bp, Glycine max
ctcccgccgctcgatgggaattgcgcttcaaggcgtctcgtagggctaatccgcctcacgagggtcaccaacggcacgtgcctttggggggccgaggccccctactgctggtcggcaaacggacggcgggcgcacgcgtcgcttctagcccggattctgacttagaggcgtgcagtcataa

SEQ ID NO: 141600 - DNA, 270 bp, Glycine max
gaccgtgatttcagtgttggtgttgcagaccaacaccaacaagaagaacatcagttagatcaacaaaagcgtggtgtaatcggatccatgttcaaggcggtgcaagacacctacgagaacgccaaggaagctgtcgttggcaagaaagaatcttcgacgacgactaactcgtacagtaccagagaggttattcacgacgttgacattcaacccgatgacgcggctgcagcgaagggaagtgagagacaaatcagcctcaaagtcaccagg

SEQ ID NO: 141601 - DNA, 267 bp, Glycine max
gtagggtcgacctctggaggaaccatgattagcacctcaactcctcacatggttctccagcaatccgtgtaccaggctttcactcaggtgtttgctcagcagctaccaaagcaagcacaggtgaaatctgtggcaccatttgggttatgcttcaactccaacaagatcaatgcatatcctagcgtggaccttgtgatggacaagcccaatggtcctgtttggagaatctctggtgaggacttgatggtgcaggcacaacctggggtc

SEQ ID NO: 141602 - DNA, 260 bp, Glycine max
tacggacttgttttcattcaatggagttagaagtttaaagggtcaccttaagaaaaagcacataagtgtcccagttggccactcgtttttcgcttctttggtccttgtgatgcctgaatctgacttcaatagggagcttggcgtgtttcagttgactgcagaactcctatctgtgaatggaaatgtgatagaaaaatctagccagccatgcctgttgaggtttagaagctcaccgattcgactagtccgaacccttatga

SEQ ID NO: 141603 - DNA, 253 bp, Glycine max
gaacaatcgtgaagttttttctttgagaagtaaaagatcttagtgcaagtaattaacatggaatctcagcaagcaaaccgtgaagaacttgatgagaaggcaaggcaaggtgaaactgttgttcctggaggaactggtgggaagagtcttgaggctcaagaacatcttgctgaaggaaggagccgtggagggcagacgaggaagcagcagctagggtcagaggggtatcatgaaatgggaccaaaggagggca

SEQ ID NO: 141604 - DNA, 246 bp, Glycine max
gacgtgagacagattgtgaagtagaaatcggtgcaagaacattctccactttatctaaaaaaattcggtgagtttgtgaagacaaaaaatcactagctactcaaaaatggccacagtaggaaggaacgttgcagctcctttgctgtttcttaacttgatcatgtattttattgttcttggctttgctagttggtgcctcaacaggttcatcaatggccaaacttaccaccctagttttggtggaaa

SEQ ID NO: 141605 - DNA, 254 bp, Glycine max
aaggtatttctatagattatcagggctcaaatttacctagtggtggaacaaatgatggtgccttttggattgatttgcctactgatgctgatgcaagaaacaatctaaagaagggaaacatagagagtgctgaactctatgttcatgtaaaaccagcattgggaggagcctatactgatattgtgatgtgggttttttgccccttcaatggacctgccacccttaaagtggcattgatgaacattgagatgaac

SEQ ID NO: 141606 - DNA, 252 bp, Glycine max
gttcagtgtgtcgtttaaaaatgtcgcagttgctggataaagccaagaacttcgtgtcggagaaggtaaatgatatggccaagccggaggcgagtgtcactgacgtggacttcaagcgcgtgagcaaagataatgtcgagtacttggccaaggtctctgttcgtaacccttattcaacttccatacccatttgtgagatcaactactctttcaaaagcgcatccagggagatagcatcagggaaaattccag

SEQ ID NO: 141607 - DNA, 254 bp, Glycine max
atcctgattagaaagaactgtatgaccagtatggtgaagatgcccttaaagaatggatggggggaggaggctcgtttcataatccatttgatatatttgaatcattttttggaggagcaagctttggtggtggtggtagttcccgaggtagaagacagaagcatggtgaagatgtggtgcattctttagaggtttccttggaggacgtttataatggcacaacaaagaaactatctctttctagaaacatatta

SEQ ID NO: 141608 - DNA, 114 bp, Glycine max
cgagctacctagctagcaagcaagcacagagatggaggcaaagcgaggccatgccctcatgtgcttggcacgtgtttcactcttcctctgcgctctaaccctatccgctgctca

SEQ ID NO: 141609 - DNA, 246 bp, Glycine max
cttccttacaatcaaaaccaacaacaactatggcaagttatcaaaagcactacgatgatcagggtcgcaaggttgacgagtatggcaacgttgagaagcaaaccgacgaatacggcaaccctgttcatgctgctagtgtcacctatgtagccaccagaactgctgctggtggttacagtgatgacattaataagcaacatgataccaccaatgcctacggcgtagacactggtagacagcattcta

SEQ ID NO: 141610 - DNA, 110 bp, Glycine max
ctccaacccggggtgttgatccaagtgttcgaaggagaacgagctagaacaaaggacaacaatctccttgggaagtttgagcttactgggatccctccagcaccaagagg

SEQ ID NO: 141611 - DNA, 225 bp, Glycine max
ccgaccgatcctgatcttctgtgaagggttcgagtgagagcatacctgtcgggacccgaaagatggtgaactatgcctgagcggggcgaagctagaggaaactctgtcggaggcccgcagcgatactgacgtgcaaatcgttcgtctgacttgggtataggggcgaaagactaatcgaactttctattacctggttccctccgaagtttgcctcaggatagctgg

SEQ ID NO: 141612 - DNA, 245 bp, Glycine max
ctaagaggagttaataattgaagaaaatgtccaagtatggaacatctctattggtgccttctgttcatgaacttgtgaagcaacctatcaccaaagttccagatcaatatcttcatccaaatcaagatcctcctgatatatctaacacaaccttaccacaagttccagtcatcgaccttagtaaattgttatctgaagatgtcactgagctagagaagctagacgatgcatgcaaggaatggggg

SEQ ID NO: 141613 - DNA, 245 bp, Glycine max
ccagttcccgttcccccacacccaaagtccccgttctccaaatttcactccccaaagccccaaccttgaaactgatgctcccgatttcaaagccccagatgctgtccctccttggagggatagcaccactggtcttggccagaccctccctcgcagaagaaattgagaaagcagcactctttgacttcaacctcacccttcccataataatggtggagtttctgctgctgatggttgccttggac

SEQ ID NO: 141614 - DNA, 85 bp, Glycine max
acccttttctcttcggctctaacaggttcgaaactctcttcaaaaaccaatatggtcgcattcgcgtcctccagaggttcaacca

SEQ ID NO: 141615 - DNA, 260 bp, Glycine max
acagtttccgttaacgctctccaatacaaaataaccattcactgaatattcggtcgaagatgtccgccgccgaagaagctaaagttcccgccgtcgaaaagccggtggaggaggtgaaggcgccgaagcttgccaaggagaagaaacctaaggctccgaaggaaaagaagccgaaacaggccaaaactgcttctcatcctccatatctccagatgattaaggacgctttgattgctctgaacgagaaaggaggatcgagt

SEQ ID NO: 141616 - DNA, 252 bp, Glycine max
caccagtgttgcaatggggatgaacatggtgtcaaaaggtgttcaaaatgtccttgattttcttcagagtgacttccctgacatggatgttattggaatttctggaaatttctgttcggacaagaaagctgcagccgtgaattggattgaagggcgtggcaagtctgtggtgtgtgaagccataattaaggaggatgtggtgaagaaggtgttgaagaccagtgtgggggccatggtcaagcttaacatgct

SEQ ID NO: 141617 - DNA, 252 bp, Glycine max
gagatgtcgttggtttcaagcatgttcgggtgtggagtggtgatggcggcgtcgcaagcaatgggaattggaaggagaagcgatggtggattgacgatagtgtgttcgtctaggccgcagaagaaagcgacggcgcatcacatgaagactcggcctcggaagacgcaggcatgggatagaaaccgcaagcccaccgtctacgatccactccctcctcttcctcctgattggaccctcgttattcgcgctgac

SEQ ID NO: 141618 - DNA, 248 bp, Glycine max
gcaaaagatattgagaacctaataaagagccaaagtgagtcctactttgtggatgctcagcctcagcagaaagaggaggggaacaagggaagaaagggtcctttgtcttcaattttgagggctttttactgaataagtatgtagtactaaaatgtatgctgtaatagctcatagtgagcgaggaaagtatcgggctatttaactatgacttgagctccatctatgaataaataaatcagcatatgatg

SEQ ID NO: 141619 - DNA, 250 bp, Glycine max
gaccccatcaaatacggcgacgttttcaaagtctccgacgaactcgctttcaaacccatcgcgccaagagacgcagctctcatgcaagccacggagaaccaagcattgggccaaactcaaaaaggaggtcccgcctcggtgatgcaatccgccgcaaccgaaaacctccgcgccggcgtcgtgggccgccaagacatctccgacgtggcgaggaacgaaggcgtgagcgtgaccgaaaccaaagtgggct

SEQ ID NO: 141620 - DNA, 106 bp, Glycine max
cagtcccacaattcctcttttcgtgtgcacgttccttccttgttcaaaagggtcttcctagaaacactcaaggtgtggctgggttaggccatgcaccaatttctct

SEQ ID NO: 141621 - DNA, 261 bp, Glycine max
  unsure (1)..(261): unsure at all n locations
aaaagaagaaaggaaagaattgatcgttgaaaatgcagggaggaaagaaagcgggagagtccattaaggaaacagctacaaacattggtgcttctgccaaggctggcatggagaagaccaaggccactgtccaagagaaggcagaaagaatgacagcacgtgatccggtgcaaaaggagttggcaacccaaaagaaagaggcaaagatgaaccaggcggagctggacaagcaggcggcgcgncacantaacacggcggcca

SEQ ID NO: 141622 - DNA, 255 bp, Glycine max
cacacaactacaagaaagaacttccttataaccagaaccaacaacaactatggcaagttatcagaagcactacgatgatcagggtcgcaaggtcgacgagtatggcaatgttgagaggcaaactgacgaatatggcaacccggttcatgccactagtgtcacttatgtagccactaaaagtgttggtggctacaatgatgacactaataagcaacatgataccaccggtgtctatcctgagacagataccggtag

SEQ ID NO: 141623 - DNA, 255 bp, Glycine max
cattcatgcctgagaaaggttctgctgagtatgaggagctgaggaagaatccccagaaggcttacttgaagactattacaccaaagtttcagacccttattgacctttctgttatagaaatcttgtcaaggcatgcatctgatgaggtgtaccttggggagagggacaatccaaattggacatctgatacaagagcgttagaggcttttaaaaggtttggaaataaactggcacaaattgagaatagactctcag

SEQ ID NO: 141624 - DNA, 143 bp, Glycine max
atccacttgagagaaaagtagtgtattaagactacaaattttcaatttttcaatggcgtcgaggcaacaaaaagaggatcgagctgaggcagctgcgaaagttgctgcgaaagaactcgaacaactcaaccgagaaaaagacc

SEQ ID NO: 141625 - DNA, 129 bp, Glycine max
ccttgctctatactacacagtacagacactagaagaataatggcttccatcctccactactttttagcccgctctctttcttgctcttttcttttcttcttatccgactcagtcaccccgacaaaacca

SEQ ID NO: 141626 - DNA, 147 bp, Glycine max
ggacgcgttcggcttcttcgccttcgtcagcgccaagaagaaggagctggacggcctacgcgccgagatgccggtggcgctggcggagtgcgtcgatccggcgaaattcgtgctggaggcgatctcggaggtgtttccggtcgacaa

SEQ ID NO: 141627 - DNA, 256 bp, Glycine max
ccgaaaaccaaatcaagatgctgagagtgggcgcaaagaggcttttgggaacgacgtcgttgggcgttagggttccggcgaggctgtaccacgagagggttgtggatcactacgacaacccccggaacgttggatcgttagacaagaacgacccgagcgtggggacgggtttggtgggggcgccggcgtgcggcgacgtgatgaagctccagattaaggtcgacgacaaaaccggaaaaatcgtcgatgctcgatt

SEQ ID NO: 141628 - DNA, 117 bp, Glycine max
cgaagaggaatggctcccaagcgtttaatcttgttgactgtgctatgcttctcagcactgtcactgagtacgggtcttgcggaggataatggacttgttaggaacttctacaaggaa

SEQ ID NO: 141629 - DNA, 80 bp, Glycine max
cattctctaccaagtcaattgagagggagattaactcagtcaatgacaaccctttgattgatgtgtcaaggaaccaggca

SEQ ID NO: 141630 - DNA, 168 bp, Glycine max
accatcagtgagataccactctggaagagctagaattctaaccttgtgccaggacctacgggccgagggacagtctcaggtagacagtttctatggggcgtaggcctcccaaaaggtaacggaggcgtgcaaaggtttcctcgggccagacggagattggccctcgag

SEQ ID NO: 141631 - DNA, 150 bp, Glycine max
ggccaagactgcgggtggcacaacggcgagttacgtcggagagaaagcggtgcaggccaaggatgtcgccgtggagagtgggaagagtgcggctgggtatgctgccaaggtggctgctgatttgagggacaaggccaccgcggtggggtg

SEQ ID NO: 141632 - DNA, 247 bp, Glycine max
  unsure (1)..(247): unsure at all n locations
cacacaactactacaagtacttccttacaatcaaaaccaacaacaactatggcaagttatcaaaagcactacgatgatcagggtcgcaaggttgacgagtatggcaacgttgagaagcaaaccgacgaatacggcaaccctgttcatgctgctagcgtcaccctntnagccaccagaacttcntcntgntgntacagntantacagtaagtagcaacagtagtccaccaagtccntcggcgntgaca

SEQ ID NO: 141633 - DNA, 248 bp, Glycine max
cgagaagccgtgtggttcaaggccgggtcccagatcttcagcgagggtgggctcgactacttgggcaacccaagcctgatccacgcccagagcatcctcgccatctgggccacacaagttatcctactgggtgccgttgaaggttaccgtattgctggtggccccctcggtgaggtcactgacccaatctacccaggtggcagcttcgacccattgggccttgctgatgacccagaggcttttgctga

SEQ ID NO: 141634 - DNA, 251 bp, Glycine max
ctatttttcttcctcagtagtgtcatttacgcttctcttctctgcagcaactatgcctaaccctaaggtcttcttcgacatgaccatcggcgctcaatctgctggccgcatcgtgatggagctctacgccgacgtcactccccgcaccgccgagaacttccgcgcgctttgcaccggcgagaagggcgtagggcggagcggcaagcccctccactacaagggctcgtccttccaccgcgtgatcccgagtt

SEQ ID NO: 141635 - DNA, 247 bp, Glycine max
agaaaaaacccttttctggagaaagaatatagtcttcagctggacaaggatcattcatcttgaaagaagagtttgtgtgtgacaatctttatagttctaaggagggtgcaagagagaactgaatttgcagtgatggcaactcgtagatatgcttttggaagagctgatgaggccactcatccagactccatgagggccactttggctgaatttgtttctactttcatctttgtctttgctggagaag

SEQ ID NO: 141636 - DNA, 205 bp, Glycine max
  unsure (1)..(205): unsure at all n locations
cgcaactaaataagaaatgaagagtactatcttctttgctctctttctagtttgtgccttcaccatctcatacctgccttcagccaccgctcagttcgtgctcgacactgatgatgatcctcttcaaaacggtggcacatactatatgttgccagttatgagaggaaagggcggngtgaatgaagcagattcaacgtgaaaagaa

SEQ ID NO: 141637 - DNA, 239 bp, Glycine max
aaaggatttgtatgttaaaagtgtgcaacgaactgtcatttggatgggaaagaggcaagaaactgtagaggatgtcccctgtggtaatacagtggctatggttggtcttgaccagttcatcacaaataatgcactattgacaaatgagaaggaagtcgatgcccaccctatccgagctatgaagttttctgtctcacctgttgttcgtgttgctgttcaatgtaaggttgcatcagatc

SEQ ID NO: 141638 - DNA, 245 bp, Glycine max
attcaattcaatctgcctcgatcatggagaggaaaacatttgggtttttgttcttgctcctccttgtcttagcttctgatgtgacggtgaagagagcagaggcgaaagattgcttgacaaggaggcacgggtttcagggtagatgcttattcgacaggcaatgtgcacatgtgtgcaggagcgatggtttcatcggtggtcagtgccgaggccctcttcgcaaatgcttttgcagcaggccatgt

SEQ ID NO: 141639 - DNA, 200 bp, Glycine max
cttttgtgtgatttttttgttctttgtttacagctctgcgagatcttgagtcgccgatttgaaaagatgagtaagcttcagagtgatgctttgcgtgaagccatctcaggaatcatggccgattccaaggagaagaatcgcaaatttgtggagaccatcgaactccaaatcggtttgaagaactacgatccacagaagga

SEQ ID NO: 141640 - DNA, 246 bp, Glycine max
caagattttgataacagaatggtgaatcactttgtttctgaattcagaaggaagaacaagaaggacatcagtgggaatgctagagcgttgagaaggttgaggacagcgtgtgagagagcaaagagaacactctcttctaccgcgcagacaactattgaaatcgattctttatacgaagggattgatttctatgctacaatcacgagggcgaggtttgaggaaatgaacatggatttgttcaggaag

SEQ ID NO: 141641 - DNA, 78 bp, Glycine max
tcatgagccattggttaaatactcatgcggtgattgagccattcatcatagcaacaaaccgacaccttagtgctctcc

SEQ ID NO: 141642 - DNA, 137 bp, Glycine max
cgcaatgtcatggatatgagatctatctatggaggatttgctgcagctttgagagatttgaatgtttgggtcatgaatgtggttacaatagactccccagatactcttcctattatttatgaacgaggtctttttgg

SEQ ID NO: 141643 - DNA, 248 bp, Glycine max
tgaactatgcctgaacggggcgaacaggagggtaactctagtggaggcccgcagcgatactgacatgcaaatcgttcgtctgacttgggtataggggcgaaagactaatcgaaccgactagtagctggttccctccgaagtgtccctcaggatagctggagcccgcgggcgagttctgatcggtaaagcgaatgattagaggcatcgggggcgcaagacctcgacctattctcaaacttgaaataggg

SEQ ID NO: 141644 - DNA, 263 bp, Glycine max
aaaagaagaaaggaaagaattgatcgttgaaaatgcagggaggaaagaaagcgggagagtccattaaggaaacagctacaaacattggtgcttctgccaaggctggcatggagaagaccaaggccactgtccaagagaaggcagaaagaatgacagcacgtgatccggtgcaaaaggagttggtcacccaaaagaaagaggcaaagatgaaccagggcggactggacaagcaggcggcgcgtcagcataacacggcgggcaaa

SEQ ID NO: 141645 - DNA, 237 bp, Glycine max
tggtgatgctataagaaactattaccatgaaatgcatgtcatccaggtcatgcttgttcctttgtactaggtggagagtgctttcgtatgtgttgagcacgcgttagacccggtgaacaagcctggtatgtctgagagtttctgcctatctagcactgaagctcaacaatcctagttgcaaggattcagcaggaacagtttagaggcctcctgacgataccaaagtcgtggagataa

SEQ ID NO: 141646 - DNA, 198 bp, Glycine max
aagccatgattcaatattcaaaccttgctctatactacacagtacatacactagaagaataatggcttccatcctccactacttttgagccctctctctttcttgctcttttcttttcttcttatccgactcagtctcccctacaaaaccaataaaccttgttgttctacccgttcaaaatgatggttccacagaact

SEQ ID NO: 141647 - DNA, 260 bp, Glycine max
ccgggcaagagcaagattgacgtgaggtggcagtactatcagctcctgccctttgggagcgggagaagaagctgccccggagcctcgctagcgttgcttgtcatgcaagcaaccctagcgagtttgatccagtgcttcgactggatcgttaatgatggtaaaaaccatcatgttgacatgtctgaggaagggagggtgactgtgtttttggccaagccactcaagtgcaagcctgttccacgtgtcactccgttcgctgg

SEQ ID NO: 141648 - DNA, 259 bp, Glycine max
tcttcatccttctctgttctcctagaacttgattacttgaacattccctatgacagatgaggtggttcttctggatttctggccaagtccatttgggatgagggtcaggattgcacttgctgaaaaggggatcgaagatgagtacaaagaagaggacttgaggaacaagagtcctacttctacttacaaatgaacccggttcacaagaagattccggttctcatccacaatggcaaacccattgccgaatccctcattg

SEQ ID NO: 141649 - DNA, 261 bp, Glycine max
gtcagattcaggaaatatggcgagagcagttgagggacaccgcagattcttaggtcaccgcaagacaatcaacccagacaggaaaggacttgttggaatttttgatatgctggaaactggagagctagtagaaggaagggaactgtcaaatatggtgcagcgcatgcacaagaacaggcaaggagctccaaggaaaacgcacggttctctaccggggattaaaggccgagcacgatttaggactgaagagcccttttatga

SEQ ID NO: 141650 - DNA, 116 bp, Glycine max
cccagtgaacaattccttcacttgcagcactgttgcagcagcatcttcagtgcaaaagccgaaagttcaccttgaacgatgacgacagaagtaggagcagacagtgtccaagtcca

SEQ ID NO: 141651 - DNA, 239 bp, Glycine max
ggtcagcctccaagtgtgcctctgttggcattcaaggcattgcttggacctttagtggcatgatctttgcccttgtctactgcactgctggaatttcagggggacacatcaacccagctgtgacctttggtctctttttggcaaggaagctgtccctcacaagggcgctgttctacattatcatgcaggtgcttggagccatctgtggggctggtgtggtgaagggatttgagggcaat

SEQ ID NO: 141652 - DNA, 177 bp, Glycine max
tgtgataaaccgcgatcacaggttgctgcaccttaaaaccggaaagaaaaggaatcgttacttgatttcaagaagctctcagtttcttccgactgctttgtgtacgagttcttgaggtgaagaaaatcactctctgtgctggccagagacttcgtgaatcagtttcttttccagaca

SEQ ID NO: 141653 - DNA, 253 bp, Glycine max
atggcgtggtttcactttgcaagaatttgcaaaccagttattttccaagatagatgagtatgggaaaggtaggcagatgccagctcattatgggtccaaaaagcacaattacttgacagtagcatcaacgattgctgacacaaatttcccatgctgttggagccgcttattccttaaagatggataaaaaggatgcatgtgccgtcacttacttcggtgatggtggctcaagtgagggtgatttccacgctgc

SEQ ID NO: 141654 - DNA, 248 bp, Glycine max
cgcgtcgctgctccgtaccagtttcactgcataaatttgagagaaaactctgcaaacatgttggtttatcaggacctcctgagaggtgatgagcttctctcggactccttccgttacaatgaaattgagaatggaatgctgtgggaagttgaggggaagtgggttgttaagggagcagttgatgttgacattggtgcaaacccatctgctgagggtggagaagatgagggagtcgatgacgcagctgt

SEQ ID NO: 141655 - DNA, 252 bp, Glycine max
tcgcggttacaatcaaaaccaacaacaactatggcaagttatcaaaagcactacgatgatcagggtcgcaaggttgacgagtatggcaacgttgagaagcaaaccgacgaatacggcaaccctgttcatgctgctagtgtcacctatgtagccaccagaactgctgctggtggttacagtgatgacattaataagcaacatgataccaccaagcctacggcgtagacactggtagacagcattctagtggtg

SEQ ID NO: 141656 - DNA, 233 bp, Glycine max
gctcgagcgaagacctcaaagtctccgacttcggactctccacgctgccggagcagcccgcgctgacggtatgctcgtaaccccgtgtgggacccctgcttacgttgcacccgaggtcttaaagaaaaaaggttacgacggttcaaaggccgatttatggtcctgtggggtaatcctcttcgctttgctttgtggctatttacccttccaagtgagaacgttatgagaattta

SEQ ID NO: 141657 - DNA, 241 bp, Glycine max
caagaaggagcttgtctgagaaggaaacagatagaagctttgggttgagaaatttcaggtacattgagaccatcaaagaagctttggaaagggaatgcccaggagttgtttcctgtgctggtatcctcgttctctctgccagagatggcattgtttcgctaggaggtccccatatccctcttaaaacaggaagaagggatgtagaaggagcagagccgatgtggtagagcagttcctccca

SEQ ID NO: 141658 - DNA, 256 bp, Glycine max
cggctacatatgcatcaagggcatggcaaacttctcaaggatttcaacaagggcctcgtcaacaacaaggccattgaagatctcaaagctgatgttgagaagttctctgccacatttgacatgcctggcttcctggtatctgaaatgaagtacaaggattaggttcaatcataacgctctctacttaattgtgtcactcaaagttcggcacaaagggagaaatggagaaaaaggaaataagtgtcttccattctgg

SEQ ID NO: 141659 - DNA, 241 bp, Glycine max
gtgacaactacatgaagcgatagccttccaattccaatgttctcgtcctcgccgccctcgtgcctttcggcgtctctcttctcatcctcgtcggcctcaccctctccgccaccgtcatcagcctcaccgtcgtcaccccactcttcgtcattttcagccccgtcttgctccccgcggccctattcatcgctctcgccgtcgccgcttcctcacatccggagtcttcggcatcacctccatc

SEQ ID NO: 141660 - DNA, 241 bp, Glycine max
aaaaaatggcacctgcaacacagagtctctctctcctcctcctgttctcactctgcatcgccgcaaccgttagatcgagcgacagcgactacgattgtgtgtacacggcctacgttagaaccggttcggtgttgaaggggggaacggactcgaagatcgggctgaagctgtacgacaagtacggctactacatctacattaaaacatcgaagcatggggcggcttgatgggcaagggctac

SEQ ID NO: 141661 - DNA, 241 bp, Glycine max
tgtgagagtcaactcaataagaatcaaccagcacagtgtgttcccactgaacaagatatcatccaccatcgtagggtcgacctctggaggaaccatgattagcacctcaactcctcacatggttctccagcaatccgtgtaccaggctttcactcaggtgtttgctcagcagctaccaaagcaagcactggtgaaatctgtgcaccatttgggttatgcttcaactccaacaagatcaatg

SEQ ID NO: 141662 - DNA, 237 bp, Glycine max
atcttgtcaaacgaactggatctattgtggatgttcctgcgggaaaggctatgctagggcgtgtggtcgacgcgttgggagtacctattgatggaagaggggctctaagcgatcacgagcgaagacgtgtcgaagtgaaagcccctgggattattgaacgtaaatctgtgcacgagcctatgcaaacagggttaaaagcgtagatagcctggttcctataggccgtggtcaacgaga

SEQ ID NO: 141663 - DNA, 241 bp, Glycine max
ttaaatcagattcaaattcaatggattggttattgtttcattctgatcacattgtcatatccataaagaagggggggaaaaaaagttagcactttgcagaagcattgcaattattttaagttgcaatagctagctgttagaaatgaaccactactgtgaaagatgttgaatcatacgtacgtgtgttctatcagagaagctgttttgatcttgtgttactacggtagatgccaaatgagtg

SEQ ID NO: 141664 - DNA, 242 bp, Glycine max
gtgaatacagctggggctgcacctcctccttctgttctttccggcatgtctgaacgtggatttcgtgtcacacacacttatggtctctcagaaacctatggcccctctgtctactgtgcctggaaaccagaatgggaatcacttccccctgaaaaccaagcccggctcaatgcaagacaaggtgttaggtacattggcttggacgcctggctgttgtgaacacaaaaaccatggaacctgtt

SEQ ID NO: 141665 - DNA, 241 bp, Glycine max
cttccttcataatttctcacttttcaaatctccattcagcttcattttctgcatagaaaaaacccttttctggagaaagaatatagtcttcagctggacaaggatcattcatcttgaaagaagagtttgtgtgtgacaatctttatagttctaaggagggtgcaagagagaactgaatttgctgtgatggcaactcgtagaatgcttttggaagagctgatgaggccactcatccagactc

SEQ ID NO: 141666 - DNA, 241 bp, Glycine max
gttttcacattcgaggatgattccacctctcctgtggctcctgctaccctttacaaagctctagttacggatgctgacaacgtcatcccaaaggctgtacacgccttcaggagtgttgaatccgttgagggaaatggtggccccggaaccatcaagaagatcactttccttgaggatggagaaaccaagtttgtgttgcaaaaatagaagcgattgatgaggctaacttgggatatagcta

SEQ ID NO: 141667 - DNA, 238 bp, Glycine max
gtttcccaacctccattgcctccgcttctacctcgctaccatgatcattcctgagacgaaccgcaaggagatctgcaaatacctcttccaagagggagtttgctttgcgaagaaggacttcaatttggcgaagaccctgagattgacgtgccgaatctgcaggtgattaagctgatgcagagtttcaagtctcgcgagatgtgagggagacttttgcttggatgcactattactggtt

SEQ ID NO: 141668 - DNA, 234 bp, Glycine max
gtcttgtcatgtatgtggaggatatagtatatggttatagtttatgtagaagaataaaaaatgtatgcatgtagtaatctaagggtcttatatatgtggctgaaatataaaccataataaaggcagagatgttgtgccaatacatcatatgttgagagttgttgggacatgtaaagcctacgtggtggtggagcaggttgttcacttttggatttagaaattatttattaattt

SEQ ID NO: 141669 - DNA, 234 bp, Glycine max
gagggagcgatgttgtgttggatgagtctggaagtcctaaagtggtcaacgatggtgtcaccattgctcgcgcaatcgagcttcccgatactatggagaccactggtgcagctcttatcagagaggttgctagcaagactagtgactctgcgggatgatgggactaccgctggcttggattcttgctcgcgagataactagctggggcttctcagtgtgagttctggggcaaat

SEQ ID NO: 141670 - DNA, 239 bp, Glycine max
ctgggacaacccatggggacccatcagacgtcagctatgcccggtcatggaaccggacagcccacgggccatgtcaccgagggagtggtgggctcacaccctattggaaccaacagaggcccgggtgggactgctatggcccataatacccgtgcggggggaaacccaaatgattatgggtatggaactgggggtacttcaattaaataatgatgatttagaaaaggaaagctacgacc

SEQ ID NO: 141671 - DNA, 237 bp, Glycine max
ctcctgcaaccttatcctgttctgcatgaaaagcctggtgattatgttgcagatatcaaattcactgtcttgctaatgcccaatggatcagatcgtgttacgtctcactcactccaggagttgcagcccaccaaaacaatagatgatcccgaaatcaaggcgtggctagcattgggcacaaagacaaagaagaaaggggtggaaagaagaagaaaggtaagaagggggcagaagctg

SEQ ID NO: 141672 - DNA, 235 bp, Glycine max
gttgcgactaagagttgctgcttcttccgccactcagcacttcgctccctctgtgcttcaccaaccatggccgaaatcgaagctaccgttccagatccctctcaaatcgacgtcaaacttttcaaccgctggagcttcgacgacgttgaggttactgatatgtctctggctgattacattggagtgtccccgtcaagcatgctacatatgttcctcacactgctggtaggtactc

SEQ ID NO: 141673 - DNA, 232 bp, Glycine max
cagagagtgatttcagtgagtgatcggtgttcacttgatctcatcataatcgtcagcgtcaattgaagaagatgccgatcagaaacatcgccgtcggaaggcctgaagaggcgactcaccccgacacgttgaaggcggctttggctgagttcatctcaaccttcatcttcgtgttcgccggctcaggctccggcacgcctacaacaagctcaccgacaacggcgctgccacc

SEQ ID NO: 141674 - DNA, 238 bp, Glycine max
tgtaaagctaacttcaacacctttaattttccacaagtatttcagcggctgaataccaagcggagaagatgagtcaggtgcagccacggcgtcccaaaggccaaaaccccatcaaatacggcgacgtttttgtcgtctccggcgaccttgcacagaagcccgtcgcatcggaagatgctgccatgactcaaagcgcgaagctcgagctgctcggacaaacccaacccggcggagcagc

SEQ ID NO: 141675 - DNA, 235 bp, Glycine max
ggcagggcgaagagtgcaattaaggagaatgccataacaataggagaggcattggaggcgacggcacagactgtgggtcagaaagcggtggatcagagtgacgcctccgcgattcaggcggcggaggtgagagcaacgggaagtaacgttataacgccgggtggacttgcggctatggctcaatcagctgctgcttatatgctgactgcaagcttgaccaggacaaggtcaagct

SEQ ID NO: 141676 - DNA, 246 bp, Glycine max
ttcacacacaacttactacattgctacttcctatacacatcataaacctaccaacaactatcggcaagttatcattagcactacgatgatcagggtcgcaaggttgacgagtatggcaacgttgagaagcaaaccgacgaatacggcaaccctgttcatgctgctagtgtcacctatgtagccaccagaactgctgctggtggttcagtgatgacattaataagcaacatgataccaccaatgcct

SEQ ID NO: 141677 - DNA, 233 bp, Glycine max
gaaagaacttccttataaccaaaaccaacaacaactatggacagttatcagaagcactacgatgatcagggtcgcaacgtcgacgagtatggcaatgttgagaggcaaactgacgaatatggcaacccggtccatgccactagtgtcacttatgtagccactaaaagtgttggtggctacaatgatgacactaatagcaacatgataccatcggtgtctatactgagaaagat

SEQ ID NO: 141678 - DNA, 235 bp, Glycine max
gtgcaaactggacttatgatgaaattgcagaacgcttacattccaggatggtggttgctgtccaacaactacaaataagaggatgaaaaaaattgatactgagatacgagcattacttaaaggtgtcatcaacaaacgagagaatgcaatgaaggctggtgaagtcttgaacaatgacttgttgggcatgcttttgaatcaaaccgtatggaaatacaagatcatggaaagaata

SEQ ID NO: 141679 - DNA, 234 bp, Glycine max
aggcattggaggccacggcacagacggtgggtcacaagccggtggatcagagtgatgcctcagcgattcaggcggcggaggttagagcaacgggaagtaacgttataacgccgggaggacttgcggctatggctcaatcagctgctgcttataatgctgactgcaagcatgaccaggacaaggtcaagcttgccgcgttctgaccggagcaaccgccaaattgcccgcggacaa

SEQ ID NO: 141680 - DNA, 233 bp, Glycine max
ctcatcatctgctgataggaaatggaaggcttcaagtgatacaagctccactgatcaatatgacaggttcatgaatgccctttacagtttgctggatggttcttctgataatacaaaatttgaggatgattgtcgagctataattggaattcaatcatatgtcttattcacattagacaagctgatatataaactgttaaacagcttcaagctgttgccgctgatgagatgga

SEQ ID NO: 141681 - DNA, 236 bp, Glycine max
gttgtaactcgttcttcttcttttgttgttctgtgtttgtgtttgttttttctctcacctgaaaatgtcttgctgcggtggtaactgtggttgcggaagctcctgcaagtgcggcaacggctgcggaggctgcaagatgtacccagacttgagctacactgagtcaaccaccaccgagaccttggtcatgggagtgcacctgttaaggctcaattcgagggtgctgaaatgggtgt

SEQ ID NO: 141682 - DNA, 229 bp, Glycine max
cacaactactacaagtacttccttacaatcaaaaccatcaacaactatggcaagttatcaaaagcactacgatgatcagggtcgcaaggttgacgagtatggcaacgttgagaagcaaaccgacgaatacggcaaccctgttcatgctgctagtgtcacctatgtagccaccagaactgctgctggtggttacaggatgacattaataagcaacatgataccaccaatg

SEQ ID NO: 141683 - DNA, 174 bp, Glycine max
ggacatttgatgtttctctcctaaccattgaggccggcatctttgacgtgaaagccacagctggtgacacccatcttggaggtgaccattttgataacagactggtgcaccactttgttcaagagtctaagagaaagaacaagaagcacataagtgggcacccccgagccactt

SEQ ID NO: 141684 - DNA, 233 bp, Glycine max
cctctctctctctccgcttccttctcttctcacacctccatgtttcacacttcccttcccttcgccgattccggcatggacgctgtccagcgccgtctcatgttcgaagacgaatgcattttggtggatgagaatgaccgtgtggttggtcatgattcaaaatacaattgtcacttgatggcaaagattgaagcgagaatttgctgcatagagctttcagtgtattcctgttc

SEQ ID NO: 141685 - DNA, 228 bp, Glycine max
gcattctagtggtggctacgatggtgacactaataaacatcatggaattactggtggctataatgatgacaccaatagacatcatggaactaccggtgtctatggtatagacaccgataggcaacaacatgggactactggtggctatgccggtgacactggtaggcaacatgggaacatcggtggcccttctatggaaccaacaccgcagacaccggtactggtccc

SEQ ID NO: 141686 - DNA, 190 bp, Glycine max
gcggtttcctttgttggtgttgctgggaactgttttcctggcatcagtttgtgtctcattaaaggtgagagaggatgagaataaccctttctacttgagaagctctaacagcttccaaactctctttgagaaccaaaacggtcgcattcgtctcctccagagattcaacaaacgctccacacaacatacg

SEQ ID NO: 141687 - DNA, 253 bp, Glycine max
  unsure (1)..(253): unsure at all n locations
caagaaataggttagttccgagctgaaacaagatggctggtgataaacaaaaactctttaacagactgaagccattcataggtgtagtgttcttacagtttggatagctggtatggatattctatccaaagctgcactgaacaagggaatgagtaactatgtatttgtcgtgtaccgtcatgtntttgcctttgttgtcatggccccttttgcactgatcttggagaagtatttttgctctcttccatatatg

SEQ ID NO: 141688 - DNA, 255 bp, Glycine max
atttacaacaacaatggcttctgtgcctcaaccaaaaatctcccttctaaccttattcttcttctcgtccttcaccatcattgcgcatgcaattgttcctcaaaacgaaccttcaaatttgagaactcaggtgaacttggaccctacatcgttgagtacggtgcatattacagaatgataagcatcttcaactctccattccaagttggtttctacaacaccaccccaaatgccttcactctagctttgcgtgta

SEQ ID NO: 141689 - DNA, 250 bp, Glycine max
ggtgtttttgactttctcggtaagaaaaaggatgaagaagacaagcctcatcctcaggaggaggtcatcgccaccgagtttcaaaaagtcactgtctcagaccaagagagaacaagcacagcctcttagaaaagcttcaccgatctgacagcagctctagctcttcaagtgaggaggaaggagaagatggagagaaaaggaagaagaagaagaaggaaaagaaagggctgaaagagaagatcgaggagaa

SEQ ID NO: 141690 - DNA, 259 bp, Glycine max
  unsure (1)..(259): unsure at all n locations
atcaccagtacataccagganattgcnggaacgaaaaatactgttggccagtatgagagccacgctggttttactcttcctgggctctatagggttgtccatggcatgatgtttttgatcccaagttcaatattgtctctcctngagctgatatgtcaatatatttcccctactctgaaaagcagaacagacttacagccctgcatggttcaattgaacagctattatttgctcctgagcagactgatgaatacattgg

SEQ ID NO: 141691 - DNA, 255 bp, Glycine max
atctcctgtgcatggtttccaagtgggaaatatatactttctggcctcagtgacaagagcatttgcatgtgggatttagatgggaaagaagtggagtcttggaaagacaaagaacccttaagatttctaatttggaaataacaggtgatggggaacacatgctgagtatttgtaaagacaattcaatactgtacttcaacaaagaaacgagggatgagagatatattgatgaggaccagacaataacttccttct

SEQ ID NO: 141692 - DNA, 244 bp, Glycine max
gatccggtgttgaaagtggagctactcttgaaaccggaggagatagatttggcaactcgggcttctatattcagcctactgtcttctcaaatgttaaggatgaatgctgattgcgaaggaagagatctttggcccagtgcaaagcatattaaaattcaaggaccttgatgatgtgattcaaagagcaaataacacacactatggccttgcagcaggggtgttcacaaaaaacattaacacagct

SEQ ID NO: 141693 - DNA, 251 bp, Glycine max
aacacatgcaaacttttcttcatcgtgagaagaaaaggttgccatcttgtcttgactggtttggatggtgcacatgggatgctttctatactgatgtcacagctagggtgttgaggaaggcctgaaaagtctatcacagggaggtacacctccacgattcctcatcatagatgatgattggcaacagattgaaaataaagcaaatgatgctactgaatgtttagtataagaaggagcacagtttgctatta

SEQ ID NO: 141694 - DNA, 248 bp, Glycine max
cggctcgagaggataaataagaagaagaagcgaaactaaagtcagcattcgaaaaagatgagtagcatcggtacaggttacgatctatcggtcaccactttctccctgatggccgcgttttccagatcgaggatgccgctaaagccgtcgacaacagcgggactgttattgggatcaagtgcaaagatggggttgtattgggcgttgagaagcttattccgtcgaaaatgatgcttccgggttccaat

SEQ ID NO: 141695 - DNA, 255 bp, Glycine max
ttcgctcttctcttggaaaagtgaaaaccagaagtacgaacgaaagagaagagcgatttagaagtgagagaagatggggttgtcgttcacgaagctgttcagcggttgtttgcgaagaaggaaatgaggattctgatggtaggtctcgatgctgctggtaagacaaccatcttgtacaagctcaagcttggagaaatcgtcaccactatccccaccatcggatttaatgttgagactgtggagtacaagaacatc

SEQ ID NO: 141696 - DNA, 243 bp, Glycine max
tccgaggcgaatagaagagaaaaattaagattgaggggaaggagcaggatgtgtcgctgggagcgaacaagttcccggagagacagccgattgggacggcgggcagagccaagactacggcaaggactaccaggagccggcgccggcgccactggttgacccgacggagtttacgtcatggtccttttacagagctgggatagcagagtttgtggccacttttctgtttctatacatcactgt

SEQ ID NO: 141697 - DNA, 257 bp, Glycine max
  unsure (1)..(257): unsure at all n locations
caacaacttctgctacttcctactccaaccgcactncctgttccgcaattatcatgggntcacgtcaagatcggaatcaacggatttggaagaattggccgtttgtagccagagtggctctgcagagagacgatgttgaactcgttgccgttaacgaccctttcatcaccaccgattacatgacatacatgtttaaatacgacagtgttcatggacactggaagcatcacgatgtcaccgttaaggacgagaagacc

SEQ ID NO: 141698 - DNA, 128 bp, Glycine max
taacaataattccttcacttgcagaacttagttctctgttgcatcatcatcatcttcattagtgttagccctaaacttcaccttcaaccatgaccacagtgcaccacacagtgtccaagtgcacacaa

SEQ ID NO: 141699 - DNA, 252 bp, Glycine max
  unsure (1)..(252): unsure at all n locations
atcgactaaaaaatgaaatgaatcatttcatattgatagtattgctatgcttattctgcaaagaacctgatttcgtaaacaacatagacctagaatgaaagaatatcctatcgagggaatcatatctgcttcggatgataggctcttcaagcacttgagccagcttggataacatctatacaaatatatgcgtgnactcgggcaatgtcacgaaatgttcgccgaggtggacaaatattggtacgcatattt

SEQ ID NO: 141700 - DNA, 251 bp, Glycine max
cacgaatgttcgggatagtcaccgtaaggttagggatagccatgatgggctcatcattcaaagaaacataggccctatttttctctggtggggatagaaggaactgaagctcagagtcacaggaagaatatggaaggaacaacagcaacagaattcggaagctggggtgtgcatgccaaatctctgtagttgacacgttatttgaaggggaatttttatcgtgtgtttctgacactcttttgagatatatt

SEQ ID NO: 141701 - DNA, 250 bp, Glycine max
aaaattggcacaatctgaggctgaaattcttcatgatgctgtaaaagagaagaagggtagctatgaagagaccattagggtcttgactacaaggagcagacccaacttgttgcaactttcaaccgctacagagagatccatggcacttccatctctaagaaattggtggatgaaggatctgatgagtttcagagggcattgtacactgccattcgtgccatcaatgatcctattaagtactatgaaaagg

SEQ ID NO: 141702 - DNA, 247 bp, Glycine max
gtccaagaaacaagaggagagagctgaggcagctgcgaaagttgctgccaaagaactcgaacaagtcaacagagaaagaagagaccgtgatttcggtgtgttgctgaacaacaacaacaacatcatcaggaagatcaacaaaaacgtggtgtaatcgggtccatgtttaaggcggtgcaagacacctacgagaacgccaaggaagctgtcgttggcaagaaagaagctactaataacgcgtacagta

SEQ ID NO: 141703 - DNA, 249 bp, Glycine max
agagaaacaacgatgagaaactgagaaaccgttgtggaccagttcaaatgccttatactctgcttttgccttctagtaaggaaggattaactttcagggaattcccaacagtatctctatctgaagaggtttgtggttccttaagttttgtggctttgaataaaagatagaagagaaggaatctgaatttcttcatccaacctgcacatggtaatctagtgtgtttgagtgctttcatgtttggcttta

SEQ ID NO: 141704 - DNA, 245 bp, Glycine max
aacttccaggaaaaaacttcgaattgggagggcgatcctcccggtgaactgaccgtaccccaaaccgacacaggtgaacaagtagagtatactaggggcttgagagaaccatgtcgaaggaactcggcaaaatgaccccgtaacttcgggagaaggggtgctctcctatcttttgattaggaaagcggcacataccagggggtagcgactgtttattaaaaacacaggactctgctaagtggtaa

SEQ ID NO: 141705 - DNA, 246 bp, Glycine max
tgacactattgacaatgtcaaagctaagattcaagacaagaaggtatcccaccagaccaacagaggctcatttttgctggaaaacagcttgaagatgtccgaaccttggcagattacaacatccagaaagaatctaccctccacttggtgctccgtcttcgcggtggtatgcaaatctttgtgaagacccttactgggaagaccattactttggaggtagagagctctgacacaattgacaatgtg

SEQ ID NO: 141706 - DNA, 208 bp, Glycine max
cactaaccctacaaaacctataaaccttctggttctacccgttcaaaatgatgcttccacacggctcaatatatacaacctccaaaaaaggaccctctaatgcaagtaccagtcctggtggacctcaatggaaaccacttgtgggttaactgtgagcaacactactcatccaaaacataccaagcacccttctgccactccacacaac

SEQ ID NO: 141707 - DNA, 247 bp, Glycine max
aagaaacctcaataaacaagtagtgttccgaaaagatggctcagcaggaagtggtagaagggttcaagttcgaacagaggcacgggaaagagcgcggagagtggcgcgcgtgtggaagacgaggcaggggcagcacttcgttgtggagtggcgcgtgggcatcactctcttctcagactgcgtcaactcgtatctccgcgatgacaactctgacatcgttgctactgataccatgaaaaacacagtg

SEQ ID NO: 141708 - DNA, 243 bp, Glycine max
tagagctaatacgtgcaacaaaccccgacttctggaagggatgcatttattagataaaaggtcaacacaggctctgcctggtgctttgatgatcatgataactcgtcggatcgcacggcctttgtgccggcgacgcatcattcaaatttctgccctatcaactttcgatggtaggatagtggcctaccatggtggtgacgggtgacggagaattagggttcgattccggagagggagcctgag

SEQ ID NO: 141709 - DNA, 205 bp, Glycine max
aaaatagcaagcctcaagctactgcaatgcatgtgggagctatagaaattatcattgatagtttcgcaagtcctgactgcaacatagttggtgcaatgcttttggttgatacttatcataccaatcctgaaaatgcagttcgtagtatttttgttgcgcctttcagaggcggaaggcccattcgggtggttacatttccgaatac

SEQ ID NO: 141710 - DNA, 252 bp, Glycine max
ttccattattgacagcggcgttggaatgaccaaagcagatttggtgaacaacttgggtaccgctgcgaggtaccgggaccaaggagttcatggaggcgttgcaggccggtgctgatgtcagcatgatagggcagttcggtgtggggttctactctgcttgccttgttgcagagaaggtcattgttaccaccaagcacaatgatgatgaacagtacatttgggagtctcaggctggtggctctttcactgtta

SEQ ID NO: 141711 - DNA, 250 bp, Glycine max
cgagactaccggattgtccagtttcagtcaaaacccaacacaatccttctcccccaccatgctgacgcgcgatttcctcctctttgtccttagcgggagagccatacttaccttggtgaacaacgacgacagagactcctacaaccttcaccctggcgatgcccagagaatcccagctggaaccacttactattgggttaaccctcacgaccacgagattctccaaaatagtcaaacttgccatacccgt

SEQ ID NO: 141712 - DNA, 254 bp, Glycine max
caaaaccaaaacactcaagttaacttcaacacctttaattttctgaacgaaattcagccacagaatatcaaagggcgcgaagatgagtcaggagcagccaaggcgcccccaaggccaagaccccatcaaatacggcgacgtttttgacgtctacggtgaccttgcacagatgcccattgcaccggaagatgctgccatgatgcaaagcgcggaagctcgagtactcggaaaaacccaacccggcggagcttctt

SEQ ID NO: 141713 - DNA, 249 bp, Glycine max
gattttacacatggcaatggtatgggtggagaatcaatttatggagagaagtttgctgatgagaacttcaagttaaagcatactggaccaggacttctatcaatggcaaatgctggtcctgacaccaatggctcacaatttttcattacaaccgtgacaactagctggttggacggaaggcatgttgtttttggtagagttctttctggattggatgttgtttacaatattgaagctgaaggaacacaa

SEQ ID NO: 141714 - DNA, 250 bp, Glycine max
acaactactacaagtacttccttacaatcaaaaccagcaacaactatggcaagttatcaaaagcactacgatgatcagggtcgcaaggttgacgagtatggcaacgttgagaagcaaaccgacgaatacggcaaccctgttcatgctgctagtgtcacctatgtagccaccagaactgctgctggtggttacagtgatgacattaataagcaacatgataccaccaatgcctacggcgtagacactggta

SEQ ID NO: 141715 - DNA, 250 bp, Glycine max
aacttccacttgagagaaaagtagtgtattaagactacaaattttcaatttttcaatggcgtcgaggcaacaaaaagaggatcgagctgaggcagctgcgaaagttgctgcgaaagaactcgaacaactcaaccgagaaaaagaccgtgatttcagtgttggtgttgcagaccaacaccaacaagaagaacatcagttagatcaacaaaagcgtggtgtaatcggatccatgttcaaggcggtgcaagac

SEQ ID NO: 141716 - DNA, 253 bp, Glycine max
tgcactatgtttttcttaatcttctccatactagcagccgttttgggcatagtgtccaaacttttgggtgcgaatctgattaggacatggaggagtgacagtttagcatctgcaggagccacatcaatcgttgcttgggcagtcactgctctagcatttgggttggcttgcaagcaaataaacataggagggcacagagggtggaggctgagggtagtggaggctttcataataatactcacattgacacagt

SEQ ID NO: 141717 - DNA, 247 bp, Glycine max
tgcaaattggatactgttactggccaatattatcctgagtgggctccaattaattgtcgagttcatcgacaaccaattcacatcactgaaggaaattatgtcagaaagcaagatgtcagcattgaatatgatgcatgtacaattccaaatgattgtggttcgttggttgttgccaaggttggaaatcacaaacaaattgttggtttccatgttgctggaagcaaaggaagactgggatatgcttcat

SEQ ID NO: 141718 - DNA, 248 bp, Glycine max
gtggactcgagggagtgacagatgcagggcttcttccactccttgagagttcggaggctggtttggttaaagtgaaccttagtggttgcacaaacgttaccaataaagtagtttcgtccttggccaatctgcatggttggactcttgagaatctgaaccttgatggttgcaaaaacatcagtgatgctagcttgatggcaattgctgaaaactgtgcattgctatgtgatctcgatgtctccaagtgt

SEQ ID NO: 141719 - DNA, 251 bp, Glycine max
gaagaaagggtccttttccttcaatcttaggtgctctctactgaacaaccagaggaacttccttgcaggcgagaaagacaatgtggtaaggcagatagaaagacaagtgcaggagcttgcgttccctgggtctgcacaagatgttgagaggctattaaagaagcagagggaatcctactttgttgatgctcagcctcagcagaaagacaatgtggtaaggcagatagaaagacaagtgcaggagcttgcgt

SEQ ID NO: 141720 - DNA, 254 bp, Glycine max
ccctctacaagcttgggattagagaccttccagtccttctatattgggggaggagccaattcgcactcggtgctttctggattcgaacctgccatccttgaaactgcatttaatgaatcaagaacggtggtagaggaaatcttctccaaggaactagatgggccaattatgttcgtggatgattctcatgcacctagcttatggactaaattccttcaactgaagaaggatgacaaagagcaacagctgaagaa

SEQ ID NO: 141721 - DNA, 245 bp, Glycine max
ctagcgatagtgataagagagataccaacaagaaaagaaaaaaagaagagttgagattccctttgaagaaaagatggcatcccataggcaaagctatgaagctggtcaaactaagggccgaactgaggaaaagacgaaccagacgatgggcaatattggagagaaggctcaagctgcaaaggagaagacccaggaaatggcccaagctgcaaaggagaagacccaacaaacagcccaagctgcca

SEQ ID NO: 141722 - DNA, 244 bp, Glycine max
agcaagcacaggtgaaatctgtggcaccgtttgggctatgcttcaactccaacaagatcaatgcatatcctagcgtggaccttgtgatggacaagcctaatggtcctgtttggagaatctctggtgaggacttgatggtgcaggcacaacctggggtcacgtgtttgggtgttatgaatggaggaatgcaacctagagctgaagttaccttagggacacgccagttggaagagaagctgatggt

SEQ ID NO: 141723 - DNA, 246 bp, Glycine max
aaaagaacccctctaatgcaagtaccagtcctggtggacctcaatggaaatcacttgtgggttaactgtgagcagcagtactcatccaaaacgtaccaagcacccttctgccactccacccaatgcaatccagcccacacaagggcggaccggacaacttggcccattggtcacagtcccacaattcctcttttcttgtgcacgttccttccttgttcaaaagggtcttcctagaaacactcaagg

SEQ ID NO: 141724 - DNA, 247 bp, Glycine max
gagcgagcgagcgagcagtttcaaagagaggatttgggattgggaaggcgagggattgcgctgcgtctcttcctcttctctttcgattcatccctcattcataatcttccaatccaacaacctcagcctcacactcacacatacacacatctgaacgcgtatcgtccctcccatggcttcaaagcgcatcctcaaggagctcaaggacttgcagaaagacccaccaacttcttgcagcgctggtcca

SEQ ID NO: 141725 - DNA, 252 bp, Glycine max
  unsure (1)..(252): unsure at all n locations
tgcaactatgtttgtcttaatcttctccatactagcagtcgttttcacaatattgtccaagcccacacagcatacgtcatcgacanganctgnangagtnacantttagcatctgcatgagccacatcaatcgttgcttgggctatcactgctctagcatttgggttggcttgcaagcaaataaacataggagggcacagaaggtggaagcttgaggtagtggaagctttcataataatactcacattgaca

SEQ ID NO: 141726 - DNA, 238 bp, Glycine max
tgtttcaccgagtttgggcgtttagatcagaaccaaatcgtgttctcttccattggcaaacatggcgactcaaatgagcaagaagagaaagtttgttgcggacggagtgttctttgccgaactgaacgaggttctgacacgtgaattggcggaggacggttactccggcgtggaagttagggttacgccgatgcgcaccgagatcatcatcagagccaccagaacccaagccgttcta

SEQ ID NO: 141727 - DNA, 243 bp, Glycine max
ctcgagccgaatcggctcgagaacattttgttgggtggggccttactctggagcggccatgaaccccgctgtgacatttgggcctgctgtcgtgagctggacctggaccaaccactggatctactgggccgggcctctcatcggtggtggaatcgctggccttgtttacgaggttgtctttatcagccacacccacgagcagcttcccaccactgactactagagggggggaaatgaaaataa

SEQ ID NO: 141728 - DNA, 244 bp, Glycine max
ccccaacaacgtcaccactgatcacattcaacagtacctggatgagaacaagtccttgatcctgaagattgttgaaagccagaattctggcaagctgagcgagtgtgcagagaaccaatcaaggctgcagagaaatctcatgtacctagctgcaatagctgattctcaaccccaaccatctccaatgcctggtcagtatccttctagtggacttatgcagcagggagcacactacatgcaggct

SEQ ID NO: 141729 - DNA, 250 bp, Glycine max
tgagaaagaaagaaaggaaataattgatctttgaaaatgcatggaggaaagaaagctggagagtccatcaaggaaacagctgcaaacattggtgcttctgccaaggctggcatggagaaaaccaaggccactgtccaggagaaggcagaaagaatgacggcacgtgatccgatgcaaaaggagttggcaacccagaagaaagaggcaaagatgagccaggcagagctggacaagcaggcggcgcgtcaca

SEQ ID NO: 141730 - DNA, 249 bp, Glycine max
atcgttgttgttctaaagcactcatccacacattctccgtcggcacgacaacaatggctccaaagaaaggtgcgaaaggtggagttgtagcagcaaagaagaaggttcaggagaaggtaacgaaccctttgttcgagaagcgtccgaagcagttcgggatcggaggcgcgctgccgccgaagcgggacctgacgcgcttcgtgaagtggccgaagaacgtccaaatccaacgcaagaagcgcatcctca

SEQ ID NO: 141731 - DNA, 243 bp, Glycine max
gtcgcagaggaaaaccctagctagtagtctcagttcgtttgaacagagaaaaaatggcagagggtctcgttctccgcggaaccatgcgcgcccacaccgacgtcgtgacggcgattgccactcccatcgacaactccgacatgatcgtgacggcgtcgcgcgacaaatccatcattctctggcacctcaccaaggaggacaagacctacggtgtcccccgccgccgcctcaccggacattctc

SEQ ID NO: 141732 - DNA, 241 bp, Glycine max
gtttcgggagaaaaagcaatccactcagagagctagaggaattcgacgatgcctcgctatgatgataaatacggcaatacccgcctctatgtggggcacttatcttcgaggactcgttcccgggatctggagcgtgccttcagcagatatggaagagttcggggtgtggatatgaagaatgatttcgcctttgttgattttagtgatcctcgagatgctgatgatgcaagatataacttgg

SEQ ID NO: 141733 - DNA, 244 bp, Glycine max
caagtacttccttacaatcaaaaccagaaacaactatggcaagttatcaaaagcactacgatgatcagggtcggcaggttgacgagtatggcaacgttgagaagcaaaccgacgaatacggcaaccctgttcatgctgctagtgtcacctatgtagccaccagaactgctgctggtggttacagtgatgacattgataagcaacatgataccaccaatgcctacggcgtagacactggtagaca

SEQ ID NO: 141734 - DNA, 261 bp, Glycine max
gccatgggcttttgcacaatgcggttttgatcatcgcttcttttcttttcgtcttgtacttagcactgcaagctaaaaagagcttcctcagactctcccatggccgctcttatatcattatatcctattacgcttccctctggcttgtcagcatccttaatcttctttggtgcttttcccaggcatgggagtgctctcctgggaaagagttcgcatggaacttgttatccctctttactacttctggaatgctgtttctag

SEQ ID NO: 141735 - DNA, 251 bp, Glycine max
ggattctacccgccgctcgatgggaattgcgcttccaggcgtctcgtagggctaatccgcctcacgagggtcaccaacggcacgttcctttggggggccgaggcccctactgctggtcggcaaacggacggcgggcgcacgcgtcgcttctagcccggattctgacttagaggcgttcagtcataatccaacgcacggtagcttcgcgccactggcttttcaaccaagcgcgatgaccaattgtgcgaatc

SEQ ID NO: 141736 - DNA, 238 bp, Glycine max
gcgatcaaagtaaaatcaaagctatgcaggaggcgaagtcggtggcgaaatcaacatgcaacgcagtggaagtatgcaactaaaggagaagaaggtgagggatttgatggtggacaagaagaggctagtggaggtgccgtacatggcgtcgctggcccacacaatgactacactggtagcgaacaaggttgtggcggtgccggtggctgcgccgccggggaaatggatcggagccgga

SEQ ID NO: 141737 - DNA, 247 bp, Glycine max
cctacattgtcagactacgaaatacgatatattatttatgaacttctgaaggcactggattattgccattcacaaggaatcatgcatcgtgatgtgaaaccacataatgtaatgattgatcatgagcagcgtaagcttcgccttatagattgggggcttgcagagttctatcatcctgggaaagaatataatgttcgcgtggcatcaagatatttcaaaggtcctgagcttcttgttgatcttcaag

SEQ ID NO: 141738 - DNA, 245 bp, Glycine max
  unsure (1)..(245): unsure at all n locations
atcctgcanctttgcnggctttatgttggtattgggctacagatggtgtangatcaaaagatatggttatccttccatataaggacagctnganattatntagtagatacttgcaacagtnggtcatggaatctctaggcaaggagtttgactgaatggtaatcgggttaatcaaggaattagtgtctatggaaataaaggaagcacagatcagcatgcctacatccaacaactgagggaaggtg

SEQ ID NO: 141739 - DNA, 159 bp, Glycine max
  unsure (1)..(159): unsure at all n locations
ccactctccacttggttcttcgtctaccgtggtgggatgcaaatgtttgttaagaccttgacgggaaattcatcacacttgaggtcgagagctccgacaccattgacaactttaangctaagattcaggacaaagagggtatccctccagatcaacaga

SEQ ID NO: 141740 - DNA, 208 bp, Glycine max
caactatggcaagttatcaaaagcactacgatgatcagggtcgcaaggttgacgagtatggcaacgttgagaagcaaaccgacgaatacggcaaccctgttcatgctgctagtgtcacctatgtagccaccagaactgctgctggtggttacagtgatgacattaataagcaacatgataccaccaatgcctacggcgtagacactgg

SEQ ID NO: 141741 - DNA, 248 bp, Glycine max
gaggcttcagaggatgttcgcgggtgcaggtggagcgctgggccatcccccaccggattcccccaccctcgattcctccgagcaggtctacatctcctccctcgcccttctcaaaatgctcaaacacggaagagctggggtacccatggaagtgatgggtctgatgttgggggagttcgtggatgagtacaccgttcgcgttgtggatgtgtttgcgatgcctcagagtgggaccggtgtcagcgttg

SEQ ID NO: 141742 - DNA, 244 bp, Glycine max
tacgtctcaggttttggacttactcggctgggtttgggcccgacaaagtctgccacaatggcaccaaaacgaaacagcttgaaccaatcttctataaccactgcaatgagttcaaaggttgcagcttccttgaaccactacttggcacccgaggtgcgcaatactggtggcaaattcactcagaaatgtgatgtatattcttttggtatagtgctgttagaacttttgacaggtagaatgccag

SEQ ID NO: 141743 - DNA, 244 bp, Glycine max
cacacaactactacaagtacttccttacaatcaaaaccataaacaactatggcaagttatcaaaagcactacgatgatcagggtcgcaaggttgacgagtatggcaacgttgagaagcaaaccgacgaatacggcaaccctgttcatgctgctagtgtcatctatgtagccaccagaactgctgctggtggttacagtgatgacattaataagcaacatgataccaccaatgcctacggcgtag

SEQ ID NO: 141744 - DNA, 245 bp, Glycine max
ctccgagtttgactacatataatagcttgatgtatatgtacagccgttctgaaaacttccaaaaatcagaagaaatgttgagggaagttctggagaaaggtatgaaacctgatagaatttcatacaatactgttatttatgcatattgcagaaatggtaggatgaaggaagcttctcggatattttctgaaatgaaagattctgcacttgttcctgatgttgtaacttacaacacatttattgca

SEQ ID NO: 141745 - DNA, 240 bp, Glycine max
attaaacaccatgagccaggaaaagccagagagacctcaagcggagaaagaccccatcaaatacggcgacgagagaagatgcagaaggagtgattggagctgagcttaggaacaacttggacatgagaacaacccctggtggggtcgctgcatccatcaaaaagctatgtttcttaatatattaaataatactacctcttatttttattgctatcttataatataatcaagttttcgtta

SEQ ID NO: 141746 - DNA, 238 bp, Glycine max
agaagaccaaggccactgtccaagagaaggcagaaagaatgacagcacgtgatccgcgtgcaaaaggagttggcaacccaaaagaaagaggcaaagatgaaccaggcggagctggacaagcaggcggcgcgtcagcataacacggcggccaaacagtccgccaccacggctgggcacatgggacatggccaccacaccaccggaaccgggactggaaccgccacgtattccaccaccg

SEQ ID NO: 141747 - DNA, 254 bp, Glycine max
cagctcgagctcatgaccaagattgacaggcgatctggcaaatagcttgagaaggaacccaagtttttgaagaatggtgatgctggttttgttaagatgattccgaccaaacccatggtggttgaaactttctctgagtaccccccacttggtcgctttgctgtcagggatatgcgtcaaactgttgctgtgggagtcatcaagaacgtggagaagaaggatcctactggagccaaggtcaccaaggctgccca

SEQ ID NO: 141748 - DNA, 133 bp, Glycine max
gaaataccactacttttaaccttattttacttattccgtgaatcggaagccgggcactgcccctctttttggacccaaggtcagcttcggccggtcgatccgggcggaagacattgtcaggtggggagtttgg

SEQ ID NO: 141749 - DNA, 157 bp, Glycine max
cagcagcaaccggcatggaacattatgacactgccttggcatatccagtgcagtcaccaggcgtgctaggaaaccaaccagacattgtcatggacagcttggctgtacatggccttggcctagtgcactcaaagaaggttttcaatttctacaacga

SEQ ID NO: 141750 - DNA, 235 bp, Glycine max
ctagcgagagtgataagagagataccatcaagaaaagaaaaaaagaagagttgagattccctttgaagaaaagatggcatcccataggcaaagctatgaagctggtcaaactaagggccgaactgaggaaaagacgaaccagacgatgggcaatattggagagaaggctcaagctgcaaaggagaagacccaggaaatggcccaagctgcaaaggagaagacccaacaaacagcc

SEQ ID NO: 141751 - DNA, 234 bp, Glycine max
tgacactattgacaatgtcaaagctaagattcaagacaagaaggtatcccaccagaccaacagaggctcatttttgctggaaaacagcttgaagatggccgaaccttggcagattacaacatccagaaagaatctaccctccacttggtgctccgtcttcgcggtggtatgcaaatctttgtgaagacccttactgggaagaccattactttggaggtagagagctctgacaca

SEQ ID NO: 141752 - DNA, 235 bp, Glycine max
gtcgtttaaaaatgtcgcagttgctggataaagacaagaacttcgtgtcggagaaggtaaatgatatggccaagccggagggagctgtcactgacgtggacttcaagcgcgtgagcaaagataatgtcgagtacttggccaaggtctctgttcgtaacccttattcaacttccatacccatttgtgagatcaactactctttcaaaagcgcatccagggagatagcatcagggaa

SEQ ID NO: 141753 - DNA, 236 bp, Glycine max
caccatgagattggtcatgctgatcagaacgagaagaaagggattatggacaagattaaggagaagcttcctggaggacacagtgacaagtagatgcatcgtgcatcatgcatgcatgcatatatataatattgttgtctttgaataaatttgctgcatatgtacttacgtacgtacagtgtcttgtcatgtatgtggaggatatagtatatggttatagtttatgtagaagaata

SEQ ID NO: 141754 - DNA, 234 bp, Glycine max
ctttaattttctaaaagtaattcagcggctgaataccaagcggagaagatgagtcaggagcagccacggcgtcccaaaggccaaaaccccatcaaatacggcgacgtttttgtcgtctccggcgaccttgcacagaagcccgtcgcaccggaagatgctgccatgatgcaaagcgcggaagctcgagtgctcggacaaacccaacccggcggagagcttccgtcatgcaatctg

SEQ ID NO: 141755 - DNA, 231 bp, Glycine max
ggtcatataaacccaatcctcggctaactcgtgtgctagacattatcttcatcctgcatgcagaacatgaaatgaattgttctacatctgctgtccgacaccttgcatcaagtggcgttgatgtatacactgctattgccggggctgttggagctctatatggaccacttcatggtggagctaatgaggctgtcctcaaaatgctgagtgaaattggaactgttcagaaca

SEQ ID NO: 141756 - DNA, 233 bp, Glycine max
cacaatttggacatgtattcagaatcacaaagaaggaagagccaaaaataaggaagaagctcaatactcagtttattatactggaaacccgtaaagatggagtgaaatttaccaacacgaagctcaagaaactaggggaccaatatcaacaaattcttgaggagtataaaagttgtcaaaaaaagttagttgatagagtagttcaaactgcggcaactttctctgaggtgttt

SEQ ID NO: 141757 - DNA, 235 bp, Glycine max
caatatcctagtacaccgtattaaagaatttaagatatactatgatgagagcgcggttcccattactgttgctgggagttgttttcctggcatcagtttctgtctcatttggcattgcgtattgggaaaagcagaaccccagtcacaacaagtgcctccgaagttgcaatagcgagaaagactcctacaggaaccaagcatgccacgctcgttgcaacctccttaaggtggagga

SEQ ID NO: 141758 - DNA, 238 bp, Glycine max
gccattttgcttagagcgctgaatgtgactattgatgaagtttgtgatgctcttagggaaggcaattgtgatacgttggggacggaacttcttgaaagtttattgaagatggctccaactaaagatgaagaatctaagctgaaggagtttcaagatgaatcgcccttcaagcttggcccggctgagaaatttcttaaagtcgtgcttgatataccttttgcttttaagagagtggatg

SEQ ID NO: 141759 - DNA, 239 bp, Glycine max
caataccaaaacactcaagttaacttcaacacctttaattttctgaacgaaattcagccacagaatatcaaagggagcgaagatgagtcaggagcagccaaggcgcccccaaggccaagaccccatcaaatacggcgacgtttttgacgtctacggtgaccttgcacagatgcccattgcaccggaagatgctgccatgatgcaaagcgcggaagctcgagtactcggaaaaacccaac

SEQ ID NO: 141760 - DNA, 234 bp, Glycine max
cgagaaagagaagaagcatatatatcaaaatggctgcagagatggagagggagtcattgataactgaagctcctaatgcaccagttactgcacagagaagggtcagaaatgacttagaaaattctctaccaaaaccatacttgccaagagcattgaaagctcctgatacgggtcacccaaatggaacagcaggccacaggcaccacaacttatctgttcttcagcagcattgtg

SEQ ID NO: 141761 - DNA, 234 bp, Glycine max
cattcccatggcctcagaagagcccactgttccggtggaacccgctcccgaacctgccaccgccgagcctcccccggaggagaaggaggagcccaaacctgaagccaaggctaagaaaaccaaggaacccaaacctaaaaaggtttccagaccacgcaaccctcccactcatccttcctacgaggagatgattaaagacgcaattacctcgctgaaggagaaaaccggttcgag

SEQ ID NO: 141762 - DNA, 234 bp, Glycine max
atagactgtcgagcagtgaataccagttgctcctatagccggcgctcaacaacatggcggacaaggcagtcaccatccgaaccagaaagttcatgacaaacaggcttctctccagaaagcaattcatcgttgatgtccttcatccagggagggctaatgtttccaaggctgaactgaaggagaaattgggcagaatgtatgacgtgaaagacactaacactgtatttgtcttca

SEQ ID NO: 141763 - DNA, 100 bp, Glycine max
catatgtactgtacgtagtgtgaagatatagtattgtatgctgcagaatatgattgtctaataaggtggactagctgtaataaaagatatttccaggttg

SEQ ID NO: 141764 - DNA, 237 bp, Glycine max
acctaagtaagaaacaaagaaaggaaataattgatctttgaaaatgcagggaggaaagatagctggagagtccatcaaggaaacagctgcaaacattggtgcttctgccaaggctggcatggagaaaaccaaggccactgtccaggagaaggcagaaagaatgacggcacgtgatccgatgcaaaaggagttggcaacccagaagaaagaggcaaagatgagccaggcagagctgga

SEQ ID NO: 141765 - DNA, 241 bp, Glycine max
cgtattaaagaatttaagatatactatgatgagagcgcggttcccattactgttgctgggagttgttttcctggcatcagtttctgtctcatttcgcattgcgtattgggaaaagcagaaccccagtcacaacaagtgcctccgaagttgcaatagcgagaaagactcctacaggaaccaagcatgccacgctcgttgcaacctccttaaggtggaggaagaagaagaatgcgaagaaggt

SEQ ID NO: 141766 - DNA, 124 bp, Glycine max
gaaataattaaaacgtgatctatgatacaacaatattagtatatatagacgcatgcagtttatatagtatatattgtcatgttgtatgtttttacattttggtttgcttgtttacattctcttc

SEQ ID NO: 141767 - DNA, 130 bp, Glycine max
gcacgagcagagagaggaacaggaatggcctcgcacggaggaaaaacgcggagaagagggaagtgaagaggaagatgaggatgaggatgaggaacaagatgaacgtcaattcccattcccacgcccacct

SEQ ID NO: 141768 - DNA, 233 bp, Glycine max
aaaaatgttgcttaagcccgataaaactatcatcacggaacctcatcacatctggccttctctaagtgatgatcaatggatgaaggtggaggttgcattaagagatcttatactatcagattatgcaaagaaaaacaatgtgaatacttcagctttgactcagtctgagattcgtgatattatacttggagctgagattactccaccttctcaacagcggcaacagattgcag

SEQ ID NO: 141769 - DNA, 234 bp, Glycine max
tgaaaatgcagggaggaaagaacctaagtgagaaacaaagaaaggaaataattgatctttgaaaatgcagggaggaaagaaagctggagagtccatcaaggaaacagctgcaaacattggtgcttctgccaaggctggcatggagaaaaccaaggccactgtccaggagaaggcagaaagaatgacggcacgtgatccgatgcaaaaggagttggcaacccagaagaaagaggc

SEQ ID NO: 141770 - DNA, 237 bp, Glycine max
acctcttccgtaggcagcagcaatggcctcaaatcccaaaactttgacctttgaggaggtagctaagcacaacaacaaaaaggattgctggattattatcaatggaaaggtgtatgatatcacaccatttttggatgagcatccaggaggtgatgaagttttgctgacgtcaacagggaaggatgccaccattgattttgaagatgtgggccacagtgattctgctatagaaatgat

SEQ ID NO: 141771 - DNA, 240 bp, Glycine max
gaagaatttctcttcacatccaagggaagaatcttggacaatcgtctcaaactcaacaaggtcgtccgggaattgcagtattcaaaaagtggtgttacggtgaaaacggaggatggttgcgtttacgagaccaattatgtgattttgtccgttagcattggcgttctccaaagcgacctactagccttcaatccacccttacccggatggaaagtgcaagcaatcgataaatgtgatgtg

SEQ ID NO: 141772 - DNA, 235 bp, Glycine max
cgcgtcgctccgcaccagtttcaccgcacgaatatcttgatgtttggagcgatccgagaaaaactctgtaaacatgttggtttaccaggacctccttacaggtgatgagcttctctctgactccttccgttacaaggaaattgagaatggaatgctgtgggaagttgaggggaagtgggttgttaaaggagcagttgatgtagacattggtgcaaacccttctgctgagggtgga

SEQ ID NO: 141773 - DNA, 232 bp, Glycine max
accgctgaaatggagactattgggaaaatcaagcacaggaaccttgttcccctgttgggatactgcaaggtaggggaagagaggctcttggtttatgagtacatgaaatatggaagtttagaggatgttctacatgatcagaagaacgctgggatcaagctgaactgggccattaggcggaaaattgctattggagctgctaggggattggcttttcttcaccacaattgta

SEQ ID NO: 141774 - DNA, 199 bp, Glycine max
gacacactgtttcctcgcatgcctgttccggtattgcggcaggttgtgtctaatcttgagaagttgaagctcccctctacacattctggttcaggagggggaactactcgtcatggttctgatgatactgcccgtagaccaccttctgttaaagctgccctttcagtctcttttggtcagcgggctccacaccgggctt

SEQ ID NO: 141775 - DNA, 182 bp, Glycine max
ccttgttgttctacccgttcaaaatgatggttccacagggctccattgggaccaacctccaaaaaagaacccctctaatgcaagtaccagtcctggcggacctcaatggaaatcacttgtgggttaactgtgagcagcagtactcatccaaaacgtaccaagcacccttctgccactccaca

SEQ ID NO: 141776 - DNA, 227 bp, Glycine max
aaggccatggacatgtcaaatccttctgtatttgtaaatgctcagttgattcccaactttatagggaagaaagtaagagcagtggttcaggtgagccaatgtgatggtggggttaccacagcaaaatccactgatgactgtcaattaaccataaaagggttgccacaagtccctcttatgaattatattgaggtcattggcattgctgaaagtaacagttctattga

SEQ ID NO: 141777 - DNA, 226 bp, Glycine max
atgctatccacagaggaggtggtgaaatcatccctactgccaggagagtcttctatgcttcccagattactgccaaacccaggcttcttgagcctgtctacctggttgaaatccaggctcctgagcaagctcttggtggaatctacagtgttcttaaccagaaacgtggacatgtgttcgaggaaatgcagaggcctggtaccccactttacaacatcaaagcata

SEQ ID NO: 141778 - DNA, 230 bp, Glycine max
aaagaatcaaagaaaggggtggtggctgcttcgaaagcttaataatttgtttatttccagaacatcatagttttcgcagcagcaaactaacaaattactcatatcatataataagatggcccgttctctctcgcaagccaaacgtattggtgtccttgttgctcaatctatctccctaattcccgttcatcggcgaggttacgcagtggcatccgatgtatcggtaagag

SEQ ID NO: 141779 - DNA, 242 bp, Glycine max
gtggaggcgactccggttgaggcagggcgaacagtgcaattaaggagaatgccataacaataggagaggcattggaggcgacggcacagactgtgggtcagaaagcggtggatcagagtgacgcctccgcgattcaggcggcggaggtgagagcaacgggaagtaacgttataacgccgggtggacttgcggctatggctcaatcagctgctgcttataatgctgactgcaagcttgaccag

SEQ ID NO: 141780 - DNA, 181 bp, Glycine max
cgtaaaggttcaatacaacgagtgcttgttttcttagggacaagcattgtacttatgtatgattctgtgtaaccatgagtcttccacgttgtactaatgtgaagggcaaaaataaaacacagaacaagttcgtttttctcaaaaaaaagaaaaagaaaaaagaaggaaaaaaaaaaaagga

SEQ ID NO: 141781 - DNA, 231 bp, Glycine max
caagtacttccttacaatcaaaaccaacaacaactatggcaagttatcaaaagcactacgatgatcagggtcgcaaggttgacgagtatggcaacgttgagaagcaaaccgacgaatacggcaaccctgttcatgctgctagtgtcacctatgtagccaccagaactgctgctggtggttacagtgatgacattaataagcaacatgataccaccaatgcctacggcgtag

SEQ ID NO: 141782 - DNA, 228 bp, Glycine max
gtggatatcaacgaaggagctcttcttctaccacactccaattcataggcatagtgatactagtgattaatgaaggagataaaaacattgaacttgttggcattaaagaacaacaacagaagcagaaacaggaagaggaacctttggaagtgcaaaggtacagagctgaattgtctgaagacgatgtatttgtaattccagcagcttatccatttgtcgtcaacgcta

SEQ ID NO: 141783 - DNA, 229 bp, Glycine max
tgaaagttctatttggctgctagcaaaggcttatgtagttgtgaatgactcgtgctatcatcaacttgtcagccattggttaaacactcatgcagttgttgagccattcatcatagcaactaacaggcatctcagtgttgttcaccctatttataaactccttcaccctcactatcgtggcaccatgaacatagatggccttgctcggttatcactggtcaacgacggg

SEQ ID NO: 141784 - DNA, 226 bp, Glycine max
gaagctcgtgccactcttcaaaagcttttgtcagctacttagccaaccttgagggacaacgtggttttgaggcagaaatcactactgcctgtgagtactgtggagttgcttctccctgttgttgttggggactataccgatttctttacgtctctgcatcacactaaaaattgtgggctcatttttcgtgggccacagactcctgttctagataattggtatcgcc

SEQ ID NO: 141785 - DNA, 225 bp, Glycine max
ctggcagactagtatccgatcctctgtcctctcgaagctttcattgttcaacatattctcaccatttctgtcatgggcctgctatcttgttttaggtctaccgtcctgagaaaatgttccaaaggaagctctggcatgtcaagattcctgtatacgaacaattttcaacgaaacttgatttcgtctggtggcaatgaatcgtattatgggtattttaacaggaga

SEQ ID NO: 141786 - DNA, 116 bp, Glycine max
gatcatacatagtagtattcgtggatttacaatgccaaacttttcaaaagtgaccgcattttctttgccaaccagacatatcttgcaagtgagacaccagcgccacacgacatacg

SEQ ID NO: 141787 - DNA, 259 bp, Glycine max
cagtcatgggaaacaaaactacccttttgcttttgctctttgttctttgccatggagtggccacaacaacaatggccttccatgatgatgagggtggtgataaaaagtcaccaaaaagtttgtttttgatgagcaactccacgagggttttcaagactgatgcaggggaaatgcgtgtgctgaaaagccatggtggtaggatattttataggcacatgcacattggcttcatctctatggaaccaaagtccttgtttgt

SEQ ID NO: 141788 - DNA, 256 bp, Glycine max
ctgacatcaccgctgggaaggatactccgcaggtagcatagaagccttgcaagctggagagagggtcaaagatcatgcaggaaaagccatgggagatattggtggacgtgggaaagccagagagactcacgagctgggtgcacactttgaatccccggctgacaaagtaactgaccatgcagcagccaatgtagttggaaacaaagagagtcaaagagaagctcgtggtggtgttcgtgatgttgggaagttcgaa

SEQ ID NO: 141789 - DNA, 255 bp, Glycine max
ggggggccgaggccccctactgctggtcggcaaacggacggcgggcgcacgcgtcgcttctagcccggattctgacttacaggcgttcagtcataatccaacgcacggtagcttcgcgccactggcttttcaaccaagcgcgatgaccaattgtgcgaatcaacggttcctctcgtactaggttgaattactattgcgacactgtcatcagtagggtaaaactaacctgtctcacgacggtctaatcccagctca

SEQ ID NO: 141790 - DNA, 252 bp, Glycine max
atcaaaccatcagccagaaaagaagacagacatcctcaaacagatagcggagacagtgaagcataggaaacacatagatggtagcgtggaattgattggagttttattgtatggaccaggaaaaggttcttctgttctacaatccatgagggctcctggtcttgcccttgttgatgactggacatgcctaaaatcaatggttcgggtgtttgagactcactgtgggacactgactcagtatggcatgaaaca

SEQ ID NO: 141791 - DNA, 255 bp, Glycine max
  unsure (1)..(255): unsure at all n locations
tgcagaccgagctagctagctagcaagcaagcacagagatggaggcaaagcgaggccatgccctcatgtgcttggcacgtgtttcactcttcctctgcgcctcaancctatccgctgctcacggaagcaccacggttcaagacatcgcgagacagttgaaactcggggacaacgagcttctgcgcacggagaagaagttcaaggttttcatggagaattacgggaggagctactccacagaggaggagtatttgc

SEQ ID NO: 141792 - DNA, 254 bp, Glycine max
aaaaaagttaccagtttgcgatctcattacaatctccccagtttctaatctcagctaagaaaaaccaaaagatgtctctgattccaggtttcttcggtggccgaaggagcaacgtgttcgatccattctcactcgacatgtgggatcccttcaaggattttcatgttcccacttcttctgtttctgctgaaaattctgcattcgtgagcactcgtgtggattggaaggagaccccagaggcacacgtgttcaag

SEQ ID NO: 141793 - DNA, 253 bp, Glycine max
cagttgcacaccgagctagctagctagcaagcaagcacagagatggaggcaaagcgaggccatgccctcatgtgcttggcacgtgtttcactcttcctctgcgctctaaccccatccgctgctcacggaagcaccacggttcaacacctcgcgagaaacttgaaactcggggacaacgagcttctgcgcacggagaagaagttcaaggttttcatggagaattacgggaggagctactccacagaggaggagt

SEQ ID NO: 141794 - DNA, 259 bp, Glycine max
tgattcttagaagttgtatcgttttcgtttccacaggtcgcgactatgtgcaaggagcggttacacgagatcgtgaatgaagagattgacagcgcgcgcgagaatttggagtggaagctgacgatggagaacggattcgctcgcatggacgacgaggttaatcgcaggagccagagcaaccagaccttcacctgcaggtgcgagctccagactccccactgcgacgccgtcggatccaccgccgtcgtcgccatcgtca

SEQ ID NO: 141795 - DNA, 252 bp, Glycine max
ggagccagagtcctttaccttggagctgcttctgggaccactgtttctcatgtgtcggacgttgttggccctactgcagttgtctatgcagtagaattttcccatagaagtggacgtgacttggtcaatatggcaaagaaaagaactaacgttatacccattattgaagatgctagacatccagctaaatacaggatgttggttggaatggttgatgtcatattttctgatgttgctcaacctgatcaggct

SEQ ID NO: 141796 - DNA, 252 bp, Glycine max
ccagagccaaggtaggttaaacactcttcttcatcgtcgtcgcaatgggacgtgtgatccgtgcgcacgtaagggagcaggctcggtcttcaagtcccacacgcaccaccgcaccggccctgcccgcttccggagcctggatttcggagagcgcaacggctacctgaagggtgtcgtcactcacgtcatccacgatcctggccgtggcgcgcctctcgctaaggtcgccttccgccacccgttccgctacaa

SEQ ID NO: 141797 - DNA, 252 bp, Glycine max
  unsure (1)..(252): unsure at all n locations
ccatttgctcccagtacagagcttaaccgagcttnacaaagatgaatcgggaaaagttgatgaagatggccggttcggttagaactgggggaaagggtaccatgagaagaaagaagaaggctgtccacaagacaacaaccacccgatnacnaaaggcttcagagcaccctgaagagaataggggtgaatgccatcccggctattgaggaggtcaatatctttaaggatgacgtattatccagtttctaaatc

SEQ ID NO: 141798 - DNA, 256 bp, Glycine max
agggtattgggagctctcgtcgtttcggagttagggaccttacgcagccatggccactgctacgaatgccgccgccgccccaccacgccagctctcccagaaggaagccgacatccagatgatgttggccgccgacgtccacctcggcaccaagacctgcgacttccaaatggaacgttacatcttcaagcgccgcaacgacgggatttacattattaaccttgggaagacgtgggagaagcttcagctagcagct

SEQ ID NO: 141799 - DNA, 259 bp, Glycine max
gaaaagaagaaaggaaagaattgatcgttgaaaatgcagggaggaaagaaagcgggagagtccattaaggaaacagctacaaacattggtgcttctgccaaggctggcatggagaagaccaaggccactgtccaagagaaggcagaaagaatgacagcacgtgatccggtgcaaaaggagttggcaacccaaaagaaagaggcaaagatgaaccaggcggagctggacaagcaggcggcgcgtcagcataacacggcgg

SEQ ID NO: 141800 - DNA, 266 bp, Glycine max
cacaggaatatggcttccttaagctcctcattagtgctgctccttgcagctctaattctatcccctcaagttcttgctgactatgagaagcccccaatttacaagccacctgtttacacaccgccagtttataagccccccattgaaaaaccaccagtgtacaaacctccagtttacaagcctccagttgaaaaaccacctgtttataagccaccagtttacaagccaccagtgtacaagcctccagttgaaaaaccaccggttta

SEQ ID NO: 141801 - DNA, 265 bp, Glycine max
ctcagattgcaattgcctcttctcttctcccagaatcggttacaggttcaagggttttgtcttcatttaggtcactaatccgatatcatgaagctcgatacgactagtctcgaatcgtttcccacactgattgcacctcaaaacgacgtcgccggagaactctccgccgctccgttctttgaccttccgaattccaatgacttcgatgggttcttgaaagacgctattcagatggtgaagcccgcgaagggtactacaactcttg

SEQ ID NO: 141802 - DNA, 179 bp, Glycine max
caaaccttgctctatactacacagtacacacactagaagaataatggcttccatcctccactactttttagccctctctctttcttgctcttttcttttcttcttatccgactcagtcacccctacaaaaccaataaaccttgttgttctacccgttcaaaatgatggttccacatggc

SEQ ID NO: 141803 - DNA, 253 bp, Glycine max
caggctgagaagatgcagcagacaccgcctatgattcctatgatgccttcgttcccacctacgaacataatcaccgagcagattcaaaaataccttgatgagaacaagaagctgattctggcaatattggacaatcaaaatcttggaaaacttgcagaatgtgcccagtaccaagctcagcttcaaaagaatttgatgtatttagctgcaattgctgatgcccagcctcaaacaccagccatgcctccacaga

SEQ ID NO: 141804 - DNA, 251 bp, Glycine max
atcactaccttggttcggttcttggtcgctatgatggagatgtgtatccaaagctgtacgaggaggcatggaaggatccattgaatgattcagtgcgtgccagatggcttccaagaatatattcgaccaatgctaaagcaacaacttcgtaatgctagactctaaattacttttttataactgcactgttgatactggagaaagttatgtattgctttcaatttaaaagacagtaataaagttctacgaaa

SEQ ID NO: 141805 - DNA, 248 bp, Glycine max
cttcaaaacactcataacaccaagcacaaagcaaagctcatccttgagttaaaaaatggcagcagcttcttccatggctctctcatccccatccttggctggcaaggccgtgaagctgggcccatcagccccagaagtgggaagggtgagcatgaggaagaccgtcaccaagcaggtctcctcaggaagcccatggtacggcccagaccgagtcaagtacttgggcccattctctggcgagcccccgt

SEQ ID NO: 141806 - DNA, 231 bp, Glycine max
agatgaaggagagattttccaaactgttgttgggccaggacatgtccggtggaggaaagggtgtttcgtctgctttggcactgtcaaatgctttcacaaaccttgctgctcctatttttggtgaacaaaagcgcctagaaccgatgccggcagaaaggaaagcaaaatggagaaaagaaattgattggcttctatcagtcacggattacgttgttgaaatggttccttccc

SEQ ID NO: 141807 - DNA, 252 bp, Glycine max
cggtcggctgccggtggactgctcgagctgcttcgcccgcgagagcgggtcgtcgcgtgccggtcgggggacggattggtcacgggcccttcggggcctcttccccgggcgtcgaacagtcaactcagaactggtacggacaagggccatccgactgtttaattaaaacaaagcattgcgatggtccctgcggatgttgacgcaatgtgatttctgcccagtgctctgaatgtcaaagtgaagaaattcaac

SEQ ID NO: 141808 - DNA, 252 bp, Glycine max
ctctggttgattcggatctagagtcttcagtttctcctcgttgttcttcgctttcctgttttcaatttcgattctttcgttaatttaataagatgtttgggagggcaccgaagaagagcgataatacgaggtactacgaaatcctcggcgtctccaagaacgcttcgcaggatgatctgaagaaggcttacaagaaagccgccattaagaatcaccccgacaagggcggtgatcccgagaagtttaaagagc

SEQ ID NO: 141809 - DNA, 252 bp, Glycine max
gagaaaccctaggtaagaagaaaagatgccggctggtcatggtttgagatcccgcaccagagcgtccttctctcgtcctttcaggaagaagggaaccatcgccctcaccacatacctgagaacctaccacgtcggcgactatgttgacgtcaaggttaacggtgccgttcacaagggaatgccccacaaattctaccatggccgcaccggacgcgtctggaatgtcaccaaacgtgctgttggcgtcgaagt

SEQ ID NO: 141810 - DNA, 240 bp, Glycine max
ggaaatctaaataaatatttttcattctaggtgatgtatcatgtatgtaccaaaatattttggtacgtgagtcttttaaaaagtttgcatctcctctttggttttccttagttctgaaagttatctcctaagaagacaatcatatgtactgtacgtagtgtgaagatatcgtattgtatgctgcagaatatgattgtctaataaggtggactagctgtaataaaagatatttccaggttg

SEQ ID NO: 141811 - DNA, 251 bp, Glycine max
gttgcagaccgagctagctagctagcaagcaagcacagagatggaggcaaagcgaggccatgccctcatgtgcttggcccgtgtttcactcttcctctgcgctctaaccctatccgctgctcacggaagcaccacggttcaagacatcgcgagacagttgaaactcggggacaacgagcttctgcgcacggagaagaagttcaaggttttcatggagaattacgggaggagctactccacagaggaggagt

SEQ ID NO: 141812 - DNA, 250 bp, Glycine max
cacaaaccctcccctcacactctccaaaccctagcggcactacacacgttatctctctctctctctctctctctccctctctccttccccaagatgtccaccgccgatcccgagcaccgagaagaggaggaggcacccgccgtcggcgacaacgaggacaccggagcacacgtcgctcccatcgtcaagctcgacgaggttgctgtcaccaccggcgaggaggacgaagatgcaatcctagatctcaaat

SEQ ID NO: 141813 - DNA, 246 bp, Glycine max
ggttgctgtgatgtgcatggttgtggtggccatgagtgctgcacccatggcacaggccgcaatcacgtgcgggcaggtcgccggcgacatgtctccgtgcttcagttatcttcgaagcggcggaaaaccgtcgcaggcctgctgcaacggagtgaagtccctcagcagcgcggcgaagaccaccgcggaccgccagggggcgtgcagttgcctgaaaaaccttgccaataatatgggacagagttt

SEQ ID NO: 141814 - DNA, 246 bp, Glycine max
caagaatggcttctgtgcctcaaccaaaaatctcccttctaaccttattcttcttctcgtccttgaccatcattgcgcatgcgattgttcctcaaaacgtgaccttcagatttgagaagtcaggtgaacttggaccctacatcgttgagtacggtgcagattacagcatgatgagcatcttcaactctccattccaagttggtttctacaacaccagcccaaatgccttcactctagctttgcgtg

SEQ ID NO: 141815 - DNA, 248 bp, Glycine max
aaagaaaggaaataattgatctttgaaaatgcagggaggaaagaaagctggagagtccatcaaggaaacagctgcaaacattggtgcttctgccaaggctggcatggagaaaaccaaggccactgtccaggagaaggcagaaagaatgacggcacgtgatccgatgcaaaaggagttggcaacccagaagaaagaggcaaagatgagccaggcagagctggacaagcaggcggcgcgtcagcataaca

SEQ ID NO: 141816 - DNA, 249 bp, Glycine max
caaatatcaagaacaatggcttatgctaggcttgctcctatggctgtcttcttgcttgccacttccaccataatgttcccaccgaagatagaagcagcagattgtaatggtgcatgttcacctttcgaggtgccaccgtgccgctcaagtgattgtcgttgtgtccctataggactattcgttggtttctgcatacatccaactggactttcatctgttgcgaagatgatcgacgaacatcccaactta

SEQ ID NO: 141817 - DNA, 251 bp, Glycine max
caaggatatgtttacaatggactatcgataccccctctctgcatttcaggcctttgccatatgcttgactagctttgatacaaaactggcttgtgaatagttacaagagatatgtgtgggaagaaaaataggatttaatctccattttagatatctgtaggaatgttgaaagcttcatcaagtcattgttatcctcatggttaaactgtaaagtacggaacaatctctgcccagtgtatcttttttctttt

SEQ ID NO: 141818 - DNA, 227 bp, Glycine max
aaatataagggtatgcttgtgttttcttttgtttttgcaaccatccttttgcttgagtggccactaggctcctgcatgtgcatttttatctttcttgttttggggtcacaactgccaaagcctagttgagtgtgtagctgttgtcattttgtcttctacacatattgaataaaatgtgtgaaaccctattttgtatagggatgctaaaaaaaaaaaaaagggggggc

SEQ ID NO: 141819 - DNA, 244 bp, Glycine max
gtgaaataccactacttttgacgttattttacttattccgtgaatcggaagcggggcactgcccctctttttggacccaaggtcggcttcggccggtcgatccgggcggaagacattgtcaggtggggagtttggctggggcggcacatctgttaaaagataacgcaggtgtcctaagatgagctcaacgagaacagaaatctcgtgtggaacaaaagggtaaaagctcgtttgattctgattt

SEQ ID NO: 141820 - DNA, 244 bp, Glycine max
cttttaggactccgctggcaccttatgagaaatcaaagtctttgggttccggggggagtatggtcgcaaggctgaaacttaaaggaattgacggaagggcaccaccaggagtggagcctgcggcttaatttgactcaacacggggaaacttaccaggtccagacatagtaaggaccgccagactgagagctctttcttgattctatgggtggtggtgcatggccgttcttagttggtggagcga

SEQ ID NO: 141821 - DNA, 254 bp, Glycine max
gataaaaattaaggaagcagaggagaaaactgagggtgggattttgcttccatcaactgctcaaacgaagcctcaagggggtgaggtggttgctgttggagaaggaaagacaattgggaagaacaatgtagagattagtgtgaagactggtgcacaagttgtgtattcgaagtatgcaggtactgaggtggatttcgatggtacaaagcatcttattgtgaaggatgatgacattgttggtatccttgaaactg

SEQ ID NO: 141822 - DNA, 245 bp, Glycine max
  unsure (1)..(245): unsure at all n locations
caattcggcagtgcaagcgcagagagtcgaatgaacaactctattatggcttttgttctgctaatattactttcggcgttacgctactcaagcgccgaacaagctttcgatgttcgcaaacatctttccactgtctccagatatcgagntgtgaaagacatcgctgacactaacttcgtgccttctaaaatccccgagggatgtgttccgatccatttgaatctcgtggcgaggcatggaactcg

SEQ ID NO: 141823 - DNA, 240 bp, Glycine max
ctaagtgagaaacaaagaaaggaaataattgatctttgaaaatgcagggaggaaagaaagctggagagtccatcaaggaaacagctgcaaacattggtgcttctgccaaggctggcatggagaaaaccaaggccactgtccaggagaaggcagaaagaatgacggcacgtgatccgatgcaaaaggagttggcaacccagaagaaagaggcaaagatgagccaggcagagctggacaagc

SEQ ID NO: 141824 - DNA, 243 bp, Glycine max
gggggaactttcagccactgctgtcaatgctcctatggttgctcctgaggtgttgtcagaattggccccatatgtggtgctggctgagaagctgggcaggctagctgtgcagttggtgtgtggaggaagtggaatcaaatctgtgaaggttgtttatcgatcagctaggggcccagatgacttggacactagacttctgcgagccatggttacaaaaggcctcattgaaccaatttcaaacac

SEQ ID NO: 141825 - DNA, 247 bp, Glycine max
atcacacacaactactacaattacttccttacaatcaaaaccattaacaactatggcaagttatcaaaagcactacgatgatcagggtcgcaaggttgacgagtatggcaacgttgagaagcaaaccgacgaatacggcaaccctgttcatgctgctagtgtcacctatgtagccaccagaactgctgctggtggttacagtgatgacattaataagcaacatgataccaccaatgcctacggcgta

SEQ ID NO: 141826 - DNA, 269 bp, Glycine max
  unsure (1)..(269): unsure at all n locations
caacttctgntacccactctcttcttccncannccangccacgctnttctctacagtcatgggcaaggtcaagatcggaatcaacggatttggaagaattggccgtntggttgccagantcgctctgcanagagacgatgtggagctcgntgncgttnacgaccctttcattaccnccgannanntgncatacatggttaaatacgacattggttcacggacactgggaagcatcaggatgtgcgccgttaaggncgagaaggcccntc

SEQ ID NO: 141827 - DNA, 258 bp, Glycine max
caggctgagaagatgcagcagacaccgcctatgattcctatgatgccttcgttcccacctacgaacataaccaccgagcagattcaaaaataccttgatgagaacaagaagctgattctggcaatattggacaatcaaaatcttggaaaacttgcagaatgtgcccagtaccaagctcagcttcaaaagaatttgatgtatttagctgcaattgctgatgcccagcctcaaacaccagccatgcctccacagatggca

SEQ ID NO: 141828 - DNA, 225 bp, Glycine max
cacacacaactactacaagtacttccttacaatcaaaaccaacaacaactatggcaagttatcaaaagcactacgatgatcagggtcgcaaggttgacgagtatggcaacgttgagaagcaaaccgacgaatacggcaaccctgttcatgctgctagtgatcactatgtagccaccagaactgctgctggtggttacagtgatgacattaataagcaacatgata

SEQ ID NO: 141829 - DNA, 260 bp, Glycine max
ctctactactgctagctgtgacttgtgttgagttcaatcaaatcgcattggtatctgaaatcaggaaagatggttagcgtactgagatcaggcaagacacaaagggcagaaggcccagcaaccatccttgccattggaactgcaaacccaccaaaccgtgttgatcagagcacctatcctgattactacttcagaatcaccaacagtgaccacatgaccgagctcaaagagaaatgtcagggcatgtgtgacaagtctat

SEQ ID NO: 141830 - DNA, 232 bp, Glycine max
ctagttctagatcgcgagccgccgcccttttttttttttagtattccgatgtcactcttgtttgttagtacacctttttatttttgatttcagtaagtgctgtgcaagtaggttagagttgggtagaagggcatgttcatggtgttaattactaggttatgtatgcatgtgagtgctgctatcgatggcaaaataatataaggagtggagatgtggtgggaggtgaagtggg

SEQ ID NO: 141831 - DNA, 256 bp, Glycine max
aaaatttaccaggattcagctttctcagctggtgaattgttggcagttgcacttgcacatggatttgctctatttgctgctgtttctgcaagcatgcatgtatcaggtggccatgtcaacccagctgtgacatttggtgctctcattggaggcagaatttctgttctccgtgccgtatactactggattgctcaaattctaggtgctatagtggctgccctcgttctcaggcttgtcactaataacatgagaccat

SEQ ID NO: 141832 - DNA, 256 bp, Glycine max
caaggaggagaagcagaaagaggagacgaagcaatggcgccgaagaagcccagaaccacgtcgaggaaccctgatttggtcaggggaattggcaaatattcgaggtcgcagatgtaccacaagacgggcatctgggccatcaaggccaaaaacggcggtgttttgcccctccacgatcccaagcccaaacccgaggccccggcacagaagccgcccaagttctacccggccgatgacgtgaagaagcccctcgtca

SEQ ID NO: 141833 - DNA, 240 bp, Glycine max
aattgccaaggcatatgttgttgtcaatgactcctgctatcatcaacttattctgcactagagaaatactcatgcagtgattgaaccatttgtcatagcaacaaacaggcatcttagtgtgctccaccctatttataaacttttgttgcctcactatcgtgacaccttgaacatcattggactcgcaagacaatcactcatcattgctggtggcattattgagcaatcatttctgcctgg

SEQ ID NO: 141834 - DNA, 245 bp, Glycine max
gtcttcttgatccttctttttctccttgaactcaaacatggcagatgaggtggttctgctagatttctggccaagtccatttgggatgagggtcaggattgcacttgctgaaaagggtatcaaatatgagtacaaagaagaggacttgaggaacaagagtcctcttctcctccaaatgaacccggttcacaagaagattccggttctcatccacaatggcaaacccatttgtgaatccctcattg

SEQ ID NO: 141835 - DNA, 256 bp, Glycine max
catttctccactttcaccaattggcatattatctaagatacacaagattggaagccatcttgggcgtgggaaggaagaagacgctcatgaaatttacaggtgcgcggttgatacaatgcaatctgtttgtctcaaggaagttggtgtttcaagtcctttggcagaagcaacaactctagttggttacacctttggaggttatttacgatctaagataaagtgcttaagatgcctggggaaatctgagaagtacgag

SEQ ID NO: 141836 - DNA, 271 bp, Glycine max
  unsure (1)..(271): unsure at all n locations
acgtagtctcggagttcggcgctagcgaaacgctcttcgttatcttttctcagactccgcggcgtagatccgaggagttcgggaaatcctaactcatcatctcaactcaagtcatggctggacttgcacctgagggatcacagttcgatgctcgtcaatatgattctaaaatgagtgacttactttcatctgatggacaggacttcctcacatcctatgacagagtgnatgatagttttgacgctatgggtttgcaggaaaatctgctcag

SEQ ID NO: 141837 - DNA, 247 bp, Glycine max
tagctctttcagtctcttcttctgtcaatactttctcgtattttcccctcttcttcccctctctcgtgtgatccgctttagtttactcgtgaaaatcatggtgaaaggtccaggtctctactctgacatcggcaagagagctcgcgagcttctgttcaaggattatcagaatgaccactagttcaccatcaccacttacacttccactggagtggaaatcggttcaactggagtcaggaaaggtgaa

SEQ ID NO: 141838 - DNA, 242 bp, Glycine max
cggcaaacaaaaacaggtttttgtggtgttgaagatgttcaagaacacattccaatctggatttctttccattttatacagccttgggagtaaacctttgcagatatgggacaaagaagttgttgatggccacattaaacgactacaggatgaagacatacagttaaatgtactagaaataattggatcaaatattcagtccacatacattacttgcccagctgacccagcgacaacgcttg

SEQ ID NO: 141839 - DNA, 242 bp, Glycine max
ctcagagagaaagagagagagagagagaaaaatggctgatacaagtggaggagatgcagtgagaccggtggtaatatgtgataacaagtgtggctgcacagttccctgcactggtggttccacttgcaggtgcacaagtgtcggcatgacaactggaggcggtaatcacgtgacatgctcgtgcggagagcactgtgggtgcaatccatgctcatgtcccaagactgcggcttctggaactg

SEQ ID NO: 141840 - DNA, 231 bp, Glycine max
atccaagcacaagttctctgagttgttttgtgagatagcacatagcatagcaaggaaggagtattacaaccgaaaccctgaagaaaaaaagagtagaggaagaaaaaacacctggcaccaccaacgatgggtgtggattactacaagatcttgcaggttgataggagcgccaaagacgacgacttgaagaaggcttataggaaacttgctatgaaatggcaccctgataag

SEQ ID NO: 141841 - DNA, 242 bp, Glycine max
cgaaactactctacaaacacaacaaaactctccaattctgaagattttcttatctcttgtctttgaaactagaagctccgtgattgatcaatggcgactgaagaaggcaaagccataggcatagacctcggcacgacctacagctgcgtgggcgtgtggcaaaacgaccgcgttgagatcatccccaacgaccaaggcaaccgaaccaccccctcctatgtcgccttcaccgacaccgagag

SEQ ID NO: 141842 - DNA, 250 bp, Glycine max
ctttggatttcattcattagatggattcgagttcggggcatcaagaattcgattatttgtttaagttcttgatgattggagactctagggttggcaagagtagtcttcttctcagtttcacctccgatgcttatggagatctctcccccactatcggtgttgattctcaggtcacatatgtgatgatggggcgtaaaaagctgaagcttacaatctgggatactgctggtcaagagagattcagaacact

SEQ ID NO: 141843 - DNA, 251 bp, Glycine max
tgtcaacacacctgccgtggcacaagggtccaactcaggttgatgcacgtgaccagattagtaagatcaccaggcgctctgaaaagcccctcaggcttccccttcaggatgtgtacaagattggaggtattggaactgtgccagtgggacgtgttgagaccggtgtcttgaagcctgcaatggtggtgacttttgcaccaactggactgacaactgaagtcaagtctgtagagatgcaccatgaatctctt

SEQ ID NO: 141844 - DNA, 168 bp, Glycine max
caaacatgatccggcatcctcagcatccagcactaacaaagtcacacattaagccactgacactgcacataaatccaaggactacgcaaatgatattgctcagaagtcataggactacacaggtgacactgctcactcatcataggactacaatggcgatgctgcgca

SEQ ID NO: 141845 - DNA, 147 bp, Glycine max
gggaatgcatggccaatctggctgtcaattccggccaggtctaaatactcggccatagaccgatagcgaacaattagcgcgagggaaagatggaaaggactttgataagagagtcagagagtgcttgaaattgtcgggggggaagcg

SEQ ID NO: 141846 - DNA, 245 bp, Glycine max
gctcgagaccgaattgtctgaacaagatatatttgtaatcccagcaggttatccagttgtggacaacgctacctcaaatctgaattgctttgctattggtattaatgccgagaacaaccagaggaacttcctcgcaggttcgcaagacaatgtgataagccagatacctagtcaagtgcaggagcttgcattccctgggtctgcacaagctgttgagaagctattaaagaaccaaagagaatcct

SEQ ID NO: 141847 - DNA, 241 bp, Glycine max
aaatttttgaaccatccaattgtcaaagaaagtctgccccctagagatcctgttttctcctttttcaagggtcttgatgaaagcctttttggttcataatagatttgatgatgtggtgtgagacttagtatttctaagaattatgtgtttgttaaaggcttctatgatagcctcactgcttcaaaatagattcatgtatgtgagactcagaatctctggggaaaattgtgtgtggtgtgga

SEQ ID NO: 141848 - DNA, 105 bp, Glycine max
cttagagatccttttatgaaacgagtgatcagtgtgaaggagttatgttatctgtgttgtcaatttaatattattctagtaattttgttcaggagatgaacaagc

SEQ ID NO: 141849 - DNA, 252 bp, Glycine max
cacgtgttggggcaacagctgcagtgtacttagcctcaattctagagtatctgactgctgaagttcttgaacttgctgggaatgcaagcaaggatctgaaggtgaacaggatcacaccaaggcatttgcagctggctatcaggggagatgaggagctggacactcttatcaaagggaccattgctggtggtggtgtcagtcctcacattcacaactccttgatcaacagaaccgccaaggattgagctctct

SEQ ID NO: 141850 - DNA, 237 bp, Glycine max
cgccatacccgttaacaaacccggtagatttgagagtttcttcctatctagcactcaagctcaacagtcctacttgcaagggttcagcaagaatattctagaggcctcatacgacaccaaattcgaggagataaacaaggttctgtttggtagagaggaggggcagcaacaaggggaggagaggctgcaagagagtgtgattgtggaaatctcaaagaaacaaattcgggaactgag

SEQ ID NO: 141851 - DNA, 234 bp, Glycine max
caggtctttaagatgagaacaaaaaatgcaaatgtagtttcctttttttgaacacaaaatatttttacttctattttttgactgaaagaataaaaaaatgatatgattcaacctcaaactcatttgaatgtagctgataatagcggacacgcgaactgatgtgtattcgaatcctaggagctagtaatcgacgatatgcttatattggtgacattgttgttgctgtaatcaaac

SEQ ID NO: 141852 - DNA, 247 bp, Glycine max
gcagaggcctggtaccccactttacaacatcaaagcatacctccctgtcattgagtcctttggtttctcgagcacattgagggctgcaacatcaggccaggctttcccacaatgtgtctttgatcactgggacatgatgtcttctgacccattggagactggatcacaagctgcacagcttgtcaccgacatgggcaagaggaagggcttgaaggaacagatgactcctctctccgagtttgaagac

SEQ ID NO: 141853 - DNA, 216 bp, Glycine max
ctctactacggctagctgtgacttgtgttgagttcaagcaaatcgcattggtatctgaaatcaggaaagattgttagcgtagcgagtttaggcaggcacaaagggcagaatggccagcaaccatccttgccattggaactgcaaacccaccagaccgtgttgatcagagcacctatcctgatgactacttcagaatcaccaacagtgagcacacga

SEQ ID NO: 141854 - DNA, 244 bp, Glycine max
acttggcccattggtcacagtcccacaattcctcttttcttgtgcaccttccttccttgttcaaaagggtcttcctagagacactcaaggtgtggctgggttaggccatgcaccaatttctcttccaaaccaactcgcttcccactttggcctacaacgccaattcaccacttgcctttctcgctaccctacttcaaagggtgctataatattcggggatgcacctaacaacatgcgacagttt

SEQ ID NO: 141855 - DNA, 232 bp, Glycine max
cacgcactctccgcgcaagctataccgttactgccagccagtgatccagctatggtcaacgcaaactcaaagctgaacttcttggccactggaagcaatgccgagaacaagcagaggacatggctcgcacgttcgctagacaatgtgagaggccagatacctagtcgtgtacatgagcatgcaatcgctgaggctgcagacactgtcgaggaggcatcatcggaccatagag

SEQ ID NO: 141856 - DNA, 246 bp, Glycine max
acagcttgaacccaccgcgtttcggagagagagacgtcgcaatggggaggaggcctgcaaggtgttaccggcagataaaaaacaagccataccccaaatcacgtttctgccgtggtgttcctgatcctaagatcagaatttatgatgttggtatgaagaagaaaggtgttgatgagtttcccttctgcgttcatctggttagctgggaaaaagaaaatgtttcaagtgaagcattggaagctgcta

SEQ ID NO: 141857 - DNA, 269 bp, Glycine max
gtaagtgttggcattctgctcgaacggggaactttcagccgctgctgtcaatgctcctatggttgctcctgaggtgttgtcagaattggccccatatgtggtgctggctgagaagctgggcatgctagctttgcagttggtgtgtggaggaagtggaatcaaatctgtgaaggttgtttatcgatcagctagtggcccacatgactttgacactagacttcttcgatgcatggttacaaaaggcctcattgaaccaatttcaaacacca

SEQ ID NO: 141858 - DNA, 240 bp, Glycine max
cttgttctttcaaagttaccagacacaagtacacaacacaacagcaacatatggcgtctgaacaattggctcgcagagagaacaccaccaccgataagcagattcacgtcgatgaacacagggttcccaagatgtcgacccacttcgagcaccgttcggacgggctaaagagtctgacatcagcgctgggaatgatactcggcaggtgagcatacgacccttgcaagctggagagagggt

SEQ ID NO: 141859 - DNA, 246 bp, Glycine max
cggcaattggttcagggacaggaatattgcttgcagtaacaatcatctatcagtacttcgaaacatttgagaaggagagagctagcgagcttggcttcttcggtttctaagctctgcttagcacattcactgttggtgacgcaattcggctctaccgcacccacagttttgttgtgtaatgaggactgggtggtaggttgtttaacacagtaaggaagaacttagattagttttgtatcacttttc

SEQ ID NO: 141860 - DNA, 207 bp, Glycine max
cacaactataagatagaacttccttataaccaaaaccatcatcaactatggctaatcatcacaagcactacgatgcatcaaggtcgcaatgtccacgagtatggtcaacgttgcagactgcagacttgccgaatactcgcaacccggttacatgccactagtgttcacttacgtagccactaggattgtttagttgctacaatgctt

SEQ ID NO: 141861 - DNA, 240 bp, Glycine max
actagctgttgcaaatttctactatttttcaatggcttctgcagatgttgagttccgttgctttgttggtgggcttgcttgggtcaccggcaacgatgccctcgagaaagccttttcaatctacggcgacatcgttgaatcgaaggttatcaacgaccgtgagactggaaggtccagaggattcggatttgtgaccttcgcctcagagcagtcaatgaaagatgcgatcgcaggaatgaa

SEQ ID NO: 141862 - DNA, 249 bp, Glycine max
atcgtgaatgcgtataaaaggaaaataaagaaattagcgtcaaaatgttgggtgtgttcagcagctccatagtgtcgccgccggacgagctcgtggccgccggctgccgtactccgtcgccgaagatgacggcggcggcgctgcggaagctgttcgaggagaagaacccctccgccgtgtcggtggaggtcggagagcatgtccagctcgcttatacccaccacaacgagtcgccgtttcagcccagat

SEQ ID NO: 141863 - DNA, 211 bp, Glycine max
caagattggacgcattggaactgtgccagtgtgacgtgttgagaccggtggcttgaagcctggaatgctggtgactgttgcaccaactggactgacaactgaagtcaagtctgtggagatgcaccatgaatctcttacagaggcacatcctggtgacaatgtgggattcaatgttaacaatgttgctgttaaggattgaagcggggttatg

SEQ ID NO: 141864 - DNA, 253 bp, Glycine max
tagaagctaacttcaacagctgtagttttctagaagtagtgcagcggctgaataccaagcggagaagatgagtgaggagcagccacgtcgtcccaaatgccaaaaccccatcaaatacggcgacggttttgtcgtctccggcgaccttgcacagaagcccgtcgcaccggaagatgctgcgatgatgcaaagcgcggaagctcgagtgctcggacaaacccaaccctgcggagcaacttccgtcaatcaatct

SEQ ID NO: 141865 - DNA, 259 bp, Glycine max
cacaaaacttccacttgagagagaagtaatgtattaagactacaaattttcaatttttcaatggcgtctaggcaacaaaaagaggatcgagctgaggcagctgcgaaagttgctgcgaaagaactcgaacaactcaaccgagaaaaagaccgtgatttcagtgttggtgttacagaccaacaccaacaagaagaacatcagttagatcaacaaaagcgtggtgtaatcggatccatgttcaaggcggtgcaagacacct

SEQ ID NO: 141866 - DNA, 263 bp, Glycine max
aagcactatagagaaaacgacattcattcatctatcgctagccttagtgctcgcacgaaccactgctccccaagaagacgctgaggctctcagaaaggcttttgaaggatgggggactgatgagagaactgtcatagtaatattgggtcataggactgtttatcagaggcagcagatcagaagagtctatgaggagattatccacgaggatcttgtgaaacgcctagagtctgagatcagaggagactttgagaaagccgtgt

SEQ ID NO: 141867 - DNA, 256 bp, Glycine max
ctctgctcgtgcctctagggttatcatatctccatttccatttcctctctctcagtttccaagaatcttaagctatgggaaagtcttacccaaccgtgagcgctgattaccagaaggccgttgagaaggcgaagaagaagctcagaggcttcatcgctgagaagagatgcgctcctctaatgctccgtttggcatggcactctgctggaacttacgacgtgagctcgaagaccggtggtcccttcggaaccataaa

SEQ ID NO: 141868 - DNA, 256 bp, Glycine max
aatgactgttgaagagaagccagatgtaacatataatgatgttggcggttgtaaggagcagattgagaagatgcgagaagttgttgaacttcccatgcttcatccagagaaatttgtcaagcttgggattgatcctccaaagggtgttctttgttatggccccccaggaactgggaaaacacttttagccagggctgtggctaataggactgatgcttgttttataagggttattggaagtgagctagttcagaaa

SEQ ID NO: 141869 - DNA, 258 bp, Glycine max
aagtgatcagagctgtagttttacgtacttgtaaagaactcaaacgtgagcaacggtataataattcagtatgatgagaatgctgcagttgtcattgatgaagaatgaaatccaaaaggaagtcgaatctgttgtgcaatcggcctggaattgagacagttaaatttcactaaaatagtttcattagcacccgaggtattataagactgtactgtgctatggatacattatttatttgtgaaatagattaattaatct

SEQ ID NO: 141870 - DNA, 255 bp, Glycine max
agaaacctaagcttagaattagaaacaaagaagagaagagaggatataattgatcgttgaagatgcagggaggagagaaagcgggagagtccattaaggaaacagctacaaacattggtgcttctgccaaggctggcatggagaagaccaatgccactgtacaagagaaggcagaaagaatgacagcacgtgatccggtgcaaaaggagttggcaacccaaaagaaagaggcaaagatgaaccaggcggactgga

SEQ ID NO: 141871 - DNA, 261 bp, Glycine max
cacacaactacaagaaagaacttccttatgagcagaaccatgaacaagtatggctagttatcagaagcagtacgatgatcagggtcgcaatgtcgacgagtatggcgatgttgagaggcaaactggcgaatatggcaacccggttcatgccactagtgtcacttatgtagccactaaaagtgctggtggctacaatgatgacactaataagcaacatgataccaccggtgtctatcctgagaaagataccggtaggcatca

SEQ ID NO: 141872 - DNA, 261 bp, Glycine max
aaaaggagttggcaacccaaaagaaagaggcaaagatgaaccaggcggactggacaagcaggcggcgcgtcacataacacggcggccaaacagtccgccaccacggctgggcacatgggacatggccaccacaccaccggaaccgggactggaaccgccacgtattccaccaccggggaatatggtcagcccatgggggcccaccagacgtcggcaatgcctggccatggaaccgggcagcccacgggccatgtcaccgaa

SEQ ID NO: 141873 - DNA, 259 bp, Glycine max
gatccagtgacaggaatctcttgcgacatatgcattaacaatctcctagctgttgtgaataccaagcttcttcgggattatgcacacatagatccaaggttgcgtcagtggctttcattattaaacattgggctaagtcaagaagagtcaatgaaacttaccatgggaccttgtctagctatgcgtatgttttgatgtgcattcattttttacaaatgagaagacctgctatccttccatgcttgcaggagatggagac

SEQ ID NO: 141874 - DNA, 262 bp, Glycine max
gcggcaaccaaagccttagtgtgtgtgtcgaatctctacggcttcgcaaagcaaaactcgggacttttgagatctgctgttggaaccgtggaagacactgtaaccaccgttctgggtcccgtctaccacaaattcaacgctgttcccaaccacatcctcctttttgtcgacaacaaggtggatgaagctgctcacaaattcgatgagcatgcaccttctttggccaagcaggttgcaagccaagtcacttgtttggttcagg

SEQ ID NO: 141875 - DNA, 265 bp, Glycine max
agcttctgattatgccagtgagacggctaagaagaccaaagattatgtcggtgatgctgctcagagaagcaaaggggctgctgaatatgctagtgatgcggctcagaggaccaaagagtatgctggtgatgctaccaagagaagcaaagaggcttctaatgatcatgccaatgacatggctcagaagaccaaagactacgccagtgacactgctcagagaaccaaggaaaaactccaagacattgcatctgaagctggtcaatac

SEQ ID NO: 141876 - DNA, 172 bp, Glycine max
gtgtggcaccagctggactgacacgtgcagtcaagtctgtggatatgcagcatgaatctgttacagaggcacatcctcagtgacaatgacgcattccgtgtcaagaatgatgctgttaacgattgaaagcggggttatgttggctcacactcaaaaggtgacacctgcaaag

SEQ ID NO: 141877 - DNA, 165 bp, Glycine max
  unsure (1)..(165): unsure at all n locations
caatatcctctcatagtgtgcttcttctgcttcattttcattatcaggatgtctttgctttcggagctcatgaacctcaatctctcataatccacagaggatatcgggtgtgagtacanagtggggttggtggatgtggtatgcgaccgcagaagcaaagccagg

SEQ ID NO: 141878 - DNA, 253 bp, Glycine max
aaggtgaatgcaagtttcatccagagaaaatagcagttgagatcacaaatttcaccaatatccctgctcatgagaaccaaattgccgcatatttagtaaaaaatggtccacttgctatggtgcgtgattgcaattttcatgcaaacatacattggtggtgtctcatgccctctcatatgtagcaagacaaggctgaaccatggtgtgttacttgtgggatatggtgcaaaaggcttctcaattcttaggcttg

SEQ ID NO: 141879 - DNA, 272 bp, Glycine max
ttcggctcgaggtagagatccaatgagatgcgaagttccaaccccttctagaccatctagatcatttgtaaacagtataacaatagttgcaagacgtggagcagagagcgccggtgttgacgcaaatgggaattcttttgatttcacagcaaagttgctgcacttagcatggcagccaactgagaattcaattgcttgtgctgctgcaaatagcgtatacatgtactatgcttgaggaagaaagatgatttaagaacatgtatttgcttttg

SEQ ID NO: 141880 - DNA, 260 bp, Glycine max
  unsure (1)..(260): unsure at all n locations
tctttcgcaccttcgaaaatcaattttctgtcttctctgcgtcttaaccctctatcagtcgntttctcttgctcgtaccatgcaaaccgctcgcaaatccaccggtggagatggctcctaggaagcaactcgccaccaaggctgcaaggaaatctgcaccgacaaccggtggagtcaagaagcctcatcgctatcgccctggaactgttgctcttcgtgagattcgagaataccacaagagcacagagcttctgatccgc

SEQ ID NO: 141881 - DNA, 251 bp, Glycine max
ccgcagaacaccgtcttcgacgccaagcgtgtaatcggtcgcagattctcagactctcctgttcaaaacgacatgaagctgtggccgtttaaggtcgtggcgggaccgggcgacaagcccatgatcgtggtcaattacaaaggcgaggagaagtaattctctgcggaggagatatcttcaatggtgttcgtgaagatgagagaagtatcagaggcgtttctcggacacgcggtgaagaacgcggttatcac

SEQ ID NO: 141882 - DNA, 255 bp, Glycine max
atcccatggtctctctctctccgatcaattcgatttagcttttccccaaatcccaaaccctttcgttcgcttagatcccaatccaattgggttatggacatggcttccagtccccgcaccgttgaagagatcttcaaggattactgcgccagaagaactgccgttattcgcgctctcactctcgacgttgatgaattttacggcctctgtgatccagataaggataacctgtgcctctatggacatccaaatgag

SEQ ID NO: 141883 - DNA, 257 bp, Glycine max
atcacacacaactactacaactacttccttacaatcaagaccaggaacaagtacggcaagttatcaaaagcactacgatgatcagggtcccaaggttgacgagtatggcaacgtggagaagcaaaccgacgaatacggcaaccctgttcatgctgctagtgtcacctatgtagccaccagaactgctgctggtggttacagtgatgacattaataagcatgatgataccaccaatgcctacggcgtagacactggta

SEQ ID NO: 141884 - DNA, 260 bp, Glycine max
ctcgaaccttgctctatactacacagtacacacactataagaataatggcttccatcctccactactttttagccctctctctttcttgctcttttcttttcttcttatccgactcagtcacccctacaaaaccaataaaccttgttgttctacccgttcaaaatgatggttccacagggctccattgacacatcctccaaaaaaggacccctctaatgctagtgccagtcattgtggacatcgatgtggatcacttgtt

SEQ ID NO: 141885 - DNA, 258 bp, Glycine max
gcctgtgtgtcctgttggatatatatatattggggatattgctcgtgttggtatccatcctccaaatgttgctgctgtctaccgcaagattgatggattttttgctctcccgatgggatatgacctggtgtggcgaaattgtccggaagattatgttactccattatcaatttggcacccacgggcaccagatggatttgtggctcccggatgtgttgccattgctggttatttggaaccagagcctgatcttgttta

SEQ ID NO: 141886 - DNA, 258 bp, Glycine max
acctgtgtgtcctgttggatatatatatattggggatattgctcgtgttggtatccatcctccaaatgttgctgctgtctaccgcaagattgatggattttgtgctctcgcgatgggatatgacctggtgtggcgaaattgtccggaagattatgttactccattatcaatttggcacccacgggcaccagatggatttgtggctcccggatgtgatgccattgctggttatttggaaccagagcctgatcttgttta

SEQ ID NO: 141887 - DNA, 259 bp, Glycine max
ctcgtcatcgtcggtgacggcggtacaggaaagacaacgttcgtgaaaaggcatcttaccggtgaattcgagaaaaaaatacgaaccgaccattggagtggaggttcacccattggatttcttcacaaactgcggaaagattcgcttctactgttgggatactgctggacaagagaagtttcgtggcctcagagatggatattatatccatgggcaatgtgcgattataatgtttgatgttactgcccgtctagcatac

SEQ ID NO: 141888 - DNA, 263 bp, Glycine max
cacaaaacttccacttgagagaaaagtagtgtattaagactacaaattttcaatttttcaatggcgtcgaggcaacaaaaagaggatcgagctgaggcagctgcgaaagttgctgcgaaagaactcgaacaactcaaccgagaaaaagaccgtgatttcagtcttggtgttgcagataaacaccaacaagaagaacatcagttagatcaacaaaagcgtggtgtaatcggatccatgttcaaggcggtgcaagacacctacga

SEQ ID NO: 141889 - DNA, 124 bp, Glycine max
  unsure (1)..(124): unsure at all n locations
ngaaaacaattccttcacttgcagcactgttgcatcatcatcttcattgcaaaaccctaaacttcaccttcaaccatgaccacacaagtaccaccatacagtgtccaagtccacacaacatacg

SEQ ID NO: 141890 - DNA, 258 bp, Glycine max; identical to SEQ ID NO: 141298

SEQ ID NO: 141891 - DNA, 257 bp, Glycine max
aacaagggcttatagctgaagctgctgatttgatgcaagaaattgcggtggaaacattcggtgccatggccaagactgagaaaattgcgttcattcttgaacaagttcgtttgtgtctagaccgccaggattatgttcgtgcacaaatactctcaagaaagattagcccaagagtatttgatgctgatttatctaaggaaaagaaaaagcctaaagaaggtgataatgttgtagaagaggcccctgcagatatacca

SEQ ID NO: 141892 - DNA, 259 bp, Glycine max
atggagatacatgtgtaccgtgtctccaagacttggaagctgggcgagcagcgggacaaagtgtattcccgaggttgatacgatacgcctgaagaacagctcaagagcatagggaacgtgcttgaggaggaaccgaaggaagggctgcaggttccgacaattgacttgagagcgatagactcggaggacgaggctgttcgagtgaaatgtcgcgagaagctgaagaaagcggccgaggcatggggtgtgatgcacgtgg

SEQ ID NO: 141893 - DNA, 232 bp, Glycine max
ggagggtctgaaagtgagtgtcagcgctgagtaccaagcggaggagatgagtgcaggtcagccacggcgtcgcagaggccaaaacgccatcagatactgcgacgtttttgtcgtctccggcgaccttgcacagaagcccgtcgcaccggaagatgctgccatgatgcaaatcgcggagactcgagtgctcggacaaacccaacccgtgcgacagctgtccgtcatgcaatct

SEQ ID NO: 141894 - DNA, 255 bp, Glycine max
cgaagagatggccaccgttccagggcagctcgtgtgggagatcgtcaagaaaaacaattacttcttggtcaagcagtttggaaggggcacccagagcgtcgaattcagcagagagagcaacaatctctacaacctcaattcgttcaagtactctggtttggcaaacaagaaaactgttactgttcagcctgagggccaagatcaggctgtgttgttggctacaaccaagacaaagaagcaaaacaagcccgctgc

SEQ ID NO: 141895 - DNA, 255 bp, Glycine max
attcctcatgaaggccccatgtgtgatctattgtggtctgacccagatgacagatgtggctggggaatttctcctcgtggtgctggatatacttttggccaggatatatctgaacaattcaatcacacaaacagccttaagctgattgctagagctcatcagcttgttatggatggatttaactcggctcatgaacaaaaggtggttaccatttttagtgcacctaactactgttaccgatgtgggaacatggct

SEQ ID NO: 141896 - DNA, 255 bp, Glycine max
cacacacacacacacactaagaataatggcttctatcctccactactttttagccctctctctttctgtctctttccttttcttcttatccgactccgtccccattccccaacaccacactaaccctacaaaacctataaaccttctggttctacccgttcaaaatgatgcttccacagggctccatgtcctcaacctccaaaaaaggacccctctaatgcaagtaccagtcctggtgcttttagatggaaacca

SEQ ID NO: 141897 - DNA, 255 bp, Glycine max
caactactacaagtacttccttacaatcaaaaccatgaacaactatggcaagttatcaaaagcactacgatgatcagggtcgcaaggttgacgagtatggcaacgttgagaagcaaaccgacgaatacggcaaccctgttcatgctgctagtgtcacctatgtagccaccagaactgctgctggtggttacagtgatgacattaataagcaacatgataccaccaatgcctacggcgtagacactggtagacagc

SEQ ID NO: 141898 - DNA, 151 bp, Glycine max
tgttcttatcattgattcgaccactggtggttttgaagctggtatttccaaggatggacagactcgtgaacatgctctgctttcattcacccttggtgtgaaacagatgatttgctgctgtaacaaaatggatgctactacacccaagtat

SEQ ID NO: 141899 - DNA, 257 bp, Glycine max
agagcgagcagtttcagacacagagagaggggtttgggattggagggattgacgctgcgtctcttcctcttctctttcgatccatccctcattcctaatcctccaatccaaccacctcagcctcacactcacatatacacatatctgaacgcgtatcgtccctcctatggcttcaaagcgcatcctcaaggagctcaaggacttgcagaaagacccaccaacttcttgcagcgctggtccagtagctgaggacatgt

SEQ ID NO: 141900 - DNA, 261 bp, Glycine max
  unsure (1)..(261): unsure at all n locations
aagcaagaaagaacttccttataaccaaaaccaccaacaactatggcaangtatcagaagcactacgatgatcagggtcgcaatgtcgacgagtatggcaatgttgagaggcaaactgacgaatatggcaacccggttcatgccactagtgtcacttatgtagccactaaaagtgttggtggctacaatgatgacactaataagcaacatgataccaccggtgtctatcctgagaaagataccggtaggcatcattttggt

SEQ ID NO: 141901 - DNA, 216 bp, Glycine max
aaggattctacccgccgctcgatgggaattgcgcttcaaagcgtctcgtatggctaatccgcctcatgacggtcaccaacggtcacgtgcctttggtgggccgagttcccctactgctagtctgtaaacggatggagggcgcatgcgtcgcttctagcccggattctgacttagaggcgttcagtcataatccaactgcacggtagcttcgtgcca

SEQ ID NO: 141902 - DNA, 237 bp, Glycine max
  unsure (1)..(237): unsure at all n locations
acttggcccattggtcacagtcccacaattcctcttttcttgtgcaccttccttccttgttcaaaagggtcttcctagaaacactcaaggtgtggctgggttaggccatgcaccaatttctcttccaaaccaactcgctttttactntggcctacaacgccaattcaccacttgcctttctcgctaccctacttcaaagggtgctataatattcggggatgcacctaacaacatgcg

SEQ ID NO: 141903 - DNA, 236 bp, Glycine max
attgattccgttgccctcaaggtcttgtacccacccaaaagaacaagagctaatttgttgaaaaatggaaacttggaagaagggccatatatatttcccaactcgtcttggggggctttgatcccaccgcatatagaggattctcacggtcctttaccagggtggattgttgagtctcttaaggccgtgaagtacattgattctgaccactttgctgtgcccgagggaaaaagagc

SEQ ID NO: 141904 - DNA, 244 bp, Glycine max
gtagtagacagtagcaccatgagccaggaacagctcaagaaacctcaaggggagcaggaccccatcaaatacggcgacgttttcaaagtctccgacgaactcgctttcaaacccatcgcgccaagagacgcagctctcatgcaagccacggagaaccaagcattgggccaaactcaaaaaggaggtcccgcctcggtgatgcaatccgccgcaaccgaaaacctccgcgccggcgtcgtgggcc

SEQ ID NO: 141905 - DNA, 240 bp, Glycine max
aaaataatcaaacttgccatacccgtcaacaaacctggcagatatgatgatttcttcttatctagcactcaagcccaacagtcctacttgcaaggcttcagccataatattctagagacctccttccatagcgaattcgaggagataaacagggttttgttgggagaggaagaggagcagaggcagcaagagggagtgatcgtggaactctcaaaggaacaaattcggcaactgagcaga

SEQ ID NO: 141906 - DNA, 240 bp, Glycine max
caaaaagtttacgttacaaatcgcataataaccgtcctaagtttattgagagaattttgcaagtgtgagaaacatggcatctcgtcaaaacaacaagcaagagcttgatgaaagagcaaggcaaggagagactgttgtcccgggtggaactggtggcaagagcctggaggctcagcaacaccttgctgacggaaggagcaagggagggcaaacaaggaaggaacagctgggtacagaagg

SEQ ID NO: 141907 - DNA, 242 bp, Glycine max
attgaacttatctctcttctcacttctgttgttataagtaacttccctcatcattacaaaacaatcctccacaggtttcaaaatgctgaaatcgggcatgggaattgaggagagaaagcaagtgaagaagccagcacaagccagctcgagaaaagggtgcatgagagggaaaggaggtcccgagaatgctagttgcacctacaaaggtgtgaggcagagaacatggggaaaatgggttgctg

SEQ ID NO: 141908 - DNA, 237 bp, Glycine max
  unsure (1)..(237): unsure at all n locations
aaaacaaaacagagcaaagatagagtgtgtgaaaagtgaaacaataaacagaacaacaatggcgacttttaaggttccttagcctcttccccccgttgcagatgattgtgagcagctccgaaaagccttctcaggttggggaactaacgaggagctgattgtatcgatcttggctcataggaatgctgctcagaggaagcttattgttgngacttatgcccagacctatggagaaga

SEQ ID NO: 141909 - DNA, 239 bp, Glycine max
aacaaattactcatatcatataataagatggcccgttctctctcgcaagccaaacgtattggtgtccttgttgctcaatctatctccctaattcccgttcatcggcgaggttacgcagtggcatccgatgtatcggtaagagttggattgggtcatattgggcgaaggaatggaatcgtgggaggtgtagaagagaagcctgatacaagagatggttcaaaagcctactcaactgattg

SEQ ID NO: 141910 - DNA, 239 bp, Glycine max
cacacaactactacaagtacttccttacaatcaaaaccataaacaactatggcaagttatcaaaagcactacgatgatcagggtcgcaaggttgacgagtatggcaacgttgagaagcaaaccgacgaatacggcaaccctgttcatgctgctagtgtcacctatgtagccaccagaactgctgctggtggttacagtgatgacattaataagcaacatgataccaccaatgcctacgg

SEQ ID NO: 141911 - DNA, 238 bp, Glycine max
catttttgtactaagaagcatttgttacatttatgtaaccaaaggaaaatcaaaagtacgcaggaggtgaagctcggtggcgaaatcaacatgcaacgcagtgaaagcatgcgactaaaggagaagaaggtgaaggatttgatggttgacaagaagaggctagtggaggtgccgtacatggcgtccctggcccacacaatgactacaccggtggcgaacaaggttgtggcggtgccgg

SEQ ID NO: 141912 - DNA, 235 bp, Glycine max
cttgatgatcgaggcgtggcttgaagcagatgatacattaacttgcacctttctaacactcagccaacgcatgataatgagaattgtgatggctaaagtgaaccaacactcttgcttcttgaccaccttagacatggtcaagtcataggtgtgtgagtaaggttcatagcttatggagagaagaattaatagccagagaaggatgagagccatccacccggcgatacggtgaatt

SEQ ID NO: 141913 - DNA, 234 bp, Glycine max
caactacaagaaagaacttccttataaccaaaccaacaacaactatggcaacttatcagaagcactacgatcatcagggtcgcaaggtcgacgagtatggcaatgttgagaggcaaactgacgaatatggcaacccggttcatgccactagtgtcacttatgtagccactaaaagtgttggtggctataatgatgacactaataagcaacatgataccaccggtgtctatcctg

SEQ ID NO: 141914 - DNA, 237 bp, Glycine max
  unsure (1)..(237): unsure at all n locations
gccaggactcttcctgggccagtgagtgaccctgcaaaacttccgaagtggaactatgatgggtctagcacagatcaagctccaggggatgacagtgaagtcattctatacccacaagctattttcaaggacccctttaggagaggaaacaatattcttgtcatttgtgatgtgtactccccagctggtgagccacttccanacaacatgcgattttatgcngctaaaattttcagt

SEQ ID NO: 141915 - DNA, 246 bp, Glycine max
cgaaaagccatttccatagcagcctaagaaaatgaagagcactagcttgttcgctatctttctactttgcgccttcacctcatacctaccttccgccaccgcccaggacgtgctcgacgtggatggcgatccgattcggaacggtttcatatactacgttttgccggcaataagaggaaacggtggcggaatagaacgagccgcactcgggaaagacacttgccctatcactgtagtgcaatctcc

SEQ ID NO: 141916 - DNA, 236 bp, Glycine max
taaaaaaccactctacaaaactctccagtaatcctgaaaattgtatgttcttttggtgaaattaacagctctgtgattgatcaatggcgacaaaggaaggcaaagccataggcatcgatctcggcacgacctacagcggcgtgggcgtgtggcaaaacgaccgcgtcgagatcatccccaacgaccaaggcaaccgaaccactccctcttatgtagccttcaccgacaccgagagg

SEQ ID NO: 141917 - DNA, 235 bp, Glycine max
caaagaaacgaaataattgatctttgtaaatgcagggaggaaagaaagctggagagtccatcaaggaaacagttgcaaacattggtgcttctgccaaggctggcatggagaaaaccaaggccactgtccaggagaaggcagaaagaatgacggcacgtgatccgatgcaaaaggagttggcaaccctgaagaaagaggcaaagatgagccaggcagagctggacaagcaggcggc

SEQ ID NO: 141918 - DNA, 237 bp, Glycine max
aaacaaacaaaccagagtaataaaactcttcaacttttagccgtttttttttctatattgcagaagccatggctttcagggtgatgggtttggattctccattgttccacacgctgcaacacatgatggacatgtcagaggacgctgcaggggacaacaagacatacagtgctccgacacggtcatacgttcgagacgccaaagcaatggctgcaacacctgcggatgtgaaggaat

SEQ ID NO: 141919 - DNA, 235 bp, Glycine max
attgtcaggtggggagtttggctggggcggcacatctgttaaaagataacgcaggtgtcctaagatgagctcaacgagaacagaaatctcgtgtggaacaaaagggtaaaagctcgtttgattctgatttccagtacgaatacgaaccgtgaaagcgtggcctatcgatcctttagtctttcgggatttgaagctagaggtgtcagaaaagttaccacagggataactggcttgt

SEQ ID NO: 141920 - DNA, 234 bp, Glycine max
gcggtttcctttgttggtgttgctgggaactgttttcctggcatcagtttgtgtctcattaaaggtgagagaggatgagaataaccctttctacttgagaagctctaacagcttccaaactctctttgagaaccaaaacggtcgcattcgtctcctccagagattcaacaaacgctccccacaacttgagaaccttcgagactaccggattgtccagtttcagtcaaaacccaa

SEQ ID NO: 141921 - DNA, 232 bp, Glycine max
gaaagaacttcctgataaccaaaaccaacaacaactatggccagttatcagaagcactacgatgacgagggtcgcaaggtcgacgagtatggcaatgttgagaggcaaactgacgaatatggcaactcggttcatgccactagtgtcacttatgtagccactaaaagtgttggtggctacaatgatgacactaataagcaacatgataccaccggtgtctatcctgagaaag

SEQ ID NO: 141922 - DNA, 234 bp, Glycine max
caatagagaggtacaaaaaggcatgttctgatcactcaagcgcgatcactaccacagaaatcaatgctcagtattatcaacaagaatctgttaagctgcgacagcaaatacagatgctgcaaaattctaacaggcacctgatgggtgatgccttaagcacactgactgtgaaggaacttaagcagttggagaatagacttgatagaggaatcactagaatcagatctaagaaac

SEQ ID NO: 141923 - DNA, 234 bp, Glycine max
aaatataagggtatgcttgtgttttcttttgtttttgcaaccacccttttgcttgagtggccactaggctcctgcatgtgcatttttatttttcttgttttggggtcacaactgccaaagcctagttgagtgtgtagctgttgtattttgtcttctacacatattgaataaaatgtgtgaaaccctattttgtatagggatgctaaaaataaaaaaaaagggcggccgccgatt

SEQ ID NO: 141924 - DNA, 240 bp, Glycine max
ccgctcgagctcgaccgaattaagaaaagccatttccatagcagcctaagaaaatgaagagcactagattgttcgctatctttctactttgcgccttcacctcatacctaccttccgccaccgcccaggacgtgctcgacgtggatggcgatccgattcggaacggtttcatatactacgttttgccggcaataagaggaaacggtggcggaatagaacgagccgcactcgggaaagaca

SEQ ID NO: 141925 - DNA, 242 bp, Glycine max
caacgacgagaatctcagaatgataacactcgccatacccgttaacaaacccggtagatttgagagtttcttccgatctagcactcaagctcaacagtcctacttgcaagggttcagcaagaatattctagaggcctcatacgacaccaaattcgaggagataaacaaggttctgtttggtagagaggaggggcagcaacaaggggaggagaggctgcaagagagtgtgattgtggaaatct

SEQ ID NO: 141926 - DNA, 241 bp, Glycine max
gttatgagagacccaaatggcttaagtcgtggatcgggttttgttgcattctcgactcccgaggaggcatctagagcactcctggagatgaatggcaaaatggtggtaagcaaacctctgtatgtgactctagcccaaaggaaagaagataggagagctagactgcaggctcagtttgctcaaatgcgacctgttggaatgccaccatctgttggtcctcgtgtgccaatgtatcccccag

SEQ ID NO: 141927 - DNA, 233 bp, Glycine max
gagagagagagaaaaatggctgatacaagtggaggagatgcagtgagaccggtggtaatatgtgataacaagtgtggctgcacagttccctgcactggtggttccacttgcaggtgcacaagtgtcggcatgacaactggaggcggtaatcacgtgacatgctcgtgcggagagcactgtgggtgcaatccatgctcatgtcccaagactgcggcttctggaactggttgcag

SEQ ID NO: 141928 - DNA, 168 bp, Glycine max
gcttgagctctgcgagagcttgagtcgccgatttgaaaagatgagtaagcttcagagtgatgctttgcgtgaagccatctcaggaatcatggccgattccaaggagaagaatcgcaattttgtggagaccatcgaactccaaatcggtttgaagaactacgatccaca

SEQ ID NO: 141929 - DNA, 248 bp, Glycine max
cttgaaacagagaaaaaaaaaaaaactcttccaaagtagaggcagagaatctgaaagctagggtttgggatgccgaagaacaagggaaagggaggaaagaaccggaagcgcggtaagaacgaggcggacgacgagaagcgggagctggtattcaaggaggacggacaggaatacgcgcaggttctccgaatgctcggaaacggtcgctgcgaacgatagtgcatcgacggcaccaagcgcctctgcca

SEQ ID NO: 141930 - DNA, 245 bp, Glycine max
cacaactactacaagtacttccttacaatcaaaaccaccaacaactatggcaagttatcaaaagcactacgatgatcagggtcgcaaggttgacgagtatggcaacgttgagaagcaaaccgacgaatacggcaaccctgttcatgctgctagtgtcactcatgtagccaccagaactgctgctggtggttacagtgatgacattaataagcaacatgataccaccaatgcctacggcgtagaca

SEQ ID NO: 141931 - DNA, 244 bp, Glycine max
tgcagaccgagctagctagctagcaagcaagcacagagatggaggcaaagcgaggccatgccctcatgtgcttggcacgtgtttcactcttcctctgcgctctaaccctatccgctgctcacggaagcaccacggttcaagacatcgcgagaaagttgaaactcggggacaacgagcttctgcgcacggagaagaagttcaaggttttcatggagaattacgggaggagctactccacagagga

SEQ ID NO: 141932 - DNA, 235 bp, Glycine max
caatagagaggtacaaaaaggcatgttctgatcagtcaagcgcgagcactaccacagaaatcaatgctcagtattatcaacaagaatctgctaagctgcgacagcaaatacagatgctgcaaaattctaacaggcacctgatgggtgatgccttaagcacactgactgtgaaggaacttaagcagttggagaatagacttgatagaggaatcactagaatcagatctaagaaaca

SEQ ID NO: 141933 - DNA, 234 bp, Glycine max
caacaaacctggcagatatgatgatttcttcttatctagcactcaagcccaacagtctgacttgcaaggcttcagccataatattctagagacctaccttccatacgcgaatgtcgaggaggataaacagggttttgttgggagaggaagaggagcagaggcagcaagagggagtgatcgtggaactctcaaaggaacaaattcggcaactgagcagacgtgccaaatctagtt

SEQ ID NO: 141934 - DNA, 227 bp, Glycine max
tgctatggtgcatgatagttcggtgtctacaataccagttgattttgtcattggtgttaagttgacaaccataaacaatatgtgtgcatatgggctcaatcctggtatttcaggttctcttcttttgggcaccattcctcagtctatttcacagcaaactgtttgtaatcaaatggcaacagtgagaacaccattgaattttgattctagcaagcagagcttttgtc

SEQ ID NO: 141935 - DNA, 217 bp, Glycine max
taggagctgttttgcatatccaaggatggctatggcagggttgatttgcaggatgtcaagaaaggtgttggagtatcagcagttttcgtggctcggaataggtttgctgtgcttgacagaagcagcaacctagtccttttgaaaaatctcaagaatgagattgttaaaaagactgttcttcctattgctactgatgctatattctatgcaggaacgg

SEQ ID NO: 141936 - DNA, 144 bp, Glycine max
ggtaccgaaagtcaaagaaaggaattagccaaccaacttacaggtcatgttttacctcttagtctgcaaatgtatggttgcagagtgattcaaaaggccttggaggtggttgatgtggatcagcagggtcaaatggtgtctgag

SEQ ID NO: 141937 - DNA, 140 bp, Glycine max
agaagaagaaaaaagcagcaagtaacggaaatggcggttctcagaatggtaactcaatgcactatgggaccctggttggggaagtgaaagctaatttgaagaaaggtattggagcgaatgaattgctgtcccatctttca

SEQ ID NO: 141938 - DNA, 232 bp, Glycine max; identical to SEQ ID NO: 136661

SEQ ID NO: 141939 - DNA, 239 bp, Glycine max
  unsure (1)..(239): unsure at all n locations
taattgtttaaacctaattctcatttcttcatcgttcgattcttctcctcctaaaggtacgtctctggtttcctctctctcttgttcattcttttcgtaatagcaaccttattagccttcgtttattgatttttctcctaattacacttcaattttgtcgatttgtgtttgttacgtcaatctgtatatcttntatgatcgcgtcgaatccgaaacttttcattcgcctatctgattcc

SEQ ID NO: 141940 - DNA, 284 bp, Glycine max
aactactacaagtacttccttacaatcaaaacccaacaacaactatgggcaagttatcaaaaagcactaacgcatgatcaggggtcgcaagggttgacgagtatggcaacgttgagaagcaaaccgacgaatacggcaaccctgttcatgctgctagtgtcacctatgtagccaccagaactgctgctggtggttacagtgatgacattaataagcaacatgataccaccaatgcctacggcgtagacactggtagacagcattctagtggtggctacgatggt

SEQ ID NO: 141941 - DNA, 279 bp, Glycine max
agaaagtaggatacaaccctgacaagattccttttgttcctatctctggttttgagggagacaacatgattgagaggtccacaaaccttgactggtacaagggtccaactctgcttgatgcacttgaccagattagtgagcccaagaggccctctgacaagcccctcaggcttccccttcaggatgtgtacaagattggaggtattggaactgtgccagtgggacgtgttgagaccggtgtcttgaagcctggaatggtggtgacttttgcaccaactg

SEQ ID NO: 141942 - DNA, 275 bp, Glycine max
  unsure (1)..(275): unsure at all n locations
gcggttgctccatcacctaatcacttcnccacttcccctgtaaatcacgtttagttcgcacaaggttttaaaaaatggctgatgctgaggacattcaacctcttgttgttgataatggaactggaatggtcaaggcgggttttgcaggtgatgacgctcctagggccgtgttccccagtattattgggcgaccacgccataccggtgtaatggttgggatgggtcagaaggatgcttacgtgggtgatgagctcaatcaaaaaggggtatactca

SEQ ID NO: 141943 - DNA, 146 bp, Glycine max
caaacctaagacgcgctgcttcactattctccctatggagtttaatcttgtggtccgtcagaagtttttaaattttgtgaggttcattatgaagaaaagggacaagcttagttgtcagttggaatcaacccatactccatggaatg

SEQ ID NO: 141944 - DNA, 248 bp, Glycine max
tgcaggaaatggatttcttcttcttgattctgagtttaatgtgaagggaaggtgggagaaaccgggtcacagcccactatttgggtatgacttttggtaccaaccacgtcacaataccatgattagcacatcatggggtgctcctagtgcttttacaaaaggttttaacttacagcatctctctgatggattatacgggaggcatctccatgtatatagctggcctgggggcgaactgagacaaacat

SEQ ID NO: 141945 - DNA, 87 bp, Glycine max
ttagaaagaaaaaaacttaaatcaaaatacttaatagcatggcgatacatttatacaaaacttctaccccaagcacacgcaatggag

SEQ ID NO: 141946 - DNA, 271 bp, Glycine max
ccgcaccagtttcaccgcacgaatatcttgttgtttggagcgatccgagaaaaactctgtaaacatgttggtttaccaggacctccttacaggtgatgagcttctctctgactccttccgttacaaggaaattgagaatggaatgctgtgggaagttgaggggaagtgggttgttaaaggagcagttgatgtagacattggtgcaaacccttctgctgagggtggaggagaagatgagggagttgatgatgcagctgtaagggttgcagac

SEQ ID NO: 141947 - DNA, 277 bp, Glycine max
gttgaagagaagaagggttttggggaaaaggctgaactcgagggaataacaagagtggtggtgggaagagagtgcagcaaagaggagaaacaaggaagaacaagagagaaagtagaggcagagaaagcaagatcaatggagaaaactagagatgaagctaaaggaagagaacaagctgaaaccaaaggtcaaaccaagaagggtggtggtgaggaacagggaagaagaagagaagaaataggagaagaaaataaacaatccagcctcgaagagattt

SEQ ID NO: 141948 - DNA, 275 bp, Glycine max
gtcttatgacaaatgcctacaattatttgctcgagtctggtgggttggaggaggagtcttcatatccctacactggggagagaggtgaatgcaagtttgatccagagaaaatagcagttaagatcacaaatttcaccaatatccctgctgatgagaaccaaattgccgcatatttagtaaaaaatggtccacttgctatgggcgtgaatgcaattttcatgcaaacatacattggtggtgtctcatgccctctcatatgtagcaagaaaaggctg

SEQ ID NO: 141949 - DNA, 277 bp, Glycine max
ccaaaccacaccgaaacctccaaaaccctagcacgccaccgtccatggcgacgacacgatccgcgccgctcctcaagcacctcctcacccgtctcaacccttctcgctccgtcacgtacatgccccgtcccggcgacggcacccctcgcggcgtgacgctgatcccgggcgacggaatcgggcctctagtaaccggcgcggtggagcaggtgatggaggcgatgcacgcgccgctgtacttcgagaagtacgaggtgcacggcgaatgaaggcggtg

SEQ ID NO: 141950 - DNA, 282 bp, Glycine max
gtaggctctcagagaaggaaaatgttgatgggccttatagtttggtcttggagcctaaagggttagccttgtactacaagagcaagaattctcctaagccaattctctattggttttcttctgattggttcaccattcaacgagggtccttggaaaatgtcaccttcacatctgatccagaaacttttgaacttggatttgattaccatgtggccaattcttcatctggtggcaatagaatccttggcaggccagtgaacaatagcaccataacatatctca

SEQ ID NO: 141951 - DNA, 205 bp, Glycine max
  unsure (1)..(205): unsure at all n locations
ctttcccgtgaaaagggaccatggaggcaaattcaggtgccagcgaccgaatttcgagaatcgccggccacctccgcccccagagagaggatgatgtttgtttgaagcgtagcgcnttgccgtgcaaaaggtggggtctccggattcaaggtggccatattgggtgccgcaggaggcatagggcaacctctggcgatgttgatga

SEQ ID NO: 141952 - DNA, 244 bp, Glycine max
ctgggctttcagcaccacaggatctatagaaggagccaattttcatgccaccggaaagctcgtcagtcttagtgaacaacagctccttgactgtgacaacaagtgtgacataacagaaaagacttcatgtgacaatgggtgtaatggaggtcttatgacaaatgcctacaattatttgctcgagtctggtgggttggaggaggagtcttcatatccctacactggggagagaggtgaatgcaag

SEQ ID NO: 141953 - DNA, 261 bp, Glycine max
aaaatttcgataagaaaagttcccaacttcagctaagagaaaatgtctctgattccaaactttttcggtggccgtaggagcaatgtgtttgatcctttctcccttgaagtgtgggatcccttcaaggattttcattttccctcttctgtttctgctgaaaatttagcatttgtaagcactcgtgtggattggaaggagactccagaagcgcacgtgttgaaggcagatattccagggctgaagaaggaggaagtgaaggtg

SEQ ID NO: 141954 - DNA, 276 bp, Glycine max
ctggccagaaaaataagatcactatcaccaatgacaagggtagattgtcaaaggaagatattgagaagatggttcaagaggctgagaagtacaagtctgaggatgaagagcacaagaagaaggttgaggccaaaaacgctttggaaaactatgcatacaacatgaggaacaccgtgaaggatgacaagattggtgagaaacttgacccggctgacaagaagaagattgaggatgcaattgagcaagcaatccagtggttagacagcaaccagcttg

SEQ ID NO: 141955 - DNA, 273 bp, Glycine max
cacacaactactacaagtacttccttacaatcaaaaccaacaacaactatggcaagttatcaaaagcactacgatgatcagggtcgcaaggttgacgagtatggcaacgttgagaagcaaaccgacgaatacggcaaccctgttcatgctgctagtgtcacctatgtagccaccagaacgctgcttgtggttaccgtgatgacattaataagcaacatgataccaccaatgctacggcgtagacactggtagacagcattctagtggtggcta

SEQ ID NO: 141956 - DNA, 273 bp, Glycine max
aacatcacacacaactactacaagtacttccttacaatcaaaaccaacaacaactatggcaagttatcaaaagcactacgatgatcagggtcgcaaggttgacgagtatggcaacgttgagaagcaaaccgacgaatacggcaaccctgttcatgctgctagtgtcacctatgtagccaccagaactgctgctggtggttacagtgatgacattaataagcaacatgataccaccaatgcctacggcgtagacactggtagacagcattctag

SEQ ID NO: 141957 - DNA, 272 bp, Glycine max
caagaaggagttcatagaagcccttaaattgttggaggaacagctgggagacaagacttattttggaggagacaatctaggttttgtggatatagcgcttgttccattctacacttggttcaaagcctatgagacttttggcaccctcaacatagagagtgagtgccccaagtttattgcttgggccaagaggtgccttcagaaagaaagcgttgccaagtctcttcctgatcagcaaaaggtttatgagttcattatggatctaagaaaga

SEQ ID NO: 141958 - DNA, 276 bp, Glycine max
cacacaacaaacatatctcttcctcttctgtccctcaatggaaggatcaggatccggtgtggttacagtctacggcaacggcgccatcaccgagaccaagaagtccctcttctccgtcaaagtcggcctagcccagatgctccgcggcggcgtcatcatggacgtcgtcgacgccgagcaggcccgcatcgcggaggaggccggtgcctgcgcggtgatggccctggagcgtgtccccgccgacatccgggcccagggcggcgtggcccgcatgag

SEQ ID NO: 141959 - DNA, 271 bp, Glycine max
tctcaattgtactaccaaaattgtactcaacatggctgttcccagtggctcgagtggtggagaggcgtcaattgttgcggaattggtggaagtggaggagtcttcatatccctacactggggagagaggtgaatgcaagtttgatccagagaaaatagcagttaagatcacaaatttcaccaatatccctgctgatgagaaccaaattgccgcatatttagtaaaaaatggtccacttgcatgggcgtgaatgcaattttcatgcaaacat

SEQ ID NO: 141960 - DNA, 280 bp, Glycine max
tagggtttctatcgcaaaccctccctacctccaaccaggtcgcgtgcaaagggatttcgaagcttcggaagaaaaaaatgaaacctgttttctgtggaaacctggatttcgacgcgcgtcaatctgacgtggagaggctcttcagaagatacggcaaagttgatagagttgacatgaaatccggattggattacttggaaagttggaatgtccatgctcttcttggatggatgtgcttctctgcatttcttttctagaatgtgcctcagcttctccttct

SEQ ID NO: 141961 - DNA, 280 bp, Glycine max
cttcaactctgcttcccctggcaaccttcttcttagttctctccgcttcttatctccagattgctggggcgaaagcacaaccgttgactagtctcaagcttaactctccgatccttcaggagtctattgctaaagagatcaatgaaaatcctgaggcaggatgggaggctgctataaatcctcatttctccaattatacagttgaacaatttaagcgccttcttggagtcaaaccaacgcctaagaaggaactgagaagtacacctgctatatctcaccc

SEQ ID NO: 141962 - DNA, 144 bp, Glycine max
aattgacaatcccaaacagtcaacagttttcgatattctcttgggaatttctcaagattttgaaattgctggtaatactcttatgccagctttttctgttccacaggctactgccagatcttctgaaaatgcggaatcctctgc

SEQ ID NO: 141963 - DNA, 141 bp, Glycine max
gcaagcttttcattggaggcctttcatatggagttgatgaccagtctcttaaggatgcattttctggctttggagatgtggttgatgcaaaagttataactgatagagacagtggaagatcaaggggatttggatttgtca

SEQ ID NO: 141964 - DNA, 133 bp, Glycine max
ggaaagggagtgttaagtgatttattagataatcgaaaacagaaaatcttgagaactattcgaaactcagaagaattacgggaaggggccattgaacagctggaaaaagcccaagcccgcttaaggaaagtcg

SEQ ID NO: 141965 - DNA, 273 bp, Glycine max
acctaacgcagcatcgctattctcttcattccatggctttgcccaaccagcaaaccgtggattaccctagtttcaaactcgttatcgtcggcgatggtggcacaggaaagacaacctttgtgaaaaggcatctcaccggagaattcgagaagaaatatgagccaaccatcggtgtggaggttcacccattggattttttcacaaactgtggaaagattcgattttactgctgggatactgctggacaggagaaatttggtggcctcagagatg

SEQ ID NO: 141966 - DNA, 256 bp, Glycine max
cactaccatatctttggcaatctgtaaggcactagatatgctggatatgttgaagaaagaggaagagatgctttctgctgtaaaggatagacaatccaaggatggggataaggagttctctaaggatgttcttgatgaacgtgccaagaaagcagaagcttggcatcgtgattctgcagttcgtgcacagtacactaggccatcaccaccaatcacatgtgccactttcgcccaagatgttctagaaggaagagca

SEQ ID NO: 141967 - DNA, 280 bp, Glycine max
gttataagtttccttctttcaacagagataattcctctatgcttgcgaaccatggaaatgggcagtgagctatccaaaacagttgcaacatttattgttcaaaaaattctgttggacgatgtgggcttggactacatttgtactacagcggagcgcttttttgcggtaggtcgagttctggggaacatggtggcagctctagctgagcaaccttcatctcgtctattgaagcatatcattcgatgctatcttcgcctgtcagataatccaagggcttgtg

SEQ ID NO: 141968 - DNA, 144 bp, Glycine max
gaaaagatggcatcccataggcaaagctatgaagctggtcaaactaagggccgaactgaggaaaagacgaaccagacgatgggcaatattggagagaaggctcaagctgcaaaggagaagacccaggaaatagcccaagctgca

SEQ ID NO: 141969 - DNA, 143 bp, Glycine max
gaaagaacttccttataaccaaaaccaacaacaactatggcaagttatcagaagcactacgatgatcagggtcgcaaggtcgacgagtatggcaatgttgagaggcaaactgacgaatatggcaacccggttcatgccactag

SEQ ID NO: 141970 - DNA, 236 bp, Glycine max
ggtgtgggtccggaacatagctttttgaaagatttagggcgtgctgaatatcatagcatcacagatgaagaagcattggaagcttttaagagagtttcgcgacttgaaggcataattccagctctggaaacatctcatgcgttggcatatctagagaaagtgtgtccaacccttcctaatggagccaaggttgtggttaacttcagtggcggggtgataagatttcaactgctatc

SEQ ID NO: 141971 - DNA, 266 bp, Glycine max
aaatgggaaatgccctacctttgaccgatatgcccttaggcacggcaatacataacatagaaatcacactcggaaagggtggacaattagctagagcagcaggtgctgtagcgaaactaattgcaaaagaggggaaatcggccacattaaaattaccctcggggggtccgctttagatcccaaaactctgctcggcaacagtcggacaagtgggaaatgttggagtaaaccagaaaaatttaggtagagccggatctaaatgttgg

SEQ ID NO: 141972 - DNA, 141 bp, Glycine max
atagtgcaggaatagtcacagttgaagactttcttcggcttgtggttaaagatcaacaaagattgcggaatatccttgggagtggtatgtcaaacaagatgtgggaggctcttttagaccatgcaaaaacatgtgttctaa

SEQ ID NO: 141973 - DNA, 272 bp, Glycine max
gcagcaacaaacaagaggggtttgccttgtgccgtttgtgttgttttcgggacgaagaagaagatggtgtcaggttctggaatctgcgcaaagcgggtggtggtggacgcgcgccaccacatgctgggtcgtctagcctccatcgtggcgaaggagcttctgaacggccagaaagtggtggtcgttcgctgtgaagagatttgcatctcgggcgggctggtgaggcagaagatgaaatacttgaggttccttcgcaaacgcatgaacaccaa

SEQ ID NO: 141974 - DNA, 269 bp, Glycine max
tggtgagaagaacgaatcgaaaaaagaaagatcatggcgatggcaaacttggctcgacggaagggttacgccgtcgttttgtcgtcgaggtcgtcgctttgtctgacaaggtggagggggttcgcgtccggatctgacgaaaacgacgtcgtggtcatcggcggcggtcccggcggctacgtggcggccattaaagcggcgcagctgggtctgaaaaccacttgcatcgaaaaacgtggcactctcggcggtacctgcctcagtcggat

SEQ ID NO: 141975 - DNA, 270 bp, Glycine max
aaccaaaacagtaaagctaacttcaacacctttaattttctaaaagtaattcagcggctgaataccaagcggagaagatgagtcaggagcagccacggcgtcccaaaggccaaaaccccatcaaatacggcgacgtttttgtcgtctccggcgacctcgcacagaagcccgtcgcaccggaagatgctgccatgatgcaaagcgcggaaactcgagtgctcggacaaacccaacccggcggagcagcttccgtcatgcaatctgccgcca

SEQ ID NO: 141976 - DNA, 278 bp, Glycine max
gaaaaagttgtattgaaattttcacaagaggaatttcttacagcttggtcaactcaggtgcgtcctgcaacaactctgttggctgatgggtgtccatatttgtatgctatggtgcatgatagttcagtgtctacaataccaggtgattttgtcattggtgttaagttgacaaccataaacaatatgtgtgcatatgggctcaatcctggtatttcaggttctcgtcttttgggcaccattcctcagtctatttcacagcaaactgtttggaatcaaat

SEQ ID NO: 141977 - DNA, 234 bp, Glycine max
tgcagaccgagctagctagctagcaagcaagcacagagatggaggcaaagcgaggccatgccctcatgtgcttggcacgtgtttcactcttcctctgcgctctaaccctatccgctgctcacggaagcaccacggttcaagacatcgcgagaaagttgaaactcggggacaacgagcttctgcgcacggagaagaagttcaaggttttcatggagaattacgggaggagctact

SEQ ID NO: 141978 - DNA, 197 bp, Glycine max
cttagtgatacacagtgccagcctgaatcacagcttaagttcataacagaggcctggttacagatagttgaatgcaggagggtgctgaaatggacatattcatatgggtactatttaccggagcatgaacatgctaaaaaacagttctttgagtacttacaaggtgaggcagaatctggtttggagagacttcatca

SEQ ID NO: 141979 - DNA, 232 bp, Glycine max
caacaatcggattttcggcgagacataatcaaaggatctatacgtgctcaaaggcgtaaaacagttacttggaaattttttcaaaaaagggtgcattcccccctttttttggataaaattgaaaaacctttattcttttcttttgatagtttcaaatcaatgaaaatattttttatgttcaaaatttggatgcgaaaaaaggaagaatttgaaatttctagttatacagagg

SEQ ID NO: 141980 - DNA, 279 bp, Glycine max
  unsure (1)..(279): unsure at all n locations
gagggganagatacgacgttggggaagcttggggagctgaaggactctgcggctgatgcggcgaagagggcagtgggttacttgagcggcaagacagaggaaaccaaagagaaagtctcggagacggcagaggcgacggctaataaggcggcggagatgaaggaggccaccagggagaaggctgccgggactgcggaggcggccaagaacaaggccgcagaggtaaaggacagagctgcagaaaccgcggaggcggccaagaacaagactgccgagact

SEQ ID NO: 141981 - DNA, 293 bp, Glycine max
gcagcaaccagcaccgccaccaccgagtggtgtccacaaaattgaatgttacgaaatggaagacgtgaagccggagtatacggcggcggattgcctgtacttcgaggcttccgactcggtgccgcggctgcacacgacggagtcgagctgttcggagcaggtggtgtcggcggagtttgcgagcgaggtgcagagcgagcggaagaggcagggcaacagcgagttttcgtataattacatggatcccactctcggaaataatcagatgtcgccgctccaggatatcttcatgc

SEQ ID NO: 141982 - DNA, 295 bp, Glycine max
gtcacggacgatggagtgggcggcgagggcggacacctccgcggcattcccagaaaactcgtgattgcggcggtgggcggattcgccaaaacggtgtcgtctttcctcaacaccgccgatgttcacaacggcgacactctcctccgcctcgtccgctccagaccccaccgcgtccccctcattaccgttagcaatcacatgtccactttggatgatccggttatgtgggggttcaagggttttcctatcttcgacaccaacttagctcgctgggttctcgctgccgaagatattt

SEQ ID NO: 141983 - DNA, 258 bp, Glycine max
cacagcgggaattggaggccaaaaaaccatctcaacctcaggaagctgaagagaggccatcagaaggaattggcgaaactgtgaggcagtatgcacaaaaaccaaagccaagtgaaagaaaccctcagaaggagggaaccgaaagcatcgtgtttacagcaataggcgaaacagtaagcagtgccggtgagaaggtaaagaaaccgtttaaaaacactatgggaggagaatgtgaaggaggagaaggaaaagaagagg

SEQ ID NO: 141984 - DNA, 298 bp, Glycine max
  unsure (1)..(298): unsure at all n locations
gtaattgtagtagtagacagtagcaccatgagccaggaacagctcaagaaacctcaaggggagcaggaccccatcaaatacggcgacgttttcaaagtctccgacgaactcgctttcaaacccatcgcgccaagagacgcagctctcatgcaagccacggagaaccaagcattgggccaaactcaaaaaggaggtcccgcctcggtgatgcaatccgccgcaaccgaaaacctccgcgccggcgtcgtgggccgccaagacatctccgacgtggcgangaacgaaagcgtgagcgtga

SEQ ID NO: 141985 - DNA, 287 bp, Glycine max
cttatgcaactatagtgaggctaagagattggtccataattaatcaaaatgttggctatattccacaaagcttttgctcatccacctgaagagctcaacagccctgcatcttacaaaggttccaagaagcctaaggttcccgaggaaactctcaaagatttcctttcccaccatcctcacaacacttgctctatgagctttggtgatgctgctgttctagcttatgtccgtcctgatcaatctttctctcgtcatcaaaggctgttttgtgggatcgatgacatata

SEQ ID NO: 141986 - DNA, 265 bp, Glycine max
gtaattgtgaagaagggtgagaatgatttaccaggattgactgatgctgagaagccaaggatgagaggcccaaagagagcatccaaaatccgtaaactgttcaacctgtccaaggaggatgatgttaggacgtatgtcaacacctaccgtcgtagatcacgacaaaagctgggataagggtgagcaaagctcctaagatgacaagtattggtcacccctcttacgctccaacgaaagcgggcaataattgctgataaaaagaggg

SEQ ID NO: 141987 - DNA, 277 bp, Glycine max
tggggtttgaagaagccggtggtgtctccttgcttgttctcgatcgacccgatattgtaaaatataataacttttttatatcgtgatcaagatgcgccgagggagagccaccgccgccgtcgtggatccgacggcggagcaggcgaaggagacgcggttccgcggcgtcaggaagcggccgtgggggcgattcgcggcggagattcgagatccgtggaagaagcagcgcgtgtggctggggacgttcgattccgccgaggatgccgcgcgggcttac

SEQ ID NO: 141988 - DNA, 286 bp, Glycine max
aataattgacacagacaatttgaagagtttgtttattgtgaaaaaaagaaaaatgcaggcagcaaagaaagccatagagacctttaaggaaaccgcagccaacattggcgcctctgccaagtctggcttggagaaaaccaaggccactatccaagagcagaatgaaaagatgaatgcagaagatcaaactcaaatggatatggctaccaagaggaaagaagaaaagatcaccaggctgagatggagaagcagcacgcccataagtactacgccgctgcaaaacaat

SEQ ID NO: 141989 - DNA, 180 bp, Glycine max
cgttctagatgttgatgatattcctagaatcgttaatgaagcgtttttcttagccacttcgggtagacctggccctgtgttaattgatatacccaaagatattcagcaacagtttgcgattcctaattgggatcaaccaattaggtacctggtacatgtctaggtgctaagtccccaatg

SEQ ID NO: 141990 - DNA, 289 bp, Glycine max
aaaacattgggcctggcatcacttatgtcaaaggctgggatgcatttgcctgccaagaaaaatccaaaacttccttggtttgaccttatccttgcagatattggagatcaccagtcccttgaacaaaatctctcaacttttagcgggcacatatcacgtatttgtaagattttggaagtggcctcaacacaatcacttgttctcattgatgaaattggtggtggaactgatccttcagaaggtgttgctctttctgccagtatcttacaatatttgaaggatcgtgtta

SEQ ID NO: 141991 - DNA, 293 bp, Glycine max
tttctctctagaatccatggcagccattggtctgaatggcgtaaaggttgggacgacgtcgtctcaggcgtaccttgaaggcaaggcagtgaaggagacgagagcgttgatggctgaactgtgtcgccatttctacacccttggatgggtgacagggacaggtggcagcatctccatgaaggtccacgatgactccatccccaggcctcaacagctcatactcatggccccttctggtgttcagaaagaaagaatggagccagaggacatgtatgtgttatcacacagtgggt

SEQ ID NO: 141992 - DNA, 291 bp, Glycine max
ggtttggttacttgctcgaatttcctcgaatcgcttaatttgtatttgattagttaaaccgcaacgcggaatctcttttctcgaactggctaactctcaggcaagtggttcggacgctgattccagcaacaagcggctggtgctcgcactgtatgacgccctaaactccggcgactccgacgccgtcgtcaagatcgtcgccgccgacctcgagtggtggttccatggtccgccctcacaccagtttttgatgcgcatgctcaccggcgactccgctgccgacaactcctt

SEQ ID NO: 141993 - DNA, 289 bp, Glycine max
aaacaacagagtttatttctttttggttccttggttcacgctggctgcaaggcttgtgtttggtgggagcagcttctcaccgtgacgctgctctacgaagacgacgacaacctcgtgtgacaacatcaaataatgggaaaaggaaacatggaactcgagacaaacaaggtctatgactacgaggatgcacgaggggacgttgaagtcccagataccgctcatcagataagcactgattcatggtttcaagtggcttttatcctcacaaccggaatcaacagtgcctttg

SEQ ID NO: 141994 - DNA, 253 bp, Glycine max
agtaattatgctagcgcaggaggaagcaagacgtcttggtcacaattttgttggaacagagcaaattctattgggtcttatcggcgaaggaactggtattgctgctaaggtgctaaagtcaatggggatcaacctcaaagatgcacgagtggaagtagaaaaaataattggacagggtagtggatttgtggctgttgaaattccgtttactccccgggcaaagcgtgttttagaactttcactggaggaagct

SEQ ID NO: 141995 - DNA, 284 bp, Glycine max
aaaaaaagaaaaatgcaggcagcaaagaaagccatagagacctttaaggaaaccgcagccaacattggcgcctctgccaagtctggcttggagaaaaccaaggccactatccaagagaagaatgagaagatgaatgcagaagatcaaactcaaatggatatggctaccaagaggaaagaagagaagatcaaccaggctgagatggagaagcagcaggcccgtaagtactacgccgctgcaaaacaatacgccatggctgagcacatggcaaagggcaaccacga

SEQ ID NO: 141996 - DNA, 274 bp, Glycine max
acagttttctgtgtcaccggaactcgtttctttcaaaacacttcaaacatctcgaacgctctctttccggcaactaggttaaagttcatcaatggcaggtcgcggcaaaaccctaggatctagcgccgccaagaaggctaacctcaaggggcaccaaggcgggcttcaatttcccggcgggcgtatcgcccgtttcctcaaggccggaaaatacgctgagcgtgtcggcgccggcgcccctgtctaactcggcgccgtactcgaatatctcgcg

SEQ ID NO: 141997 - DNA, 271 bp, Glycine max
tggctctctacaagccgtttcttccgattctctcttctatgaagacaagtccaaagatcttgctgtgaagaagaagatcgagaaacatagggagagggtgctccgatgtgatagcctgctacagaaaaatcagtttgttaagccagtgccatcttctattctgaagaagtgttctaaaaaccgtaatgtggcctctaaatccaatttgaaagtggccaatcaggatggtgagaaggatgattctgccatttttgatctatgggatgataaa

SEQ ID NO: 141998 - DNA, 194 bp, Glycine max
tgcagaccgagctagctagctagcaagcaagcacagagatggaggcaaagcgaggccatgccctcatgtgcttggcacgtgtttcactcttcctctgcgctctaaccctatccgctgctcacggaagcaccacggttcaagacatcgcgagaaagttgaaactcggggacaacgagcttctgcgcacggagaag

SEQ ID NO: 141999 - DNA, 242 bp, Glycine max
aaatatcatggcttcgagggtggtttcggttttggtgatagcgatgatgttgtttgccatgaactgtaactgcactagtgttggccacatgccttcaaccaaagaggacggtcacgattttcaggcggctaaagccaagacaacacaaactgcgaacaaggccatggaaacctggtaaagatggggaagaagccgcagagtcatggacagaatgggctaaagagacactcactgaaggtctt

SEQ ID NO: 142000 - DNA, 270 bp, Glycine max
aaagaaaggaaataattgatctttgaaaatgcagggaggaaagaaagctggagagtccatcaaggaaacagctgcaaacattggtgcttctgccaaggctggcatggagaaaaccaaggccactgtccaggagaaggcagaaagaatgacggcacgtgatccgatgcaaaaggagttggcaacccagaagaaagaggcaaagatgagccaggcatagctggacaagcaggcggcgcgtcagcataacacggcggcgaacaggctgccacg

SEQ ID NO: 142001 - DNA, 232 bp, Glycine max
agaacctaagtgagaaacaaagaaaggaaataattgatctttgaaaatgcagggaggaaagaaagctggagagtccatcaaggaaacagctgcaaacattggtgcttctgccaaggctggcatggagaaaaccaaggccactgtccaggagaaggcagaaagaatgacggcacgatgatccgatgcaaaaggagttaggcaacccagaagaaaagagggcaaagatgaagcc

SEQ ID NO: 142002 - DNA, 286 bp, Glycine max
agttatgagaacttgattggaaaaggtggtcacgctgaagtgtacaaaggctacttacccgatggtcaggttatagctgtaaagaggctaatgaagaatgaaaaggatgctgcagacagagctggtgatttcttgacggagcttgggatcatagcacacataaaccacccaaatgcgacgcgccttgttggttttggggttgattgtggcctatactttgtcctacagcttgctccacatggcagtctttcttctttgcttgttggttctgaatgcttggactgga

SEQ ID NO: 142003 - DNA, 177 bp, Glycine max
taaaaatgcacattgcagagaaaggagaaggccctgtggtgttgtttctccacggcttccccgaactctggcactgttggcacaaccagattgtggctcttggttccctcggataccatgcggtggcaccagatctccgaggctacggtgacaccgatgcaccaccttcaatagaca

SEQ ID NO: 142004 - DNA, 288 bp, Glycine max
tagggtttctatcgcaaaccctccctacctccaaccaggtcgcgtgcaaagggatttcgaagcttcggaagaaaaaaatgaaacctgttttctgtggaaacctggatttcgacgcgcgtcaatctgacgtggagaggctcttcagaagatacggcaaagttgatagagtggacatgaaatccggattggattacttggaaagttggaatgtccatgctcttcttggatggatgtgcttctctgcatttcttttctagaatgtgcctcagcttctccttcttgtatttt

SEQ ID NO: 142005 - DNA, 233 bp, Glycine max
acaactctacaagtacttcctatcaatcacaaccaacaacaactatggcaagttatcaaaatcactacgatgatcagggtcgcaaggttgacgagtatggcaacgttgagaagcaaaccgtcgaatacggcaaccctgtccatgctgctagtgtcacctatgtagccaccagaactgctgctggtggttacagtgatgacattgataagcaacatgatccaccaatgcctacg

SEQ ID NO: 142006 - DNA, 262 bp, Glycine max
aaaagactttctctttacaaattttgtaactttcaagactcagctaataaacatcaaaagatgtctctgattccaagtatttttggtggccgaagagcaacgtgttcgatcctttctcccttgacgtgtgggaccctttcaaggattttcattttcccacttctctttctgctgaaaattctgcatctgtgaacactcgtgtggattggaaagaaaccccagaagcacacgtgttcaaggctgatattccagggctgaagaa

SEQ ID NO: 142007 - DNA, 284 bp, Glycine max
cacacacaactactaccaatacttccttacaatcaaaaccaacaacaactatggcaagttatcaaaagcactacgatgatcaaggtcgcaaggttgacgagtatggcaacgttgagaagcaaaccgacgaatacggcaaccctgttcatgctgctagtgtcacctatgtagccaccagaactgctgctggtggttacagtgatgacattaataagcaacatgataccaccaatgcctacggcgtagacactggtagacagcattctagtggtggctacgatggt

SEQ ID NO: 142008 - DNA, 268 bp, Glycine max
gtgcggtttcctttgttggtgttgctgggaactgttttcctggcatcagtttgtgtctcattaaaggtgagagaggatgagaataaccctttcctacttgagaagctctaacagcttccaaactctctttgagaaccaaaacggtcgcattcgtctcctccagagattcaacaaacgctccccacaacttgagaaccttcgagactaccggattgtccagtttcagtcaaaacccaacacaatccttctcccccaccatgctgacgcc

SEQ ID NO: 142009 - DNA, 234 bp, Glycine max
cgacgaatacggcaaccctgttcatgctgctagtgtcacctatgtagccaccagaactgctgctggtggttacagtgatgacattaataagcaacatgataccccccattgcctacggcgtagacactggtagacagcattctagtggtggctacgatggtgacactaataaagctcatggaactactggtgggcataatgatgacaccataggcatcatggaactaccggtgt

SEQ ID NO: 142010 - DNA, 281 bp, Glycine max
gaattctccagagagaagaagaaacttaatcgatcatcacttcacttcactaatacatcatggcagacgagacccagaacaagtatgagagctctgaggttgaggtccaggatcgtggtgtttttgactttctcggtaagaaaaaggatgaagaagacaagcctcatcctcaggaggaggtcatcgccaccgagtttcaaaaagtcactgtctcagaccaaggagagaacaagcacagcctcttagaaaagcttcaccgatctgacagcagctctagctct

SEQ ID NO: 142011 - DNA, 266 bp, Glycine max
tatagaaagagagagaagaagaaaagaagaacaaagatgcaatcctcaaaggagaagatgaaaaacatggcaagtgctgccaaggaacaagtcgacatctataaagccaaaatagacgagaaggcagagaaagcaacggcaagaacagaagaggagagggtgatagcccatgagcacgcaaaggcaaaggaagctggagcaaagatggagctgcatgaagctaaagccaggcatgcagcagagaagctaagcggcaaccaatcaca

SEQ ID NO: 142012 - DNA, 267 bp, Glycine max
ctttgtttgcttctcaagtctctcgaagcctctttctctctcttcgagaagctatctgtgtttggcgttactaagtctccaacaagcaaagtacatggttgatttggaaatccaggtccccaccccattcgacccgtttgccgaggcgagagaatcggatgcccccggagcaaaggagtatgtgcatattcgaattcagcagaggaatgggaagaagagtctgaccacagtgcaagggctgaagaaggagttcagcgacgagaagat

SEQ ID NO: 142013 - DNA, 281 bp, Glycine max
gtagctttttgatgagtacaagatagattacattattcacggggatgatccttgtgttcttccggatggaactgatgcttatgctcatgctaagaaggctggtcgatataagcagataaagcgtactgaaggggtttccagcactgatattgttggtcgcatgcttctctgtgtaagagaaaggtctattactgaataaaatcataatcattcttctttacaaagacaattcagcgatggccatagtccgaagtttgaagctggtgcatctgctgcaactg

SEQ ID NO: 142014 - DNA, 271 bp, Glycine max
cttccttaccaccacgtcgacaccaccctacgctccctcgctcgccaagccgagggcttcggtcgcttcgctatcggaggcctccacggtccccttcaccccgtcacatctctcgcagatgatggaccggggtcactgcgtgacgcgtgtcgcagaaaagaacctttgtggattgtgttcgaagtttccggcaccattcaactctcctcgtacttgaacgtgtcgtctcacaagaccatcgatggtcgtggccagaggatcaaactcagcg

SEQ ID NO: 142015 - DNA, 158 bp, Glycine max
gcatggtgtcttcctcccaacacattctggtcaccggtggtgccggtttcattggcacccacaccgtcgttcagcttctcaaagctggcttcagcgtttcaataatcgacaatttcgataactccgtcatggaagcagtggaccgcgtccgcaaattg

SEQ ID NO: 142016 - DNA, 283 bp, Glycine max
aatggcacaggaggaaattctgtcttctagtgcaagtgatttcagaactgcaatggtgagtaaaaatagcaagcctcaagctactgcaatgcatgtgggagctatagaaattatcattgatagtttcgcaagtcctgactgcaacatagttggtgcaatgcttttggttgatacttatcataccaatcctgaaaatgcagttcgtagtatttttgttgcgcctttcagaggcggaaggcccattcgggtggttacatttccgaataccattgtgcagattgaa

SEQ ID NO: 142017 - DNA, 281 bp, Glycine max
agcgcgagccgggcggacggtcgtcggtgcagatcttggtggtagtagcaaatattcaaatgcgaactttgaaggccgaagaggggaaaggttccatgtgaacggcacttgcacatgggttagtcgatcctaagggacgggggaagcccgtctgatagcgctctgtgcgcgtactccgaaagggaatcgggttaaaattcctgaaccgggacgtggcggctgacggcaacgttagggagtccggagacgtcggcgggggccccggaaagagttatcttttc

SEQ ID NO: 142018 - DNA, 279 bp, Glycine max
atccctaatgcgccttctgcgttcaattctcagagctacgttggtctcagagcgccactgaggaccttcaacttttcttctcctcaagctgccaaaattcctcgctcccaacgccttttcgtcgtcagagcctccgattcggagttcgaagccgccgttgtcgccggtaaggttccgccggcgcctcccgtgccgcccagaccggcggctccggttggaacaccggtggttccttcacttccacttcaccggcgtcctcgtcggaaccggaagtcgccg

SEQ ID NO: 142019 - DNA, 282 bp, Glycine max
caaaaccaacaacaactatggcaagttatcaaaagcactacgatgatcagggtcgcaaggttgacgagtatggcaacgttgagaagcaaaccgacgaatacggcaaccctgttcatgctgctagtgtcacctatgtagccaccagaactgctgctggtggttacagtgatgacattaataagcaacatgataccaccaatgcctacggcgtagacactggtagacagcattctagtggtggctacgatggtgacactaataaacatcatggaactactggtg

SEQ ID NO: 142020 - DNA, 273 bp, Glycine max
gatccaaaagctgaatgccctcaaaccggataaccgtatagagtcggaaggtgggttcattgagacctggaaccctaacaacaagccattccagtgtgccggtgttgccctctctcgctgcacccttaaccgcaatgcccttcgtagaccttcctacaccaacggtccccaggaaatctacatacaacaaggtaatggtatttttggcatgatattcccgggttgtcctagcacttatcaagagccgcaagtatctcagcaacgaagacgaag

SEQ ID NO: 142021 - DNA, 123 bp, Glycine max
gtacttccttacaatcaaaaccaacaacaactatggcaagttatcaaaagcactacgatgatcagggtcgcaaggttgacgagtatggcaccgttgagaagcgaaccgacgattacggcaacc

SEQ ID NO: 142022 - DNA, 290 bp, Glycine max
caaagaaaagggtggtagctgcttcgaaagcttagtaatttgtgtatttccagaacatcatagttttcgcagcagcaaactaacaaattactcatatcatataataagatgggccgttctctctcgcaagccaaacgtattggtgtccttgttgctcaatctatctccctaattcccgttcatcggcgaggtaacgcagtggcatccgatgtatcggaaagatttggagtgggtaatgttgggcaaagaaatggcctcgtgggaggtttagaagagacgcctgataaaag

SEQ ID NO: 142023 - DNA, 273 bp, Glycine max
ccaaatccgtgttctgatgcatggagtttggaatttctgaagcgtaccggatttcattgtgatatcatttgtgtcactggatggactgccactccaatgcaggatgttcaggttacaattgattggtttatttcctctcaggaatgtgttcccaggacctattgtgttttaaatccacaaaatccttttgtgttaaataggtggatggggaaactgaatttcccccagggcacttcccgaaatgttaaaagaatgcctctttcgataggggga

SEQ ID NO: 142024 - DNA, 250 bp, Glycine max
ctcgagccgaatcggctcgagctgcccctctttttggacccaaggacggcttcggccggtcagtccgggcggaagacattgacaggtggggagtttggctggggcggcacatctgttaaaagataacgcgagtgtcctaagatgagctcaacgagaacagagatctcgtgtggaacaaaagggtaaaagctcgttgattctgatttccagtacgaatacgaacgtgaaaggtggcctacgatccttagtc

SEQ ID NO: 142025 - DNA, 236 bp, Glycine max
caagaaagaacttccttataaccaaaaccaacaacaactatggcaagttatcagaagcactacgatgatcagggtcgcaaggtcgacgagtatggcaatgttgagaggccaactgacgaatatggcaacccggttcatgccactagtgtcacttatgtagccaccaaaagtgttggtggctacaatgatgacgctaataagcaacatgatattactggtgtccatcccgagaaaga

SEQ ID NO: 142026 - DNA, 271 bp, Glycine max
ctaactcttagagagaaaaaaaaatggctgatacaggtggaggagatgcagtgagaccagtggtaatatgtgataacaagtgtggctgcacacttccatgcactggtggttccacttgcaggtgcacaagtgctggcactgccacaggagggggtgatcacgtgacatgctcgtgcggagagcactgtggttgcaatccatgctcatgtcccaagattgcggctgctgaaagtggttgcagatgtggcacagattgtgcatgtgcctcctg

SEQ ID NO: 142027 - DNA, 243 bp, Glycine max
tcgtattccttacaatcatcaccaacaacaactatggcaagttatcaaaagcactacgatgatcagggtcgcaaggttgacgagtatggcaacgttgagaagcaaaccgacgaatacggcaagcctgttcatgctgctagtgtcagctatgtagccaccagaactgctgctggtggttacagtgatgacattacataagcaacatgcttccaccaatgactacggcgtagacactggttggca

SEQ ID NO: 142028 - DNA, 279 bp, Glycine max
ataattccttcacttgcagaacttagttctctgttgcatcatcatcatcttcattagtgttagccctaaacttcaccttcaaccatgaccacagtgccaccacacagtgtccaagtgcacacaacaacacaccgctacgaagccggcgtcgtcccgccggctcgttttgaggcgccgcgttacgaagccggcatcaaggcgccctcttccatttaccattccgagagaggtccgacgacctctcaggttctcgcaattgtcgccggccttccggtcggc

SEQ ID NO: 142029 - DNA, 254 bp, Glycine max
cctaagtgagatacaaagaaaggaaataattgatctttgaaaatgcagggaggaaagaaagctggagagtccatcaaggaaacagctgcaaacattggtgcttctgccaaggctggcatggagaaaaccaaggccactgtccaggagaaggcagaaagaatgacggcacgtgatccgattgcaaaggagttggcacccagaagaaagaggcaaaatgacccagcaaacttgacaagcaggggcggtcacataac

SEQ ID NO: 142030 - DNA, 232 bp, Glycine max
ctagttctagatcgcgagcgggaaataattgatctttgaaaatgcagggaggatagaaagctggagagtccatcatggtaacagctgcaaacattggtgcttctgccaaggctggcatggagaaaaccaaggccactgtccaggagatggcagaaagtatgacggcacgtgatccgatgcaaaaggagttggcaacccagatgacagaggcaaagataagccaggcaaagct

SEQ ID NO: 142031 - DNA, 269 bp, Glycine max
ggaggaagtggcaaagtgatcaatagcaaacctgaggacagaatatttatatactactctgatcatggaggtccgggagttcttgggatgccaaacatgccatacctttatgctatggactttattgaagtcttgaagaagaaacatgcatctggaggttacaagaagatggtcatatacgtggaagcttgtgaaagtgggagcatgtttgagggtataatgcctaaggatctgcagatttatgtcacaactgcatccaatgcacaaga

SEQ ID NO: 142032 - DNA, 230 bp, Glycine max
ataacaagcacaattacagtgactccgcttggttcctcttcttcgatcttcggtttgattctgcgtttgttcacatcatggccaccgcttcagtggcatttaagtccagggaggaccaccgcaagcagattgagttggaggtagcgcgtaaagcggggcttgcgccagctgaactcgatgaagatggaaaggacatcaatcctaaaatcccccataaaaggcctccggcc

SEQ ID NO: 142033 - DNA, 254 bp, Glycine max
  unsure (1)..(254): unsure at all n locations
acaaaaacttaaatcaaaatacttaatagcatggcgatacatttatacaaaacttctaccccaagcacacgcaatggagccgtagacagtcaagtanaatccaatccacgaaatcatttgatctatggacagcatcgttgtggtaaaggccgtaatgcccagaggaatcattaccgaaggcatagaagggggaggtcataagcgtctataccgtaaaattgattttcgacggaatgaaaaaacttatatggaag

SEQ ID NO: 142034 - DNA, 272 bp, Glycine max
cacacaactactacaagtacttccttacaatcaaaaccaacaacaactatggcaagttatcaaaagcactacgatgatcagggtcgcaaggttgacgagtatggcaacgttgagaagcaaaccgacgaatacggcaaccctgttcatgctgctagtgtcacctatgtagccaccagaactgctgctggtggttacagtgatgacattaataagcaacatgataccaccaatgcctacggcgtagacactggtagacagcattctagtggtgg

SEQ ID NO: 142035 - DNA, 152 bp, Glycine max
tcgagaactactacaagtacttccttacaatcaaaaccaacaacaactatggcaagttatcaaaagcactacgatgatcagggtcgcaaggttgacgagtatggcaacgttgagaagcaaaccgacgaatacggcaaccctgttcatgctgc

SEQ ID NO: 142036 - DNA, 258 bp, Glycine max
ctgcaattcactctgtacaattcttcgttcgttctctgcagttatatcctttttgagcttcaatggcggacgctgaaaccttcgctttccaggctgagatcaaccagcttctaagtctcatcatcaacacattctacagcaacaaggagattttcttgcgtgaactcatcagcaatgcttctgatgctttggataaaattcgatccgagagcttaaccgacaagagcaagctcgatgctcaaccagagcccttcattc

SEQ ID NO: 142037 - DNA, 371 bp, Glycine max
  unsure (1)..(371): unsure at all n locations
ctcggaatcggctcgaggtgagaacgataatggagcattgtaactgctacatgttcacgctgagccttcttcttcttcttcttcttactccgccttctctctccgacgatctcggattcgattttccggcgaagaagctgataagagaccttaacctttttccttctgaagatgtcaacatcgttcctcgccactccaattctcacgccaacaaaatcgtcgagaaaccgcttaggttcccanacttagtgccttcagactccggcatttccctcgacgacttggctcaccgcgctggctattatcttattcctcattctcatgctgccaaagatgtctacttnttctttgaatcaaaggacagcaagaag

SEQ ID NO: 142038 - DNA, 344 bp, Glycine max
  unsure (1)..(344): unsure at all n locations
attgcccctggaggagaaaactgcgttgtcatttacaccaccacgttacgggggatcagaanaacgtttgaggagtgcaacaaggtaaggtccattgtcgagtcctattgcgtgcacgtggtggagcgtgacgtgtcaatggattcggggtttaaggaggagttgcggaagctgatggggaccanacaagttaaggttccggttgtgttcgtgaaaggaaggttggtcgggggtgctgaggaaattgtgaagttggaagaagagggataattgggtgttctctttgaagggtttcccacaaggctttgggggagtgtgaagggtgtggtggtgtgaagtttgta

SEQ ID NO: 142039 - DNA, 336 bp, Glycine max
  unsure (1)..(336): unsure at all n locations
caacggtatattgaacgtgtctgcggaggacaanaccactggacagaagaacaagattacaattaccaacgacaagggcaggctttctaaggaggagattgagaagatggtgcaggaagctgagaaatacaagtctgaggacgaggagcataagaagaaagtggaggccanaaatgcattggaaaattatgcctataacatgaggaacacaatcaaggatgacaagattgcttccanactgtcttctgatgataagaagaaaattgaagatgcgattgagcaggctatccaatggctangatggaaccacttgctgaggctgacgaaattgaggat

SEQ ID NO: 142040 - DNA, 324 bp, Glycine max
ccgattgatacacccttcttcgttcctcactcaccagccacagattctctcttctctattcagtaaacggctgttttgtatacgagctgtcccggtctcagcctctacatcccaaaacatcaaaacaactggttgggctccttgtatggcttcttcctcagttggtagaagagctacatattcaacacaatctgtatcgacaaatgagccagttgtatctgtagattggctttatgataacctgaaggagccagatatcaaggtactagatgcttcgtggtacatgccggatgagcagaggaatccaattcaagaatatcaggt

SEQ ID NO: 142041 - DNA, 331 bp, Glycine max
  unsure (1)..(331): unsure at all n locations
cgcattcgtgagaanactcaatattcgtcgctcatggcactctcttctcgtctcttttccaaatccaaattgatctatggcagtcaaatacttctacaaaaggagcatgctattccagttcgtcactttgctanagagtctgcccctcctgcccttaagggagacgagatgctgaagaacatttttgtggaggtgaagaacaaatttgagaccgccataggaatattaaagaaggagaaaatcaccattgacccagaagatccagctgctgtttctcattatgcaaaggtcatgataacaattagagagaaggcaagcttattgtcggagt

SEQ ID NO: 142042 - DNA, 349 bp, Glycine max
cggctcgagcaaaattggtggtattggtaccgtgccagtgggacgtgttgagactggtgtcatgaagcccggtatggtggtgacttttggtcccactgggctgacaactgaggttaagtctgttgagatgcaccatgaggctctcacagaggctcttccaggtgacaatgttggctttaatgtgaagaatgttgcagtcaaggatctcaagcgtggttttgttgcatccaactccaaggatgaccctgccaaggaagctgccaacttcacatctcaagtcattatcatgaaccaccctggccagattggaaatggatacgcaccggtgcttgattgccacacttctcac

SEQ ID NO: 142043 - DNA, 350 bp, Glycine max
  unsure (1)..(350): unsure at all n locations
cgagccatatggaatttgacgagcacgaggaccaagagcaagaagaggaggaggaggaggaggaaatgggattctcagtggcggcggcggcgagttacgactcgctgggaaacgccgcggtgaggtctanaattagcggcggcgatggtgttgcggccaccgtgaattccggtcgcaaagggacggtgagatacagagaatgtcagaagaaccatgccgtcagcatcggcggccacgccgtcgacggatgctgcgagttcttggctgccggagaggaaggcacgctggaagccgtaatttgcgccgcctgtaactgccaccgcaacttccaccgcaaggagatcgacggc

SEQ ID NO: 142044 - DNA, 341 bp, Glycine max
  unsure (1)..(341): unsure at all n locations
cttcattctagaatataactgagggaagtatttggcncatgcttgctcaagaaagtttaaaggcattaggtggattgggtctgctttctcttggggcaaagtacattctcagaagagtttttgaggttgttgcagatacaaggagctcagaggcttttgttgctctttgcttgctgactgttgcagggacttcactagtcacacagaatttgggatttagtgacacgcttggggcttttttagctggagcaattttagcagagacaaacttcaggacccagattgaagcagacataagaccatttagaggcttgcttcttgggttgttatttctactacgg

SEQ ID NO: 142045 - DNA, 345 bp, Glycine max
  unsure (1)..(345): unsure at all n locations
ctcgagccgttcttcccaaccactactactcactcactgcagatctcaattgcatcgctgtccatggctaccatcgttagcatcaaggcccgccagatcttcgacagtcgtggcaatccaactgtcgaggtggatttgacttgctccgatggtacttttgccagagctgctgttccaagtggtgcatccactgggatttatgaggcccttgaattgagagatggaggatctgactaccttggaaagggtgtatcaaaggctgttgacaatgtgatcancgtcattggccctgctttgattggcaaggacccaactgagcagactgctattgacaacttaatggtt

SEQ ID NO: 142046 - DNA, 336 bp, Glycine max
caaactctttcttccaaaactttgttattcctaatgggacacagcctgagtacattcatccttacctcatccaatcctcaaactcttcactctcagcctcattccctcttctcctcttcaccacagcactcctgtaccaagcttttgtgccagatctcactatctctgcctctaaaacatactcatcatatcaacaaaaccgtgtagtctcatcctacagtgaccttggtgtcactttggacattccaagctccaaccttcgattctttcttgtcagaggaagcccttatataactgcttctgtcacaaagccaacacctctttccatcaaaacag

SEQ ID NO: 142047 - DNA, 306 bp, Glycine max
ttcccttgcacgtgaggcacttattagtgcaaatggggtcattgaaatttcattccttactaataaatattcaatggaattaagctctgtggcatacgatcaactttggcaatttgattcgcaagcacttcccaatgatcttatttccaggggaatggctgtggcagatcctaatgcaccacatggcctaaagctaacaattgaagattatccttttgccaatgatggtcttctcatatgggatgccatcaaacaatgggtcaccgactatgtcaaccattactatccaaccccaagcatcataga

SEQ ID NO: 142048 - DNA, 329 bp, Glycine max
gaaagtgagaggagagagaaagtagctgatcctccatggcctccaccaaggaacgcgaaaactttgtctacaccgccaagctcgccgaacaagccgaacgctatgaagaaatggtggaagcaatgaagaatgtggcgaactgaacgtggaattgacggtcgaggagcggaaccttctgtcggtagggtacaagaacgtggtgggtgctcgtagggcttcgtggaggattctatcgtcgattgaacagaaagaagaagctaaagggaacgatgtgagtgtgaagaggataaaggagtataggcagaaggtggagtctgagttgaccaata

SEQ ID NO: 142049 - DNA, 329 bp, Glycine max
ctttgttcttctaccttattttctttccctagtcaaggagattcatctctgcagcaggttgttttagaaaagaaaaaatgctgaagatttgctgcattggggctggatatgtggggggtccaacaatggcagtcattgcactgaaatgcccctcaattgaagtggctgttgttgacatctctaaatccaggattgcagcatggaacagtgaccagctccctatctatgagccaggccttgatgatgtggtgaagcaatgtcgtggcaagaaccttttcttcagcactgatgttgagaaacatgtctatgaggccgacatagtgttcgtc

SEQ ID NO: 142050 - DNA, 333 bp, Glycine max
tactcgagccgaatcggctcgagggtgagctcattgacaatggctgacccaaagtgggtcatacacggacaaaagatggtctctccatggaatgacagctctagtcacaggaggcacccgaggcatagggcatgccattgttgaagagttagctgagtttggagcaactgttcatatatgtgcacgtaatcaagatgatattgataaatgtttagaagagtggaaaaacaagggacttaatgtgactggttcagtatgtgatttactatgttctgaccaacgtaaaagattaatggaaattgttggctccatctttcatggaaagctcaatat

SEQ ID NO: 142051 - DNA, 334 bp, Glycine max
  unsure (1)..(334): unsure at all n locations
gtgatatgtatagcaatgatccaacctctgccaaacaagccatgtgcttctttcttgatcctgaaacgtccaaatatattgcatttgttcaattccctcaaatgtttcacaaccttagcaaaaaagacatctatgataatcaatctagaactgcttttaagactatgtggcaaggcatggatggactaagaggtccaggtctttcaggcagcggcaattacttaagtagaagtgctttactatttggaagtccaaaccanaaagacgactatctgaaggatgcacaaaagtactttggcaagtctaccgcatacattgaatcactgaaggccat

SEQ ID NO: 142052 - DNA, 271 bp, Glycine max
gaaagaatggatctcatgcgagcagctattgttggtgcatctggaaccccttatcatgaagggttgtttttctttgacatatgcttccctccggagtatcccaacgaaccacctatggtgcactacaattctggagggctccgattaaatcctaatctgtacgagtcaggaaaaatttgtctgagtctcctgaacacttggacaggcacaggtactgaagtgtggaccctggagcctccactattcttcatgtccttctctctctacaggc

SEQ ID NO: 142053 - DNA, 124 bp, Glycine max
gattaccacaggtaccttgctgagttcaagaccggggcagagaggaaagaggctgcagagagtactttgcatgcttacaaatccgctcaggatatagctcttgctgacttggaccgcactcacc

SEQ ID NO: 142054 - DNA, 334 bp, Glycine max
cacaaagcacaaagcaaagctcatccttgagttaaaaaatggcagcagcttcttccatggctctctcatccccatccttggctggcaaggccgtgaagctgggcccatcagccccagaagtgggaagggtgagcatgaggaagaccgtcaccaagcaggtctcctcaggaagcccatggtacggcccagaccgagtcaagtacttgggcccattctctggcgagcccccgtcctacctaaccggtgagttcccaggcgactacggctgggacactgctgggctttccgcagacccagaaaccttcgccaagaaccgtgaactcgaagtgatcca

SEQ ID NO: 142055 - DNA, 328 bp, Glycine max
  unsure (1)..(328): unsure at all n locations
gcaatgctgaatgaatcaaggattcacataattgacttccaagttgcacagggcactcagtggctgttgcttattcaagctcttgcatctcgtccaagtggagcacctttcattcgtgtaaccggagttgatgattcacaatcatttcatgcaaggggtggaggacttcacattgtaggaaaacgcctctcagattatgccaaatcttgtggagttccatttgaggtccacagtgctgctatgtgtggaagtgagcttgaacntagaaaccttgtaattcaacccggggaagctctagttgtgaacttccctttntgtttgcaccaca

SEQ ID NO: 142056 - DNA, 325 bp, Glycine max
attggttcctagcagatttgagccttgtggtctcattcagttacaagctatgcgctatggatctgtaccaattgttgcctcaacaggtggattagttgacactgtcaaagaaggtttcactggatttcagatgggtgccttcagtgttgaatgtgatgctgtggatccagctgatgtggatgctatagcaaagactgtcaaaagggcccttgcagtctatggaactccagcttttacagaaataataaagaactgcatggctcaagatctttcctggaaggggcctgctaagaagtgggaggaagtgctgctaagcctgggagtt

SEQ ID NO: 142057 - DNA, 341 bp, Glycine max
  unsure (1)..(341): unsure at all n locations
gtggtaatggcagcgtcactacaagcagcagctactttcatgcaacccaccaagttgagcaggagcaacactttgcagcaaaagtctactcagtccatttccaaggcttttggtttggaacctgttggagctaaaaaggtcacatgctcccttcaggctgatcttaaggacttggctcacaagtgtgttgatgctaccanaattgcaggattcgcccttgccacctctgccctcgttgtctctggggcaagtgctgaaggtgttccaaagaggctaaccttcgacgaaatccagagcaagacctacttggaagtgaaggggacaggaacagcaaaccagtg

SEQ ID NO: 142058 - DNA, 286 bp, Glycine max
gatcacataacatggcatcattggcatgcaacacgtttattgttagcagcacgttaagatcagttgttactcgtgcggaaccacctaaacctggtcctcttttcgatcttagttcattcaatcgccacagctttccggcaggcttcactttcggggcatcatcttccgcgtaccagtttgaaggtgcggcaaaagaatatggtagaggaccaagtatatgggatactttcatcaatcaacatccaggtaagatagcagatggaacgaatggagatcgcgcacttga

SEQ ID NO: 142059 - DNA, 315 bp, Glycine max
gcagacttgcagatgccattgcagacatttcagacttggcgaagttggaaggatggtcccttcatattcaatactcgacctatgagctctgacccgtgccagcagccagctaggtttttcctggatcaggctacaaaggtgggaaaaagtggaagtatcactatctacaagagacatgaaggcaaggaagcaaagtgcaacagagaaggcactaataatgaggaagtgcaaagaattagagtttctgccttgaagctggatccagaatattggaagaatgtaccccgtaggcattgctgtcaacttttgggtggt

SEQ ID NO: 142060 - DNA, 334 bp, Glycine max
agagaaggtgatcctgtaccaaggatggtgttcgttgtccgagggcgcataaaacgcaaccaaagccttagcaaaggcatggtagcctcaagcatccttgatcccggaggtttttgggtgacgagctactttcatggtgccttcgtcggccgtttatcgacagacttccggcctcctccgccacatttgtatgtcttgaatcagcagaagcctttggccttgatgccaataacttgaggtacatcactgatcacttccggtacaaatttgcatatgagaggctgaaaagaacagcaagatattactcatccaattggagaacttgggctgctgt

SEQ ID NO: 142061 - DNA, 293 bp, Glycine max
cgaccacctccggcgccgttgatcgacccagatgagctcactaagtggtccttgtacagagccgccatagctgagttcatagcaacactccttttcctttacatcaccgtgttgaccattattggctacaagagacagagtgacaccaaaatccccggtaacaccgagtgcgacggcgttggcattttgggcatcgcttggtgcttcggtggcatgatcttcatccttgtatactgcaccgcctgcatctctggtatagtggttctcacaaatcccacatcagctaatcatat

SEQ ID NO: 142062 - DNA, 321 bp, Glycine max
ctgtgacatggggtgtcttcccagctaaggagataattcaaccaaccattgtagatcctgtcagcttcaatgtatggaaggatgaggcatttgaaatttggtcaagaggatgggcaagcttgtaccctgaggatgaggcatccaggaaattggttgaagaggttgggggcagccacttcttggttagtttggtcgacaatgattacatcaatggtgatctttttgccgtctttgcagatttctgacatgagcttattatttattagtactttagctatgtcacttctgttggttgtcatgttctattcctttcttttgttt

SEQ ID NO: 142063 - DNA, 327 bp, Glycine max
atttgatgaagaagatgacagcattgaaacaatcacacttggggataaaaggattggcattaagactagtgtcttggaggagaaggctaccgcttgtaacatgctatgttgctatgctgatgagttgaaggaaggatttttcccttggattgaccaggttgctttcacattggttcctcttcttaaattttacttccacgaagaagttaggaaggctgcagtttcagccatgccagaactgttgtcctcggcaaaatcagctgtagagaagggacagtcgcaaggtcgtgataagacttacgtaaaacagttgtctgattatataat

SEQ ID NO: 142064 - DNA, 326 bp, Glycine max
ctcttatttgcagctttatatggagactatacaagatctgcttgaccctgccaatgataacataaccatcgtagaagatcccaaaactggtgatgtttcattacctggagctagcctagttgacattagggacaagcagagttttgtagaactattaagattaggagaggctcaccgctttgctgcaaatacaaaactgaatacagaatcttctcgaagtcatgctattctgatggtgcatgtaaagagatccgtgaaaggaagagatgcggctctttcaagtgaaaatggcaatcattcacacgtggttaaatcaataaagccgc

SEQ ID NO: 142065 - DNA, 327 bp, Glycine max
  unsure (1)..(327): unsure at all n locations
ggagtccaatgccacggcaaggctgctgactcggttggaggttgcgagctcnccacagaagaagataagtctgtcgtggttgttaagaggctacatcanaggcggccattttaacgaggcggcagagacgatcatgaaaatgcttgatttgggattctatccagagtacttggacagggcggctgtattacaaggtttgagganaagaatccagcaatatgggaatctagatacttatgtcaggctctgtaagtccctctctgatgcaaaccttataggacctgtcttgtacatntagtatatagacaatataagcttatgggtgtg

SEQ ID NO: 142066 - DNA, 214 bp, Glycine max
tgaccaagaacaacatgaattttctaaccttcgttactgttctactcttcatactaccagcaacctcatcttcccagtatttggggaacaaccttctcactcatcgcaagatattcctaaaaaaagacaacattattacctcgtacgctgtcatctttgacggtggtagcacaggaacccgtgtgcatgtcttccattttgaccagaatttgga

SEQ ID NO: 142067 - DNA, 325 bp, Glycine max
  unsure (1)..(325): unsure at all n locations
cattctcctctctgaattcctcttattcaggaatttggagagtattgatatatcaaggtaggataaaccagtagccaaggaagatatggagttttctatgattttcattgttagcaacattatgctgcttttcagttcagcatttgccaaaactgctagtcctccctctctgagcccaactccagcaccagccccggcaccagacttcgtgaacctcactgagttactcagtgttgctggtccgtttcacaccttccttggataccttgagtccactagagtgattgacactttccanaaccaagccaacaacactgaagaaggt

SEQ ID NO: 142068 - DNA, 323 bp, Glycine max
  unsure (1)..(323): unsure at all n locations
ctgttaatccaggggatctgtggtcgggttcagaaggaggaggtataaaaatatggcctttggaggctgttgaaaaatctattcatcttacaaaggaggaaaggcacagtgctgccatatttgtggagaggtcctatgttgacttgaggagccagctatctacaaatggcttcagtaacatgctaacttcagatgtanagtacttagtatctgataattcgagagcanaggtgtggagtgctggctatttttcatttgctttgtgggatgctcgtacaagagagctactgaaagttttcaattcagatggacagattgagaat

SEQ ID NO: 142069 - DNA, 333 bp, Glycine max
gatctctgacctcaggaatcttgaagttgaaagacacaggttgccgagcttgacgaactcgtcaatggcggagagggcaaaagaggctgagaaattaaatgaacaagctgcagtggctaacccagaggaagtggtttcaatggttgagatgagcatccaaaacagcacagagaggaggaagttgggatttttctcttgtggaactggcaaccccattgatgattgctggcgttgcgaccccaactggcaacgcaatcggaagcgtcttgcagattgtggcattggttttggccgaaacgccatcggtggccgtgatggaaaatctatgtggtg

SEQ ID NO: 142070 - DNA, 331 bp, Glycine max
gtgagtgagatagagagagacgcttcgcaaatctcaatcgaatctcagaaaaatgagagaaatcatcagcattcacataggtcaggccgggatccaggtcggaaactcctgctgggaactctactgcctcgaacatggcatccagcccgacggcatgatgccttctgactccaccttcggtgtagcccacgacgccttcaacaccttcttcagcgaaaccggatctggcaagcacgtcccccgtgctgtcttcgtcgacctcgaacccaccgtcatcgacgaggtccgctgcggcacctaccgtcaactcttccaccccgaacaactcatc

SEQ ID NO: 142071 - DNA, 319 bp, Glycine max
cgggcatcaggaactctatccactttatttgatgttggaggggtgctcggtggaattctagctggccacatttctgatcacttagaggctagagccattactgcagcaagtttcatgtactgtgcaatccccgctctcttcttctatcgaagttatgggcacgtttctttgattgtaaatggagcattgatgtttgtcactggcatgtttgtgaacggaccttatgctcttataactactgcagtttcagctgacctgggaacacataaatcattgaagggtaattcacgagctcttgcaactgtcacagcaatcattg

SEQ ID NO: 142072 - DNA, 325 bp, Glycine max
  unsure (1)..(325): unsure at all n locations
agtctgaggtcaagcagatgataanaaaaatatctaggcatgcctcatcttcaaaagttacaaatttaaatgaagtgcttatatctcttattagtactattgtatgtagaattgttttggggagaaggtatgaagaggagggatctgaaggtagcagattccataagttgttcaatgagtgtgaagctatgttgggtaacttctttgtttcagattatattcctttcatgggttggattgataaactcaggggactggatgcacgtcttgaacgcaatttcaaggagatggataagttctaccaagaagccattgatgaacacat

SEQ ID NO: 142073 - DNA, 324 bp, Glycine max
ggatttctgataacacagaccaactcatttgggcacatgtttagggcttataatgatgctgaaagtgagaggcatgaaggagtggagaacttctacagaaaaaatcacacttaccaatcaattgatttcgtgaagaaaatgagagaggagtacgcaaaattgaacagggtagagatgagcatatgggaatgttgtgaactccttaatgaagtggtggatgagagtgaccctgacttggatgaacctcagattgaacacttgctccagacagccgaagctataaggagggactaccctgatgaagattggttgcacctaactggc

SEQ ID NO: 142074 - DNA, 317 bp, Glycine max
gtgatttcagtgagtgatcggtgttcacttgatctcatcataatcgtcagcgtcaattgaagaagatgccgatcagaaacatcgccgtcggaaggcctgaagaggcgactcaccccgacacgttgaaggcggctttggctgagttcatctcaaccttcatcttcgtgttcgccggctcaggctccggcatcgcctacaacaagctcaccgacaacggcgctgccacccctgccggcctcatctccgcctccatcgcccatgcattcgccctcttcgtcgccgtctccgtcggcgccaacatctccggcggccacgtc

SEQ ID NO: 142075 - DNA, 251 bp, Glycine max
aaatgaaaacccaaagtgcttctctcctctgtctttttctctctcttgctatccttttggctagtggcactgctgcaagtgcaactccaagaagcgcagtgccaagccaccatgtttcaacattcaacagaagcctttttccttccattttctctttggaattggttcttctgcttaccaggcagaaggagcagcaagtgtagatgggagaggaccaagcatatgggacacctacactagacagcatactg

SEQ ID NO: 142076 - DNA, 247 bp, Glycine max
ggggattctgacagtctcaaagagtctggctcaaagaaaagggttaggtctgagtcatgtgctgcttctggctccaaggcatgtcgggagaagttgagaagggataggcttaatgacaagtttgttgaattgggcgccattttggagcctggaaggcctgccaaaacagacaaggctgctatcctgattgatgctgtccgaatggtgacccagttacggggtgaagcccagaagttgaaagacacta

SEQ ID NO: 142077 - DNA, 252 bp, Glycine max
ggctcgagctcatctctgacgccccagacgccgccatcgcctcccgcgaccccatcatcgcccccaacgtcatcaacgccaccttccgcaacttcatcgaagtcatcctcgagaaccccaccaaggtcacccagtcctacaaccttgatggctctctttcttttccgtcgcggttgaggcggggcagtggagcccagagaagaggaagtgctacaaccttcttgatgctgtcagcaggcacaccatccaggt

SEQ ID NO: 142078 - DNA, 196 bp, Glycine max
tccatggctaccattgttagcatcaaggcccgccagatctttgacagtcgtggcaatccaaccgtcgaggtggatttgacatgctccgatggtactttgctagagctgctgttccaagtggtgcatccactgggatttatgaggcccttgaattgagagatggaggatctgactaccttggaaagggtgtatcaaa

SEQ ID NO: 142079 - DNA, 245 bp, Glycine max
gaaggatattagtggaaatgccagagcattgaggaggttgagaacagcatgtgagagggccaagaggactctctcttccactgctcaaaccaccattgagattgattccttgtatgagggtattgacttctacacaaccatcaccgtgcccgtttcgaagagcttaacatggacctattcaggaagtgcatggagcccgtggagaagtgtttgcgggatgctaagatggacaagagcaccgtcca

SEQ ID NO: 142080 - DNA, 195 bp, Glycine max
gctcattttcgcgttctgcgccgtcgccgtcgccgtcgccgtcgcgggctcctccttcgatgatgccaaccctatccgtttagcgtcggacttggagtcgcaggtgctggacgtgatcggacagagccgccacgctctctccttcgcccgcttcgctcgccgccacggcaagcgctaccgttccgtcgacgagat

SEQ ID NO: 142081 - DNA, 245 bp, Glycine max
cttatcgctgtggttatcatcttcttcttcctctttcttagatctcttctttctctacgccgcacgccgaaaccatggccggaaaaggagagggtcctgctatcggaatcgatctcggaaccacctactcttgcgtcggtgtgtgcaacatgaccgcgttgaaatcatcgccaacgaccaagggaacagaaccacgccgtcttacgtcggattcactgacaccgagcgtctcatcggtgatgcgg

SEQ ID NO: 142082 - DNA, 248 bp, Glycine max
ttgaaatggccatgagcattgttgaacagagtggaggccagtaccatgtgttggtgataatcgcagatggccaggtaacaaaaaatgttgacactaaacatgggagaccaagtccacaagaacagaagactgtggatgccatagtgcagctagtaaatttcctctttcaatcatattggttggcgttggagatggaccgtgggacatgatgaaggaatttgatgacaatatcccagctcgggcctttg

SEQ ID NO: 142083 - DNA, 240 bp, Glycine max
gtaattttgacagatatctggtgaaacagtaggtgaagtgaggattgtttcagatatgcacgagcgtaaggctgcaatggcacaagaagctgatgcatttgttgctctccctggaggatatggaaccatggaagagctgttgagatgataacttgggcccaacttggaatccataaaaaaccggtaacatagtatttttactctgtagtacaaaatctttaatataacaatcaagtgcta

SEQ ID NO: 142084 - DNA, 242 bp, Glycine max
gttttgtttatttgaaattaacaagtagcaaagatgtttggacatcatcggaggaaacaagggtcacaagataaaggggaacttggtgattatgcgaaagaatgtgttggatatcaacagcattaccagtgttaagggtgtcacggaaccggcattaacatcattggaggagtcgtcgacaccgttactgctttggcgtcccacatctccatccagctcattagtgccaccaaggctgatgg

SEQ ID NO: 142085 - DNA, 239 bp, Glycine max
ttacccttaatagagagattaaacagactcactatacagctccaaaagatttgtattttgtttaataaacttagtaaaggtaactatcaaatagttgcaatatataatatataatgttgacagatatataatataataaaaactgaatgccgaatggctgcattttatgctggttttcccgaaactgtgcctgttaggaccgttaataggcaatgttcatctgggctccaggctgtcgc

SEQ ID NO: 142086 - DNA, 236 bp, Glycine max
tctcctctcactttcatttctacatccctggctctgttccgtcgatgacgatggcgtttagggtgcgaaaccctgacctccgctttctcattcttctctctctcttgtccatcacttccgccaaggtcttcttcgagagcgtttcgatgacggatggggaaatcgttgggttaaatcagattggaaaaaagatgagaacctggctggggagtggaaccacacctctggccaatgga

SEQ ID NO: 142087 - DNA, 241 bp, Glycine max
aaaagacaacccagagagcgcgtcttaataaacgctcttctctgaaaacccccatttcttttcttctttcttcttctctttcgcttcttcgatcttcgatcttcgtcgctgaaaatgagagagtgcatttcaatccacatcgccaggccgggattcaggttggaaacgcctgctgggagctttactgcctcgaacacggcattcagcctgatgggcagatgccaagtgacaagaccgttgg

SEQ ID NO: 142088 - DNA, 249 bp, Glycine max
aaccaccacacaattcctacacatttctactctttagtttctccaattttctttctcaattctcaacaatggccactacaacacaacttcacttaccccctggattcagattccatccaacagatgaagaactcgtcatccactactttgtcgcaaatgcgcttcgcaacatatcgcggttcccataatcgccgaaattgatctgtacaagtacgacccttgggaccttccaggaatggctttgtacgg

SEQ ID NO: 142089 - DNA, 239 bp, Glycine max
gactgggccaatgaccggttcaggctagccaagtgcggcaaagggttcggaagacgggccaccggcgggctcggtggtcccatctatgtcgtcaccgataattccgatgacgacatggtgaaccctaagccgggaactatcgtcacgctgtcacccaaaaaggccccttgtggatcatcttcggacacagcatgatcatcagtttgaggcaagagctgatgatttcctccgacaagacc

SEQ ID NO: 142090 - DNA, 215 bp, Glycine max
atgggaattgcgcttcaaggcgtctcgtagggctaatccgcctcacgagggtcaccaacggcacgtgcctttggggggccgaggccccctactgctggtcggcaaacggacggcggcgcacgcgtcgcttctagcccggattctgacttagaggcgttcagtcataatccaacgcacggtagcttcgcgccactggcttttcaaccaagcgcgat

SEQ ID NO: 142091 - DNA, 237 bp, Glycine max
tcttcgtggcgagggaagaagggggcgaggaagatgatgggtacttggtgagttacgtgcacgatgagaggaagggggagtcgaggtttttggtgatggacgcgaagtcgccggagctagatgttgtggcggcggtgagcttccgcggcgggtgccgtacgggttccatgggctgtttgtgaaggagagtgagctgaggaaagtgtcgttgtcgtgaagctgagacatgatggttcg

SEQ ID NO: 142092 - DNA, 241 bp, Glycine max
atcctctgtcctctcgaagctttcatcgttcaacatattctcaccatctcagtcatgggcctgctatcttgttttaggtctaccgtcctgagaaaatgttccaaaggaagctctggcatgtcaagattcctgtatacgaacattttcaacgaaacttgatttcgtctggtggcaatgaatcgtattatgggtattttaacaggagatcatacacttcactttatatgggaactggaactgt

SEQ ID NO: 142093 - DNA, 243 bp, Glycine max
taatgttgtgcttgacgacaacttcataagtaatcttggaaggactttcaatgagtcattacagattcaagatgctcataaatctgttcttgcttctgaggagaatgatatctataatgtgaatgaggaaaaattatgtgaacaatgaaagatcaagagacaaacataaatatgacgtgcttgaaaaaatctgcaacttttccaattcctaatacaatgttgccttcaagcccatctgataag

SEQ ID NO: 142094 - DNA, 242 bp, Glycine max
ttccaatatattccattctctctgtgtatttccctacctctcccttcaagatgcagatcttcgtcaagaccctcaccggcaagaccatcacccttgaggtggaaagctctgacaccatcgacaacgtcaaggccaagatccagacaaggaaggaatccccccggaccagcaacgtctcattttcgccggaaagcaacttgaggacggccgtacccttgctgactacaacattcagaaggaga

SEQ ID NO: 142095 - DNA, 240 bp, Glycine max
gaaagagataagcaaagcacgaataagattaatggagtctttggtgaaggggtctgctggtctggactaccttaggaatgcctttgctaacaaatatggatctccatctgatgccaatacctctctgccttcaacactgagatggatttcatctgtttggaattgcaaaggtcaggaatgggaagagcatgtgagttcctcatcaggattggcttctaattcatcccaagaatggcttcc

SEQ ID NO: 142096 - DNA, 238 bp, Glycine max
tggaaaatctcttgcctttcctgatggtctccttatcaatggccaagctcatacaaccataaatggggaccagggaaagacctatatgttcagaatctcaaatgtgggcatgtcaacatcaattaacttcagaatccaggtcatcctctgaagctagttgagattgaaggatcacacattgtccagaacacgtacgacacgcttgatgtgcatgttgggcaatcagctgctgtgttgg

SEQ ID NO: 142097 - DNA, 241 bp, Glycine max
ctgtggcagaagtcctaggagtgtaaaacagagacgcaaaatgaagacgatcttgtcgtctgagaccatgaatattcccgacggcgtgagcatcaaggttcacgctaaggttatcgaggttgagggccctcgtggaaaactcgtgcgagacttccaccatctgaacttggacttccaacttattaccgacgatggcggtaaaaggaagctcaagattgattcttggtttggttctcgtaaa

SEQ ID NO: 142098 - DNA, 242 bp, Glycine max
aagagatgaaaacttcggtcacttgaagtcatctgatttccttacatatggaatcaaatccttatctcagaacgtgatacctttgttcaaatctataatatttgacttaagggtcacatcgagtgagttcgatagcttcgagaagtgcgtggtctctttgaaggtggaatcaagctgccaacaaatatactgagccaaattagccccttaccagtcctcaaggaaatcttccgcactgatgg

SEQ ID NO: 142099 - DNA, 239 bp, Glycine max
gagaaaaatatatccaactaatggctacccttattgctcctagccaccattcccgggttgaggatgctgaagctctccgaaatgctttcaaaggatggggggctgatgacaaggccattatagcaatactgggtcacagaatgttcatcagaggcaagaaatcagaaaagcttatgaggagatttaccaagaggatctcatcaaacgccttgagtccgagatctctggtgactttgaga

SEQ ID NO: 142100 - DNA, 235 bp, Glycine max
gtgtcaaggcaactaaagcttctctcgctttgcaagagagggaggagtgagtgagatggaaggagtgatacacagaacagtggaagtgaatggcataaaaatgcacatagcagagaaaagagagggtccagtggtgtgttcctccacggcttccctgagctctggtactcatggcgccaccagattctctctctcagctccctcggctaccgcgccgtcgctcccgatctccgtg

SEQ ID NO: 142101 - DNA, 237 bp, Glycine max
gcaaaattctcttccgtttcaggattagcgtttcaccgttacagtgaaacatggcaaaaccaaagcgaatctctctgcgtatctttgcgctgctcctcttgatttccacctcttcgtttcagcttctccgcgcttccgatacgccgatgatgatgcgatcttctatgattcgttcgacgaggattttgaagaccgttgggttgtgtctcagaaagatgagtacagtggtgtctggaa

SEQ ID NO: 142102 - DNA, 240 bp, Glycine max
ctttgttgcagatctcacaaatgatttcaaagagaccagaatctccaacttcacagaagaggacacaatttaccatggaagctgaagcagagatcaagcaaagacattataaggaagaaggtgtatgtgtgcccagaaccagttgcgtgcaccacgagccttcaagggccctgggggacctcactggcatcaagaagcacttctgcagaaaacacggcgagaagaagtggaaatgtgaca

SEQ ID NO: 142103 - DNA, 240 bp, Glycine max
gcaaaacaacaactcaattaagaaattcttctccggagccatggcagatctcaagtctacattcttgaacgtctattccgttctcaaatctgaactcctccacgaccccgccttcgagttctccgatgatgctcgccatgggtcgaccggatgctagactacaatgtgcctggaggaaagttgaaccggggactgtcagtcattgacagctacagattgttgaaagaaggacaggcatta

SEQ ID NO: 142104 - DNA, 239 bp, Glycine max
tcctacaccaacaaaaatggcaccttctccacaagaaatcatcttccgatccccactccccgatattcccatccccacacatctcccattgtactcttactgcttccaaaacttgtcaaagttccatgaccgtccatgctcatcgacggcgacaccggcgagaccctcacctacgccgacgtcgacctcgctgctcgccgcatcgcctccggcctccacaaaatcggcatccgccaggg

SEQ ID NO: 142105 - DNA, 236 bp, Glycine max
aagttcgatgagcacgctcctccttttgctaaacacattgcggatcaagccaagggtgtgattcagaaagtgacttgtgaggcagggaaagtagcaagtgaagcacaatctggggggccaagagcagctgttcattatgttgctacagaatcaaagcattttgtgttgataaattcagtaaagttgtggaatggactcaaccactatccaccattccatgcactgtcagagatggc

SEQ ID NO: 142106 - DNA, 240 bp, Glycine max
gcgaacacatgactgatctgcaagaaaagttcaagcgcatgtgtgaaaagtccatgataaagaagcgatacatgcacctgacggaggagtttctgaaagagaacccgaacatgtgcgagtacatggcgccatcgctggactgagacaagacgtagtggtgatggaggtgccgaagctgggaaaacaagccgcaacgaaagcgattaaggagtggggtcaaccaaagtcaaagatcacaca

SEQ ID NO: 142107 - DNA, 240 bp, Glycine max
ctaattcagaaggcaaaagaagggatttctccactttcaccaattgggatattatctaagatacacaagattggaagccatcttgggcgtgggaaggaagaagacgctcatgaatttttgaggtgcgcggttgatacaatcaatctgtttgtctcaaggaagttggtgtttcaagtcctttggcagaagaaacaactctagttggttacacctttggagataaagtgcttaagatgcctg

SEQ ID NO: 142108 - DNA, 233 bp, Glycine max
gtcgccgacgggtctgggccctcaagttcccctccgatgacacctaccgccgattcgtcacggaatttcagagctgcatgttcgagaacgtgtacggaatcgagtgcacggaagaaaacaaggtcaaaatctacggtaaagagttcatcggctgggtgaagccggaagccgccgacgattccgtctgggaggacgccgtctccggagaaccgtctccttcgccgtcgccgtcg

SEQ ID NO: 142109 - DNA, 234 bp, Glycine max
aacagttagaatggtgtagtgaagcgcctttttacactcttggtcctttgactactgatattgcccctggctatgatcacatcacctctgcaattggtgctgcaaatattggggcacttggtacagctcttctctgttatgtgactccaaaagaacatcttgggttgccaaaccgggatgacgtgaaggctggcgttatagcttacaagattgcggctcatgctgctgatttag

SEQ ID NO: 142110 - DNA, 234 bp, Glycine max
  unsure (1)..(234): unsure at all n locations
gncggaaacacgagtgnccgctattgggaangggtttgccattgggttctgctngccnttgtatcatggcccctctttggtgcctttgtgagccgagctgctattacaactgttgatgtgttgactccaaaggttttcattggtttgattgtgggtgcaatgcttccttactggttttctgctatgactatgaagagtgtgggaagtgctgctctgaagatggttgaagaagta

SEQ ID NO: 142111 - DNA, 231 bp, Glycine max
ttcaaaccttgctctatactacacagtacacacactagaagaataatggcttccatcctccactactttttagccctctctctttcttgctcttttcttttcttcttatccgactcagtcacccctacaaaaccaataaaccttgttgttctacccgttcaaaatgatggttccacagggctccattgggccaacctccaaaaaagaacccctctaatgcaagtaccagtc

SEQ ID NO: 142112 - DNA, 232 bp, Glycine max
ttctcattttcattatcttaccactttcaattccaaattcactctcagaaattagaatggctagccaatcaaacactaaatcagttcacgatttcacagttaaagatgccaggggaaatgatgttaatctcgccgattacaaaggaaaggtccttctccttgtcaatgttgcctcacaatgcggcttgactaattcaaactacacagagcttaatcaattgtatgagaaata

SEQ ID NO: 142113 - DNA, 231 bp, Glycine max
atttagaaaaggcacaacttggtctggggcatagttacagcagagcaaaggtgaagtttaatgttaaccgtgttgacaacatggttattcaagctatcttccttcttgatacacttgacaaggatgttaattcgttctccatgagagtcagagagtggtattcatggcactttcctgagctggtgaaaattgtaaatgataattatctgtatgccaaagttgcaaaattta

SEQ ID NO: 142114 - DNA, 232 bp, Glycine max
aagagatgtacaccatctcagcttgcattgtcctgggttcatcaccaaggaaaagatgtgtgccctattcctggaaccaccaaacttgagaacttcaatcagaacattggggctttgtctgtcaaactaacaccagaagaaatggcggaacttgagtcccttgctgctctagatgctgtcaagggtgatagatatgcggatgatggtttatctacgtggaaggactctgaaa

SEQ ID NO: 142115 - DNA, 234 bp, Glycine max
tgctagttgcacctacaaacgtgtgaggcagagaacatggggaaaatgggttgctgaaatccgtgaacccaatcgacgtgctaggctctggctcgggacttttgagacctctcatgaagctgctttggcttatgatgctgctgcacgtaagctctatggctctgatgcgaaactcaacttaccagagctctctatcaaatcacaatctcagtgtccaccaccagcttcttctgt

SEQ ID NO: 142116 - DNA, 232 bp, Glycine max
ttcttatctagcactcaagcccaacagtcctacttgcaaggcttcagccataatattctagagacctccttccatagcgaattcgaggagataaacagggttttgttgggagaggaagaggagcagaggcagcaagagggagtgatcgtggaactctcaaaggaacaaattcggcaactgagcagacgtgccaaatctagttcaaggaaaaccatttcctccgaagatgaac

SEQ ID NO: 142117 - DNA, 233 bp, Glycine max
ggagaagacgttcttgcaatccacgccacacaagggtcgacccaacaacttggcccattggtcacagtcccacaattcctcttttcttgtgcaccttccttccttgttcaaaagggtcttcctagaaacactcaaggtgtggctgggttaggccatgcaccaatttctcttccaaaccaactcgcttcccactttggcctacaacgccaattcaccacttgcctttctcgcta

SEQ ID NO: 142118 - DNA, 231 bp, Glycine max
aagcggttggctaagtcagatcctatggttgtttgtaccattgaggagtctggtgaacacattgttgctggtgcaggagagcttcatcttgagatctgtttgaaggacttgcaggatgatttcatgggtggagctgagattatcaaatctgaccctgttgtgtcattcagggagactgttttggagagatcatgccgcaccgtgatgagcaaatcacccaacaagcacaac

SEQ ID NO: 142119 - DNA, 230 bp, Glycine max
ccacacagtctacagtttttgatattctcttgggaatttctcaagattttgaaattgctggtaatactcttatgccagctttttctgttccacaggctactgccagatcttctgaaaatgcggaatcctctgcatgatctagaatttgtgttttctttcgcttgttcgtttgtttaattcaataaacgaaattaggcatgaccctcttgttgagtatgctctgcctattt

SEQ ID NO: 142120 - DNA, 234 bp, Glycine max
ggaatgcaatgccataattgcacagacaagggaagataaaattcttcgccttgagagtcttatggatggtgttttacccactgaagagttcatggaggaagagctagtggctcttacccatgaacataaggttttaaaggataagtacgagaatcatccagaagttttgaagatggagatagagttgaaaaaagtgcaagaggaactagagaagtatcaaaatttctacaaatt

SEQ ID NO: 142121 - DNA, 232 bp, Glycine max
cgatgcaaaaggagttggcaacccagaagaaagaggcaaagatgagccaggcagagctggacaagcaggcggcgcgtcacataacacggcggcgaacaggctgccacggcagggcacatgggacaacccatggggacccatcagacgtcagctatgcccggtcatggaaccggacagcccacgggccatgtcaccgagggagtggtgggctcacaccctattggaaccaaca

SEQ ID NO: 142122 - DNA, 229 bp, Glycine max
aaaagaacctgatatgggtggtgactaagatgcaggttgtggttgataaatatcccacatggggtgatgttgttcaagtagacacttgggtatctgcatcagggaagaatggtatgtgtcgtgattggcttgtgcgtgacgcgaaatctggtgaaatcttgacaagagcctccagtgtttgggtcatgatgaataaagtgacaagaagactgtctaaaattcccgaaga

SEQ ID NO: 142123 - DNA, 229 bp, Glycine max
cttgtatgcatatgtttcccagttgcctttccaattagtaagttgttggattttttgctgggccatcgacatgaagccctattccgtagagctgagttgaaaacactcgtaaatttgcatggtaatgaggctggaaaagggggggaactgacacatgatgaaacaacgatcattgctggggcacttgaactcagtgagaagacagcgagtgatgccatgactcctatat

SEQ ID NO: 142124 - DNA, 231 bp, Glycine max
gctgaagaaaacctaagcttagaattagaaacaaagaaaagaagaaaggaaagaattgatcgttgaaaatgcagggaggaaagaaagcgggagagtccattaaggaaacagctacaaacattggtgcttctgccaaggctggcatggagaagaccaaggccactgtccaagagaaggcagaaagaatgacagcacgtgatccggtgcaaaaggagttggcaacccaaaaga

SEQ ID NO: 142125 - DNA, 229 bp, Glycine max
gcggtttcctttgttggtgttgctgggaactgttttcctggcatcagtttgtgtctcattaaaggtgagagaggatgagaataaccctttctactttagaagctctaacagcttccaaactctctttgagaaccaaaacggtcgcattcgtctcctccagagattcaacaaacgctccccacaacttgagaaccttcgagactaccggattgtccagtttcagtcaaaa

SEQ ID NO: 142126 - DNA, 229 bp, Glycine max
cacaaaagtgttccacttgagtgaaaagtagtgtgttaagaactaaacaatttttcaatggcgtccaagaaacaagaggagcgagctgaggcagctgcgaaagttgctgccaaagaactcgaacaagtcaacagagaaagaagagaccgtgatttcggtgttgttgctgaacaacaacaacaacatcatcaggaagatcaacaaaaacgtggtgtaatcgggtccatgt

SEQ ID NO: 142127 - DNA, 231 bp, Glycine max
gaaaatttaaacactcatgggttctgaaacttttctcgaagtgatattggcaatcctgctacctcctgttggtgttttcctccgttatggctgtggcgtggagctctggatagatctggtgctgaccatactgggatacatacctgggattatatatgcaatttatgtattgattggatgactctcatgtaccataatgtgtatatttctgtgttatttataatatgtgca

SEQ ID NO: 142128 - DNA, 224 bp, Glycine max
ctttctttcaatttccaaatcacgaaactcaagaagatggcgagagcgatcaacagacagcagattctgcttcatcatctcaacccttcatcatctatccaatccaacgaatcatcctccctccatgcttcagcatgtgtggcgggggatagcgtgcttatcaaaggacatcgacattcggggacgatgttgtgatcgtggctgcttatcggactgctcattgc

SEQ ID NO: 142129 - DNA, 230 bp, Glycine max
attttctgtgcgctctaacaaacattctcgttcacactttcagattgtgtgaagatgggggcgggtggccgaactgatgttcctcctgccaacaggaagtcagaggttgaccctttgaagcgggtgccatttgaaaaacctccatttagtctcagccaaatcaagaaggtcattccacctcactgtttccagcgttctgttttccgctcattctcctatgttgtttacga

SEQ ID NO: 142130 - DNA, 230 bp, Glycine max
ccttgctctatactacacagtacacacactagaagaataatggcttccatcctccactactttttagccctctctctttcttgctcttttcttttcttcttatccgactcagtcacccctacaaaaccaataaaccttgttgttctacccgttcaaaatgatggttccacagggctccattgggccaacctccaaaaaagaacccctctaatgcaagtaccagtcctggt

SEQ ID NO: 142131 - DNA, 225 bp, Glycine max
tcgagccgattcggtcgagcaatgggactgaagctgcatgaagactggggaagtactaccgctgcaatagacagttgattgactgttgctgatcaatacgatatccagattaacatacataccgacaccctaaatgaagctggatttgtcgaacatagcattgcagcatttaaaggaagaactattcatacttaccacagtgaaggtgcaggtggtggtcatgct

SEQ ID NO: 142132 - DNA, 231 bp, Glycine max
caggcgcagagtagagcagcacagaagagggaaaacggcaccgccgccgtagaagaaaacaaccatggtgcacgtctccttttacaggaactatgggaagacattcaagaagccgcgtcgtccgtacgagaaggagcgtctcgacgcggagttgaagctggttggtgagtacgggcttcggtgcaagagagagctgtggagggtgcagtacgcgctcagccgcatccgcaa

SEQ ID NO: 142133 - DNA, 232 bp, Glycine max
gttcctcactgaccaagccatggcgatgagaaccaaactttctttagctatctttatctattatcttttagccttattttcaaacctagcctttggcagatgtaaagaaaccgaggtacaagaagaagaccctgagctcgtaacttgcaaacaccaatgccaacagcaacagcaatacactgagggtgacaagcgggtatgcttgcaaagttgtgacaggtatcatcgtatg

SEQ ID NO: 142134 - DNA, 125 bp, Glycine max
gcaagcatctactacatgttatggttaataaaagtaataatgtaagaatacagactttgaactaaatgataatatgaacgattctctttcgttgttcaaagaaaactgactccaaaagctcaaga

SEQ ID NO: 142135 - DNA, 227 bp, Glycine max
tggaggtattggaactgtgccagtgggacgtgttgagaccggtgtcttgaagcctggaatggtggtgacttttgcaccaactggactgacaactgaagtcaagtctgtggagatgcaccatgaatctcttacagaggcacatcctggtgacaatgtgggattcaatgttaagaatgttgctgttaaggatttgaagcgtggttatgttgcctcaaactcaaaggatg

SEQ ID NO: 142136 - DNA, 227 bp, Glycine max
cttcatcagagataacttgacaaataaaatcaccatgtctatcatcccaaacttgttcggtggtagacgaagcaacgtcttcgacccattctctctggacgtatgggaccctttcgaggggtttcctttttccacaggtcacgtgccttcctctggtggggaaagcagtgccatagccaacactcgcgtggactggaaggagactccggcggctcacgtgttcaacg

SEQ ID NO: 142137 - DNA, 229 bp, Glycine max
cccctacaaaaccaataaaccttgttgttctacccgttcaaaatgatggttccacagggctccattgggccaacctccaaaaaagaacccctctaatgcaagtaccagtcctggtggacctcaatggaaatcacttgtgggttaactgtgagcagcagtactcatccaaaacgtaccaagcacccttctgccactccacccaatgctctagagccaacacccaccaatg

SEQ ID NO: 142138 - DNA, 224 bp, Glycine max
aattcttccaccaagttatgggattccttgtgttgcttcttttctccctcttaggtctctcttctagttccagcatatcaactcatcgttccatattggaccttgacctaaccaagtttaccacacagaaacaggtgtcttcactgttccaactatggacgagtgagcatggacgtgtctaccataaccacgaagaagaggcaaagagacttgagattctcaag

SEQ ID NO: 142139 - DNA, 229 bp, Glycine max
gtacatggcacctgaaattattcttggcaaaggccatgataaggctgctgattggtggagcgtaggtattctactgtttgagatgcttactggaaagccgcctttctgtggcggaaaccgtgacaaaattcagcagaagatagttaaagacaagattaagctgccagcatttttgtcaagtgaagcacattcactgttgaaagggctgctacagatggaaccaggtagg

SEQ ID NO: 142140 - DNA, 230 bp, Glycine max
ggaggaaagggcgcgaggggggtggtgtcgatggcgaagaagagcgtgggggacctgagcgcggcggacctgaaggggaagaaggtcttcgtcagggccgacctcaacgtcccgctcgacgacaaccagaacatcaccgacgacaccagaatccgcgccgccattcccaccatcaaacatctcatccaaaacggcgccaaagtcattctctccagccacttggggcggcc

SEQ ID NO: 142141 - DNA, 225 bp, Glycine max
gttctggttccttgtttcgtccctgcataatctgaattcaaatacttgccatcttgttacttgttatgctaccagatctgttttgaattaagagatggggttgtctttcaccaagctttttagccggctctttgccaagaaagagatgcgtattctcatggtaggtcttgatgctgctggtaagactaccatcttgtacaagctcaagctgggagaaattgtcac

SEQ ID NO: 142142 - DNA, 226 bp, Glycine max
cgagacaccaccagcatggccgatggcaggcgagaataggcagagttgccggaaacaaagacctctaccttggcactttcagcacccaagaagaagctgctgaggcctatgacattgctgctatcaaattcaggggattaaatgcagtaacaaactttgacatgagtcgctacgacgtgaagagcattgcaaatagtactcttcctattggtggtttatctggcaa

SEQ ID NO: 142143 - DNA, 236 bp, Glycine max
ggagaatggattcggatcagggaaagcttttcatcggtgggatttcatgggatacgacggaggacaagctcaaggagcatttcggaaactatggcgacgttttgagcacctccgtcatgcgggagaagaacactgggaagcctaggggcttcggtttcgtcgtttttgcggatcctaacattctagatagggttttggaagacaaacatgtcatagatggcagaacggttgatgcc

SEQ ID NO: 142144 - DNA, 227 bp, Glycine max
ctcgagccgaatcggctcgagggcggggcagaggaaggggcagaattttggagtttgaaagagaaaatattgattgcagtagagttctaatgagtaacgaatacgattacctgttcaagcttctcctaatcggagactcttccgttggaaaatcctgcttgcttctcagattcgctgatgactcctatgtcgacagctacataagtaccattggagttgatttcaaa

SEQ ID NO: 142145 - DNA, 227 bp, Glycine max
tggccagagaggcattgaaagacaacgaccttgagtttagtggacgacctaaattacttggccagcagaaactgtcctacaatgggttagagatgatattttccccatatggtgagttttggagagaaattagaaaaatttgtgttgtccatgtccttagctcaagacgtgtctcaagattttcctcaataagaaactttgaggtcaagcaaatgattaaaagaata

SEQ ID NO: 142146 - DNA, 226 bp, Glycine max
ttgcatttcgttactttcatttgttgtgcaatcttacaagttccaaacttctctattttgttattatttgttctcacttctcacacatacaaattttagccttttatattatcatggcttctaaggtggtttcggtttttgttatagcgatgatgttgtttgccatgaactgtaactgcactagtgttggccacatgccttcaaccaaagaggaaggtcacgattt

SEQ ID NO: 142147 - DNA, 226 bp, Glycine max
atcggggagagagcaaagagtgttgtgttggtaattaagaaagagaggaaaaatgccgctcaagttggcgggaggagccactgtcggttcccttctcctatgtgttgctatttctctctttcacatcgctggggccgaagatccctacaggttcttcaactggaatgttacttatggtgacatttaccctcttggtgttcgccaaacgggaatattgatcaacggg

SEQ ID NO: 142148 - DNA, 227 bp, Glycine max
ggaaccatgattagcacctcaactcctcacatggttctccagcaatccgtgtaccaggctttcactcaggtgtttgctcagcagctaccaaagcaagcacaggtgaaatctgtggcaccatttgggttatgcttcaactccaacaagatcaatgcatatcctagcgtggaccttgtgatggacaagcccaatggtcctgtttggagaatctctggtgaggacttgat

SEQ ID NO: 142149 - DNA, 214 bp, Glycine max
ctttcaatgtggagatattttgtcggagatctcgtctttgaagtatctaagatgacttctccctacattaaatgtacagtctcgatcatcatagcattttgaaatttggctgatgacaccatcaattgtgaggcttttccccacaagctggtgcagtttggtgagattcaggtaaaagttgtattgaaattttcacaagaggaatttcttacag

SEQ ID NO: 142150 - DNA, 225 bp, Glycine max
cggctcgagcaatccctaaaacaaatgagaacttccgcctgctgtatgacaccaaaggccgattccgtcttcactcagtcagagatgacgaggctaagttcaagctttgcaaagttcgctcagtgcagtttgggcaaaaaggtatcccatacttgaacacctacgatggtcgcactatccgctacccagaccctctcatcagagctaatgacaccattaagttgg

SEQ ID NO: 142151 - DNA, 224 bp, Glycine max
aacctacctctttttcttctctctcaacaacttcaccttcttcctcctcgatcatgtctcacttcaagggcaagtaccatgatgagcttattgccaatgctgcgtacattggcactcctggaaagggtattcttgctgctgatgagtcaacagggacaattggcaagcgtttggccagcatcagtgtagagcacattgaatccaacatgcgagctcttagggag

SEQ ID NO: 142152 - DNA, 224 bp, Glycine max
ctttgtaacttcaaaacatactcctctgttctctctgtttctcttcaatcttcctgaaaaaaacaaaaacacgaaaaatcatccaccctctcacattctctctctctctcctttcaactaatatggcaattgaaaaccaagacaacactgtcagagaaatcaagccaaagaacaggagaatcatgggtgctggaggccctgatgatgacgacaataggtggcca

SEQ ID NO: 142153 - DNA, 222 bp, Glycine max
gaaagaacttccttataaccaaaaccaacaacaactatggcaagttatcagaagcactacgatgatcagggtcgcaaggtcgacgagtatggcaatgttgagaggcaaactgacgaatatggcaacccggttcatgccactagtgtcacttatgtagccactaaaagtgttggtggctacaatgatgacactaataagcaacatgataccaccggtgtctat

SEQ ID NO: 142154 - DNA, 223 bp, Glycine max
cacaaatcttagccgccattgatttttcctcttccatttctcttactttctcagcctttttcgattacccatttggttctttcgccctaatggctcttgctccttccaaagtttccaccttttctgggttttctcccaaacccagtgttgggggtgctgagaaaaacccaacttgctctgtttctctgagctttttgaatgagaaacttggaagcagaaacct

SEQ ID NO: 142155 - DNA, 225 bp, Glycine max
taagactacaaattttcaatttttcaatggcgtcgaggcaacaaaaagaggatcgagctgaggcagctgcgaaagttgctgcgaaagaactcgaacaactcaaccgagaaaaagaccgtgatttcagtgttggtgttgcagaccaacaccaacaagaagaacatcagttagatcaacaaaagcgtggtgtaatcggatccatgttcaaggcggtgcaagacacct

SEQ ID NO: 142156 - DNA, 220 bp, Glycine max
ctaacctacctctttttcttctctctcaacaacttcaccttcttcctcctcgatcatgtctcacttcaagggcaagtaccatgatgagcttattgccaatgctgcgtacattggcactcctggaaagggtattcttgctgctgatgagtcaacagggacaattggcaagcgtttggccagcatcagtgtagagaacattgaatccaacaggcgagctctt

SEQ ID NO: 142157 - DNA, 223 bp, Glycine max
atgaaatcgtgaaggaagtctcttcttacttgaagaaggttggttacaacccagacaagattccctttgttcccatctctggttttgagggtgacaacatgattgagaggtccaccaaccttgactggtacaagggaccaactctccttgaggctcttgaccaaatcaatgagcccaagaggccctccgacaagcctctaaggcttccattgcaggatgtcta

SEQ ID NO: 142158 - DNA, 224 bp, Glycine max
ctcgagccgcaaaaagaaagaatcccaggcgaggagaaagatggaggggaaggagcaggatgtgtcgttgggagcgaacaagttccccgagagacagccaattgggacggcggcgcagagccaagacgacggcaaggactaccaggagccggcgccggcgccgctggttgactcgacggagtttacgtcatggtcgttttacagagcagggatagcagagtttg

SEQ ID NO: 142159 - DNA, 280 bp, Glycine max
gctgggataactgtgtatagcccaatgaaatattatgggatgacagagccaggcaaacatttgggagtggcagggcttggtgggttaggccatgttgcaatcaaacttgctaaggcttttgggctcaaagttactgtcattagtagttctccaaacaagcaagctgaggccattgaccgactcggggctgattttttccttgtttcatcagaccctgcaaaaatgaaggctgctttgggaaccatggactatatcatagacacaatttctgctgttcatt

SEQ ID NO: 142160 - DNA, 286 bp, Glycine max
gagaaattgatgcgtgaaaggacacacctgctgttggcttgttgttcaaggatggcaatttgtaagaaagatgtttggagagttgaatgtggaatcccttctggatttccgctcacagttatttgcaatagcatttttaatgagatgctcattagatatagctatgaaaaattactgcgccaggctaaagctccaagtatgtttttacaatccttcaaaaattttgtttctttgtgtgtgtatggtgatgataacttaattagtgttcatgaatatgtcaagcctt

SEQ ID NO: 142161 - DNA, 282 bp, Glycine max
gtggatgaagcttcccacaagttcgatgagcatgctccttcctttgccaagcaccttgcggatcaagccaagggtgtgattcagaaagtgacttgtgaggcagggaaagttgcaagtgaagctcaatctggggggtcaagagctgctgttcattttgttgctacagagtcaaagcattttgtgttgataaattcggtgaagttgtggaatggactcacccactatccaccattccatgcattggcagagatagcagttcccactgctgctcactggtcagag

SEQ ID NO: 142162 - DNA, 281 bp, Glycine max
agttggtggagcgatttgtctggttaattccgttaacgaacgagacctcagcctgctaaatagctatgtggaggtaaccctccacggccagcttcttagagggactatggccgcttaggccacggaagtttgaggcaataacaggtctgtgatgcccttagatgttctgggccgcacgcgcgctacactgatgtattcaacgagtctatagccttggccgacaggtccgggtaatctttgaaatttcatcgtgatggggatagatcattgcaattgttggt

SEQ ID NO: 142163 - DNA, 282 bp, Glycine max
gggagagtacaacgtgagagtcaactcaataagaatcaaccagcacagtgtgttcccactgaacaagatatcatccaccatcgtagggtcgacctctggaggaaccatgattagcacctcaactcctcacatggttctccagcaatccgtgtaccaggctttcactcaggtgtttgctcagcagctaccaaagcaagcacaggtgaaatctgtggcaccatttgggttatgcttcaactccaacaagatcaatgcatatcctagcgtggacttgtgatggac

SEQ ID NO: 142164 - DNA, 292 bp, Glycine max
  unsure (1)..(292): unsure at all n locations
ttatgattgaagctaacggcaaccagttatgtaccaaagaccctccttttgggaattactcgaatgctgcattgcagtttcctgtgatgcccacttgcaaagctaccatggatttgtctgctactgcaacatctgcctcacccgtctttgttgctgctccagcagagaaaggccattttctttttagactttctcatgggaggtgtttcagcagctgtctccanaactgctgctgctcccattgaacgtgttaagcttttgatccagaaccaggatgagatgatcaaactgg

SEQ ID NO: 142165 - DNA, 120 bp, Glycine max
gatgagagtgcggtttcctttgttggtgttgctgggaactgttttcctggcatcagtttgtgtctcattaaaggtgagagaggatgagaataaccctttctactttagaagctctaacag

SEQ ID NO: 142166 - DNA, 281 bp, Glycine max
ctgaaggcagtagcagaggctctagatggtcccttaagggaaccactgctctcgttactggaggaacgcgtggaattgggcacgctgtggtggaggaactagcggagtttggtgccacagtgtacacttgttcgaggaatgaagaagagctgaatgcatgcttgaaggagtggaaagagaagggattttcggtttctgggttggtttgtgatgcgtcttctccaccccatagagagaacctcattcaacaagtggcctctgctttcaacggcaagctcaac

SEQ ID NO: 142167 - DNA, 285 bp, Glycine max
tagcggaagctctagcttgggtagcgaatcacaatggcgagaggattgaagaagcatttgaagaggcttaatgccccaaagcattggatgcttgacaaactgggtggtgcatttgctcctaagccctcatctggaccacacaaatccagggaatgcctgccactcatactcattttgcgaaaccggctgaagtatgctctgacataccgtgaagtcattgctattctgatgcagcgacatgtccttgttgatggcaaagtcaggacagacaagacatatcctgct

SEQ ID NO: 142168 - DNA, 281 bp, Glycine max
ctcgagccgtgacaagccaggcaatcacaattttgatcttcttaagaagctggttctcccggatggttcggttctccgtgctcagttacctggcaggccaactcgtgattctctatttgtggatccagccagagataggactagcttgctcaaaatatggaacctgaacaaatgctctggagttgttggtgtatttaactgccaaggtgctggatggtgcaagatagagaagaaaacccgcatccatgatacatctcctggtacactcaccgcctctgtct

SEQ ID NO: 142169 - DNA, 280 bp, Glycine max
cgccgagatcttcaactacctctcccgcattctcgcttcctcaactgcacaacattcctattcaattccagaggaaagaatcatgagttgtttcagctgttgtgaagaagatgactaccagaaggcttctgaaagtggaggacagcatgtagtaaaaaactcaacaggaaatcatggaaatggtcatgcatccgaaactgcaaagcagggcactcaagctgtgaaaattcagcccattgaagttcctgaattaccagtggatgaactcaaagaaattacg

SEQ ID NO: 142170 - DNA, 279 bp, Glycine max
gcttgggtaggcctggtggtattgctgtgtttgattgtcacggccatcgccgaacaatgcggtcgtcaagctggcgggcagacatgtcccaacaacctatgctgcagccagtacggttggtgtggaaacaccgaagaatactgttccccttctaagaactgccagagcaactgctggggaggcggcggcggtggcggtggcggcggcggcggtgaaagtgcttctaatgtccgcgccacatatcattactatgagccagagcaacacgggtgggacttg

SEQ ID NO: 142171 - DNA, 280 bp, Glycine max
catgactttgatctcattaagatgcttgtgttccctgatggtaccgtgcccaaatgcatacattttgcacttccaacaagagattgccttttcaagaaccctctctttgaccaaaaaaccgttctcaaaatttggaacttcaacaagtatggaggagttattggtgctttcaactgtcaaggggctggttgggaccctaagatgaagaagatcaagggtttctctgaatgctacaggccaatttcttgtactgtgcatgtaactgaggttgaatgggacc

SEQ ID NO: 142172 - DNA, 282 bp, Glycine max
tggatttcttccttttagtgccatctacatagagctgtactacatttttgccagtgtatggggccacagaatttatacgatctacagcatactcttcattgtcttcattattctgttgattgtcactgctttcatcactgtggctttgacatacttccaacttgctgctgaggatcatgaatggtggtggaggtctttcctttgtggtggatcaactggcttgttcatctacggctattgcttgtattactactatgcacgatcagatatgtctggttttat

SEQ ID NO: 142173 - DNA, 282 bp, Glycine max
cgttactttcatttgttgtgcaatcttacaagttccaaacttctctattttgttattatttgttctcacttctcacacatacaaatttgagccttttatattatcatggcttctaaggtggtttcggtttttgttatagcgatgatgttgtttgccatgaactgtaactgcactagtgttggccacatgccttcaaccaaagaggaaggtcacgattttcaggagtctaaagccaagaccacacaaacggcgaacaaggccatggaaactggtaaagaggga

SEQ ID NO: 142174 - DNA, 279 bp, Glycine max
cctttgttcactcttcttctcttgcggctagggttttagcgcacttgcttctagatttaaggaagatgggtaaggaaaaggttcacatcagtattgtggtcattggccatgtcgactctgggaaatccactaccactggtcacctgatttacaagcttggaggcattgacaagcgtgttattgagaggtttgagaaggaagctgctgagatgaacaagaggtctttcaagtatgcctgggtgctggacaaacttaaggctgagcgtgaaagaggaatca

SEQ ID NO: 142175 - DNA, 106 bp, Glycine max
gcgatttgtctggttaattccgttaacgaacgagacctcagcctgctaaatagctatgtggaggtaaccctccacggccagcttcttagagggactatggccgctt

SEQ ID NO: 142176 - DNA, 131 bp, Glycine max
acacaactactacaagtacttccttacaatcaaaaccaacaacaactatggcaagttatcaaaagcaccacgatgatcagggtcgcaaggttgacgagtatggcaacgttgagaagcaaaccgacgaatac

SEQ ID NO: 142177 - DNA, 244 bp, Glycine max
ccagtacttcctttacaatcgaaaccaacaacaactatggcaagttatccaaagcactacgatgatcagggtcgcaaggttgacgagtatggcaacgttgagaagcaaaccgacgaatacggcaaccctgttcatgctgctagtgtcacctatgtagccaccagaactgctgctggtggttacagtgatgacattaataagcaacatgataccaccaatgcctacggcgtagacactggtagac

SEQ ID NO: 142178 - DNA, 288 bp, Glycine max
atcacacacaactactacaagtacttccttacaatcaaaaccaacaacaactatggcaagttatcaaaagcactacgatgatcagggtcgcaaggttgacgagtatggcaacgttgagaagcaaaccgacgaatacggcaaccctgttcatgctgctagtgtcacctatgtagccaccagaactgctgctggtggttacagtgatgacattaataagcaacatgataccaccaatgcctacggcgtagacactggtagacagcattctagtggtggctacgatggtga

SEQ ID NO: 142179 - DNA, 279 bp, Glycine max
ggagaatgtgttggcttcttctccccgacgaactgtggaggcgaattctggagatcggaatcgagagcaacggtttcagttacaaggatctctgctgcgtctcaatctcatgccgccgccttcatcgcctctcctcggaagaacctctttggaaccgtcttctcttctctgactatccccaatcccaatctcacccttcttcttcttcttcttcttcttcttctaaatctctttacagattaaggtttgagagagacaaggagaggagaatagctgctc

SEQ ID NO: 142180 - DNA, 281 bp, Glycine max
tcacacacaactactacaagtacttccttacaatcaaaaccaacaacaactatggcaagttatcaaaagcactacgatgatcagggtcgcaaggttgacgagtatggcaacgttgagaagcaaaccgacgaatacggcaaccctgttcatgctgctagtgtcacctatgtagccaccagaactgctgctggtggttacagtgatgacattaataagcaacatgataccaccaatgcctacggcgtagacactggtagacagcattctagtggtggctacga

SEQ ID NO: 142181 - DNA, 237 bp, Glycine max
ttgttgttcaatctaacaaacttctctatatcgtttactttttcaacacaccttacacacttctttatttgagcctttcatataaatatcatggcttcgagggtggtttcggttttggtgatagcgatgatgttgtttgccatgaactgtaactgcactagtgttggccacatgccttcaaccaaagaggaaggtcacgattttcaggaggctaaagccaagacaacacaaactgcg

SEQ ID NO: 142182 - DNA, 277 bp, Glycine max
tctatctattataaccagacactcttcttcatattcttcttcttcttcttgttcttgttctatctgtgacgagcatcatggcctcgagagcagtgctattgttggctatgtgtgtgcttccggccatggttgtggccattcgcccagcaaagaaccctttttgcgtgaagggtcgcgtctactgtgacccttgccgtgctggttttgagacctcagcaaccacctacattgccggtgctgagattatgttgcaatgcaagagcagggttagcaacga

SEQ ID NO: 142183 - DNA, 279 bp, Glycine max
ccatgatgagcttattgccaatgctgcttacattggcactcctggaaagggtattcttgctgctgatgagtcaacagggacaattggcaagcgtttggccagcatcagtgtagagaatgttgaatccaacaggcgtgctcttagggagctgcttttcaccgctcccggtgctcttaaatatctcagtggtgtcattctctttgaggaaactctctaccagagcacagctgcaggcaagccctttgtggaagtcttgaaggaggctggtgtgcttcctgg

SEQ ID NO: 142184 - DNA, 174 bp, Glycine max
gaagaaagggtcctttgtcttcaattttgagggctttttactgaataagtatgtagtactagaatgtatgctgtaatagctcatagtgagcgaggaaagtatcgggctatttaactatgacttgagctccatctatgaataaataaatcagcatatgatgcttttgttttgtgt

SEQ ID NO: 142185 - DNA, 279 bp, Glycine max
cacaactactacaagtacttccttacaatcaaaaccaacaacaactatggcaagttatcaaaagcactacgatgatcagggtcgcaaggttgacgagtatggcaacgttgagaagcaaaccgacgaatacggcaaccctgttcatgctgctagtgtcacctatgtagccaccagaactgctgctggtggttacagtgatgacattaataagcaacatgataccaccaatgcctacggcgtagacactggtagacagcattctagtggtggctacgatgg

SEQ ID NO: 142186 - DNA, 135 bp, Glycine max
tcagtttctggtcccgtagttaggttgttcaagccattcgatgaactttttgttgacttccaggatttcaatgtggaagctctagagaaatttgttgaggaatctagtacccctgttgttactgtctttaacaat

SEQ ID NO: 142187 - DNA, 277 bp, Glycine max
atggtttcagcggcatgaagagcccaaagttgcaaccgatgaatatgagcagggaacttatgtgtactttgatttccatattgcaaatgatgcatgcaacatggatggtgtcaaagaatcaagactgaattcacttttgagtataattatcttgaagatgatcttcttgtatagaagatgccatctgggacactgaaaggaaagaaaatatgattaaagtgaagataaaataagggaagattgatgaggtatgtatgaactttgtttgaatgtgact

SEQ ID NO: 142188 - DNA, 282 bp, Glycine max
ataaccatgtcagacgaggagcaccacttcgagtcaaaggctgatgctggagcatcaaagacatttccccagcaagctggaaccatccgcaaaaacggttacattgtcatcaagaacaggccatgcaaggttgtggaggtttcaacttccaaaactggcaagcatggacacgcaaagtgtcactttgttgcaattgacatcttcactgggaaaaagcttgaggatattgtcccatcttcccataactgtgatgttccccatgttaatcgcattgactaccag

SEQ ID NO: 142189 - DNA, 277 bp, Glycine max
atttcaccaatttctattttcataactttctctgcagtctcttcacctttatgttaatgatattatgtgtttagagagaaagagaacaagcatagttgagcttgattgtgttcttcaacattagaacaagaaaagaaagacaacaacatggaaggaggaggagtagaagttgatgcctctgctttcagagaatgcttgtctctgtcatggaaaaatccttacgttcttcgccttgctttttctgctggaattggtggccttctctttggctatgaca

SEQ ID NO: 142190 - DNA, 278 bp, Glycine max
gattgtttctgcgagaagacttggagccacacccctcagttccagattgggtactgccaacagtgccctgataaggttcaatggccctctcactttggttccaaacctcctctatatttcaatgctggcatgtttgtttatgagcctaatctcgacacctaccgtgatcttctccaaactgtccaactcaccaagcccacttcttttgctgagcaggactttctcaacatgtacttcaaggacaagtacaagccaataccgaacatgtacaaccttgt

SEQ ID NO: 142191 - DNA, 276 bp, Glycine max
caactacaagaaagaacttccttataaccaaaaccaacaacaactatggcaagttatcagaagcactacgatgatcagggtcgcaaggtcgacgagtatggcaatgttgagaggcaaactgacgaatatggcaacccggttcatgccactagtgtcacttatgtagccactaaaagtgttggtggctacaatgatgacactaataagcaacatgataccaccggtgtctatcctgaagaagataccggtaggcatcattttggtcgtggttacgat

SEQ ID NO: 142192 - DNA, 162 bp, Glycine max
ccacaaaaggattaaagagaaaacggtcaagttagaatcttttgaacctttcgatcgcgtgggaaggaagagaggaagatgggtgcgtacagagcggacgatgattacgactacttgttcaaggtggtgttgatcggagactcgggcgttgggaaatcgaac

SEQ ID NO: 142193 - DNA, 277 bp, Glycine max
gaagattcttcttcaagcttctgatcaatcaaaattttatagtggagattgcttcatcttccagtatacatatcctggagaggataaagaagattgtcttataggaacgtggattggaaagaatagtgttgaggaagaacgagcttcagctaattcattggcaagcaaaatggttgagtcaatgaagtttcttgcttcccaggctcgtatatatgaaggcaatgaaccaattcaatttcattctatccttcaaagcttcattgtttttaagggtggg

SEQ ID NO: 142194 - DNA, 278 bp, Glycine max
tttaggttacgaggacattatcatgaatccaattatttctgctgcttctgttattgctgctgggttggccgtagggcttgctctctattggacctggggttggtcaaggcactgctgcagggcaagctgtagaagggattgcacgacaaccggaggctgagggaaaaatacgaggtactttattgcttagtttggcttttatggaagctttaacaatttatggactggttgtagcattagcacttttatttgctaatccttttgtttaatcctaaaaa

SEQ ID NO: 142195 - DNA, 278 bp, Glycine max
gagatctcattcccaaggaaaggagactcactgatgctgatatcctgaaatgggtgaacagaaaagtgaagagcactggcagaacttctcacatagagagcttcaaggataagagcctgtcatgtggactctttttccttgagcttctgagtgctgttgagcctaggattgtcaattggaaccttgtcaccaagggtgaaagcaatgatgagaagaggttgaatgccacttatataatcagtgttgcacggaagctcggttgttccatatttttgtta

SEQ ID NO: 142196 - DNA, 278 bp, Glycine max
caacaagaaaagaaaaaaagaagagttgagattccctttgaagaaaagatggcatcccataggcaaagctatgaagctggtcaaactaagggccgaactgaggaaaagacgaaccagacgatgggcaatattggagagaaggctcaagctgcaaaggagaagacccaggaaatggcccaagctgcaaaggagaagacccaacaaacagcccaagctgccaaggacaagacttgcgacacttcccaagcggcaaaggagaaggcccaacagaatacagg

SEQ ID NO: 142197 - DNA, 246 bp, Glycine max
  unsure (1)..(246): unsure at all n locations
cttatggtggatacctaggcacccagagacgaggaagggcgtagtaagcgacgaaatgcttcggggagttgaaaataagcgtagatccggggattcccgatataggtcaacctttcgaactgctgctgaatccacgggcaggcaagagacaacctggtgaactgaaacatcttagtagccagagganaagaaagcanaagcgattccgtagtagcggcgacgaaatgggagcaactaaaccgtgaa

SEQ ID NO: 142198 - DNA, 248 bp, Glycine max
cacatccaaacttgcagaagccatggagaggagtataccagtggttagggaggcttggttgattgacagcattgaaaagcaagaaccacaacctttggaagcttatgatcttgtctctgatctttctgtggatggcaagggtatcccctgggacaaacaagatcctggggaagaggctatcgaatcactctcagcagaactcaagctttatgggaagagaggagtctataaagataccaagttgcagg

SEQ ID NO: 142199 - DNA, 222 bp, Glycine max
  unsure (1)..(222): unsure at all n locations
catgaagctatggctacggtggccaacaaggcaacaatcactgctgagagagaggtccctgaggacttggacagcaaactcnccaaaccatatttgcctagagctttgagtgcccctgacacagagaatgtgaatggcacgtgggggcacaaacacaacgacatgtccgttcttcagcagcatgtatccttcttcgaccttaacaatgatggtgtcgtctac

SEQ ID NO: 142200 - DNA, 270 bp, Glycine max
aaagtattattgcacagttattgatgcgcctggacatagggatttcattaagaatatgattactgggacatcccaagctgactgtgctgttcttatcattgattcgaccactggtggttttgaagctggtatttccaaggatggacagactcgtgaacatgctctgctttcattcacccttggtgtgaaacagatgatttgctgctgtaacaaaatggatgttactacacccaagtattccaaggccaggtatgatgaaattgtgaagga

SEQ ID NO: 142201 - DNA, 191 bp, Glycine max
ctttcaatgtggagatattttgttggagatctcgtctttgaagtttctaagatgacttctccctacattaaatgtacagtctctttcttcatagcatttggaaatttggctgatgacaccatcaattttgaggcttttccccacaagctggtgcagtttggagagattcaggaaaaagttgtattgaaatt

SEQ ID NO: 142202 - DNA, 277 bp, Glycine max
gaatataggaatataagaactaagatggattggatcggagcgtaccgcggaggccagagaagcagggactggtgcgacccttcatcaccattcactgatttgtgggaccctcgtcgtgtcggtgacgctgatgatatcacctcctactctcgcccatgctcacgttgactggcgtgagactgataaagctcatatcttccgtgctgatcttccaggggtgaagaaagaggatctgaaggtgcaggtggaggagaataagatcctgcagataagcggg

SEQ ID NO: 142203 - DNA, 276 bp, Glycine max
gtttgttgttcctcactgacctcaccatggcgaccagagccaagctttctttagctatcttccttttctttcttttagccttgatttcaaacctagccttgggcaaacttaaagaaaccgaggtcgaagaagatcccgagctcgtaacatgcaaacaccagtgccaacagcaacggcaatacactgagagtgacaagcgaacatgcttgcaacaatgtgacagtatgaagcaagagcgagagaaacaagtcgaagaggaaactcgcgagaaggaag

SEQ ID NO: 142204 - DNA, 272 bp, Glycine max
gcggaggcggcgaagaataaggcgggggaggcggcggtggggggttcgtggactgggagacggaaatgcggcagagagtgagggagttcgaggagaggagggagctcgagaagaaggccgaggagttgcagagtcgcgttggagaggaaggcgaggaggaagaaaccgaggaagaaaagaggatgagagtcaggaaagagctcgaaaaggtagctaaggaacaggcagagaggagggccactgctcagttgatgtttgatttgggtcagaag

SEQ ID NO: 142205 - DNA, 272 bp, Glycine max
attttatttatttaaaggaaagaagtgggttttgcgtgtggccagatgcgagacaactttgcttagggaaaggtcttctatatggatttatgcgattattttcaataccattaaaaacattgcgtggagctagtcggtcgctgagagtaaatcaattttgcagtgtagtgaatctatcgtcctcattgcagatagaattggttccatgccttagggacaattatgcatatcttttacacgatgtggatacggggacagttggtgttgttgat

SEQ ID NO: 142206 - DNA, 270 bp, Glycine max
gccggcgatgcgctcctgtccttaactggccgggtcgtgcctccggtgctgttactttgaagaaattagagtgctcaaagcaagcctacgctctgtatacattagcatgggataacaccacaggattctgatcctattgtgttggccttcgggatcggagtaatgattaacagggacagtcgggggcattcgtatttcatagtcagaggtgaaattcttggatttatgaaagacgaacaactgcgaaagcatttgccaaggatgttttca

SEQ ID NO: 142207 - DNA, 127 bp, Glycine max
cgacgagtatggcaatgttgagaggcaaactgacgaatatggcaacccggttcatgccactagtgtcacttatgtagccactaaaagtgttggtggctacaatgatgacactaataagcaacatgat

SEQ ID NO: 142208 - DNA, 200 bp, Glycine max
agaaaacctaagcttagaattagaaacaaagaaaagaagaaaggaaagaattgatcgttgaaaatgcagggaggaaagaaagcgggagagtccattaaggaaacagctacaaacattggtgcttctgccaaggctggcatggagaagaccaaggccactgtccaagagaaggcagaaagaatgacagcacgtgatccggt

SEQ ID NO: 142209 - DNA, 263 bp, Glycine max
cttttgtctctccaaactaacatccagattgctctgttactatcaaaaggccttctatcctcatttcggacgcacgctccccatccatgtctacttgtgtaaaatcccgagatgtttgtattgttggtgttgcacggacgccaataggtggtttacttggcaccctatcatctctttctgccacagagttaggctcaattgctattaagactgctctcaagagagcaaatgttgatccatcactcgtgcaagaggtgtttttt

SEQ ID NO: 142210 - DNA, 268 bp, Glycine max
cacggcgccccgtgcgcccggcctcctcgtcctcgcgacaaacacaatccccggcgcttcgtgcgccaaggaactcaaatctgttaagtgcgactcccgggggcccggagacggtgtcccgcgggagtcgtcacgacacaacatttacatacaatgactctcggcaacggatatctcggctcttgcatcgatgaagaacgtagcgaaatgcgatacttggtgtgaattgcagaatcccgtgaaccatcgagtctttgaacgcaagttg

SEQ ID NO: 142211 - DNA, 273 bp, Glycine max
ctgagaaggagagacagaaggaaggtgaattagctgatgaggaacagaagaaagtgaagaaagaggttaagaagaaaggctcttcatcttctaaggatggcactgctaaatcaacctcttctaagaaaaaagcaagtggctctgatgaagaccgcacttcacctactcacagtcaaattgacgagaaagaggaggctccagatgaagatgatgacgacgacgtgcaatggctgacagatacatcacttgatgctgctcgtcaacgtatccaag

SEQ ID NO: 142212 - DNA, 271 bp, Glycine max
gagaaaggagctgtcaccgaagttaagttacagggtagatgtggatcatgctgggctttcagcaccacaggatctatagaaggagccaattttcttgccaccggaaagctcgtcagtcttagtgaacaacagctccttgactgtgacaacaagtgtgacataacagaaaagacttcatgtgacaatgggtgtaatggaggtcttatgacaaatgcctacaattatttgctcgagtctggtgggttggaggaggagtcttcatatccctaca

SEQ ID NO: 142213 - DNA, 204 bp, Glycine max
  unsure (1)..(204): unsure at all n locations
aatctgtcagatacgaatttanaaccaacatccatgttcctaaattaggggtaatgcttgtgggttggggtggaaacaacggctcaaccctcaccggtggtgttattgctaaccgagagggcatttcatgggctacaaaggacaagattcaacaagccaattactttggctcnctcacccaagcctcagctatccgagttgggt

SEQ ID NO: 142214 - DNA, 254 bp, Glycine max
agaccgagctagctagctagcaagcaagcacagagatggaggcaaagcgaggccatgccctcatgtgcttggcacgtgtttcactcttcctctgcgctctaaccctatccgctgctcacggaagcaccacggttcaagacatcgcgagaaagttgaaactcggggacaacgagcttctgcgcacggagaagaagttcaaggttttcatggagaattacgggaggagctactccacagaggaggagtatttgcgc

SEQ ID NO: 142215 - DNA, 275 bp, Glycine max
  unsure (1)..(275): unsure at all n locations
gcgatggttcctgcggatgttgacgcaatgtgatttctgcccagtgctctgaatgtcaaagtgaagaaattcaaccaagcgcgggtaaacggcgggagtaactatgactctcttaaggtagccanatgcctcgtcatctaattagtgacgcgcatgaatggattaacgagattcccactgtccctgtctactatccagcgaaaccacagccaagggaacgggcttggcggaatccagcggggaagaagaccctgttgagcttgatctagtccgac

SEQ ID NO: 142216 - DNA, 298 bp, Glycine max
caattttgaggcttttccccacaagctggtgcagtttggagagattcaggaaaaagttgtattgaaattttcacaagaggaatttcttacagcttggtcaactcaggtgcgtcctgcaacaactctgttggctgatgggtgtccatatttgtatgcaatggtgcatgatagttcagtgtctacaataccaggtgattttgtcattggtgtcaagttgacaaccataaacaatatgtgtgcatatgggctcaatcctggtatttcaggttctcgtcttttgggcaccattcctcagtcc

SEQ ID NO: 142217 - DNA, 295 bp, Glycine max
ctcgagccgtttgaggcttttccccacaagctggtgcagtttggagagattcaggaaaaagttgtattgaaattttcacaagaggaatttcttacagcttggtcaactcaggtgcgtcctgcaacaactctgttagctgatgggtgtccatatttgtatgctatggtgcatgatagttcagtgtctacaataccaggtgattttgttattggtgttaagttgacaaccataaacaatatgtgtgcatatgggctcaatcctggtatttcaggttctcgtcttttgggcaccattc

SEQ ID NO: 142218 - DNA, 294 bp, Glycine max
agatgcatcaggacgtcgtgttccagtgcccgccaggagtcaagctgctgggttcgactgatgtgtgccctattcagggcatgttcgtacctcggaagctcctgacgctgcagggacacccggaggtcaacgctgagatcatgactgaggtggtcgactctcggtacaatcggggtgtcttcactgaggaacaatgggtgaaggctcgggaagaggtccaaaggcctcacgacggattcattgtagggcgtgcgttttatcgattcctcctgaagtagactgagtgtacattgt

SEQ ID NO: 142219 - DNA, 288 bp, Glycine max
attgaccttctcggtggaggaatcttagtggacaaaactggagattggatcacacttatacaaaattctccaattagtaacttgttgagagttgctgcttggaagaaaggctgtttaatggtcaagattgtgatgtctgggaatgcagcagtcaaaaggagtgattgggcctcattggtacaagtgtttttaacaaacagcaacagtacagagcattttgatgcatgtaagtggacaaaatcagaaccacattcctgggaattgatcttcccaatagaggtatgtggt

SEQ ID NO: 142220 - DNA, 283 bp, Glycine max
gctgggacagtgagaaaactttgccaaataatttttctgcagaattgctctcttgcaaattggatactgttactggccaatattatcctgagtgggctccaattaattgtcgagttcatcgacaaccaattcacatcactgaaggaaattatgtcagaaagcaagatgtcagcattgaatatgatgcatgtacgattccaaatgattgtggttcattggttgttgccaaggttggaaatcacaaacaaattgttggtttccatgttgctggaagcaaaggaag

SEQ ID NO: 142221 - DNA, 291 bp, Glycine max
ggcacaggaggaaattctgtcttctagtgcaagtgatttcagaactgcaatggtgagtaaaaatagcaagcctcaagctactgcaatgcatgtgggagctatagaaattatcattgatagtttcgcaagtcctgactgcaacatagttggtgcaatgcttttggttgatacttatcataccaatcctgaaaatgcagttcgtagtatttttgttgcgcctttcagaggcggaaggcccattcgggtggttacatttccgaataccattgtgcagattgaaccagacatgaa

SEQ ID NO: 142222 - DNA, 290 bp, Glycine max
gtaataatctggaaatgcaagaagcttatcttgtcaatctcgtaaatgtgttacgagaattgtatttgcacagtccagaggaagctcgccaattgagaaggaaagctctctctcgtattgaatggctgcaaaaagctgatgtgcctaccatagcacagattgaagagtttcattcgatgcagaggatgatgaatgctcctgattcaaatgataatattgatctactgttgagcattgatttgttgggtttacaaggagcaggtaaagcttttccaaacaagattgttttt

SEQ ID NO: 142223 - DNA, 291 bp, Glycine max
caatttgttagtggaaaaaccttcaaatatgatataattggtgctggttcacattcttcagaagattttcctgaaaaggaagatcaagaaaaacccaaaaagattgatgccagattgagacaaagaatagatcctcaatacaatgaggttcaggctcagatggaaacaaatttgtttaaattgtctcttgatgatgttgaaactcctaaaggttccatgttggatctgaaaatttctcaatctaaaattgcacttcccaagaacacagttggaggaaccattctgcgtagt

SEQ ID NO: 142224 - DNA, 287 bp, Glycine max
gttatttgcaatagcatttttaatgagatgctcattagatatagctatgaaaaattactgcgccaggctaaagctccaagtatgtttttacaatccttcaaaaattttgtttctttgtgtgtgtatggtgatgataacttaattagtgttcatgaatatgtcaagccttactttagtggttctaaattgaaaagctttctagctagtcataacatcaccattactgatggtattgacaaaactagtgcaactttgcaatttagaaagttagcagattgtgattttct

SEQ ID NO: 142225 - DNA, 284 bp, Glycine max
cttttgtgttaaataggtggatgggaaaactgactttcccccagggcacttcccgaagtgttaagagaatgcctctttctatagggggaggagctggtgcaaagaatgctattctcatgaatatgccaaatgctgttctttcaatgtggagatattttgttggagatctcgtctttgaagtttctaagatgacttctccctacattaaatgtacagtctctttcttcatagcatttggaaatttggctgatgacaccatcaattttgaggcttttccccacaag

SEQ ID NO: 142226 - DNA, 283 bp, Glycine max
ttgtcattggtgtcaagttgacaaccataaacaatatgtgtgcatatgggctcaatcctggtatttcaggttctcgtcttttgggcaccattcctcagtccatttcacagcaaactgtttggaatcaaatggcaacagtgagaacaccattgaattttgattctagcaagcagagcttttgtcagttttctattgaccttctcggtggaggaatcttagtggacaaaactggagattggatcacacttatacaaaattctccaattagtaacttgttgagagt

SEQ ID NO: 142227 - DNA, 286 bp, Glycine max
cgcaaaatttttgacaaacctaagacgcgctgcttcactaatctccctatggagtttaatcttgtggttcgtcagaagtttttaaattttgtgaggttcattatgaagaaaagggacaagcttagttgtcaagttggaatcaacccatactccatggaatggactggtttggccaatagattactgagtaagggcaacgatattctgtgttgcgattatgctagttttgatggtttgattaccaagcaagttatgagcaagatggcagaaatgataaacagtcttt

SEQ ID NO: 142228 - DNA, 288 bp, Glycine max
ggcagaaatgataaacagtctttgtggtggtgatgaaaaattgatgcgtgaaaggacgcacctgctgttggcttgttgttcaaggatggcaatttgtaagaaagatgtttggagagttgaatgtggaatcccttctggatttccgctcacagttatttgcaatagcatttttaatgagatgctcattagatatagctatgaaaaattactgcgccaggctaaagctccaagtatgtttttacaatccttcaaaaattttgtttctttgtgtgtgtatggtgatgataa

SEQ ID NO: 142229 - DNA, 296 bp, Glycine max
ctcaatttagaaaatttctaccgcattacattaggtggcatctgtataccttgttgatctacattctcccatcttttctcactgctgaaattaaatataagcggaatttgagtaatattcatatttccggcttattttacgacggcagattcaaattctggactaaacacgagaaaaatcttgctttgacagaagaggaaaagatggaagtgattagaaatagaggcattcctgctgatgttcttgcaaagcgagctcatgaatttgaaaaacatgttgctcatgaaagcctcaag

SEQ ID NO: 142230 - DNA, 292 bp, Glycine max
gcgcgccagttctgatatttacaccatctgctctcaagactgtgaattgtggaatcctgcttgcacaaaagcaatgactatgtcatttaatccaaacccgtgttctgatgcatggagtttggaatttctgaagcgtactggatttcattgcgatatcatttgtgtcactggatggactgccaccccaatgcaggatgttcaggttacaattgattggtttatttcctctcaggaatgtgttcccaggacctattgtgttttaaatccacaaaatccttttgtgttaaatagg

SEQ ID NO: 142231 - DNA, 290 bp, Glycine max
tgttgaaactcctaaaggttccatgttggatcttaaaatttctcaatctaaaattgcacttcccaagaacacagttggaggaaccattctgcgtagtgatttattggcaaattttttgacagagggcaattttagagcaagtgttgatttgcagcgcactcatcgtattagaggaatgattaaaatggtggccacagttggtattcctgagaatacaggtatagcattggcctgtgctatgaatagttcttttagggggcgcgccagttctgatatttacaccatctgct

SEQ ID NO: 142232 - DNA, 285 bp, Glycine max
cttcccgaagtgttaagagaatgcctctttctatagggggaggagctggtgcaaagaatgctattctcatgaatatgccaaatgctgttctttcaatgtggagatattttgttggagatctcgtctttgaagtttctaagatgacttctccctacattaaatgtacactctctttcttcatagcatttggaaatttggctgatgacaccatcaattttgaggcttttccccacaagctggtgcagtttggagagattcaggaaaaagttgtattgaaattttcac

SEQ ID NO: 142233 - DNA, 288 bp, Glycine max
cgtaaatgtgttacgagaattgtatttgcacagtccagaggaagctcgccaattgagaaggaaagctctctctcgtattgaatggctgcaaaaagctgatgtgcctaccatagcacagattgaagagttccattcgatgcagaggatgatgaatgctcctgattcaaatgataatattgatttactgttgagcattgatttgttgggtttacaaggagcaggtaaagcttttccaaacaaaattgtttttgatgataagcttgtgttggctaacacacaagaattctt

SEQ ID NO: 142234 - DNA, 286 bp, Glycine max
gcaatttgtaagatagatgtttggagagttgaatgtggaatcccttctggatttccgctcacagttatttgcaatagcatttttaatgagatgctcattagatatagctatgaaaaattactgcgccaggctaaagctccaagtatgtttttacaataccttcaaaaattttgtttctttgtgtgtgtatggtgatgataacttaattagtgttcatgaatatgtcaagccttactttagtggttctaaattgaaaagctttctagctagtcataacatcaccatt

SEQ ID NO: 142235 - DNA, 282 bp, Glycine max
tgataacttaattagtgttcatgaatatgtcaagccttactttagtggttctaaattgaaaagctttctagctagtcataacatcaccattactgatggtattgacaaaactagtgcaactttgcaatttagaaagttagcagattgtgattttctcaagagaaactttaagcagatgtctaatgttttgtgggtggctcctgaggacaaggcgagtttatggtcacaacttcattatgtttcgtgtaataatctggaaatgcaagaagcttatcttgtcaa

SEQ ID NO: 142236 - DNA, 284 bp, Glycine max
aaaatttttgacaaacctaagacgcgctgcttcactattctccctatggagtttaatcttgtggtccgtcagaagtttttaaattttgtgaggttcattatgaagaaaagggacaagcttagttgtcaagttggaatcaacccatactccatggaatggactggtttggccaataggttactgagtaagggcaacgatattctgtgttgcgattatgctagttttgatggtttgattaccaagcaagttatgagcaagatggcagaaatgataaacagtctttg

SEQ ID NO: 142237 - DNA, 288 bp, Glycine max
atgacactgattccgggaaccagtgttgaagaggcttacaacaagctaatagttgaacttgagaaaagtgttcctacattggttggcattgaatgtcccaaggatgagaaacttcctcgtcgcaaaatttttgacaaacctaagacgcgctgcttcactattctccctatggagtttaatcttgtggtccgtcaaaagtttttaaattttgtgaggttcattatgaagaaaagggacaaacttagttgtcaagttggaatcaacccatactccatggaatggactggt

SEQ ID NO: 142238 - DNA, 287 bp, Glycine max
ctcgagccgattcggctcgagtgagggttttcctcatgtgctttcacgcaaaaatggtgagaaaggcaaaaggagatttgtttctggggatggtgaagagatgacattgattccgggaaccagtgttgaagaggcctacaacaagctaatagttgaacttgagaaaagtgttcctacattggttggcattgaatgtcccaaggatgagaaacttcctcgtcgcaaaatttttgacaaacctaagacgcgctgcttcactattctccctatggagtttaatcttgtgg

SEQ ID NO: 142239 - DNA, 98 bp, Glycine max
attttgataaaccgcgatcacaggttgccgcaccttaacaccggaaacaaaagcaagcgttacttgatttcaagaatttctcaatttctttctacttc

SEQ ID NO: 142240 - DNA, 287 bp, Glycine max
tttccgaataccattgtgcagattgaaccagacatgaattcaaggtttcagcttttgagtaccactaccaatggtgattttgttcaagggaaagatctcgcaatggttaaagttaatgtagcatgtgctgctgttggcttgacatcaagttacactccaactccattgttggaatctggtttgcaaaaagacagagggttaattgtggagtattttggaaggatgtcttacgttgctcataacgttaatcagccccaagagaaagatttgttggagggactttttcc

SEQ ID NO: 142241 - DNA, 285 bp, Glycine max
attagatatagctatgaaaaattactgcgccaggctagagctccaagtatgtttttacaatccttcaaaaattttgtttctttgtgtgtgtatggtgatgataacttaattagtgttcatgaatatgtcaagccttactttagtggttctaaattgaaaagctttctagctggtcataatatcaccattactgatggtattgacaaaactagtgcaactttgcaatttagaaagttagcagattgtgattttctcacgagaaactttaagcagatgtctaatgtt

SEQ ID NO: 142242 - DNA, 282 bp, Glycine max
cggctcgagcaaaaatatgctactcccatgatgcccctagatgaagaaattctttctaaggttgcacaagatatggttgaggaatggtttgattgtgttgatgaggaggattcctttgaggaagtttctttaagtgcagcactcaatggtgttgagggtttggactatatggaaagaattcctcttgccacatctgagggttttcctcatgtgctttcacgtaaaaatggtgaaaaaggcaagaggagatttgtttctggggatggtgaagagatgacattg

SEQ ID NO: 142243 - DNA, 281 bp, Glycine max
attctactaaggttaataagtttgcaaaaattatgaaccttagacaaagtgttgttggtgatcttaaacttcttactgatgggaagttgtatgagggtaagcatattcctgtatctaatattagtgcaggggaaaatcatgtagttcaaatacccttaatggcacaggaggaaattctgtcttctagtgcaagtgacttcagaactgcaatggtgagtaaaaatagcaagcctcaagctactgcaatgcatgtgggagctatagaaattatcattgatagt

SEQ ID NO: 142244 - DNA, 282 bp, Glycine max
gatattctgtgttgcgattatgctagttttgatggtttgattaccaagcaagttatgagcaagatggcagaaatgataaacagtctttgtggtggtgatgaaaaattgatgcgtgaaaggacgcacctgctgttggcttgttgttcaaggatggcaatttgtaagaaagatgtttggagagttgaatgtggaatcccttctggatttccgctcacagttatttgcaatagcatttttaatgagatgctcattagatatagctatgaaaaattactgcgccag

SEQ ID NO: 142245 - DNA, 279 bp, Glycine max
cttaattagtgttcatgaatatgtcaagccttactttagtggttctaaattgaaaagctttctagctggtcataatatcaccattactgatggtattgacaaaactagtgcaactttgcaatttagaaagttagcagattgtgattttctcaagagaaactttaagcagatgtctaatgttttgtgggtggctcctgaagacaaggcgagtttatggtcacaacttcattatgtttcgtgtaataatctggaaatgcaagaagcttatcttgtcaatct

SEQ ID NO: 142246 - DNA, 287 bp, Glycine max
gaggacaaggcgagtttatggtcacaacttcattatgtttcgtgtaataatctggaaatgcaagaagcttatcttgtcaatctcgtaaatgtgttacgagaattgtatttgcacagtccagaggaagctcgccaattgagaaggaaagctctctctcgtattgaatggctgcaaaaagctgatgtgcctaccatagcacagattgaagagtttcattcgatgcagaggatgatgaatgctcctgattcaaatgataatattgatctactgttgagcattgatttgtt

SEQ ID NO: 142247 - DNA, 277 bp, Glycine max
actccatggaatggactggtttggccaatagattactgagtaagggcaacgatattctgtgttgcgattatgctagttttgatggtttgattaccaagcaagttatgagcaagatggcagaaatgataaacagtctttgtggtggtgatgaaaaattgatgcgtgaaaggacacatttgctgttggcttgttgttcaaggatggcaatttgtaagaaagatgtttggagagttgaatgtggaatcccttctggatttccgctcacagttatttgcaa

SEQ ID NO: 142248 - DNA, 276 bp, Glycine max
caacgatattctgtgttgcgattatgctagttttgatggtttgattaccaagcaagttatgagcaagatggcagaaatgataaacagtctttgtggtggtgatggaaaattgatgcgtgaaaggacacacctgctgttggcttgttgttcaaggatggcaatttgtaagaaagatatttggagagttgaatgtggaatcccttctggatttccgctcacagttatttgcaatagcatttttaatgagatgctcattagatatagctatgaaaaatt

SEQ ID NO: 142249 - DNA, 281 bp, Glycine max
gttgaatgtggaatcccttctggatttccgctcacagttatttgcaatagcatttttaatgagatgctcattagatatagctatgaaaaattactgcgccaggctaaagctccaagtatgtttttacaatccttcaaaaattttgtttctttgtgtgtgtatggtgatgataacttaattagtgttcatgaatatgtcatgccttactttagtggttctaaattgaaaagctttctagctagtcataacatcaccattactgatggtattgacaaaactag

SEQ ID NO: 142250 - DNA, 281 bp, Glycine max
gtcggtgtctttcgatgagctcattgcactctacgccgtctctgatgtgtgcttggtgtcctcgacccgagatggcatgaatctcgtttcctacgagtacattgctactcagcagaagcgtcatggcgtcatgatcttatccgagttcgctggcgccgctcaaagtttgaacggtagtatcattgtcaacccttggaacacggaggaacttgcagacgcaatccacgatgcagtcaccatgggtgcggagcaacgggctcttaactaccaaaagctggcca

SEQ ID NO: 142251 - DNA, 286 bp, Glycine max
ttcattatgaagaaaagggacaagcttagttgtcaagttggaatcaacccatactccatggaatggactggtttggccaatagattactgagtaagggcaacgatattctgtgttgcgattatgctagttttgatggtttgattaccaagcaagttatgagcaagatggcagaaatgctaaacagtctttgtggtggtgatgaaaaattgatgcgtgaaaggacacatttgctgttggcttgttgttcaagatggcaatttgtaagacagatgtttggagagttga

SEQ ID NO: 142252 - DNA, 286 bp, Glycine max
ggtgatgataacttaattagtgttcatgaatatgtcaagccttactttagtggttctaaattgaaaagctttctagctggtcataatatcaccattactgatggtattgacaaaactagtgcaactttgcaatttagaaagttagcagattgtgattttctcaagagaaactttaagcagatgtctaatgttttgtgggtggctcctgaggacaaggcgagtttatggtcacaacttcattatgtttcgtgtaataatctggaaatgcaagaagcttatcttgtca

SEQ ID NO: 142253 - DNA, 278 bp, Glycine max
gtgatgaaaaattgatgcgtgaaaggacacatttgctgttggcttgttgttcaaggatggcaatttgtaagaaagatgtttggagagttgaatgtggaatcccttctggatttccgctcacagttatttgcaatagcatttttaatgagatgctcattagatatagctatgaaaaattactgcgccaggctagagctccaagtatgtttttacaatccttcaaaaattttgtttctttgtgtgtgtatggtgatgataacttaattagtgttcatgaa

SEQ ID NO: 142254 - DNA, 281 bp, Glycine max
tgcgattatgctagttttgatggtttgattaccaagcaagttatgagcaagatggcagaaatgataaacagtctttgtggtggtgatgaaaaattgatgcgtgaaaggacacacctgctgttggcttgttgttcaaggatggcaatttgtaagaaagatgtttggagagttgaatgtggaatcccttctggatttccgctcacagttatttgtaatagcatttttaatgagatgctcattagatatagctatgaaaaattactgcgccaggctaaagctcc

SEQ ID NO: 142255 - DNA, 281 bp, Glycine max
agcttatcttgtcaatctcgtaaatgtgttacgggaattgtatttgcacagtccagaggaagctcgccaattgagaaggaaagctctctctcgtattgaatggttgcaaaaagctgatgtgcctaccatagcacagattgaagagttccattcgatgcagaggatgatgaatgctcctgattcaaatgataatattgatctactgttgagcattgatttgttgggtttacaaggagcaggtaaagcttttccaaacaagattgtttttgatgataagcttg

SEQ ID NO: 142256 - DNA, 279 bp, Glycine max
aaaagaacttcattgtcaaatgctctctcaaaagaaatccttgaccaaacacttgcaaaatctataaggattcttacatgatcttcattgtaatattcttctcttgaagagagaattcttcttctattcttcttattcaatgagattggttaagagactgtgagtctcttgttgtaaagcatctgaacacaagggatgggttgtccctgtgtggttcagactttgtaaaggattttacaaagatagtggaaatctcaagtgggttgcttgagtactgga

SEQ ID NO: 142257 - DNA, 279 bp, Glycine max
tggacacaaggccagccaccgcaaggcctcgtcggaatccaacaccaccgcctccgccgtcgccgtctttgccacagccaacgacagcgtttccgcttcgaccgtcggcggcggaaggatgcacgagtgttccatctgtcacaagagtttccctaccggtcaggccctgggtggccacaagcgctgtcactacgacggcggaaacaaccacagtaacagcaacgccaacggcaacaacagcagcggcgtcactacctccgacggcggcgctgcctcctc

SEQ ID NO: 142258 - DNA, 275 bp, Glycine max
gctagttttgatggtttgattaccaagcaagttatgagcaagatggcagaaatgataaacagtctttgtggtggtgatgaaaaattgatgcgtgaaaggacgcacctgctgttggcttgttgttcaaggatggcaatttgtaagaaagatgtttggagagttgaatgtggaatcccttctggatttccgctcacagttatttgcaatagcatttttaatgagatgctcattagatatagctatgaaaaattactgcgccaggctaaagctccaag

SEQ ID NO: 142259 - DNA, 276 bp, Glycine max
tatctctctctgtctctatatctgtatttctgaattttgggaatagaaaaaccctaagcaaagcaaagcggtaaggatggggaacacggagaagctgatgaaccagatcatggaattgaaattcacttcgaaatcgctgcagcgtcaatcgcgtaagtgcgagaaggaggagaaatcggagaagctgaaggtgaagaaggcgatcgagaaaggcaacatggacggcgctcgaatctacgcggagaacgcgatccgtaagcgcacggagcagatgaa

SEQ ID NO: 142260 - DNA, 280 bp, Glycine max
caatcctggtatttcaggttctcgtcttttgggcaccattcctcagtccatttcacagcaaactgtttggaatcaaatggcaacagtgagaacaccattgaattttgattctagcaagcagagcttttgtcagttttctattgaccttctcggtggaggaatcttagtggacaaaactggagattggatcacacttatacaaaattctccaattagtaacttgttgagagttgctgcttggaagaaaggctgtttaatggtcaagattgtgatgtctggg

SEQ ID NO: 142261 - DNA, 278 bp, Glycine max
gacacacctgctgttggcttgttgttcaaggatggcaatttgtaagaaagatgtctggagagttgaatgtggaatcccttctggatttccgctcacagttatttgcaatagcatttttaatgagatgctcattagatatagctatgaaaaattactgcgccaagctaaagctccaagtatgtttttacaatccttcaaaaattttgtttctctgtgtgtgtatggtgatgataacttaattagtgttcatgaatatgtcaagccttactttagtggtt

SEQ ID NO: 142262 - DNA, 281 bp, Glycine max
gtctctttcttcatagcatttggaaatttggctgatgacaccatcaattttgaggcttttccccacaagctggtgcaatttggagagattcaggaaaaagttgtattgaaattttcacaagaggaatttcttacagcttggtcaactcaggtgcgtcctacaacaactctgttggctgatgggtgtccatatttgtatgctatggtgcatgatagttcagtgtctacaataccaggtgattttgtcattggtgttaagttgacaaccataaacaatatgtg

SEQ ID NO: 142263 - DNA, 286 bp, Glycine max
  unsure (1)..(286): unsure at all n locations
gataacttaattagtgttcatgaatatgtcaagccttacacacacaaagtttcataatttttgatgngttgtaaaaacatgcttggagctctagcctgtttttacaatccttcaaaaattttgtttctttgtgtgtgtatggtgatgataacttaattagtgttcatgaatatgtcaagccttactttagtggttctaaattgaaaagctttctagctggtcataatatcaccatctatgatggtattgacaaaactagtgcaactttgcaatttagaaagttagc

SEQ ID NO: 142264 - DNA, 286 bp, Glycine max
cttcttcgttcgtcgtgattgtgttagggttcgcaaaattgcagcttcccttcacagttttcgtcccgaaaaatctatagtatcgcgtgacacgcattgaagcacttgaaagatgcagaaattgggagagtttaaattaccacctttcttcaattacccaccttacttcactttgcagccagtcagagacacaagagagaagcagatacagctatggaaagatcttattttagatttttgtaaaacacagaagatatttataattgggcttgaagaagaatttcca

SEQ ID NO: 142265 - DNA, 157 bp, Glycine max
ctcgagccgtggaatttgtgttttctttcgcttgttcgtttgtttaattcaataaaggaaactaggcatgaccctcttgttgagtatgctctgcctatttgataatttccacacctcttttaattgtcgtaatgatgtgtgaagtgtgtgttatttt

SEQ ID NO: 142266 - DNA, 280 bp, Glycine max
cgcgctgcttcactattctccctatggagtttaatcttgtggtccgtcaaaagtttttaaattttgtgaggttcattatgaagaaaagggacaaacttagttgtcaagttggaatcaacccatactccatggaatggactggtttggccaatagattactgagtaagggcaatgatattctgtgttgcgattatgctagttttgatggtttgattaccaagcaagttatgagcaagatggcagaaatgataaacagtctttgtggtggtgatgaaaaatt

SEQ ID NO: 142267 - DNA, 279 bp, Glycine max
gagtaagggcaacgatattctgtgttgcgattatgctagttttgatggtttgattaccaagcaagttatgagcaagatggcagaaatgataaacagtctttgtggtggtgatgaaaaattgatgcgtgaaaggacacatttgctgttggcttgttgttcaaggatggcaatttgtaagaaagatgtttggagagttgaatgtggaatcccttctggatttccgctcacagttatttgcaatagcatttttaatgagatgctcattagatatagctatga

SEQ ID NO: 142268 - DNA, 280 bp, Glycine max
gtgatgataacttaattagtgttcatgaatatgtcaagccttactttagtggttctaaattgaaaagctttctagctagtcataacatcaccattactgatggtattgacaaaactagtgcaactttgcaatttagaaagttagcagattgtgattttctcaagagaaactttaagcagatgtctaatgttttgtgggtggctcctgaggacaaggcgagtttatggtcacaacttcattatgtttcgtgtaatagtctggaaatgcaagaagcttatct

SEQ ID NO: 142269 - DNA, 277 bp, Glycine max
ctaaattgaaaagctttctagctggtcataatatcaccattactgatggtattgacaaaactagtgcaactttgcaatttagaaagttagcagattgtgattttctcaagagaaactttaagcagatgtctaatgttttgtgggtggctcctgaggacaaggcgagtttatggtcacaacttcattatgtttcgtgtaataatctggaaatgcaagaagcttatcttgtcaatctcgtaaatgtgttacgagaattgtatttgcacagtccagagga

SEQ ID NO: 142270 - DNA, 279 bp, Glycine max
gactatgtcatttaatccaaacccgtgttctgatgcatggagtttggaatttctgaagcgtaccggatttcattgtgatatcatttgtgtcactggatggactgccaccccaatgcaggatgttcaggttacaattgattggtttatttcttctcaggaatgtgttcccaggacctattgtgttttaaatccacaaaatccttttgtgttaaataggtggatggggaaactgactttcccccagggcacttcccgaagtgttaaaagaatgcctctttc

SEQ ID NO: 142271 - DNA, 274 bp, Glycine max
gacaagcttagttgtcaagttggaatcaacccatactccatggaatggactggtttggccaatagattactgagtaagggcaacgatattctgtgttgcgattatgctagttttgatggtttgattaccaagcaagttatgagcaagatggcagaaatgataaacagtctttgtggtggtgatgaaaaattgatgcgtgaaaggacacatttgctgttggcttgttgttcaaggatggcaatttgtaagaaagatgtttggagagttgaatgtg

SEQ ID NO: 142272 - DNA, 275 bp, Glycine max
atgagatacttcctcgtcgcaaaatttttgacaaacctaagacgcgctgcttcactattctccctatggagtttaatcttgtggttcgtcagaagtttttaaattttgtgaggttcattatgaagaaaagggacaagcttagttgtcaagttggaatcaacccatactccatggaatggactggtttggccaatagattactgagtaagggcaacgatattctgtgttgcgattatgctagttttgatggtttgattaccaagcaagttatgagc

SEQ ID NO: 142273 - DNA, 276 bp, Glycine max
attttgtcattggtgttaagttgacaaccataaacaatatgtgtgcatatgggcttaatcctggtatttcaggttctcgtacttttgggcaccattccacagtccatttcacagcaaactgtttggaatcaaatggcaacagtgagaacaccattgaattttgattactagcaagcagagcttttgtcaattttactatcgaccttcacggtggaggaattttagtggcccaaaactggagattggatcacacttatacaaattctccaattagta

SEQ ID NO: 142274 - DNA, 272 bp, Glycine max
ggtggctcctgaggacaaggcgagtttatggtcacaacttcattatgtttcgtgtaataatctggaaatgcaagaagcttatcttgtcaatctcgtaaatgtgttacgagaattgtatttgcacagtccagaggaagctcgccaattgagaaggaaagctctctctcgtattgaatggctgcaaaaagctgatgtgcctaccatagcacagattgaagagtttcattcgatgcagaggatgatgaatgctcctgattcaaatgataatattg

SEQ ID NO: 142275 - DNA, 277 bp, Glycine max
cacaagctggtgcagtttggagagattcaggaaaaagttgtattgaaattttcacaagaggaatttcttacagcttggtcaactcaggtgcgtcctgcaacaactctgttggctgatgggtgtccatatttgtatgcaatggtgcatgatagttcagtgtctacaataccaggtgattttgtcattggtgtcaagttgacaaccataaacaatatgtgtgcatatgggctcaatcctggtatttcaggttctcgtcttttgggcaccattcctcagt

SEQ ID NO: 142276 - DNA, 265 bp, Glycine max
gacagagggcaattttagagcaagtgttgatttgcagcgcactcatcgtattaaaggaatgattaaaatggtggccacagttggtattcctgagaatacaggtatagcattggcctgtgctatgaatagttcttttagggggcgcgccagttctgatatttacaccatctgctctcaagactgtgaattatggaatcctgcttgcacaaaagcaatgactatgtcatttaatccaaacccgtgttctgatgcatggagtttggaa

SEQ ID NO: 142277 - DNA, 283 bp, Glycine max
ctggtatttcaggttctcgtcttttgggcaccattcctcagtccatttcacagcaaactgtttggaatcaaatggcaacagtgagaacaccattgaattttgattctagcaagcagagcttttgtcaattttctatcgaccttctcggtggaggaattttagtggacaaaactggagattggatcacacttatacaaaattctccaattagtaacttgttgagagttgctgcttggaagaaaggctgtttaatggtcaagattgtgatgtctgggaatgcagc

SEQ ID NO: 142278 - DNA, 296 bp, Glycine max
aaaattcagctcaagctttgacttcttccctgtggaggttgctagtcaagagagagttgatcacattggtgaattgaaatctggtgactatgttccactgcctacaaaaactaatttggtggaaactcccaaggaatagcaattggatctaccttgtgacaaaattcctaatgtcttgactacaactgatgagagattggtaggcacagaacatgagggatatgatccttttcttggtggaattcaaaaatatgccactcccatgatgcacctagatgaagaaattctttctaagg

SEQ ID NO: 142279 - DNA, 274 bp, Glycine max
ttaaatgtacagtctctttcttcatagcatttggaaatttggctgatgacaccatcaattttgaggcttttccccacaagctggtgcagtttggagagattcaggaaaaagttgtattgaaattttcacaagaggaatttcttacagcttggtcaactcaggtgcgtcctgcaacaactctgttggctgatgggtgtccatatttgtatgctatggtgcatgatagttcagtgtctacaataccaggtgattttgtccattggtgtaagttgac

SEQ ID NO: 142280 - DNA, 278 bp, Glycine max
caaggtttcagcttttgagtaccactaccaatggtgattttgttcaagggaaagatcttgcaatggttaaagttaatgtagcatgtgctgctgttggcttgacatcaagttacactccaactccattgttggaatctggtttgcaaaaagacagagggttaattgtggagtattttggaaggatgtcttacgttgctcataacgttaatcagccccaagagaaagatttgttggaggagagtttttcctttgatattaaatctcgctctagattgcaa

SEQ ID NO: 142281 - DNA, 276 bp, Glycine max
aatttttctgcagaattgctctcttgcaaattggatactgttactggtcaatattatcctgagtgggctccaattaattgtcgagttcatcgacaaccaattcacatcactgaaggaaattatgtcagaaagcaagatgtcagcattgaatatgatgcatgtacaattccaaatgattgtggttcattggttgttgccaaggttggaaatcacaaacaaattgttggtttccatgttgctggaagcaaaggaagattgggatatgcttcattgata

SEQ ID NO: 142282 - DNA, 274 bp, Glycine max
tttgattctagcaagcagagcttttgtcaattttctattgaccttctcggtggaggaattttagtggacaaaactggagattggatcacacttatacaaaattctccaattagtaacttgttgagagttgctgcttggaagaaaggctgtttaatggtcaagattgtgatgtctgggaatgcagcagtcaaaaggagtgattgggcctcattggtacaagtgtttttaacaaacagcaacagtacagagcattttgatgcatgtaagtggacaa

SEQ ID NO: 142283 - DNA, 276 bp, Glycine max
ctcgagccgattcggctcgaggaaactcctaaggaatggcaactggcatctaccttgtgacaaaattcctagtgtcttgactacaactgatgagagattggtaggcacagaacatgagggatatgatccttttcttggtggaattcaaaaatatgccactcccatgatgcccctagatgaagaaattctttctaaggttgcacaagatatggttgaggaatggttcgattgtgttgatgaggaggattcctttgaggaagtttctttaagtgcagc

SEQ ID NO: 142284 - DNA, 271 bp, Glycine max
gctggtcataatatcaccattactgatggtattgacaaaactagtgcaactttgcaatttagaaagttagcagattgtgattttctcaagagaaactttaagcagatgtctaatgttttgtgggtggctcctgaggacaaggcgagtttatggtcacaacttcattatgtttcgtgtaataatctggaaatgcaagaagcttatcttgtcaatctcgtaaatgtgttacgggaattgtatttgcacagtccagaggaagctcgccaattga

SEQ ID NO: 142285 - DNA, 269 bp, Glycine max
gttttaaatccacaaaatccttttgtgttaaataggtggatgggaaaattgactttcccccagggcacttcccgaagtgttaagagaatgcctctttctatagggggaggagctggtgcaaagaatgctattctcatgaatatgccaaatgctgttctttcaatgtggagatattttgttggagatctcgtctttgaagtttctaagacgacttctccctacattaaatgtacagtctctttcttcatagcatttggaaatttggctga

SEQ ID NO: 142286 - DNA, 274 bp, Glycine max
ttcacattcttcagaagattatcctgaaaaggaagatcaagataaacccagaaagattgatgccagattgagacaaagaatagatcctcaatacaatgaggttcaggctcagatggaaacaaatttgtttaaattgtctcttgatgatgttgaaactcctaaaggttccatgttggatctgaaaatttctcaatctaaaattgcacttcccaagaacacagttggaggaaccattctgcgtagtgatctattggcaaattttgtgacagacggc

SEQ ID NO: 142287 - DNA, 275 bp, Glycine max
ctaatctggaaatgcaagaagcttatcttgtcaatctcgtaaatgtgttacgagaattgtatttgcacagtccagaggaagctcgccaattgagaaggaaagctctctctcgtattgaatggctgcaaaaagctgatgtgcctaccatagcacagattgaagagttccattcgatgcagaggatgatgaatgctcctgattcacatgataatattgatctactgttgagcattgatttgttgggtttacaaggagcaggtaaagcttttccaaac

SEQ ID NO: 142288 - DNA, 279 bp, Glycine max
acttaattagtgttcatgaatatgtcaagccttactttagtggttctaaattgaaaagctttctagctggtcataatatcaccattactgatggtattgacaaaactagtgcaactttgcaatttagaaagttagcagattgtgattttctcaagagaaactttaagcagatgtctaatgttttgtgggtggctcctgaagacaaggcgagtttatggtcacaacttcattatgtttcgtgtaataatctggaaatgcaagaagcttatcttgtcaatc

SEQ ID NO: 142289 - DNA, 269 bp, Glycine max
atatagcaagcctcaagctactgcaatgcatgtgggagctatagaaattatcattgatagtttcgcaagtcctgattgcaacatagttggtgcaatgcttttggttgatacttatcataccaatcctgaaaatgcagttcgtagtatttttgttgcgcctttcagaggcggaaggcccattcgggtggttacatttccgaataccattgtgcagattgaaccagacatgaattcaaggtttcagcttctgagtaccataccaatggtga

SEQ ID NO: 142290 - DNA, 253 bp, Glycine max
atgactttcccccagggcacttcccgaagtgttaagagaatgcctctttctatagggggaggagctggtgcaaagaatgctattctcatgaatatgccaaatgctgttctttcaatgtggagatattttgtggaaatcccgcttgaaaatttcctagatgacttctccctacattaaatgtaaagtctcttcttcaaagcattggaatttggcggatgaccatcaattttgaagctttccccacagctggtgc

SEQ ID NO: 142291 - DNA, 266 bp, Glycine max
ggccacagttggtattcctgagaatacaggtatagcattggcctgtgctatgaatagttcttttagggggcgcgccagttctgatatttacaccatctgctctcaagactgtgaattatggaatcctgcttgcacaaaagcaatgactatgtcatttaatccaaacccgtgttctgatgctggaagtttggaatttctgaagcgtaccggatttcattgtgatatcatttgtgtcactggatggactgccaccccaatgcaggatg

SEQ ID NO: 142292 - DNA, 260 bp, Glycine max
ctggtgcaaagaatgctattctcatgaatatgccaaatgctgttctttcaatgtggagatattttgttggagatctcgtctttgaagtttctaagatgacttctccctacattaaatgtacagtctctttcttcatagcatttggaaatttggctgatgataccatcaattttgaggcttttccccacaagctggtgcagtttggagagattcaggaaaaagttgtattgaaattttcacaagaggaatttcttacagct

SEQ ID NO: 142293 - DNA, 264 bp, Glycine max
agaattttgtttctttgtgtgtgtatggtgatgataacttaattagtgttcatgaatatgtcaagccttactttagtggttctaaattgaaaagctttctagctggtcataatatcaccattactgatggtattgacaaaactagtgcaactttgcaatttagaaagttagcagattgtgattttctcaagagaaactttaagcagatgtctaatgttttgtgggtggctcctgaagacaaggcgagtttatggtcacaacttc

SEQ ID NO: 142294 - DNA, 264 bp, Glycine max
ctcctgaggacaaggcgagtttatggtcacaacttcattatgtttcgtgtaataatctggaaatgcaagaagcttatcttgtcaatctcgtaaatgtgttacgagaattgtatttgcacagtccagaggaagctcgccaattgagaaggaaagctctctctcgtattgaatggctgcaaaaagctgatgtgcctaccatagcacagattgaagagttccattcgatgcagaggatgatgaatgctcctgattcaaatgataata

SEQ ID NO: 142295 - DNA, 266 bp, Glycine max
gggaaaatcatgtagttcaaatacccttaatggcacaggaggaaattctgtcttctagtgcaagtgatttcagaactgcaatggtgagtaaaaatagcaagcctcaagctactgcaatgcatgtgggagctatagaaattatcattgatagtttcgcaagtcctgactgcaacatagttggtgcaatgcttttggttgatacttatcataccaatcctgaaaatgcagttcgtagtatttttgttgcgcctttcagaggcggaagg

SEQ ID NO: 142296 - DNA, 255 bp, Glycine max
ggaatctctcaagattttgaaattgctggtaatactcttatgccagctttttctgttccacaggctactgccagatcttctgaaaatgcggaatcctctgcatgatctggaatttatgttttctttcgcttgttcgttcgtttaattcaataaaggaaattgggcatgaccctcttgttgagtatgctctgcctatttgaaaatttccacacctcttttaattgtcgtaatgacgtgtgaagtgtgtgttatttt

SEQ ID NO: 142297 - DNA, 259 bp, Glycine max
caaacctaagacgcgctgcttcactattctccctatggagtttaatcttgtggtccgtcaaaagtttttaaattttgtgaggttcattatgaagaaaagggacaaacttagttgtcaagttggaatcaacccatactccatggaatggactggtttggccaatagattactgagtaagggcaatgatattctgtgttgcgattatgctagttttgatggtttgattaccaagcaagttatgagcaagatggcagaaatg

SEQ ID NO: 142298 - DNA, 261 bp, Glycine max
ggcctgtgctatgaatagttcttttagggggcgtgccagttctgatatttacaccatctgctctcaagactgtgaattatggaatcctgcttgcacaaaagcgatgactatgtcatttaatccaaacccgtgttctgatgcatggagtttggaatttctgaagcgtactggatttcattgtgatatcatttgtgtcactggatggactgccaccccaatgcaggatgttcaggttacaattgattggtttatttcctctca

SEQ ID NO: 142299 - DNA, 261 bp, Glycine max
ctacaactgatgagagattggtaggcacagaacatgagggatatgatccttttcttggtggaattcaaaaatattctactcccatgatgcccctagatgaagaaattctttctaaggttgcacaagatatggttgaggaatggtttgattgtgttgatgaggaggattcctttgaggaagtttctttaagtgcagcactcaatggtgttgagggtttggactatatggaaagaattcctcttgccacatctgagggttttc

SEQ ID NO: 142300 - DNA, 267 bp, Glycine max
cgactttgcaatttagaaagttagcagattgtgattttctcaagagaaactttaagcagatgtctaatgttttgtgggtggctactgaggacaaggcgagtttatggtcacaacttcattatgtttcgtgtaataatctggaaatgcaagaagcttatcttgtccatctcgtaaatgtggttacgagaattgtatttgcacagtccagaggaagctcgccaattgagaaggaaagctctctctcgtattgaatggctgcaaaaagct

SEQ ID NO: 142301 - DNA, 264 bp, Glycine max
ggatttcattgtgatatcatttgtgtcactggatggactgccactccaatgcaggatgttcaggttacaattgattggtttatttcctctcaggaatgtgttcccaggacctattgtgttttaaatccacaaaatcctttttggtaaataggtggatggggaaactgacttttccccagggcacttcccgaagtgttaaaagaatgcctctttctatagggggaggagctggtgcaaagaatgctattctcatgaatatgccaa

SEQ ID NO: 142302 - DNA, 262 bp, Glycine max
ctcgagccgttttgatgcatgtaagtggacaaaatcagaaccacattcctgggaattgatcttcccaatagaggtatgtggtcctaataatggttttgaaatgtggagttctgagtgggcaaatcaaacttcatggcatttgagtttccttattgacaatcccaaacagtctacagtttttgatattctcttgggaatctctcaagattttgaaattgctggtaatactcttatgccagctttttctgttccacaggctact

SEQ ID NO: 142303 - DNA, 263 bp, Glycine max
caccactgcttggattagttctgcagttaacaatcgctcctcagatatcaacaaaaagattcgcacagcacttgggaaaggtaagagaattgtttttcttactagagttgatccttttccagtagctctattggctgttctttttggcgttaagaatgaaattctgagttctaacgccactaaccctatgctgacgcgacttcttgagaactgtaagagtctcaaatatctggttgatgagtgtccttttgcatttatgaact

SEQ ID NO: 142304 - DNA, 262 bp, Glycine max
ccgaagtgttaaaagaatgcctctttctataggaggaggagctggtgcaaagaatgctattctcatgaatatgccaaatgctgttctttcaatgtggagatattttgttggagatctcgtctttgaagtttctaagatgacttctccctacattaaatgtacagtctctttcttcatagcatttggaaatttggctgatgacaccatcaattttgaggcttttccccacaagttggtgcagtttggagagattcaggaaaaa

SEQ ID NO: 142305 - DNA, 257 bp, Glycine max
ctgagtaagggcaacgatattctgtgttgcgattatgctagttcgatggtttgattaccaagcaagttatgagcaagatggcagaaatgataaacagtctttgtggtggtgatgaaaaattgatgcgtgaaaggacacatttgctgttggcttgttgttcaaggatggcaatttgtaagaaagatgtttggagagttgaatgtggaatcccttctggatttccgctcacagttatttgcaatagcatttttaatgag

SEQ ID NO: 142306 - DNA, 261 bp, Glycine max
gttgacaaccataaacaatatgtgtgcatatgggcttaatcctggtatttcaggttctcgtcttttgggcaccattcctcagtccatttcacagcaaactgtttggaatcaaatggcaacagtgagaacaccattgaattttgattctagcaagcagagcttttgtcaattttctatcgaccttctcggtggaggaattttagtggacaaaactggagattggatcacacttatacaaaattctccaattagtaacttgtt

SEQ ID NO: 142307 - DNA, 263 bp, Glycine max
tggtcataatatcaccattactgatggtattgataaaactagtgcaactttgcaatttagaaagttagcagattgtgattttctcaagagaaactttaagcagatgtctaatgttttgtgggtggctcctgaggacaaggcgagtttatggtcacaacttcattatgtttcgtgtaataatctggaaatgcaagaagcttatcttgttaatctcgtaaatgtgttacgagaattgtatttgcacagtccagaggaagctcgcc

SEQ ID NO: 142308 - DNA, 263 bp, Glycine max
ctcgagccgctcgagccgattcggctcgagggaatttcttacagcttggtcaactcaggtgcgtcctgcactaactctgttagctgatgggtgtccatatttgtatgctatggtgcatgatagttcagtgtctacaataccaggtgattttgttattggtgttaagttgacaaccataaacaatatgtgtgcatatgggctcaatcctggtatttcaggttctcgtcttttgggcaccattcctcagtccatttcacagcaaa

SEQ ID NO: 142309 - DNA, 264 bp, Glycine max
aaaaccttcaaatatgatataattggtgctggttcacattcttcagaaggttttcctgaaaaggaagatcaagaaaaacccaaaaagattgatgccagattgagacaaagaatagatcctcaatacaatgaggttcaggctcagatggaaacaaatttgtttaaattgtctcttgatgatgttgaaactacctaaaggttccatgttggatcttaaaatttctcaatctaaaattgcacttcccaagaacacagttggaggaac

SEQ ID NO: 142310 - DNA, 260 bp, Glycine max
caatttgtaagacagatatttggagagttgaatgtggaatcccttctggatttccgctcacagttatttgcaatagcatttttaatgagatgctcattagatatagctatgaaaaattactgcgccaggctaaagctccaagtatgtttttacaatccttcaaaaattttgtttctttgtgtgtgtatggtgatgataacttaattagtgttcatgaatatgtcaagccttactttagtggttctaaattgaaaagcttt

SEQ ID NO: 142311 - DNA, 259 bp, Glycine max
ggtattcctgctgatgttcttgcaaagcgagctcatgaatttgaaaaacatgttgctcatgaaagcctcaaggatcaaattcctgctgttgacaagttgtattctactaaggttaataagtttgcaaaaattatgaaccttagacaaagtgttgttggtgatcttaaacttcttactgatgggaagttgtatgagggtaagcatattcctgtatctaatattagtgcaggggaaaatcatgtagttcaaatacccttaa

SEQ ID NO: 142312 - DNA, 261 bp, Glycine max
cctctcaggaatgtgttcccaggacctattgtgttttaaatccacaaaatccttttgtgttaaataggtggatgggaaaattgactttcccccagggcacttcccgaagtgttaagagattcaggaaaaagttgtattgaaattttcacaagaggaatttcttacagcttggtcaactcaggtgcgtcctgcaacaactctgttggctgatgggtgtccatatttgtatgcaatggtgcatgatagttcagtgtctacaat

SEQ ID NO: 142313 - DNA, 193 bp, Glycine max
cattttctcaagagaaactttaagcagatgtctaatgttttgtgggtggctcctgaggacaaggcgagtttatggtcacaacttcattatgtttcgtgtaataatctggaaatgcaagaagcttatcttgtcaatctcgtaaatgtgttacgagaattgtatttgcacagtccagaggaagctcgccaattga

SEQ ID NO: 142314 - DNA, 259 bp, Glycine max
ggaagttatgagcaagatggcagagatgataaacagtctttgtggtggtgatgaaaaattgatgcgtgaaaggacacatttgctgttggcttgttgttcaaggatggcaatttgtaagaaagatgtttggagagttgaatgtggaatcccttctggatttccgctcacagttatttgcaatagcatttttaatgagatgctcattagatatagctatgaaaaattactgcgccaggctagagctccaagtatgttttta

SEQ ID NO: 142315 - DNA, 259 bp, Glycine max
gtaaaagttgtattgaaattttcacaagaggaatttcttacagcttggtcaactcaggtgcgtcctgcaacaactctgttggctgatgggtgtccatatttgtatgcaatggtgcatgatagttcagtgtctacaataccaggtgattttgtcattggtgtcaagttgacaaccataaacaatatgtgtgcatatgggctcaatcctggtatttcaggttctcgtcttttggggcacattcctcagtccatttcacagc

SEQ ID NO: 142316 - DNA, 256 bp, Glycine max
gaaatgataaacagtctttgtggtggtgatgaaaaattgatgcgtgaaaggacacacctgctgttggcttgttgttcaaggatggcaatttgtaagaaagatgtctggagagttgaatgtggaatcccttctggatttccgctcacagttatttgcaatagcatttttaatgagatgctcattagatatagctatgaaaaattactgcgccaagctaaagctccaagtatgtttttacaatccttcaaaaattttg

SEQ ID NO: 142317 - DNA, 256 bp, Glycine max
ccccaatgcaggatgttcaggttacaattgattggtttatttcctctcaggaatgtgttcccaggacctattgtgttttaaatccacaaaatccttttgtgttaaataggtggatgggaaaattgactttcccccagggcacttcccgaagtgttaagagaatgcctctttctatagggggaggagctggtgcaaagaatgctattctcatgaatatgccaaatgctgttctttcaatgtggagatattttgttgg

SEQ ID NO: 142318 - DNA, 257 bp, Glycine max
caaatatgatataattggtgctggttcacattcttcagaagattttcctgaaaaggaagatcaagaaaaacccaaaaagattgatgccagattgagacaaagaatagatcctcaatacaatgaggttcaggctcagatggaaacaaatttgtttaaattgtctcttgatgatgttgaaactcctaaaggttccatgttggatcttaaaatttctcaatctaaaattgcacttcccaagaacacagttggaggaacca

SEQ ID NO: 142319 - DNA, 256 bp, Glycine max
ggtccgtcagaagtttttaaattttgtgaggttcattatgaagaaaagggacaagcttagttgtcaagttggaatcaacccatactccatggaatggactggtttggccaataggttactgagtaagggcaacgatattctgtgttgcgattatgctagttttgatggtttgattaccaagcaagttatgagcaagatggcagaaatgataaacagtctttgtggtggtgatgacaaattgatgcgtgaaaggaca

SEQ ID NO: 142320 - DNA, 262 bp, Glycine max
ctcgagccgaatcggctcgagagagaatgcctctttctataggtgcgaggagctggtgcaaagcctgctattctcatgaataggccaaatgctgttctttcaatgtggagatattttgttgaagatctcgtctttgaagtttctaagatgacttctccctacattaaatgtacagtctctttccatcatagcatttggaaatttggctgatgatccacactttgagggggtccccccaagagagcggtgcagtttggagaga

SEQ ID NO: 142321 - DNA, 249 bp, Glycine max
cttctggatttccgctcacagttatttgcaatagcatttttaatgcgatgctcattagatatagctatgaaaaattactgcgccaggctagagctccaagcatgtttttacaatccttcaaaaattttgtttctttgtgtgtgtatggtgatgataacttaattagtgttcatgaatatgtcaagccttactttagtggttctaaattgaaaagctttctagctggtcaaatatcaccactactgatgg

SEQ ID NO: 142322 - DNA, 257 bp, Glycine max
cggctcgagctcgagccgtggagatgataatttaattagtgttcatgagtatgttaagccatattttagtggttctaaattgaaaagtttcctagctagtcataacatcaccattactgatggaattgacaaaactagtgcaactttacagtttagaaagttgtcagagtgtgattttcttaaaagaaattttaagcaaatgtccaatgttttgtgggtagctcctgaagacaaagctagtttgtggtcacaagtac

SEQ ID NO: 142323 - DNA, 255 bp, Glycine max
attttcttttccactcttagtttatttcctgaacactctccgatttgatatatgacttcgtgtcagatttaaacttcttctgtgtctttctcagttctctgttcaatttcaagttcaagctggtgaactcttggattagtgctcccactctcctatctggtataggacttcgtgggtagacttttctatttctctcctttctttcactttcttcttctcacttatccgcattgccgttcaaagtggtcttatttg

SEQ ID NO: 142324 - DNA, 259 bp, Glycine max
gaaatctggtgtctatgttccactgcctacaaaaactaatttggtggaaactcctaaggaatggcaactggatctaccttgtgacaaaattcctagtgtcttgactacaactgatgagagattggtaggcacagaacatgagggatatgatccttttcttggtggaattcaaaaatatgccactcccatgatgcccctagatgaagaaattctttctaaggttgcacaagatatggttgaggaatggttcgattgtgtt

SEQ ID NO: 142325 - DNA, 259 bp, Glycine max
ctgagtaagggcaacgatattctgtgttgcgattatgctagttttgatggtttgattaccaagcaagttatgagcaagatggcagaaatgataaacagtctttgtggtggtgatgaaaaattgatgcgtgaaaggacacatttgctgttggcttgttgttcaaggatggcaatttgtaagaaagatgtttggagagttgaatgtggaatcccttctggatttccgctcacagttatttgcaatagcatttttaatgaga

SEQ ID NO: 142326 - DNA, 254 bp, Glycine max
ctcgagccgctcgtgccgttctggtctacacacgagagaaatcttgctttgacagaagaggcaaagatggctctgattagaaatagaggtattcctgctgatgttcttgcaaagcgagctcatgaatttgaaaaacatgttgctcatgaaagcctcaaggatcaaattcctgctgttgacaagttgtattctactaaggttaataagtttgcaaaaattctgaaccttagacaaagtgttgttggtgatcttaa

SEQ ID NO: 142327 - DNA, 254 bp, Glycine max
gtctatgttccactgcctacaaaaactaatttggtggaaactcccaaggaatggcaattggatctaccttgtgacaaaattcctagtgtcttgactacaactgatgagagattggtaggcacagaacatgagggatatgatccttttcttggtggaattcaaaaatatgccactcccatgatgcccctagatgaagaaattctttctaaggttgcacaagatatggttgaggaatggtttgattgtgttgatga

SEQ ID NO: 142328 - DNA, 255 bp, Glycine max
tattgaccttctcggtggaggaatcttagtggacaaaactggagattggatcacacttatacaaaattctccaattagtaacttgttgagagttgctgcttggaagaaaggctgtttaatggtcaagattgtgatgtctgggaatgcagcagtcaaaaggagtgattgggcctcattggtacaagtgtttttaacaaacagcaacagtacagagcattttgatgcatgtaagtggacaaaatcagaaccacattc

SEQ ID NO: 142329 - DNA, 256 bp, Glycine max
  unsure (1)..(256): unsure at all n locations
cctcagtccatttcacagcaaactgtttggaatcaaatggcaacagtgagaacaccattgaattttgattctagcaagcagagcttttgtcaattttctatcgaccttctcggtggaggaattttagtggacaaaactggagattggatcacacttatacanaattctccaattagtaacttgttgagagttgctgcttggaaagaaggctgtttaatggtccagattgtgatgtccgggaatgcaacaatccaaa

SEQ ID NO: 142330 - DNA, 256 bp, Glycine max
ctgaagacaaggcgagtttatggtcacaacttcattatgtttcgtgtaataatctggaaatgcaagaacgctatcttgtcaatctcgtaaatgtgttacgggaattgtatttgcacagtccagaggaagctcgccaattgagaaggaaagctctctctcgtattgaatggttgcaaaaagctgatgtgcctaccatagcacagattgaagagttccattcgatgcagaggatgatgaatgctcctgattcaaatga

SEQ ID NO: 142331 - DNA, 258 bp, Glycine max
gtaagggcaacgatattctgtgttgcgattatgctagttttgatggtttgattaccaagcaagttatgagcaagatggcagaaatgataaacagtctttgtggtggtgatggaaaattgatgcgtgaaaggacacacctgctgttggcttgttgttcaaggatggcaatttgtaagaaagatatttggagagttgaatgtggaatcccttctggatttccgctcacagttatttgcaatagcatttttaatgagatgc

SEQ ID NO: 142332 - DNA, 260 bp, Glycine max
ggaggaggagctggtgcaaagaatgctattctcatgaatatgccaaatgctgttctttcaatgtggagatattttgttggagatctcgtctttgaagtttctaagatgacttctccctacattaaatgtacagtctctttcttcatagcatttggaaatttggctgatgacaccatcaattttgaggcttttccccacaagttggtgcagtttggagagattcaggaaaaagttgtattgaaattttcaccagaggaatt

SEQ ID NO: 142333 - DNA, 258 bp, Glycine max
gtgttctgatgcatggagtttggaatttttgaagcgtaccggatttcattgtgatatcatttgtgtcactgggtggactgccaccccaatgcaggatgttcaggttacaattgattggtttatttcctctcaggaatgtgttcccagaacctattgtgttttaaatccacaaaatccttttgtgttaaataggtgggatgggaaaactgactttcccccagggcacttcccgaagtgttaagagaatgcctctttcta

SEQ ID NO: 142334 - DNA, 255 bp, Glycine max
tgccagttctgatatttacaccatctgctctcaagactgtgaattatggaatcctgcttgcacaaaagcaatgactatgtcatttaatccaaacccgtgttctgatgcatggagtttggaatttctgaagcgtaccggatttcattgtgatatcatttgtgtcactggatggactgccactccaatgcaggatgttcaggttacaattgattggtttatttcctctcaggaatgtgttcccaggacctattgtgt

SEQ ID NO: 142335 - DNA, 254 bp, Glycine max
gcttttccccacaagctggtgcagtttggagagattcaggaaaaagttgtattgaaattttcacaagaggaatttcttacagcttggtcaactcaggtgcgtcctgcaacaactctgttggctgatgggtgtccatatttgtatgcaatggtgcatgatagttcagtgtctacaataccaggtgattttgtcattggtgtcaagttgacaaccataaacaatatgtgtgcatatgggctcaatcctggtatttc

SEQ ID NO: 142336 - DNA, 258 bp, Glycine max
gtggagtattttggaaggatgtcttacgttgctcataacgttaatcagccccaagagaaagatttgttggagggaaatttttcctttgatattaaatctcgctctagattgcaaaaagtttcctctacaaaagcacaatttgttagtggaaaaaccttcaaatatgatataattggtgctggttcacattcttcacaagattttcctgaaaaggaagatcaagataaacccaaaaagattgatgccagattgagacaa

SEQ ID NO: 142337 - DNA, 258 bp, Glycine max
ctcgagccgctcgagccggatatttttcctttgatattaaatctcgctctagattgtaaaaagtttcctctataaaagcacaatttgttagtggaaaaaccttcaaatatgatataattggtgctggttcacattcttcagaagattttcctgaaaaggaagatcaagaaaaacccaaaaagattgatgccagattgagacaaagaatagatcctcaatacaatgaggttcaggctcagatggaaacaaatttgttta

SEQ ID NO: 142338 - DNA, 253 bp, Glycine max
atttcttacagcttggtcaactcaggtgcgtcctgcaacaactctgttggctgatgggtgtccatatttgtatgctatggtgcatgatagttcagtgtctacaataccaggtgattttgtcattggtgttaagttgacaaccataaacaatatgtgtgcatatgggcttaatcctggtatttcaggttctcgtcttttgggcaccattcctcagtccatttcacagcaaactgtttggaatcaaatggcaaca

SEQ ID NO: 142339 - DNA, 255 bp, Glycine max
gaaaaattgatgcgtgaaaggacgcacctgctgttggcttgttgttcaaggatggcaatttgtaagaaagatgtttggagagttgaatgtggaatcccttctggatttccgctcacagttatttgcaatagcatttttaatgagatgctcattagatatagctatgaaaaattactgcgccaggctaaagctccaagtatgtttttacaatccttcaaaaattttgtttctttgtgtgtgtatggtgatgataac

SEQ ID NO: 142340 - DNA, 254 bp, Glycine max
cgatatagctatgaaaaattactgcgccaggctaaagctccaagtatgtttttacaatccttcaaaaattttgtttctttgtgtgtgtatggtgatgataacttaattagtgttcatgaatatgtcaagccttactttagtggttctaaattgaaaagctttctagctggtcataatatcaccattactgatggtattgacaaaactagtgcaactttgcaatttagaaagttagcagattgtgattttctcaa

SEQ ID NO: 142341 - DNA, 252 bp, Glycine max
ggacaaaatcagaaccacattcctgggaattgatcttcccaatagaggtatgtggtcctaataatggttttgcaatgtggagttctgagtgggcaaatcaaacttcatggcatttgagtttccttattgacaatcccaaacagtctagagtttttgatattctcttgggaatctctcaagattttgaaattgctggtaatactcttatgccagctttttctgttccacaggctactgccagatcttctgaaa

SEQ ID NO: 142342 - DNA, 255 bp, Glycine max
gtgagaggggcagtagccgagattccgtgagttgcaaaaatgaagacgattctttccaccgagaccatgaacatcccggacggcgtgagcatcaaagttcatgccaaggtcatcgaagttgagggcccccgcggaaaattggtgcgagacttcaagcatttgaatctcgattttcagctcattactgacgaaaacggtaaaagaaagctgaaaatcgacgcgtggtttggttctcggaaaacatccgccgccatt

SEQ ID NO: 142343 - DNA, 255 bp, Glycine max
gtctctttcttcatagcatttggaaatttggctgatgataccatcaattttgaggcttttccccacaagctggtgcagtttggagagattcaggaaaaagttgtattgaaattttcacaagaggaatttcttacagcttggtcaactcaggtgcgtcctgcaacaactctgttggctgatgggtgtccatatttgtatgcaatggtgcatgatagttcagtgtctacaataccaggtgattttgtcattggtgtc

SEQ ID NO: 142344 - DNA, 172 bp, Glycine max
gcagaaatgataaacagtctttgtggtggtgatgaaaaattgatgcgtgaaaggacgcacctgctgttggcttgttgttcaaggatggcaatttgtaagaaagatgtttggagagttgattggggattccttctggatttccgctcaagttatttgcaatagcatttttaat

SEQ ID NO: 142345 - DNA, 256 bp, Glycine max
aattgaaaagctttctagctggtcataatatcaccattactgatggtattgacaaaactagtgcaacgttgcaatttagaaagttagcagattgtgattttctcaagagaaactttaagcagatgtctaatgttttgtgggtggctctgaggacaaggcgagtttatggtcacaacttcattatgtctcgtgtaataatctggaaatgcaagaagcttatcttgtcaatctcgtaaatgtgttacgggcattgtat

SEQ ID NO: 142346 - DNA, 255 bp, Glycine max
gagaaactttaagcagatgtctaatgttttgtgggtggctcctgaggacaaggcgagtttatggtcacaacttcattatgtttcgtgtaataatctggaaatgcaggaagcttatcttgtcaatctcgtaaatgtgttacgagaattgtatttgcatagtccagaggaagctcgccaattgagaaggaaagctctctctcgtattgaatggctgcaaaaagctgatgtgcctaccatagcacagattgaagagtt

SEQ ID NO: 142347 - DNA, 241 bp, Glycine max
caggtatagcattggcctgtgctatgaatagttcttttagggggcgcgccagttctgatatttacaccatctgctctcaagactgtgaattgtggaatcctgcttgcacaaaagcaatgactatgtcatttaatccaaacccgtgttctgatgcatggagtttggaatttttgaagcgtaccggatttcattgtgatatcatttgtgtcactgggtggactgccaccccaatgcaggatgt

SEQ ID NO: 142348 - DNA, 256 bp, Glycine max
gtttcatgtaacaatttggaaatgcaagaagcttatcttgttaacctggttaatgtgttgcgtgagttgtacctgcacagtccagaagaagctcgtcaattgagaagaaaggctctctctcgtattgagtggttgcaaaaagctgatgtgcccaccatagcacaaattgaagaatttcattcaatgcagaggattatgaatgctcctgattcaaatgataatattgatcttttgttgagcatcgatttgttgggtc

SEQ ID NO: 142349 - DNA, 256 bp, Glycine max
ttagaaagttagcagattgtgattttctcaagagaaactttaagcagatgtctaatgttttgtgggtggctcctgaagacaaggcgagtttatggtcacaacttcattatgtttcgtgtaataatctggaaatgcaagaagcttatcttgtcaatctcgtaaatgtgttacgagaactgtatttgcacagtccagaggaagctcgccaattgagaaggaaagctctctctcgtattgaatggctgcaaaaagctga

SEQ ID NO: 142350 - DNA, 254 bp, Glycine max
gtcatttaatccaaacccgtgttctgatgcatggagtttggaatttttgaagcgtaccggatttcattgtgatatcatttgtgtcactgggtggactgccaccccaatgcaggatgttcaggttacaattgattggtttatttcctctcaggaatgtgttcccagaacctattgtgttttaaatccacaaaatccttttgtgttaaataggtggatgggaaaactgactttcccccagggcacttcccgaagtg

SEQ ID NO: 142351 - DNA, 252 bp, Glycine max
ttcaagttcaagctggtgaaatcttggattagtgctcccactctcctatctggtataggacttcgtgggtagacttttctatttctctcctttctttcactctcttcttctcactgatccgcattgccgttcaaagtggtcttatttgaaaaacacttgggcgctggtgcaaatgtttgcttcgttaattttctctggagacaacaggctcactgagaaaacaatttttacttgcagagatttggacatctt

SEQ ID NO: 142352 - DNA, 250 bp, Glycine max
tgaatgtggaatcccttctggatttccgctcacagttatttgcaatagcatttttaatgagatgctcattagatatagctatgaaaaattactgcgccaggctaaagctccaagtatgtttttacaatccttcaaaaattttgtttctttgtgtgtgtatggtgatgataacttaattagtgttcatgaatatgtcaagccttactttagtggttctaaattgaaaagctttctagctagtcataacatc

SEQ ID NO: 142353 - DNA, 252 bp, Glycine max
tgagggttttcctcatgtgctttcacgcaaaaatggtgaaaaaggcaaaaggagatttgtttctggggatggtgaagagatgacattgattccgggaaccagtgttgaagaggcttacaacaagctaatagttgaacttgagaaaagtgttcctacattggttggcattgaatgtcctaaggatgagaaacttcctcgtcgcaaaatttttgacaaacctaagacgcgctgcttcactattctccctatgga

SEQ ID NO: 142354 - DNA, 252 bp, Glycine max
atttcattgtgatatcatttgtgtcactggatggactgccaccccaatgcaggatgttcaggttacaattgattggtttatttcctctcaggaatgtgttcccaggacctattgtgttttaaatccacaaaatccttttgtgttaaataggtggatgggaaaactgactttcccccagggcacttcccgaagtgttaagagaatgcctctttctatagggggaggagctggtgcaaagaatgctattctcat

SEQ ID NO: 142355 - DNA, 252 bp, Glycine max
gccagttctgatatttacaccatctgctctcaagactgtgaattgtggaatcctgcttgcacaaaagcaatgactatgtcatttaatccaaacccgtgttctgatgcatggagtttggaatttttgaagcgtaccggatttcattgtgatatcatttgtgtcactgggtggactgccaccccaatgcaggatgttcaggttacaattgattggtttatttcctctcaggaatgtgttcccaggacctattgt

SEQ ID NO: 142356 - DNA, 254 bp, Glycine max
ttagcagattgtgattttctcaagagaaactttaagcagatgtctaatgttttgtgggtggctcctgaggacaaggcgagtttatggtcacaacttcattatgtttcgtgtaataatctggaaatgcaagaagcttatcttgtcaatctcgtaaatgtgttacgggaattgtatttgcacagtccagaggaagctcgccaattgagaaggaaagctctctctcgtattgaatggttgcaaaaagctgatgtgcc

SEQ ID NO: 142357 - DNA, 279 bp, Glycine max
tgcaatttttgctagtggaagtccatttgatcctgtagaatacaagggcaaagtgtactattctggccaggccaacaatgcttacattttcccgggctttggtctggggttggtaatctcaggagcaatcagagtgcatgatgatatgcttctagcagcttcggaagccttggctaaactagtgtccaacgagaactacgaaaagggcttgatttatccaccattctctaacatcagagaaatttcagctaacatagcagcaagtgtagctggcaaggc

SEQ ID NO: 142358 - DNA, 276 bp, Glycine max
ggcagaaagcaagctcatcctagagttttaaaaatggcagcagcctcctccatggctctctcttccccatccttggctggcaaggccgtgaagctgggcccatcagcccccgaagtcgggagggtcagcatgaggaagaccgtcaccaagcaggcctcctccggaagcccatggtacggcccagaccgcgtcaagtacttgggcccattctctggcgagcccccgtcctacctcactggcgagttcccaggtgactacggctgggacactgctggg

SEQ ID NO: 142359 - DNA, 276 bp, Glycine max
cttgttcaccaattaagctttcaagagacaaactgctttgaaaaatgggatccaaggttgttgcatccgttgcccttctcctctccatcaacattcttttcatttccatggttagctccagcagccactacgatccacagccccaaccttctcacgtcactgctcttattacacgacctagttgtccggatctgagtatttgcctcaatattttaggcgggtctctaggaaccgtggatgattgttgtgccctcatcggtggtcttggtgacattg

SEQ ID NO: 142360 - DNA, 272 bp, Glycine max
cacaagctctggtggctatcataccatctagcggtgccccaaatgcatatacttcttccattgcaaatcccggaaccacactggcagagggagccatctcttataatcactcaggattgacggctacccatcagagcactgaggtcaccatctatgctaccctcactcttcccagtggtaccaccactttggtccacctttggaacgatggtcctgtgtcttctggtacccctgcaatgcattctatgacttcttccaacacccaatccaag

SEQ ID NO: 142361 - DNA, 273 bp, Glycine max
gcttgccaagtggtatggtcctgacagaaggatcttcttgcctgagggtctcttggaccgatctgagatcccagagtacttgaccggagaagtccccggagactatggttatgacccatttggtcttagcaagaagccagaagatttttccaaatatcaggcatttgaattgattcacgccagatgggcaatgcttggtgctgctggattcatcattcccgaggccttcaacaaatatggagcaaactgcggtcctgaggctgtttggttcaa

SEQ ID NO: 142362 - DNA, 273 bp, Glycine max
gcctgccgcttcatgagatggaaggaggaagaacttactatctgggaatgtttttgggtggggcttacgaggaggcgctcggtggagtccacaacttgttcggcggccccagcgtggtcagggtgtcgcagagcgatggccctcacagctttgcggtcacgcgtgccgtgccggggccatcctgtggagatgttcttcgagtgatgcagcaccagcccgagctcatgttcgagacactcaagcaccgcgcgcaggagtatgtcagccacgaca

SEQ ID NO: 142363 - DNA, 269 bp, Glycine max
gtgaaggatttcattcatgacattggtgagaagattgaggaagctattgggtttgggaagccaactgctgacgttactgcgattcacattccatcgattaatcttcacaaggcagatcttgttgttgatgtgctcatcaagaacccgaatccggtgccaatccctctgattgacatagattacttggttgacagtgatgaaaggaagctagtttctggattgataccagatgcgggtaccatcggtgcacatggagagcagactgtcaa

SEQ ID NO: 142364 - DNA, 269 bp, Glycine max
gcttgagtcatcaacaattgaagtcccttccgttttcatctgcccaatttcacttgagccaatgcaagacccggtgaccctttgcacgggacaaacctacgaccgttccaacatcctcaaatggttctccctcggtcacaacacgtgtcccacgacaatgcaagagctttgggatgattctgtcacaccaaacaccactctttaccacttcatactctcttggttctcgcagaagtatttggtcatgaagaagaagctcgaggacgtgc

SEQ ID NO: 142365 - DNA, 277 bp, Glycine max
cgcatttgagtacatacttcagtctgggggagtacagaaagaaaaggactatccatacaccgggagagatggcacctgcaaatttgacaaaaccaaagttgcggctactgtatctaattacagtgtggtttcccttgatgaagaacaaattgctgcaaacctagtaaagaatggccctcttgcagttgctatcaatgcagtttttatgcagacatatgttggtggcgtctcatgcccatacatctgtgggaagcatttggatcatggggttcttcta

SEQ ID NO: 142366 - DNA, 276 bp, Glycine max
cggctcgagcatgattgtggcttccaccaaacctctggttccagtctgcaccagttcccgttcccccacacccaaagtccccattctccaaatttcactccccaaagccccaaccttgaaactgaaactcccgatttcaaagccccagatgctgtccctccttggagggatagcaccactggtcttggccagaccctccctcgcagaagaaattgagaaagcagcactctttgacttcaacctcacccttcccataataatggtggagtttctgct

SEQ ID NO: 142367 - DNA, 277 bp, Glycine max
ccaatctccaaacccgtggcacgtgtcattctcgtatgccagagccctccaaaacactgccttgaagacatggggaggccgcccagagaacgtgaaggcagcacaagatgcactcgcattccgtgccaagtccaactcactcgctcagcttgggaagtacactggtgagggtgaatccgaggaagccaagaaggagttgttcgtcaaaagctactcctactaagatgtttgcagtgaatatgatacttgttaggcagcaacaccagcagttacagta

SEQ ID NO: 142368 - DNA, 272 bp, Glycine max
gtctctctctctctctctcgatcaatcatggctttgcccaatcagcaaaccgtcgattaccctagtttcaaactcgtcatcgtcggtgacggtggtacaggaaagacaacgttcgtgaaaaggcatcttaccggtgaatttgagaagaaatacgaaccgaccattggagtggaggttcacccattggatttcttcacaaactgtggaaagattcgcttctactgttgggatactgccggacaagagaagtttggtggcctcagggatggata

SEQ ID NO: 142369 - DNA, 275 bp, Glycine max
gctgctgcaaaacctagggttgagccttttgctcaggttttcagcgcttctttcttacaatggttctacagaacgatattgatttgctgaatcctccagctgagttggagaagagaaagcacaacccaagcgtcttgtgcagtcaccaaactctttcttcatggatgttaagtgccagggctgcttcaacataacaactgtgtttagccactctcagactgttgtggtttgcggaaactgccagactgtgttgtgccaaccaacaggcggacggg

SEQ ID NO: 142370 - DNA, 275 bp, Glycine max
cgaggagtcttacaaagacagcaccctaattatgcagcttctgagggacaatctcaccctgtggacttctgacatccctgaagaaggagctgaggaacaaaaggtggattctgccagagctgctggaggtgacaatgcatagtgaagcaggtattggctaggaatttgtggtgtcatacgagaaggctagtctttctcttgataatttaccattaggatgtagtaatagaacatggagttggtctctagaaaatcaccatagggctttgtgagcc

SEQ ID NO: 142371 - DNA, 271 bp, Glycine max
cacactatggccacctcaagcgccaaatcagtccatgatttcaccgttaaagatgccaagggaaatgatattaatcttggtgactacaaaggaaaggtccttatcattgtcaatgttgcctcacaatgtggcttgactaattcaaattacactgagctcagtcagttgtatgagaaatacaaacagaaaggtctggaaattctggcatttccatgcaatcagtttggggcacaggagcctggatctaatgaacagatacaagagtttgttt

SEQ ID NO: 142372 - DNA, 269 bp, Glycine max
taattgcaagaatggcacttcgttgcttggtgatgtccctttctgttctcttcactcttggtcttgcgagagaaagccatgccagagacgaagatttttggcatgctgtttggccaaacactcccattccaagttcattgcgagatcttctaaagcctggccctgcaagtgttgaaatcgatgatcaccctatgcaaattgaagaaacacagtacccgaaaaccttcttctataaagaagaccttcatccaggcaaaacaatgaaagta

SEQ ID NO: 142373 - DNA, 270 bp, Glycine max
gcaaaagcaagaagaactagtctaagcagaaatggcctcttcagtgatggcatctgtggccctcaaacctgcccctttcactgttgagaagtcctcagttagaggccttccctccctctcaaggaactcctcttcattcagagttgtggccagtggtggcaagaagatcaagactgacaagccttatggaattaatggtggcatggctttgagggaaggagttgatgcatctggcaggaaaggaaagggaaagggcgtttaccagtttgt

SEQ ID NO: 142374 - DNA, 271 bp, Glycine max
ctctactctactgcttcaccttctgctctagaaaattcagtggtgatacatggcttcggctactctctctgtagccaaaccagcccttcaggcaaatgggaaaggcttctctgaattctctggcctccgcagctcatcaggcttccttcccttttctagaaaatcttcagaggatttccattctgtcattgccttccagacctatgcagttggaagcagtggaggatacaagaagggtgtgacagaagcaaaactgaaggttgccataaac

SEQ ID NO: 142375 - DNA, 272 bp, Glycine max
ctagcattcactcaagagatcaataatgggatctggggccggcaatttcctcaaggtgcttctcaaaaacttcgatgtgcttgctgggcctgtcattagtcttgtttatcctctatatgcttcaattagggcaattgagagcaagtctcctattgatgatcagcagtggctcacttactgggttctctactccttgatcaccctctttgaacttacttttgctaaagtccttgagtggattccaatatggccctatgcaaagctgattgcaa

SEQ ID NO: 142376 - DNA, 273 bp, Glycine max
ctggaacatgattctgctgcaaaggttacaggcatgcttctggagatggaccagcctgaagttttacatctgattgagtcaccagatgctctgaaggcaaaagttgctgaagccatggatgtgttgagaaatgttgctcaacagcaaaccaacccagctgatcaactagcctcactctctctcaatgacaatcttgtgtcttagattccgttagtcatttgacaagaatctgtacaccagttatttctatcccgtacgctacccaccagttta

SEQ ID NO: 142377 - DNA, 271 bp, Glycine max
ctcgagccgtatctctctgttctcttctacctctcaagtttttgaagtatagagatggcagagacattcctatttacctcagagtcagtgaacgagggacaccctgacaagctctgtgaccaaatctctgatgctgtcctcgacgcttgcctcgaacaggacccagacagcaaggttgcctgcgaaacatgcaccaaaaccaacttggtcatggtcttcggagaaatcacgaccaaggccaatgttgactacgagaagatagtgcgtgaca

SEQ ID NO: 142378 - DNA, 273 bp, Glycine max
aaccctctccccacgcgcccttctctctccctcacgcgcccctcgcacactcgccgctccttcgtcgtcaaagcctcctccagcgagcttccgctagttggaaacaccgcaccggatttcgaagcagaggctgtgtttgaccaggagtttatcaacgtgaaactatctgattacattgggaagaaatatgttgtgctcttcttctacccgttggacttcacttttgtatgtcccacagaaatcactgctttcagtgaccggcatgcagagttc

SEQ ID NO: 142379 - DNA, 272 bp, Glycine max
ctcgagccgtgggcgtaaagcgtctgtaggtggctttttaagttcgccgtcaaatcccagggctcaaccctggacaggcggtggaaactaccaagctggagtacggtaggggcagagggaatttccggtggagcggtgaaatgcgtagagatcggaaagaacaccaacggcgaaagcactctgctgggccgacactgacactgagagacgaaagctaggggagcgaatgggattagataccccagtagtcctagccgtaaacgatggatact

SEQ ID NO: 142380 - DNA, 270 bp, Glycine max
gttttgattccaagaactaagggttttgtttctgcagtaagtcatatgcgctcatttgttcctgccatttatgatgtaacagtagccatccctaagagttcccctgctcctacaatgctaagactcttcaagggacaaccttcagtggtgcatgttcatatcaagaggcatttgatgaaggaactgccagatacagatgaggctgttgctcaatggtgtcgagatatatttgtggccaaggatgctttgttagacaaacatatggctgag

SEQ ID NO: 142381 - DNA, 270 bp, Glycine max
gctcgtttgattctgatttccagtacgaatacgaaccgtgaaagcgtggcctatcgatcctttagtccttcggaatttgaagctagaggtgtcagaaaagttaccacagggataactggcttgtggcagccaagcgttcatagcgacgttgctttttgatccttcgatgtcggctcttcctatcattgtgaagcagaattcaccaagtgttggattgttcacccaccaatagggaacgtgagctgggtttagaccgtcgtgagacaggtt

SEQ ID NO: 142382 - DNA, 269 bp, Glycine max
caggtgtcctaagatgagctcaacgagaacagaaatctcgtgtggaacaaaagggtaaaagctcgtttgattctgatttccagtacgaatacgaaccgtgaaagcgtggcctatcgatcctttagtccttcggaatttgaagctagaggtgtcagaaaagttaccacagggataactggcttgtggcagccaagcgttcatagcgacgttgctttttgatccttcgatgtcggctcttcctatcattgtgaagcagaattcaccaagtg

SEQ ID NO: 142383 - DNA, 271 bp, Glycine max
gccttggcccccggtggagtgcgaattggggcccctgccatgacttctaggggtttggttgaaaaggactttgagcagattggtgagttccttcatcgtgctgtgactctcacactggagatccagaaggagcatggcaaacttctcaaggatttcaacaagggcctcgtcaacaacaaggccattgaagatctcaaagctgatgttgagaagttctctgccacatttgacatgcctggcttcctggtatctgaaatgaagtacaaggatt

SEQ ID NO: 142384 - DNA, 270 bp, Glycine max
aaaggattctacccgccgctcgatgggaattgcgcttcaaggcgtctcgtagggctaatccgcctcacgagggtcaccaacggcacgtgcctttggggggccgaggccccctactgctggtcggcaaacggacggcgggcgcacgcgtcgcttctagcccggattctgacttagaggcgttcagtcataatccaacgcacggtagcttcgcgccactggcttacctaccaagcgcgatgaccaattgtgcgaatcaacggttcctctcgt

SEQ ID NO: 142385 - DNA, 272 bp, Glycine max
ggcgcactccaagtcacaatggagcatttcaacaaagccaaagccgtgaagctccgcagccacctcggcaagtacctcatcgccgacgaggacaaactccgtcaaagcaaacgaggctcaacaaaaaaggcaatatgggaaattgaactaataaacggaaagaaccaccacgtgcggctgaaaagctccaacggccgttacctaacggcgacggacgcgccgtttctcttaggcatgacggggaacaaggtggtgctagcgaatttcgacaa

SEQ ID NO: 142386 - DNA, 268 bp, Glycine max
gctagctatatgcttaacacatgcaagtcgaacgttgttttcggggagctgggcagaaggaaaagaggctcctagcgtgaaggttgcttgtctcgcccaggaggtgggaacagttgaaaacaaagtggcgaacgggtgcgtaatgcgtgggaatctgccgaacagttcgggccaaatcctgaagaaagctaaaaagcgctgtttgatgagcctgcgtagtattaggtagttggtcaggtaaaggctgaccaagccaatgatgcttagc

SEQ ID NO: 142387 - DNA, 269 bp, Glycine max
gagcatcatggcctcgagagcagtgctattgttggctatgtgtgtgcttccggccatggttgtggccattcgcccagcaaagaaccctttttgcgtgaagggtcgcgtctactgtgacccttgccgtgctggttttgagacctcagcaaccacctacattgccggtgctgagattatgttgcaatgcaagagcagggttagcaacgaggttgtgtacaccaagaaggggtacactgactcaactggagcatacacaatgtacgtggacg

SEQ ID NO: 142388 - DNA, 264 bp, Glycine max
tgaagaccgacttctggtctatgaatttatgcctcgtggtagcttggagtatcacttgttcatgagaggctcgtattttcaacctctttcttggggtctccgtttgaaagttgctcttggcgctgccaaagggcttgcatttcttcacagtgctgaaacaaaagtgatataccgagatttcaagacctcaaatgtcttgctggattcaaattataatgcaaagcttgctgatttggggctggcaaaggacagaccaacacgtga

SEQ ID NO: 142389 - DNA, 264 bp, Glycine max
cgttatcttcttcttttgttgtttgtgtgtttgttttttctctcacctgaaaatgtcttgctgcggtggtaactgtggttgcggaagcgcctgcaagtgcggcaacggctgcggaggctgcaagatgtacccagacttgagctacaccgagtcaaccaccaccgagaccttggtcatgggagtggcaccagttaaggctcaattcgagagtgctgaaatgggtgttcccgctgagaacgatggctgcaaatgtggagctaactg

SEQ ID NO: 142390 - DNA, 264 bp, Glycine max
tctagagctaatacgtgcaacaaaccccgacttctggaagggatgcatttattagataaaaggtcaacacaggctctgcctgttgctttgatgattcatgataactcgtcggatcgcacggcctttgtgccggcgacgcatcattcaaatttctgccctatcaactttcgatggtaggatagtggcctaccatggtggtgacgggtgacggagaattagggttcgattccggagagggagcctgagaaacggctaccacatcca

SEQ ID NO: 142391 - DNA, 265 bp, Glycine max
gcaataataagagatatgtgatgtggtgaaatttgtgtttaacagaagtggagcaagggaaagcaaaaggagaaggtgaataacatggtgctgtttgatcagggcacctatgataagctcctttctgaagctcccaaattcaagctcatcactccttccattctttctgatcgtttgaggattaatggatcacttgcaaggaaggctataagagaattgatggctaggggttcaatcaggatggtgtctgcccatgcaagccagc

SEQ ID NO: 142392 - DNA, 267 bp, Glycine max
aaaatggaaaagatagtagaatttgcggaacataaagattatatcaggagtttagctgttcatcctgtcctgccatatgtaatatcagcttcagatgatcaggttctaaaattgtggaattggaggaaaggttggtcttgttatgagaactttgaagggcactcacattatgtgatgcaagtggcattcaaccctaaggatccatctacctttgctagtgcatcccttgatggcaccttgaagatctggagccttgattcctctgct

SEQ ID NO: 142393 - DNA, 261 bp, Glycine max
agttatagtttgtttgatggtatcttctactcggataaccgtagtaattctagagctaatacgtgcaacaaaccccgacttctggaagggatgcatttattagataaaaggtcaacacaggctctgcctgttgctttgatgattcatgataactcgtcggatcgcacggcctttgtgccggcgacgcatcattcaaatttctgccctatcaactttcgatggtaggatagtggcctaccatggtggtgacgggtgacggag

SEQ ID NO: 142394 - DNA, 267 bp, Glycine max
aaaacaagtagttgagaactaagaagaaggaaatggcttcctcaatgatctcctccccagctgttaccaccgtcaaccgtgccggtgccggcatggttgctccattcaccggcctcaaatccatggctggcttccccacgaggaagaccaacaatgacattacctccattgctagcaacggtggaagagtacaatgcatgcaggtgtggccaccaattggcaagaagaagttcgagactctttcctacttgccagacctcgatgatg

SEQ ID NO: 142395 - DNA, 264 bp, Glycine max
cagaagatgtgaagagcagatcagaggtgtaccacggggacgaaatgtgccaagtgaagtccaaggagcttctcaaggaaatcgccctccccaacggccttcttcccctcaaggacatggaggagtgcggctacgacagacaaaccggcttcgtctggctcaaacaaaagaagagttacacccacaagttcgacaagatcggaaagcttgtctcctacgcgcccgaggtaactgctcatgtccaacaaggtaaaattaccaaac

SEQ ID NO: 142396 - DNA, 262 bp, Glycine max
ctcgcaaaccaattttcacattctttgtattgagttacttgagctagccgcaaccatggaaccatccaaaaactcgcagaagccctcacatttccatgactacctccccgtgatggcgaacaagctcggcggggacggcctcatcgatgagctctgcaacggcttcaacctgctcaaggactccgacagaggggtgataacctttgagagcctcaagaggaacgctgctctgctgggcctgcaaggactcggcgatgaggac

SEQ ID NO: 142397 - DNA, 260 bp, Glycine max
attttgttgtagacttataatattagtcaatcaaatccgttgaattcttcttgttcatatcgaaatgaataaaaattgataaggagttggtcaatgatattcgagcatgcacttgttttgagtgcctatttattttctataggtatatatgggttgatcacgagccggaatatggttagagcccttatgtgtcttgaacttatactgaatgcagttaatataaatctcgtaaccttttctgatttttttgatagtcgaca

SEQ ID NO: 142398 - DNA, 254 bp, Glycine max
aacgttttggaggatccattgacgcggctgcaattttggattttgttgattcgggtcatgatttgatcgttgctgctgatagcaatgcatctgatttaatcagggaaatagccaccgagtgtggagtggactttgatgaggatcctgctgctgtggttgtggatcattcggcatatgcagtctctgctactgaaggagatcatacattgattgctagtgatgattttatcaagtctgacgtcatatttggaagc

SEQ ID NO: 142399 - DNA, 265 bp, Glycine max
gcaaaggattctacccgccgctcgatgggaattgcgcttcaaggcgtctcgtagggctaatccgcctcacgagggtcaccaacggcacgtgcctttggggggccgaggccccctactgctggtcggcaaacggacggcgggcgcacgcgtcgcttctagcccggattctgacttagaggcgttcagtcataatccaacgcacggtagcttcgcgccactggcttttcaacctagcgcgatgaccaattgtgcgaatcaacggttc

SEQ ID NO: 142400 - DNA, 260 bp, Glycine max
gaatgcagaatggacagaagattacattccctggtgaagctgatgaagcacctgatacagtcactggggatattgtctttgtcctacagcagaaggaacacccaaagttcaaacgaaaggccgatgacctttttgtagaacacacattgtctcttactgaggcactgtgtggcttccagtttgtgctggctcacttggatggccggcagcttcttatcaaatctaaccctggggaggttgttaagcctgattcatacaag

SEQ ID NO: 142401 - DNA, 262 bp, Glycine max
gtttatggctaagtggatgtttttctttgatgtggatgagtacatctatgtgcctcccaagagtactattaagtctgtgcttgattcgctctccgagtactctcagttcaccattgaacagatgccaatgagtagcaagctctgcctcactgcggattacggcaagacatataggaaatgggggtttgagaagctagtgtacaaagattcaaagaaagggattagaagagatcgaaaatatgcagtgcaaccaaggagttta

SEQ ID NO: 142402 - DNA, 260 bp, Glycine max
gttcaccaattaagctttcaagagacaaactgctttgaaaaatgggatccaaggttgttgcatccgttgcccttctcctctccatcaacattcttttcatttccatggttagctccagcagccactacgatccacagccccaaccttctcacgtcactgctcttattacacgacctagttgtccggatctgagtatttgcctcaatattttaggcgggtctctaggaaccgtggatgattgttgtgccctcatcggtggt

SEQ ID NO: 142403 - DNA, 262 bp, Glycine max
ctagcttcaagctgcatgtccaattccgtttgatgaagctaatttgtggaaaggccaaagtggacctgagctaaaacagaaaattcaacaacaattcagaaacatcagtgcaatgatggattgtgtaggatgtgagaaatgtcgattatggggcaaacttcaggttcttggtctcggaactgcattaaagattctcttctctgttgatggtcaagaaaactcaagtcatacactgcagctgcaaaggaatgaggtaattgca

SEQ ID NO: 142404 - DNA, 262 bp, Glycine max
ctggatatggtgatgttggcaagggttgtgctgctgcaatgaagcaggctggtgctcgtgtcatcgtgaccgagattgatcccatctgtgcccttcaggctctcatggaaggccttcaggttctgaccttggaggatgttgtttctgaggctgatatctttgtcaccaccaccggtaacaaggacatcatcatggttgaccacatgaggaaaatgaagaacaatgccattgtttgcaacattggtcactttgacaatgagat

SEQ ID NO: 142405 - DNA, 262 bp, Glycine max
aaggattctacccgccgctcgatgggaattgcgcttcaaggcgtctcgtagggctaatccgcctcacgagggtcaccaacggcacgtgcctttggggggccgaggccccctactgctggtcggcaaacggacggcgggcgcacgcgtcgcttctagcccggattctgacttagaggcgttcagtcataatccaacgcacggtagcttcgcgccactggcttttcaaccaagcgcgatgaccaattgtgcgaatcaacggttc

SEQ ID NO: 142406 - DNA, 261 bp, Glycine max
gtttgatccatgggttcttccaggtaaggcagcgtttggagagaaggagtggtacttcttcagtccaagagacaggaagtacccgaatggttcacgaccaaacagagttgcgggttctgggtattggaaagccactggaactgacaaaatcatcaccactgaaggtagaaaagttggcataaaaaaagcacttgttttctacgttggcaaagcacccaaaggctccaaaaccaattggatcatgcacgagtatcgccttct

SEQ ID NO: 142407 - DNA, 260 bp, Glycine max
gctacaatggtggccagtagccggttcagtcctcgccggggagctatcgctcatgtctgctattgcagctggacaacttgttaagagccacatgaaatacaacagatctagcagggatatatctacaattgtccaatgaactggccacagtacacttaaacttgtgtcagagactaatattctaataagcaaaccatcagataaagacataaataacgagaaaaaaattggtattgatgatggtgggggtaaaagataaa

SEQ ID NO: 142408 - DNA, 260 bp, Glycine max
acaaaactcagtttccaattcaccaaactcacaatggttgatctagattggcaaacaaagatggttcactccaacatcatgcctccaatgtcccccaaactctctctcccggatcataacattccaatcccaactttgcaactcccccttcgccaaaacgacatcaccgcagcgtcgtctcctatctgcgctgcatacgacaactaccttcgtctccctgagctcagagccctctgggcctccaaggacttccccaattg

SEQ ID NO: 142409 - DNA, 256 bp, Glycine max
ggtgatagaacactttatgcagatgagattttgaaagatgggttttgcctgaatatgattgatacccctctgtgccctctgaaggttgtgacaaacctgcaggaggctgtgtgggatgctgatatcgtgattaatggcttgccatcaacggaaactcgtgaggtgtttgaggaaattagtaagtactggaaagagagaatcactgtccctgtcattgtatccttggcaaaaggtgtagaggctgaattgggcactg

SEQ ID NO: 142410 - DNA, 161 bp, Glycine max
ggggcaattgctgtaagacgtgtgcggaaagaggacatgcgccatgttgccaaggctactggtgcaacattggtctcaacatttgctgatatggaaggggaggaaacatttgaaccatcttttcttggatatgctgatgaggttgttgaggagcgaatttc

SEQ ID NO: 142411 - DNA, 274 bp, Glycine max
gacatgggaggaggcaatgggcaaaaggcaaagatggctcgcgagaagaacatcgagaagcagaaggccgcctcaaagggaagccagctggattcaaacaagaaagcaatgtcgatccagtgcaaggtgtgcatgcaaacatttatgtgcaccacatcggaagtgaagtgtagggagcatgctgaagccaaacaccctaaatctgatgtttatgcttgttttcctcatctcaaaaagtgaacatattggagagtgcgaatggagaaaactttat

SEQ ID NO: 142412 - DNA, 270 bp, Glycine max
gccggatctgctaaaatacgcttgatccatatcggcctcctcgaccacttgtgggacgacaccgtcgccggcccaaggccggaaaacggtctcggcaagctccgaaaacaccacaccttcactttccgacctagctccggcaaggaaacggagggcgggagcgtgagatcgtacggagacgaatcgtcggaggaagcgacgagagtgacgcgtagtatcatgatcgtgaaaccgcccgggtaccagagtggatcgcctccggttctcccg

SEQ ID NO: 142413 - DNA, 269 bp, Glycine max
tgaatctcagaattctctaaaagagatctttttctgctctttgaagaaagaagggtctttgcttgattttggagatgtctctgctctcagatctcatcaaccttaacctctccgataccaccgagaaggtgatcgcagagtacatatggatcggtggatcaggaatggacctgaggagcaaagcaaggactctcccaggaccagttagcgacccttcagagcttcccaagtggaactatgatggttccagcacaggtcaagtcctggtg

SEQ ID NO: 142414 - DNA, 265 bp, Glycine max
ctcgagccgctcgagccgctttccaccctttatggtgcttattatcgctatcctaaatgatggtactaatatgacaatttcaaaagatcgtgtaaaaccatcacctctgccagatagctggaagctagcagagatatttactactggagttgtgcttggaagttacttggcaatgatgacagttatattcttttgggcggcatacaaaacaaactttttcccgcgagtgtttggagtcccaagtcttgaaaaaactgctctgatg

SEQ ID NO: 142415 - DNA, 264 bp, Glycine max
gataacgcaggtgtcctaagatgagctcaacgagaacagaaatctcgtgtggaacaaaagggtaaaagctcgtttgattctgatttccagtacgaatacgaaccgtgaaagcgtggcctatcgatcctttagtccttcggaatttgaagctagaggtgtcagaaaagttaccacagggataactggcttgtggcagccaagcgttcatagcgacgttgctttttgatccttcgatgtcggctcttcctatcattgtgaacagaa

SEQ ID NO: 142416 - DNA, 268 bp, Glycine max
  unsure (1)..(268): unsure at all n locations
gccacagccacaacacacaaacacaaacccttcgttcctctctcgttcccttcttcaattcgatccaaacacagaatagtacttttttattatgatggccgtggcccgaaaggaaatggaccggatcaagggcccgtggngcccggaggaggacgaggctcttcagaagctcgtggagcngcatgggcccagaaactggtccctcatcagcaggtccattccgggccggtctgggaaatcgtgcaggctccgatggtgcaccagctgt

SEQ ID NO: 142417 - DNA, 265 bp, Glycine max
cccaagccctatacaaccaaaccctaacacacacccatttgattcagtttccatggctagcctcaaggttgcatttttggctgcagtgctctgcatggttgtggtgagtgcacccatggcacatgcagctatcacgtgcgggcaggtgacgaatagcctgatcaattgcatcggttacctccagaacggaggaacgccgccgtcgggatgctgcaacggagtgaagagcctcaatgccgccgccaagaccaccgccgccgccaga

SEQ ID NO: 142418 - DNA, 256 bp, Glycine max
cttgcaggtcctacttcatttgcaccaatcgttgaaatggccatgacaatagttgagcagagtggaggccagtaccatgttttggtgatagttgcagacggccaggtaacaagaagcattgacactgagcgtgggaggctaagtccacaggagcagaggactgtggatgccattgttgaggccagtaaatttcctctttcaatcatattggttggtgttggggatggtccttgggacatgatgaaggagtttgatg

SEQ ID NO: 142419 - DNA, 267 bp, Glycine max
gtgattgttgtgactcgttcttcttcgtcgttatcttcttcttttgttgtttgtgtgtttgttttttctctcacctgaaaatgtcttgctgcggtggtaactgtggttgcggaagcgcctgcaagtgcggcaacggctgcggaggctgcaagatgtacccagacttgagctacaccgagtcaaccaccaccgagaccttggtcatgggagtggcaccagttaaggctcaattcgagagtgctgaaatgggtgttcccgctgagaacg

SEQ ID NO: 142420 - DNA, 270 bp, Glycine max
tcgcctttctctctcttctttttactctctctctgtctctctctacgctttctcgttcgagatccctcaagggatccactaactgaaggagaaatggggttgacattcaccaagcttttcagccggcttttcgccaagaaggaaatgcgaattctgatggtgggtctcgatgcagctggtaagaccaccatcctgtacaagctcaaacttggagagatcgttaccacaattcccaccattgggttcaatgtggagactgtggaatcaaga

SEQ ID NO: 142421 - DNA, 266 bp, Glycine max
ctcgagccgggatatcagtaacttgaacctggcagatgccatggccagggccaaggtgtttgatatcgacctgcagaaacagttgaggccttacatggaatctatggttccactccccggaatctatgaccccgatttcattgctgccaaccaaggagaccgtgccaacaacgtgatcaagggcacaaagaaagaacaagttcaacaaatcatcaaagacattaaggagtttaaggaaagcactaaggttgacaaggtggttgtcc

SEQ ID NO: 142422 - DNA, 263 bp, Glycine max
tctcgagccgctcgagccgattcggctcggctcgagccgctcgagccgtttaagcgcaggaatggagcatgcaacaaacacggccgtgacgacgtcacgttcattcgatgctccaactgcggcaaatgctgtcctaaggacaaggctatcaagaggtttctggtgaggaacattgttgaacaggctgcagtcagagatgttcaggaggcttgtgtctatgaacaatacacgcttccgaagctttatgtgaagatgcgtattgt

SEQ ID NO: 142423 - DNA, 260 bp, Glycine max
ggggccaaaaatcatcaggagctgtgccatttggcacaatgtttgctctgatctttttatggtttgggatctcagttccacttgtttttgtgggtagctatgtcggattcaagaagcctgcgattgagaatcctgtgaaaacgaacaagatcccaaggcagattcctgagcaggcgtggtacatgaacccagttttctctgtcctgattggtggaatactcccatttggagctgttttcattgagcttttcttcatctca

SEQ ID NO: 142424 - DNA, 261 bp, Glycine max
aacaaaccctacccttttgagtcttccaagttttcaccatcgtaatgggttccgaaggatccagcgtcgtggttcctaggaatttcagattattggaagagcttgagagaggtgagaagggaattggggatggaactgttagctatggaatggatgatgctgatgacatatacatgcaatcttggactgggactatcatcggtccccctagtactgttcatgaagggcgtatctaccagttgaaattgttttgcacaggga

SEQ ID NO: 142425 - DNA, 259 bp, Glycine max
caactataagatgtcttctggtgccatttattcattcttctttcatgctcgctagctgtattttgcaatgtgagccaatacctttgcattgggcgcttttcagctgtttccttccaggttttaggccacatgaaaacagtatgtgttctgactctgggatggctgctatttgattcggagctaactttcaaaaatatcatgggaatggtcatcgcagttgttggcatggtaatttacagttgggctgtagacttgaaaa

SEQ ID NO: 142426 - DNA, 261 bp, Glycine max
gaagaaagggcctgcgcaatttagggttttaatttggggaatacttcccctgtgcctgtgactgagcttgtggcgattctggagaagcttcttaaggtgaaggccaagaagaaggtgcttccaatgcctacaaatggagatgtgaagttcactcatgctaatattagtttggctcacagggaccttgggtacaggcccaccactgatttggagactgggctcaggaagtttgtgaagtggtaccttgaattttacccaaga

SEQ ID NO: 142427 - DNA, 264 bp, Glycine max
gctacggattcatctgggcaatcaaaaggctatggctttgttcaatttgataatgaggaatctgcccaaaaagctatagagaagctgaatggtatgctgttgaatgataaacaagtgtacgtgggacccttccttcgcaagcaagagagagaaagtgctgctgacaaggcaaaattcaacaatgtttttgtgaagaatctatcagaatcaaccaccgatgatgagttgaagaacacttttggtgaatttggaactatactagtg

SEQ ID NO: 142428 - DNA, 263 bp, Glycine max
caccaattaagctttcaagagacaaactgctttgaaaaatgggatccaaggttgttgcatccgttgcccttctcctctccatcaacattcttttcatttccatggttagctccagcagccactacgatccacagccccaaccttctcacgtcactgctcttattacacgacctagttgtccggatctgagtatttgcctcaatattttaggcgggtctctaggaaccgtggatgattgttgtgccctcatcggtgtcttggtg

SEQ ID NO: 142429 - DNA, 257 bp, Glycine max
ctcgagccgcttttcggatgatatcacctaaaggctctcgcatgtctccacaacttcttgaagtgttgcaagcttttgaggcaacattggcagagaggctgaaaaatcttatgcctaaaagcaaggatgaaatcctcaccttgtcttggatgactttagctatgaagtcactttgtgaaagtcacaatgacatacggacccttatgactgcccttgagcttcctgtgagtgattgggaggacaaatggattgagtgt

SEQ ID NO: 142430 - DNA, 260 bp, Glycine max
gttgatgctgatggcaatggaaccatcgacttcccagagttcctcaacctgatggctcgcaagatgaaagacaccgactccgaggaggagcttaaggaggctttccgtgtgttcgacaaggatcagaatggtttcatctctgcagctgagctccgccatgtcatgacaaatcttggggagaagctgaccgatgaggaggttgatgagatgatccgcgagtccgacgtcgatggtgatggacagatcaactatgagagttc

SEQ ID NO: 142431 - DNA, 259 bp, Glycine max
gctttgagagagagagagggaggagggagagtgttgacgctccatcaagatgggtatttctagggattccatgcacaagaggcgtgccactggtggcaagaagaaggcatggagaaagaagagaaagtatgagcttgggcgtcaggccgcaaacaccaagttatcaagcaacaaaactatccggaggattcgtgttcgaggtggcaatgttaaatggagggcattgaggttggataccggcaattactcatgggtagtg

SEQ ID NO: 142432 - DNA, 258 bp, Glycine max
gttatgccatgtggacatacgatccataagagctgcctgaatgaaatgagagaacatttccagtatgcatgccctctctgctcaaagtcagtctgtgacatgtcaaaggtttgggagaaatttgaccttgagattgctgctacacgaatgcctgagcaatatcaaaataaaatggtttggatcctgtgcaatgactgtggtaaaacttctcacgttcagttccattttgtggctcaaaagtgtcttaactgaaatcct

SEQ ID NO: 142433 - DNA, 247 bp, Glycine max
ggacgggggaagcccgtctgatagcgctctgtgcgcgtactccgaaagggaatcgggttaaaattcctgaaccgggacgtggcggctgacggcaacgttagggagtccggagacgtcggcgggggccccggaaagagttatcttttctgtttaacagcctgcccaccctggaaacggctcagccggaggtagggtccagcggctggaagagcaccgcacgtcgcgtggtgtccggtgcgccccggcg

SEQ ID NO: 142434 - DNA, 259 bp, Glycine max
cttcttctcttgcggctagggtttagcgcagttcttctagatttaaggaagatgggtaaggaaaaggttcacatcagtattgtggtcattggccatgtcgactctgggaaatccactaccactggtcacctgatttacaagcttggaggcattgacaagcgtgttattgagaggtttgagaaggaagctgctgagatgaacaagaggtctttcaagtatgcctgggtgctggacaaacttaaggctgagcgtaaagagg

SEQ ID NO: 142435 - DNA, 260 bp, Glycine max
gttgttgcatccgttgcccttctctctccatcaacattcttttcatttccatggttagctccagcagccactacgatccacagccccaaccttctcacgtcactgctcttattacacgacctagttgtccggatctgagtatttgcctcaatattttaggcgggtctctaggaaccgtggatgattgttgtgccctcatcggtggtcttggtgacattgaagccattgtgtgcctttgcatccaactcagggcctcggaa

SEQ ID NO: 142436 - DNA, 266 bp, Glycine max
gtgacctcaggccttgtgggactgtctctctcttatgctttctccttgacaggatctcaaatattttggactcgatggtattgcaacttattaaactacattatctctgttgaaagaatcaagcaattcatccacctaccagtggagcctccagccatcttggaggaccaccggcctccatcttcatggccttcaaaaggcaggattgatcttcaagccttagagattagatatcgtcccaatgctccattggtgcttagggcatc

SEQ ID NO: 142437 - DNA, 128 bp, Glycine max
aaataacacacacttcacacatcattacgacaattaaaagaggtgtggaaattttcaaataggcagagcatactcaacaagagggtcatgcctaatttcctttattgaattaaacaaacgaacaagcg

SEQ ID NO: 142438 - DNA, 260 bp, Glycine max
tccgctttcacttcttctctctcccctccaactatgagttactacaaccagtagcagccacccgtcggtgttcctcctccccaaggttacccaccgccggaatcttacggaaaggacgcgtaccctccgccagggtaccctccacagggaggataccctccgcaggcgtatccagcacaggggtaccctccaccctacgcgcctcctcagtacgctcagcctccgccgcaacaacaccagaattcatctggccgggttgc

SEQ ID NO: 142439 - DNA, 256 bp, Glycine max
tctcgagccgattcggctcgagaccttgcaacatttgagaagccgcttcggaagcttacttttgcggaccttcttgacgctaccaatggttttcacaacgacagtctcattggctctggcgggtttggggatgtgtacaaggctcagttgaaggatggaagtgttgtggctatcaagaagctgattcatgttagcggacaaggggacagggaattcaccgctgaaatggagactattgggaaaatcaagcaaggaa

SEQ ID NO: 142440 - DNA, 258 bp, Glycine max
ggtggatacctaggcacccagcgacgaggaagggcgtagtaagcgacgaaatgcttcggggagttgaaaataagcgtagatccggggattcccgatataggtcaacctttcgaactgctgctgaatccacgggcaggcaagagacaacctggtgaactgaaacatcttagtagccagaggaaaagaaagcaaaagcgattcccgtagtagcggcgagcgaaatgggagcagcctaaaccgtgaaaacggggttgtggg

SEQ ID NO: 142441 - DNA, 258 bp, Glycine max
gcgcagagtagagcagcagagcagagagaaaacggcactgcagccgtagaaggaaaaccgaccatggtgcacgtctccttttacaggaactatggtaagacgtttaagaagccccgccgtccgtacgagaaggagcgtctagacgcggagctgaagctggtgggggagtacgggctgcggtgcaagagggagctgtggagggtgcagtacgcgctcagccgcatccgcaacaacgcgcggaatctccttacctcgacg

SEQ ID NO: 142442 - DNA, 258 bp, Glycine max
gttcttcttcgtcgttatctcttcttttgttgtttgtgtgtttgttttttctctcacctgaaaatgtcttgctgcggtggtaactgtggttgcggaagcgcctgcaagtgcggcaacggctgcggaggctgcaagatgtacccagacttgagctacaccgagtcaaccaccaccgagaccttggtcatgggagtggcaccagttaaggctcaattcgagagtgctgaaatgggtgttcacgctgagaacgaggctgca

SEQ ID NO: 142443 - DNA, 260 bp, Glycine max
aaacaatatcaaagtttggctcgggcatgtttcttcttgttcaagtcatgctcttgttggattttgttcatggatggaatgacaaatgggttggatatgatgaacaattctggtacattgctctatttgttgtttcccttgtttgttatgtggcaacatttgcattctcaggagttctctttcacttcttcacgccatctggacaagactgtggactcaatgtctttttcattactatgaccatgattcttgatttgttt

SEQ ID NO: 142444 - DNA, 262 bp, Glycine max
agaacacccgctgaacttaagatattactaagcggaggaaaagaaatcaacgaagattgcctcagtagcggcgagtgaagcggcaatagctcaagtttagaatcggaggtcgtctcggtcttcgaattgtaatctaaagtgagtaacaaaaggggatttggaagcataagttccttggaacaggacatcatagagggtgaaaatcccgtatgtagcttccattgaaccgaatgttatttatctaagagtcgggtgtttggga

SEQ ID NO: 142445 - DNA, 258 bp, Glycine max
gaccggcatgaggggcgccttttggaagccgcaggggacgtgcgctagggttaacattggtcaggtgctgctctcggtgaggtgtaagtatgctaacagtcaccatgctcaggaggctcttcgtagggccaagttcaagttccccggccgccagaagatcattcttagcagaaaatggggatttacaaagttcagtcgaagtgagtatttgaagttgaagtctgagaacagaattgtgccggatggggtcatgccaag

SEQ ID NO: 142446 - DNA, 258 bp, Glycine max
ctcagaataaggttgcagagtcacattccaagggacaccagcacatcttaggcacggtgatgttgttatagctgctatcaccagttgtacaaatacttcaaatcctagcgtaatgcttggagctgcattggttgcaaagaaagcatgtgaattgggattgcaggtgaagccatggattaaaacaagccttgccccaggttctggtgttgtgactaagtatttgcagaggagtggcttgcagaagtatttgatgagcta

SEQ ID NO: 142447 - DNA, 253 bp, Glycine max
tggcattgttgagggtttgctgaccactgttcattccatcactgctacccagaagactgttgatgggccatcagccaaagactggagaggtggaagagctgcttcatttaacatcattcctagcagcactggagctgccaaggctgttggaaaagtcctccctgctttgaatggaaaattgactggtatggcattccgtgttcccactgtggatgtctctgttgttgacctcacagtgaggctggagaagaag

SEQ ID NO: 142448 - DNA, 255 bp, Glycine max
gttgctgcagcctccatgataaccccatttgtcccttcccctggttcagacagagtatcaagatcaaacccaggtgcatggctcattcttcgccccaatggtgcctgtgtgagtagctggaagccatggggtcgtctagaagcgtggcgagagagaggccccgtcgatggcttgggctacaaatttgagctcgtcattgagaatggacctaccaatggaataccaattgctgaggccacaatgaatgtaaaaagg

SEQ ID NO: 142449 - DNA, 255 bp, Glycine max
cgagacttaagaaaatggagtctgaatatgactcagaaccaatcacttttattattaattgatcatctaatactaatcccttgtttgaatgcacagggaaaattatgaatcccgataagttcacccacaagacaaacgaagctctggtgagtgcccacgaaatagcaacaagcaacggtcacgcgcagttcacccctcttcacctggcgtcctctctgatttccgacaaggatggcattttctctcaacgctttc

SEQ ID NO: 142450 - DNA, 182 bp, Glycine max
ctcgagccgctcgaaccgttgagaactaagaagaaggatatggcttcctcaatgatctcctacccagctgttaccaccgtcaaccgtgccggtgccggcatggttgctccattcaccggcctcaaatccatggctggcttctccacgaggaagaccaacaatgacattacctccattgctag

SEQ ID NO: 142451 - DNA, 255 bp, Glycine max
tgccaaagaaggtcttaatgttgaagaagcattccaatgcatagcaaagaatgccctgaaaagtggagaagaagaagaattatacctgccagacacaattgatgttggaaacagcagtcagccacgggcaacaggatgtgagtgctgaatgtataggttttcttttcaatacaataaagtacattacttcaaattgatttcactgtgtttagccattgctgtctatgtggaggcatcattgtacattatatttgc

SEQ ID NO: 142452 - DNA, 254 bp, Glycine max
atcttcgagctccgatggcgagcctgtggcgcgcggcaaccggcatgacggacaacgccaccgattacgacggcgtcgagttctggtcgaaccccgagcggaccggctggctcaccaagcagggcgagtacatcaagacctggcgccgccgctggttcgtcctcaagcaaggcaagctcttctggttcaaggactccgccgtcacgcgtgcgtctcgtccacgcggcgtggtccccgtcgccacgtgctcaccg

SEQ ID NO: 142453 - DNA, 257 bp, Glycine max
attgttgtgactcgttcttcttcgtcgttatcttcttcttttgttgtttgtgtgtttgttttttctctcacctgaaaatgtcttgctgcggtggtaactgtggttgcggaagcgcctgcaagtgcggcaacggctgcggaggctgcaagatgtacccagacttgagctacaccgagtcaaccaccaccgagaccttggtcatgggagtggcaccagttaaggctcaattcgagagtgctgaaatgggtgtcccgctg

SEQ ID NO: 142454 - DNA, 255 bp, Glycine max
tgatgcaattggaggtgacgatttgatgatggcgttggtggtgacaatgaggttcagcgcaccatgcttgaaattgtgaatcagcttgatgggtttgatgctcggggaaacatcaaagttttgatggcaactaataggcctgacactctagatccagcactactgcggcctgggcgattggaccgtaaagttgagtttggccttcctgacttagagagtaggacgcagatattcaagatacacacaagaccatga

SEQ ID NO: 142455 - DNA, 256 bp, Glycine max
tccagattagcacctttgctggtttgtactttgttgctctcttctcctcaatcattgcaactggtattcttgagttgaaatggagtggagtgagcattgaggaatggtggagaaatgagcagttttgggtcattggtggtgtatcagctcacctctttgctgttatacaaggtctgctaaaggttctggctggaattgacaccaatttcactgttacatcaaaggcaacagatgatgaagagtttggagattgtac

SEQ ID NO: 142456 - DNA, 252 bp, Glycine max
cggccatccaagctgatacatctggattgacggcgatggtggtctccgatgtaagaccatgaccatcgagaagggcaagccctcctccgtctccgagctcaaggagtggaactttgacggttcctccaccaaccaggccccgggagagaactctgacgtctacctccgccccgtcgccatgttcaaggacccgttccgtggcggtgacaacatcctcgtcctctgcgagtgctacgacaacgacgtaccgtc

SEQ ID NO: 142457 - DNA, 251 bp, Glycine max
cttggcaaggttatcagggtgataacaaatccttccttgtttgcaaaaagaagatgggaacatctcctgagatgctatgctgtttttgccctgctccttttaggcagttccttgagattgtagtaaacatgaagtttgatgaagaacctaactattccaggctaatatctttgtttgatggtatgcttggaccgaatcctgcattgaggccaattaacactgaaggtgctcaaaaggttgggcaaagaggg

SEQ ID NO: 142458 - DNA, 250 bp, Glycine max
caagagacaaactgtttgaaaaatgggatccaaggttgttgcatacgttgcccttctcctctccatcaacattcttttcatttccatggttagctccagcagccactacgatccacagccccaaccttctcacgtcactgctcttattacacgacctagttgtccggatctgagtgtttgcctcaatattttaggcgggtatctaggaaccgtggatgattgttgtgccctcatcggtggccttgtgaca

SEQ ID NO: 142459 - DNA, 179 bp, Glycine max
gtccaagtcatcaccggaaggtggttcgtggtgttcgcctcctttctaatcatggccgccgccggcgccacctacatgttcagcctctactccggagacatcaaatccgccctggcctacgaccaaaccaccttaaacctccttagtttcttcaaagacttgggtggcaatgtcggcgt

SEQ ID NO: 142460 - DNA, 184 bp, Glycine max
ccttcagcttcctccgtccccctcgcctccgcctgaagcttccctccctatccctcccctccccgaacgccgtcttcgccctccttcttcttacctacttcatggtcgtctcaggcatcgtctacgacatcatcgtcgagccccccggcattggctccacgcaggacccctacaccggcgccgt

SEQ ID NO: 142461 - DNA, 257 bp, Glycine max
tgggtgcccatatttgtatgctatggtgcatgatagttcagtgtctacaataccaggtgattttgtcattggtgttaagttgacaaccataaacaatatgtgtgcatatgggctcaatcctggtatttcaggttctcgtcttttgggcaccattcctcagtccatttcacagcaaactgtttggaatcaaatggcaacagtgagaacaccattgaattttgattctagcaagcagagcttttgtcaattttctattg

SEQ ID NO: 142462 - DNA, 255 bp, Glycine max
gttgcgaatctcgacgttgaactgacggtggaggagcggaatttgctttctgttgggtacaagaatgtgattggtgctcgcagacgtcctggaggatcctgtcttccattgagcagaaggaagaaacaaaagggaacgagttgaatgcgaacggattaaggagtacagacagaaggttgaattggagctatcgaacatctgtaatgatgttatgagagtgattgatgagcaccttatcccttcggctgcagctgg

SEQ ID NO: 142463 - DNA, 252 bp, Glycine max
ggagagattcaggaaaaagttgtgttgaaattttcacaagaggaatttcttacagcttggtcaactcaggtgcgtcccgcaacgactctgttggctgatgggtgcccatatttgtatgctatggtgcatgatagttcagtgtctacaataccaggtgattttgtcattggtgttaagttgacaaccataaacaatatgtgtgcatatgggctcaatcctggtatttcaggttctcgtcttttgggcaccatt

SEQ ID NO: 142464 - DNA, 252 bp, Glycine max
gactcaagcccagattcaaccagttaaacttggaacccaaggctttgaggtttcaaaattgggattcggatgtatgggccttactggagcgtacaatgaccctctccaagaacaggatggcatatctgttatcaagtatgcgttcagtaagggaatcacattttttgatactgcggatgtttatggagccaatgctaatgaacttttggttggaaaggctttgaagcagctgcccagagaaaagattcagat

SEQ ID NO: 142465 - DNA, 256 bp, Glycine max
cgcatgtgttagaggtatagtcttctctggaagcttctgcgctatcttctggctcaaaaagcgaggactcatgccggggctcactttctcaaacgaactcatttctcgcgacgaagggctacactgcgatttcgcgtgtctgctctactctctgctgaggcagaagctcaccgaggagcgcgtgagggagattgtgagggacgccgtggatattgagcgggagtttgtgtgcgacgcgctgccctgcgcgttggtg

SEQ ID NO: 142466 - DNA, 255 bp, Glycine max
ggaatggactggtttggccaatagattactgagtaagggcaatgatattctgtgttgcgattatgctaggtttgatggtgtgattgccaagcaagttatgagcaagatggcagaaatgataaacagtctttgtggtggtgatggaaagttgatgcgtgaaaggacgcacctgctgttggcgtgttgttcaaggatggcgatttgtaagaaagatgtttggagagttgaatgtggaatcccttgctggatttccgc

SEQ ID NO: 142467 - DNA, 254 bp, Glycine max
gttatgagcaagatggcagagatgataaacagtctttgtgaggttcattatgaagaaaagggacaagcttagttgtcaagttggaatcaacccatactccatggaatggactggtttggccaatagattactgagtaagggcaatgatattctgtgttgcgattatgctagttttgatggtttgattaccaagcaagttatgagcaagatggcagaaatgataaacagtctttgtggtggtgatgaaaaattga

SEQ ID NO: 142468 - DNA, 253 bp, Glycine max
caataccaggtgattttgtcattggtgttaagttgacaaccataaacaatatgtgtgcatatgggctcaatcctggtatttcaggttctcgtcttttgggcaccattcctcagtccatttcacagcaaactgtttgggatcaaatggcaacagttagaacaccattgaattttgattctagcaagcagagcttttgtcaattttctattgaccttctcggtggaggaattttagtggacaaaactggagattg

SEQ ID NO: 142469 - DNA, 251 bp, Glycine max
aagtgcgtagtgatctattggcaaattttttgacagagggcaattgtagagcaagtgttggtttgcagcgcactcatcgtattaaaggaatgattaagatggtggccacagttggtattcctgagaatacaggtatagcattggcctgtgctatgaatagttcttttagggggcgcgccagttctgatatttacaccatctgctctcaagactgtggagttatggaatcctgcttgcacaaaagcaatgac

SEQ ID NO: 142470 - DNA, 249 bp, Glycine max
ggaaaaagttgtgttgaaattttcacaagaggagtttcttacagcttggtcaactcaggtgcgtcccgcaacgactctgttggctgatgggtgcccatatttgtatgctatggtgcatgatagttcagtgtctacaataccaggtgattttgtcattggtgttaagttgacaaccataaacaatatgtgtgcatatgggctcaatcctggtatttcaggttctcgtcttttgggcacgatcctcagtcc

SEQ ID NO: 142471 - DNA, 254 bp, Glycine max
cttgaatcttcgttatccttctttttttctccttgaactcgaatattcactatggcagatgaggtggttctgctagatttctggccaagtccatttgggatgagggtcaggattgcacttgctgaaaagggtatcaaatatgagtccaaagaagaggacttgcagaacaagagccctttgctcctcaaaatgaacccggttcacaagaaaatcccggttctcatccacaatggcaaacccatttgtgaatctct

SEQ ID NO: 142472 - DNA, 252 bp, Glycine max
  unsure (1)..(252): unsure at all n locations
ggaatgtccagtttgtaagggagaggtgacacttaaaagtgttaccccaatntatggccgtgcgaacantgtccgtggtcctgaggaggattctgcacttaagatccctcccaggccccaagcgaagagagttgagagtctgngacaaaccattcagagaantgcatttgcnctccctgtggaagagatgattcggcgtcttggaagcagaattgagcttacacgcgatttggttcagccacctgaaccgga

SEQ ID NO: 142473 - DNA, 252 bp, Glycine max
gacattggaatcctcaccaatcgcgatgtgctcatcctcctcagcaagtccggcgccaccgaggagctcctccgccttgtgccgtgtgcgagggccaaaggcgcgctcctcatcgcgctcacctccgttgaaggcaacgcgctcgccgcggcgtgcgacatgtccgtgcatttgccgctccagagagagctctgtccgttcaacctcgcgccggtgacatccaccgctattcaaatggtgttcggcgacacc

SEQ ID NO: 142474 - DNA, 249 bp, Glycine max
cattggtgttaagttgacaaccataaacaatatgtgtgcatatgggctcaatcctggtatttcaggttctcgtcttttgggcaccattcctcagtccatttcacagcaaactgtttggaatcaaatggcaacagtgagaacaccattgaattttgattctagcaagcagagcttttgtcaattttctattgaccttctcggtggaggaattttagtggacaaaactggagattggatcacacttataca

SEQ ID NO: 142475 - DNA, 247 bp, Glycine max
gtttaaagagctggcgcaacttttcgaggttctgagtgagcctgagaagcgtgagatatatgatcagtattgtgaagatgcgcttaaggaaggaatgggtggtggcggtggccatgatccatttgatatcttttcatctttctttggcggtgggagtccctttggatcaggtggaagtagtcgaggtaggaggcagaggcgcggagaagacgtggttcaccctctcaaggtctctttggaggacctt

SEQ ID NO: 142476 - DNA, 248 bp, Glycine max
gcagcagtcaaaaggagtgattgggcctcattggtacaagtgtttttgacaaacagcaacagtacagagcattttgatgcatgtaagtggacaaaatcagaaccacattcctgggaattaatcttcccaatagaggtatgtggtcctaataatggttttgaaatgtggagttctgagtgggcaaatcaaacttcatggcatttgagtttccttattgacaatcccaaacagtctacagtttttgatat

SEQ ID NO: 142477 - DNA, 249 bp, Glycine max
tggaaagttagcagattctgatgttctcttgagaaaatcacaatctgctaactttctcaagagaaactttaagcagatgtctaatgttttatgggtggctcctgaggacaaggcgaacttatagtcacaacttcattatgtttcgtgcaataatctggaaatgcaagaagcttatcttgtcaatctcagcaatgtgttacgagaattgtatttgcacagtccagaggaagctcgccaattgagaaggaa

SEQ ID NO: 142478 - DNA, 246 bp, Glycine max
gtgattttgtcaagagagactttaagcagatgtctaatgttttatgggtggctcctgaggacaaggcgagtttatggtcacgacttcattatgtttcgtgcaataatctggaaatgcaagaagcttatcttgtcaatctcgtaaatgtgttacgagaattgtatttgcacagtccagaggaagctcgccaattgagaaggaaagctctctctcgtattgaatggctgcgaaaagctgatgtgccta

SEQ ID NO: 142479 - DNA, 246 bp, Glycine max
ttcccagcaaccgtgataagctcaaaagatggcgtcacaatcctccagtatatcaattcaaccagcaatccagtggcaacaattctaccaacagctacagcgcttgattataagccagcgcccgtggtgccaaacttttcatcaagagggccttcatcgctttcaagcaatattctcaagcctgatattgcagcaccaggagtgaacattctcgctgcatggattggaaataacgcagatgatgtt

SEQ ID NO: 142480 - DNA, 242 bp, Glycine max
ctcgagccgcgagttcaaggaagccttcagcttgttcgacaaggacggcgatggttgcatcacaaccaaggagcttggaactgttatgcgttcattggggcaaaacccaactgaggcagagctccaggacatgatcaatgaagtggatgctgatgggaatggtaccattgacttccctgagttcctaaatctcatggccaggaagatgaaggacactgattctgaggaggagctgaaagagg

SEQ ID NO: 142481 - DNA, 248 bp, Glycine max
  unsure (1)..(248): unsure at all n locations
ggaatgtccagtttgtaancaganaggtgacacttaaaagtgttaccccaatatatggccgtgcgaacaatgtccgtngtcctgaggaggattctgcacttaagatccctcccaggccccaagcgaagagagttgagagtctgagacaaaccattcagagaaatgcatttgcactccctgtggaagagatgattcggcgtcttggaagcagaattgagcttacacgcgatttggttcagccacctgaa

SEQ ID NO: 142482 - DNA, 247 bp, Glycine max
gggctatggcagagttaatcaacaatccagatgtgttggagaaggcaaggcaagagatagatgcggtggttggaaaaagtagaatggtagaagaatcagatattgccaaccttccttacttgcaagccattgttagagaaacacttaggcttcacccaggtggtccattggttgttagagaatcatcaaaaagtgcggtggtttgtgggtatgatattccagcaaagactcgattatttgtcaatgt

SEQ ID NO: 142483 - DNA, 243 bp, Glycine max
ttccagagccaaggtaggttaaacactcttcttcatcgtcgtcgcaatgggacgtgtgatccgtgcgcacgtaagggagcaggctcggtcttcaagtcccacacgcaccaccgcaagggccctgcccgcttccggagcctggatttcggagagcgcaacggctacctgaagggtgtcgtcactgacgtcatccacgatcctggccgtggcgcgcctctcgctaaggtcgccttccgccacccg

SEQ ID NO: 142484 - DNA, 241 bp, Glycine max
tcctaataatggttttgaaatgtggagttctgagtgggcaaatcaaacttcatggcatttgagtttccttattgacaatcccaaacagtctacagtttttgatattctcttgggaatctctcaagattttgaaattgctggtaatactcttatgccagctttttctgttccacaggctactgccagatcttctgaaaatgcggaatcctctgcatgatctggaattcgtgttttctttcgc

SEQ ID NO: 142485 - DNA, 246 bp, Glycine max
  unsure (1)..(246): unsure at all n locations
atcgcaggcaaaatttgttacgggaaattnttggttatcgcccagacattatttgtcttcaggaggttcaaagcgatcattatgacgaattcttttctcctgaactagacaaacatggatatcntggtctttacaagagaaaaacaaatgaggtgtacagtggcaacacaaatacaattgatgggtgtgcaacatttttccgtatagacagattttcacatgttaagaaatacgaggttgaattta

SEQ ID NO: 142486 - DNA, 243 bp, Glycine max
tggttaccaatttttgtgaattgtctctatcctgtaagtcaatttccttcagaagctgtcgttgtaaatgttacatgtggtagtggacgtggtggtttacccaccactgcttggattagttctgcagttaacaatcgctcctcagacatcaacaaaaggattcgcacagcacttgggaaaggtaagaaaattgtttttcttactagagttgatccttttccagtagctttattggctgttctt

SEQ ID NO: 142487 - DNA, 238 bp, Glycine max
tgggtgtccatatctgtatgctatggtgcatgatagttcagtgtctacaataccaggtgattttgtcattggtgttaagttgacaaccataaacaatatgtgtgcatatgggctcaatcctggtatttcaggttctcgtcttttgggcaccattcctcagtctatttcacagcaaactgtttggaatcaaatggcaacagtgagaacaccattgaattttgattctagcaagcagagc

SEQ ID NO: 142488 - DNA, 241 bp, Glycine max
cggctcgaggtggtgccttatcgctgtggttttcatcgtcttccttctcttatatttctgtgtatttttgtcttcgccgcacgccgaaacaatggccggaaaaggagagggtcctgctatcggaatcgatctcggaaccacctactcttgtgtcggtgtgtggcaacatgaccgagttgaaatcatcgccaacgaccaagggaacagaacgacgccgtcttacgtcggcttcactgatacc

SEQ ID NO: 142489 - DNA, 243 bp, Glycine max
gtttctggggatggtgaagagatgacattgattccgggaaccagtgttgaagaggcttacaacaagctaatagttgaacttgagaaaagtgttcccacattggcaggcattgaatgtcccaaggatgaaaaacttcctcgtcgcaaaatttttgacaaacctaagacgcgctgcttcactattctccctatggagtttaatcttgtggtccgtcagaagtttttaaattttgtgaggttcatt

SEQ ID NO: 142490 - DNA, 263 bp, Glycine max
catcagcagatggaatttttttctagtaatacgagtgccgataccctcaatcgtgtgaggggagaagttggtgagatacgcactatcatggtggacaatattgagaaaatattggagagaggtgaccggattgagcttcttgttgataaaacagcaacaatgcaagacagtgcatttcactttaggaaacagtcaaagcgccttcgaagagctctttggatgaaaaattttaaactcctggccttattgacatgcttgattgt

SEQ ID NO: 142491 - DNA, 256 bp, Glycine max
gaagcacctaccatcaccccacgatgtctttgttggcaactggaaacccacaaaaaatgacacattgtccaaaagggtgcctggatttggtgccacaataaacttgctctatggggaccaaacttgtggccagggatcagataatgaggccatgaacaacatcatttcacactatctttattaccttgatctcataggtgttggcagagaagaggcaggacctaatgaagtactctcatgtgctgaacaagctgct

SEQ ID NO: 142492 - DNA, 256 bp, Glycine max
tcaataccatttaccaaactcactcatcaattctcatctttcttctcactaactattaattcatcatgtcgagcacagctggccaagtcatcaaatgcaaagctgcggtttcatgggaggcagggaagccacttgtgattgaagaagtagaggttgcgccaccacaagctggtgaagtgcgtttgaagatcctctacacctctctttgccacactgatgtttacttctgggaagctaagggccaaactccattgtt

SEQ ID NO: 142493 - DNA, 249 bp, Glycine max
ggagagattcacgacttctcttaacactttccctcagggcacttcccgaagtgttaagagaatgcctctttctatagggggagcacctggtgcaaagaatgctattctcatgaatatgccaaatgctgttctttcaatgtggagatattttgttggagatctcgtctttgaagtttctaagatgacttctccctacattaaatgtacagtctctttcttcatagcatttggaaatttggctgatgacac

SEQ ID NO: 142494 - DNA, 253 bp, Glycine max
ctcgagccgctcgagccgggctttccaacaagaatgtttcaccaaaagtttgctagaagatatggttttctcctccttgatcatgttgcttctcaggatccgcttagtgtttcagttttaattcttcatcagtttaatattttgcctgagatgtatcaagttggctacacaaaattatttttccgaacagggcagattggtgtgcttgaagatactagaaatcgtaccctccatggcattttacgtgtccaaa

SEQ ID NO: 142495 - DNA, 256 bp, Glycine max
attttgtgaggttcattatgaagaaaagggacaagcttagttgtcaagttggaatcaacccatactccatggaatggactggtttggccaatagattactgagtaagggcaatgatattctgtgttgcgattatgctagttttgatggtttgattaccaagcaagttatgagcaagatggcagaaatgatacacagtctttgtggtggtgatgaaaaattgatgcgtgaaaggacgcacctgctgttggcttgttg

SEQ ID NO: 142496 - DNA, 257 bp, Glycine max
aatgaagagatgacattgattccgggaaccagtgttgaagaggcttacaacaagctaatagttgaagttgagaaaagtgttcccacattggttggcattgaatgtcccaaggatgaaaaacttcctcgtcgcaaaatttttgacaaacctaagacgcgctgcttcactattctccctatggagtttaatcttgtggtccgtcagaagtttttaaattttgtgaggttcattatgaagaaaagggacaagcttagttg

SEQ ID NO: 142497 - DNA, 252 bp, Glycine max
cttttgtgtaagataggtgtatgggaaaactgactttccctcagggcacttcccgaagtgttaagagaatgcctctttctatacgggaaggagctggtgcagagaatgctattctcatgaatatgccaaatgctgttctttcaatgtggagatattttgttggagatctcgtctctgaagtttctaagatgacttctccctacattaaatgtacagtctctttcttcatagcatttggagatttggctgatg

SEQ ID NO: 142498 - DNA, 110 bp, Glycine max
ccagatttatgtggcacggatacaaagaagctccatgtgatactctcctaccacggtcaaaattaccccataaagaaggacctgcaatgtgaaactgacaggttaactca

SEQ ID NO: 142499 - DNA, 255 bp, Glycine max
ttttgacaagtttctccatggttcaactttagaggaatgctattcagctgttgcttcggtggcaaatggctagcttgatcttcttgataaccagggaaaggatattgcagacagtgagttgcttgattatatatcagaatcaagtacgatgagcaaatctttcgctgattatggtctgcagaagtcttgagctgttgccactgctagacgtctggctgactttcttggcgatacaatggtcaaagataaaggtct

SEQ ID NO: 142500 - DNA, 254 bp, Glycine max
tggaagatctccattcattgtgtgcagggatgctgatgttgatgcagccagctccagaattactggcttcaggttgctgtgtgcagacagttcaagccagtaactctggagctgggtggaaaatctccattcattgtgtgcaaggatgctgatgttgatgcagccgttgaggcttcacattttgctttattttttaatcaggggcaatgttgctgtgctggttctcgcacatttgtccatgaaagcatatatgg

SEQ ID NO: 142501 - DNA, 252 bp, Glycine max
gatctatgcaaacttcgaaagcgcttatttgaaagccgcttcgtctatgagcatgaaaagggtcgatccagtttccccctttgggctctgcttcgaatccaacggcgttggaagctcccaagtggggcccaacgtgccggtcattgatctggtcctgcagagcgagatggtgaagtggagcatacacggaagaaactccatggtgcaggtgaacgacgatgttatgtgcttagggtttgttgatggaggtga

SEQ ID NO: 142502 - DNA, 261 bp, Glycine max
ggggtggagtttgctgtgaagcgcatttctcatgaaaatgatggtttgcgagagcttcttgctgaagtttcaagccttgggagactgaagcaaaggaatttggtaggtttgagaggttggtgcaagaaagatgttgggaatttcttgttaatttatgattacatggaaaataggagcttggacaagtgggtgtttgattgtgatgagagcaagatgttaagttatgaagacagaataaggattcttaaagatgtagctttt

SEQ ID NO: 142503 - DNA, 255 bp, Glycine max
gattgttgtgactcgttcttcttcgtcgttatcttcttcttttgttgtttgtgtgtttgttttttctctcacctgaaaatgtcttgctgcggtggtaactgtggttgcggaagcgcctgcaagtgcggcaacggctgcggaggctgcaagatgtacccagacttgagctacaccgagtcaaccaccaccgagaccttggtcatgggagtggcaccagttaaggctcaattcgagcgtgctgaaatgggtgttccc

SEQ ID NO: 142504 - DNA, 254 bp, Glycine max
cacatttaaaaagggcaaaactaagcaaagcagaaagatcccgtcgtcgcaggcgcagagtagagcagcacagaagagggaaaacggcaccgccgccgtagaagaaaacaaccatggtgcacgtctccttttacaggaactatgggaagacattcaagaagccgcgtcgtccgtacgagaaggagcgtctcgacgcggagttgaagctggttggtgagtacgggcttcggtgcaagagagagctgtggagggtg

SEQ ID NO: 142505 - DNA, 255 bp, Glycine max
  unsure (1)..(255): unsure at all n locations
cgagcacanggacatggtattctgggatgaaggagagatttgtacagatggtgaagagcatctatgaaacagaagttacagattggtcagtaccactgaagatcatttctggaaccattgctgcaccagttttgggaacaaccttctggaaactctttgcctccctccgagatgctggtagtgggggagtttttgttggcagtgttgcttgagcattcacaacttcaagtgtgcttgaggcccaaagtagaaagc

SEQ ID NO: 142506 - DNA, 259 bp, Glycine max
gaaaagctttctagctggtcataatatcaccattactgatggtattgacaaaactagtgcaactttgcaatttagaaagttagcagattgtgattttctcaagagaaactttaagcagatgtctaatgttttgtgggtggctcctgaagacaaggcgagtttatggtcacaacttcattatgtttcgtgtaataatctggaaatgcaagaagcttatcttgtcaatctcgtaaatgtgttacgagaactgtatttgcac

SEQ ID NO: 142507 - DNA, 256 bp, Glycine max
aatcttgagagattcccaagattttgaaaaagctggcataagagtattaccagcaatttctgttccacaggctactgccagatctactgaaaatgcggaatcctctgcatgatctggaattcgtgttttctttcgcttgttcgtttgtttaattcaataaaggaaattaggcatgaccctcttgttgagtatgctctgcctatctgaaaatttccacacctcttttaattgtcgtaatgatgtgtgaagtgtgtgt

SEQ ID NO: 142508 - DNA, 253 bp, Glycine max
atggtgatgatgacttaattagtgttcatgaatatgtcaagccttactttagtggttctaaattgaaaagctttctagctggtcataatatcaccattactgatggtattgacaaaactagtgcaactttgcaatttagaaagttagcagattgtgattttctcaagagaaactttaagcagatgtctaatgttttatgggtggctcctgaggacaaggcgagtttatggtcacaacttcattatgtttcgtg

SEQ ID NO: 142509 - DNA, 249 bp, Glycine max
tctcgagccgaatcggctcgagtccaataacaagaaggcatgtgtgggacataattgaaaatgcaaagagagggcgtgccatagttcttacaacgcactctatggaagaagctgacattctaagtgaccgtataggaatcatggcaaaaggaagtcttcgctgcattggcacctcaatcagattgaagtcccgctttggtactggttttattgctaatatcagcttcaatggaaacaatatcgaacata

SEQ ID NO: 142510 - DNA, 245 bp, Glycine max
gctcattagatatagctatgaaaaattactgcgccaggctaaagctccaagtatgtttttacaatccttcaaaaattttgtttctttgtgtgtgtatggtgatgataacttaattagtgttcatgaatatgtcaagccttactttagtggttctaaattgaaaagctttctagctggtcataatatcaccattactgatggtattgacaaaactagtgcaactttgcaatttagaaagttagcag

SEQ ID NO: 142511 - DNA, 249 bp, Glycine max
acaacttctgctacttcctactccaaccgcacttctgctccgcaattatcatgggcaaggtcaagatcggaatcaacggatttggaagaattggccgtttggtagccagagtggctctgcagagagacgatgttgaactcgttgccgttaacgaccctttcatcaccaccgattacatgacatacatgtttaaatacgacagtgttcatggacactggaagcatcacgatgtcaccgttaaggacgaga

SEQ ID NO: 142512 - DNA, 257 bp, Glycine max
atcgtattaaaggaatgattaaaatggtggccacagttggtattcctgagaatacaggtatagcattggcctgtgctatgaatagttcttttagggggcgcgccagttctgatatttacaccatctgctctcaagactgtgaattatggaatcctgcttgcacaaaagcaatgactatgtcatttaatccaaacccgtgttctgatgcatggagtttggaatttctgaagcgtaccggatttcattgtgatatcatt

SEQ ID NO: 142513 - DNA, 255 bp, Glycine max
ctcttagttagctagcgctggcaatgctcgtggcaggtgcttggtcattaacggatgctacctggttgatcctgccagtagtcatatgcttgtctcaaagattaagccatgcatgtgtaagtatgaactaattcagactgtgaaactgcgaatggctcattaaatcagttatagtttgtttgatggtatctactactcggataaccgtagtaattctagagctaatacgtgcaacaaaccccgacttctggaagg

SEQ ID NO: 142514 - DNA, 252 bp, Glycine max
aacttaccaaagcaaaactaatatcactgagttaggaaaatggggaagaagaagaagagaagtagggtttccgaagacgaggaaatcgaatccgataccaaccccttcgataaaaacgaaaactctctctatcaggttcttggtgtggagaaaacagcatctcaacaggaaataaagaaggcatactacaagttggcattgaggctgcatcctgataagaaccctggtgatgaggaagctaaagcaaagttt

SEQ ID NO: 142515 - DNA, 227 bp, Glycine max
agaagttgtcaattttgcttcagcaaactatcttgggtttataggtcatccaaagctacttgactcatgttcttctgctttagcgaaatacggtgttggttcttgtggtccccgtggattttatgggacaattgatgtccaccttgactgtgaagcaagaatagcaaaatttttaggaacccctgaatcaattctgtactcttatggactttccaccatgtgcagtg

SEQ ID NO: 142516 - DNA, 248 bp, Glycine max
attgaatgtcccaaggatgaaaaacttcctcgtcgcaaaatttttgacaaacctaagacgcgctgcttcactattctccctatggagtttaatcttgtggtccgtcagaagtttttaaattttgtgaggttcattatgaagaaaagggacaagcttagttgtcaagttggaatcaacccatactccatggaatggactggtttggccaataggttactgagtaagggcaacgatattctgtgttgcga

SEQ ID NO: 142517 - DNA, 248 bp, Glycine max
gaaagatttgttagagggaaatttttcctttgatattaaatctcgctctagattggaagaagtttcctctacaaaagcacaatttgttaatggaaaaaccttcaaatatgatataattggtgctggttcacattcttcaggagattttcctgaaaaggaagatcaagaaaaacccaaaaagattgataccagattgagacaaagaatagatcctcaatacaatgaggttcaggctcagatggaaacaa

SEQ ID NO: 142518 - DNA, 251 bp, Glycine max
tgatgataacttaattagtgttcatgaatatgtcaagccttactttagtggttctaaattgagaagctttctagctggtcataatatcaccattactgatggtattgacaaaactagtgcaactttgcaatttagaaagttagcagattgtgattttctcaagagaaactttaagcagatgtctaatgttttatgggtggctcctgaggacaaggcgagtttatggtcacaacttcattatgtttcgtgca

SEQ ID NO: 142519 - DNA, 245 bp, Glycine max
cccatatttgtatgctatggtgcatgatagttcagtgtctacaataccaggtgattttgtcattggtgttaagttgacaaccataaacaatatgtgtgcatatgggctcaatcctggtatttcaggttctcgtcttttgggcaccattcctcagtccatttcacagcaaactgtttggaatcaaatggcaacagtgagaacaccattgaattttgattctagcaagcagagcttttgtcaatttt

SEQ ID NO: 142520 - DNA, 240 bp, Glycine max
gggaatctctcaagattttgaaattgctggtaatactcttatgccagctttttctgttccacaggctactgccagatcttctgaaaatgcggaatcctctgcatgatctggaattcgtgttttctttcgcttgttcgtttgtttaattcaataaaggaaattaggcatgaccctcttgttgagtatgctctgcctatctgaaaatttccacacctcttttaattgtcgtaatgatgtgtg

SEQ ID NO: 142521 - DNA, 235 bp, Glycine max
atgcaatggagtggtctggtcaaaaacaatttggggcgtctggtacagtcccatttttagttgatggtgcagaagcaggaacgctgaaaagccatggacctctctctttcctcaaggtatacgaggctggtcacatggtccctatggatcaaccaaaagctgcacttgagatgctaagaagctggatgcaagggaaactgacaatgacaaagagtggagataatgtctctcctaa

SEQ ID NO: 142522 - DNA, 231 bp, Glycine max
cgttcaatagaattttacgattaagatcacccactcgaggcattacgtggcacaaaggttcaggagtgggacctcttgagccaagtaatgcgtcgagttggtgatcttaatcgctctgtacaattgtacgataacgcatatggtatggatctgcatcgtacacgagatgatccagcttacatgtccatcatagcagttcttgggtatggtcctgcagatgcaagcactgtt

SEQ ID NO: 142523 - DNA, 237 bp, Glycine max
gaaaaattgatgcgtgaaaggacgcacctgctgttggcttgttgttcaaggatggcaatttgtaagaaagatgtttggagagttgaatgtggaatcccttctggatttccgctcacagttatttgcaatagcatttttaatgagatgctcattagatatagctatgaaaaattactgcgccaggctaaagctccaagtatgtttttacaatccttcaaaaattttgtttctttgtgt

SEQ ID NO: 142524 - DNA, 240 bp, Glycine max
ctcttcctcaccgattgcgagactggaatttcgatgctcagtcatctcttttaccattctcttctctcttgctcttgcaggagagagccatgtccatgcatcgctacctgaggaagattattgggaagctgtttggccaaacactcccattcccactgcactgcgagagcttctaaagcctctccctgcaggtgttgaaaacgatgaactccctaagcaaattgatgatacacagtaccc

SEQ ID NO: 142525 - DNA, 240 bp, Glycine max
atcctgagtgggctccaattaattgtcgagttcatcgacaaccaattcacatcactgaaggaaattatgtcagaaagcaagatgtcagcattgaatatgatgcatgtacaattccaccatgattgtggttcattggttgttgccaaggttggaaatcacaaacaaattgttggtttccatgttgctggcagcccaggaagactgggatatgcttcattgataccatatgttgagccagtt

SEQ ID NO: 142526 - DNA, 240 bp, Glycine max
atttgaagtctgtgattaagaagaaatatggtcaagatgcaataaatgttggtgacgaaggtggctttgcccctaacatccaggaaaacaaggaaggcttggaattgctgaaaactgccatcgccaaagctggttacacaggcaaagttgtcattggaatggatgttgcagcttctgaattctacaaggaagacaaaacatacgatttgaacttcaaggaagataacaatgatggctccc

SEQ ID NO: 142527 - DNA, 240 bp, Glycine max
gccaaagcagatgttctctatgttatgtccggtatgtggaaaacaacagctgacagatttttcctgtggattggaggctttcacccctcggagcttctaccggttcttggtgccctgattgaacgcctgacggagcaacagcgtttgaatatctataaccttcgacaatcatgtcagcaagcagagagatgccctttcatcaggtatggacaaactccgccaaacacttgctgatagtgt

SEQ ID NO: 142528 - DNA, 242 bp, Glycine max
cacttcccgaagtgttgagagaatggctctttctgtagggggaggagctggtgcaaagaatgctattctcatgaatgtgccaaatgctgtgcttgtcaatggcagatattttgttggagatctcgtctttgaagtttctaagatgacttctccgtagattaaatgtgcagtctctttcttcatagcatttggaaatttggctgatgacaccatcaattttgaggcttttccccacaagctgg

SEQ ID NO: 142529 - DNA, 236 bp, Glycine max
gtttggaatcaaatggcaacagtgagaacaccattgaattttgattctagcaagcagagcttttgtcaattttctgttgaccttctcggtggaggaattttagtggacaaaactggagattggatcacacttatacaaaattctccaattagtaacttgttgagagttgctgcttggaagaaaggttgtttaatggtcaagattgtgatgtctgggaatgcagcagtcaaaaggag

SEQ ID NO: 142530 - DNA, 237 bp, Glycine max
taataatggttttgaaatgtggagttctgagtgggcaaatcaaacttcatggcatttgagtttccttattgacaatcccaaacagtctacagtttttgatattctcttgggaatctctcaagattttgaaattgctggtaatactcttatgccagctttttctgttccacaggctactgccagatcttctgaaaatgcggaatcctctgcatgatctggaattcgtgttttctttcg

SEQ ID NO: 142531 - DNA, 236 bp, Glycine max
atcacacttatacaaaattctccaattagtaacttgttgagagttgctgcttggaagaaaggttgtttaatggtcaagattgtgatgtctgggaatgcagcagtcaaaaggagtgattgggcctcattggtacaagtgtttttaacaaacagcaacagtacagagcattttgatgcatgtaagtggacaaaatcagaaccacattcctgggaattaatcttcccaatagaggtatg

SEQ ID NO: 142532 - DNA, 234 bp, Glycine max
gttttattgtgttgatgaggaggattcctttgaggaagtttctttaagtgcagcactcaatggtgttgagggtttggactatatggaaagaattcctcttgccacatctgagggttttcctcatgtgctttcacgtaaaaatggtgaaaaaggcaagaggagatttgtttctggggatggtgaagagatgacattgattccgggaaccagtgttgaagaggttacaacaagcta

SEQ ID NO: 142533 - DNA, 230 bp, Glycine max
attctattatcccaagaattaatcttatgctactctactctagatcaaagtgtcactcgtcagcatcttctagaaaactgcggaatacatctgcatgatctggaattcgtgttctatttcgattgttcgactgtttaattcaacacaggcaattaggcatgacactcttgttgagtatgctctgcctatctgaaaatttccacacctcttttaattgtcgtaatgatgtg

SEQ ID NO: 142534 - DNA, 210 bp, Glycine max
atgcaatggagtggtctggtcaaaaacaatttggggcgtctggtacagtcccatttttagttgctggtgcagaagcaggaacgctgaaaagccatggacctctctctttcctcaaggtatacgaggctggtcacatggtccctatggatcaaccaaaagctgcacttgagatgctaagaagctggatgcaagggaaactgacaatgcaaa

SEQ ID NO: 142535 - DNA, 210 bp, Glycine max
cgcgatacgacgcacctgatgttcgcatgttgtccaaggatcggaatttgtcacaaagatgtttggagactccaatgtggaatcccttctgcatttccgctcacagttatttgcaatagcatttttaatgaaatgctcactagacatagctacgaaaaattactgcgccaggctaaagctcacagtacgttttaacaatccttcaaaaat

SEQ ID NO: 142536 - DNA, 227 bp, Glycine max
ctcgagccgtgcatatgggctccatcctggtatttcaggttctcgtcttttgggcaccatacctcagtccatttcacagcaaactgtttggaatcaaatggcaacaggcacaacaccattgaattttgattctagcaagcagagcttttgtcaattttctatgcaccttctcggtggacgaattgtagtggacaaaactggagattggatcacacttatacaaaatt

SEQ ID NO: 142537 - DNA, 229 bp, Glycine max
ggtgtatccaaaatcctggactactatattggtgtctttggataaccaaggcatgtggaacttgaggtctgcaatatgggaaaggcaatatcttgggcaacagttctatcttagagtgtggaatgcacagaaaagccttgctaatgaatatgacattcccaataatgttctgctttgtggcaaagctgttggacatcacccttagtatatatatcggtgtattttctag

SEQ ID NO: 142538 - DNA, 236 bp, Glycine max
atgcaatggagtggtctggtcaaaaacaatttggcggcgtctggtacagtcccatttttagttgatggtgcagaagcaggaacgctgaaaagccatggacctctctctttcctcaaggtatacgaggctggtcacatggtccctatggatcaaccaaaagctgcactcgagatgctaagaagctggatgcaagggaaactgacaccgacaccgagtggagataatgtctccctaaa

SEQ ID NO: 142539 - DNA, 221 bp, Glycine max
ctctggttgattcggatctagagtcttcagtttctcctcgttgttcttcgctttcctgttttcaatttcgattctttcgttaatttaataagatgtttgggagggcaccgaagaagagcgataatacgaggtactacgaaatcctcggcgtctccaagaacgtttcgcaggatgatctgaagaaggcttacaagagagccgccattaagattcaccccgac

SEQ ID NO: 142540 - DNA, 229 bp, Glycine max
  unsure (1)..(229): unsure at all n locations
ctgggtgctctcatgacgatttgtccaccaacagacgaanacagtccgaggaacaaccacgtgtatggnaaggagttccagtccatgctggaaggactcgacgaagaagggtgcgtggaagaagcagggcaccactctgagaagaaacgacgactaaacgtagatcaggtgnaggccttggagaagnacttcgaagtagagnacaaantggaacctgaccgaaaggtga

SEQ ID NO: 142541 - DNA, 228 bp, Glycine max
tgcaggatgttcaggttacaatttattggtttatttcctctcaggaatgtgttcccaggacctattgtgttttaaatccacaaaatccttttgtgttaaataggtggatgggaaaactgagctttccctcagggcacttcccgaagtgttaagagaatgcctctttctatagggggaggagctggtgcaaaggatgctattctcatgaatatgccaaatgctgttctt

SEQ ID NO: 142542 - DNA, 130 bp, Glycine max
tggaatttgaatcaagatgctgctaagatattctatgatgaatatgcccggcgtttaggatttgttatgcgtgtgatgtcttgtcgacgctcagaaagggatggtaggattcttgcccgcagacttggat

SEQ ID NO: 142543 - DNA, 252 bp, Glycine max
cccatatttgtatgctatggtgcatgatagttcagtgtctacaataccaggtgattttgtcattggtgttaagttgacaaccataaacaatatgtgtgcatatgggctcaatcctggtatttcaggttctcgtcttttgggcaccattcctcagtccatttcacagcaaactgtttggaatcaaatggcaacagtgagaacaccattgaattttgattctagcaagcagagcttttgtcaattttctattga

SEQ ID NO: 142544 - DNA, 241 bp, Glycine max
cgcctcaacagtaccattattagtgccggggaagatgctgttattcgtatttgggattccgagaccggaaaactgcttaaagagtccgacaaggaatctggccataaaaagactgtaacttcgcttgccaagtctgccgatggttcacatttccttactggttcccttgataagtctgccacggcttgggatactaggtcattgactcttatcaagacctatgtcacagaacgcccagtca

SEQ ID NO: 142545 - DNA, 252 bp, Glycine max
gggaatctctcaagattttgaaattgctggtaatactcttatgccagctttttctgttccacaggctactgccagatcttctgaaaatgcggaatcctctgcatgatcttgaattcgtgttttctttcgcttgttcgtttgtttaattcaataaaggaaattaggcatgaccctcttgttgagtatgctctgcctatctgaaaatttccacacctcttttaattgttcgtaatgatgtgttgaaatgtgtgt

SEQ ID NO: 142546 - DNA, 244 bp, Glycine max
atgcaatggagtggtctggtcaaaaacaatttggggcgtctggtacagtcccatttttagttgatggtgcagaagcaggaacgctgaaaagccatggacctctctctttcctcaaggtatacgaggctggtcacatggtccctatggatcaaccaaaagctgcacttgagatacgtcgaaactggatgcaatgtgttacgattatctcttaatgatgttgaaactcctctcggttctatgttgg

SEQ ID NO: 142547 - DNA, 247 bp, Glycine max
gaaaaattgatgcgtgaaaggacgcacctgctgttggcttgttgttcaaggatggcaatttgtaagaaagatgtttggagagttgaatgtggaatcccttctggatttccgctcacagttatttgcaatagcatttttaatgagatgctcattagatatagctatgaaaaattactgcgccaggctaaagctccaagtatgtttttacaatccttcaaaaattttgtttctttgtgtgtgtatggtg

SEQ ID NO: 142548 - DNA, 249 bp, Glycine max
ctcttcctcaccgattgcgagcctggaatttcgatgctcagtcaactcttttaccattctcttctctcttgctcttgcaggagagagccatgtccatgcatcgctacctgaggcagattattgggaagctgtttggccaaacactcccattcccactgcactgcgagagcttctaaagcctctccctgcaggtgttgaaatcgctgaactccctaagcaaattgatgatacacagtacccaaaaacatt

SEQ ID NO: 142549 - DNA, 253 bp, Glycine max
gttggaggcgccgcactccactccactccaagcaatcagatactagcgatggggaggaagcgaaaggtagcaccgaaatcttctgtatccgccgagcccccgctgaagcaacaccaaccaaaacccgaaaatgccgctcaggaatacgaagaagaggtcgaagaggaagttgaggaagaagaggtagaggaagaggtcgaagaggaagaagaagaagaggaggacgaagaggacgaggaagaagaagaagaag

SEQ ID NO: 142550 - DNA, 252 bp, Glycine max
atcctgagtgggctccaattaattgtcgagttcatcgacaaccaattcacatcactgaaggaaattatgtcagaaagcaagatgtcagcattgaatatgatgcatgtacaattccaaatgattgtggttagttggttgttgccaaggttggaaatcacaaacaaattgttggtttccatgttgctggaagcaaaggaagactgggatatgcttcattgataccatatgttgagccagttgtgcaagctcaaa

SEQ ID NO: 142551 - DNA, 257 bp, Glycine max
cgtttgaagtctgtgattaagaagaaatatggtcaagatgcaataaatgttggtgacgaaggtggctttgcccctaacatccaggaaaacaaggaaggcttggaattgctgaaaactgccatcgccaaagctggttacacaggcaaagttgtcattggaatggatgttgcagcttctgaattctacaaggcagacaaaacatacgatttgaacttcaaggcagataacaatgatggctcccagaggatctctggaga

SEQ ID NO: 142552 - DNA, 178 bp, Glycine max
ttctccctacattaaatgtacagtctctgtcttcctagcatttggaaatttggctgatgacaccatcaattttgaggcttttccccacaagctggtgcagtttgtttgagattcaggacaaagttgtgttgaaattttcacaagaggcatttcttacagcttggtcaactcaggtgcg

SEQ ID NO: 142553 - DNA, 245 bp, Glycine max
atcagctggtgtcagggacaattcctactgaaagcatacatgtctcaagatgatcttattgtcttgcgttccttagttgtcaaaggtgaaagaatgagagagcaaatgctggaaggagaggttaaagtgtctcctagtgtttgtaatcttattgtaaaaggttgtgaagaagctcctaagttgatgagagaaagtgtgctacattgttcccacgatgtcacggaaaattccacttgtcatttttg

SEQ ID NO: 142554 - DNA, 244 bp, Glycine max
aagggaagtgatgatgtaaatatactcagctctgactcagcacttgctgttgggagtagaggagtttctggagaggcaggaccagttgcggcaattcgaatgccaatgctacgggtttgtaatttcaaaggaggaacacctgagctaagacaggcttgctatgctatattagtcttaattcttcctactggagataatcaggagcctagatcgtggagcaatcaggagctggagatccttatgg

SEQ ID NO: 142555 - DNA, 246 bp, Glycine max
tgataacttaattagtgttcatgaatatgtcaagccttactttagtggttctaaattgaaaagctttctagctggtcataatatcaccattactgatggtattgacaaaactagtgcaactttgcaatttagaaagttagcagattgtgattttctcaagagaaactttaagcagatgtctaatgttttgtgggtggctcctgaagacaaggcgagtttatggtcacaacttcattatgtttcgtg

SEQ ID NO: 142556 - DNA, 185 bp, Glycine max
atgcttgtctcaaagattaagccatgcatgtgtaagtatgaactaattcagactgtgaaactgcgaatggctcattaaatcagttatagtttagttgatggtatctctactcggataaccgtagtaattctagagctaatacgtgcaacaaaccccgacttctggaagggatgcatttattagat

SEQ ID NO: 142557 - DNA, 264 bp, Glycine max
attcggctcgagctcatatttgtatgctatggtgcatgatagttcagtgtctacaataccaggtgattttgtcattggtgttaagttgacaaccataaacaatatgtgtgcatatgggctcaatcctggtatttcaggttctcgtcttttgggcaccattcctcagtccatttcacagcaaactgtttggaatcaaatggcaacagtgagaacaccattgaattttgattctagcaagcagagcttttgtcaattttctattga

SEQ ID NO: 142558 - DNA, 245 bp, Glycine max
gcaacacaacgcgcactctctcttttctctcttaacacaaaaaccctatcgttcttcgcggtttcgccgattctcgccatgccgaaagccaaatccgacgccaaagccgccgatagccggttgaagcgcaagggcgctggtgctggaaggaagcaatcgaagaaagctgctaaggatcctaacaagccaaagagacctccaagcgctttcttcgttttcatgtccgagttcagagagcagtttaa

SEQ ID NO: 142559 - DNA, 245 bp, Glycine max
ggtgagtcaaaattgaaaagctttctagctggtcataatatcaccattactgatggtattgacaaaactagtgcaactttgcaatttagaaagttagcagattgtgattttctcaagagaaactttaagcagatgtctaatgttttatgggtggctcctgaggacaaggcgagtttatggtcacaacttcattatgtttcgtgcaataatctggaaatgcaagaagcttatcttgtcaatctcgt

SEQ ID NO: 142560 - DNA, 248 bp, Glycine max
ggtgatgataacttaattagtgttcatgaatatgtcaagccttactttagtggttctaaattgaaaagctttctagctggtcataatatcaccattactgatggtattgacaaaactagtgcaactttgcaatttagaaagttagcagattgtgattttctcaagagaaactttaagcagatgtctaatgttttgtgggtggctcctgaagacaaggcgagtttatggtcacaacttcattatgtttc

SEQ ID NO: 142561 - DNA, 250 bp, Glycine max
caaaggttggaggatcagatctgtatccatacccaagagggtgtcgtactggccgcgaaggaagtgatacagatctgtacgcagagagtcgtgtggagaagccattgcctatgtatgtgccaagagatgaacgttttgaggaatctaagcagaacacattcactgtgaagcggctcaaggcagtgctgcataacttgatcccagggcttaaggctagcctttcttctagcaaccaacgattcaatgcatt

SEQ ID NO: 142562 - DNA, 243 bp, Glycine max
ccaggacctattgtgttttaaatccacaaaatccttttgtgttaaataggtggatgggaaaactgactttcccccagggcacttcccgaagtgttaagagaatgcctctttctatagggggaggagctggtgcaaagaatgctattctcatgaatatgccaaatgctgttctttcaatgtggagatattttgttggagatctcgtctttgaagtttctaagatgacttctccctacattaaat

SEQ ID NO: 142563 - DNA, 226 bp, Glycine max
  unsure (1)..(226): unsure at all n locations
gattgcaacatagttggtgcaatgcttttggttgatacttatcgtaccaatcctgaaaatgcagttcgtcgtatttttgatgccgcctttccgaggcggtaggcccattcgggtggttacatttccgaataccattgtgcagattgaaccagacatgaattcaaggtttcagcttttgagtatcactancaatggtgattttgttcaagggaacgatctcgcaatg

SEQ ID NO: 142564 - DNA, 251 bp, Glycine max
ctaaagtaaggcttgacatattcatgaacactaattaagtggttctaaattgaaaagctttctagctggtcataatatcaccattactgatggtattgacaaaactagtgcaactttgcaatttagaaagttagcagattgtgattttctcaagagaaactttaagcagatgtctaatgttttatgggtggctcctgaggccaaggcgagtttatggtcacaacttcattatgttgcgtgcaataatctgg

SEQ ID NO: 142565 - DNA, 228 bp, Glycine max
ataatatgtgtgcatatgggctcaatcctggtatttcaggttctcgtcttttgggcaccattcctcagtccatttcacagcaaactgtttggaatcaaatggcaacagtgagaacaccattgaattttgattctagcaagcagagcttttgtcaattttctattgaccttctcggtggaggaatttttgtggacaaaactggagattggatcacacttatacaaaatt

SEQ ID NO: 142566 - DNA, 239 bp, Glycine max
gtagaatgctattctcatgaatatgccaaatgctgttctttcaatgtggagatattttgttggagatctcgtctttgaagtttctaagatgacttctccctacattaaatgtacagtctctttcttcatagcatttggaaatttggctgatgacaccatcaattttgaggcttttccccacaagctggtgcactttggagagattcaggaaaaagttgtattgaaattgtcacaagagg

SEQ ID NO: 142567 - DNA, 240 bp, Glycine max
attttggaaggatgtcttacgttgctcataccgttaatcagccccaagagaaagatttgttagagggaaatttttcctttgatattaaatctcgctctagattggcaaaagtttcctctacaaaagcacaatttgttagtggaaaaaccttcaaatatgatataattggtgctggttcacattcttcaggagattttcctgaaaaggaagatcaagaaaaacccaaaaagattgatacca

SEQ ID NO: 142568 - DNA, 246 bp, Glycine max
gccgagcatgaagcgcaagggaggtgtagaactgagcggaaggaatgtcttacataggaaatgggctcttctgctttgtgtggcaagcttctatgctggaatgttcttcaccaataggctatggtcaatggctgaatataacgaaatttcaagggcttctactgagattgaaagaataaactcaaactctgagggttgtactctaaatctagtcaatatgtctgttacacttttacttatgttgta

SEQ ID NO: 142569 - DNA, 247 bp, Glycine max
gtacagtttttgatattctcttgggaatctctcaagattttgaaattgctggtaatactcctatgccagctttttctgttccacaggctactgccagatcttctgaaaatgcggaatcctctgcatgatctggaattcgtgttttctttcgcttgttcgtttgtttaattcaataaaggaaattaggcatgaccctcttgttgagtatgctctgcctatctgacaatttccacacctcttttaattg

SEQ ID NO: 142570 - DNA, 232 bp, Glycine max
ggcagtcattgcacttaagtgcccatccattgaagtcgctgttgttgatatctctaaatcccgcattgcagcctggcccagcgaccagcttcctatctatgaacctggccttgatggtgttgtgaagcaatgccgtggcaagaacctcttcttcagcactgatgttgaaacgcatgtctttgaggctgacatagtgtttgtctctgtcaacaccccaaccaaaactcagggt

SEQ ID NO: 142571 - DNA, 225 bp, Glycine max
aaatttgttagtggataaagcttcaaatatgatataattggtgctggttcacattcgtcaggagattttcctgaaaaggaagatcaagaaaaacccaaaaagattgataccagattgagacaaagaatagatcctcaatacaatgaggttcaggtccagatggaaacaaatttgtttaaattgtctcttgatgatgttgaaactcctaaaggttctatgttggat

SEQ ID NO: 142572 - DNA, 236 bp, Glycine max
ctgccaccccaatgcaggatgttcaggttacaattgattggtttatttcctctcaggaatgtgttcccaggacctattgtgttttaaatccacaaaatccttttgtgttaaataggtggatgggaaaactgactttccctcagggcacttcccgaagtgttaagagaatgcctctttctatagggggaggagctggtgcaaagaatgctattctcatgaatatgccaaatgctgtt

SEQ ID NO: 142573 - DNA, 237 bp, Glycine max
ttccaatatattccattctctctgtgtatgtccctacctctcccttcaagatgcagatcttcgtcaagaccctcaccggcaagaccatcacccttgaggtggaaagctctgacaccatcgacaacgtcaaggccaagatccaggacaaggaaggaatccccccggaccagcaacgtctcattttcgccggaaagcaacttgaggacggccgtacccttgctgactacaacattcaga

SEQ ID NO: 142574 - DNA, 227 bp, Glycine max
  unsure (1)..(227): unsure at all n locations
ccgccgcggaatttgagtaatattcatatgccaggcttattttacgacggcagatacaaattctggactaaacacgagacaaatcttgctttgacagaagaggaaccgatggaagtgattaganatggaggcattcctgctgatgttcttccaaagcgagctcatgaatttgaaaaacatgttgctcatgaaagcctgccggatcaaattcctgctgttgacaaatt

SEQ ID NO: 142575 - DNA, 243 bp, Glycine max
ggaacatcagttattgtgggtgttgcagcatcagggcaggaaatatctacccgtcccttccagttggtgagtggacgtgtctggaaaggaacagcttttggtggcttcaagagcaggtcacaggtgccttggcttgtagacaagtacttgaagaaggaaatcaaggttgatgagtatattacccatactttgaccctttcggagatcaacaaggcttttgatcttttgcatgaagggggatgt

SEQ ID NO: 142576 - DNA, 246 bp, Glycine max
  unsure (1)..(246): unsure at all n locations
gccaaatgctgttctttcaatgtggagatattttgttggagatctcgtctttgaagtttctaagatgacgtctccctacattaaatgtacagtctctttcttcatagcatttggaaatttggctgatgacaccatcaattttgaggcttttccccacaagctggtgcagtttngtgagattcaggaaaaagttgtgttgaaattttcacaagaggcatttcttacagcttggtcaactcaggtgcg

SEQ ID NO: 142577 - DNA, 245 bp, Glycine max
ggggtggagtttgctgtgaagcgcatttctcatgaaaatgatggtttgcgagagtttcttgctgaagtttcaagccttgggagactgaagcaaaggaatttggtaggtttgagaggttggtgcaagacagatgttgggaatttcttgttaatttatgattacatggaaaataggagcttggacaagtgggtgtttgattgtgatgagagcaagatgttaagttatgaagacagaataaggattct

SEQ ID NO: 142578 - DNA, 275 bp, Glycine max
gttaagcacagcccgattccttagcttcgattcatcccatccaactatagttgctggaaccattgggtacatagccccagagcttgcatatagtatggttgtgagtgaaaggtgtgatgtgtacagctttggagtggtggcactcgaaactttggtgggatcgcatcctaaggaaatactctcatcacttcaatcagcatctactgagaatggcatcacattatgtgaaatattggaccaacgcctcccacagccaacaatgtcagttttaatgg

SEQ ID NO: 142579 - DNA, 188 bp, Glycine max
tgaaattttaataaaccgcgatcacaggttgccgcaccttaaaaccggaaacaaaagcaatcgttacttgatttcaagaatttctcaatttcttcctacttctttgtgtacgatttcttaagggaaagaaaatcactctctgtgctggtcacagacttcgtgaatcattttcttttccacacaacata

SEQ ID NO: 142580 - DNA, 270 bp, Glycine max
ttgcagcgcactcatcgtattaaaggaatgattaaaatggtggccacagttggtattcctgagaatacaggtatagcattggcctgtgctatgaatagttcttttagggggcgcgccagttctgatatttacaccatctgctctcaagactgtgaattatggaatcctgcttgcacaaaagcaatgactatgtcatttaatccaaacccgtgttctgatgcatggagtttggaatttctgaagcgtaccggatttcattgtgatatcatt

SEQ ID NO: 142581 - DNA, 263 bp, Glycine max
gtcaaaaggagtgattgggcctcattggtacaagtgtttttaacaaacagcaacagtacagagcattttgatgcatgtaagtggacaaaatcagaaccacattcctgggaattaatcttcccaatagaggtatgtggtcctaataatggttttgaaatgtggagttctgagtgggcaaatcaaacttcatggcatttgagtttccttattgacaatcccaaacagtctacagtttttgatattctcttgggaatctctcaaga

SEQ ID NO: 142582 - DNA, 270 bp, Glycine max
gcaagtcctgactgcaacatagttggtgcaatgcttttggttgatacttatcataccaatcctgaaaatgcagttcgtagtatttttgttgcgcctttcagaggcggaaggcccattcgggtggttacatttccgaataccattgtgcagattgaaccagacatgaattcaaggtttcagcttttgagtaccactaccaatggtgattttgttcaagggaaagatctcgcaatggttaaagttaatgtagcatgtgctgctgttggcttg

SEQ ID NO: 142583 - DNA, 105 bp, Glycine max
aattttaataaaccgcgatcacaggttgccgcaccttaaaaccggaaacaaaagcaatcgttacttgatttcaagaatttctcaatttcttcctacttctttgtg

SEQ ID NO: 142584 - DNA, 268 bp, Glycine max
gtggtctcagggaacacttggccttcttgttgctgctgagatcaagcttatacctgttaaggagtacatgaagctagcctacaaacctgttgttggcaccctgcaagatcttgcacaggcatattgtgattcttttgctcccagagatggagaccaggataacgaggagaaggttccagactttgttgaaggaatgatttatacaccaacagaaggtgtgatgatgacaggaagatatgcttcaaaggaagaggccaagaagaagggg

SEQ ID NO: 142585 - DNA, 269 bp, Glycine max
aactttaagcagatgtctaatgttttatgggtggctcctgaggacaaggcgagtttatggtcacaacttcattatgtttcgtgcaataatctggaaatgcaagaagcttatcttgtcaatctcgtaaatgtgttacgagaattatatttgcacagtccagaggaagctcgccaattgagaaggaaagctctctctcgtattgaatggctgcaaaaagctgatgtgcctaccatagcacagattgaagagttccattcgatgcagaggat

SEQ ID NO: 142586 - DNA, 269 bp, Glycine max
gtgatcttatggaatagaagttcatccaaagcaaaagttactgcatcctggtctgacataggcctgaaacctggaacttcagttgaagcaagagatttatgggcgcattcaacacaatcatctgtttcgggagaaatatctgctgaattagattcacatgcttgtaagatgtatgtcgtcactcctaactaagctgttaatttcttgaggcagaaaaggaggtaaaaacagaagtcaggagaaacaaatgcattggcaatagttggatg

SEQ ID NO: 142587 - DNA, 268 bp, Glycine max
aagacaccctgcaatttgctctgtactccaaccatggatgagttattttcaaatagggagggctcatcagcacagaagggccttctcaaaagtccagcactccttaagtacatctttgaaaggagtggctatcccaaagagcacgagcaattgaagcaactccgagagataacagtgcagaaatacggggttaagagtacgatgagtgtaccggtggatgaggcccaattcctatccattcttctaaaaatcatgaacgcaaagaaaa

SEQ ID NO: 142588 - DNA, 268 bp, Glycine max
gttcatgaatatgtcaagccttactttagtggttctaaattgaaaagctttctagctggtcataatatcaccattactgatggtattgacaaaactagtgcaactttgcaatttagaaagttagcagattgtgattttctcaagagaaactttaagcagatgtctaatgttttatgggtggctcctgaggacaaggcgagtttatggtcacaacttcattatgtttcgtgcaataatctggaaatgcaagaagcttatcttgtcaatc

SEQ ID NO: 142589 - DNA, 265 bp, Glycine max
gttggaggaaccattctgcgtagtgatctattggcaaattttttgacagagggcaattttagagcaagtgttgatttgcagcgcactcatcgtattaaaggaatgattaaaatggtggccacagttggtattcctgagaatacaggtatagcattggcctgtgctatgaatagttcttttagggggctcgccagttctgatatttacaccatctgctctcaagactgtgaattatggaatcctgcttgcacaaaagcaatgacta

SEQ ID NO: 142590 - DNA, 266 bp, Glycine max
  unsure (1)..(266): unsure at all n locations
ccttacatnaccgagaataacacgatacggctcattgggaggaattatataatacacgtgaacgtgctcggcagttgttagccaatggaagctctgaaatccctgaggagactaccttcacaaatgttgaacagttcctggagcctcttgaatnatgttatagatcgctgtgtgcatgtggtgaccaaccaatagctgatggaagccttcttgatttcttgcgccaagtttccacacannnncgnntacngncnagacntncnnaa

SEQ ID NO: 142591 - DNA, 259 bp, Glycine max
atcgagccgaatcggctcgagaatttgttagtggaaaaaccttacaaatatgatataattggtgctggttcacattcttcaggagattttcctgaaaaggaagatcacgaaaaacccaaaaagattgataccagattgagacaaagaatagatcctcaatacaatgaggttcaggctcagatggaaacaaatttgtttaaattgtctcttgatggtgttgaaactcctaaaggttctatgttggatcttaaaatttctc

SEQ ID NO: 142592 - DNA, 258 bp, Glycine max
ggagacaacatgattgagaggtccacaaaccttgactggtacaagggtcctactctgctagatgcacttgaccagatctctgagcccaagaggccttctgacaagcccctcaggctaccccttcaggatgtgtacaagattggaggaattggaactgtgcctgtgggacgggttgagactggtgtcttgaagcctggaatggtggtgacttttgcaccaactggactgacaaccgaagttaagtctgtggaaatgcac

SEQ ID NO: 142593 - DNA, 264 bp, Glycine max
ctcgagccggttgtcaagttggaatcaacccatactccatggaatggactggtttggccaatagattactgagtaagggcaatgatattctgtgttgcgattatgctagttttgatggtttgattaccaagcaagttatgagcaagatggcagaaatgataaacagtctttgtggtggtgatgaaaaattgatgcgtgaaaggacgcacctgctgttggcttgttgttcaaggatggcaatttgtaagaaagatgtttggagag

SEQ ID NO: 142594 - DNA, 262 bp, Glycine max
cagggggttcctagaagcatcagggacatccaccgcaaggttcgtgacagttttgatggtctcatcattcagaggaatatggccctttttttttccggtggtgaccggaaggaattgaagctaagggttactggtaggatctggaaagaacagtgaagggagagagatgtccttccactagcaattatatataggctgatagtttgtagtgaaactcgtttgtagtgatatatgtaccttctggtcttctaattgtgttttg

SEQ ID NO: 142595 - DNA, 263 bp, Glycine max
aaagtttatccattggatgctgtttttgacaatcccgatgatgtgcctgaatatataaaaacaaacaagcgctatgccggatcatctaaatggacggttcaggaagttgctgaatctgttaaggaagactttggcagtatagatatccttgtgcactcacttgccaatggaccagaggtgaccaaaccattgttggagacatctcggaatgggtatcttgctgcaatatctgcatctagttactcatatgtttctttactcaa

SEQ ID NO: 142596 - DNA, 184 bp, Glycine max
attttaataaaccgcgatcacaggttcacgcaccttaaaacaggcaacaacagcaatcgttacttgatttcaagaatttatcaatttcttcctacttctttgtgtacgatttcttaagggaaagaaaatcactctctgtgctggtcacagacttcgtgaatcattttcttttacacacaacata

SEQ ID NO: 142597 - DNA, 257 bp, Glycine max
tgctttcatcactgtggcattgacatacttccagcttgctgctgaggatcatgagtggtggtggagatcattcctatgtggtggttcaactgggttatttatctatgcctactgtctgtattactactatagcacgctccgacatgtctggattcatgcagacctcatttttcttcggatacatggcctgtatatgctatggtttcttcttaatgcttggaaccgttggattccgtgctgctttgttctttgtccgc

SEQ ID NO: 142598 - DNA, 262 bp, Glycine max
gtgcatgatagttcagtgtctacaataccaggtgattttgtcattggtgttaagttgacaaccataaacaatatgtgtgcatatgggctcaatccttctatttcaggttctcgtcttttgggcaccattcctcagtccatttcacagcaaactgtttggaatcaaatggcaacagtgagaacaccattgaattttgattctagcaagcagagcttttgtcaattttttattgaccttctcggtggaggaattttagtggaca

SEQ ID NO: 142599 - DNA, 261 bp, Glycine max
tgattccaggaaccagtgttgaagaggcttacaacaagctaatagttgaacttgagaaaagtgttcctacattggttggcattgaatgtcccaaggatgagaaacttcctcgtcgcaaaatttttgacaaacctaagacgcgctgcttcactattctccctatggagtttaatcttgtggtccgtcaaaagtttttaaattttgtgaggttcattatgaagaaaagggacaagcttagttgtcaagttggaatcaacccat

SEQ ID NO: 142600 - DNA, 256 bp, Glycine max
tggaattcgtgttttctttcgcttgttcgtttgtttaattcaataaaggaaattaggcatgaccctcttgttgagtatgctctgcccatctgaaaatttccacacctcttttaattgtcgtaatgatgtgtgaagtgtgtgttattttaacaaaaaaaaaaaaaaaaaaaaaaaaaaaaaaaaaaaaaagggggggggcccccctttgcgacccgccccacccgcgaatttttgccggaccacgaactcgggggcc

SEQ ID NO: 142601 - DNA, 234 bp, Glycine max
gctactgcaatgcatgtggagttctatagatattatctttgatagtttcgcaagtcctgattgtaacatagttggtgcaatgcttatggttgatacttatcataccaatcctgaaaatgcagttcgtagtatttttgatgcgcctttcagaggaggcaggcccattcgggcggttacatttccgaatacctttgtgttactgaacctagactgacttcaaggttccagcttttg

SEQ ID NO: 142602 - DNA, 264 bp, Glycine max
ctctttctccgagaacaaaaaaaaaaacgtgattcgctcttctcttcgaataaaccacaaaaccaacaaacgagaagaggagtgagagaagatggggttgtcgttcacgaagctgttcagcaggttgtttgcgaagaaggaaatgaggattctgatggtaggtctcgatgctgctggtaagacaaccatcttgtacaagctcaagcttggagaaatcgtcaccaccatccccaccatcggatttaatgttgagactgtggagta

SEQ ID NO: 142603 - DNA, 101 bp, Glycine max
ggaaattaggcatgaccctcttgttgagtatgctctgcctatctgaaaatttccacacctcttttaattgtcgtaatgatgtgtgaagtgtgtgttatttt

SEQ ID NO: 142604 - DNA, 265 bp, Glycine max
gaagattgttgacgtgctgcttgagcaaaacattgttcctggtattaaagtcgacaagggtttggtgccccttgcaggttccaacgacgagtcatggtgccaaggtttggatggtctagcctctcgctcagctgcatactacgagcaaggtgcccgtttcgccaaatggcgtactgttgtgagcatccccaacggtccctctgctctggcagttaaggaagcagcctggggtctggctcgctatgctgcaattgctcagtacaat

SEQ ID NO: 142605 - DNA, 261 bp, Glycine max
  unsure (1)..(261): unsure at all n locations
cccttctacgtgttctccattctctctctcactcctccatctacgtttcttaaatcatttccttctttctctctttctttatcttctcattttcctcattacactctttatatnctctcaacttttctctttttaaccatagttcacatattatatcatcacatatcatagtgatatattatatcatatcacaatgtgtggcaaacttgctgtgcttggttgctctgattcatctcaagccaaaagggttcgcgtccttga

SEQ ID NO: 142606 - DNA, 256 bp, Glycine max
gctcacagttatttgcaatagcatttttaatgagatgctcattagatatagctatgaaaaattactgcgccaggctaaagctccaagtatgtttttacaatccttcaaaaattttgtttctttgtgtgtgtatggtgatgataacttaattagtgttcatgaatatgtcaagccttactttagtggttctaaattgaaaagctttctagctggtcataatatcaccattactgatggtattgacaaaactagtgca

SEQ ID NO: 142607 - DNA, 96 bp, Glycine max
attggaaattttaataaaccgcgatcacaggttgccgcaccttagaaccggaaacaaaagcaatcgttacttgatttcaagaatttctcaatttct

SEQ ID NO: 142608 - DNA, 256 bp, Glycine max
  unsure (1)..(256): unsure at all n locations
ccnggatgctttgtttaattcgacactctctgcctttggttgagctaaggcgggtcctactggtgatagaactcatgtgtctactcaagtcatgggctctcaagggcatgcagcacctgcatatgttgcaactggtcggatgacggccaaaagtgatgtctacagcttcggagttgtgttgctctagattctatcaggaagacgcgcagttgataaaaccataaccggaatggagcagcatctggtcgactgggca

SEQ ID NO: 142609 - DNA, 259 bp, Glycine max
tgacttctttcaacctaacccatcgttcgcacggagccgtggtggttctggctctgtccttttttcctttctctcgttaccagaaccagaagaaccatttgtggccaacatggatttggaccagtggatctccaaggtcaaagagggccagcatcttcttgaagacgagcttcaacttctctgcgaatatgtaaaagagatccttatcgaggagtccaatgtgcagcctgtcaatagtccagtgactgtttgtggtgat

SEQ ID NO: 142610 - DNA, 268 bp, Glycine max
aactcaagtttatcgatacctcttcaaagtttgggcatggtcgcttccagaccacacaggagaagcagaagttctttggacgcctcaaagcataattatgttaattggatggaaatgctggaattctatttggttgccatcacttataaactttgtagtgtttctgttttgatattatggattctcgggtagtgagttttttttctccttaagttggccaaacttttgtttcagggaagactgatcgtttatttcaaattttgtttat

SEQ ID NO: 142611 - DNA, 258 bp, Glycine max
cttttctttctttttttccttcttcgtcccagatcccggtggccttttccctctctttctctggaaaattcccccgattttctcgagaaagtgaaacggaattatgagctttcaggacatcgaggctgggcggcccttcagttcgaggcgcgggttgatgaacgggaagcaagacccgacgcaagcggtggctgccggaatattccagatcaacaccgcctaatccaccttccagagactcgtcaacaccctcggaac

SEQ ID NO: 142612 - DNA, 187 bp, Glycine max
  unsure (1)..(187): unsure at all n locations
ctggaactctgtaagtcaacaaacatggctttacagaanattggtgctgcaaacagtgatgacgccttctacaggtataagatgcctaagatgattaccaaaattgagagcagaggcaacggcatcaccactaatgttgtcaatatggttgacactgcaaaggcattggcaaggcctgcgtcttaca

SEQ ID NO: 142613 - DNA, 186 bp, Glycine max
gctaatgcactgcatgtgggctctatcgaaattatctttgatagtttcgcaagtactagatataacatacttggtgctatactttacgttactacatatcagagcagtactgacaatgcacgacgtagtatacctacagcgcctttacgcggaggacggcccattcgggtggttcactttccgaat

SEQ ID NO: 142614 - DNA, 271 bp, Glycine max
gcagttagagacagagagagagagaaacaaaaccctaattggtgagtggcgaaaatggcgcaccggcggcggcagcagcagcaacaggagcagcagtaatcgagcaagtgcagtgcttcgggcggaagaagacagcggtggcagtgacctactgcaagcgtggtcgaggcctcatcaagatcaatggctgcccgatcgagctggtggagccggagatcctccgtttcaaggccttcgagccaatcctcctcctcggccgccaccgcttcgc

SEQ ID NO: 142615 - DNA, 256 bp, Glycine max
tgtgaagagatgacattgattccgggaaccagtgttgaagaggcttacaacaagctaatagttgaacttgagaaaagtgttcccacattggttggcattgaatgtcccaaggatgaaaaacttcctcgtcgcaaaatttttgacaaacctaagacgcgctgcttcactattctccctatggagtttaatcttgatgtccgtcagacgtcatgaaatgttgtgacgtgcattctttcgaaaaggcgcaagcttagtt

SEQ ID NO: 142616 - DNA, 270 bp, Glycine max
gaaaaattgatgcgtgaaaggacgcacctgctgttggcttgttgttcaaggatggcaatttgtaagaaagatgtttggagatatgaatgtggaatcccttctggatttccgctcacagttatttgcaatagcatttttaatgagatgctcattagatatagctatgaaaaattactgcgccaggctaaagctccaagtatgtttttacaatccttcaaaaattttgtttctttgtgtgtgtatggtgatgataacttaattagtgttcat

SEQ ID NO: 142617 - DNA, 268 bp, Glycine max
caacattctcataatcaaataccatttcattcattcttacatattgcttaattttatctgaattttgaaacaccttctgaatggctttttcaagagttgcattgttaatatgcacggtaattgggtattttgtgattgcctctgcgggcaatttttaccaagattttgatatcacttggggagatgggcgtgctaagatactcaacaatggcgagcttctcactctgtctcttgacaaagcctctggctcgggtttccaatccaagaa

SEQ ID NO: 142618 - DNA, 269 bp, Glycine max
gcattgcgttcaatggtgcaatccaatccacaaattctacagcctgtgcttcaggaacttggtaagcagaatcccggtcttttaagactgattcaagagcatcatggggagtttctccagttgataaatgaacctgttgagggttctgaaggtgatatgtttgagcagcctgagcaagacatgccccatgccatcaatgtgactccagctgagcaggaggcaattggaaggcttgaggctatgggatttgatagagcctcggtgataga

SEQ ID NO: 142619 - DNA, 280 bp, Glycine max
tcggctcgagtaaacttcttactgatgtgaagttgtactagggtcagcatattcctgtctctaatatcagtgtagggcgaaatcatgcagttcgaatacccttaatggcacaggatgagattctgtcttctgatgcaagtgacttcataactgtgttggtgcataaaaatagcacgcctcaagctactgcaattcatgtgggagctatagagattatcattgaaagtttcgcaagtcctgaatgcaacatagttggtgcaatgcttttggttgataacta

SEQ ID NO: 142620 - DNA, 122 bp, Glycine max
acaggttgccgcaccttaaaaccggaaacaaaagcaatcgttacttgatttcaagaatttctcaatttcttcctacttctttgtgtacaatttcttaagggaaagaaaatcactctctgtgc

SEQ ID NO: 142621 - DNA, 268 bp, Glycine max
caccaaataaaattggactggacaacaagatacaagatttgtgttggtattgctagaggtttggcatacctccatgaagaatcaagattgaagattgttcatagggacattaaggcaactaatgtgttgcttgatcaagatctcaatccaaaaatatcagactttggtttggccaagcttgatgaagaggacaacactcatattagcacccgaatagctgggacatttggatatatggctccagaatatgccatgcatggttacttga

SEQ ID NO: 142622 - DNA, 268 bp, Glycine max
actatatggaaagaattcctcttgccacatctgagggttttcctcatgtgctttcacgcaacaatggagaacaaggcaaaaggagatttgtctctggggatggtgaagagatgacattgattccaggaaccagtgttgaagaggcttacaacaagctaatagttgggaacttgagaagagtgttcctacattggttggcattgaatgtcccaaggatgagaaacttcctcgtcgcaaaatttttgacaaacctaagacgcgctgcttc

SEQ ID NO: 142623 - DNA, 267 bp, Glycine max
cgtgaaaggacgcacctgctgttggcttgttgttcaaggatggcaatttgtaagaaagatgtttggagagttgaatgtggaatcccttctggatttccgctcacagttatttgcaatagcatttttaatgagatgctcattagatatagctatgaaaaattactgcgccaggctaaagctccaagtatgtttttacaatccttcaaaaattttgtttctttgtgtgtgtatggtgatgataacttaattagtgttcatgaatatgtc

SEQ ID NO: 142624 - DNA, 228 bp, Glycine max
cgctctgtttctgtctctgactttgcggctgaggattccgaacgagcgacgttcttcgtttctcgcaaagtttaagtcatcatgggttaggaaaagactcacatcaacattgtcgtcattggacatgtcgactctgggaagtcaactaccactggtcatttgatctacaagcttggaggtattgacaagcgtgtgattgagaggttcgagaaggaggctgctgagatg

SEQ ID NO: 142625 - DNA, 264 bp, Glycine max
atgaacatcaatcggattctctgctgtttaagaacacaagtgaagctgcaatagcgggggtgaaaagcatagctaagtattgcattaaatcgggaacggtgagacggctaatttacactgcctcggtggttgctgcttctccgcttaaagatgacggctctggtcttaaagatttcattgatgaaacttgttggacgcctctcaacctttcaatggggactcttcatcagtggtacactgattcgaagacacaggctgagagag

SEQ ID NO: 142626 - DNA, 259 bp, Glycine max
taaataggtggatgggaaaactgactttccctcagggcacttcccgaagtgttaagagaatgcctctttctatagggggacgagctggtgcaaagaatgctattctcatgaatatgccaaatgctgttctttcaatgtggagatattttgttggagatctcgtctttgaagtttctaagatgacttctccctacattaaatgtacagtctctttcttcatagcatttggacatttggctgatgacaccatcaattttga

SEQ ID NO: 142627 - DNA, 237 bp, Glycine max
cacttccctaagtgttaagagaatgcctctttctatagggggaggagctggtgcagagaatgctattctcatgaatatgccaaatgctgttctttcaatgtggagatattttgttggagatctcgtctttgaagtttctaagatgacttctccctacattaaatgtacagtctctttcttcatagcatttggaaatttggctgatgacaccatcaattttgaggcttttccacacaa

SEQ ID NO: 142628 - DNA, 266 bp, Glycine max
agactcaatatgaaagtggaacgcggctttctttacaccatgccacctattagttggtctgatatatcttactataaggaccagattctacccttgatacaaaagtacaaagttgttcacttaaatagaactgatgctcggttggccaataatggtcaaccgatagagattcagaagctgcgttgccgggtcaattttagtggtctgagatttacttcccagatagaggagttgggcagaaaggtgatcaggcttctaaggcaaaa

SEQ ID NO: 142629 - DNA, 266 bp, Glycine max
aaattgaaaagctttctagctggtcataatatcaccattactgatggtattgacaaaactagtgcaactttgcaatttagaaagttagcagattgtgattttctcaagagaaactttaagcagatgtctaatgttttatgggtggctcctgaggacaaggcgagtttatggtcacaacttcattatgtttcgtgcaataatctggaaatgcaagaagcttatcttgtcaatctcgtaaatgtgttacgagaattgtatttgcacag

SEQ ID NO: 142630 - DNA, 266 bp, Glycine max
gaaatgcaagaagcttatcttgtcaatctcgtaaatgtgttacgagaattgtatttgcacagtccagaggaagctcgccaattgagaaggaaagctctctctcgtattgaatggctgcaaaaagctgatgtgcctaccatagcacagattgaagagttccattcgatgcagaggatgatgaatgctcctgattcaaatgataatattgatctactgttgagcattgatttgtggggtttacaaggagcaggtaaagcttttccaaa

SEQ ID NO: 142631 - DNA, 266 bp, Glycine max
aacagagatgacgacacgattcaagaagaaccgcaagaagcgcggccacgtgagcgccggtcatggccgtatcggaaagcaccgtaagctccccggcggccggggaaacgccggtggcatgcatcaccacaggatcctgttcgacaagtaccatccgggcttcttcggtaaggtgggaatgaggtacttccataagcttcgcaataaattctactcccccatcgtcaacgtcgaaaagctatggtctctcataccccaagacgcga

SEQ ID NO: 142632 - DNA, 261 bp, Glycine max
tcaagattgaagaatggcaattttgttgagttgcatggttactgtgttgaaggaaatcttcgtgtacttgcatatgagtttgctactatgggctctcttcatgacatattgcacggtagaaagggagttcaaggtgctcaaccaggaccaactcttgattggatacagcgagttagaattgcagttgatgctgctcggggattggaatatttacatgagaaagttcaaccaccgattatacacagggatatcagatcaagt

SEQ ID NO: 142633 - DNA, 263 bp, Glycine max
aaaaagtttcctctacaaaagcacaatttgttagtggaaaaaccttcaaatatgatataattggtgctggttcacattcttcaggagattttcctgaaaaggaagatcaagaaaaacccaaaaagattgataccagattgagacaaagaatagatcctcaatacaatgaggttcaggctcagatggaaacaaatttgtttaaattgtctcttgatgatgttgaaactcctaaaggttctatgttggatcttaaaatttctcaa

SEQ ID NO: 142634 - DNA, 260 bp, Glycine max
gggacagtgagaagactttgccaaataatttttctgcagaattgctctcttgcaaattggatactgttactggccaatattatcctgagtgggctccagttaattgtcgagttcatcgacaaccaattcacatcactgaaggaaattatgtcagaaagcaagatgtcagcattgaatatgatgcatgtacaattccaaatgattgtggtcacatggttgttgccaaggttggaaatcacaaacaaattgttggtttccat

SEQ ID NO: 142635 - DNA, 226 bp, Glycine max
tggaattcgtgttttctttcgcttgttcgtttgtttaattcaataaaggaaattaggcatgaccctcttgttgagtatgctctgcctatctgaaaatttccacacctcttttaattgtcgtaatgatgtgtgaagtgtgtgttattttaaaaaaaaaaaaaaaaaaaaaaaaaaaaaaaaaaaaaaaaaagggggggccccccgaatagagccctcgcaccccggg

SEQ ID NO: 142636 - DNA, 259 bp, Glycine max
cacttcccgaagtgttaagagaatgcctctttctatagggggaggagctggtgcaaagaatgctattctcatgaatatgccaaatgctgttctttcaatgtggagatattttgttggagatctcgtctttgaagtttctaagatgacttctccctacattaaatgtacagtctctttcttcatagcatttggcaatttggctgatgacaccatcaattttgaggcttttccccacaagctggtgccctttggagagatt

SEQ ID NO: 142637 - DNA, 259 bp, Glycine max
gtgatttgtgagataagccatggtggcaaaagatgcaaactcgtgcagagttggttgaagcttccgctatcctcatatggattgcttcagcccttcatgctgctgttaactttggacagtatccatatggaggtttaatcctaaacaggccaactattagcaggagattcatgcctgaaaaggggtctcctgaatatgatgcgttggctaagaaccctgagaaggagtttttgaagactattactggcaagaaggagac

SEQ ID NO: 142638 - DNA, 260 bp, Glycine max
gtgaggaagcatcttgtgacttattggctgatgaccctggcacctaccgttggatggcacctgagatgatcagaaggaaatcctacgggaaaaaggttgatgtctacagttttgggcttatcttatgggagatgttgactggaacaataccatatgaggatatgaatccaatacaggctgcttttgcagtagtaaataagaattcaagaccgattattccatcaaactgccctcctgcaatgcgagctctaattgagcaa

SEQ ID NO: 142639 - DNA, 263 bp, Glycine max
ctcgagccgaatcggctcgaggaaaaaagcagaaagtatggcttccacggcagcgtacctggctcggcgcgcggcgcagaagcgagagggttcggatcctctaccgccgtgccctcaaagacactctcaactgggccgtacatcgccacctcttctacgacgacgcttcaaacctccgcgaaaggttcgaggagaacagacacgtggaagaccctgataccattgacaggctcatagcggatgctgaagcttcctacaacaag

SEQ ID NO: 142640 - DNA, 261 bp, Glycine max
tcaggccttcttctctgctaatgctgcagctcaggcttcaaggaagtcctctccaagagtgaccaacgaggctgttcagaaggctgctgctgcattgaagggttcagatcatcgccgtgcaacaaatgtcagtgccagactggatgctcaacaaaagaagctcaaccttccaatccttccaaccaccactattggatccttccctcagactgtagaactgaggagggtacgccgtgagttcaaggctaccaagatctccga

SEQ ID NO: 142641 - DNA, 258 bp, Glycine max
ccgattgctagaatggaatttcgatgctcagtcatctcttttaccattctcttctctcttgctcttgcaggagagagccatgtccatgcatcgctacctgtggaagattattgggaagctgtttggcgaaacactcccattcccactgcactgcgagatcttctaaagcctctccctgcaggtgttgaaatcgatgaactccctaagcaaattgatgatacacagtacccaaaaacattcttctataaagaagacctt

SEQ ID NO: 142642 - DNA, 257 bp, Glycine max
gtagaagaggcacttagtactcagagattattcatattagattaccaagatgcattcatcccatatttgacgaggataaacagcctacctactgcaaaagcttatgccacaaggacaatcctgttcttgaaagatgatggtactttgaagccacttgctattgaattaagcaaaccacatccagatggagataatttgggtcctgagagtatagtggtgttgcctgcaactgaaggtgttgatagtacaatttggct

SEQ ID NO: 142643 - DNA, 258 bp, Glycine max
caatggacctccgtgaatcgataagcaaccaaaccgacgtggccctgagcatctcaaagctcctgttgtcgaaagaagctcgggactagaacctcgtgtattcgccgctgtcgttgcacgttgttctgagcatcatcgccgctggctccaagggccccacactcgatcagcttctctccttcctccgatccaaatccaccgatcatctcaactccttcgcctctcagctcttcgccgtcgtgctcttcgacgcctctc

SEQ ID NO: 142644 - DNA, 256 bp, Glycine max
ccattcctcagtccatttcacagcaaactgtttggaatcaaatggcaacagtgagaacaccattgaattttgattctagcaagcagagcttttgtcaattttctattgaccttctcggtggaggaattttagtggacaaaactggagattggatcacacttatacaaaattctccaattagtaacttgttgagagttgctgcttggaagaaaggttgtttaatggtcaagattgtgatgtctgggaatgcagcagt

SEQ ID NO: 142645 - DNA, 194 bp, Glycine max
cttgatcactgtcaaaagggtagttgcaaattgcaatggctaagcatgatgttgagggtggttccttctcagcaaaggaccaccatgatcctcctccagcacctgtgattgacgctgaggaactcacacagtggtccttctacagggctttgattgctgaattcattgccacattacttatcctccacatcaca

SEQ ID NO: 142646 - DNA, 255 bp, Glycine max
atgccatgaagtttgatttgcccactcagaactccacatttcaaaaccattattgacaatcccaaacagtctacagtttttgatattctcttgggaatctctcaagattttgaaattgctggtaatactcttatgccagcttttttctgttccacaggctactgccagatcttctgaaaatgcggaatcctctgcatgatctggaattcgtgttttctttcgcttgttcgtttgtttaattcaataaaggaaatt

SEQ ID NO: 142647 - DNA, 254 bp, Glycine max
  unsure (1)..(254): unsure at all n locations
catctaggggcatcatgggagtggcatatgttgattgtgttgatgaggaggattcctttgaggaagtttctttaagtgcagcacttaatggtgttgagggtttggactatatggaaagaattcctcttgccacatctgagggttttcctcatgtgcttgcagacagcatacgacccgaaganattgnatntgggtnagnanagaatgaggaaaaggaatggaaagatgnatgggatgaaagggataaggatttt

SEQ ID NO: 142648 - DNA, 254 bp, Glycine max
ggcaacttgcttccttggaatgccttgatcactgcagtggattactttgcctacctctatccaacaaaacacatagaaaaggttttctctgtggcctatatgatttcatcagtgatggtgcttcttgggatgatcagttgggggggttggagcaaaacaacattgaggctgagaatgaacttggggttctccatgttcgttatgtctcttatggtagcaccagtcatagactggacctcaagcagcaccaagct

SEQ ID NO: 142649 - DNA, 256 bp, Glycine max
cgcgacataaagaaagaatcccaggcgaggagaaagatggaggggaaggagcaggatgtgtcgttgggagcgaacaagttccccgagagacagccgattgggacggcggcgcagagccaagacgacggcaaggactaccaggagccggcgccggcgccgctggttgacccgacggagtttacgtcatggtcgttttacagagcagggatagcagagtttgtggccacttttctgtttctctacatcaccgtcttaa

SEQ ID NO: 142650 - DNA, 110 bp, Glycine max
tgaaattttaataaaccgcgatcacaggttgccgcaccttaaaaccggaaacaaaagcaatcgttacttgatttcaagaatttctcaatttcttcctacttctttgtgta

SEQ ID NO: 142651 - DNA, 186 bp, Glycine max
gaaattttaataaaccgcgatcacaggttgccgcaccttaaaaccggaaacaaaagcaatcgttacttgatttcaagaatttctcaatttcttcctacttctttgtgtacgatttcttaagggaaagaaaatcactctctgtgctggtcacagacttcgtgaatcattttcttttccacacaacat

SEQ ID NO: 142652 - DNA, 254 bp, Glycine max
aacaggctaggtcatgttttcaaggaccctgataggtatgatcctgatcgatttgctgtggggagggaagaggacaaggtggcaggtgcattctcatacatttcatttggaggaggcagacatggatgccttggggagccttttgcatatctgcagataaaagctatatggactcatctgcttaggaattttgaactggagttggtgtcacctttccccgagattgattggaatgccatggttgtgggagtgaa

SEQ ID NO: 142653 - DNA, 252 bp, Glycine max
tattgtgttttaaatccacaaaaggccctggcaccacattcctgagaggaaataatccaatcaattgtaacctgaacatcctgcattggggtggcagtccatccagtgacacaaatgattggtgtatatcctctcaggaatgtgttcccaggacctattgtgctttaaatccacaaaatccttgtgtgttaaataggcggatgggataactgactttccctcagggcacttcccgaagtgtttcgagactgc

SEQ ID NO: 142654 - DNA, 255 bp, Glycine max
catggatcaaattcctgctgttgacaagttgtattctactaaggttaataagtttgcaaaaattatgaaccttagacaaagtgttgttggtgatctaaaacttcttactgatgggaagttgtatgagggtaagcatattcctgtatctaatattagtgcaggggaaaatcatgtagttcaaatacccctaatggcacaggaggaaattctgtcttctagtgcaagtgatttcagaactgcaatggtgagtaaaaa

SEQ ID NO: 142655 - DNA, 254 bp, Glycine max
tgagaaatcagggggaataacgtgtccaggaggagcattttcaaaccaacttgcaatgttaacagcaagaaattacatgtttccagagattaaaactaaaggatattgtaattttggcaagaagcttatagtatttacgtctagtggtggacattattctattgagaaaactggtatggcattaggattaggaattgataatatagttaaagttccttgtgatgatcaaggacgaatgcgcacagatgcattag

SEQ ID NO: 142656 - DNA, 263 bp, Glycine max
ctgatttgaagagaggaatgttctctcaacaagaggaggatcttataattagtcttcatgaagttctaggaaataggtgggctcaaattgcagctcaattaccagggagaacagataatgagattaagaacttttggaattcatgtttgaagaagaagctaatgaagcaagggattgaccctgcaacacacaagcctctcctcagtgctcaagaacacataattataaaggaagagaaggaaaccattttggagacaccacca

SEQ ID NO: 142657 - DNA, 192 bp, Glycine max
taagatttgatattttaataaaccgcgatcacaggttgccgcaccttaaaaccggaaacaaaagctatcgttacttgatttcaagaatttctcaatttcttcctacttctttgtgtacgatttcttaagggaaagaaaatcactctctgtgctggtcacagacttcgtgaatcattttcttttccacactac

SEQ ID NO: 142658 - DNA, 268 bp, Glycine max
ttggatggagctacatgtcaaaaacagggagaagcttctcacatcccttcgtcaacacctctccgactcttctcgttctctccatggcttcgtcatccttcaaggtggcgaggagcatacgcgttacgacaccgatcacttggagctcttcaggcaagagagttacttcgcttacttgtttggagtcatagagcctggattctatgcagctattgacgttgcaactgggaattctatcctatttgctcctaggttaccttctgagtat

SEQ ID NO: 142659 - DNA, 187 bp, Glycine max
tgaaattttaataaaccgcgatcacaggttgccgcaccttaaaaccggaaacaaaagcaatcgttacttgatttcaagaatttctcaatttcttcctacttctttgtgtacgatttcttaagggaaagaaaatcactctctgtgctggtcacagacttcgtgaatcattttcttttccacacaacat

SEQ ID NO: 142660 - DNA, 254 bp, Glycine max
ctgtgttttactatgagattcttaactctcctgatcgtgcatgcagccttgcaaaacaggcttttgatgaggctattgctgaattggatacgttgggagaggaatcatacaaggatagcactttgatcatgcaacttcttcgtgataaccttaccctctggacctctgacatgcaggatgatggtgcagatgaaatcaaagaagccgcacccaaaggtgacggggaacaaaattaaacataccatacttctaat

SEQ ID NO: 142661 - DNA, 200 bp, Glycine max
cacaaaatccttttgtgttaaataggtggatgggaaaactgactttccctcagggcacttcccgaagtgttaagagtatgcctctttctatagggggatgagctggtgcaaagaatgctattctcatgaatatgccaaatgctgttctttcaatgttgagagattttgttggagatctcgtctttgaagtttctaagatg

SEQ ID NO: 142662 - DNA, 261 bp, Glycine max
gtttgacaacagtgaaataggtctttattctaatcccactttggaagatatcccacattcagcttgggaccttttttgctgggacagtgagaaaactttgccaaataatttttctgcagaattgctctcttgcaaattggatactgttactggccaatattatcctgagtgggctccaattaattgtcgagttcatcgacaaccaattcacagcactgaaggaaattatgtcagaaagcaagatgtcagcattgaatatga

SEQ ID NO: 142663 - DNA, 254 bp, Glycine max
gtcaagagggagttgctcacattggtgaattgaaatctggtgtctatgttccactgcctacaaaaaccaatttgatggaaactcccaaggaatggcaactggatctaccttgtgacaaaattcctagtgtcttgactacaactgatgagagattggtaggcacagaacatgagggatatgatccttttcttggtgcaattcaaaaatatgccactcccatgatgcccctagatgaagaaattctttctaaggtt

SEQ ID NO: 142664 - DNA, 253 bp, Glycine max
aatctagcagaagcaaattcacttctaagatacacatattaagttcaccagagagagagagagacattaatcaagatgggtacgtggttcacaaatgcaaggccgtatctgctgttagtggcggttcaatttggctcagcaggcatgttcatatttgcgatggatgctataaagaagggtatgagccattacgtgttcatcgtctatcgtaatgccatcgcctctgtatctcttgctcccttcgcattcgttt

SEQ ID NO: 142665 - DNA, 252 bp, Glycine max
caagattgtgatgtctgggaatgcagcagtcaaaaggagtgattgggcctcattggtacaagtgtttttaacaaacagcaacagtacagagcattttgatgcatgtaagtggacaaaatcagaaccacattcctgggaattaatcttcccaatagaggtatgtggtcctaataatggttttgaaatgtggagttctgagtgggcaaatcaaacttcatggcatttgagtttccttattgacaatcccaaaca

SEQ ID NO: 142666 - DNA, 249 bp, Glycine max
taagtggacaaaatcagaaccacattcctgggaattaatcttcccaatagaggtatgtggtcctaataatggttttgaaatgtggagttctgagtgggcaaatcaaacttcatggcatttgagtttccttattgacaatcccaaacagtctacagtttttgatattctcttgggaatctctcaagattttgaaattgctggtaatactcttatgccagctttttctgttccacaggctactgccagatc

SEQ ID NO: 142667 - DNA, 175 bp, Glycine max
agcgggatcctctgcatgatctgggattcggggttttcctttcggcttggtccgtgttgttgacaatcattaaaggaaattaggcatgaccctcttgttgagtattctctgcctatctgaagatttccacacctcttttaattgtcgtaatgatgtgtgaagtgtgtgttatttt

SEQ ID NO: 142668 - DNA, 253 bp, Glycine max
agtttttgatattctcttgagacactcccaagagaatatcaaaaacagtctacagtttttgatattctcttgggaaactctcaagattttgaaattgctggtaatactcttatgccagctttttctgttccacaggctactgccagatcttctgagcatgcggaatcctctgcatgatctggaatttatgttttctttcgcttgttcattcgtttaattcaataaaggaaattgggcatgaccctcttgttga

SEQ ID NO: 142669 - DNA, 204 bp, Glycine max
attacatatgtatgcatgtaaccaaaaaaaaaaaaaaaaaagggcgcccgccaacaattgaccccgtcgccccggaatttattcccgacccggaacctccaggcgtaccatcttgcgccaatagacagccttataaaaccttggcgaaatcatggccaaaccggttccctgggtaaaattgtaacccgcccaaaatcccacaca

SEQ ID NO: 142670 - DNA, 248 bp, Glycine max
tagctaccttttgacaaaattcctagtgtcttgactacaactgatgagagattggtaggtacagaagatgagggatatgagccgtttctgtgtggaattcaataatatgccacgcccatgatgcctctagatgatgatatgctttcttaggttgcacaagatttgggtgaggaatggtttgattgtgttgatgaggtggatgcctgtgaggaagtttctttaagtgcagcacttaatggtgtagaggg

SEQ ID NO: 142671 - DNA, 247 bp, Glycine max
gcaaaggaaggttgtggtaagtaaatagtagtaacctaacccttgcgtttgcgagtgaggctgaggttgggtttggaaggcaaaggctggtgttgtcccaatccaagagagaagtaaagtaaagcaaaggaatggcgaacatagacatcgaagggatcttgaagcagcagcctgatgatgggcgcgttccgaagacgaaaatagtgtgtactttgggccccgcttctcgatccgtggaaatgactga

SEQ ID NO: 142672 - DNA, 225 bp, Glycine max
  unsure (1)..(225): unsure at all n locations
ccaattcctaattgtttaaacctaattctcatttcttcatcgttcgattcttctcctcctaaagatgcagatcttcgtgaaaactttgaccggtaagaccatcacccttgaggtggagtcctccgacaccatcgataagtggnaagctaagattcaagacaaggaagggatcccacctgaccagcagagacttatctttgcgggtaaacagcttgaggatggtcg

SEQ ID NO: 142673 - DNA, 246 bp, Glycine max
  unsure (1)..(246): unsure at all n locations
ctcccatgatgcccctagatgaagaaattctttctaaggttgcacaagatatggttgaggaatggtttgattgtgttgatgaggaggattcctttgaggaagtttctttaagtgcagcacttaatggtgttgagggtttggactatatggaaagaattcctcttgccacatctgagggttttcctcatgtgctttcacgcaaaaatggaatcttnngcaaaaggagatttgtctctggggatggtg

SEQ ID NO: 142674 - DNA, 257 bp, Glycine max
tatttgtatgctatggtgcatgatagttcagtgtctacaataccaggtgattttgtcattggtgttaagttgacaaccataaccaatatgtgtgcatatgggctcaatcctggtatttcaggttctcgtcttttgggcaccattcctcagtccatttcacagcaaactgtttggaatcaaatggcaacagtgagaacaccattgaattttgattctagcaagcagagcttttgtcaattttctattgaccttctcgg

SEQ ID NO: 142675 - DNA, 177 bp, Glycine max
aattttaataaaccgcgatcacaggttgccgcaccttaaaaccggaatcaaaagcaatcgttacttgatttcaagaatttctcaatttcttcctacttctttgtgtacgatttcttaagggaaagaaaatcactctctgtgctggtcacagacttcgtgaatcattttcttttccac

SEQ ID NO: 142676 - DNA, 245 bp, Glycine max
taatttcctttattgaattaaacaaacgaacaagcgaaagaaaattaggcagagcatactcaacaagacggtcatgcctaatttcctttattgaattaaacaaacgaacaagcgaaagaaattaggcatgaccctcttgttgagtatgctctgcctatctgaaaatttccacacctcttttaattgtcgtaatgatgtgtgaagtgtgtgttattttaaaaaaaaaaaaaaaaagggcggccgcc

SEQ ID NO: 142677 - DNA, 242 bp, Glycine max
ctcgagcgaatcacctcgaggttcctctcgcccagaatccgagatcaaccccgacgaagaccatgggtttttctcggcctcttcagatttctgaaatggcgcctgtttcagctttagccaagtacaagctcgtcttcctgggtgatcaatccgtgggcaaaaccagcatcatcactcgcttcatgtatgataaattcgataacacctatcaggctacaattggtattgattttctatcaaaa

SEQ ID NO: 142678 - DNA, 244 bp, Glycine max
gatcagatgataaatcgagttgaatttattcattccaaatcatttttacatagggacatcaagccagacaacttcctaatgggtttggggaggcgtgcaaatcaagtttatgccattgactttggtcttgctaagaagcacagagacacctctacccatcaacatattccttacagagagaataagaattcgactggaactgctagatatgctagtatgaatactcatcttggaattgagcaaa

SEQ ID NO: 142679 - DNA, 248 bp, Glycine max
attgaatgtcccaaggatgagaaacttcctcgtcgcaaaatttttgacaaacctaagacgcgctgcttcactattctccctatggagtttaatcttgtggtccgtcaaaagtttttaaattttgtgaggttcattatgaagaaaagggacaagcttagttgtcaagttggaatcaacccatactccatggaatggactggtttggccaatagattactgagtaagggcaatgatattctgtgttgcga

SEQ ID NO: 142680 - DNA, 276 bp, Glycine max
gattatcgtgaatgcgtataaaaggaaaataaagaaattagcgtcaaaatgttgggtgtgttcagcagctccatagtgtcgccgccggacgtgctcgtggccgccggcagccgtactccgtcgccgaagatgacggcggcggcgctgcggaagcggttcgaggagaagaacccctccgccgtgtcggtggaggtcggagagcatgtccagctcgcttatacccaccacaacgagtcgccgtttcagctcagatactttgctgtcaaggatgaggtg

SEQ ID NO: 142681 - DNA, 209 bp, Glycine max
ttcggctcgagggctgagaacattcccgatatggaggagggtaccttggagattggaatggaatacagaactgtatctggagtggctggaccattggtcattcttgacaaagttaagggacccaaatttcaagagattgttaattgtcgtttaggagatggatatactcggcgtggacaagttctagaggttgatggcgaaaaggctgt

SEQ ID NO: 142682 - DNA, 276 bp, Glycine max
tagctggagattggatcacacttatacaaaattctccaattagtaacttgtgtagagttgctgcttggaagaaaggctgtttaatggtcaagattgtgatgtctgggaatgcagcagtcaaaaggagtgattgggcctcattggtacaagtgtttttaacaaacagcaacagtacagagcattttgatgcatgtaagtggacaaaatcagaaccacattcctgggaattgatcttcccaatagaggtatgtggtcctaataatggttttgaaatgt

SEQ ID NO: 142683 - DNA, 271 bp, Glycine max
acttcgtgttgttcgtgatggtcaacttcgaatagttttctctccagacctgaagatatgctcttgggaattttgtgctcgacgctgtgaagagctcatccccagaagattgttaatacctcaggttagtcaacttggagtagttgctcaaaaataccaggcatttactcaaaatgcaacacccaatttatccgttccagagttacaatataattgcaatctgtttgttgcatcagcccgtcagttggcaaaagctttagaagttccattg

SEQ ID NO: 142684 - DNA, 272 bp, Glycine max
cttttaccattctcttctctcttgctcttgcaggagagagccatgtccatgcatcgctacctgaggaagattattgggaagctgtttggccaaacactcccattcccactgcaacgcgagagcttctaaagcctctccctgcaggtgttgaaatcgatgaactccctaagcaaattgatgatacacagtacccaaaaacattcttctataaagaagaccttcatccaggcaaaacaatgaaagtacaattcaccaagcgtccctatgcacaa

SEQ ID NO: 142685 - DNA, 280 bp, Glycine max
atacggctcgtgtgcaccaagaccaacatggtgatggttttcggagagatcacaaccaaggccaacgtggactatgagaagattgtgcgtgacacatgcaggaacattggttttgtctctgatgatgttggtcttgatgctgacaactgcaaggtcctcgtcaacattgagcaacagagtcctgatattgctcaaggtgtgcacggccacctcacaaagaggcctgaggagattggtgctggtgaccaaggtcatatgttcggctatgccactgacgaga

SEQ ID NO: 142686 - DNA, 264 bp, Glycine max
ggcggctgctgcgttgcgcacggcagcatggttcacgtctatgactggatgttggaagaacaccgtcctctgaacctcgattaccagagggtcaacgatgttggttgggttgactccgacaacgtggttatcggagtcagcgagcgcctcgggcgaggtgacggcgggatggggctgttcagctcccacacaggggagctgaggtacaagtttcacgtctgtcatgacaatcaggtgaagagttacaactgctgagctctgagt

SEQ ID NO: 142687 - DNA, 265 bp, Glycine max
gaaacctcgaccagtggctccacgaacccgatctctctcgctcccctctcccctggcccacacgcgtcaacatcatccgcggcgtggcccatgggctttcctacctccacggcctcgacaagcccgtcatccaccgcgacataaagggtagcatgatcttactggactctaacttccaggcccatatcgctgactttgggctggcccgtaggatcgacaacactcggacccacgtgtccacgcagttcgcgggaacaatgggcta

SEQ ID NO: 142688 - DNA, 290 bp, Glycine max
tctgaattcggctctagttgtttgggacagtgagaaaactttgccaaataatttttctgcagaattgctctcttgctaattggatactgttactggccaatattatcctgagtaggctccaattaattgtcgagttcatcgacaaccaattcacatcactgaaggaaattatgtcagaaagcaagatgtcagcattgattatgttgcatgtacaattccaaatgattgtggttctttggttgttgccaaggttggaaatcacaaacaaattgttggtttccatgttgctg

SEQ ID NO: 142689 - DNA, 190 bp, Glycine max
ggagaatccgagtgtttgtgcctatatggcaccttcattggatgcaaggcaagacatggtggttgtggaggtaccaaagttgggaaaagaggctgcaacaaaggcaatcaaggaatggggtcaacccaagtccaagattactcatctcatcttctgcagcactagtggtgtggacatgcctggtgctgag

SEQ ID NO: 142690 - DNA, 267 bp, Glycine max
aagaaacccaaaatctcttcggctctctctcttttccatatccatatatatctccaaaccctaccgttaggttccccaattcatcaccccgtgggccgttgcgctgcttctttgttcgtacggtttccgtcgattgcctccgaaacgatgtcgtatcgcccaagcgggaactccaggaccgacgtccgccgcaaccggtacaaggtggcggttgacgcggacgaaggtcggagacgacgagatgacacgatggtggagatccgcaag

SEQ ID NO: 142691 - DNA, 266 bp, Glycine max
ctcgagccgattctcttgggaatctctcaagattttgaaattgcttgtaatactcttatgccagctttttctgttccacaggctactgccagatcttctgaaaatgcggaatcctctgcatgatctggaattcgtgttttctttcgcttgttcgtttgtttaattcaataaaggaaattaggcatgaccctcttgttgagtatgctctgcctatctgaaaatttccacacctcttttaattgtcgtaatgatgtgtgaagtgtgtg

SEQ ID NO: 142692 - DNA, 267 bp, Glycine max
atcaaatggcaacagtgagaacaccattgaattttgattctagcaagcagagcttttgtcaattttctattgaccttctcggtggaggaattttagtggacaaaactggagattggatcacacttatacaaaattctccaattagtaacttgttgagagttgctgcttggaagaaaggttgtttaatggtcaagactgtgatgtctgggaatgcagcagtcaaaaggagtgattgggcctcatcggtacaagtgtttttaacaaaca

SEQ ID NO: 142693 - DNA, 268 bp, Glycine max
agaccataaccctagaggttcaaagctccgacaccatcgataacctcaaggccaagatccaggacaaggagggtatccccccggaccagcaacgtctcatcttcgccggaaagcagctcgaggacggccgcaccctcgccgactacaacatccagaaggaatcaacccttcacctcgtcctccgtctccgtggtggcatgcagatcttcgttaagaccctcaccggcaagactattaccctagaagtcgaaagctccgacaccatcga

SEQ ID NO: 142694 - DNA, 263 bp, Glycine max
  unsure (1)..(263): unsure at all n locations
aagactgtgaattatggaatgctgcttgcacattgagaatgactttgncatntaatccaaacccgtgttctgatgcatcgagtttggaatttctgaagcgtaccggatttcattgtgatatcatttgtgtcactggatggactgcctgcccaatgcaggatgttcaggttacaattgattggtttatttcctctcaggaatgtgttttcaggacctattgtgttttaaatccacaaaatccttttgttttaaataggtggatg

SEQ ID NO: 142695 - DNA, 256 bp, Glycine max
cgcagatgtacttagtatctccattaatggatccaactcaagaatgtttgtatctggttcttgtgatgcaactgctcgattgtgggatactcgtgtggcaagtcgagcagtgcggacatttcatgggcatgagggagatgttaatgcagtcaaattctttccagacggtaatagattcggaacaggctcagatgatggaacctgcagattatttgacattaggactggacaccaacttcaagtttattatcagcag

SEQ ID NO: 142696 - DNA, 261 bp, Glycine max
agctggtgcagtttggagagattcaggaaaaagttgtgttgaaattttcacaagaggaatttcttacagcttggtcaactcttgtgcgtcccgcaacgactctgttggctgatgggtgcccatatttgtatgctatggtgcatgatagttcagtgtctacaataccaggtgattttgtcattggtgttaagttgacacccataaacaatatgtgtgcatatgggctcaatcctggtatttcaggttctcgtcttttgggca

SEQ ID NO: 142697 - DNA, 266 bp, Glycine max
catttgtcttcgatggctatatgaacaagggttgacttttgttgttaagagctatgacaaagagaggatgaagcaaaacttggggatttttgattggtcactgactgaggatgattacaagaaaataagtgaaatccaccaagagaggctcatcaaaggaccaaccaagcctcttcttgatgatctatgggatgaagaatgagcagtcacctaaatttcatagtttgagtgttttctggttactcttgagagaataaagcaaagtg

SEQ ID NO: 142698 - DNA, 224 bp, Glycine max
  unsure (1)..(224): unsure at all n locations
tgcttaggaaggngtgcgcatgacctattttgttttagatccacagaatccttttgtgggaaataggtgtatnnnaaatctgacgttccctcagtgcacttcctcgaagtgttaatagtttgcctctgtctatatgttgaggtgctggtgcaaagattgctagtctcatgagtatggcaaatgctgttctgtcagtgtggagttatttggttgtagatctcggc

SEQ ID NO: 142699 - DNA, 268 bp, Glycine max
  unsure (1)..(268): unsure at all n locations
cctcttgccacatctgagggttttcctcatgtgcttccacgcaacattcgacatgtcangcaaaaggagatttgtctctggggatggtgaagagatgacatcgattccaggtaccagtgttgaagaggcttacaacaagctagacgtggatcttgagaaaagtgttcctacattggttggcattgaatgtcccaaggatgagaaacttcctcgtcgcaaaattgttgacaaacctaagacgcgctgcttcactattctccctatggag

SEQ ID NO: 142700 - DNA, 263 bp, Glycine max
ggttggcattgaatgtcccaaggatgagaaacttcctcgtccgaaaatttttgacaaacctaagacgcgctgcttcactattctccctatggagtttaatcttgtggtccgtcaaaagttgttaaattttgtgaggttcattatgaagaaaagggacaagcttagttgtcaagttggaatcaacccatactccatggaatggactggtttggccaatagattactgagtaagggcaatgatattctgtgttgcgattatgcta

SEQ ID NO: 142701 - DNA, 253 bp, Glycine max
gttttctttcgcttgttcgtttgtttacttcaataaaggaaattaggcatgaccctcttgttgagtatgctctgcctatctgaaaatttccacacctcttttaattgtcgtaatgatgtgtgaagtgtgtgttattttaaaaaaaaaaaaaaaaaaaaaaaaaaaaaaaaggggcgccccccgattagtgacccctccgcccgggaatttattccgggccgggaacttgaggggtaacaattttccccaaaag

SEQ ID NO: 142702 - DNA, 256 bp, Glycine max
atgaacatgagggtggagcccggggatgcgccgccgtacgccggcgcgttggattgtgctctgaagacggtgcgcgcggagggtcccatggcgctttataagggttttattcctacgatctcaaggcagggaccgttcactgttgtgctgttcgtgactctggaacaggttcgcaagttgcttaaggattttggatgatgacgaagatgtatgctactttcattttcaataagatgcgttttgtgtttgtcttgtg

SEQ ID NO: 142703 - DNA, 261 bp, Glycine max
cgacaacctagtcacatcactgaaggaaattatgtcagaaagcaagatgtcagcattgaatatgatgcatgtacaattccaaatgattgtggttttttggttgttgccaagtttggaaatcacaaacaaattgttggtttccttgttgctggaagcaaaggaagactgggatatgcttcattgataccatatgttgagccagttgtgcaagctcatagtgctgaagcttacttggacttcttccctgtggaggttgatagt

SEQ ID NO: 142704 - DNA, 259 bp, Glycine max
gtcggcggactgcggtctaagtacaacgtgaggtctagcccagtacggaaggaggacgaggtgcaggtgatgcgaggaacatacaagggtcgcgaggggaaggtgactcaggtctaccgtcgaaagtgggtgattcacattgagcgcataacccgcgagaaggtgaatggttccaccgtcaacgttgggattcacccctccaaggttgtgctgaccaagctcaaattggacaaggaccgtaaggccattctcgatcgca

SEQ ID NO: 142705 - DNA, 225 bp, Glycine max
gcatataggaagattcccaggcgaggagtgagatggatgggcaggagcaggatgtgtcgttgggagctaacatgtgccccgtgagacatcggctttggacggcgtcgcagagccaagacgacggcgaggactagcatgagccggcgctggcgccgctggttgaccctacggagtttacgtgttgagtcggttgacatagccgggatagcagcgtttgtggccact

SEQ ID NO: 142706 - DNA, 261 bp, Glycine max
ggcagaaatgataaacagtctttgtggtggtgatgtatagattgtgtaggaaaggacactcctgctgttggcttgttgttcaaggatggcaatttgtaagaaagatgtttggtgagttgaatgtggaatcccttctggatttccgctcacagttatttgtaatagcatttttaatgagatgctcattagatatagctatgaaaaattactgcgccaggttaaagctccaagtatgtttttacaatccttcaaaaattttgt

SEQ ID NO: 142707 - DNA, 257 bp, Glycine max
tgtttcgtgtaataatctggaaatgcaagaagcttatcttgtcaatctcgtaaatgtgttacgagaactgtatttgcacagtccagaggaagctcgccaattgagaaggaaagctctctctcgtattgaatggctgcaaaaagctgatgtgcctaccatagcacagattgaagagttccattcgatgcagaggatgatgaatgctcctgattcaaatgataatattgatctactgttgagcattgatttgttgggtt

SEQ ID NO: 142708 - DNA, 269 bp, Glycine max
ggtgattttgtcattggtgttaagttgacaaccataaacaatatgtgtgcatatgggcttaatcctggtatttcaggttctcgtcttttgggcaccattcctcagtccatttcacagcaaactgtttggaatcaaatggcaacagtgagaacaccattgaattttgattctagcaagcagagcttttgtcaattttctatcgaccttctcggtggaggaattttagtggacaaaactggagattggatcacacttatacaaaattctcc

SEQ ID NO: 142709 - DNA, 150 bp, Glycine max
atcgagccgaatcggctcgagcaggttgccgcaccttaaaaccggaaacaaaagcaatcgttacttgatttcaagaatagtctcaatttcttcctacttctttcgtgtacgatttcttaagggaaagaaaatcactctctgtgctggtca

SEQ ID NO: 142710 - DNA, 265 bp, Glycine max
accaaatagctcattagtgagtttttgagttcgtgtgtcctttctttgtgtgttgcaaggttacaagatggaggatcaaaatgcatcatctaatggattgggcaaggtgttccacaaggttaagccctgccttgctatgatgtcccttcagtttggctactccggaatgtacatcatcaccatggtttctttcaagcatggcatgagccattgggtactctccgtgtaccgtcatatagttgccactctcatcatggcccctttt

SEQ ID NO: 142711 - DNA, 263 bp, Glycine max
ctcgtggccaaaaactcatcttcaaaggaaaggttttggaagaccccatgactttgactgcatccaaattgactaatggatccaaactcatgcttgtggcttcccaatgtttatatcaaggggatggtcctgtcttgaagaaagctcaggttgttcccaaatcgaggaaagatggtcactcaggctctagcaacgacatgaagaaaattcctgttaagaaccggatggaacggtggaaagcaacaggagttgtggcattgtct

SEQ ID NO: 142712 - DNA, 259 bp, Glycine max
ggaaaactgactttccctcagggcacttcccgaagtgttaagagaatgcctctttctatagggggaggagctggtgcaaagaatgctattctcatgaatatgccaaatgctgttctttcaatgtggagatattttgttggagatctcgtctttgaagtttctaagatgacttctccctacattaaatgtacagtctctttcttcatagcatttggaaatttggctgatgacaccatcaattttgaggcttttccccaca

SEQ ID NO: 142713 - DNA, 256 bp, Glycine max
caagatatggttgaggaatggtttgattgtgttgatgaggaggattcctttgaggaagtttctttaagtgcagcacttaatggtgttgagggtttggactatatggaaagaattcctcttgccacatctgagggttttcctcatgtgctttcacgcaaaaatggcctaaaaggcaaaaggagatttgtctctggggatggtgaagagatgacattgattccaggaaccagtgttgaagaggcttacaacaagctaa

SEQ ID NO: 142714 - DNA, 174 bp, Glycine max
aattttaataaaccgcgatcacaggttgccgcaccttaaaaccggaaacaaaagcaatcgttacttgatttcaagaatttctcaatttcttcctacttctttgtgtacgatttcttaagggaaagaaaatcaccttctgtgctggtcacagacttcgtgaatcattttcttttc

SEQ ID NO: 142715 - DNA, 237 bp, Glycine max
tgatattctgtgttgcgattatgctagttttgatggtttgattaccaagcaagttatgagcaagatggcagaaatgataaacagtctttgtggtggtgatgaaaaattgatgcgtgaaaggacgcacctgctgttggcttgttgttcaaggatggcaatttgtaagaaagatgtttggagagttgaatgtggaatcccttctggatttccgctcacagttatttgcaatagcatttt

SEQ ID NO: 142716 - DNA, 258 bp, Glycine max
ttccattaacacccgattcctcttaaattggcacaccaccaattttcgtgggaacccgaaccaataaaacaaaaaaagagtccaattttgtgaaaattattaccattcattcttattcatcaacgtccccccttctgtgcccacttccaaatcttctcctctcgctatgggttgtggctcctcccttccagatagggattcaaggcagttgggtcgacccaattccgagaatggtggagggcaagacgccaagaatct

SEQ ID NO: 142717 - DNA, 261 bp, Glycine max
ggaaagaattcctcttgccacatctgagggttttcctcatgtgctttcacgcaaaaatggcgtggaaggcaaaaggagatttgtctctggggatggtgaagagatgacattgattccaggaaccagtgttgaagaggcttacaacaagctaatagttgaacttgagaaaagtgttcctacattggttggcattgaatgtcccaaggatgagaaacttcctcgtcgcaaatttttgacaaacctaagacgcgctgcttcact

SEQ ID NO: 142718 - DNA, 260 bp, Glycine max
ggaaaaatttgtacaaatgatgaagagcatctatgaaacagaagttacagattggccagtaccactgaaaatcatttctggaaccattcttgcaacaattttgggaacaaccttctggaaactcttttcctttcttagagatgctggtaatgggggagtttttgttggcaatgttgcttcagtcattcacaacttcaagtgtgcttgaggcccaaagtagaaagcccaacagatatgaagtttcccaatacagatatcgc

SEQ ID NO: 142719 - DNA, 259 bp, Glycine max
gtggatgggaaaactgactttccctcagggcacttcccgaagtgttaagagaatgcctctttctatagggggaggagctggtgcaaagaatgctattctcatgaatatgccaaatgctgttctttcaatgtggagatattttgttggagatctcgtctttgaagtttctaagatgacttctccctacattaaatgtacagtctctttcttcatagcatttggaaatttggctgatgacaccatcaattttgaggctttt

SEQ ID NO: 142720 - DNA, 258 bp, Glycine max
actacaacttatatgatcaggctgagaagttgaggtcgaaggctcctcgatttgaagcacattcaaaccagcagttttgtcgttatctcttctacctagggaaaattcggacaactcagctggagtataccgatgcaaaagagtctctcctgcaggccgcccggaaagctcctgttgctgcacggggttttcgaattcaatgtaacaagtgggctgtgatagtgcgtttactgttgggagaaatactgagcggactgt

SEQ ID NO: 142721 - DNA, 261 bp, Glycine max
gtctacaataccaggtgattttgtcattggtgttaagttgacaaccataaacaatatgtgtgcatatgggctcaatcctggtatttcaggttctcgtcttttgggcaccattcctcagtccatttcacagcaaactgtttggaatcaaatggcaacagtgagaacaccattgaattttgattctagcaagcagagcttttgtcaattttctattgaccttctcggtggaggaattttagtggacaaaactggagattggat

SEQ ID NO: 142722 - DNA, 264 bp, Glycine max
cttgttcctccgctcaacaactatactaacatctttctttctccgaacagatcacactatggccacctcaagcgccaaatcagtccatgatttcaccgttaaagatgccaagggaaatgatattaatcttggtgactacaaaggaaaggtccttatcattgtcaatgttgcctcacaatgtggcttgactaattcaaattacactgagctcagtcagttgtatgagaaatacaaacagaaaggtctggaaattctggcatttcc

SEQ ID NO: 142723 - DNA, 265 bp, Glycine max
gattgtgatgtctgggaatgcagcagtcaaaaggagtgattgggcctcattggtacaagtgtttttaacaaacagcaacagtacagagcattttgatgcatgtaagtggacaaaatcagaaccacattcctgggaattaatcttcccaatagaggtatgtggtcctaataatggttttgaaatgtggagttctgagtgggcaaatcaaacttcatggcatttgagtttccttattgacaatcccaaacagtctacagtttttgat

SEQ ID NO: 142724 - DNA, 265 bp, Glycine max
ataaaattgaccgtgttgagacaagcctcaaagaatctagccgtgacctgtctctcttcaagttcaagtctgggggtgtggtggctctggttctctttgtggtctttgggttgctgaattcactcttcgaaggcaaggttgttgccaaattgcccttcaaaccttttgggcttattatgaagatgagccatcgagggttgcagggtaatgaccccactgattgttccatggcatttctgtacttcttgtgttccattagcatcag

SEQ ID NO: 142725 - DNA, 254 bp, Glycine max
tcttgggaatctctcaagattttgaaattgctgttaatactcttatgccagctttttctgttccacaggctactgccagatcttctgaaaattcggaatcctctgcatgatctggaattcgtgttttctttcgcttgttcgtttgtttaattcaataaaggaaattaggcatgaccctcttgtcgcagtatgctctgcctatctgaaaatttccacacctcttttaattgtcgtaatgatgtgtgaagtgtgtg

SEQ ID NO: 142726 - DNA, 246 bp, Glycine max
attctggcattagaaaaattcttccagattctgagatttgtgactttgactttgagccatgtggttattcaatgaactctgttgaaggtgctgctgtttctaccattcatgttaccccagaagatggtttcagttatgcaagctttgagactgttgggtatgacttcaaagtggtgaatctgaacgaaatggttaagagggtattggcatgttttctcccaatgagttctctgttgcagttcatgt

SEQ ID NO: 142727 - DNA, 256 bp, Glycine max
ggaaaactgactttccctcagggcacttcccgaagtgttaagagaatgcctctttctatagggggaggagctggtgcaaagaatgctattctcatgaatatgccaaatgctgttctttcaatgtggagatattttgttggagatctcgtctttgaagtttctaagatgacttctccctacattaaatgtacagtctctttcttcatagcatttggaaatttggctgatgacaccatcaatttgaggcttttcccca

SEQ ID NO: 142728 - DNA, 253 bp, Glycine max
ggcgattgctcgcatgtcagagtcgcccgaattagcaagtgattaccataggaagttgaaagaagcctatgagactgaagagaaattgaaagaagcagatgttttgagaaggagcaaggagcatttggttatactgcttgatgaggtggagaggcagctgagtgaaacaccttatttggcaggtcaagagtttaccatggcagatgtgatgctcattccagtattagttcgtttgaaactcttggatttagag

SEQ ID NO: 142729 - DNA, 255 bp, Glycine max
cgtcgcgcgccggtctggggacggattgggaacgggcccttcggggcctcttccccgggcgtcgaacagtcaactcagaactggtacggacaaggggaatccgactgtttaattaaaacaaagcattgcgatggtccctgcggatgttgacgcaatgtgatttctgcccagtgctctgaatgtcaaagtgaagaaattcaaccaagcgcgggtaaacggcgggagtaactatgactctcctaaggtagccaaatg

SEQ ID NO: 142730 - DNA, 262 bp, Glycine max
gagcattttgatgcatgtaagtggacaaaatcagaaccacattcctgggaattaatcttcccaatagaggtatgtggtcctaataatggttttgaaatgtggagttctgagtgggcaaatcaaacttcatggcatttgagtttccttattgacaatcccaaacagtctacagtttttgatattctcttgggaatctctcaagattttgaaattgctggtaatactcttatgccagctttttctgttccacaggctactgcca

SEQ ID NO: 142731 - DNA, 263 bp, Glycine max
cttgttcctccgctcaacaactataataacatctttctctctccgaacagatcacactatggccacctcaagcgccaaatcagtccatgatttcaccgttaaagatgccaagggaaatgatattaatcgtggtgactacaaaggaaaggtccttatcattgtcaatgttgcctcacaatgtgagctgactaattcaaattacactgagctcagtcagttgtatgagaaatacaaacagaaaggtctggaaattctggcatttc

SEQ ID NO: 142732 - DNA, 252 bp, Glycine max
ccttagagaaaacaaaagcacagaatcgaaagaagagttcttttttgagagagattgggatggcttcgacgaagaagatcacactgaagagttcggacggcgaggccttcgaggtggaggaggcggtggcggtggagtcccagacgatcaagcacatgatcgaggacaactgcgccgacagcggaattcctctccccaatgttaccagcaagattctggccaaggttatcgagtattgcaagaagcacgttg

SEQ ID NO: 142733 - DNA, 254 bp, Glycine max
ggaacatcccgacaacaaagcagtgtctgctgtgggcaaagctgctggagcaaaatggaagacgatgtctgatgctgaaaaagcaccttatgtggcaaagtctgagaaaaggaaagtggagtacgagaagaacatgagagcttataacaagaaacaggcggaaggtcctactggtggggatgaagaagaatctgagaagtctgtatctgaggtgaatgatgaggatgatgacgattagagaatggactgatgat

SEQ ID NO: 142734 - DNA, 254 bp, Glycine max
gcaccccatgcttcggagcaaggtgccgcctgctccggtgaatttcttccgtaggttgccttctctcacagacagcatgctgtaaatggatactcttgtgtgttctagattcttgaaaacttatctgctgctgccagtgtttgaattaatttttggtagtggttgtagaatcattggcgctatctcactttgtgttgtttattaagtgttgaccgttggtgcaactgtatacttagtttggtaaactccaatgt

SEQ ID NO: 142735 - DNA, 256 bp, Glycine max
ggaacatagacaccagatttcaattcaccaatgtgatggaaactcccaaggaatggcaactggatctaccttgtgacaaaattcctagtgtcttgactacaactgatgagagattggtaggcacagaacatgagggatatgatccttttcttggtggaattcaaaaatatgccactcccatgatgcccctagatgaagaaattctttctaaggttgcacaagatatggttgaggaatggtttgattgtgttgatga

SEQ ID NO: 142736 - DNA, 255 bp, Glycine max
ttcctttgaggaagtttctttaagtgcagcacttaatggtgttgagggtttggactatatggaaagaattcctcttgccacatctgagggttttcctcatgtgctttcacgcaaaaatggcgagaaaggcaaaaggagatttgtctctggggatggtgaagagatgacattgattccaggaaccagtgttgaagaggcttacaacaagctaatattgcaacttgagaaaagtgttcctacattggttggcattga

SEQ ID NO: 142737 - DNA, 253 bp, Glycine max
caacaagctaatagttgaacttgagaatagtgttcctacattggttggcattgaatgtcccaaggatgagaaacttcctcgtcgcaaaatttttgacaaacctaagacgcgctgcttcactattctccctatggagtttaatcttgtggtccgtcaaaagtttttaaattttgtgaggttcattatgaagaaaagggacaagcttagttgtcaagttggaatcaacccatactccatggaatggactggtttg

SEQ ID NO: 142738 - DNA, 257 bp, Glycine max
attttgaaccaagacccaatgtttcaggttatggtggcaatgatgttgatgctaagccaaagaaaaatgtcatgaaagattttgaaccaagacccaatgtttcagcttatggtggcaatgatgttgatgctaagccaaagaaaagtgtcacgaaagattttgatccaagacccaatgtttcatcttacaatgacaatgacattgaagcagtggaagaaaagaaaatcatgaaaatactgcatccaatacctaaagtt

SEQ ID NO: 142739 - DNA, 259 bp, Glycine max
gactagttgtagatcgcgatctagaactagaaacaacttgaggatggtcgcacccttgccgattacaacatccaaatggaatcaaccttccatctcgtgcttcgcctcaggggtggcatgcaaatctttgtcaagactttgaccgggaagaccatcacccttgaggtggaatcctcggacaccattgataatgttaaggccaagatccaggacaaagagggcatccccccagatcagcagaggctgatttttgccggta

SEQ ID NO: 142740 - DNA, 123 bp, Glycine max
tttgtttaattcaataaaggaaattaggcatgaccctcttgttgagtatgctctgcctatctgaaaatttccacacctcttttaattgtcgtaatgatgtgtgaagtgtgtgttattttaaaa

SEQ ID NO: 142741 - DNA, 254 bp, Glycine max
cgtctttgaagtttctaagatgacttctccctacattaaatgtacagtctctttcttcatagcatttggaaatttggctgatgacaccatcaattttgaggcttttccccacaagctggtgcagtttggagagattcaggaaaaagttgtgttgaaattttcacaagaggaatttcttacagcttggtcaactcaggtgcgtcccgcaacgactctgttggctgatgggtgcccatatttgtatgctatggtgc

SEQ ID NO: 142742 - DNA, 254 bp, Glycine max
gaaacttcctcgtcgcaaaatttttgacaaacctaagacgcgctgcttcactattctccctatggagtttaatcttgtggtccgtcaaaagtttttaaattttgtgaggttcattatgaagaaaagggacaagcttagttgtcaagttggaatcaacccatactccatggaatggactggtttggccaatagattactgagtaagggcaatgatattctgtgttgcgattatgctagttttgatggtttgatta

SEQ ID NO: 142743 - DNA, 161 bp, Glycine max
aataaaccgcgatcacaggttgccgcaccttaaaaccggaaacaaaagcaatcgttacttgatttcaagaatttctcaatttcttcctacttctttgtgtacgatttcttaagggaaagaaaatcactctctgtgctggtcacagacttcgtgaatcattt

SEQ ID NO: 142744 - DNA, 248 bp, Glycine max
cctacattaaatgtacagtctctttcttcatagcatttggaaatttggctgatgacaccatcaattttgaggcttttccccacaagctggtgcagtttggagagattcaggaaaaagttgtgttgaaattttcacaagaggaatttcttacagcttggtcaactcaggtgcgtcccgcaacgactctgttggctgatgggtgcccatatttgtatgctatggtgcatgatagttcagtgtctacaata

SEQ ID NO: 142745 - DNA, 252 bp, Glycine max
caagctttcaaggattgacctggagtgggtccatgtcctcagcgaaggatgggccacacccctcagaggcttcatgagagaagccgagttcctccaaacgcttcatttcaactctctccgactcgatgatgggtcggtcgtgaacatgtcagtgcccatcgtgctggctattgatgatgcccagaagcataagatcggggataacaaaagggttgctcttttcgattccaagggagaccctgttgcaattct

SEQ ID NO: 142746 - DNA, 252 bp, Glycine max
tctcgagccgattcggctcgaggtcaagagggagttgctcacattagtgaattgaaatctggtgtctatgttccactgcctataaaaactaatttggtggaaactcccaaggaatggcaactggatctaccttgtgacaaaattcctagtgtcttgactacaactgatgagagattggtaggcacagaacatgagggatatgatccttttcttggtggaattcaaaaatatgctactcccatgatgccccta

SEQ ID NO: 142747 - DNA, 254 bp, Glycine max
ttcaggaaaaagttgtgttgaaattttcacaagaggaatttcttacagcttggtcaactcaggtgcgtcccgcaacgactctgttggctgatgggtgcccatatttgtatgctatggtgcatgatagttcagtgtctacaataccaggtgattttgtcattggtgttaagttgacaaccataaacaatatgtgtgcatatgggctcaatcctggtatttcaggttctcgtcttttgggcaccattcctcagtcc

SEQ ID NO: 142748 - DNA, 262 bp, Glycine max
caacctccaaccccaccaagtcaaagccaccgtctttatgacccacggctacggctccgacaccggctggctcttccagaaaatctgcatcaacttcgccacctggggctacgccgtcttcgccgccgacctcctcggccacggccgctccgacggtctccagtgctacctcggcgacatggacaaaatcgccgccacctccctctccttcttcctccacgtccgcaatagccacccctacaaaaacctcccggcattcctc

SEQ ID NO: 142749 - DNA, 169 bp, Glycine max
gaaattttgataaaccgcgatcacaggttgccgcaccttaaaaccgtaaacaaaagcaatcgttacttgatttcaagaatttctcaatttcttcctacttctttgtgtacgatttcttaagggaaagaaaatcactctctgtgctggccacagacttcgtgaattattt

SEQ ID NO: 142750 - DNA, 253 bp, Glycine max
tgtctagttctagctcgcgatctagaactagtcctcgagccgcttttgtgttaaataggtggatgggaaaactgactttcccccagggcacttcacgaagtgttaagagaatgcctctttctatagggggaggagctggtgcaaagaatgctattctcatgaatatgccaaatgctgttctttcaatgtggagatattttgttggagatctcgtctttgaagtttctaagatgacttctccctacattaaatg

SEQ ID NO: 142751 - DNA, 252 bp, Glycine max
cattcttcaggagattttcctgaaaaggaagatcaagaaaaacccaaaaagattgataccagattgagacaaagaatagatcctcaatacaatgaggttcaggctcagatggaaacaaatttgtttaaattgtctcttgatgatgttgaaactcctaaaggttctatgttggatcttaaaatttctcaatctaaaattgcacttcccaagaacacagttggaggaaccattctgcgtagtgatctattggca

SEQ ID NO: 142752 - DNA, 247 bp, Glycine max
tgttcctacattggttggcattgaatgtcccaaggatgagaaacttcctcgtcgcaaaatttttgacaaacctaagacgcgctgcttcactattctccctatggagtttaatcttgtggtccgtcaaaagtttttaaattttgtgaggttcattatgaagaaaagggacaagcttagttgtcaagttggaatcaacccatactccatggaatggactggtttggccaatagattactgagtaagggc

SEQ ID NO: 142753 - DNA, 249 bp, Glycine max
tttctaaggttgcacaagatatggttgaggaatggtttgattgtgttgatgaggaggattcctttgaggaagtttctttaagtgcagcacttaatggtgttgagggtttggactatatggaaagaattcctcttgccacatctgagggttttcctcatgtgctttcacgcaaaaatggctgcaaaggcaaaaggagatttgtctctggggatggtgaagagatgacattgattccaggaaccagtgttg

SEQ ID NO: 142754 - DNA, 243 bp, Glycine max
tctcgagccgaatcggctcgaggcctctttctatagggggaggacgctggtgcaaagaatgctattctcatgaatatgcaccatgctgttccttcaatgtggagatattttgttggagatctcgtctttgaagtttctaagatgacttctccctacattaaatttacagtcccttccttcatagcatttggaaatttggctgatgacaccatcaattttgaggcttttccccacaagctggtg

SEQ ID NO: 142755 - DNA, 100 bp, Glycine max
gagaatacaggtatagcattggcctgtgctatgaatagttcttttagggggcgcgccagttctgatatttacaccatctgctctcaagactgtgaattat

SEQ ID NO: 142756 - DNA, 244 bp, Glycine max
cccaaggaagaaaaggaggcctcaattcctccagagcagcatattgaagaaacacggcccgcatcggctgctgctgcaccactttctgtagttattccaatgtcaaaatccaatattgcaccgtacagaactgtgataatcatgctattgataatattgggacttttcttccattatcgagttacacttccagttgagagtgcctttcctctttggttgacttctatcatctgtgagatctggt

SEQ ID NO: 142757 - DNA, 237 bp, Glycine max
attttgtgaggttcattatgaagaaaagggacaagcttagttgtcaagttggaatcaacccatactccatggaatggactggtttggccaatagattactgagtaagggcaatgatattctgtgttgcgattatgctagttttgatggtttgattaccaagcaagttatgagcaagatggcagaaatgataaacagtctttgtggtggtgatgaaaaattgatgcgtgaaaggacgc

SEQ ID NO: 142758 - DNA, 236 bp, Glycine max
attttcacaagaggaatttcttacagcttggtcaactcaggtgcgtcctgcaacaactctgttggctgatgggtgtccatatttgtatgctatggtgcatgatagttcagtgtctacaataccaggtgattttgtcattggtgttaagttgacaaccataaacaatatgtgtgcatatgggcttaatcctggtatttcaggttctcgtcttttgggcaccattcctcagtccattt

SEQ ID NO: 142759 - DNA, 238 bp, Glycine max
cataaccatcgagatttactatcaaaccaaaaattctcaaaatctcttcacctctgtgatgaccatggaatacagaaccttagaactcaacatcatatccgcaaaggacatcaagaacgttaacctcttctccaagatggacgtatacgccgtcgttacgctctccggcgaccctctccaccctcagggcgccaccacccacgtccacaaagacgccggcaggaaccccacgtggaat

SEQ ID NO: 142760 - DNA, 242 bp, Glycine max
cattctgtacgatagtgactggaacccacaagttgacttgcaggctcaggatcgtgctcataggattggtcaaaagaaagaagttcaagttttccgtttttgtactgagtatacaatagaagagaaagtcattgaaagggcctacaaaaagcttgcacttgatgctctggtgattcagcaagggcgattggctgagcagaagacggtaaataaagatgagttgcttcaaatggttagatttg

SEQ ID NO: 142761 - DNA, 197 bp, Glycine max
cgcagtcgcagtgagtgaaaaggaaaaccctaattgcggtattctcagtgccttcgagagaaagaacaaaatggcagataatcttgttctccgtggcaccatgcgcgcccacaccgacgttgtgacggcgattgccactcccatcgacaactccgacatgatcgtcaccggctcacgcgacaaatccatcatcctct

SEQ ID NO: 142762 - DNA, 236 bp, Glycine max
gagttgaatgtggaatcccttctggatttccgctcacagttatttgcaatagcatttttaatgagatgctcattagatatagctatgaaaaattactgcgccaggctaaagctccaagtatgtttttacaatccttcaaaaattttgtttctttgtgtgtgtatggtgatgataacttaattagtgttcatgaatatgtcaagccttactttagtggttctaaattgaaaagcttt

SEQ ID NO: 142763 - DNA, 236 bp, Glycine max
gacaaaactagtgcaactttgcaatttagaaagttagcagattgtgattttctcaagagaaactttaagcagatccctaatgttttatgggtggctcctgaggacaaggcgagtttatggtcacaacttcattatgtttcgtgcaataatctggaaatgcaagaagcttatcttgtcaatctcgtaaatgtgttacgagaattgtatttgcacagtccacaggaagctcgccaatt

SEQ ID NO: 142764 - DNA, 234 bp, Glycine max
agacagcaaagttgcctgcgaaacatgcaccaaaaccaacttggtcatggtcttcggagaaatcacgaccaaggccaacgttgactacgagaagatagtgcgtgacacctgcaggaacatcggcttcgtctcaaatgatgtgggactggatgccgacaactgcaaggtcctcgtcaacattgagcagcagagccctgatattgctcagggtgtacacggccaccttaccaaaaa

SEQ ID NO: 142765 - DNA, 176 bp, Glycine max
ctgaaaatgcggaatcctctgcatgatctggaatttatgttttctttcgcttgttcgttcgtttaattcaataaaggaaattgggcatgaccctcttgttgagtatgctctgcctatttgaaaatttccacacctcttttaattgtcgtaatgacgtgtgaagtgtgtgttatttt

SEQ ID NO: 142766 - DNA, 238 bp, Glycine max
cttatctttctcttgttaactaattaaaatgactctcacaaaggccttgttctttgtgaccgctctatgctgcacctctgccgcataagactgcaaggtttgacatcacaaaccgatgctcataccctgtttgggccgcggctgtgcctggcggtggcaggaggctgaactcgggccagtcatgggctttagacgtgcctgcaggaacgaaaggggcccgcgtttgggcccgaaccgg

SEQ ID NO: 142767 - DNA, 235 bp, Glycine max
acttctttggcttttgcttgcttctctgcggcactttagttgcaaggcgtagggagtacctctaccttggtggtttgctttcttctgggctgtccattcttatgtggttgcactttgcttcctctctctttgggggctcaattgcactcttcaagtttgagctgtactttgggcttttggtgtttgtgggctacgttatagtagacactcaagaaattattgaaagggctcactt

SEQ ID NO: 142768 - DNA, 238 bp, Glycine max
gttatttgcaatagcatttttaatgagatgctcattagatatagctatgaaaaattactgcgccaggctaaagctccaagtatgtttttacaatccttcaaaaattttgtttctttgtgtgtgtatggtgatgataacttaattagtgttcatgaatatgtcaagccttattttagtggttctaaattgaaaagctttctagctcgtcataatatcaccattactgatggtattgaca

SEQ ID NO: 142769 - DNA, 120 bp, Glycine max
aatagattactgagtaagggcaatgatattctgtgttgcgattatgctagttttgaacgtttgattaccaagcaagttatgagcaagatggcagaaatgataaacagtctttgtggtggt

SEQ ID NO: 142770 - DNA, 235 bp, Glycine max
taaaatggtggccacagttggtattcctgagaatacaggtatagcattggcctgtgctatgaatagttcttttagggggcgcgccagttctgatatttacaccatctgctctcaagactgtgaattatggaatcctgcttgcacaaaagcaatgactatgtcatttaatccaaacccgtgttctgatgcatggagtttggaatttctgaagcgtaccggatttcattgtgatatc

SEQ ID NO: 142771 - DNA, 232 bp, Glycine max
gtttgacaacagtgagataggtctttattctaatcccactttggaagatatcccacattcagcttgggaccttttttgctgggacagtgagaaaactttgccaaataatttttctgcagaattgctctcttgtatattggatactgttactggccaatattatcctgagtgggctccaattaattgtagagttcaccgacaaccaattcacatcactgaaggaaattatgtc

SEQ ID NO: 142772 - DNA, 232 bp, Glycine max
gagaaactttaagcagatgtctaatgttttgtgggtggctcctgaagacaaggcgagtttatggtcacaacttcattatgtttcgtgtattaatctggaaatgcaagaagcttatcttgtcaatctcgtaaatgtgttacgagaactgtatttgcacagtccagaggaagctcgccaattgagaaggaaagctctctctcgtattgaatggctgcaaaaagctgatgtgcct

SEQ ID NO: 142773 - DNA, 234 bp, Glycine max
caactcagtgaaagagaatccgaggcgaagagaagagaaaaattaagatggaggggaaggagcaggatgtgtcgctgggagcgaacaagttcccggagagacagccgattggagacgcggcgcagagccaagacgacggcaaggactaccaggagccggcgccggcgccactggttgacccgacggagtttacgtcatggtccttttacagagcagggatagcagagtttgtgg

SEQ ID NO: 142774 - DNA, 229 bp, Glycine max
gcaagttatgagcaagatggcagaaatgataaacagtctttgtggtggtgatgaaaaattgatgcgtgaaaggacgcacctgctgttggcttgttgttcaaggatggcaatgtgtaagaaagatgtttggagagttgaatgtggaatcccttctggatttccgctcacagttatttgcaatagcatttttaatgagatgctcattagatatagctatgaaaaattactg

SEQ ID NO: 142775 - DNA, 228 bp, Glycine max
caaaaactaatttgatggaaactcccaaggaatggcaactggatctaccttgtgacaaaattcctagtgtcttgactacaactgatgagagattggtaggcacagagcatgagggatatgatccttttcttggtggaattcaaaaatatgccactcccatgatgcccctagatgaagaaattctttctaaggttgcacaagatatggttgaggaatggtttgattgtg

SEQ ID NO: 142776 - DNA, 229 bp, Glycine max
gttactattgaatcgattggattgacatggcgagcgcgatggttgaggacgccaacttcgaagatgaccagctcgccaatatgaccaccgacgacgtcgtcagagcttctcgtcttctcgacaacgagattcgcatcctcaaagaagagttgcagaggaccaatttggagttggaatcgtacaaggacaagatcaaggagaatcaggagaagattaagctcaataagca

SEQ ID NO: 142777 - DNA, 226 bp, Glycine max
tcttggttaccaatttttgtgaattgtctctatcctgtaagtcaattaccttcagaagctgtcgttgtaaatgttacgtgtggtagtggacgtggtggtttacccaccactgcttggattagttctgcagttaacaatcgctcctcagacatcaacaaaaggattcgcacagcacttgggaaaggtaagaaaattgtttttcttactagagttgatccttttccag

SEQ ID NO: 142778 - DNA, 227 bp, Glycine max
ctcaaatgccatgaagtttgattttccttattgacaatcccaaacagtctacagtttttgatattctcttgggaatctctcaagattttgaaattgctggtaatactcttatgccagctttttctgttccacaggctactgccagatcttctgaaaatgcggaatcctctgcatgatctggaattcgtgttttctttcgcttgttcgtttgtttaattcaataaagg

SEQ ID NO: 142779 - DNA, 226 bp, Glycine max
gaggcatgttcttaacacttcgggggaggagctggtgcaaagaatgctattctcatggatatgccaaatgctgttctttcaatgtggagatattttgttggagatctcgtctttgaagtttctaagatgacttctccctacattaaatgtacagtctctttcttcatagcatttggaaatttggctgatgacaccatcaattttgaggcttttccccacaagctgg

SEQ ID NO: 142780 - DNA, 232 bp, Glycine max
cgatgaagacgaggaggagttgaagaagaagccctttgggttctctcgctccagcaacaaggctgcttctaagcctctctctcgtggatcagcaactgtggaatcaaaggggcaagctgagaagtgtgccaagagaaagaggaagaaccagtatcgtggaatccgtcagcgtccatggggaaagtgggctgctgagatccgtgacccaagaaagggggttcgtgtttggctt

SEQ ID NO: 142781 - DNA, 226 bp, Glycine max
caaaaattttgtttctttgtgtgtgtatggtgatgatatacttaattagtgttcatgaatatgtcaagccttactttagtggttctaaattgaaaagctttctagctggtcataatatcaccattactgatggtattgacaaaactagtgcaactttgcaatttagaaagttagcagattgtgattttctcaagagaaactttaagcagatgtctaatgttttatg

SEQ ID NO: 142782 - DNA, 172 bp, Glycine max
gcgatcacaggttgccgcaccttaaaaccggaaacaaaagcaatcgttacttgatttcaagaatttctcaatttcttcctacttctttgtgtacgatttcttaagggaaagaaaatcactctctgtgctggtcacagacttcgtgaatcattttcttttccacacaacatac

SEQ ID NO: 142783 - DNA, 259 bp, Glycine max
ccctacctctcctttcaagatgcagatcttcgtcaagaccctcaccggaaagaccatcacccttgaggtggaaagctctgacaccatcgacaacgtcaaggccaagatccaggacaaggaaggaattcccccggatcacaacgtctcatcttcgccggaaagcagctcgaggacggccgtaccctcgccgactacaacatccagaaggagtcaacccttcaccttgtccttcgtctccgtggtggcatgcagatcttcg

SEQ ID NO: 142784 - DNA, 258 bp, Glycine max
ctgaaaatgcggaatcctctgcatgatctggaattcgtgttttctttcgcttgttcgtttgtttaattcaataaaggaaattaggcatgaccctcttgttgagtatgctctgcctatctgaaaatttccacacctctttaattgtcgtaatgatgtgtgaagtgtgtgttattttaaaaaaaaaaaaaaaaaaaaaaaaaaaaaaaaaaaaaaaaaaaaaaaggggggcccccccatttaggtcccctcccccccggg

SEQ ID NO: 142785 - DNA, 254 bp, Glycine max
aataaacaaaaacaaacacaaccaaacccagagcccattcgatttggatccgatgggtgatatagtgaaacaaatattggcgaagcgatccagctggcggaccaagtaaccaaagccgccgacgaagccagctcctcaagcaggaatgcggcgagctgaaggcgaagacggagaagctggcggcgctgctgcgtcaggcggctcgtgcgagttccgatctctacgagcgtcccacgcgccgcatcatcgacgaa

SEQ ID NO: 142786 - DNA, 256 bp, Glycine max
attttgattctagcaagcagagcttttgtcaattttctattgaccttctcggtggaggaattttagtggacaaaactggagattggatcacacttatacaaaattctccaattagtaacttgttgagagttgctgttggaagaaaggttgtttaatggtcaagattgtgatgtctgggaatgcagcagtcaaaaggagtgattgggcctcattggtacaagtgtttttaacaaacagcaacagtacagagcatttt

SEQ ID NO: 142787 - DNA, 255 bp, Glycine max
gccatctaatttaattacaactctgtatgtgaattctgcttgcagctgatggcgcaaattctgctccatgggactcttcatgccactatctatgaagtcgataagctcaaaattggtggaggcaactttttaaccagatcgtacaaaacatcgaggagactgttggtattggaaaaggtgtcactaaactatatgcaaccattgatctagagaaggcacgagtggggaggaccagaattattgaaaaagagatta

SEQ ID NO: 142788 - DNA, 253 bp, Glycine max
gtttcctctacaaaagcacaatttgttagtggaaaaaccttcaaatatgatataattggtgctggttcacattcttcaggagattttcctgaaaaggaagatcaagaaaaacccaaaaagattgataccagaagggacaaagaatagatcctcaatacaatgaggttcaggctcagatggaaacaaatttgtttagattgtcagatgatgatgttgaaactcctaaaggttctatgttggatcttaaaatttc

SEQ ID NO: 142789 - DNA, 255 bp, Glycine max
aaaaagacagagggttaattgtggagtattttggaaggatgtcttacgttgctcataacgttaatcagccccaagagaaagatttgttagagggaaatttttcctttgatattaaatctcgctctagattggaaaagtttcctctacaaaagcacaatttgttagtggaaaaaccttcaaatatgatataattggtgctggttcacattcttcaggagattttcctgaaaaggcagatcaagaaaaacccaaaaa

SEQ ID NO: 142790 - DNA, 246 bp, Glycine max
gatggcagaaatgataaacagtctttgtggtggtgatgaaaaaatgatgcgtgaaaggacgcacctgctgttggcttgttgttcaaggatggcaatttgtaagaaagatgtttggagagttgaatgggaatcccttctggatttccgctcacagttatttgcaatagcatttttaatgagatgctcattagattaagctatgaaaaattactgcgccaggctaaagctccaagtatgtttttacaa

SEQ ID NO: 142791 - DNA, 255 bp, Glycine max
gtgtgagccacactgtgcccatatatgaagggtatgctcttcctcatgcaattcttcggttggaccttgctggccgtgatttaacagagtacttggtgaaaatccttaccgagagaggatactccttcagcaccctgccgaaaaggaaattgtccgtgatgtgaaggagaaattggcatacgtggcccttgatttcgaacaagaaatggagactactaagagtagttctgcagtggaaaagagctatgaattgcc

SEQ ID NO: 142792 - DNA, 251 bp, Glycine max
ctcgagccgctcgatccgcccttcaatggggtgatcaagatgattatgaggttgtgcgaaaagtgggcatgggtaaatatagtgaagtttttgaaggcataaatgtcaatagcaatgagcgctgtataattaaattctgaaacctgtcaagaaaaagaagattaaaagagagataaaaatacttcagaatatttgcggaggcccaaatattgttaagcttcttgatattgtcagagatcaacattcgaaaa

SEQ ID NO: 142793 - DNA, 252 bp, Glycine max
ctttgtgctaaataggtgtatgggaaaactgactttccctcaaggcacatcccgaagtgttaagagaatgcctctaactataggaggacgagctagagcaaagaatgctattctcataaatatgccatatgctgtctttcaatgtggagatattttgttggagatctcgtctatgtagttccaaagatgacttctccctacattaaatgtacagtctctttcttcatagcatttggatatttagctgatgac

SEQ ID NO: 142794 - DNA, 244 bp, Glycine max
  unsure (1)..(244): unsure at all n locations
aagagagagacttngttggaagggaaatttgtcctttgatattagatctcgctctagatgcggaaaacgtttcgtctacgaaagctcactttgttagtggatcaaccttccaatatgatatagttcgtgctggggacattcttcagaagatttccctgacaaggaagatctggaagaacccaaaaagattggtgtcacattgagtcgaagaatggatcctccatgcaatgaggttcatggtcag

SEQ ID NO: 142795 - DNA, 257 bp, Glycine max
gaactcgagccgctcgagccgctcgagcggctcgagctcgagccgtttagagcaagtgttgatatgcagcgcactcatcgtattaacaggaatgactcaaatggtggccacagttggtattcctgagaatacaggtatacattggcctgtgctatgaatagttcttttagggggcgcgccagttctgatatttacaccatctgctctcaagactgtgaattatggaatcctgcttgcacaaaagcaatgactatgtc

SEQ ID NO: 142796 - DNA, 250 bp, Glycine max
gaaaaagtttcctctacaaaagcacaatttgttagtggaaaaaccttcaaatatgatataattggtgctggttcacattcttcaggagattttcctgaaaaggaagatcaagaaaaacccaaaaagattgtaccagattgagacaaagaatagatcctcaatacaatgaggttcaggctcagatggaaacaaatttgtttaaattgtctcttgatgatgttgaaactcctaaaggttctatgttggatct

SEQ ID NO: 142797 - DNA, 255 bp, Glycine max
accaagagagggttgtgtggtggtgcaggttcgaagatatcccggacgctagtggagacgggttcggcgatcacgtggaagtacccgagtgttgtgctgtgaggagatggtagtgttggggagttctattctgtgctttgacgaataactatcagcaggcggataccgggaccaagatcgtacacaaagggaagaacacgaggagtaggattatatccaaaggaatatcggttgggcattccaggaactgttata

SEQ ID NO: 142798 - DNA, 263 bp, Glycine max
ctcgactatagacaagaaccaacacaaccacacccagagcccattcgatttggatccgatgggtgatatagtgaaacaaatattggcgaagcgatgccagctggcggaccaagtaaccaaagccgccgacgaagccagctcctcaagcaggaatgcggcgagctgaaggcgaagacggagaagctggcggcgctgctgcgtcaggcggctcgtgcgagttccgattcctacgagcgtgccacgcgccgcaatcatcgacgaaa

SEQ ID NO: 142799 - DNA, 249 bp, Glycine max
ctcgagccgtgcagtttggagagattcaggaaaaagttgtgttgaaattttcacaagaggactttcttacagcttggtcaactcaggtgcgtcccgcaacgactctgttggctgatgggtgcccatatttgatgctatggtgcatgatagttcagtgtctacaataccaggtgattttgtcattggtgttaagttgacaaccataaacaatatgtgtgcatatgggctcaatcctggtatttcaggttc

SEQ ID NO: 142800 - DNA, 252 bp, Glycine max
gacaaaactagtgcaactttgcaatttagaaagttagcagattgtgattttctcaagagaaactttaagcagatgtctaatgttttatgggtggctcctgactacaaggcgagtttatggtcacaacttcatttgtttcgtgcaataatctggaaatgcaagaagcttatcttgtcaatctcgtaaatgtgttacgagaattgtatttgcacagtccagaggaagctcgccaattgagaaggaaagctctct

SEQ ID NO: 142801 - DNA, 212 bp, Glycine max
cacttataccaaattctccaattagtaacttgttgagagtagctgcttggaatcaaggttgtttaatggtcaagattgtgatgtctgggaatgcagcagtcaaaaggagtgattgggcctcattggtacaagtgttttaacaaacagcaacagtacagagcattctgatgcatgtaagtggacaaaatcagaaccacattccggggtaatct

SEQ ID NO: 142802 - DNA, 258 bp, Glycine max
aacaaatggtaatgcccggacaccgtgagtcaaacttgcagaaagagctgaatcgatacattcccactgccgcagcatttggaggcatctgtattggtgccctgacagtgttggcagatttcatgggggccatcggtcaggaacaggaatattgcttgcagtaaccatcatctatcagtactttgagacatttgagaaggagagagctagcgagcttggcttctttggtttctaagttctgccaatgagctctcccac

SEQ ID NO: 142803 - DNA, 258 bp, Glycine max
aaatttggctgatgacaccatcaattttgaggcttttccacacaagctgctatataatggagagattcaggaaaaagttgtgttgaaattttcacaagagtaatttcttacagcttggtcaactcaggtgcgtcccgaacgactctgtctggctgatgggtgcccatatttgtatgctatggtgcatgatagttcagtgtctacaataccaggtgattttgtcattggtgttaagttgacaaccataaacaatatgtg

SEQ ID NO: 142804 - DNA, 245 bp, Glycine max
atactgaggattatggaatccggctttcacataagcaatgtctttgtcttgtagatcctaacccgtgttctgatgcatggattttggaatctctgtatcgtaccttatttcattgtgatatcattgtgtcactggatggactgccaccccaatgcaggatgttcaggttacaattgattgctttatttcctctcaggaatgtgttcccaggtcttattgtgttttaaatccacaaaatccttttt

SEQ ID NO: 142805 - DNA, 248 bp, Glycine max
aattgtctctatcctgtaagtcaattaccttcagaagctgtcgttgtaaatgttacatgtggtagtggacgtggtggtttacccaccactgcttggattagttctgcagttaacaatcgctcctcagaatcaacaaaaggattcgcacagcacttgggaaaggtaagacaattgtttttcttactagagttgatctgattccagtagctttattggctgttctttttggcgttaagaatgaaattctg

SEQ ID NO: 142806 - DNA, 236 bp, Glycine max
gattgtggttcattggttgttgccaaggttggaaatcacaaacaaattgttggtttccatgttgctggaagcaaaggaagactgggatatgcgtcattgataccatatgttgagccagttgtgcaagccaaagtgctgaagttgactctgacttctaccctgtggaggttgatagtcaagagggagttgctcagattggtgaattgaaatctggtgtctatgttccactgcctaca

SEQ ID NO: 142807 - DNA, 257 bp, Glycine max
cggtttctagagagagaaagtttgttatagagagagaaagcgcgctgctgcttcttctgctgctgcttcgacagtgagaagagagagagaagcgctcttctccgtaccgtttctagagagagaaactgatggccgggttaatccgaacggcgtcgccgattttccggcgactccaacgcacggcggacagttcattcagtacaacatattcggaaacctcttcgaggttacggcgaagtaccgtcctccgatcatgc

SEQ ID NO: 142808 - DNA, 254 bp, Glycine max
tgtgtgagccacactgtgcccatatattaagggtatgctcttcctcatgcaattcttcggttggaccttgctggacgtgatttaacagagtacttggtgaaaatccttaccgagagaggatactccttcagcaccctgccgaaaaggaaattgtccgtgatgtgaaggagaaattggcatacgtggcccttgatttcgaacaagaaatggagactactaagagtagttctgcagtggaaaagagctatgaattg

SEQ ID NO: 142809 - DNA, 246 bp, Glycine max
ggcaatgcttttgtatgcaacagtagtgtcagtctgtgctccagtgtgggaggagatagttttccgtggctttctactcccatccctcaccaaatacatgccagtgtggtgtgcaatactggtaagtcaattgcctttgcacttgcacatttcaacatacagagtatgctgccccttatatttcttgggatggtgatgggtgtgatatatacacggtcaaggaatttactgccatcaatgctgttg

SEQ ID NO: 142810 - DNA, 242 bp, Glycine max
ttgaaacaacagcaacggagaggatgagaagagagtgaagtttgtgaaagagatggcactcgtaacaacaaacccaaccatcaatgaggggcctctgttcgccgaagttgacatgggttccgacttaacgccccaacggttcgagctaccgttgttcaagcctccaccatcttctacgacacaccagccaccttagataaggctgagaggttgttggctgaagctactagctatgggtccca

SEQ ID NO: 142811 - DNA, 258 bp, Glycine max
cagctgacgatgcgggatcctactgagtatctggaatccggcttgcacttcagctgttacgactggctaattccctaaaccgagttctgcatcaccctcttgttaagtactgtactcgcatatgtgaacatttcgaaaactactgtgatcgtcgtaatgactgtctcccctgtgcatgatgttcaggttacaattgaatggcttatttcctctcaggaatgtgttcccaggacctattgtgttttaaatccacaaaat

SEQ ID NO: 142812 - DNA, 254 bp, Glycine max
aataaacaaaaacaaacacaaccaaatccagagcccattcgatttggatccgatgggtgatacagtgaaacaaatattggcgaaccgatccagctggcggaccaagtaaccaaacccgccgacgaagccagctcctcaagcaggaatgcggcgagctgaaggcgaagacggagaagctggcggcgctgctgcgtcaggcggctcgtgcgagttccgatctctacgatcgtcccatacgccgcatcatcgacgaa

SEQ ID NO: 142813 - DNA, 242 bp, Glycine max
taaggttagctacgatacactgcggttatcgcacaaggttctggctcaagagtctgacggctccgttaaattcggtcactgcgattcctccgcctacctgtttgatcctgatatttacactgatgtaggatctccgttcagggaattgacggcgttcttatccctcctgaagaagaagaagtacgcactcgccgcaccactccacttgttaatgttgctgctcctataccaagtagagggat

SEQ ID NO: 142814 - DNA, 246 bp, Glycine max
agttcagtgtctacaataccaggtgattttgtcattggtgttaagttgacaaacatagacaatatgtgtgcatataggacttaatacctggtaattcaggttctcgtcatttgggcaccattcctcatccatttcacagcaaactgtttggaatcatatggcaacagtgagtacaccattgaatattgattctagcaagcagagcttatgacaattttctatcgaccttctcagtagaggcatttt

SEQ ID NO: 142815 - DNA, 235 bp, Glycine max
ggaagactgggatatgcttcattgataccatatgttgagccagttgtgcaagctcaaagtgctgaagtttactttgacttcttccctgtggaggttgatagtcaatagggagttgctcacattgtgaattgaaatctggtgtctatgttccactgcctacaaaaactaatttgatggaaactcccaaggaatggcaactggatctaccttgtgacaaaattcctagtgtcttgac

SEQ ID NO: 142816 - DNA, 244 bp, Glycine max
acttctttggcttttgcttgcttctctgcggcagctttagttgcaaggcgtagggagtacctctaccttggtggtttgctttcttctgggctgtccattcttatgtggttgcactttgcttcctcttctttgggggctcaattgcactcttcaagtttgagctgtactttgggcttttggtgtttgtgggctacgttatagtagacactcaagaaattattgaaagggctcactttggtgacct

SEQ ID NO: 142817 - DNA, 263 bp, Glycine max
gaaaagtgttcctacattggttggcattgaatgtcccaaggatgagaaacttcctcgtcgcaaaatttttgacaaacctaagacgcgctgcttcactattctccctatggagtttaatcttgtggtccgtcaaaagtttttaaattttgtgaggttcattatgaagaaaagggacaagcttagttgtcaagttggaatcaacccatactccatggaatggactggtttggccaatagattactgagtaagggcaatgatattc

SEQ ID NO: 142818 - DNA, 271 bp, Glycine max
tcggctcgaggatttgagattttgataaaccgcgatcacaggttgccgcaccttaaaaccggaaacaaaatgaatcgttacttgatttcaagaatttctcaatttcttcctacttctttgtgtacgatttcttaagggaaagaaaatcactctctgtgctggtcacagacttcgtgaatcattttcttttccactcctagttcatccggtgaacactctcctatttgatataggacttcgtgtcagatttgaactttttctgtttctttct

SEQ ID NO: 142819 - DNA, 261 bp, Glycine max
  unsure (1)..(261): unsure at all n locations
tgaaattttaataaaccgcgatcacaggttgccgcaccttaaaaccggaaacgaaagcaatcgtgtattgatttcaaggatttctcaatttcttcctacttctctgtgtacgatttcttaagggaaagaaaatcactctctgtgctggtcacagacttcgtgaatcattttcttttccactcctagttgaaccgctnaacactctcctatttgatataggacttcgtgtcagatttaaactttttctgtttctttctcagg

SEQ ID NO: 142820 - DNA, 259 bp, Glycine max
ggtaggcacagaacatgagggatatgatccttttcttggtggaattcaaaaatatgccactcccatgatgcccctagatgaagaaattctttctaaggttgcacaagatatggttgaggaatggtttgattgtgttgatgaggaggattcctttgaggaagtttctttaagtgcagcacttaatggtgttgagggtttggactatatggaaagaattcctcttgccacatctgagggttttcctcatgtgctttcacgc

SEQ ID NO: 142821 - DNA, 261 bp, Glycine max
tacatttccttttctgctcatgctgactctgctcaaacaagtgcgttcttagaagagctcaatcctcctaacataattcttgttcatggagaagctaatgagatgggcaggctcaagcagaagctcataagtcaatttgctgatcgcaacactaaaattcttactccaaaaaactgtcaatctgttgaaatgtatttcaattcgcagaaaatggcaaaaaccatagggaagctggctgaaaaaacaccagaagttggtgaa

SEQ ID NO: 142822 - DNA, 259 bp, Glycine max
tgtcagcattgaatatgatgcatgtacaattccaaatgattgtggttcattggttgttgccaaggttggaaatcacaaacaaattgttggtttccacgttgctggaagccgaggaagactgggatatgcttcattgataccatatgttgagccagttgtgcaagctcaaagtgctgaagtttactttgacttcttccctgtggaggttgatagtcaagagggagttgctcacattggtgaattgaaatctggtgtctat

SEQ ID NO: 142823 - DNA, 136 bp, Glycine max
aaaaccggaaacaaaagcaatcgttacttgatttcaagaatttctcaatttcttcctaacttctttgtgtacgatttcttaagggaaagaaaatcactctctgtgctggccacagacttcgtgaatcattttcttt

SEQ ID NO: 142824 - DNA, 218 bp, Glycine max
gaaagtatggacgtcgagtaagtatcataggtagtggtatcagcttatcttattggatcagctctgaatgcttcagctgttaacctgataatgttgatcttaggccgggttatgcttggtgttggcattggatttggaaatcaggctattccgctttatttgtcagagatggcaccaacacaccttcgaggaggcctgaacatgatgtttcaagttgc

SEQ ID NO: 142825 - DNA, 258 bp, Glycine max
gagattcaggaaaaagttgtattgaaattttcacaagaggaatttcttacagcttggtcaactcaggtgcgtcctgcaacaactctgttggctgatgggtgtccatatttgtatgctatggtgcatgatagttcagtgtctacaataccaggtgattttgtcattggtgttaagttgacaaccataaacaatatgtgtgcatatgggcttaatcctggtatttcaggttctcgtcttttgggcaccattcctcagtcc

SEQ ID NO: 142826 - DNA, 256 bp, Glycine max
ggagttctgagtgggcaaatcaaacttcatggcatttgagtttcttattgacaatcccaaacagtctacagtttttgatattctcttgggaatctctcaagattttgaaattgctggtaatactcttatgccagctttttctgttccacaggctactgccagatcttctgaaaatgcggaatcctctgcatgatctggaattcgtgttttctttcgcttgttcgtttgtttaattcaataaaggaaattaggcatg

SEQ ID NO: 142827 - DNA, 257 bp, Glycine max
tgcagacacaggttatcatcaatcaccaggctcttccttgccttctgaatctgttgaccaataattataaaaaaagcatcaagaaggaagcttgttggaccatatcaaacatcacagctggtaataaacagcagattcaggctgtgattgaggctaatctaattgctcctttggtcaatctgcttcaaaatgctgagtttgatatcaagaaagaagctgcttgggctatctcaaatgctacatccggtggttctcat

SEQ ID NO: 142828 - DNA, 258 bp, Glycine max
atctcttgggaatctctcaagattttgaaattgctggtaatactcttatgccagctttttctgttccacaggctactgccagatcatgctgaaaatgcggaatcctctgcatgatctggaattcgtgtattctttcgcttgttcgtatgtttaattcaatgaaggaaattaggcatgaccctcttgttgagtatgctctgcctatctgaaaatttccagacctcttttaattgtcgtaatgatgtgtgaagtgtgtgt

SEQ ID NO: 142829 - DNA, 253 bp, Glycine max
  unsure (1)..(253): unsure at all n locations
ccagtctcttctgtacagattgcatttactctgctagtgtttccttgccttcttttagcctactctggacaggctgcttaccttatgcataacttggaccattcaaaagatgcgttttatcgttctattccagacaaaatatacttttcantatntgttgttgcaacattagcagctatagttgcaagccaggccacaatatccgcaaccttttcaattattaagcaagcaatgctatggggctgtttcccga

SEQ ID NO: 142830 - DNA, 173 bp, Glycine max
gcatttttaatgagatgctcattagatatagctatgaaaaattacctgcgccaggctaaagctccaagtatgtttttacaatccttcaaaaattttgtttctttgtgtgtgtatggtgatgataacttaattagtgttcatgaatatgtcaagccttactttagtgggtcaaa

SEQ ID NO: 142831 - DNA, 253 bp, Glycine max
ctgtgttttactatgagattcttaactctcctgatcgtgcatgcagccttgcaaaacaggcttttgatgaggctattgctgaattggatacgttgggagaggaatcatacaaggatagcactttgatcatgcaacttcttcgtgataaccttaccctctggacctctgacatgcaggatgatggtgcagatgaaattaaagaagccgcacccaaaggtgacggggaacaaaattaaacataccatacttctaa

SEQ ID NO: 142832 - DNA, 253 bp, Glycine max
acaataccaggtgattttgtcattggtgttaagttgacaaccataaacaatatgtgtgcatatgggctcaatcctggtatttcaggttctcgtcttttgggcaccattcctcagtccatttcacagcaaactgtttggaatcaaatggcaacagtgagaacaccattgaattttgattctagcaagcagagctagtgtcaattttctattgaccttctcggtggaggaattttagtggacaaaactggagatt

SEQ ID NO: 142833 - DNA, 252 bp, Glycine max
attgcacttcccaagaacacagttggaggaaccattctgcgtagtgatctattggcaaattttttgacagagggcaattttagagcaagtgttgatttgcagcgcactcatcgtattaaaggaatgattaaaatggtggccacagttggtattcctgagaatacaggtatagcattggcctgtgctatgaatagttcttttagggggcgcgccagttctgatatttacaccatctgctctcaagactgtgaa

SEQ ID NO: 142834 - DNA, 254 bp, Glycine max
aaaattttgtttctttgtgtgtgtatggtgatgataacttaattagtgttcatgaatatgtcaagccttactttagtggttctaaattgaaaagctttctagctggtcataatatcaccattactgatggtattgacaaaactacagcaactttgcaatttagaaagttagcagattgtgattttctcaagagaaactttaagcagatgtctaatgttttatgggtggctcctgaggacaaggcgagtttatgg

SEQ ID NO: 142835 - DNA, 239 bp, Glycine max
gagcattttgatgcatgtaagtggacaaaatcagaaccacattcctgggaattaatcttcccaatagaggtatgtggtcctaataatggttttgaaatgtggagttctgagtgggcaaatcaaacttcatggcatttgagtttccttattgacaatcccaaacagtctacagtttttgatattctcttgggaatctctcaagatttggaaatggccgggaaagatactatgccagtttt

SEQ ID NO: 142836 - DNA, 265 bp, Glycine max
ctttgatcaatatacaaatgattctctcaatgtgatggatacgagcgtatctgctcaaggaattgcagatttggctctgtccatggtcagatggattcctactcaaattaaaaaagttgtgaattttggggtaggatcggtcataggatccttatcggaacatttcaataagctcctaatgcaatattatccaatagtgttccaagcttttaactgggtgtacaatatctggaccatggttaaagaatggattgaggaggctgcg

SEQ ID NO: 142837 - DNA, 252 bp, Glycine max
gacaaaactagtgcaactttgcaatttagaaagttagcagattgtgatctctctcaagagaaactttaagcagatgtctaatgttttatgggtggctcctgaggacaaggcgagtttatggtcacaacttcattatgtttcgtgcaataatctggaaatgcaagaagcttatcttgtcaatctcgtaaatgtgttacgagaattgtatttgcacagtccagaggaagctcgccaattgagaaggaaagctct

SEQ ID NO: 142838 - DNA, 249 bp, Glycine max
gtcgctgtctcagaggcttacaatagcccttgatgttgctagagcgatggaataccttcatggtcttgcacgccaaaccttcatccatcgcgacctcaagtcttctaatattctactgggggatgattttcacgcaaaagtttctgattttggcctggtgaaacttgccccggatggccagaagtctgtggcaacaaagcttgcaggaacatttggttatcttgcccctgaatatgcagtgatggggaa

SEQ ID NO: 142839 - DNA, 196 bp, Glycine max
tcaagactgtgaattatggaatcctgcttgcacaaaagcaatgactatgtcatttaatccaaacccgtgttctgatgcatggagattggaatttctgaagcgtaccggatttcattgtgatatcatttgtgtcactggatgcgactgccaccccaatgcgggattttcaggttacaattgattggtttatttcctc

SEQ ID NO: 142840 - DNA, 249 bp, Glycine max
  unsure (1)..(249): unsure at all n locations
ctcgatcaactcaacacaaaccaaaacnagngctaaaattctnacttctctctctcatctcgagatcatagtatcntattcaatatcatangnataccaaacacatggntttggaagctctcaactcaccaacaacaaccgctgcatcttttccctttgacgacccaactattccatgggcgaaacgaaaacgttcaaagcgttctcgcgaccatccttctgaagaagagtacctcgccctctgcctca

SEQ ID NO: 142841 - DNA, 243 bp, Glycine max
tcattttcacttttccctcagtttatgttcaatctgcgacgctcgcagtttgtacaggtttttaacaacagtccagacgagactgcatatttccgtatgttgttaaacagggaaaatattagtaatgctgctgttatgattcagccgtcattgatatcatattcatttaatgcgctgcctgcaccagcattgttagatgtggcttccattgctgcagacaagattttgttgctagattcatat

SEQ ID NO: 142842 - DNA, 246 bp, Glycine max
aaccgacctacgtagtagccatgaagagaggcagagaagagagtaagttagacatggctaattgcttgatgctattgacgaaagagggagagagtgaaaccaattacccaatatcaaagggtagtgatattggtgatttcaagtgcaagacttgcaatagaaggttctcttcttttcaagcccttggtggccatagagcaagccacaaaaaaccaaagctcatggtcacagatctttcgtgccatc

SEQ ID NO: 142843 - DNA, 241 bp, Glycine max
aagcacaacttttgctcaaagcttcagaaactatgctcatgaaagcttatgcttttttgaagtataacaatgcgaccaatttgattgtcaggactcatttggcagaattggtcaatgaagacttttatgatgaaaaatttaattttattggcacaattgggactccagcttttcatcgacaaattgctgcacacttggagaaaatgccattatggcaaaaagcaattttgtgtggaatggg

SEQ ID NO: 142844 - DNA, 247 bp, Glycine max
tggtcatggtctttggagagatcacaaccaaggccaacgtagactatgagaagattgtccgtgacacatgccgcgaaattggattcatctctgatgatgttggtcttgatgctgacaaatgcaaggtgttggtcaacattgagcagcagagccctgatatcgcccagggtgtgcacggtcacttcaccaagcgcccagaggaggttggtgctggtgaccagggtcacatgtttggctatgccactga

SEQ ID NO: 142845 - DNA, 261 bp, Glycine max
cgtggcacaattatcatgcctaacttctccatgtttcattttggtcgccctgtagccctttcaactggatgtaaatcggcattcacatctttgaatggtgatactgttggtgatttttcctcaaaaagctctgcagatcatgtcgaaaacgttcataattgcaataagaaagagactcccgccatggaggaatacaacttgtttgcaacaagtaatcacctaaggttttcaattttctaaaatgataaggtggctgttgtc

SEQ ID NO: 142846 - DNA, 251 bp, Glycine max
tcgatgccaaatgctgttctttcaatgtggagatattttgttggagatctcgtctttgaagtttctaagatgacttctccctacattaaatgtacagtctctttcttcatagcatttggaaatttggctgatgacaccatcaattttgaggcttttccccacaagctggtgcagtttggagagattcaggaaaaagttgtgttgaaattttcacaagaggaatttcttacagcttggtcaactcaggtgcg

SEQ ID NO: 142847 - DNA, 243 bp, Glycine max
ctcgagccgaatcggctcgagaagtaatcgagcttcagcaatggtgtacgtcaaggctcagatatcaaaagcctacttcaagagatatcaagtcaagttcaagagaagaagagagggaaaaaccgattaccgtgccaggattcggttgattaatcaggacaagaacaaatataacactccgaaataccgatttgtggttcgctttagcaacaaggacattgttgcacaaataatatctgctag

SEQ ID NO: 142848 - DNA, 240 bp, Glycine max
ctcttgttggttttgggctttatgagttaggctttcctggggttgctaaatgtgtagagattggactgccagagcttatattactagtatttatttcacagtttgtacctcatgtgctacatgcaggaaaacatgtcttcgatcggttcgctgttttatttacaattgcaattgtatggttatatgcttatctgctcactgttggaggggcatacaaccatgctgcacctaaaacacagt

SEQ ID NO: 142849 - DNA, 225 bp, Glycine max
gtaaatgccttggccaaggcattgtctggacagaaggatgaggttttcttttctgctaatgctgctgccttggcttcaaggaagtcctccccaagggtgataaatgaggctgtccaaaaagccgctgctgctctgaagggctctgatcatcggagggccacaaatgttagtgccaggttggatgctcaacagaagaaattgaatctttctgttcttccaacaact

SEQ ID NO: 142850 - DNA, 243 bp, Glycine max
gaagagatgacattgattccaggaaccagtgttgaagaggcttacaacaagctaatagttgaacttgagaaaagtgttcctacattggttggcattgaatgtcccaaggatgagaaacttcctcgtcgcaaaatttttgacaaacctaagacgcgctgcttcactattctccctatggagtttaatcttgtggtccgtcaaaagtttttaaattttgtgaggttcattatgaagaaaagggac

SEQ ID NO: 142851 - DNA, 248 bp, Glycine max
gctttgcaagagcattaacccagatgaagctgttgcctatggtgcaacaagtgcaggctgccattctcagtggcgagggtaatgagaaagtgcaggatcttctgttgttggatgttactcctctctcccttgggttggagaccgcgggaggagtcatgactgtgttgattcccagaaacacaaccattcccaccaagaaggagcaggtattttcgacctattccgacaaccagcctggtgtgttgatt

SEQ ID NO: 142852 - DNA, 251 bp, Glycine max
caaggttgcaagagaacatggcgtggttgaaagtggagggcaaatttcctttgagcatattcattttgcttcctcagtttatacttatgggaactgctgatgcattcttagaggttgcaaaaattgagtttttctatgatcaatccccggaacacatgaagagcattggaacttcatattccacaaataccttaggccttggtaacttcatcagttcctttcttctctcaacagtgtcaaatatcaccaag

SEQ ID NO: 142853 - DNA, 258 bp, Glycine max
gggttcgcatgccaatttcatctgacttgagcaatccgcgcaatttcatcaccaagatttctcgttataacaaagtagtcaacattccaaacagcatgaccattttggatgaacttctgccgatttcaattgagatggcaaagcgaaacttgaggggcatctggaacttcacaaatcctggggccgtgagccacaatgagatcctcgagatgtacagggattacattgatccaagcttcaagtggactaacttcaatc

SEQ ID NO: 142854 - DNA, 211 bp, Glycine max
caacgttatgacagaatgcgacaggaagctgaagcccaggctattgaagtttctaaacgccaggcaaaagtaagagaaatgccacccagtgcagagaatactatgaaattagaagcagctgaagctaagctgcaagatctgaagacaaacatgaccatactggggaaggaagcagctgcagctttggctgctgttcaagcacagcaacaga

SEQ ID NO: 142855 - DNA, 249 bp, Glycine max
gcaacagtgagaacaccattgaattttgattctagcaagcagagcttttgtcaattttctattgaccttctcggtggaggaattttagtggacaaaactggagattggatcacacttatacaaaattctccaattagtaacttgttgagagttgctgcttggaagaaaggatgtttaatggtcaagattgtgatgtctgggaatgcagcagtcaaaaggagtgattgggcctcattggtacaagtgttt

SEQ ID NO: 142856 - DNA, 248 bp, Glycine max
atacaagaacattgactttggggttgatttagattctcgggttgcgctggttgggcccaatggtgctgggaagagtacactactgaagctattgacaggtgacttgatgcctagtgatggcatggtccgacgtcataatcatcttcgaattgcacaatatcaccagcatttggccgaaaagctagacatggaaatgtctgctctccagtttatgattaaagaataccctggaaacgaggaagagaaga

SEQ ID NO: 142857 - DNA, 248 bp, Glycine max
agctcgagggtcaagattgtgatgtctgggaatgcagcagtcaaaaggagtgattgggcctcattggtacaagtgtttttaacaaacagcaacagtacagagcattttgatgcatgtaagtggacaaaatcagagccacattcctgggaattaatcttcccaatagaggtatgtggtcctaataatggttttgaaatgtggagttctgagtgggcaaatcaaacttcatggcatatgagtatccttat

SEQ ID NO: 142858 - DNA, 245 bp, Glycine max
gttcccaggacctattgtgttttaaatccacaaaatccttttgtcttaaataggtggatgggaaaactgactttcccccagggcacttcccgaagtgttaagagaatgcctctttctatagggggaggagctggtgcaaagaatgctattctcatgaatatgccaaatgctgttctttcaatgtggagatattttgttggagatctcgtctttgaagtttctaagatgacttctccctacattaa

SEQ ID NO: 142859 - DNA, 161 bp, Glycine max
tgaaattttaataaaccgcgatcacaggttgccgcacctctaaaaccggaaacaaaagcaatcgttacttgatttcaagaatttctcaatttcttcctacttctttgtgtacgatttcttaagggaaagaaaatcactctctgtgctggtcacagacttcg

SEQ ID NO: 142860 - DNA, 247 bp, Glycine max
atgaaaaggaagatcaagaaaaacccaaccagatctgataccagattgagacaaagaatagatcctcaatacaatgaggttcaggctcagatggaaacaaatttgtttaaattgtctcttgatgatgttgaaactcctaaaggttctatgttggatcttaaaatttctcaatctaaaattgcacttcccaagaacacagttggaggaaccattctgcgtagtgatctattggcaaattttttgacag

SEQ ID NO: 142861 - DNA, 247 bp, Glycine max
ctcttcctcaccgattgctagaatggaatttcgatgctcagtcatctcttttaccattctcttctctcttgctcttgcaggagagagccatgtccatgcatcgctacctgaggaagattattgggaagctgtttggccaaacactcccattcccactgcactgcgagagcttctaaagcctctccctgcaggtgttgaaatccatgaactccctaagcaaattgatgatacacagtacccaaaaaca

SEQ ID NO: 142862 - DNA, 253 bp, Glycine max
gggaatctctcaagattttgaaattgctggtaatactcttatgccaactttttctgttccacaggctactgccagatcttctgaaaatgcggaatcctctgcatgatctggaattcgtgttttctttcgcttgttcgtttgtttaattcaataaaggaaattaggcatgaccctcttgttgagtatgctctgcctatctgaaaatttccacacctcttttaattgtcgtaatgatgtgtgaagtgtgtgttat

SEQ ID NO: 142863 - DNA, 171 bp, Glycine max
cttatttcttttccctagtcaaggagattcatctctgccgtcggttgttttagaaaagaaaaaatgctgaagatttgctgcattggggctgtctatgtggggggtccaacactgtcagtcattgcactgaaatgcccctcaattgaagtggctcttgttgacatctctaaa

SEQ ID NO: 142864 - DNA, 247 bp, Glycine max
gggagctttaactgaaagagcgaaatgagcagagtacgaaggagactgttgataaatatcatggtacaaacttgtatatcaagaacttggatgatagtgttggtgatgaagaactcagggaactgttctctgagtttggtacgataacctcatgcaaggttatgcgagatccaagtggaattagtaggggatctggatttgttgcattttcaattgctgagggagcaagttgggctcttggtgagat

SEQ ID NO: 142865 - DNA, 247 bp, Glycine max
  unsure (1)..(247): unsure at all n locations
attggttcttgccaaggttggacatcacaaacaaattgttggtttccatgttgctggaagcaaaggaagactgggatatgcttcattgataccatatgttgagccagttgtgcaagctcaaagtgctgaagtttactttgacttcttccctgtggaggttgatagtcaagagggagttgctcacattggtgaattgaaatctggtgtctatgttccactcaatatacgttccgantcgatggaaact

SEQ ID NO: 142866 - DNA, 246 bp, Glycine max
cgagtcgatttatggcgccaagttcgccgacgagaacttcgtgaagaagcacaccggtcccggcatcctctccatggcgaacgccggtcccggaaccaacggatctcagttcttcaattgcacggagaagacagagtggctcgacggaaagcatgtcgtgttcggacaggtcatcgaaggattgaacgttgtcaaggacatcgagaaggtcggatccagctccggcaggacctccaagcccgttgt

SEQ ID NO: 142867 - DNA, 243 bp, Glycine max
tttcctctcaggaatgtgttcccaggacctattgtgttttaaatccacaaaatccttttgtcttaaataggtggatgggaaaactgactttccctcagggcacttcccgaagtgttaagagaatgcctctttctatagggggaggagctggtgcaaagaatgctcttctcatgaatatgccaaatgctgttctttcaatgtggagatattttgttggagatctcgtctttgaagtttctaaga

SEQ ID NO: 142868 - DNA, 244 bp, Glycine max
ctcgagcctaatcggctcgagctggagattggatcacacttatacaaaattctccaattagcaacttgttgagagttgctgcttggaagaaaggttgtttaatggtcaagattgtgatgtctgggaatgcagcagtcaaaaggagtgattgggcctcattggtacaagtgtttttaacaaacagcaacagtacagagcattttgatgcatgtaagtggacaaaatcagaatcacattcctggga

SEQ ID NO: 142869 - DNA, 254 bp, Glycine max
ataaggaggaaataacaatacctattgtcacgataattatcataattacttccaatgggacaaaaaggaagaatcctcatcagacttcttcagattttgtcgccttatgactaagttccgccaggaatgtgaatcgctaggcttagctgacttcccaacctctgagaggctgcagtggcatggtcattttcctggaaatcggactggtctgaaaccagccgttttgtggcttgtaccatggtagattcagtgaa

SEQ ID NO: 142870 - DNA, 241 bp, Glycine max
caactcagtgaaagagaatccgaggcgaagagaagagaaaaattaagatggaggggaaggagcaggatgtgtcgctgggagcgaacaagttcccggagagacagccgattgggacggcggcgcagagccaagacgacggcaaggactaccaggagccggcgccggcgccactggttgacccgacggagtttacgtcatggtccttttacagagcagggatagcagagtttgtggccacttt

SEQ ID NO: 142871 - DNA, 247 bp, Glycine max
attcaggaaaaagttgtgttgaaattttcacaagaggaatttcttacagcttggtcaactcaggtgcgtcccgcaacgactctgttggctgatgggtgcccatatttgtatgctatggtgcatgatagttcagtgtctacaataccaggtgattttgtcattggtgttaagttgacaaccataaacaatatgtgtgcatatgggctcaatcctggtatttcaggttctcgtcttttgggcaccattc

SEQ ID NO: 142872 - DNA, 246 bp, Glycine max
cattcctgggaattaatcttcccaatagaggtatgtggtcctaataatggttttgaaatgtggagttctgagtgggcaaatcaaacttcatggcatttgagtttccttattgacaatcccaaacagtctacagtttttgatattctcttgggaatctctcaagattttgaaattgctggtaatactcttatgccagctttttctgttccacaggctactgccagatcttctgaaaatgcggaatcc

SEQ ID NO: 142873 - DNA, 240 bp, Glycine max
tctcgagccgattcggctcgagataaaaaggttgatgactgatgtactttttggtgttctactctctggaggtttggactcacctttggttgcatccatcacttctcgttacttggccaacaccaaggttgctgacgcgtgccgatcaaagttacatcccttctgtgtaggccttgccggctcaccagatttgaaggctgcaaacgaggttgctcgatcatccggcactgcccaccatga

SEQ ID NO: 142874 - DNA, 244 bp, Glycine max
agaacatgagggatatgatccttttcttggtggaattcaaaaatatgctactcccatgatgcccctagatgaagaaattctttctaaggttgcacaagatatggttgaggaatggtttgattgtgttgatgaggaggattcctttgaggaagtttctttaagtgcagcactcaatggtgttgagggtttggactatatggaaagaattcctcttgccacatctgagggttttcctcatgtgctt

SEQ ID NO: 142875 - DNA, 252 bp, Glycine max
gagggaatgcctctttctatagggggaggagctggtgcaaagaatgctattctcatgaatatgccaaatgctgttctttcaatgtggagatattttgttggagatctcgtctttgaagtttctaagatgacttctccctacattaaatgtacagtctctctcttcatagcatttggaaatttggtcgatgacaccatcaattttgaggcttttccccacaagctggtgctctttggagagattcaggaaaaa

SEQ ID NO: 142876 - DNA, 250 bp, Glycine max
gcttttgtttgatacttatcataccaatcctgacaatgcagttcgtagtatctttgctgcgcgtttcagaggcggaaggcccattcgggtggttacatttccgaataccattgtgcagattgaaccagacatgaattcaaggtttcagcttttgagtaccactaccaatcgtcattttgttcaagggcaagcatctcgcaatggttacagttcctgtagcatgtgctgctgttggcgtgacatcaagtta

SEQ ID NO: 142877 - DNA, 247 bp, Glycine max
tgactatgtcatttaatccaaacccgtgttctgattcatggagtttggaatttctgaagcgtaccggatttcattgtgatatcatttgtgtcactggatggactgccaccccaatgcaggatgttcaggttacaattgattggtttatttcctctcaggaatgtgttcccaggacctattgtgttttaaatccacaaaatccttttgtcttaaataggtggatgggaaaactgactttccctcaggg

SEQ ID NO: 142878 - DNA, 243 bp, Glycine max
gcttttccccacaagctggtgcattttggagagattcaggaaaaagttgtgttgaaattttcacaagaggaatttcttacagcttggtctcctcaggtgcgtcccgcaacgactctgttggctgatgggtgcccatatttgtatgctatggtgcatgatagttcagtgtctacaataccaggtgattttgtcattggtgttaagttgacaaccataaacaatatgtgtgcatatgggctcaat

SEQ ID NO: 142879 - DNA, 241 bp, Glycine max
  unsure (1)..(241): unsure at all n locations
tttctctctcgctataccaatattaatttgaacctctctcagtncaattccagatagactttgttgncatttgagttttgtcgaatagaaccaaaaagaaaaaatgggaaggcaaccttgctgtgacaaagtggggttgaagaaggggccatggaccgcagaggaggataagaaactcatcaatttcatccncactaatggccaatgttgctggagagctgtccctaaactagcagggctg

SEQ ID NO: 142880 - DNA, 242 bp, Glycine max
atcaaatggcaacagtgagaacaccattgaattttgattctagcaagcagagcttttgtcaattttctattgaccttctcggtggaggaattttagtggacaaaactggagattggatcacacttatacaaaattctccaattagtaacttgttgagagttgctgcttggaagaaaggttgtttaatggtcaagattgtgatgtctgggaatgcagcagtcaaaaggagtgattgggcctca

SEQ ID NO: 142881 - DNA, 174 bp, Glycine max
gatttgaaattttaataaaccgcgatcacaggttgccgcaccttaaaaccggtaacaaaagcaatcgttacttgatttcaagaatttctcaatttcttcctacttctttgtgtacgatttcttaagggaaagaaaatcactctctgtgctggtcacagacttcgtgaatcattt

SEQ ID NO: 142882 - DNA, 246 bp, Glycine max
actcagtgatcgagaatccgaggcgaagacaagagacaaattaagatcgaggggaaggagcaggatgtgtcgctgggagcgaacaagttcccggagagacagccgattgggacggcggcgcagagccaagacgacggcaaggactaccaggagccggcgccggcgccactggtcgacccgacggagtttacgtcatggtccttttacagagcagggatagcagagtttgtggccacttttctgttt

SEQ ID NO: 142883 - DNA, 245 bp, Glycine max
tgatgatgttgaaactcctaaaggttctatgttggatcttaaaatttctcaatctaaaattgcacttcccaagaacacagttggaggaaccattctgcgtagtgatctattggcaaattttttgacagagggcaattttagagcaagtgttgatttgcagcgcactcatcgtattaaaggaatgattaaaatggtggccacagttggtattcctgagaatacaggtatagcattggcctgtgcta

SEQ ID NO: 142884 - DNA, 244 bp, Glycine max
ggtgattttgtcattggtgttaagttgacaaccataaacaatatgtgtgcatatgggctcaatcctggtatttcaggttctcgtcttttgggcaccattcctcagtccatttcacagcaaactgtttggaatcaaatggcaacagtgagaacaccattgaattttgattctagcaagcagagctcttgtcaattctctattgaccttctcggtggcggacttttagtcgacaaaactggagatt

SEQ ID NO: 142885 - DNA, 210 bp, Glycine max
ccttcctctctctctctgtctctctgtctcctccatggccatctccttcagtcccaaacaccctccttacgatgagatgatatacacagcaatcggagctctgaaggagagggatggttcgagcaagcgagccataggaaagtacatagaacaagtctacaaggaccttccacacatcagcggctttcaatagactcaccatctcaaccg

SEQ ID NO: 142886 - DNA, 241 bp, Glycine max
ggagattttcctgaaaaggaagatcaagaaaaacccaaaaagattgataccagattgagacaaagaatagatcctcaatacaatgaggttcaggctcagatggaaacaaatttgtttaaattgtctcttgatgatgttgaaactcctaaaggttctatgttggatcttaaaatttctcaatctaaaattgcacttcccaagaacacagttggaggaaccattctgcgtagtgatctattgg

SEQ ID NO: 142887 - DNA, 239 bp, Glycine max
ctttcagtaacaaacatgaacggagtgttcttgttgctgtggctgctgctatcggcaacttgctgcaaggatgggataatgccaccattgcaggatctattttgtacataaagagggagtttaatttacaaagtgaacccacaatagaaggtctaattgtggccatgtcacttattggagccactgtcgttcacgacatgctctggacccttatcagacttgctaggccggcgtcctat

SEQ ID NO: 142888 - DNA, 220 bp, Glycine max
agaatgcctctttctatagggggaggagctggtgcaaagaatgctattctcatgaatatgccaaatgctgttctttcaatgtggagatattttgttggagatctcgtctttgaagtttctaagatgacttctccctacattaaatgtacagtctctttcttcatagcatttggaaatttggctgatgacaccatcaattttgaggcttttccccacaagt

SEQ ID NO: 142889 - DNA, 245 bp, Glycine max
aaaaattactgcgccaggctaaagctccaagtatgtttttacaatccttcaaaaattttgtttctttgtgtgtgtatggtgatgataacttaattagtgttcatgaatatgtcaagccttactttagtggttctaaattgaaaagctttctagctggtcataatatcaccattactgatggtattgacaaaactagtgcaactttgcaatttagaaagttagcagattgtgattttctcaagaga

SEQ ID NO: 142890 - DNA, 242 bp, Glycine max
gtgtcactggatggactgccaccccaatgcaggatgttcaggttacaattgattggtttatttcctctcaggaatgtgttcccaggacctattgtgttttaaatccacaaaatccttttgtcttaaataggtggatgggaaaactgactttccctcagggcacttcccgaagtgttaagagaatgcctctttctatagggggaggagctggtgcaaagaatgctattctcatgaatatgcca

SEQ ID NO: 142891 - DNA, 245 bp, Glycine max
ggagagcgtaggcgagggtgtgactcatctgaaaccaggtgaccatgccctccctgtgttcacaggagagtgtggagattgcgcccattgcaagtcagaggagagcaacatgtgtgagctactcaggatcaacaccgataggggtgtcatgatccatgatggccaatcaaggttctctaagaatggacaacccatacaccatttcttgggaacctctacattcagtgaatacactgttgtccatg

SEQ ID NO: 142892 - DNA, 239 bp, Glycine max
ctttccaaatcccaactactattcacactcactgcagatctcaatccatggctaccattgttagcatcaaggcccgccagatctttgacagtcgtggcaatccaaccgtcgaggtggatttgacatgctccgatggtacttttgctagagctgctgttccaagtggtgcatccactgggattcatgaggcccttgaattgagagatggaggatctgactaccttggaaagggtgtatca

SEQ ID NO: 142893 - DNA, 241 bp, Glycine max
gtgaaactttaagcagatgtctaatgttttatgggtggctcctgagaaaatcacaatctgctaactttctaaattgcaaagttgcactagttttgtcaataccatcagtaatggtgatattatgaccagctagaaagcttttcaatttagaaccactaaagtaaggcttgacatattcatgaacactaattaagttatcatcaccatacacacacaaaaaaaaaaaaaaaaggggcggccg

SEQ ID NO: 142894 - DNA, 247 bp, Glycine max
  unsure (1)..(247): unsure at all n locations
cagaaagacaagaaattcaaatgaagaaagccaaactaattggcatgcttgatgaggtggagcaaaggtacaggcagtaccaccagcagatggagatagtgggttcatcatttgagcaagctgcggggattggttcagcaaggacttacactgcccttgcattgcaaacaatctcgaagcagtttcggtgcttganagatgcaattgcagggcaggttcgcactgcgaataagagcttaggagaaga

SEQ ID NO: 142895 - DNA, 282 bp, Glycine max
atttgaggccaggcaagccccactcaaccaccacacttctcctcgttcacgctacccctttctgctcttcttctacctttcaagttttaaaagtataaagatggcagagacattcctatttacctcagagtcggtgaacgagggacaccctgacaagctctgcgaccaaatctccgatgctgtcctcgacgcttgcctcgagcaggacccagacagcaaagttgcctgcgaaacatgcaccaaaaccaactttgtcatggtcttcggagaaatcacgaccaa

SEQ ID NO: 142896 - DNA, 172 bp, Glycine max
gttgaggaatggtttgattgtgttgatgaggaggattcctttgaggaagtttctttaagtgcagcacttaatggtgttgagggtttggactatatggaaagaattcctcttgccacatctgagggttttcctcatgtgctttcacgcaacatacgaagtaaaggcaaaagga

SEQ ID NO: 142897 - DNA, 276 bp, Glycine max
agcgagtctgccatcaaacctcaacaactgactgatgatgtctgggattatattttctgtggtggaccatatcccaagtcaactgatatatcatcatcccttttagaaagaatgaagcgtgagtttgaatattggtatccatttgatcttcgagtctctggtaaggatctcatccagaatcatcttaccttctgcatttacaaccatactgcaattatggccaagcatcactggcctcgtgggtttagatgcaatggacacattatgctcaattct

SEQ ID NO: 142898 - DNA, 271 bp, Glycine max
agaaatttaagtgaggagctagagaatgatgatgaagtctgctatgtgtgcagtggtggttgtagcacttcttcttctggcggaggtggggcccatggctgaggctgtgacatgcaccccaacagagttgagtccgtgtcttccagcaatcacttccggtgctaaaccttccaatgcttgttgcacgaagctgaagcagcaaaaaccatgcttatgtggctacctcaaaaacgctagcttgaagcagtatgttaactctcctaatgcccga

SEQ ID NO: 142899 - DNA, 276 bp, Glycine max
caagaaaaacccaaaaagattgataccagattgagacaaagaatagatcctcaatacaatgaggttcaggctcagatggaaacaaatttgtttaaattgtctcttgatgatgttgaaactcctaaaggttctatgttggatcttaaaatttctcaatctaaaattgcacttcccaagaacacagttggaggaaccattctgcgtagtgatctattggcaaattttttgacagagggcaattttagagcaagtgttgatttgcagcgcactcatcgt

SEQ ID NO: 142900 - DNA, 268 bp, Glycine max
ttggttagtggaaaaaccttcaaatatgatataattggtgctggttcacattcgtcaggagatgttcctgaaaaggaagatcaagaaaaacccaaaaagattgataccagattgagacaaagaatagatcctcaatacaatgaggttcaggctcagatggaaacaaatttgtttaaattgtctcttgatgatgttgaaactcctaaaggttctatgttggatcttaaaatttctcaatctaaaattgcacttcccaagaacacagttg

SEQ ID NO: 142901 - DNA, 285 bp, Glycine max
attcggctcgaggccttcttggctttcttattgggaactccaagatataggtatgtcaagccatgtggaaacccagttgtgagggttgcacaggtattcactgctgtttttagaaaatggaaggtgtctccagcaaaggcagaagaactctatgaggtcgatggtccacaatctgcaataaaaggcagtagaaagattcgccacaccgatgattttgaattcatggacaaggcagcaacaatcaaagagactgaggagcatagtccaaagaatccatggcggctt

SEQ ID NO: 142902 - DNA, 270 bp, Glycine max
agagattatcattgatagtttcgcaagtcctgattgcaacatagttggtcgaatgcttttggttgatacttatcataccaatcctgaaaatgcagttcgtagtatttttgttgcgcctttcagaggcggaaggcccattcgggtggttacatttccgaataccattgtgcagattgaaccagacatgaattctaggtttcagcttttgagtaccactaccaatggtgattttgttcaagggaaagatctcgcaatggttaaagttaatgt

SEQ ID NO: 142903 - DNA, 271 bp, Glycine max
gcacggggaagaagtttgtggtgaaactagaggagaaaacgatgctgatgctgatgatgaaggtgaagaaagccatcacaggtcatcagaggacagtgaaaatgcatctgaaaatgttgatgtttctggaagcgagtctgctgatggtgaggagtgttctcgagaagagcacgaggatggggaacatgataacaatgctgagagtgaaggtgaagctgaaggaatagctgatgcccatgatgttgaaggagatggaatgtcattgccatat

SEQ ID NO: 142904 - DNA, 270 bp, Glycine max
aaatcagaaccacattcctgggaattaatcttcccaatagaggtatgtggtcctaataatggttttgaaatgtggagttctgagtgggcaaatcaaacttcatggcatttgagtttccttattgacaatcccaaacagtctacagtttttgatattctcttgggaatctctcaagattttgaaattgctggtaatactcttatgccagctttttctgttccacaggctactgccagatcttctgaaaatgcggaatcctctgcatgatct

SEQ ID NO: 142905 - DNA, 274 bp, Glycine max
acaagagcctgacagtggagaaggctgttcaaaactgggtgcaattccagggaaatgtgtttaaatttccaggtggagggaccatgttccctcacggagcagatgcatatattgatgaacttgcgtcagttattccaattgctgatggttctgtcagaacagcactggacactggttgtggggttgcaagctggggagcctacttgctaaagagaaatgtgctggctatgtccttcggtccaaaggacaaccatgaagcacaagttcagtttgg

SEQ ID NO: 142906 - DNA, 273 bp, Glycine max
gtcccaaggatgagaaacttcctcgtcgcaaaatttttgacaaacctaagacgcgctgcttcactattctccctatggagtttaatcttgtggtccgtcaaaagtttttaaattttgtgaggttcattatgaagcaaagggacaagcttagttgtcaagttggaatcaacccatactccatggaatggactggtttggccaatagattactgagtaagggcaatgatattctgtgctgcgattatgctagttttgatggtttgattaccaagc

SEQ ID NO: 142907 - DNA, 275 bp, Glycine max
agtcaacaccttttctcctgaaggccgtttatttcaggttgaatatgcaatcgaagccatcaagctgggatcaactgcaattgggttgaagacgaaagagggtgttgtccttgcagttgaaaagcgcatcacttcgccgcttctggagccaagtagtgttgagaaaattatggaaattgatgagcatataggttgtgcaatgagtggattgattgctgatgctcgaacacttgttgagcatgcacgggttgaaactcagaatcataggttctcat

SEQ ID NO: 142908 - DNA, 168 bp, Glycine max
gaaattttaataaaccgcgatcacaggttgccgcaccttaaaaccggaaacaaaagcaatcgttacttgatttcaagaatttctcaatttcttcctacttctttgtgtacgatttcttaagggaaagaaaatcactctctgtgctggtcacagacttcgtgaatcatt

SEQ ID NO: 142909 - DNA, 275 bp, Glycine max
gtcctccagggccggtgttaaggccagcagtgactgggtgatggagagcatgaacaagggcactgacagctacggcgtcaccaccgggttcggtgctacctcccaccggagaacctaacagggcggtgccttgcagaaggagctaattaggtttttgaatgctggaatatttggcaatggtacagagtccaattgcaccctaccccacacagcaaccagagcagctatgctagtgagaatttgaagaacacggtcaagaacgttgtgagtcaagt

SEQ ID NO: 142910 - DNA, 274 bp, Glycine max
gccagagccaatgcaaatctgcaacaccctcaacaccaactccaacaacacctagtagtggtggagatattagcagactcattagctcttctctctttgatcaaatgcttaaataccgaaacgatggccgctgttctggccatggattctacagatatgatgctttcattgccgctgctggctctttcaatggctttggcacaaccggtgatgacaacactcgcaagaaggagattgctgctttcttggctcaaacttctcatgaaaccacagg

SEQ ID NO: 142911 - DNA, 258 bp, Glycine max
tgggagggcacaattggtagaaaaaaacccgcaactccttggggttgtcctggacttagaagaagaagtagaaaaaggaagaaatatagtgataatatgattcttcgtcgtcgtactaaatagtagagaaaatagaaattgtttcttcggcttgacaagaaaaaggagtaattaactgtgacacgttcactaaaaaaaaatccttttgtagcgaatcatttattaagaagaaataaataaacttaacacaaaagcgga

SEQ ID NO: 142912 - DNA, 271 bp, Glycine max
ggagttctgagtgggcaaatcaaacttcatggcatttgagtttccttattgacaatcccaaacagtctacagtttttgatattctcttgggaatctctcaagattttgaaattgctggtaatactcttatgccagctttttctgttccacaggctactgccagatcttctgaaaatgcggaatcctctgcatgatctggaattcgtgttttctttcgcttgttcgtttgtttaattcaataaaggaaattaggcatgaccctcttgttgag

SEQ ID NO: 142913 - DNA, 267 bp, Glycine max
ctgcttcactattctccctatggagtttaatcttgtggtccgtcaaaagtttttaaattttgtgaggttcattatgaagaaaagggacaagcttagttgtcaagttggaatcaacccatactccatggaatggactggtttggccaatagattactgagtaagggcaatgatattctgtgttgcgattatgctagttttgatggtttgattaccaagcaagttatgagcaagatggcagaaatgataaacagtctttgtggtggtga

SEQ ID NO: 142914 - DNA, 269 bp, Glycine max
ggaaaaagtttcctctacaaaagcacaatttgttagtggaaaaaccttcaaatatgatataattggtgctggttcacattcttcaggagattttcctgaaaaggaagatcaagaaaaacccaaaaagattgataccagattgagacaaagaatagatcctcaatacaatgaggttcaggctcagatggaaacaaatgtgtttaaattgtctcttgatgatgttgaaactcctaaaggttctatgttggatcttaaaatttctcaatcta

SEQ ID NO: 142915 - DNA, 272 bp, Glycine max
agcgtaccggatttcattgtgatatcatttgtgtcactggatggactgccaccccaatgcaggatgttcaggttacaattgattggtttatttcctctcaggaatgtgttcccaggacctattgtgttttaaatccacaaaatccttttgtgttaaataggtggatgggaaaactgactttccctcagggcacttcccgaagtgttaagagaatgcctctttctatagggggaggagctggtgcaaagaatgctattctcatgaatatgcca

SEQ ID NO: 142916 - DNA, 275 bp, Glycine max
cgtcttttgggcaccattcctcagtccatttcacagcaaactgtttggaatcaaatggcaacagtgagaacaccattgaattttgattctagcaagcagagcttttgtcaattttctattgaccttctcggtggaggaattttagtggacaaaactggagattggatcacacttatacaaaattctccaattagtaacttgttgagagttgctgcttggaagaaaggttgtttaatggtcaagattgtgatgtctgggaatgcagcagtcaaaag

SEQ ID NO: 142917 - DNA, 256 bp, Glycine max
ggcgttgggattatctcttatgtggtgcctgtttatatagctgagattgcacctcaaaacttgagaggtggccttgggtcagtgaaccagctctctgttacaattggcatcatgctggcttatctgttgggtctttttgtcaactggagagtccttgcaattctaggaattttgccttgtacagtattaatacctggattatttttcatacctgaatcccccagatggccaagatggggatgatagatgagtttga

SEQ ID NO: 142918 - DNA, 270 bp, Glycine max
ctcgagccgattcggctcgataagaaattcctcttgtgaaaagttcttacagcttggtcaactcaggtgcgtcccgcaacgactctgttggctgatgggtgcccatatttgtatgctatggtgcatgatagttcagtgtctacaataccaggtgattttgtcattggtgttaagttgacaaccataaacaatatgtgtgcatatgggctcaatcctggtatttcaggttctcgtcttttgggcaccattcctcagtccatttcacagcaa

SEQ ID NO: 142919 - DNA, 269 bp, Glycine max
aaaagcacaatttgttagtggaaaaaccttcaaatatgatataattggtgctggttcacattcttcaggagattttcctgaaaaggaagatcaagaaaaacccaaaaagattgataccagattgagacaaagaatagatcctcaatacaatgaggttcaggctcagatggaaacaaatttgtttaaattgtctcttgatgatgttgaaactcctaaaggttctatgttggatcttaaaatttctcaatctaaaattgcacttcccaaga

SEQ ID NO: 142920 - DNA, 273 bp, Glycine max
ggttttctcattaacgcttcttctctcttcactctgcgaaggtgcaacctgacagcctccaaatccaatggcttcagagaagaaactttcgaacccaatgagggagataaaagtgcagaagctcgtcctcaatatctctgttggcgagagtggagatcgtctcaccagagccgccaaggtgttggaacaacttagtggccaaaccccagtgttttccaaagcacggtacactgttcgttcctttgggattagaagaaatgagaagattgcatg

SEQ ID NO: 142921 - DNA, 269 bp, Glycine max
catatctccatttccatttcctctctctcagtttccaagaatcttaagctatgggaaagtcttacccaaccgtgagcgctgattaccagaaggccgttgagaaggcgaagaagaagctcagaggcttcatcgctcagaagagatgcgctcctctaatgctccgtttggcatggcactctgctggaacttacgacgtgagctcgaagaccggtggtcccttcggaaccataaagcacccctccgaactcgctcacggcgctaacaacggt

SEQ ID NO: 142922 - DNA, 264 bp, Glycine max
attcacatcactgaaggaaattatgtcagaaagcaagatgtcagcattgaatatgatgcatgtacaattccaaatgattgtggtgctttggttgttgccaaggttggaaatcacaaacaaattgttggtttccatgttgctggaagcaaaggaagactgggatatgcttcattgataccatatgttgagccagttgtgcaagctcaaagtgctgaagtgtactttgacttcttccctgtggaggttgatagtcaagagggagtt

SEQ ID NO: 142923 - DNA, 173 bp, Glycine max
aaaatgcggaatcctctgcatgatctggaattcgtgttttctttcgcttgttcgtttgtttaattcaataaaggaaattaggcatgaccctcttgttgagtatgctctgcctatctgaaaatttccacacctcttttaattgtcgtaatgatgtgtgaagtgtgtgttatttt

SEQ ID NO: 142924 - DNA, 263 bp, Glycine max
gaagagtttagttcataatagtagttggatcttctgcataatcatattcagtatgattttctcaagaggcaacaccgccatgtctgccatattgctgcttcttggaatattatcttccactggagtagaattttcgggggcacaatctgttggtgtgtgttatggaggaaatggaaacaatctaccaacaaagcaagcagtggtggatctttacaaatcaaacagaataggcaaaatccgtttatactatccagacgaaggag

SEQ ID NO: 142925 - DNA, 262 bp, Glycine max
gttgcacaagatatggttgaggaatggtttgattgtgttgatgaggaggattcctttgaggaagtttctttaagtgcagcacttaatggtgttgagggtttggactatatggaaagaattcctcttgccacatctgagggttttcctcatgtgctttcacgcaaaaatggcgattaaggcaaaaggagatttgtctctggggatggtgaagagatgacattgattccaggaaccagtgttgaagaggcttacaacaagctaa

SEQ ID NO: 142926 - DNA, 268 bp, Glycine max
ccctcgagccgaatcggctcgagggctcgagtgattttgttcaaaggaaagatctcgcaatggttaaagttaatgtagcatctgctgctgttggcttgacatcaagttacactccaactccattgttggaatctggtttgcaaaaagacagagggttaattgtggagtattttggaaggatgtcttacgttgctcataacgttaatcagccccaagagaaagatttgttagagggaaatttttcctttgatattaaatctcgctctag

SEQ ID NO: 142927 - DNA, 266 bp, Glycine max
aagaaacatggtattctgggatgaaggaaaaatttgtacaaatgatgaagagcatctatgaaacaggagttacagattggccagtaccactgaaaatcatttctggaaccattcttgcaacaattttgggaacaaccttctggaaactcttttcctttcttagagatgctggtaatgggggagtttttgttggcaatgttgcttcagcattcacaacttcaagtgtgcttgaggcccaaagtagaaagcccaacagatatgaagtt

SEQ ID NO: 142928 - DNA, 265 bp, Glycine max
gggcagatcaatcaaattctttgagtttaacacaggggccaagattccttcgctttggttagggacttggcaagctgaacctggtgttgtagctgaagctctcaccacagccattcaggttggatacaggcatattgactgtgctagtgcgtataagaatcaagcagagattggttctgctcttaagaagctttttgatgatggtgtggtgaagcgtgaggacttatggatcacttccaaactctggtgttcagatcatgcacca

SEQ ID NO: 142929 - DNA, 263 bp, Glycine max
gcaacagaaccagttgatcttggatatgtagattctgtttcagttcaggaaattggtggtgtcagggtgaccattgtgaaaaatgaagagggtggaaattctgtggctactgttgttttacgaggaagtactgatagtatactagatgatcttgaaagagcagtggatgatggagtgaacacttacaaggccatgtgcagggatagccgctttgtacctggagctgcagcaactgaaattgagttagctaaaagggtgaaaga

SEQ ID NO: 142930 - DNA, 263 bp, Glycine max
accggatttcattgtgatatcagttgtgtcagtggatggactgacaatccaatgcagtatgtacaggttacaattgattggtggatttcctctcaagaatgtgttcccaggacctattgtgttgtaaatccacaatatcctatatggttagataggtggatgggaaaactggctttccctcaaggcacttcccgaagtgttaagagaatgcctcttgctatagggggacgatctagtgcattgggtactattctcatgaatat

SEQ ID NO: 142931 - DNA, 261 bp, Glycine max
ccactaccaatggtgattttgttcaagggaaagatctcgcaatggttaaagttaatgtagcatgtgctgctgttggcttgacatcaagttacactccaactccattgttggaatctggtttgcaaaaagacagagggttaattgtggagtattttggaaggatgtcttacgttgctcataacgttaatcagccccaagagaaagatttgttagagggaaatttttcctttgatattaaatctcgctctagattggaaaaag

SEQ ID NO: 142932 - DNA, 267 bp, Glycine max
attatccacatggccatcatggtgagtcgacaaggagggaaggcctgtttatattgaaagacttggaaaggtcgatcctaacaaacttatgcaagttacaactttggatagatatgtgaagtaccatgtgcaggagtttgagaaagcttttgcaatcaagtttcctgcttgctctattgctgccaagaggcacattgattccagcaccacaatcttatatgttcacggagtgggccttaagaactttacaaagtctgcccgggaact

SEQ ID NO: 142933 - DNA, 266 bp, Glycine max
aggagatttgtttctggggatggtgaagagatgacattgattccgggaaccagtgttgaagaggcttacaacaagctaatagttgaacttgagaaaagtgttcccacattggttggcattgaatgtcccaaggatgaaaaacttcctcgtcgcaaaatttttgacaaacctaagacgcgctgcttcactattctccctatggagtttaatcttgtggtccgtcagaagtttttaaattttgtgaggttcattatgaagaaaaggga

SEQ ID NO: 142934 - DNA, 263 bp, Glycine max
caaaactagtgcaactttgcaatttagaaagttagcagattgtgattttctcaagagaaactttaagcagatgtctaatgttttatgggtggctcctgaggacaaggcgagtttatggtcacaacttcattatgtttcgtgcaataatctggaaatgcaagaagcttatcttgtcaatctcgtaaatgtgttacgagaattgtatttgcacagtccagaggaagctcgccaattgagaaggaaagctctctctcgtattgaat

SEQ ID NO: 142935 - DNA, 261 bp, Glycine max
gagattcaggaaaaagttgtgttgaaattttcacaagaggaatttcttacagcttggtcaactcaggtgcgtcccgcaacgactctgttggctgatgggtgcccatatttgtatgctatggtgcatgatagttcagtgtctacaataccaggtgattttgtcattggtgttaagttgacaaccataaacaatatgtgtgcatatgggctcaatcctggtatttcaggttctcgtcttttgggcaccattcctcagtccatt

SEQ ID NO: 142936 - DNA, 262 bp, Glycine max
gccctagaaaaccccttgaactacgcgcgcaactacctcggcgacatgctcgacgcgtgcgtgtcccgcgtgatctacctcgactccgacgtcgtcgttgtcgacgacgttggcaagctcctggcgcgccccaatcacgcgcgagcgcgtgcatcgccgcgccagactactgtcacgcgaacttcaccaagtacttcaccgacgagttctggaacgaccctctactctcgcgcgtgttcagcacgcgcaagccgtgctattt

SEQ ID NO: 142937 - DNA, 259 bp, Glycine max
cggctcgagaatttttcctttgatattaaatctcgctctagattggaaaacgtttcctctacaaaagctcaatttgttgttggaaaaaccttcaaatatgatataattggtgctggttcacattcttcagaagattttcctgaaaaggaagatcaagaaaaacccaaaaagattgatgccagattgagacaaagaatagatcctcaatacaatgaggttcaggctcagatggaaacaaatttgtttaaattgtctcttg

SEQ ID NO: 142938 - DNA, 261 bp, Glycine max
atctgtatgcctatgcttgtttatcattttcttactttcctctcacgctctgccataaaactccgtctctcgcaataacggaatcataaaacaagtttaattactattatggcgccgagggatcataagacaagcttcgctaaggctaacggtaacggtaacagcggggtgaaggaggtgcattttcgtggagtgagaaagaggccgtgggggagatacgccgcggagatcagagatcccggcaagaagagccgcgtctgg

SEQ ID NO: 142939 - DNA, 262 bp, Glycine max
tgtcagcattgaatatgatgcatgtacaattccaaatgattgtggttcattggttgttgccaaggttggaaatcacaaacaaattgttggtttccatgttgctggaagcataggaagactgggatatgcttcattgataccatatgttgagccagttgtgcaagctcaaagtgctgaagtttactttgacttcttccctgtggaggttgatagtcaagagggagttgctcacattggtgaattgaaatctggtgtctatgtt

SEQ ID NO: 142940 - DNA, 231 bp, Glycine max
acactctctctcatggcatcagataagaagattaggatcggcatcaacgggtttggaaggattggccgtttggtggccagggttgcccttcaaaggaatgatgttgaacttgttgctgtcaacgatcctttcatcaccactgattacatgacatacatgttcaagtacgacaccgttcatggccagtggaagcattttgatgtgaaggtgaaggacttctaagacccttct

SEQ ID NO: 142941 - DNA, 219 bp, Glycine max
attttcatttcattttcgagtaaaagtaaaacacagttcctgatcaatggcatctcgccgccgcatgttattgaaggtcataatcctcggagacagcggggttggtaaaacatcactgatgaatcagtatgtgaatcgtaaatttagtaatcagtataaggcaaccatcggtgcagattttcttaccaaggaagttcaatttgaagataggttgttcac

SEQ ID NO: 142942 - DNA, 158 bp, Glycine max
ctccgccacgtcgcctcctctctctctcgcttttcgtagttatacttcttctctcgttcctagaaatgagcttctcaacatgcgcagagctgtcgcgttgtttcgccgcagcatcggcgaaacctaattccggtcagtcaaacggcacttccacacaa

SEQ ID NO: 142943 - DNA, 222 bp, Glycine max
gtgaaaggacgcacctgctgttggcttgttgttcaaggatggcaatttgtaagaaagatgtttggagagttgaatgtggaatcccttctggatttccgctcacagttatttgcaatagcatttttaatgagatgctcattagatatagctatgaaaaattactgcgccaggctaaagctccaagtatgtttttacaatccttcaaaaatgttgtgtctttgt

SEQ ID NO: 142944 - DNA, 232 bp, Glycine max
ccgaagcccttcagcaaccatgtcgaggagaaaggttagggagccaaaggaggaacatgtcactcttggtccagccgttagagacggtgaacatgttttcggcgtggctcgcatctttgcctccttcaacgacaccttcatccatgtcactgatttgtctgggagggaaaccttgttcgcatcactggtgggatgaaagttaaagctgacagagatgaatcatctccatatg

SEQ ID NO: 142945 - DNA, 224 bp, Glycine max
tagctatgaaaaattactgcgccaggctaaagctccaagtatgtttttacaatccttcaaaaattttgtgtctttgtgtgtgtatggtgatgataacttaattagtgttcatgaatatgtcaagccttactttagtggttctaaattgaaaagctttctagctggtcataatatcaccattactgatggtattgacaaaactagtgcaactttgcaatttagaa

SEQ ID NO: 142946 - DNA, 231 bp, Glycine max
ctggaacaatgtggtttcttacctcattgaagagtatagtagtggccgaacccctaaccctgatgttctgtgcaatacaagaattaagtttggtccattcttggatgcgattggtggcatgggttttgactatgttgcctctgggcattatgcaaatgttatccacccatgttctgatcggagggatgaaccttctgttctggaactatcacaagacatggtaaaggatca

SEQ ID NO: 142947 - DNA, 222 bp, Glycine max
tatggaaagaattcctcttgccacatctgagggtgttcagtgtatgcacgtccagagttactggcttgcggttgctgtgtgcagacagttcaagccagtaactctggagctgggtggaaaatctccattcattgtgtgcaaggatgctgatgttgatgcagccgttgaggcttcacattttgctttattttttaatcaggggcaatgttgctctgctggttc

SEQ ID NO: 142948 - DNA, 226 bp, Glycine max
caaaatttctgggtaccctaagatgcaagatacatttgctcgtatctctggctactgtgcgcaaaatgatatccactcacctcatgttactgtttatgaatccttgctctactcagcatggcttcgtttaccttcaagtgttgattcccaaaccagaaagatgttcattgaggaagtcatggaactggtggcgctgaacccagtaaggaactcactggttggattg

SEQ ID NO: 142949 - DNA, 229 bp, Glycine max
atccaaacccgtgttctgatgcatggagtttggaatttactgaagcgtaccggatttcattgtgatatcatttgtgtcactggatggactgccaccccaatgcaggatgttcaggttacaattgattggtttatttcctctcaggaatgtgttcccaggacctattgtgttttaaatccacaaaatcctgttgtgttaaataggtggatgggaaaactgactttccctc

SEQ ID NO: 142950 - DNA, 225 bp, Glycine max
gtggttctgaattgaaaagctttctagctggtcataatatcaccattactgatgggattgacaaaactagtgcaactgtgcaatttagaaagttagcagattgtgattttctcaagagaaactttaagcagatgtctaatgttttatgggtggctcctgaggactaggcgagtttatggtcacaacttcattatgtttcgtgcaataatctggaaatgcaagaag

SEQ ID NO: 142951 - DNA, 218 bp, Glycine max
gtttaaagagctggcgcaacttatgaggttctgagtgaccctgagaagcgtgagatatatgatcagtatggtgaagatgcgcttaaggaaggaatgggtggtggcggtggccatgatccatttgatatcttttcatctttctttggcggtgggagtccctttggatcaggtggaagtagtcgaggtaggaggcagaggcgcggagaagacgtggttca

SEQ ID NO: 142952 - DNA, 193 bp, Glycine max
cgtctcaaacctcttcgttccttcgattcattaccattgtcttgccagaaatggtgcccaaagaactgccagttacgacgattcgtcgtacacgtggagccgcagggcaaattggatatgctcttgtccctatgattgctaggggagtgatgctgggtcctgaccagcccgtgatcctccacatgcttgacat

SEQ ID NO: 142953 - DNA, 221 bp, Glycine max
aattagttcattctctttgcgcagttccctacctctcctttcaagatgcagatcttcgtcaagaccctcaccggaaagaccatcacccttgaggtggaaagctctgacaccatcgacaacgtcaaggccaagatccaggacaaggaaggaattcccccggatcagcaacgtctcatcttcgccggaaagcagctcgaggacggccgtaccctcgccgacta

SEQ ID NO: 142954 - DNA, 222 bp, Glycine max
catgaaatcagtagttgattactttcaagaaatgtatggatatacaatcatatattctcatctaccctgccttcaagtaggaagccaaaagaaggtgaactatttgcctatggaggcatgcaagatagttgggggtcagagatatacaaaagggcttaacgaaaagcagataacttctctgctaaaggtctcatgccagagaccacgtgaacaagagacaga

SEQ ID NO: 142955 - DNA, 224 bp, Glycine max
cattgaatgtcccaaggatgagaaacttcctcgtcgcaaaatttttgacaaacctaagacgcgctgcttcactattctccctatggagtttaatcttgtggtccgtcaaaagtttttaaattttgtgaggttcattatgaagaaaagggacaagcttagttgtcaagttggaatcaacccatactccatggaatggactggtttggccaatagattactgagta

SEQ ID NO: 142956 - DNA, 221 bp, Glycine max
acaaaacaaaacagagcaaagagagagtgtgtgaaaagtgaaacaaaaaacagaacaacaatggcgacacttaaggttcctcagcctcttccccccgttgcagatgattgtgagcagctccgaaaagccttctcaggttggggaactaacgaggagctgattgtatcgatcttggctcataggaatgctgctcagaggaagcttatcagagaaacttatgc

SEQ ID NO: 142957 - DNA, 221 bp, Glycine max
gttttcttgtggcaacgactatgctctgaaggtaagaaagccttatactatcaccaaacagagagagcgatggacagatgaagaacataagaagttccttgaagctttaaagctgtacggacgggcttggcgacgtattgaagaacatgttggcacaaagactgctgttcagattcgaagtcatgctcagaagtttttttctaagcttcttcgcgatccta

SEQ ID NO: 142958 - DNA, 219 bp, Glycine max
gaagcgtaccggatttcattgtgatatcatttgtgtcactggatggactgccaccccaatgcaggatgttcaggttacaattgattggtttatttcctctcaggaatgtgttcccaggacctattgtgttttaaatccacaaaatccttttgtgttaaataggtggatgggaaaactgactttccctcagggcacttcccgaagtgttaagagaatgcc

SEQ ID NO: 142959 - DNA, 220 bp, Glycine max
gatatatggagtgcaggagtcatattgtatatcttactgagtggagtccctccattttgggccgagactgagaagggaatatttgatgccatattggaaggtcacattgattttgaaagtcaaccatggcctaacatttcaaacaatgccaaggatcttgttcgtaagatgcttatacaggatccaaagaaacgcattacctctgctcaagttcttgagc

SEQ ID NO: 142960 - DNA, 305 bp, Glycine max
aaaccgcgatcacaggttgccggaccttaaaaccggaaacaaaagcaatcgttacttgatttcaagaatttctcaatttcttcctacttctttgtgtacgatttcttaagggaaagaaaatcactctctgtgctggtcacagacttcgtgaatcattttcttttccactcctagtttatctactgaacactctcctatttgatataggacttcgtgtcagatttaaactttttctgtgtctttctcagttctctgtttaatttcaagttcaagctggtgaaattttggattagtgctcccactct

SEQ ID NO: 142961 - DNA, 304 bp, Glycine max
atgaagagcatctatgaaacagaagttacagattggccagtaccactgaaaatcatttctggaaccattcttgcaacaattttgggaacaaccttctggaaactcttttcctttcttagagatgctggtaatgggggagtttttgttggcaatgttgcttcagcattcacaacttcaagtgtgcttgaggcccaaagtaggaagcccaacagatatgaagtttcccagtacagatatcgcaatgtgccaataaagcgcagagcatgggttgaaggccagatgtctttcgatcagtctgtagtag

SEQ ID NO: 142962 - DNA, 303 bp, Glycine max
ctcgagccgaaaattttgtttctttgtgtgtgtatggtgatgataacttaattagtgttcatgaatatgtcaagccttactttagtggttctaaattgaaaagctttctagctggtcataatatcaccattactgatggtattgacaaaactagtgcaactttgcaatttagaaagttagcagattgtgattttctcaagagaaactttaagcagatgtctaatgttttatgggtggctcctgaggacaaggcgagtttatggtcacaacttcattatgtttcgtgcaataatctggaaatgc

SEQ ID NO: 142963 - DNA, 305 bp, Glycine max
catgactatgtcactgaggatttggtcaacatatatcctgggataaaagatctagttaaaattacccttctggaggctggagatcatattttgagcatgtttgataaaagaattactgcttttgctgaagagaagttcggaagagatggtattgatgtgaaaactggatccatggttgtgaaggtatccgagaaagaaatttctactaaagaaatgaaaaatggaggagcaattactacaattccatatggaatggctgtctggtcaactggtattggcactcgtccatttataagagattttat

SEQ ID NO: 142964 - DNA, 304 bp, Glycine max
atttcctctcagaaccctcgatcactcccacgcgctcctatatcctctccttcaccgtcgctctctccaacgatcacaacaacatcgtcatcccatggcaaacgccgcatctggtatggcagtccatgatgactgcaagttaaggtttttggagctgaagacaaagaggacacaccgtttcatagtttttaagattgaggagcagcagaagcaggtcattgtggagaagcttggtgagccagcccaaggctatgaagatttcactgccagccttcctgctgatgagtgccgttatgctgtttat

SEQ ID NO: 142965 - DNA, 297 bp, Glycine max
ccgattgctagaatggaatttcgatgctcagtcatctcttttaccattctcttctctcttgctcttgcaggagagagccatgtccatgcatcgctagctgtggaagattattgggaagctgtttggccaaacactcccattcccactgcactgcgagatgctctaatgcctctccctgcaggtgttgaaatcgatgaactccctaagcaaattgatgatacacagtacccaaaaacattcttctataaattagaccttcatccaggcaagactttgaacgtacaattcaccaagcgt

SEQ ID NO: 142966 - DNA, 295 bp, Glycine max
tggaaacaaatttgtttaaattgtctcttgatgatgttgaaactcctaaaggttctatgttggatcttaaaatttctcaatctaaaattgcacttcccaagaacacagttggaggaaccattctgcgtagtgatctattggcaaattttttgacagagggcaattttagagcaagtgttgatttgcagcgcactcatcgtattaaaggaatgattaaaatggtggccacagttggtattcctgagaatacaggtatagcattggcctgtgctatgaatagttcttttagggggcg

SEQ ID NO: 142967 - DNA, 222 bp, Glycine max
gacgcgacttcttgagaactgtaagagtctcaaatatctggttgatgagtgtccttttgcatttgtgaactagtatgtaatattttattcacttaaataaagcgcattactatgtgcaatgagtgtgtttaaatataaaaaaaaaaaaaaaaaaaaaaaaaaaaaaaaaaaaaaaaaaaaaaaaaaaaaaaaaaaaaaagggaacctgtgcgataaagagaa

SEQ ID NO: 142968 - DNA, 298 bp, Glycine max
ctacattaaatgtacagtctctttcttcatagcatttggaaatttggctgatgacaccatcaattttgaggcttttccccacaagctggtgcagtttggagagattcaggaaaaagttgtgttgaaattttcacaagaggaatttcttacagcttggtcaactcaggtgcgtcccgcaacgactctgttggctgatgggtgcccatatttgtatgctatggtgcatgatagttcagtgtctacaataccaggtgattttgtcattggtgttaagttgacaaccataaacaatatgtgt

SEQ ID NO: 142969 - DNA, 300 bp, Glycine max
gagtaggagagacctttcaaatgtattctcaagaccgaaatgtcttctttgcctctaaaatttaaaggtttggctctatgtttaagtcccacattctaggttgtctctgtgtgatgatttccagccccgaggctgcctagtttgtgctgaacaaagctcaactcttcaagccaacattcccagttagcaaagagatgatgttgggaaaacaagctatcttctttcaccaaggagagtaccttgctaacttgagaaggcttgttcttcgcaccttcatgctagaagcatcaagaacatcgt

SEQ ID NO: 142970 - DNA, 306 bp, Glycine max
ggccaggcaagccccactcaaccaccacacctctcctcgttcacgctacccctttctgctcttcttctacctttcaagttttaaaagtataaagatggcagagacattcctatttacctcagagtcggtgaacgagggacaccctgacaagctctgcgaccaaatctccgatgctgtcctcgacgcttgcctcgagcaggacccagacagcaaagttgcctgcgaaacatgcaccagaaccaacttggtcatggtcttcggagaaatcacgaccaaggccaacgttgactacgagaagatagtgcg

SEQ ID NO: 142971 - DNA, 301 bp, Glycine max
aggtggtggtggtggcagatatggaggcggcggtggcgggaggtacgttggtggtggaggcggcggcggcggcggaggaagctgctacagctgtggagagtctgggcattttgccagagattgcccatcaagtgctcgttgaatttactgttagggttgtttatgttttgcggattgttttaagtttttactttaatatgtcttagggattttaatggtttctgtccaaactatgggttcttatgagtagatgtgtgggatttttcttttttggttatttaaatgaagggtttctgtgtta

SEQ ID NO: 142972 - DNA, 305 bp, Glycine max
  unsure (1)..(305): unsure at all n locations
cttcaaatggctttggaagctcttcaatcacccaccacagccactccatcgtttagtccctttgaagaaaccagtctcagttacttagagacaccgtggacgaaaggaaagcgttctaagcgtagccgcacggagcaacaactgcaacacccttcatgcaccgaggaagagtacctcgctctttgtctcatcatgctcgctcgcggcgncgccggcagtgtctccaccgccaaacccgctgtctccgacaacaattctgcgccgctatccgccgccaaactgagctacaaatgttcggtttgcaa

SEQ ID NO: 142973 - DNA, 302 bp, Glycine max
gttcaacatagatgagtaatattttttaatgcttgatgaatagagtgtatgaatgaaccaaagcaatttattattaaatcatttttcaggaaactgctttaaatcatgtcaccagctctgggattggtggagaaggatttggagcaacccgcgagatgagccttagaaaactcatttgggtggttactcgtattcaagttcaagtgcaaagatataacacatggggagacgaaattgaagttgatacttgggtcgatgcagcaggaaagaatggaatgcgaagagattggataatcagggat

SEQ ID NO: 142974 - DNA, 302 bp, Glycine max
agaccataaccctagaggttgaaagctccgacaccatcgataacgtcaaggccaagatccaggacaaggagggtatccccccggaccagcaacgtctcatcttcgccggaaagcagctcgaggacggccgcaccctcgccgactacaacatccagaaggaatcaacccttcacctcgtcctccgtctccgtggtggcatgcagatcttcgttaagaccctcaccggcaagactattaccctagaagtcgaaagctccgacaccatcgacaacgtcaaggctaagattcaggacaaggaggga

SEQ ID NO: 142975 - DNA, 295 bp, Glycine max
gtaaggcttgacatattcatgaacactaattaagttatcagattgtgattttctcaagagaaactttaagcagatgtctaatgttttatgggtggctcctgaggacaaggcgagtttatggtcacaacttcattatgtttcgtgcaataatctggaaatgcaagaagcttatcttgtcaatctcgtaaatgtgttacgagaattgtatttgcacagtccagaggaagctcgccaattgagaaggaaagctctctctcgtattgaatggctgcaaaaagctgatgtgcctaccata

SEQ ID NO: 142976 - DNA, 299 bp, Glycine max
atgccgcgaaattggattcatctctgatgatgttggtcttgatgctgacaaatgcaaggtgttggtcaacattgagcaacagagcccggatatcgcccagggtgtgcacggccacttcaccaagcgcccagaggaggttggtgctggtgaccagggtcacatgtttgggtatgccaccgatgaaacccccgagtacatgcccctcagccatgtccttgcaaccaaacttggtgctcgcctcacagaggttaggaagaatggcacctgtgcttggttgaggccagatggtaagacacaag

SEQ ID NO: 142977 - DNA, 299 bp, Glycine max
atgcaaggacccgttttacaatcatcaaaaccagatatggaattttatagagcgcttgaaggaatttttggtgatcagtcagtgcctcaccagtgtggccatggctgctgtgctgctccaaatggtagaaagtccgaaagctctttgttgggaccagaattcattgaattttcggaacctccatctttcccaaattttgagttggctgcaatagctacagacattagtaaccttgcttggcttaaaagtgggttggagagtagtagtgtcaaaataatgggcaacacctctggcagggt

SEQ ID NO: 142978 - DNA, 267 bp, Glycine max
  unsure (1)..(267): unsure at all n locations
cgttcaatagaattttacgagtaagctcangcactcgaggcgctacgtagcacaaaggatccagagtgggagctcacgagccaagtactgcgtcgtgtgcgagaacttaatcgcacagtagtagagtacgcgaaggcatatggtatcacgctgcatcgtacacgagacgatccagatcacaagtccacgggcgcaatgcagggttatggtcctgcagatcaaagcactgtactggagttgacttacaattatggactcctgcatacg

SEQ ID NO: 142979 - DNA, 290 bp, Glycine max
cctacaaaaactaatttgatggaaactcccaaggaatggcaactggatctaccttgtgacaaaattcctagtgtcttgactacaactgatgagagattggtaggcacagaacatgagggatatgatccttttcttggtggaattcaaaaatatgccactcccatgatgcccctagatgaagaaattctttctaaggttgcacaagatatggttgaggaatggtttgattgtgttgatgaggaggattcctttgaggaagtttctttaagtgcagcacttaatggtgttga

SEQ ID NO: 142980 - DNA, 291 bp, Glycine max
ctggtttggcttttgatctagtctcatgtgtagctataatcatgtgtttcagtcatcctcagtttgtttattgagaataagaaacgagacttgctctttcaatatgtatttaggagaataaaattatcttaggacatgaagtgcctacagcaagcggattctggattcatataggtggaatttttggtggaagtggattatcttgaatcctgtatttcatagatggacttcttgtagcaatgagtatttaattatttattcgaaatatgttgcatgtctagttttatcaaa

SEQ ID NO: 142981 - DNA, 290 bp, Glycine max
gttcccaggacctattgtgttttaaatccacaaaatccttttgtgttaaataggtggatgggaaaactgactttccctcagggcacttcccgaagtgttaagagaatgcctctttctatagggggaggagctggtgcaaagaatgctattctcatgaatatgccaaatgctgttctttcaatgtggagatattttgttggagatctcgtctttgaagtttctaagatgacttctccctacattaaatgtacagtctctttcttcatagcatttggaaatttggctgatga

SEQ ID NO: 142982 - DNA, 291 bp, Glycine max
gattcaggtaaaagttgtgttgaaattttcacaagaggaatttcttacagcttggtcaactcaggtgcgtcccgcaacgactctgttggctgatgggtgcccatatttgtatgctatggtgcatgatagttcagtgtctacaataccaggtgattttgtcattggtgttaagttgacaaccataaacaatatgtgtgcatatgggctcaatcctggtatttcaggttctcgtcttttgggcaccattcctcagtccatttcacagcaaactgtttggaatcaaatggcaac

SEQ ID NO: 142983 - DNA, 292 bp, Glycine max
  unsure (1)..(292): unsure at all n locations
ctgccacctcaatgcaggatgttcangttacaattgattggtttatttcctctcaggaatgtgtccccaggacctattgtgttttaaatccacaaaatccttttgctttaaataggtggatggggaaactgactttccctcagggcacttcccgaagtgttaagagaatgcctctttctatagggggcggagctggtgcaaagaatgctattctcatgaatatgccaaatgctgttctttcaatgtggagatattttgttggagatctcgtctttgaagtttctaagatgac

SEQ ID NO: 142984 - DNA, 296 bp, Glycine max
gtgtatggtgatgataacttaattagtgttcatgaatatgtcaagccttactttagtggttctaaattgaaaagctttctagctggtcataatatcaccattactgatggtattgacaaaactagtgcaactttgcaatttagaaagttagcagattgtgattttctcaagagaaactttaagcagatgtctaatgttttatcggtggctcctgaggacaaggcgagtttatggtcacaacttcattatgtttcgtgcaataatctgggaatgcaagaagcttatcttgtcaatct

SEQ ID NO: 142985 - DNA, 292 bp, Glycine max
gcagaaaattccagacaaaaaagtggtgtcatcatgtgagaagaagaagaaaagcgtggtgggtgcagaaaagaagaagagtgatagtgggcgagctcgtaaaaacgtgtacagaggaatcaggcaaaggccatggggcaagtgggccgcggagataagggacccacacaagggtgttcgtgtctggctcggcaccttccccaccgccgaagaagccgcccaagcctacgacgacgccgccatacgcatccgcggcgacaaggccaagctcaacttcccggccaccaccatt

SEQ ID NO: 142986 - DNA, 290 bp, Glycine max
ctgctaactttctcaagagaaactttaagcagatgtctaatgttttatgggtggctcctgaggacaaggcgagtttatggtcacaacttcattatgtttcgtgcaataatctggaaatgcaagaagcttatcttgtcaatctcgtaaatgtgttacgagaattgtatttgcacagtccagaggaagctcgccaattgagaaggaaagctctctctcgtattgaatggctgcaaaaagctgatgtgcctaccatagcacagattgaagagttccattcgatgcagaggatg

SEQ ID NO: 142987 - DNA, 294 bp, Glycine max
caataccaggtgattttgtcattggtgttaagttgacaaccataaacaatgtgtgcatatgggctcaatcctggtatttcaggttctcgtcttttgggcaccattcctcagtccatttcacagcaaactgtttggaatcaaatggcaacagtgagaacaccattgaattttgattctagcaagcagagcttttgtcaattttctattgaccttctcggtggaggaattttagtggacaaaactggagattggatcacacttatacaaaattctccaattagtaacttgttgaga

SEQ ID NO: 142988 - DNA, 292 bp, Glycine max
ccatcttctcataagctctacttagcaaatcaaaatggcactttcttcttcatcttcaacatccatatttgctttagctttgttcactactcttttgcttataggaagttcttcagctcaactctctgagaacttctatgatagtaaatgtcccaaggttttctatgccgtaaaatccgttcttcaatctgctttggctaaagaacctcgccatggagcatctatcgttcgcctcttctttcatgactgctttgtcaatggttgtgatggatcagtgttacttgatggccct

SEQ ID NO: 142989 - DNA, 292 bp, Glycine max
gacttgggagataaagaatctgtaaataaaatattttcagagaataaatttgatgccgtgatgcactttgctgccgttgcatacgtgggagagagcacacttgaccctcttaagtattatcacaatattacatcgaataccttgttggtattggagtctatggctaaatatggtgtgaagacattaatatattctagtacgtgtgcaacatatggggaacctgaaaagatgcctattatagaaacaacagaacagaaaccaattaatccatacggaaaagccaagaagatgg

SEQ ID NO: 142990 - DNA, 292 bp, Glycine max
catttgtgtcactggatggactgccaccccaatgcaggatgttcaggttacaattgattggtttatttcctctcaggaatgtgttcccaggacctattgtgttttaaatccacataatccttttgtgttaaataggtggatgggaaaactgactttccctcagggcacttcccgaagtgttaagagaatgcctctttctatagggggaggagctggtgcaaagaatgctattctcatgaatatgccaaatgctgttctttcaatgtggagatattttgttggagatctcgtc

SEQ ID NO: 142991 - DNA, 287 bp, Glycine max
ggcagaaatgataaacagtctttgtggtggtgatgacaaattgatgcgtgaaaggacgcacctgctgttggcttgttgttcaaggatggcaatttgtaagaaagatgtttggagagttgaatgtggaatcccttctggatttccgctcacagttatttgcaatagcatttttaatgagatgctcattagatatagctatgaaaaattactgcgccaggctaaagctccaagtatgtttttacaatccttcaaaaattttgtgtctttgtgtgtgtatggtgatgata

SEQ ID NO: 142992 - DNA, 288 bp, Glycine max
aaattctccaattagtaacttgttgagagttgctgcttggaagaaaggttgtttaatggtcaagattgtgatgtctgggaatgcagcagtcaaaaggagtgattgggcctcattggtacaagtgtttttaacaaacagcaacagtacagagcattttgatgcatgtaagtggacaaaatcagaaccacattcctgggaattaatcttcccaatagaggtatgtggtcctaataatggttttgaaatgtggagttctgagtgggcaaatcaaacttcatggcatttgag

SEQ ID NO: 142993 - DNA, 290 bp, Glycine max
  unsure (1)..(290): unsure at all n locations
tcanaagnnccnaaaagccaccatgncctnccttcaagngcagatacaacagntgagttgatnngccaatggctacttatattggcaccccaggaaanggtatccttgcanctgatgagtcaaccggcacaattgggaaacgtttggcgagcatcaacgtggagaatgttgaaacnaacaggcgcatncttcgtgagctcctantcactgctcccggttgtcttgagtgcctcagtggtgtcatcttgtttgaggaaaccctctaccaaaaatcagctgcaggantaccc

SEQ ID NO: 142994 - DNA, 285 bp, Glycine max
ggacaagcttagttgtcaagttggaatcaacccatactccatggaatggactggtttggccaatagattactgagtaagggcaatgatattctgtgttgcgattatgctagttttgatggtttgattaccaagcaagttatgagcaagatggcagaaatgataaacagtctttgtggtggtgatgaaaaattgatgcgtgaaaggacgcacctgctgttggcttgttgttcaaggatggcaatttgtaagaaagatgtttggagagttgaatgtggaatcccttc

SEQ ID NO: 142995 - DNA, 303 bp, Glycine max
attcggctcgagctttgtgaggatatcccacattcagcttgggatcttgtttgctgggacagtgagaaaactttgccaaataatttttctgcagaattgctctcttgctaattggatactgttactggtcaatattatcctgagtgggctccaattaattgtcgagttcatcgacaaccaattcacatcatttaaggaaattatgtcagaaagcaagatgtcagcattgaatatgatgcatgtacaattccaaatgattgtggttcgattgttgttgccaaggttggaaatcacaaacaaatt

SEQ ID NO: 142996 - DNA, 291 bp, Glycine max
gagctatagaaattatcattgatagtttcgcaagtcctgactgcaacatagttggtgcaatgcttttggttgagacttatcataccaatcctgaaaatgcagttcgtagtattcgtgttgcgcctttcagaggcggaaggcccattcgggtggttacatttccgaataccattgtgcagattgaaccagacatgaattcaaggtttcagcttttgagtaccactaccaatggtgattttgttcaagggagagatctcgcaatggttaaagttaatgtagcatgtgctgctg

SEQ ID NO: 142997 - DNA, 290 bp, Glycine max
tgcactcctgatcacagacaaacaccacagccaaaatggacgcgatcaagaagaagatgcaggcgatgaaaatcgagaaggacaacgctctcgatcgcgccgatgccgccgaggagaaagtccgtcagatcacggagaagctcgagcgaactgaggaagagctgagagacacccagaagaagatgatgcagaccgagaatgacctcgagcaggcacaggaagacctcaccgctgccaccactcaacttgaggagaaagagaagaaagtccaggaggccgaggccgaggtc

SEQ ID NO: 142998 - DNA, 183 bp, Glycine max
ctcgagactcgcgatcacaggttgccgcaccttaaaaccggaaacaaaagcaatcgttacttgatttcaagaatttctcaatttcttgctacttctttgtgtactatttcttaagggaaagaaaatcactctctgtgctggtcacagacttcgtgaatcattttcttttccacacaacatacg

SEQ ID NO: 142999 - DNA, 284 bp, Glycine max
aatgggcagttcccttgaaaagcattgaagatatatatgagaggtttagactgtattgtcttggaaagttgagaagcaatccttggtcagaactagatggtcttcagccagagacaaagataataaatgagctgctggaaaagattaacacaaagggcttcctcaccatcaatagccagccagctgtcaatggggaaaagtcagattctcctactgttggctggggtggaccaggcgggtatgtttaccagaaggcatatgtagagttcttctgctctaaggaa

SEQ ID NO: 143000 - DNA, 281 bp, Glycine max
gacatagaatagatcctcaatacaatgaggttcaggctcatatggacacaaattggtttaaattgtctcttgatgatgttgaaactcctaaaggttctatgttggatcttagaatttctcaatctaaaattgcacttcccaagaacacagttggcggaaccattctgcgtagtgatctattggcaaattttttgacagagggcaattttagagcaagtgttgatttgcagcgcactcatcgtattaaaggaatgattaaaatggtggccacagttggtatt

SEQ ID NO: 143001 - DNA, 281 bp, Glycine max
cgtggaggtctcatgactgctatggttctgttgtgggtttttatgggcttatttgctggctactcctcagcacgtttgtacaagatgttcaagggcacagaatggaaaaggaacaccttgaaaactgcatttatgttcccaggcattctttttgctgtcttctttgtgctgaatgctttaatctggggggagcagtcctccggggcagtcccttttggaacaatgtttgctctagtctgcttatggtttggtatatcagtacccttggtctttgttggcag

SEQ ID NO: 143002 - DNA, 290 bp, Glycine max
  unsure (1)..(290): unsure at all n locations
tttnacgacccaactattccatgggcgaaacgaaaaacgttcaaagcgttctcgcgaccatccttctgaagaagagtacctccgccctctgcctcatcatgctcgctcgcggcggcaccaccaccgtcaacaaccgccacgtnagccctccaccgccacagccacagccacagccgacaccagatccttccaccaagctcagttacaaatgctccgtttgcgacaagagcttcccctcttaccaagcgctcggtggacacaaggccagtcaccggaaactcgccgccgcc

SEQ ID NO: 143003 - DNA, 238 bp, Glycine max
atgttattggattggtctccgtatagctctacacatggttttataaattgcatgacagccaacagtggccaatcatgtataaggcgtcacttgtctctagttaaaaactcgactacttccctcattattaatgttactttcatcccacattttcaaaaaaaaaaaaaaaaaaaaaaaaaaaaaaaaaaaaaaaaaaaaaaaaaaaaacaaaaaaaaaaaggagacagagagaacacag

SEQ ID NO: 143004 - DNA, 269 bp, Glycine max
ccaaattgttttctcggatccggataagcgtcaatttctcaaccgattgctggctccttacatatcacgtggaatattttgggagattttgaagctatggatgaagggttataaggtcattgttcttgacgtgcctttgttatttgaggctaagatggacaggttcaccaagcctgttattgttgtatgggttgatcctgagacgcagattcagcggctcttggcgagagacaagtccggtgaggaggatgctcggaataggattaatg

SEQ ID NO: 143005 - DNA, 253 bp, Glycine max
cctcgaaccgattcggctcgagatgtagttcaaatacccttaatggcacaggaggaaattctgtcttctagtgcaagtgatttcagaactgcaatggtgagtagaaatagcaaacctcaagctactgcaatgcatgtgggagctatagaaattatcattgatagtttcgcaagtcctgattgcaacatagttggtgcaatgcgtgtggttgatacttatcataccaatcctgaaaatgcagttcgtagtattt

SEQ ID NO: 143006 - DNA, 272 bp, Glycine max
gatctattggcaaattttttgacagagggcaattttagagcaagtgttgatttgcagcgcactcatcgtattaaaggaatgattaaaatggtggccacagttggtattcctgagaatacaggtatagcattggcctgtgctatgaatagttcttttagggggcgcgccagttctgatatttacaccatctgctctcaagactgtgaattatggaatcctgcttgcacaaaagcaatgactatgtcatttaatccaaacccgtgttctgatgc

SEQ ID NO: 143007 - DNA, 270 bp, Glycine max
ggatggcaatttgtaagaaagatgtttggagagttgaatgtggaatcccttctggatttccgctcacagttatttgcaatagcatttttaatgagatgctcattagatatagctatgaaaaattactgcgccaggctaaagctccaagtatgtttttacaatccttcaaaaattttgtttctttgtgtgtgtatggtgatgataacttaattagtgttcatgaatatgtcaagccttactttagtggttctaaattgaaaagctttctag

SEQ ID NO: 143008 - DNA, 276 bp, Glycine max
tcaagatataactgtccttcatatttgttgcgcaatctgaaggaacttggatttagagaaccaacacctatccaaaggcaggctataccagtacttttacaaggtcgtgaatgctttgcttgtgcaccaagtggctctgggaaaacccttgcgtttgtctggccaatgcttatgaagcttaaggtattgctcattttctccaactgtgtttgcagttcccaacttcggtgtccttggttcaaataatcaactgtgttttacaggatccggaaaaag

SEQ ID NO: 143009 - DNA, 279 bp, Glycine max
atgataacttaattagtgttcatgaatatgtcaagccttactttagtggttctaaattgaaaagctttctagctggtcataatatcaccattactgatggtattgacaaaactagtgcaactttgcaatttagaaagttagcagattgtgattttctcaagagaaactttaagcagatgtctaatgttttatgggtggctcctgaggacaaggcgagtttatggtcacaacttcattatgtttcgtgctataatctggaaatgcaagaagcttatcttg

SEQ ID NO: 143010 - DNA, 281 bp, Glycine max
aaaatctgactcagaaagtgcgagtccaaattgttacatctgaaaagagttactggcatgtgtatgatcctgacaagtttcagatgtttgacaacagtgaaataggtctttattctaatcccactttggaagatatcccacattcagcttgggaccttttttgctgggacagtgagaaaactttgccaaataatttttctgcagaattgctctcttgcaaattggatactgttactggccaatattatcctgagtgggctccaattaattgtcgagttcat

SEQ ID NO: 143011 - DNA, 285 bp, Glycine max
agaggctccccctaacttctggggccacaccccggaagaagaatactacacctcccaaggcgttcgcaacaccaagtcccacttcgaaacccccaacggcaaaatcttcacccagtccttcctccctctcaacctccaaccccaccaagtcaaagccaccgtctttatgacccacggctacggctccgacaccggctggctcttccagaaaatctgcatcaacttcgccacctggggctacgccgtcttcgccgccgacctcctcggccacggccgctccgacgg

SEQ ID NO: 143012 - DNA, 288 bp, Glycine max
tcgaagcccgtcgcgagaagaagctgcttcgtcgcggttcccaaaatcgcgtttcccaagctccgtttcaaacccgtcgctatggctacgctcggcgctcgcatggtggccgccgcacccaccgtcactccgccggcctcgctcgacttcgaaacctccgttttcaagaaggagaagattaacctcgctggacacgacgagtacatcgtgaaaggagggagggatttgttccctctgttgcagggtgctttcaaggggattaagcagattggcgtcattggatggggt

SEQ ID NO: 143013 - DNA, 268 bp, Glycine max
ggcagactagtatccgatcctctgtcctctcgaagctttcatcgttcaacatattctcaccatctcagtcatgggcctgctatcttgttttaggtctaccgtcctgagaaaatgttccaaaggaagctctggcatgtcaagattcctgtatacgaacaattttcaacgaaacttgatttcgtctggtggcaatgaatcgtattatgggtattttaacaggagatcatacacttcactttatatgggaactggaactgtgggtgggatt

SEQ ID NO: 143014 - DNA, 188 bp, Glycine max
gaaattttaaaaaaccgcgatcacaggttgccgcaccttaaaaccggaaacaaaagcaatcgttacttgatttcaagaatttctcaatttcttcctacttctttgtgtacgatttcttaagggaaagaaaatcactctctgtgctggtcacagacttcgtgaatcattttcttttccacacaacatac

SEQ ID NO: 143015 - DNA, 274 bp, Glycine max
gccaaatgctgttctttcaatgtggagatattttgttggagatctcgtctttgaagtttctaagatgacttctccctacattaaatgtacagtctctttcttcatagcatttggaaatttggctgatgacaccatcaattttgaggcttttccccacaagctggtgcagtttggagagattcaggaaacagttgtgttgaaattttcacaagaggaatttcttacagcttggtcaactcaggtgcgtcccgcaacgactctgttggctgatggg

SEQ ID NO: 143016 - DNA, 285 bp, Glycine max
aaaagattgataccagattgagacaaagaatagatcctcaatacaatgaggttcatgctcagatgtaaacaaatttgtttaaattgtctcttgatgatgttgaaactcctaaaggttctatgttggatcttaaaatttctcaatctagaattgcacttcccaagaacacagttggaggaaccattctgcgtagtgatctattggcaaattttttgacagatggcaattttagagcaagtgttgatttgcagcgcactcatcgtattaaaggaatgattaaaatgg

SEQ ID NO: 143017 - DNA, 285 bp, Glycine max
aaggaaattatgtcagaaagcaagatgtcagcattgaatatgatgcatgtacaattccaaatgattttggttcattggttgttgccaaggttggaaatcacaaacaaattgttggtttccatgttgctggaagcaaaggaagactgggatatgcttcattgataccatatgttgagccagttgtgcaagctcaaagtgctgaagtttactttgacttcttccctgtggaggttgatagtcaagagggagttgctcacattggtgaattgaaatctggtgtctatg

SEQ ID NO: 143018 - DNA, 268 bp, Glycine max
ggtgatgataacttaattagtgttcatgaatatgtcaagccttactttagtggttctaaattgaaaagctttctagctggtcataatatcaccattactgatggtattgacaaaactagtgcaactttgcaatttagaaagttagcagattgtgattttctcaagagaaactttaagcagatgtctaatgttttatgggtggctcctgaggacaaggcgagtttatggtcacaacttcattatgtttcgtgcaatattctggaaatgc

SEQ ID NO: 143019 - DNA, 270 bp, Glycine max
acgtggtgcaatgcttttggttgatacttatcataccagtcctgaaaatgcagttcgtagtatttttgttgcgcctttcagacgcggcaggcccattcgggtggttacatttccgaataccattgtgcagattgaaccagacatgaattcaaggtttcagcttttgagtaccactaccaatggtgatgttgttcaagggaaagatctcgcgatggttaaagttaatgtagcatgtgctgctgtttgcttgacatgcaagtgacactccaa

SEQ ID NO: 143020 - DNA, 266 bp, Glycine max
  unsure (1)..(266): unsure at all n locations
gccaaatgctgttctttcaatgtggagatattttgttggagatctcgtctttgaagtttctaagatgacttctccctacattaaatgtacagtctctttcttcatagcatttggaaatttggctgatgacaccatcaattttgaggcttttccccacaacctgctactttnnggagagattcaggaaaaagttgtgttgaaattttcacaagacgtatttcttagagcttgatcaactcaggtgcgtcccgcaacgactctgttgg

SEQ ID NO: 143021 - DNA, 143 bp, Glycine max
cgagccgtgttctgatgcatggcgtttggagtttctggagcgtaccggatttcgttgtgatgtcgtttgtgtcactggatggtgtgccaccccactgcaggatgctcaggttagacttgattcgtttgtttcctctcaggggt

SEQ ID NO: 143022 - DNA, 266 bp, Glycine max
gacatatactcctttgggatgtgcatgattgaaatttttacttctgagttcccatacagcgagtgcttaatccctgctcagatatacaagaaagttacttcggggaagctgccagaagcgtattacagaatccatgacttggaagcccagaaatttgtgggaaaatgtttggcaaatgtctcagagaggttgtcagcaaaggagctcttgttggatccatttttagccacggaacaactagactctccacttcctagcccaacatt

SEQ ID NO: 143023 - DNA, 266 bp, Glycine max
agtgtatgtgtagtagcatttttaatgagatgctcattagatatagctatgaaaaattactgcgccaggctaaagctccaagtatgtgtttacaatccttcaaaaattctgtttctttgtgtgtgtatggtgatgatgacttaattagtgttcatgaatatgtcaagccttactttagtggttctaaattgataagctttctagctggtcatgatatcaccattactggatggtattgacaaaactagtgcaactttgcaatttag

SEQ ID NO: 143024 - DNA, 268 bp, Glycine max
gcgttaccttgatgagcttatcctatatgacaacatgtgggatgatgggaattctctagggccgaaggaggtgcataattatttaacccgtgtgatgtataatagacgtaacaagttcaacccattgtggaatgcacttgtacttggtggggtgaaaaacgggcagaagtaccttggcatggttaacatgattggcattaattttgaggacaaccatgtagcaaccgggcttggaaatcatctcgctaggccaattctccgtgatgag

SEQ ID NO: 143025 - DNA, 271 bp, Glycine max
  unsure (1)..(271): unsure at all n locations
ctcgtctttgaagtttctaagatgacttctccctacattaaatgtacagtctctttcttcatagcatttggaaatttggctgatgacaccatcaattttgaggcttttccacacaagatactgattttnggagagattcagggaaaagttgtgtagagattttcacaagaggaatttcttacagcttggacaactcaggtgcgtcacgcaacgactctggtggctgatgggtgcccatatttgtatgctatggtgcatgatagttcagtgt

SEQ ID NO: 143026 - DNA, 274 bp, Glycine max
aaaaattactgcgccaggctaaagctccaagtatgtttttacaatccttcaaaaattttgtttctttgtgtgtgtatggtgatgataacttaattagtgttcatgaatatgtcaagccttactttagtggttctaaattgaaaagctttctagctggtcataatatcaccattactgatggtattgacaaaactagtgcaactttgcgatttagaaagttagcagattgtgattttctcaagagaaactttaagcagatgtctaatgttttatg

SEQ ID NO: 143027 - DNA, 265 bp, Glycine max
gccagttgtgcaagctcaaagtgctgaagtttactttgacttcttccctgtggaggttgatagtcaagagggagttgctcacattggtgaattgaaatctggtgtctatgttccactgcctacaagaactgatttgatggaaactcccaaggaatggcaactggatctaccttgtgacaaaattcctagtgtcttgactacaactgatgagagattggtaggcacagaacatgagggatatgatccttttcttggtggaattcaa

SEQ ID NO: 143028 - DNA, 281 bp, Glycine max
ctgatgggtgcccatatttgtatgctatggtgcatgatagttcagtgtctacaataccaggtgattttgtcattggtgttaagttgacaaccataaacaatatgtgtgcatatgggctcaatcctggtatttcaggttctcgtcttttgggcaccattcctcagtccatttcacagcaaactgtttggaatcaaatggcaacagtgagaacaccattgaattttgattctagcaagcagagcttttgtcaattttctattgaccttctcggtggaggaatt

SEQ ID NO: 143029 - DNA, 263 bp, Glycine max
cagtaatggtgatattatgaccagctagtgcaactttgcaatttagaaagttagcagattgtgattttctcaagagaaactttaagcagatgtctaatgttttgtgggtggctcctgaagacaaggcgagtttatggtcacaacttcattatgtttcgtgtaataatctggaaatgcaagaagcttatcttgtcaatctcgtaaatgtgttacgagaactgtatttgcacagtccagaggaagctcgccaattgagaaggaaa

SEQ ID NO: 143030 - DNA, 263 bp, Glycine max
tactgagtaagggcaatgatattctgtgttgcgattatgctagttttgatggtttgattaccaagcaagttatgagcaagatggcagaaatgataaacagtctttgtggtggtgatgaaaaattgatgcgtgaaaggacgcacctgctgttggcttgttgttcaaggatggcaatttgtaagaaagatgtttggagagttgaatgtggaatcccttctggatttccgctcacagttatttgcaatagcatttttaatgagatg

SEQ ID NO: 143031 - DNA, 266 bp, Glycine max
agatgctggtaatgggggagtttttgttggcaatgttgcttcagcattcacaacttcaagtgtgcttgaggcccaaagtagaaagcccaacagatatgaagtttcccagtacagatatcgcaatgtgccaataaagcgcagagcatgggttgaaggccagatgtctttcgatcagtctgtagtagcacttatgtctaaatgcaaagccagcatgagaatgggaaacactgatgctcaaattttgatggttccagggcgcagattca

SEQ ID NO: 143032 - DNA, 268 bp, Glycine max
caagatgtcagcattgaatatgatgcatgtacaattccaaatgattgtggttcattggttgttgccaaggttggaaatcacaaacaaattgttggtttccatgttgctggaagcaaaggaagactgggatatgcttcattgataccatatgttgagccagttgtgcaagctcaaagtgctgaagtttactttgacttcttccctgtggaggttgatagtcaagagggagttgctcacattggtgaattgaaatctggtgtctatgttc

SEQ ID NO: 143033 - DNA, 270 bp, Glycine max
caacttcattatgtttcgtgcaataatctggaaatgcaagaagcttatcttgtcaatctcgtaaatgtgttacgagaattgtatttgcacagtccagaggaagctcgccaattgagaaggaaagctctctctcgtattgaatggctgcaaaaagctgatgtgcctaccatagcacagattgaagagttccattcgatgcagaggatgatgaatgctcctgattcaaatgataatattgatctactgttgagcattgatttgttgggttta

SEQ ID NO: 143034 - DNA, 278 bp, Glycine max
atctgagtctctgtccgaagccacttgagagaaaatggcggtgcctctgctctcaaagaagatcgtgaagaagagggtaaagaagttcaagaggcctcagagtgacaggaaaatttccgtcaagactaactggcgcagaccaaagggtatcgattctcgtgttaggagaaagttcaagggatgcactttgatgccaaacattggttatggttcagacaagaagacccgccactatctccctaatggtttcaagaaatttgttgttcacaatgtgaagg

SEQ ID NO: 143035 - DNA, 275 bp, Glycine max
ggaagtcggctcgagcaagtaactctcgaactccattgttggagtctggtttgcaagatgacacaagggtaattgtggagtagtctggaaggatgtcttacgttgctcagaaccgtaatcagccccaagaggaagattggttagagggaaattgttgccgttgatattagatctcgctctatattggagaaagtgtcgtgcttgcagaagcacgatgtgttagtggaaaaagcttcaagtatgaggtaattggtgctgggtcacatgcggcagga

SEQ ID NO: 143036 - DNA, 281 bp, Glycine max
ggacaaactactatttatgctcattacaaatttttgacaaaggaagagcttgagaggttaaatttgaccaacctgattggctccaatctacttagagcctacatgcatggcttctttattaatcatgcattatacaaaaaggcaaaagcactggtggatccttttgaatatgaagcttatattgaacagcagaaacgagaaaagatggaagctgagcgcgcctcacgaatcacggtcaggaaaaagttacccaaagttaatcgggcccttgcagctcgcct

SEQ ID NO: 143037 - DNA, 282 bp, Glycine max
attctctttgcgcagttccctacctctcctttcaagatgcagatcttcgtcaagaccctcaccggaaagaccatcacccttgaggtggaaagctctgacaccatcgacaacgtcaaggccaagatccaggacaaggaaggaattcccccggatcagcaacgtctcatcttcgccggaaagcagctcgaggacggccgtaccctcgccgactacaacatccagaaggagtcaacccttcaccttgtccttcgtctccgtggtggcatgcagatcttcgtcaag

SEQ ID NO: 143038 - DNA, 262 bp, Glycine max
ggtttgcagtcactgctttgtttagatcagaaccagatcgtgttctcttcttccattggcaaacatggcaactcaaatgagcaagaagagaaagtttgtggcggatggagtgttcttcgccgaactgaacgaggttctgacacgtgagttggcggaggacggttactccggcgtggaggttagggttacgccgatgcgtaccgagattatcatcagagccaccagaacccaagccgttctcggtgagaagggaaggagaatt

SEQ ID NO: 143039 - DNA, 263 bp, Glycine max
tctcgagccgaatcggctcgagcattaagatgatctgtttatctctattcttctttttaaaaactaaagtctttgtattttgacatgtaaagatgtaaaattatgattattaggtggtgcatgtgtcgcgtcatgggccaatgttatcctctgcttttaagttggaagaggcccaactcatgtgtgatgtacggctgtgattgtgtaatttaatttgcaaaatcaaaaataacaccagagtcatatatatgcatctctttatt

SEQ ID NO: 143040 - DNA, 261 bp, Glycine max
gacgcgctacttcactattctccctatggagtttaatcttgtggtccgtcaaaagtttttaaattttgtgaggttcattatgaagaaaagggacaagcttagttgtcaagttggaatcaacccatactccatggaatggactggtgtggccaatagattactgagtaagggcagtgatattctgtgttgcgattatgctagttttgatggtttgattgacaagcaagttatgagcaagatggcagaaatgataaacagtct

SEQ ID NO: 143041 - DNA, 262 bp, Glycine max
gctccaagtatgtttttacaatccttcaaaaattttgtttctttgtgtgtgtatggtgatgataacttaattagtgttcatgaatatgtcaagccttactttagtggttctaaattgaaaagctttctagctggtcataatatcaccattactgatggtattgacaaaactagtgcaactttgcaatttagaaagttagcagattgtgattttctcaagagaaactttaagcagatgtctaatgttttatgggtggctcctg

SEQ ID NO: 143042 - DNA, 264 bp, Glycine max
atctgcttaaagtttctcttgaggacaaggcgagtttatggtcacaacttcattatgtttcgtgcaataatctggaaatgcaagaagcttatcttgtcaatctcgtaaatgtgttacgagaattgtatttgcacagtccagaggaagctcgccaattgagaaggaaagctctctctcgtattgaatggctgcaaaaagctgatgtgcctaccatagcacagattgaagagttccattcgatgcagaggatgatgaatgctcctg

SEQ ID NO: 143043 - DNA, 264 bp, Glycine max
agttcaaatgcccttaatggcacaggaggaaattctgtcttctagtgcaagtgcattcagaactgcaatggtgagtaaaaatagcaagcctcaagctactgcaatgcatgtgggagctatagagattatcattgatagtttcgcaagtcgctgttgcaacatagttggtgcaatgcttttggttgatacttatcataccagtcctgaaaatgcagttcgtagtatctttgttgcgcctttcagaggcggaaagcccattcgggt

SEQ ID NO: 143044 - DNA, 267 bp, Glycine max
attttccagtggattcttggttaccaatttttgtgaattgtctctatcctgtaagtcaattaccttcagaagctgtcgttgtaaatgttacatgtggtagtggacgtggtggtttacccaccactgcttggattagttctgcagttaacaatcgctcctcagacatcaacaaaaggattcgcacagcacttgggaaaggtaagaaaattgtttttcttactagagttgatccttttccagtagctttattggctgttctttttggcg

SEQ ID NO: 143045 - DNA, 277 bp, Glycine max
gatttaccgggtctgactaaagtggctatagagggacaacctgagaatattgttcaggaaattgaaactatggttcgttcttatgttgaaaagcctaattgcatcatactagcaatatctccagccaatcaagacatagcaacttctgatgctattaaacttgccaaggaagttgaccccacaggtgaaaggacatttggggtgttgacaaagctagatttgatggacaaaggaaccagatgctttggatgtccttgaaggaaggtcttatcgcctg

SEQ ID NO: 143046 - DNA, 277 bp, Glycine max
catctgaccacaaacgagacgttgccgaattttgtgggaatgtggagttatgcaggctcactgagcaggttgttttctccgacccttataaagtttctcaatataatcgttggacttccccctatctcgatcgtgatgctgaggcagttcgggaagacaatccgctgaagcttgaagttgctgagctgaaatctaagttcattgagagggcccaggcactaatacatggagatctacacactggttctgtgatggttacccgtgaatcaactcaagt

SEQ ID NO: 143047 - DNA, 259 bp, Glycine max
caactggcagtccgatggccttttctcctgatagtgcaaatgctaaaggtgatcagcagccagaatgtaaaggagaacaacttgatctaggtgtgaggcttggtatgctgaaattagtaagtggaatatctggcttgacacaagatgatctcccagaaactttatctcttaacttcctgaggctgaggtctgttcaggctcaaattcagaagattattgtgatttctacaagcattcttattcgcggtcaggttctctt

SEQ ID NO: 143048 - DNA, 258 bp, Glycine max
ctactgcaatgcatgtgggagctatagaaattatcattgatagtttcgcaagtcctgattgcaacatagttggtgcaatgcttttggttgatacttatcataccaatcctgaaaatgcagttcgtagtattttagttgcgcctttcagaggctgaaggcccattcgggtggttacatttccggataccattgtgcatattgaaccagacatgaattcaaggtttcagcttttgagtaccactaccaatggtgattttg

SEQ ID NO: 143049 - DNA, 257 bp, Glycine max
gtcagaaagcaagatgtcagcattgaatatgatgcatgtacaattccaaatgattgtggttcattggttgttgccaaggttggaaatcacaaacaaattgttggtttccatgttgctggaagcaaaggaagactgggatatgcttcattgataccatatgttgagccagttgtgcaagctcaaagtgctgaagtttactttgacttcttccctgtggaggttgatagtcaagagggagttgctcacattggtgaatt

SEQ ID NO: 143050 - DNA, 260 bp, Glycine max
gcaacagccccaaatccaatggttcagagaagaaactttcgaacccaatgagggagataaaggtgcagaagctcgtcctcaatatctccgttggcgagagtggagatcgtcttaccagagccgctaaggtgttggaacagcttagtggccaagcccctgtgttttccaaagcaaggtacacggttcgttcctttgggattagaagaaatgagaagattgcatgctatgtcactgtcagaggtgacaaggcaatgcaactt

SEQ ID NO: 143051 - DNA, 272 bp, Glycine max
aaatagaggtattcctgctgatgttcttgcaaagcgagctcatgaatttgaaaaacatgttgctcatgaaagcctcaaggatcaaattcctgctgttgacaagttgtattctactaaggttaataagtttgcaaaaattatgaaccttagacaaagtgttgttggtgatcttaaacttcttactgatgggaagttgtatgagggtaagcatattcctgtatctaatattagtgcaggggaaaatcatgtagttcaaatacccttaatggcac

SEQ ID NO: 143052 - DNA, 274 bp, Glycine max
gccagttctgatatttacaccatctgctctcaagactgtgaattatggaatcctgcttgcacaaaagcaatgactatgtcatttaatccaaacccgtgttctgatgcatggagtttggaatttctgaagcgtaccggatttcattgtgatatcatttgtgtcactggatggactgccactccaatgcaggatgttcaggttacaattgattggtttatttcctctcaggaatgtgttcccaggacatattgtgttttaaatccacaaaatcctt

SEQ ID NO: 143053 - DNA, 276 bp, Glycine max
tctcgagccgaatcggctcgaggcaccagcagctaccttcgctattagaaccaccggttccctcggccaaagaggaagctcgcttcctcaatcaaagtcctttgggttgaaattcaactctctgaatcatttgaagagcttctgtggcctcaaggccatgtcatccgtgagatgtgagtcggaatcctccttcttcggtaacaaaaccggtgctgctctacgggcgtcttttgcatccaaagctcaaaaggaaaacaaccacaactcgcagcctca

SEQ ID NO: 143054 - DNA, 263 bp, Glycine max
  unsure (1)..(263): unsure at all n locations
agtgtcggtggcatttttgttggttcgagtgagcgagggaagatgtactctagagattcatggggtggtccgttggagataaacgcgacggactcggcaacggaggacgagcggagccggaacctgcaggacgtggacagggcggcgctgtcgcgtcccttggacgagacgcagcagagctggctcctatgctccggcgagcagaagacatangagtacgtcgatctcggctgcatcatcgtcagccgcaagatctccaagtg

SEQ ID NO: 143055 - DNA, 273 bp, Glycine max
ctttcatctttctcattcacttaacccaagtgtaaaaatggcagcattgaatatgtccactgtgagacttccaagagcttccttgtctggaacgacaccagctaggagatcttgtgctctcatcaagaatccatcatctttgaggtctgtgaagaacgtgtctaaagtatttggattgaaatcatcttcctttagagtgtcagcgatggcggtatataaagtgaagctgattggaccagacggtgaagagaatgaatttgaagcccctgatga

SEQ ID NO: 143056 - DNA, 268 bp, Glycine max
gaaagttagcagattgtgattttctcaagagaaactttaagcagatgtctaatgttttatgggtggctcctgaggacaaggcgagtttatggtcacaacttcattatgtttcgtgcaataatctggacctgcaagaagcttatcttgtcaatctcgtaaatgtgttacgagaattgtatttgcacagtccagaggaagctcgccaattgagaaggaaagctctctctcgtattgaatggctgcaaaaagctgatgtgcctaccatagc

SEQ ID NO: 143057 - DNA, 267 bp, Glycine max
gcaagagctgcaagacacaaccttgggttctctcttgtcagcactcatgcagcactgtgatcctcctcagaggcgttatccattggagaagggcgttcctccaccatggtggcctaatggtaatgaagagtggtggccccaaataggtttgcctaaagatcaaggtcctccaccttacaagaaacctcatgacctgaagaaggcatggaaagttggtgttctgactgcagttatcaagcacatgtctcctgatatcgcaaaaagtcg

SEQ ID NO: 143058 - DNA, 268 bp, Glycine max
gagttgcaagagaaagagagcgagattccgatggcgactctggattccgacgtgcctatggttcccgccggcgagccctcgagcagcgccggtccttcttccaagaagcccaagcgcttcgagatcaagaagtggaacgccgtcgctctctgggcttgggacatcgttgtcgataactgtgctatctgccggaaccacatcatggatctctgcatcgagtgccaagccaaccaggctagcgccactagcgaggaatgcactgtggcat

SEQ ID NO: 143059 - DNA, 266 bp, Glycine max
gcttgctttatgcacctcaggcataaagaacatgaaaagtttactgcagatcttacaaccataaaccctcgtattcttctctctggacctgcagggtctgaaatatatcaggagatgttggtaaaagcacttgcaaaatactttggagctaagttgctcatatttgatagtcatttgcttttgggtggtttatcttccaaggaagctgagctactcaaagatggacttaatgctgagaaatccttcggctgcactaaactaagtcc

SEQ ID NO: 143060 - DNA, 266 bp, Glycine max
ggagctttagcctggcgcagtaattttttacaatccttcaaaaattttgtttctttgtgtgtgtatggtgatgataacttaattagtgttcatgaatatgtcaagccttactttagtggttctaaattgaaaagctttctagctggtcataatatcaccattactgatggtattgacaaaactagtgcaactttgcaatttagaaagttagcagattgtgattttctcaagagaaactttaagcagatgtctaatgttttatgggt

SEQ ID NO: 143061 - DNA, 279 bp, Glycine max
tgggaattggccatgtgctgctggtaaaaaatattatggccgaggaccaatccaacttacacacaactacaattacgggcaagctggcaaagcacttggtctggatttgataaacaatccggatcttgtagccacagacgcaaccgtgtcattcaagacagccctatggttttggatgactgcacagggaaacaagccatcaagccatgatgtgatcactggaagatggactccatctagtgctgacagctcagcgggtcgggctcctggctacggtgt

SEQ ID NO: 143062 - DNA, 178 bp, Glycine max
taagatttgaaattttaataaaccgcgatcacaggttgccgcaccttaaatccggaaacaaaagcaatcgttacttgattttcagaatttctcaatttcttcctacttctttgtgtacgatttcttaagggaaagaaaatcactctctgtgctggtcacagacttcgtgaatcatttt

SEQ ID NO: 143063 - DNA, 271 bp, Glycine max
atagtaggggagcatggggatagttcggtggcgttatggtctagcattagcattgggggtgttccggttctgagctttttggagaatcaacagattgtgtatgagaaagagacgttggagaacatacacaagtcagtgatagacagtgcgtatgaagtgatcaagctgaaagggtacacttcatgggccattgggtactctgtggctaaataggcccggtcctttatcaggaaccagaggaagattcaccctgtgtctgttctggctaaag

SEQ ID NO: 143064 - DNA, 269 bp, Glycine max
  unsure (1)..(269): unsure at all n locations
cttcaaatatgatataattggtgctggttcacattcttcaggagattttcctgaaaaggaagatcaagaaaaacccaaaaagattgataccagattgagacaaagaatagatcctcaatacaatgaggttcaggctcagatggaaacaaatttgtttaaattgtctcttgatgatgttgaaactcctaaaggttctatgttggatcttaaaatttctcaatctanaattgcacttcccaagaacacagttggaggaaccattctgcgta

SEQ ID NO: 143065 - DNA, 266 bp, Glycine max
gtggtgatcgaaaatttgatgcgtgaacggacgcacctgctgttggcttgttgttcaaggatggcaatttgtaagaaagatgtttggagagttgaatgtggaatcccttctggatttccgctcacagttatttgcaatagcatttttaatgagatgctcattagatatagctatgaaaaattactgcgccagggcaaagctccaagtatgtttttacaatccttcaaaaattttgtttctttgtgtgtgtatggtgatgataatta

SEQ ID NO: 143066 - DNA, 263 bp, Glycine max
tattctcatgaatatgccaaatgctgttctttcaatgtggagatattttgttggagatctcgtctttgaagtttctaagatgacttctccctacattaaatgtacagtctctttcttcatagcatttggaaatttggctgatgacaccatcaattttgaggcttttccccacaagctggtgcaccttggagagattcaggaaaaagttgtgttgaaattttcacaagaggaatttcttacagcttggtcaactcaggtgcgtc

SEQ ID NO: 143067 - DNA, 234 bp, Glycine max
gtttgattgtgttgatgaggaggattcctttgaggaagtttctttaagtgcagcacttaatggtgttgagggtttggactatatggaaagaattcctcttgccacatctgagggttttcctcatgtgctttcacgcaaaaatggcgaataaggcataaggagatttgtctctggggatggtgaagagatgacattgattccaggaaccagtgttgaagaggcttacaacaagct

SEQ ID NO: 143068 - DNA, 266 bp, Glycine max
cagtccttttgtgttaaataggtggatgggaaaactgactttccctcagggcacttcccgaagtgttaagagaatgcctctttctatagggggaggagctggtgcaaagaatgctattctcatgaatatgccaaatgctgttctttcaatgtggagatattttgttggagatctcgtctttgaagtttctaagatgacttctccctacattaaatgtacagtctcattcttcatagcatttggcaatgtcgctgatgacacatcaa

SEQ ID NO: 143069 - DNA, 273 bp, Glycine max
ggtttgtttgttcgatcagccattgttggggccttctgtgtttctatcaagacgggcaagtttgtttcaaatagtgagttaatcacatgtgctaccattgcagtttctacaattgcaactgttatgtctcaagctttcaaaccttctgaagaaattaaagggcaattccaggctctttctgttttagagggattggcaacacaactcacttcattttgtgacacatctttgattgccatgggaaaaacttgcacagcatcaatcaaattgcac

SEQ ID NO: 143070 - DNA, 268 bp, Glycine max
gctccaagtatgtttttacaatccttcaaaaattttgtttctttgtgtgtgtatggtgatgataacttaattagtgttcatgaatatgtcaagccttactttagtggttctaaattgaaaagctttctagctggtcataatatcaccattactgatggtattgacaaaactagtgcaactttgcaatttagacagttagcagattgtgattttctcaagagaaactttaagcagatgtctaatgttttatgggtggctcctgaggaca

SEQ ID NO: 143071 - DNA, 260 bp, Glycine max
attagatatagctatgaaaaattactgcgccaggctaaagctccaagtatgtttttacaatccttcaaaaattttgtttctttgtgtgtgtatggtgatgataacttaattagtgttcatgaatatgtcaagccttactttagtggttctaaattgaaaagctttctagctggtcataatatcaccattactgatggtattgacaaaactagtgcaactttgcaatttagaaagttagcagattgtgattttctcaagag

SEQ ID NO: 143072 - DNA, 264 bp, Glycine max
cttagaaagaattctttctaaggttgcacaagatatggttgaggcatggtttgattgtgttgatgaggaggattcctttgacgaagtttctttaagtgcagcacttaatggtgttgagggtttggactatatggaaagaattcctcttgccacatctgagggttttcctcatgtgctttcacgcaacaatggaggcatcaggcaaaaggagatttgtctctggggatggtgaagagatgacattgattccatgatccagtgttg

SEQ ID NO: 143073 - DNA, 285 bp, Glycine max
agcgtagtagctcggaatcggtcgagtgcctgagggaggagctggtgcaaagaatgctattctcatgaatatgccaaatgctgttctttcaatgtggagatattttgttggagatctcgtctttgaagtttctaagatgacttctccctacattaaatgtacagtctctttcttcatagcatttggcaatttggctgatgacaccatcaattttgaagcttttccccacaagctggtgcagtttggagagattcaggaaaaagttgtgttcgacatttcacaaga

SEQ ID NO: 143074 - DNA, 275 bp, Glycine max
ggaaaaaccttcaaatatgatataattggtgctggttcacattcttcaggagattttcctgaaaaggaagatcaagagaaacccaaaaagattgataccagattgagacaaagaatagatcctcaatacaatgaggttccggctcagatggaaacaaatttgtttaaattgtctcttgatgatgttgaaactcctaaaggttctatgttggatcttaaaatttctcaatctataattgcacttcccaagaacacagttggaggaaccattctgcg

SEQ ID NO: 143075 - DNA, 243 bp, Glycine max
gattggatcacacttatacaaaattctccaattagtaacttgttgagagttgctgcttggaagaaaggttgtttaatggtcaagattgtgatgtctgggaatgcagcagtcaaaaggagtgattgggcctcattggtacaagtgtttttaacaaacagcaacagtacagagcattttgatgcatgtaagtggacaaaatcagaaccacattcctgggaattaatcttcccaatagaggtatgt

SEQ ID NO: 143076 - DNA, 263 bp, Glycine max
tgtttctttgtgtgtgtatggtgatgataacttaattagtgttcatgaatatgtcaagccttactttagtggttctaaattgtcaagctttctagctggtcataatatcaccattactgatggtattgacaaaactagtgcaactttgcaatttagaaagttagcagattgtgattttctcatcagaaactttaagcagatgtctaatgttttatgggtggctcctgaggacaaggcgagtttatggtcacaacttcattatg

SEQ ID NO: 143077 - DNA, 261 bp, Glycine max
gtaagtggacaaaatcagaaccacattcctgggaattaatcttcccaatagaggtatgtggtcctaataatggttttgaaatgtggagttctgagtgggcaaatcaaacttcatggcatttgagtttccttattgacaatcccaaacagtctacagtttttgatattctcttgggaatctctcaagattttgaaattgctggtaatactcttatgccagctttttctgttccacaggctactgccagatcttctgaaaatg

SEQ ID NO: 143078 - DNA, 264 bp, Glycine max
gagaaaaggaagaagaagaagaaggaaaagaaagggctgaaagagaagatcgaggagaaaatagagggtgatcatcatcatcacaaggatgaggacacaagtgtccctgttgagaaagttgaggttgttgaaacagcacatgctgaggaaaagaaggggttcctcgacaagattaaggagaagctaccagggcacaagaagacagaggaggccacagctactactcctcctccaccaccacctgttgcatcattggagcatggt

SEQ ID NO: 143079 - DNA, 248 bp, Glycine max
gctgcttggaagaaaggttgtttaatggtcaagattgtgatgtctgggaatgcagcagtcaaaaggagtgattgggcctcattggtacaagtgtttttaacaaacagcaacagtacagagcattttgatgcatgtaagtggaccaaatcagaaccacattcctgggaattaatcttcccaatagaggtatgtggtcctaataatggttttgaaatgtggagttctgagtgggcaaatcaaacttcatg

SEQ ID NO: 143080 - DNA, 152 bp, Glycine max
aaccgcgatcacaggttgccgcaccttaaaaccggaaacaaaagcaatcgttacttgatttcaagaatttctcaatttcttcctacttctttgtgtacgatttcttaagggaaagaaaatcactctctgtgctggtctcagacttcgtgaat

SEQ ID NO: 143081 - DNA, 272 bp, Glycine max
  unsure (1)..(272): unsure at all n locations
tttttcacaggactctcaattaaaatcagggggccggcaggattcttttgaagatgaaccctctcaaaatggcagttcagcatatactcctcaaaatgggggactaaatatacctcatacagtggtcaatcaaaccatgtctatcatacctatctctgcaggtggtgctcctggagctgttcctggtcccacnccaaacttaaatataggaatggattattggggtacaccaggttcatccaacattcctggacttggcagaaaggttccat

SEQ ID NO: 143082 - DNA, 265 bp, Glycine max
gtcctgggaacacattcctgagaggaaataaaccaatcaattgtgttttaaatccacaaaatccttttgtgttaaataggtggatgggaaaactgactttccctcagggcacttcccgaagtgttaagagaatgcctctttctatagggggaggagctggtgcaaagaatgctattctcatgaatatgccaaatgctgttctttcaatgtggagatattttgttggagatctcgtctttgaagtttctaagatgacttctcccta

SEQ ID NO: 143083 - DNA, 264 bp, Glycine max
ggacaaacaactatttatgatcattacaaatttttgacaaaggaagagcttgagaggttaaatttgaccaacctgattggcaccaatctacttagagcctacatgcatggcttctttattaatcatgcattatacaaaaaggcaaaagcactggtggatccttttgaatatgaagcttatattgaacagcagaaacgagaaaagatggaagctgagcgcgcctcacgaatcacggtcaggaaaaagttacccaaagttaatcgg

SEQ ID NO: 143084 - DNA, 264 bp, Glycine max
  unsure (1)..(264): unsure at all n locations
gccagccaccgcaaggcctcgtcggaatccaaccccaccgcctccgtctctgccctagccaacgacagcgtttctncttccaccgtcggcggcggaaggatgcacgagtgttccatctgtcacaagagtttccctaccggtcaggccctgggtggccacaagcgctgccactacgacggcgggaacanccacagtaacagcaacgccaacggaaacaacagcagcggcgccactacctccgacggcggcgctgcctcctcctcc

SEQ ID NO: 143085 - DNA, 259 bp, Glycine max
gcactactcattccatacattttcttcagcttgccttcattaattttcgacgtcttcaggggagagcttggaaaatggattgctgcagttgctgttgtattacgccttttccttccaagacacttccctgattggctggaattgcctggtgctctgattcttcttatcgttgtagctccttctctaattgcaagcacctttagagacaacattgttggggtggtagtgtgcctcatcattgcatgttatttgctgcaag

SEQ ID NO: 143086 - DNA, 256 bp, Glycine max
cggctcgagatttgggcaagcaaagaggttgatgtggaggttcccgctgatgaagatgattccagtgatgaagaggattcagctgaaagcagctccaaggaggaaagcgaagatgaagatgctgataaaagtgaagacgaagaaaaaaagcccaagacaaagacggtgaaggaaacaacttatgaatgggaacttttaaatgatgtgaaagctatatggctgaggaatccaaaggaggttacagaagaagaataca

SEQ ID NO: 143087 - DNA, 260 bp, Glycine max
ccctcgagccgattcggctcgagcctctctctctgagatggcaaagactgtggggattctcgccatcgacatctacttccctaccacctgtattcagcaggaattgctggaggctcatgatggtgccagtaaagggaaatatactattggacttggtcaagattgcatggcgttttgtacagaagtagacgatgtcatctcgatgagtttgacagtagtttcttcccttcttgaaaagtatgcgattgatcctaaacaaa

SEQ ID NO: 143088 - DNA, 261 bp, Glycine max
atgagaatgagaaggaggagtcttgggttggcttcaccgagttcaccttggatcaactgagaagtgccacatcgtcattttcacccgacaacatagtctcggaacacggtgagaaggctcccaatgttgtctacaaaggaaggactgaagatgataggttggttgctgtgaagcgcttcaacaagtctgcatggcctgatcctcgacagttcctagaggaagcaagggcagtggggcagctgaggaatgagcggttggcta

SEQ ID NO: 143089 - DNA, 259 bp, Glycine max
aaggaaagctcaagcaggatgatgctaggagatattttcagcaattgatcagtgctgttgactactgccatagcagaggcgtgtgccatcgcgatctgaaaccagaaaatcttctactggatgaaaacgggaatttgaaggtcacagatttcgggttaagtgcccttgctgaaactaagcaccaagatggattactccatactacatgtggtacccctgcctatgttgctccagaagtgataaacagaaggggttatga

SEQ ID NO: 143090 - DNA, 258 bp, Glycine max
gagaaatcgagacaccgtacttgaaatgctgaaggacaaaatcaaggaggaggcattgaggacatacctctttaccttctcttcatcttatgaatcgttgagcctggatcaactcacaaaattttttgatctctctgtttgtcgcactcatagcattgtcagtaggatgatgatcaatgaggagcttcatgcaagctgggatcagccaactgggtgcattcttttccaagatgttgaacactccaggcttcaggcatt

SEQ ID NO: 143091 - DNA, 260 bp, Glycine max
aatttcaaatgtcacactacgccaaccaacttcttctggtggtactttaacatatgaggggcggtttgaaattctctccttgtctggttcatatataacaactgagaatggattaacaaagagcagatctggtgggatgagcatctctttggccgctccagatggtcgagtaatggggggtggattggcttctttgctggtagctgcaggtcctgtgcaggttgttgtggctagttttgttcctggtcatcagctggagc

SEQ ID NO: 143092 - DNA, 265 bp, Glycine max
atgattttgatttagataatactttatatttttttaccgcaggcgttacgaatatagaaacaaaggtgtttacatgtttcttgaatcattgggacgtcggccttaatcaaaaactgaaagcatccaattcttcaacgactattgtcgctttcattattatgccagctgctacaaattcttatgctgttgaagctttaaaaggacaagctgtcattaaacaattacaagaaactgtaaacatgtatactgataggattggacaaag

SEQ ID NO: 143093 - DNA, 264 bp, Glycine max
ggcaattggaagagcaatgatagcacagggattcgaggacgaagagaaatggctcgccgaggggatcgccggcattcagcacaacgcattcttcctgcatcgcgcactggacgataacaatctcagagacgctctcaaatactccgcgcagatgctatccgagcttcgaacttccaggctctcacctcacgaatactaccacctctatatgcgagcctttgatgagcttcggaggctggagattttcttcaaagacgaaagcag

SEQ ID NO: 143094 - DNA, 219 bp, Glycine max
ggtggccatatttgtatgctatggtgcatgatagttcagtgtctacaataccaggtgatattgtcattggtgttaagttgacaaccataaacaatatgtgtgcatatgggctcaatcctggtattgtagacactgaactatcatgcaccatagcatacacctatgggcagccatcagccaagagactcgttgcgagagccactgagtagaccaagctgt

SEQ ID NO: 143095 - DNA, 255 bp, Glycine max
caagtcaagttctcactttgaagaggaaataaacaacgtaaaaatgtctgcaacaagaagcaaatgaagcccagaggaagagaagaagcctctggataaaggagcccatataatctccaagttcagggcccagctggtaatgacggtctcctgaggattacaagcagcactcagctcaagaaacttatgaatgcatactgtgatcgccaatctgtagattttaactcaattgctttcttgtctgatggaatgaga

SEQ ID NO: 143096 - DNA, 255 bp, Glycine max
  unsure (1)..(255): unsure at all n locations
ctcgagccgattcggctccgaggagaaggtacanaagtatgaaggtgcatatccangttggggtcaagagccccctgaagttgatgccatggagacatagtcaattggcgtgtccagagctttgctggtcaacctacagctgtacagaatggtttgggtccagtatcaccttttcctgtagagtttgacgaaagcaatgctagtatctctccaactatgcttagtggcaccagaatacaatagatcttatcagag

SEQ ID NO: 143097 - DNA, 256 bp, Glycine max
gcattggcctgtgctatgaatagttcttttagggggcgcgccagttctgatatttacaccatctgctctcaagactgtgaattatggaatcctgcttgcacaaaagcaatgactatgtcatttaatccaaacccgtgttctgatgcatggagtttggaatttctgaagcgtaccggatttcattgtgatatcatttgtgtcactggatggactgccaccccaatgcaggatgttcaggttacaattgattggttta

SEQ ID NO: 143098 - DNA, 259 bp, Glycine max
cacgcgtacgtgagcgcgtgcgaaaacccccaactccaacctctgttcatcgtctaccgcgctttcttttcaaccagaactatgattaagctttttaaagtaaaggaaaagcagagcgaacttacagaaaatgcaagtggcggaccacctgttaagaagcaaagtgctggagagttgcgtcttcacaaagatataagtgagctgaatctaccaaaatcatgtaccatgcaattccccaatggcaaagatgatctgatga

SEQ ID NO: 143099 - DNA, 235 bp, Glycine max
attatcctgagtgggctccaattaattgtcgagttcatcgacaaccaattcacatcactgaaggaaattatgtcagagagcaagatgtcagcattgaatatgatgcatgtacaattccaaatgattgtggttcattggttgttgccaaggttggaaatcacaaacaaattgttggtttccatgttgctggaagcaaaggccgactgggatatgcttcattgataccatatgttga

SEQ ID NO: 143100 - DNA, 225 bp, Glycine max
gtgttttaaatccacaaaatccttttatgttaaataggtggatgggaaaactgactttccctcagggcacttcccgaagtgttaagagaatgcctcttgcctatagggggaggcgctggtgcaaagaatgctattctcatgaatatgccaaatgctgttctttcaatgtagcgatattttattagagatctcgtctttgaagtttctaagatgacttctcccgac

SEQ ID NO: 143101 - DNA, 233 bp, Glycine max
gagcaatccgcgggtggaggagccggtcgctcagctaatgctcataattggcctcctatgcccagcttcatcccggtggcaccgtgcttttatcaggacattgacgtggagatccctgtacaattccaggaaacagttcgcctagtatactatatatatctaacggctatattagcactggtggtaaatgtagttgcatcacttttactcatattattcgctgccggaggaat

SEQ ID NO: 143102 - DNA, 222 bp, Glycine max
ctccaaccccgccgacaccaaacttggccgcgacggccctaaaatcgttcagaaatgggtcctatttcagctcggcccaatcctccgcttgggcctccctcaattcttggaagaatcaacaatccggagcttccgcctaccgttctctctgatccaaaaagattaccagagcactctacgatttcttactaccaatcttctggttctatgctagacgacgcg

SEQ ID NO: 143103 - DNA, 190 bp, Glycine max
ttcggctcatgattttgataaccgcgatcacatgttgccgcaccgtaaaaccggatacaaaagctatcattacttgatttcaagaatttctcaatttcttactacttctttatatacgatttcttaagggaaagaaaatcactctctatgctggccacagacttcgtgaatcattttgctttccacacaa

SEQ ID NO: 143104 - DNA, 231 bp, Glycine max
cgagataatgttgtcggggtttgttttgtggcccatgatataactgctcagaagaatgtcatggacaaattcatccgtattaaaggtgattacaaggcaattgtacagaaccgcaatccattaatccctcctatatttggcacagatgaatctggctagtgttgtgagtggaatccagctatgatgaagttaactggatggacgcgagaggaggtgatggctaaaatgctt

SEQ ID NO: 143105 - DNA, 221 bp, Glycine max
agcttttggttgatacttatcataccgatcctgaaaatgcagttcgtagtatttttattgcgcctttcagaggcggacggcccattcgggtgattacctttccgaataccattatgcagattgaaccagacatgaattcaaggtttcagcttttaagtaccactaccaatggtgattttattgccgggacagatctcgcaatggttaaagttaatatagca

SEQ ID NO: 143106 - DNA, 229 bp, Glycine max
gtagatgtcagcattgaatatgatgcatatacaattccaaatgattatggttcgttaattattgccaaggttggaaatcacaaacaaattgttagtttccatattgctggaagcaaaggccgactgggatatacttcattaataccatatattgagccagttatgcacgctcaaagtgctgaagtttactttgacttcttccctatggaggttgatagtcaagagggag

SEQ ID NO: 143107 - DNA, 234 bp, Glycine max
gcacagatgttgctggaacctttggttacttggctcctgaatacttcatgtacggcaaagtaaatgataagattgatgtctatgcattcggtgtcgtgctccttaagcttctttcagggagaaagcccataagccgtgattatccaaaaggccaagagagtcttattatatgggcaagtccgattctaaatagtggaaaggtgttgcaattgttagatcctagtttaggtgata

SEQ ID NO: 143108 - DNA, 189 bp, Glycine max
ggcatcaatccaatgaggttcaggctcagatggcaacaaatttgtttaaattgtctcttgatgatgttgaaactccgaaaggttccatattggatcttaaaatttctacatctaaaattgcacttcccaagagcacagttggaggaaccattctgcgtagtgatttattagcaaattttttgccagagg

SEQ ID NO: 143109 - DNA, 223 bp, Glycine max
gagggttttcctcatgtgctttcacgcaaaaatggcgaggaaggcataaggggatttatctctggggatggtgaagagatgacattaattccaggtaccagtgttaaagaggcttacaacaagcgaatagttaaacttgagaaaagtgttcctacattaattgagcatgaatgtcccaaggctgtgaaacttcctacgtcgcaaaatttttgaccaaccgaag

SEQ ID NO: 143110 - DNA, 234 bp, Glycine max
cccacttcttattttttcatggaaggttgcacctgcattagcttgtggtaatacagttgtaatgaaaactgcagagcagacacccctttcagccctttatgtgtcaaagctatttcttgaggcaggacttcctacctggagttctaaatattatctctggctttggtcctactgctggtgcagcactatatagtcatatggacgttagacagcttgctttcacaggatccacta

SEQ ID NO: 143111 - DNA, 233 bp, Glycine max
gtggtgatgaaaaattgatgcgtgagaggacgcacctgctgttggcttattattcaaggatggcaatttgtaagagagatgtttagagagttgaatgtggaatccctactagatttccgctcacagttatttgcaatagcatttttaatgagatgctcattagatatagctatgaaaaattactgcgccaggctaaagctccaagtatgtttttacactccttcaaaattttg

SEQ ID NO: 143112 - DNA, 209 bp, Glycine max
gtcgagccgcgaaaaaggcaaaaggagatttgtctctagggatggtgaagagatgacattgattccaggaaccagtgttgaagaggcttacaacaagctaatagttgaacttgagaaaagtattcctacattggttagcattgaatatcccagggatgagaaacttcctacgtcgcaaaatttttgacaaacctaagacgcgctgcttc

SEQ ID NO: 143113 - DNA, 231 bp, Glycine max
aaggttcatggttggcactttgttagaaagatgtttaatgagttgcctgtggaatcccttctagatttccgctcagagttatatgcgatagcattgtcaatgggatgcgcattagatatagctatgatacattactgcgccaggctaaagctccaagtatatgtgtacaatccttcaaaaattttatgtctatgtgtgtgtatggtgatgataacttaattagtattcatg

SEQ ID NO: 143114 - DNA, 234 bp, Glycine max
gaatccttttgtgttaaataggtggatgggaaaactgactttccctcagggcacttcccgaagtgttaagagaatgcctctttctatagggggcggagctagtgcaaagaatgctattctcatgaatatgccaaatgctgttctttcaatgtggagatattttattagcgatctcgtctttgaaatttctaagatgacttactccctacattaaatgtacagtctctttcttca

SEQ ID NO: 143115 - DNA, 227 bp, Glycine max
gtcagatgcatcattcgtataggggagtaaatctatcaaaccaatgataacatggtccctgtaagggactaagttctctttctagttatgaaagtgtaaagaagaaaataaatttcatatgtatgatatatccctttagaattattgaattagtgaaaacttatgtaagtttaaatattgagaatgataggaactttgctgctattattatctaatacatgataaat

SEQ ID NO: 143116 - DNA, 226 bp, Glycine max
gttttaaatccacaaaatccttttgtgttaaataggtggatgggaaaactgactttccctcagggcacttcccgaagtgttaagagaatgcctctttctatagggggcggagctggtgcaaagaatactattctcatgaatatgccaaatgctattctttcaatatggagatattttattagagatctcgtctttaaagtttctaagatgacttctccctacatta

SEQ ID NO: 143117 - DNA, 230 bp, Glycine max
gtcctattatgttttagatccacaaaatccttttatgttaaataggtggataggaaaactgactttccctcagggcacttcccgaagtgttaagagaatgcctactgtctatagggggcggagctagtgcaaagaatgctattctcatgaatatgccaaatgctattactttcaatatggagatattttggcggcgatctcgtctttaaagtttctaagatgacttctcc

SEQ ID NO: 143118 - DNA, 234 bp, Glycine max
  unsure (1)..(234): unsure at all n locations
ctggtgggcccgacaatgatttcggcatcaagtacaacgtacaacaacggtggtccagctnccagagagtgtgaccgacaagatcttccaacgcaccaaggaganttccgcctacaaggtccttgatgctggcgagcttgacctatccaagattggtagctccacctatggtcccatggnggttgagatcgtcgactcgntcaaggactatgttacccnaacttcaaggacatc

SEQ ID NO: 143119 - DNA, 216 bp, Glycine max
caagagaagaaacctattaggccgttgtccccctggattactgatatattattagcttcaccagttggtattagaagtgactatttccgatggtgcagtggtgttatgagtaaatatactgcaggagaattgaagcctccatcaaccgcttcttcccgtagttctgggaagcatctacaacttatgccttcaactccaagataggctattgccaat

SEQ ID NO: 143120 - DNA, 207 bp, Glycine max
cacattaccctggataacaatgagaacaaacctgtcactaacagtagggatacacaagaggtaatattggagcctagcctgaaattaatcaaaattttcaaggaatataccagcaagacatacattctagatgattttagcttctatgaggcccgtcagaagactattttagagaagacgccaaagcaacaattcccaaagcaggta

SEQ ID NO: 143121 - DNA, 229 bp, Glycine max
tctgcgtatgtttatgaattgttattgagatctgaatcaaaatcagaaacgataatggctacaccggaccaactcttcaacctccgcaacaacttctacctcggcgcttaccaagccgccatcaacagcagcgacgttgccaacctctcccaagaagataccctcgagcgcgacaccctcgtccaccgctgctacatcgccctcggccagctccagttcgtcatctccg

SEQ ID NO: 143122 - DNA, 142 bp, Glycine max
cttggaattcggcgcgagcgtctttgaagtttctaagatgacttctccctacattaaatgtacagtctctttcttcatagcatttggcaatttggctgatgacaccatcaattttgcggcttttccccacaagctggtgcag

SEQ ID NO: 143123 - DNA, 270 bp, Glycine max
cggctccgcccaatcccggcggctgggtgtcctgggggatcaaccccagcggcaccggcatggtgggggcgcaggtgctggccgcgtacaaggcggagggcaccggtgccgtcaccgtgaaaacgttgcgaccttacatcttactctgccattgttccggggaagctgtcgttggacgtgtgggacatgaggggggaagaggtcaggggtgtgattaggattttcgcgacggttaaggttccggataaggcggagagtgttaaccaggtg

SEQ ID NO: 143124 - DNA, 267 bp, Glycine max
ggtttgggtttctcttcctcccttggagaaaaagaagagccaccgctgcgacgccgttcgtgcatttttgaggtgccgctgtcatgtttgggcgtggtggaccaaggaggagtgataactccaaatattatgatattctcgggatttccaaaaatgccagtgaagatgaaatcaagaaggcctatagaaaggcggctatgaagaaccatccagataagggaggagatcctgaaaagtttaaggagttaggtcaagcatatgaagttt

SEQ ID NO: 143125 - DNA, 263 bp, Glycine max; identical to SEQ ID NO: 143029

SEQ ID NO: 143126 - DNA, 265 bp, Glycine max
aaaccccgcaacaaacaaccaacccccaaacccctcactcttctcggcgtccatcggaaatttccaaggtaaaaagatgaatctgaagaacatgaagattccgaacgttccaggcggcggtgcgtcctctgcgctgctgaagcttgggcttcttggtggaattggtttatatgcagctgctaacagtctctacaacgttgaaggaggtcaccgagccattgttttcaaccgtctagttggtgtcaaagacaaggtctatcctgaa

SEQ ID NO: 143127 - DNA, 263 bp, Glycine max
ggagtaactcattgaccatgggtgttgcagatgagcatataggattggttgttggtcgtggtggaaggaatattatggaaattagtcaggctagtggggcaaggataaagatatcagatagaggtgattacgtatctggaacaaccgataggaaagttaccataacaggatcccagagagcaatacgtacagctgaatctatgatattgcagaaggttgcttatgctaccgagaggggggtgatggagtagtttgctactgca

SEQ ID NO: 143128 - DNA, 264 bp, Glycine max
agcgctcttctccgtaccgtttctagagagagaaactgatggccggagttaatccgaacggcgtcgccgattttccggcgactccaacgcacggcggacagttcattcagtacaacatattcggaaacctcttcgaggttacggcgaagtaccgtcctccgatcatgcctgtcggacgcggcgcgtatggaatcgattgctcgctgttgaataccgagacgaatgagctggtggcggttaagaagatagcgaacgcgttcgaca

SEQ ID NO: 143129 - DNA, 264 bp, Glycine max
atcagatgcatcattcgtatgggggagtaaatctatcaaaccaatgatgacatggtccctgtgagggactgagttctctttctagttgtgaaagtgaaaagaagaaaataaatttcatatatatgatatatccctttagaattattgaattagtgaaaacttgtgtaagtttgaatgttgagaatgataggacctttgctgctgttattgtctaatgcatgataaataaaatgtggtttttttgtcgatttgttgttcttgtgg

SEQ ID NO: 143130 - DNA, 267 bp, Glycine max
aaattagtgcagtctctttgcgcagttccctacctctcctttcaagatgcagatcttcgtcaagaccctcaccggaaagactatcacccttgaggtggaaagctctgacaccatcgacaacgtcaaggccaagatccaggacaaggaaggaattcccccggatcagcaacgtctcatcttcgccggaaagcagctcgaggacggccgtaccctcgccgactacaacatccagaaggagtcaacccttcaccttgtcctgcgtctccg

SEQ ID NO: 143131 - DNA, 271 bp, Glycine max
ccaatggtgattttgttcaagggaaagatctcgcaatggttaaagttaatgtagcatgtgctgctgttggcttgacatcaagttacactccaactccattgttggaatctggtttgcaaaaagacagagggttaattgtggagtattttggaaggatgtcttacgttgctcataacgttaatcagccctaagagaaagatttgttagagggaaatttttcctttgatattaaatctcgctctagattggaaaaagtttcctctacaaaagc

SEQ ID NO: 143132 - DNA, 266 bp, Glycine max
gacactcacaaatcgcgatatgttgccttaaaaattcaaaagagtgctcagcattacactgaagcggcaatggatgaaataaagattcttaaacaaattgctgacggggatccagatgacaagaaatgtgttgtaaagcttttggatcactttaagcattcaggacctaatggccagcatgtttgtatggtttttgaattccttggagataatcttctcacacttatcaaatatagtgattatcgaggagttccccttcccatggt

SEQ ID NO: 143133 - DNA, 267 bp, Glycine max
tgctcgagccgaatcggctcgagctttgaaagggttcacgaagaaaacccaatccgctccgagttgtatgttttgcagagctacaagaaatcaacgatgcctcgctatgatgataaatatggtaatacccgcctctatgttggacgcttgtcttcgaggactcgttcccgtgacctggagcgtgtcttcagcagatatggaagagttcgaggcgtagatatgaagaatgatttcgcctttgttgaatttagtgatcctcgagatgct

SEQ ID NO: 143134 - DNA, 263 bp, Glycine max
cattctctctgtgtatttccctacctctcccttctcgatgcagatcttcgtcaagaccctcaccggcaagaccatcacccttgaggtggaaagctctgacaccatcgacaacgtcaaggccaagatccaggacaaggaaggaatccccccggaccagcaacgtctcattttcgccggaaagcaacttgaggacggccgtacccttgctgactacaacattcagaaggagagtactcttcacctcgtcctccgtctccgtggtg

SEQ ID NO: 143135 - DNA, 265 bp, Glycine max
cgctcgagccgaatcggctcgagcatcgtattaaaggaatgattaaactggtggccacagttactattcctgagaatacaggtatagcattggcctgtgctatgaatagttcttttagggggcgcgccagttctgatatttacaccatctgctctcaagactgtgaattatggaatcctgcttgcacaaaagcaatgactatgtcatttaatccaaacccgtgttctgatgcatggagtttggaatttctgaagcgtaccggatt

SEQ ID NO: 143136 - DNA, 262 bp, Glycine max
gtgcctaccatagcacagtttatggtcacaacttcattatgtttcgtgcaataatctggaaatgcaagaagcttatcttgtcaatctcgtaaatgtgttacgagaattgtatttgcacagtccagaggaagctcgccaattgagaaggaaagctctctctcgtattgaatggctgcaaaaagctgatgtgcctaccatagcacagattgaagagttccattcgatgcagaggatgatgaatgctcctgattcaaatgataat

SEQ ID NO: 143137 - DNA, 262 bp, Glycine max
ctttgtggaatggattccccacaatgtgaaatccacagtctgtgacattcccccaaccggcttgaagatggcttcaacattcattggcaactctacctccattcaggagatgttccgtagagtgagtgagcaatgcactgctatgttcaggaggaaggccttcttgcattggtataccggggaaggcatggacgagatggagttcactgcggctgagagcaacatgaacgatcttgtgtcagagtatcaacagtaccaggat

SEQ ID NO: 143138 - DNA, 193 bp, Glycine max
gattttcccaatagaggtatgtggtcctaataatggttttgaaatgtggagttctgagtgggcaaatcaaacttcatggcatttgagtttccttattgacaatcccaaacagtctacagtttttgatattctcttgggaatctctcaagattttgaaattgctggtaatactcttatgccagctttttctgtt

SEQ ID NO: 143139 - DNA, 262 bp, Glycine max
ccgcaagatcaaagcacttcaccaatatgattgcttgcgagccaataaatcaacatttgcttagggtctagaagcccgtgtaccatttttggacaaggcgtttatcaatgctgcaatgagtattgaccctgagtggaagatgataaaaagagatgaaggacgaattgagaagtggattctgaggagagcctttgatgatgaagagcatccttatctgccaaagcacattttatacaggcagacagaacaattcagtgatgga

SEQ ID NO: 143140 - DNA, 263 bp, Glycine max
cgcagaagatggcaaagatagtggcagagctccaagctgtgaagcacaacagtggcaagtcctacaatcagttagcggaggagactggactcaccaacgtctatgttgctcagcttctcaggagacaggctcagctcaatccccaaactgcccctctacttcgggcagcgctgcccgacctgccccaagaccttgtttctgagatgatgagaccccctttgaggtcttatgaccctaatctcatccaagaccccactgtctat

SEQ ID NO: 143141 - DNA, 271 bp, Glycine max
cgtctttgaagtttctaagatgacttctccctacattaaatgtacagtctctttcttcatagcatttggaaatttggctgatgacaccatcaattttgaggcttttccccacaagctggtgcagtttggagagattcaggaaaaagttgtgttgaaattttcacaagaggaatttcttacagcttggtcaactcaggtgcgtcccgcaacgactctgttggctgatgggtgcccatatttgtatgctatggtgcatgatagttcagtgtct

SEQ ID NO: 143142 - DNA, 265 bp, Glycine max
gatgacattgattccgggaaccagtgttgaagaggcttacaacaagctaatagttgaacttgagaaaagtgttcccacattggttggcattgaatgtcccaaggatgaaaaacttcctcgtcgcaaaatttttgacaaacctaagacgcgctgcttcactattctccctatggagtttaatcttgtggtccgtcagaagtttttaaattttgtgaggttcattatgaagaaaagggacaagcttagttgtcaagttggaatcaac

SEQ ID NO: 143143 - DNA, 263 bp, Glycine max
cagatgcagatattcgtgaaaactttgaccggcaagaccatcacccttgaggtggaatcctccgacaccattgacaacgtaaaagctaagattcaagacaaggaagggatcccacctgaccagcagagacttatctttgcgggtaaacaacttgaggatggtcgcacccttgccgattacaacatccaaaaggaatcaaccctccatctcgtgcttcgcctcaggggtggcatgcaaatctttgtcaagactttgaccgggaa

SEQ ID NO: 143144 - DNA, 261 bp, Glycine max
atttccttttgcttgtgtgaagtgccaaagttcatattaagagagaaagagagagagagatagaagggaaaaaagcatcaaagatcatgaaacccaacttttcctttttatctaagcttttgatactgcaatatctatcagttttatgcatttctcaggaatttgatttcttctactttgttcagcagtggccaggagcatactgtgacacaaagcagagctgctgctatcctaagactgggaaacctgctgctgatttca

SEQ ID NO: 143145 - DNA, 260 bp, Glycine max
gatttgaggccaggcaagccccactcaaccaccacacctctcctcgttcacgctacccctttctgctcttcttctacctttcaagttttaaaagtataaagatggcagagacattcctatttacctcagagtcggtgaacgagggacaccctgacaagctctgcgaccaaatctccgatgctgtcctcgacgcttgcctcgagcaggacccagacagcaaagttgcctgcgaaacatgcaccaaaaccaacctggtcatg

SEQ ID NO: 143146 - DNA, 256 bp, Glycine max
ttgctatctatctcttgtttcaatttcaacaaccgttactcctgtttcgttttgagtttcaatcaagccatcatcatgtctaccgcatcgcaacccaaggccaagaaaacggcgtcgtccaagaagcccctctcccaccctcccttcgccgtgatgatagcagaggcgattgcgagtctgaaagagagaaccggttcgagccaatacgcgataaccaaatacatcgaagggaagcacaaggagttgacctgcacct

SEQ ID NO: 143147 - DNA, 259 bp, Glycine max
ctaggaccatgtccagtgttgctgcttccctttctggactgggaatggctgcaggaaacttggtgtctagttttgtcttcagcgttgtacaaaatgctacttcaagaggggggaaagaaggttgggttttggataacattaacaagggtcgttatgacaagtactactgggttatttctggactcagtgctcttaatatagtgtattatctaatatgcagttgggcttatggacctaccgttgagcaagtacaagtacg

SEQ ID NO: 143148 - DNA, 257 bp, Glycine max
gatggattgcgttgctggttcgagtttgtttccgttgcatcgttgcaaaaccattcacctggtgaggcacgcgcaggggatccacaatgtggagggtgacaagaactacaatgcctacatcaaccccgattatttcgatgctcatctcactcccttgggatggcaacaggttgacaatttgcgtaacatgttcgtgactctggccttatcaacaccattgatctcgtcattgcatctcctatgatgaggactctaca

SEQ ID NO: 143149 - DNA, 257 bp, Glycine max
gtttggagagattcaggaaaaagttgtgttgaaattttcacaagaggaatttcttacagcttggtcaactcaggtgcgtcccgcaacgactctgttggctgatgggtgcccatatttgtatgctatggtgcatgatagttcagtgtctacaataccaggtgattttgtcattggtgttaagttgacaaccataaacaatatgtgtgcatatgggctcaatcctggtatttcaggttctcgtcttttgggcaccattc

SEQ ID NO: 143150 - DNA, 265 bp, Glycine max
gttcctacattggttggcattgaatgtcccaaggatgagaaacttcctcgtcgcaaaatttttgacaaacctaagacgcgctgcttcactattctccctatggagtttaatcttgtggtccgtcaaaagtttttaaattttgtgaggttcattatgaagaaaagggacaagcttagttgtcaagttggaatcaacccatactccatggaatggactggtttggccaatagattactgagtaagggcaatgatattctgtgttgcg

SEQ ID NO: 143151 - DNA, 260 bp, Glycine max
ggtttgcagtcactgctttgtttagatcagaaccagatcgtgttctcttcttccattggcaaacatggcaactcaaatgagcaagaagagaaagtttgtggcggatggagtgttcttcgccgaactgaacgaggttctgacacgtgagttggcggaggacggttactccggcgtggaggttagggttacgccgatgcgcaccgagattatcatcagagccaccagaacccaagccgttctcggtgagaagggaaggagaa

SEQ ID NO: 143152 - DNA, 258 bp, Glycine max
cgtttctggtggcattggatactggcagtgacttgttctggttaccttgcaattgtaccaaatgtgtgcatggtataggcttatcaaatggagagaaaattgcttttaatatctatgatcttaaaggatcatccacaagccaacccgttttgtgcaatagcagcttatgtgagctacagagacaatgcccttcatctgataccatctgtccatatgaagtaaactatctatcgaatggtacttcaactactggattcc

SEQ ID NO: 143153 - DNA, 256 bp, Glycine max
tggcaacagtgagaacaccattgaattttgattctagcaagcagagcttttgtcaattttctattgaccttctcggtggaggaattttagtggacaaaactggagattggatcacacttatacaaaattctccaattagtaacttgttgagagttgctgcttggaagaaaggttgtttaatggtcaagattgtgatgtctgggaatgcagcagtcaaaaggagtgattgggcctcattggtacaagtgtttttaac

SEQ ID NO: 143154 - DNA, 256 bp, Glycine max
atcaaacttcatggcatttgagtttccttattgacaatcccaaacagtctacagtttttgatattctcttgggaatctctcaagattttgaaattgctggtaatactcttatgccagtcttttctgttccacaggctactgccagatcttctgaaaatgcggaatcctctgcatgatctggaattcgtgttttctttcgcttgttcgtttgtttaattcaataaaggaaattaggcatgaccctcttgttgagtat

SEQ ID NO: 143155 - DNA, 249 bp, Glycine max
gatttgaggccaggcaagccccactcaaccaccacacctctcctcgttcacgctacccctttctgctcttcttctacctttcaagttttaaaagtataaagatggcagagacattcctatttacctcagagtcggtgaacgagggacaccctgacaagctctgcgaccaaatctccgatgctgtcctcgacgcttgcctcgagcaggacccagacagcaaagttgcctgcgaaacatgcaccaaaacca

SEQ ID NO: 143156 - DNA, 255 bp, Glycine max
ggttggcattgaatgtcccaaggatgagaaacttcctcgtcgcaaaatttttgacaaacctaagacgcgctgcttcactattctccctatggagtttaatcttgtggtccgtcaaaagtttttaaattttgtgaggttcattatgaagaaaagggacaagcttagttgtcaagctggaatcaacccatactccatggaatggactggtttggccaatagattactgagtaagggcaatgatattctgtgttgcga

SEQ ID NO: 143157 - DNA, 257 bp, Glycine max
ctctcgagccgaatcggctcgagcgtcgcaaaatttttgacaaacctaagacgcgctgcttcactattctccctatggagtttactcttgtggtccgtcaaaagtttttaaattttgtgaggttcattatgaagataagggacaagcttagttgtcaagttggaatcaacccatactccatggactggactggtttggccaatagattactgagtaagggcaatgatattctgtgttgcgattatgctagttttgat

SEQ ID NO: 143158 - DNA, 266 bp, Glycine max
  unsure (1)..(266): unsure at all n locations
ctggtgcagttatgggttttctccttgctgcaaatggtcttttggttctttacattggccatcaacttgtttcnagnctgactatggtgatgactgngngtggtctnnttgagcggccatcacctggttatggtcttgngtgggtcttctatgggcnttgtntggaagagtttggtggaggtatctatgactaaggctgctgatgttgtgtgctgatcttgtcggaaaggttgaaanaaacatccccgaagatgatccangaaatc

SEQ ID NO: 143159 - DNA, 261 bp, Glycine max
gcagaagaaggcaaagatagtggcagagctccaagctgtgaagcacaacagtggcaagtcctacaatcagttagcggaggagactggactcaccaacgtctatgttgctcagcttctcaggagacaggctcagctcaatccccaaactgcccctctacttcgggcagcgctgcccgacctgccccaagaccttgtttctgagatgatgagaccccctttgaggtcttatgaccctaatctcatccaagaccccactgtcta

SEQ ID NO: 143160 - DNA, 257 bp, Glycine max
atcccactttggaagatatctcacattcagcttggtgtcttttgtgctgggacagtgataaaactttgccaaataatttttctgcagaattgctctcttgcaaattggatactgttactggtcaatattatcctgagtgggctccaattaattgtcgagttcatcgacaaccaattcacatcactgaaggaaattatgtcagatagcaagatgtcagcattgaatatgatgcatgtacaattccaaatgattgtggt

SEQ ID NO: 143161 - DNA, 257 bp, Glycine max
tttctatctatctcttgtttcaatttcaacaacggttactcctttttcgttttgagtttcaatcaagccatcatcatgtctaccgcatcgcaacccaaggccaagaaaacggcgtcgtccaagaagcccctctcccaccctcccttcgccgtgatgatagcagaggcgattgcgagtctgaaagagagaaccggttcgagccaatacgcgataaccaaatacatcgaagggaagcacaaggagttgcctgcaaccta

SEQ ID NO: 143162 - DNA, 255 bp, Glycine max
gctctcaagactgtgaattatggaatcctgcttgcacaaaagcaatgactatgtcatttaatccaaacccgtgttctgatgcatggagtttggaatttctgaagcgtaccggatttcattgtgatatcatttgtgtcactggatggactgccaccccaatgcaggatgttcaggttacaattgattggtttatttcctctcaggaatgtgttcccaggacctattgtgttttaaatccacaaaatccttttgtgt

SEQ ID NO: 143163 - DNA, 254 bp, Glycine max
cgcacctgctgttggcttgttgttcaaggatggcaatttgtaagacagatgtttggagagttgaatgtggaatcccttctggatttccgctcacagttatttgcaatagcatttttaatgagatgctcattagatatagctatgaaaaatttctgcgccaggctaaagctccaagtatgtttttacaatccttcaaaaattttgtttctttgtgtgtgtatggtgatgataacttaattagtgttcatgaatat

SEQ ID NO: 143164 - DNA, 254 bp, Glycine max
cgttcatgtatgaagtcacagatggcatctccaggatttacagatgtttttgctgctttggttgctgtcgttaatactaagtttcctgaagtgggggatcttttgctaagaaggattgttttgcagcttaagagagcttataagcggaatgacaagcctcaattactagcagctgttaaatttatagcgcatctggtgaatcagcaagtggctcatgagatcattgctctagagttactcacagttttactcga

SEQ ID NO: 143165 - DNA, 255 bp, Glycine max
atttgggattgggaaggcgagggattgcgctgcgtctcttcctcttctctttcgattcatccctcattcataatcttccaatccaacaacctcagcctcacactcacacatacacacatctgaacgcgtatcgtccctcccatggcttcaaagcgcatcctcaaggagctcaaggacttgcagaaagacccaccaacttcttgcagcgctggtccagtagctgaggacatgttccattggcaagcaacgattatg

SEQ ID NO: 143166 - DNA, 254 bp, Glycine max
caaaaatggcgaaaaaggcaaaaggagatttgtctctggggatggtgaagagatgacattgattccaggaaccagcgttgaagaggcttacaacaagctaatagttgaacttgagaaaagtgttcctacattggttggcattgaatgtcccaaggatgagaaacttcctcgtcgcaaaatttttgacaaacctaagacgcgctgcttcactattctccctatggagtttaatcttgtggtccgtcaaaagtttt

SEQ ID NO: 143167 - DNA, 251 bp, Glycine max
cacagaagaagactatcagaaagaacttgagcatattgaaaaggttttcacaccattggttgagcaatgtaagaactatgggagagcaatgcgcattgggacaaaccatggaagtctttctgatcgtataatgagctactatggagactcgcctaggggaatggtagaatctgcttttgaatttgcaaggatatgccgaaagttagactatcacaattttgttttttctatgaaagcaagcaacccagtta

SEQ ID NO: 143168 - DNA, 254 bp, Glycine max
gacaaaactagtgcaactttgcaatttagaaagttagcagattgtgattttctcaagagaaactttaagcagatgtctaatgttttatgggtggctcctgaggacaaggcgagtttatggtcacaacttcattatgtttcgtgcaataatctggaaatgcaagaagcttatcttgtcaatctcgtaaatgtgttacgagaattgtatttgcacagtccagaggaagctcgccaattgagaaggaaagctctctc

SEQ ID NO: 143169 - DNA, 203 bp, Glycine max
cgtttttgagcaacttcgtgttgttcgtgatggtcaacttcgaatagtcatctctccagacctaaagatatgctcttgggaattttgtgctcggcgccatgaagagctcatcaccagaagattgttaatacctcaggttagtcaacttggagcagttgctcacaaataccaggcaataactcaaaatgcaacacccaatttat

SEQ ID NO: 143170 - DNA, 252 bp, Glycine max
tggacattttttcaaaaatctgactcagaaagtgcgagtccaaattgttacatctgaaaagagttactggcatgtgtatgatcctgacaagtttcagatgtttgacaacagtgaaataggtctttattctaatcccactttggaagatatcccacattcagcttgggaccttttttgctgggacagtgagaaaactttgccaaataatttttctgcagaattgctctcttgcaaattggatactgttactgg

SEQ ID NO: 143171 - DNA, 250 bp, Glycine max
ctcaagctatcacgaagtcagcggatggctcattctctttaaagaccaacaaaggtacagtggacggtttctcacatattatgtttgctacaggacgcagacctaatactcagaacttaggcctggagtctgttggtgtgaaactagctaaagatggagctatagaggttgatgaatactctcaaacatcagtttcttcaatttgggcagttggagatgttacaaacaggataaatctcaccccagttgc

SEQ ID NO: 143172 - DNA, 254 bp, Glycine max
gcagattgaaccagacatgaattcaaggtttcagcttttgagtaccactaccaatggtgattttgttcaagggaaagatctcgcaatggttaaagttaatgtagcatgtgctgctgttggcttgacatcaagttacactccaactccattgttggaatctggtttgcaaaaagacagagggttaattgtggagtattttggaaggatgtcttacgttgctcataacgttaatcagccccaagagaaagatttgt

SEQ ID NO: 143173 - DNA, 255 bp, Glycine max
ggggcagtatgggatccgcagtaggtgagaaaatcacccgtttggtagaatatgctactaatcaacttttacctcttattctggtatgtgcgtccggaggagcgcgtatgcaagaaggaagtttgagcttgatccaaatggctaaaatctcttctgctttatatgattatcaaaaaaataaaaagttattctatgtatccatacttacatctcccactactgggggggtaactgctagttttggcatgttggggg

SEQ ID NO: 143174 - DNA, 257 bp, Glycine max
ggcattgaatgtcccaaggatgagaaacttcctcgtcgcaaaatttttgacaaacctaagacgcgctgcttcactattctccctatggagtttaatcttgtggtccgtcaaaagtttttaaattttgtgaggttcattatgaagaaaagggacaagcttagttgtcaagttggaatcaacccatactccatggaatggactggtttggccaatagattactgagtaagggcaatgatattctgtgttgcgattatgc

SEQ ID NO: 143175 - DNA, 179 bp, Glycine max
aacaacaataagatcccatctttcccactcatgaagagacttaacagctcagattcttccactgccctcatgacaatttttccatcatcatcaacagaggaacatagtccgaggaacagccaccacatgtatggcagggatttccgatcgatgttggacggactcgacgaggaagggtg

SEQ ID NO: 143176 - DNA, 257 bp, Glycine max
attatatacccacgcaatagaagggagtgctactctcttcgccgctctctctctccttctcgctctttcagctttgacttttgttggaaactaaggcctaatcaaaatggtgaagttcacagctgaagagctacgtcgtattatggactataagcataatatccgtaatatgtctgtcattgctcatgttgatcacggaaaatcaaccctcactgattctcttgtggctgctgctggtattattgctcaagaagttg

SEQ ID NO: 143177 - DNA, 251 bp, Glycine max
cgcagaattgctctcttgcaaattggatactgttactggccaatattatcctgagtaggctccaattaattgtcgagttcatcgacaaccaattcacatcactgaaggaaattatgtcagaaagcaagatgtcagcattgaatatgatgcatgtacaattccaaatgattgtggttcattggttgttgccaaggttggaaatcacaaacaaattgttggtttccatgttgctggaagcaaaggaagactgg

SEQ ID NO: 143178 - DNA, 249 bp, Glycine max
ctgtgatgatggaaatatttgtacaaatgttgaagagcatctatgaaacagaagttacagattggccagtaccactgaaaatcatttctggaaccattcttgcaacaattttgggaacaaccttctggaaactcttttcctttcttagagatgctggtaatgggggagtttttgttggcaatgttgcttcagcattcacaacttcaagtgtgcttgaggcccaaagtagaaagcccaacagatatgaag

SEQ ID NO: 143179 - DNA, 257 bp, Glycine max
cgtgtcgagctcgagccgaaataggtggatgggaaaactgactttccctcagggcacttcccgaagtgataagagaatgcctctttctatagggggaggagctggtgcaaagaatgctattctcatgaatatgccaaatgttgttctttcaatgtggagatattttgttggagatctcgtctttgaagtttctaagatgacttctccctacattaaatgtacagtctctttcttcatagcatttggaaatttggctg

SEQ ID NO: 143180 - DNA, 240 bp, Glycine max
agatcccggtggccttttccctctctttctctggaaaattcccccgattttctcgagaaagtgaaacggaattatgagctttcaggacatcgaggctgggcggcccttcagttcgaggcgcgggttgatgaacgggaagcaagacccgacgcaagcggtggctgccggaatattccagatcaacaccgccgtctccaccttccagagactcgtcaacaccctcggaacccccaaagacac

SEQ ID NO: 143181 - DNA, 166 bp, Glycine max
taagatttgaaattgtaataaaccgcgatcacaggttgccgcaccttaaaaccggaaacaaaagcaatcgttacttgatttcaagaatttctcaatttcttcctacttctttgtgtacgatttcttaagggaaagaaaatcactctctgtgctggtcacagacttc

SEQ ID NO: 143182 - DNA, 253 bp, Glycine max
ctcgagccgcaacttcaagtgtgcttgaggcccaaagtagaaagcccaacagatatgaagtttcccaatacagatatcgcaatgtgccaataaagcgcagagcatgggttgaaggccagatgtctttcgatcagtctgtagtagcaattatgtctaaatgcaaagccagcatgagaatgggaaacactgatgctcaaattttgatggttccagggcgcagattcatagctcatggacattttttcaaaaatct

SEQ ID NO: 143183 - DNA, 250 bp, Glycine max
tatttacaccatctgctctcaagactgtgaattatggaatcctgcttgcacaaaagcaatgactatgtcatttaatccaaacccgtgttctgatgcatggagtttggaatttctgaagcgtaccggatttcattgtgatatcatttgtgtcactggatggactgccaccccaatgcaggatgttcaggttacaattgattggtttatttcctctcaggaatgtgttcccaggacatattgtgttttaaat

SEQ ID NO: 143184 - DNA, 168 bp, Glycine max
tgaaattttgataaaccgcgatcacaggttgccgcaccttaaaaccggaaacaaaagcaatcgttacttgatttcaagaatttctcaatttcttcctacttctttgtgtacgatttcttaagggaaagaaaatcactctctgtgctggccacagacttcgtgaatcat

SEQ ID NO: 143185 - DNA, 255 bp, Glycine max
gcaagatgtcagcattgaatatgatgcatgtacaattccaaatgattgtggttcattggttgttgccaaggttggaaatcacaaacaaattgttggtttccatgttgctggaagcaaaggaagactgggatatgcttcattgataccatatgttgagccagttgtgcaagctcaaagtgctgaagtttactttgacttcttccctgtggaggttgatagtcaagagggagttgctcacattggtgaattgaaatc

SEQ ID NO: 143186 - DNA, 257 bp, Glycine max
ctctctctcaccaaagccttcctagaacgataaaaaaaagaagagcaattttccctcaccaaagaagaagaagcaaacaatggccgatcaacttaccgatgaacagatctccgagttcaaggaagccttcagcttgttcgacaaggacggcgatggttgcatcacaaccaaggagcttggaactgttatgcgttcattggggcaaaacccaactgaggcagagctccaggacatgatcaatgaagtggatgctgatg

SEQ ID NO: 143187 - DNA, 259 bp, Glycine max
aacaaatttgtttaaattgtctcttgatgatgttgaaactcctaaaggttctatgttggatcttaaaatttctcaatctaaaattgcacttcccaagaacacagttggaggaaccattctgcgtagtgatctattggcaaattttttgacagagggcaattttagagcaagtgttgatttgcagcgcactcatcgtattaaaggaatgattaaaatggtggccacagttggtattcctgagaatacaggtatagcattg

SEQ ID NO: 143188 - DNA, 257 bp, Glycine max
gccatagagactgctattgcattgacttatctccatgcctctgacatcattcaccgtgacgtgaaaacaaacaacattctccttgacaacaacttttgtgttaaggtagccgattttgggctttcaagagactttcccaacaatgtcacacatgtctccacagctccacaagggtccccgggttaccttgaccctgaatattacaattgttatcagcttactagtaagagtgatgtgtatagttttggagttgtgct

SEQ ID NO: 143189 - DNA, 246 bp, Glycine max
ctcttagaaagaaaaaaacttaaatcagaatacttaatagcatggcgatacatttatacaaaccttctaccccaagcacacgcaatggagccgtagacagtcaagtaaaatccaatccacgaaatcatttacatctatggacagcatcgttgtggtaaaggccgtaatgccagaggaatcattaccgcagtccatagagggggaggtcataagcgtctataccgtaaaattgattttcgacggaat

SEQ ID NO: 143190 - DNA, 247 bp, Glycine max
taattgtcgagttcatcgacaaccaattcacatcactgaaggaaattatgtcagaaagcaagatgtcagcattgaatatgatgcatgtacaattccaaatgattgtggttctttggttgttgccaaggttggaaatcacaaacaaattgttggtttccatgttgctggaagcataggaagattgggatatgcttcattgataccatatgttgagccagttgtgcaagctcaaagtgctgaagtttac

SEQ ID NO: 143191 - DNA, 249 bp, Glycine max
ctcttagaaagaaaaaaacttaaatcaaaatacttaatagcatggcgatacatttatacaaaacttctaccccaagcacacgcaatggagccgtagacagtcaagtaaaatccaatccacgaaatcatttgatctatggacagcatcgttgtggtaaaggccgtaatgccagaggaatcattaccgcagggcatagagggggaggtcataagcgtctataccgtaaaattgattttcgacggaatgaaa

SEQ ID NO: 143192 - DNA, 249 bp, Glycine max
ccaaattgctcagggaactcaatggatgactcttcttcaagcgcttgccgcaagacctggcggtgctccccatgtgcggatcacagggattgatgatcctgtttccaaatatgctcgtggcgacggaccagaagttgttggcaaaaggttggccttgatgtctgagaaatttggcatcccagttgagtttcatggggtgccagtttttgctccagatgtgacaagggaaatgcttgatatcaggccagg

SEQ ID NO: 143193 - DNA, 251 bp, Glycine max
caacgttatgacagaatgcgacaggaagctgaagcccaggctattgaagtttctaaacgccaggcaaaagtaagagaaatgccacccagtgcagagaatactatgaaattagaagcagctgaagctaagctgcaagatctgaagacaaacatgaccatactggggaaggaagcagctgcagctttggctgctgttgaagcacagcaacagaggttaactcttcagcgtattatagctatggttgaagctga

SEQ ID NO: 143194 - DNA, 254 bp, Glycine max
aagaaaatcctcaattttctgagcagccaaacactctctctctgtctctcgaaaattctcagtttgcagagaaaatctgaatcatgtcgtggcaagcgtatgtcgacgatcaccttctgtgtgacatcgaaggtaaccacctcactcacgctgctatcatcggccaagacggcagcgtttgggctcagagtaccgacttccctcagttcaaacctgaggagataactgccatcatgaatgactttaatgagcct

SEQ ID NO: 143195 - DNA, 253 bp, Glycine max
gtttcaacatcatcaagagacaatttaaactcctaaaggttctatgttggatcttaaaatttctcaatctaaaattgcacttcccaagaacacagttggaggaaccattctgcgtagtgatctattggcaaattttttgacagagggcaattttagagcaagtgttgatttgcagcgcactcatcgtattaaaggaatgattaaaatggtggccacagttggtattcctgagaatacaggtatagcattggcc

SEQ ID NO: 143196 - DNA, 252 bp, Glycine max
aatttgtaagaaagatgtttggagagttgaatgtggaatcccttctggatttccgctcacagttatttgcaatagcatttttaatgagatgctcattagatatagctatgaaaaattactgcgccaggctaaagctccaagtatgtttttacaatccttcaaaaattttgtttctttgtgtgtgtatggtgatgataacttaattagtgttcatgaatatgtcaagccttactttagtggttctaaattgaa

SEQ ID NO: 143197 - DNA, 253 bp, Glycine max
  unsure (1)..(253): unsure at all n locations
gttccactgactataagatttagnntgatggaaactcccaaggaatggcaactggatctaccttacgacaagaaccctagtgtcttgactacaactgatgagagattggtaggcacagaacatgagggatatgatccttttcttggtggaattcaaaaatatgccactcccatgatgcccctagatgaagaaattctttctaaggttgcacaagatattgttgaggaatggtttgattgtgttgatgaggagg

SEQ ID NO: 143198 - DNA, 254 bp, Glycine max
acgtgcttttactaccttcaatgctttttggaagaaatgcttgcacatgcaaatggatattgtttcagttgttcctccatggcaattaattccagctgaaggaaaaattgaggaatgttcattggaggaacttggtcttgaaaatgaatcagaaaaaccaagtaatgcattgctaggacgggcatggtcaccgggttggagaaatgctgacaaggctttaagagaatttgtggagcttcatctacttcactact

SEQ ID NO: 143199 - DNA, 255 bp, Glycine max
atctattggcaaattttttgacagagggcaattttagagcaagtgttgatttgcagcgcactcatcgtattaaaggaatgattaaaatggtggccacagttggtattcctgagaatacaggtatagcattggcctgtgctatgaatagttcttttagggggcgcgccagttctgatatttacaccatctgctctcaagactgtgaattatggaatcctgcttgcacaaaagcaatgactatgtcatttaatccaa

SEQ ID NO: 143200 - DNA, 244 bp, Glycine max
gttgtgcaagctcaaagtgctgaagtttactttgacttcttccctgtggaggttgatagtcaagagggagttgctcacattggtgaattgaaatctggtgtctatgttccactgcctacaaaaactaatttgatggaaactcccaaggaatggcaactggatctaccttgtgacaaaattcctagtgtcttgactacaactgatgagagattggtaggcacagaacatgagggatatgatcctt

SEQ ID NO: 143201 - DNA, 244 bp, Glycine max
agcaattaatgataatacggaacaaagtattagaagtatagtgtctgagccctctccaggcatttttatatttgacatatttcagacccacttttgtgagttattgctatctgagattgaaaattttgagaagtgggtgaatgaaactaaatttcggatcatgcgtccgaatacaatgaataaatttggtgctgtacttgatgactttggacttgaaacaatgcttgacaagcttatggaaggt

SEQ ID NO: 143202 - DNA, 245 bp, Glycine max
ggcaattttagagcaagtgttgatttgcagcgcactcatcgtattaaaggaatgattaaaatggtggccacagttggtattcctgagaatacaggtatagcattggcctgtgctatgaatagttcttttagggggcgcgccagttctgatatttacaccatctgctctcaagactgtgaattatggaatcctgctttcacaaaagcaatgactatgtcatttaatccaaacccgtgttctgatgc

SEQ ID NO: 143203 - DNA, 162 bp, Glycine max
ccgcgatcacaggttgccgcaccttaaaaccggaaacaaaagcaatcgttacttgatttcaagaatttctcaatttcttcctatttctttgtgtacgatttcttaagggaaagaaaatcactctctgtgctggtcacagacttcgtgaatcattttcttgtc

SEQ ID NO: 143204 - DNA, 248 bp, Glycine max
aaaagacagagggttaattgtggagtattttggaaggatgtcttacgttgctcataacgttaatcagccccaagagaaagatttgttagagggaaatttttcctttgatattaaatctcgctctagattggaaaaagtttcctctacaaaagcacaatttgttagtggaaaaaccttcaaatatgatataattggtgctggttcacattcttcaggagattttcctgaaaaggaagatcaagaaaaac

SEQ ID NO: 143205 - DNA, 249 bp, Glycine max
aaaaaattactgcgctaggctaaagctccgaggatgtttatacaatccttcaaaaattctgtttctgagtgcgtgtatggtgatgataacttaattagtgtacatgaatatgttaagcctaactttagtggtgctaaattgaaaagctgtctagctggtcataatatcaccattactgatggaattgacaaaactagtgcaactttgcaatttagaaagttagtagattgtgatgttctcaagagaaac

SEQ ID NO: 143206 - DNA, 250 bp, Glycine max
gttcaacatagatgagtaatattttttaatgattgatgaatagagtgtatgaatgaaccaaagcaatttattattaaatcatttttcaggaaactgctttaaatcatgtcaccagctctgggattggtggagaaggatttggagcaacccgcgagatgagccttagaaaactcatttgggtggttactcgtattcaagttcaagtgcaaagatataacaaatggggagacgaaattgaagttgatacttg

SEQ ID NO: 143207 - DNA, 252 bp, Glycine max
aggaaattcagcttcactccaagaaaattttgtccaatgtctcaacttgaattcggacagaacattcccatttaacccactaatttacacaccaaaaagtccttcattcaccagtgtccttgactcctccggcaagaatcaaaggcttttggtgccttcaacaccaaaaccaaagttcatattcacaccaacccgtgattcccatgtttaagcagcggtaatctgctccaagaaacttggcattcatcttag

SEQ ID NO: 143208 - DNA, 173 bp, Glycine max
gaaattttaataaaccgcgatcacaggttgccgcaccttaaaaccggaaacaaaagcaatcgttacttgatttcaagaatttctcaatttcttcctacttctttgtgtacgatttcttaagggaaagaaaatcactctctgtgctggtcacagacttcgtgaatcattttctt

SEQ ID NO: 143209 - DNA, 268 bp, Glycine max
ccggctcgagctcgagatcagaaccttaatcgtccccctcatgctctccgcctcccccaaaatccaatctcagctcagcgaacccttgccctaatcggtcaccacgatttccccaaatcctggccctctctcctccccgaactcatcgcaaatctccaaaaagcctcccagtcctccgattacgcctccattaacggtattctcggcactgctaactctattttcaagaaatttaggtttcagtataaaaccaatgacctattgctcg

SEQ ID NO: 143210 - DNA, 243 bp, Glycine max
catatatcagacaacttcctcaatatcctcgccaacctttagctcaagtcttcccccatgttcatcccgcagccattgatcttgttgataaaatgctgacagttgatcccaccaaaagaattacagttgaagaagcactagcccatccataccttgaaaaactgcatgatgtagctgatgaaccaatctgcatggagccattctcatttgattttgagcaacagcaattggatgaagagcaaa

SEQ ID NO: 143211 - DNA, 196 bp, Glycine max
aagatttgaaattttaataaaccgcgatcacaggttgccgcaccttaaaaccggaaacaaaagcaatcgttacttgatttcaagaatttctcaatttcttcctacttctttgtgtacgatttcttaagggatagaaaatcactctctgtgctggtcacagacttcgtgaatcattttcttttccacacaacatacg

SEQ ID NO: 143212 - DNA, 243 bp, Glycine max
gcttgttctttgcttatgttggtgctggtggtcttagttttcttcagttctgcaacctcaacagttttagaacaaagttcattttaggcttctcaatcttcataggcttgtctgtgccacagtacttcaacgagtacacagcaattaatggctatggtccagttcacacaggcgcaagatggttcaatgatataatcaacgtcccattccaatcaaaaccatttgttgcgggtgttgtggcat

SEQ ID NO: 143213 - DNA, 245 bp, Glycine max
taacactcagtctctgaattggggctgagggtttcgagtaacgtttatttttcacgagtttaagatatcatgggtaaagagaaggttcacattaacattgtggtcattggccatgttgactctgggaagtcaaccaccactggccacttgatttacaagcttggaggtattgacaagcgtgttattgagaggtttgagaaagaagctgctgagatgaacaagaggtcattcaaatacgcctgggt

SEQ ID NO: 143214 - DNA, 153 bp, Glycine max
tgagaatacaggtatagcattggcctgtgctatgaatagttcttttagggggcgcgccagttctgatatttacaccatctgctctcaagactgtgaattatggaatcctgcttgcacaaaagcaatgactatgtcattgtaatccaagacccg

SEQ ID NO: 143215 - DNA, 248 bp, Glycine max
taaatgcaaagccagcatgagaatgggaaacactgatgctcaaattttgatggttccagggcgcagattcatagctcatggacattttttcaaaaatctgactcagaaagtgcgagtccaaattgttacatctgaaaagagttactggcatgtgtatgatcctgacaagtttcagatgtttgacaacagtgaaataggtctttattctaatcccactttggaagatatcccacattcagcttgggacc

SEQ ID NO: 143216 - DNA, 250 bp, Glycine max
taaacgccgcccaaaaccatttatagggttttcttttctttgccaagaaaatgagagagtgcatttcaatccacattggtcaggccggtatccaggtcggaaacgcctgctgggaactctattgccttgaacacggcattcagcccgatgggcagatgccgagtgacaagaccgttggaggaggagacgacgccttcaacacattcttcagcgagaccggcgccggaaagcacgtgcctcgcgccgtctt

SEQ ID NO: 143217 - DNA, 240 bp, Glycine max
aaaaaaaaaaaaaaaaaaaaaaaaaaaaaaaaaaaaaaaaaaaaaaaaaaaaaaaaaaaaaaaaaaaaaaaaaaaaaaggggggcgggccacttctggccgggccccccctgggtgtttttgctgggcgggttcgcgggggggggcccctcttcccccgggggggttctttcggagatggggttgtctggggcgccgggcccccccccccccccccccccgccccccccccgcccccccc

SEQ ID NO: 143218 - DNA, 240 bp, Glycine max
  unsure (1)..(240): unsure at all n locations
ggtaattgatttnnagggtttgactactcatggattatgatggtatgagaaaaccttccaaaaacttatttcattcctcgcttcttcctttttgggttctattgctgggattgggagttcttgaccgctctcctcctttttagttcttccccttaatcttctttcttcacaatttttatntccttccttattagacgtattagatcagattgaacaaaagggttttnctttctttctntc

SEQ ID NO: 143219 - DNA, 229 bp, Glycine max
ctggtaatactcttatgccagctttttctgttccacaggctactgccagatcttctgaaaatgcggaatcctctgcatgatcacgaattcgtttttctttcgcttgttcgtttgtttaattcaataaaggaaattaggcatgaccctcttgttgagtatgctctgcctatctgaaaatttccacacctcttttaattgtcgtaatgatgtgtgaagtgtgtgttatttt

SEQ ID NO: 143220 - DNA, 188 bp, Glycine max
agctttttctgttccacaggctactgccagatcttctgaaaatgcggaatcctctgcatgatctggaattcgtgttttctttcgcttgttcgtttgtttaattcaataaaggaaattaggcatgaccctcttgttgagtatgctctgcctatctgagaatttccacacctcttttaattgtcgtaatg

SEQ ID NO: 143221 - DNA, 241 bp, Glycine max
aaatctcgctctagattggaaaaagtttcctctacaaaagcacaatttgttagtggaaaaaccttcaaatatgatataattggtgctggttcacattcttcaggagattttcctgaaaaggaagatcaagaaaaacccaaaaagattgataccagattgagacaaagaatagaacctcaatacaatgaggttcaggctcagatggaaacaaatttgtttaaattgtctcttgatgatgttg

SEQ ID NO: 143222 - DNA, 246 bp, Glycine max
gggtgcccatatttgtatgctatggtgcatgatagttcagtgtctacaataccaggtgattttgtcattggtgttaagttgacaaccataaacaatatgtgtgcatatgggctcaatcctggtatttcaggttctcgtcttttgggcaccattcctcagtccatttcacagcaaactgtttggaatcaaatggcaacagtgagaacaccattgaattttgattctagcaagcagagctattgtcaa

SEQ ID NO: 143223 - DNA, 246 bp, Glycine max
atgttccactgcctacaaaaactaatttgatggaaactcccaaggaatggcaactggatctaccttgtgacaaaattcctagtgtcttgactacaactgatgagagattggtaggcacagaacatgagggatatgatccttttcttggtggaattcaaaaatatgccactcccatgatgcccctagatgaagaaattctttctaaggttgcacaagatatggttgaggaatggtttgattgtgttg

SEQ ID NO: 143224 - DNA, 246 bp, Glycine max
gttcattggttgttgccaaggttggaaatcacaaacaaattgttggtttccatgttgctggaagcaaaggaagactgggatatgcttcattgataccatatgttgagccagttgtgcaagctcaaagtgctgaagtttactttgacttcttccctgtggaggttgatagtcaagagggagttgctcacattggtgaattgaaatctggtgtctatgttccactgcctacaaaaaccaatttgatgg

SEQ ID NO: 143225 - DNA, 120 bp, Glycine max
caggttgccgcaccttaaaaccggaaacaaaagcaatcgttacttgatttcaagaatttctcaatttcttcctacttctttgtgtacgatttcttaagggaaagaaaatcactctctgtg

SEQ ID NO: 143226 - DNA, 239 bp, Glycine max
cccaaggaatggcaactggatctaccttgtgacaaaattcctagtgtcttgactacaactgatgagagattggtaggcacagaacatgagggatatgatccttttcttggtggaattcaaaaatatgctactcccatgatgcccctagatgaagaaattctttctaaggttgcacaagatatggttgaggaattgtttgattgtgttgatgaggaggattcctttgaggaagtttcttt

SEQ ID NO: 143227 - DNA, 236 bp, Glycine max
ctggtttggccaatagattactgagtaagggcaatgatattctagtgttgcgattatgctagttttgatggtttgattaccaagcaagttatgagcaagatggcagaaatgataaacagtctttgtggtggtgatgaaaaattgatgcgtgaaaggacgcacctgctgttggcttgttgttcaaggatggcaatttgtaagacagatgtttggagagttgaatgtggaatcccttc

SEQ ID NO: 143228 - DNA, 230 bp, Glycine max
cccggatttcattgtgatatcatttgtgtcactggatggactgccacgccaatacaggatgttcaggttacaattgattggctgatttcctctcaggcatgtgttcccaggacgtcttgtgttttaaatccacaaaatccttaggtgttaaataggtcgttgggaaaactgactttccctcagggcacttcccgaagtgtgaagagaatgcctctttctatagggggagg

SEQ ID NO: 143229 - DNA, 231 bp, Glycine max
aaaaattgatgcgtgaaaggacgcacctgctgttggcttggtgttcaaggatggcaatttgtaagaaagatgtttggagagttgaatgtggaatcccttctggatttccgctcacagttatttgcaatagcatttttaatgagatgctcattagatatagctatgaaaaattactgcgccaggctaaagctccaagtatgtttttacaatccttcaaaaattttgtttctt

SEQ ID NO: 143230 - DNA, 234 bp, Glycine max
gtggatgggaaaactgactttcccccagggcacttcccgaagtgttaagagaatgcctctttctatagggggaggagctggtgcaaagaatgctattctcatgaatatgccaaatgctgttctttcaatgtggagatattttgttggagatctcgtctttgaagtttctaagatgacttctccctacattaaatgtacagtctctttcttcatagcatttggaaatttggctga

SEQ ID NO: 143231 - DNA, 235 bp, Glycine max
gcacttaatggtgttgagggtttggactatatggaaagaattcctcttgccacatctgagggttttcctcatgtgctttcacgcaaaaatggcgacaaaggcaaaaggagatttgtctctggggatggtgaagagatgacattgattccaggaaccagtgttgaagaggcttacaacaagctaatagttgaacttgagaaaagtgttcctacattggttggcattgaatgtccca

SEQ ID NO: 143232 - DNA, 233 bp, Glycine max
agtgaagttcccatttaaccaaccaatgaagattacaacagtttgtggaatgctgatgactgggccacaaggggtggtttggagaaaacagattggtccaaagcccccttcgtagcctcctacaagggcttccacattgatggttgtgaggcctcagtgaatgccaagttctgtgacacacaaggcaagaggtggcgggatcaaccagagttccgtgaccttgatgctgctca

SEQ ID NO: 143233 - DNA, 233 bp, Glycine max
ggagtattttggaaggatgtcttacgttgctcataacgttaatcagccccaagagaaagatttgttagagggaaatttttcctttgatattaaatctcgctctagattggaaaaagtttcctctacaaaagcacaatttgttagtggaaaaaccttcaaatatgatataattgggtgctaggttcacattcttcaggagattttcctgaaaaggaagatcaagaaaaacccaa

SEQ ID NO: 143234 - DNA, 229 bp, Glycine max
tgacaccatcaattttgaggcttttccccacaagctggtgcagtttggagagattcaggaaaaagttgtgttgaaattttcacaagaggaatttcttacagcttggtcaactcaggtgcgtcccgcaacgactctgttggctgatgggtgcccatatttgtatgctatggtgcatgatagttcagtgtcgacaataccaggtgattttgtcattggtgttaagttgaca

SEQ ID NO: 143235 - DNA, 230 bp, Glycine max
gtcagaaagcaagatgtcagcattgaatatgatgcatgtacaattccaaatgattgtggttcattggttgttgccaaggttggaaatcacaaacaaattgttggtttccatgttgctggaagcaaaggaagactgggatatgcttcattgataccatatgttgagccagttgtgcaagctcaaagtgctgaagtttactctgacttcttccctgtggaggttgatagtca

SEQ ID NO: 143236 - DNA, 231 bp, Glycine max
caatgtacagtctctttcttcatagcatttggaaatttggctgatgacaccatcaattttgaggcttttccccacaagctggtgcagtttggagagattcaggaaaaagttgtgttgaaattttcacaagaggaatttcttacagcttggtcaactcaggtgcgtcccgcaacgactctgttggctgatgggtgcccatatttgtatgctatggtgcatgatagttcagtg

SEQ ID NO: 143237 - DNA, 235 bp, Glycine max
accagattgagacaaagaatagatcctcaatacaatgaggttcaggctcagatggaaacaaatttgtttaaattgtctcttgatgatgttgaaactcctaaaggttctatgttggatcttaaaatttctcaatctaaaattgcacttcccaagaacacagttggaggaaccattctgcgtagtgatctattggcaaattttttgacagagggcaattttagagcaagtgttgatt

SEQ ID NO: 143238 - DNA, 186 bp, Glycine max
aattttaataaaccgcgatcacaggttgccgcaccttaaaacctgaaacataagcaatcgttacttgatttcaagaatttctcaatttcttcctacttctttgtgtactatttcttaagggaaagataatcactctctgtgctggtcacagacttcgtgaatcattttcttttccacacaacatac

SEQ ID NO: 143239 - DNA, 231 bp, Glycine max
catgagcctcttcggtataggcagaaaccagagaacattccgcccgaaaaaaagtactccttctggaagtaagggagctcaacttcgaaaacatattgatgccacgttaggtagtggaaatctgagggaagcagtaaagctacctcctggggaggatttaaatgagtggctagctgtcaacactgttgatttcttcaatcaggtgaatctgctttatggtacccttacaga

SEQ ID NO: 143240 - DNA, 195 bp, Glycine max
gattgagacaaagaatagatcctcaatacaatgaggttcaggctcagatggaaacaaatttgtttaaattgtctcttgatgatgttgaaactcctaaaggttccatgttggatcttaaaatttctcaatctaaaattgcacttcccaagaacacagttggaggaaccattctgcgtagtgatttattggcaaatt

SEQ ID NO: 143241 - DNA, 216 bp, Glycine max
acttcgtgttgttcgtgatggtcaacttcgaatagttttctctccagacctgaagatatgctcttgggaattttgtgctcgacgccatgaagagctcatccccagaagattgtgaatacctcaggttagtcaacttggagtagttgctcaaaaataccaggcatttactcaaaatgcaacacccaatttatccgttccagagttacaaaataattg

SEQ ID NO: 143242 - DNA, 231 bp, Glycine max
tgtttctttgtgtgtgtatggtgatgataacttaattagtgttcatgaatatgtcaagccttactttagtggttctaaattgaaaagctttctagctggtcataatatcaccattactgatggtattgacaaaactagtgcaactttgcaatttagaaagttagcagattgtgattttctcaagagaaactttaagcagatgtctaatgttttatgggtggctcctgagga

SEQ ID NO: 143243 - DNA, 233 bp, Glycine max
ggcctgtgctatgaatagttcttttagggggcgcgccagttctgatatttacaccatctgctctcaagactgtgaattatggaatcctgcttgcacaaaagcaatgactatgtcatttaatccaaacccgtgttctgatgcatggagtttggaatttctgaagcgtaccggatttcattgtgatatcatttgtgtcactggatggactgccaccccaatgcaggatgttcagg

SEQ ID NO: 143244 - DNA, 162 bp, Glycine max
gtgttttaaatccacaaaagcctttggggttaaataggtggatgggaaaactgactttcccccagggcacttcccgaagtgttaagagaatgcctctttctatagggggaggagctggtgcaaagaatgctatgctcatgaatatgccaaatgctgttcttt

SEQ ID NO: 143245 - DNA, 235 bp, Glycine max
agcatgtgctgctgttggcttgacatcaagttacactccaactccattgttggaatctggtttgcaaaaagacagagggttaattgtggagtattttggaaggatgtcttacgttgctcataacgttaatcagccccaagagaaagatttgttagagggaaatttttcctttgatattaaatctcgctctagattggaaaaagtttcctctacaaaagcacaatttgttagtgga

SEQ ID NO: 143246 - DNA, 231 bp, Glycine max
gggcgaaacgccaagacttaaagtcattgaccaaacactgagacaacaaagggcgtttcagcaaatgagcatgatggaaacacatccttggagaccccaacgtggccttccagagcgtgccgtttcagttcttcgggcttggctctttgaacattttctccatccgtacccaagcgatgttgataagcatattttagcacgccaaaccggtctctcgagaggccaggtttc

SEQ ID NO: 143247 - DNA, 223 bp, Glycine max
ttttgacaaacctaagacgcgctgcttcactattctccctatggagtttaatcttgtggtccgtcaaaagtttttaaattttgtgaggttcattatgaagaaaagggacaagcttagttgtcaagttggaatcaacccatactccatggaatggactggtttggccaatagattactgagtaagggcaatgatattctgtgttgcgattatgctagttttgat

SEQ ID NO: 143248 - DNA, 226 bp, Glycine max
cattgtgatatcatttgtgtcactggatggactgccaccccaatgcaggatgttcaggttacaattgattggtttatttcctctcaggaatgtgttcccaggacctattgtgttttaaatccacaaaatccttttgtgttaaatcggtggatgggaaaactgactttccctcagggcacttcccgaagtgttaagagaatgcctctttctatagggggaggagctg

SEQ ID NO: 143249 - DNA, 225 bp, Glycine max
accagattgagacaaagaatagatcctcaatacaatgaggttcaggctcagatggaaacaaatttgtttaaattgtctcttgatgatgttgaaactcctaaaggttctatgttggatcttaaaatttctcaatctaaaattgcacttcccaagaacacagttggaggaaccattctgcgtagtgatctattggcaaattttttgacagagggcaattttagagca

SEQ ID NO: 143250 - DNA, 229 bp, Glycine max
tggtgatgataacttaattagtgttcatgaatatgtcaagccttactttagtggttctaaattgacaagctttctagctggtcataatatcaccattactgatggtattgacaaaactagtgcaactttgcaatttagaaagttagcagattgtgattttctcaagagaaactttaagcagatgtctaatgttttatgggtggctcctgaggacaaggcgagtttatgg

SEQ ID NO: 143251 - DNA, 232 bp, Glycine max
ctctctttgacggtggtgctgtcagcattgacctcagcttgagcagtaaaacatcatcagcactactacggtaccatggctgtgctgcaatctttcgtttcggtccacccagattctcacttccccatacagaacctcccttacggagtcttcaagccccaatccgcttcgcctcctcgtcccggcgtcgccatcggcgacttcgtcctcgacctctccgaaatatcttccg

SEQ ID NO: 143252 - DNA, 230 bp, Glycine max
ggagttctgagtgggcaaatcaaacttcatggcatttgagtttccttattgacaatcccaaacagtctacagtttttgatattctcttgggaatctctcaagattttgaaattgctggtaatactcttatgccagctttttctgttccacaggctactgccagatcttctgaaaatgcggaatccgctgcatgatctggaattcgtgttttctttcgcttgttcgtttgt

SEQ ID NO: 143253 - DNA, 223 bp, Glycine max
tttgcctccaaaaattgatccaagtgtgaccatgatgactgttgaagagaagccagatgtaacatataatgatgttggcggttgtaaggagcagattgaaaagatgcgagaagttgttgaacttcccatgcttcatccagagaaatttgtcaagcttgggattgatcctccaaagggtgttctttgttatggccccccaggaactgggaaaacacttttagcc

SEQ ID NO: 143254 - DNA, 188 bp, Glycine max; identical to SEQ ID NO: 142579

SEQ ID NO: 143255 - DNA, 224 bp, Glycine max
aacaagatctccgaggaagagtatgtaaagtcaattaaggaggaaattcgcaaagttgttgagcttcaagaagagcttgatattgatgttcttgttcatggagaaccagagagaaatgatatggttgagtacttcggtgaacaattgtcaggctttgccttcaccgttaatgggtgggtgcaatcctatggttcccgttgcgtgaagccaccgatcatctatgg

SEQ ID NO: 143256 - DNA, 227 bp, Glycine max
gtctctccgtcgattacggcaaaaagtccaaattagggttcaccatttacccttcccctcaggtttcaaccgcagtcgtggagccctacaacagcgtcctctccacccactcccttctgcaacacaccgacgtggctgttctcttggacaacgaagccatctacgacatctgtaggagatctctcgacatcgagaggcccacctacaccaacctcaacaggctcatt

SEQ ID NO: 143257 - DNA, 226 bp, Glycine max
gccatggattatccaggatttggtctctcagaaggactccattgctatattcatagttttgatggacttgttgatgatgtcattgagcattactcaaaaatcaaagaaaatccagagttccattctcttcccagcttcctatttggacagtccatgggtggagctgttgcattaaagatacacctgaaacagcctaaggcatgggatggtgccattcttgttgcgc

SEQ ID NO: 143258 - DNA, 234 bp, Glycine max
aaacagcatacctagtaaaacagcatacttccttaaagcagaaaaattatggaagcccaaagagatgagcgtgtctcaaaactacttggagctcaaacccatgtttggaatcacattttcagcttcataaattccatgtccctcaaatgtgcaattgagttggacatacctgatatcatacacaagtatggtcaacccatgccactctcaaaactcactacttcactatcaatc

SEQ ID NO: 143259 - DNA, 236 bp, Glycine max
tattgacaaaactagtgcaactttgcaatttagaaagttagcagattgtgattttctcaagagaaactttaagcagatgtctaatgttttatgggtggctcctgaggacaaggcgagtttatggtcacaacttcattatgtttcgtgcaataatctggaaatgcaagaagcttatcttgtcaatctcgtacatgtgttacgagaattgtatttgcacagtccagaggaagctcgcc

SEQ ID NO: 143260 - DNA, 229 bp, Glycine max
ttcaatgtggagatattttgttggagatctcgtctttgaagtttctaagatgacttctccctacattaaatgtacagtctctttcttcatagcatttggaaatttggctgatgacaccatcaattttgaggcttttccccacaagctggtgcagtttggagagattcaggaaaaagttgtgttgcaattttcacaagaggaatttcttacagcttggtcaactcaggtg

SEQ ID NO: 143261 - DNA, 225 bp, Glycine max
cccacggcatggcaactggatctaccttgtgacaaaattcctagtgtcttgactacaactgatgagagattggtaggcacagaacatgagggatatgatccttttcttggtggaattcaaaaatatgctactctcatgatgcccctagatgaagaaattctttctcaggttgcacaagatatggttgaggaatggtttgattgtgttgatgaggaggattccttt

SEQ ID NO: 143262 - DNA, 224 bp, Glycine max
ctctcaacaagttactaattggagagttgctgcttggaagaaaggttgtttaatggtcaagattgtgatgtctgggaatgcagcagtcaaaaggagtgattgggcctcattggtacaagtgtttttaacaaacagcaacagtacagagcattttgatgcatgtaagtggacaaaatcagaaccacattcctgggaattaatcttcccaatagaggtatgtggtc

SEQ ID NO: 143263 - DNA, 220 bp, Glycine max
caataaccagtgagagtcacaatcaaatagtagggaatgggttaatccttggaacagggctgattccatattgtgcaaccttctttgtattcactgactacatgagaggtgccataaggctttctgcgctgtctgaggctggggttatttatgtcatgacccatgattcaataggacttggagaagatgggccaacccaccagcctattgagcacctagc

SEQ ID NO: 143264 - DNA, 99 bp, Glycine max
gtggatgggaaaactgactttcccccagggcacttcccgaagtgttaagagaatgcctctttctatagggggaggagctggtgcaaagaatgctattct

SEQ ID NO: 143265 - DNA, 227 bp, Glycine max
cagtacagagcattttgatgcaatgtagtgggacaaaatcagcaagcacattccctgggacattaatcttcccaatagaggtatgtggtcctaataatggttttgaaatgtggagttctgagtgggcaaatcaaacttcatggctcttgagtttccttattgacaatcccaaacagtctacagtttttgatattctcttgggaatctctcaagattttgaaattgct

SEQ ID NO: 143266 - DNA, 225 bp, Glycine max
catgactatgtcactgaggatttggtcaacatatatcctgggataaaagatctagttaaaattacccttctggaggctggagatcatattttgagcatgtttgataaaagaattactgcttttgctgaagagaagttcggaagagatggtattgatgtgaaaactggatccatggttgtgaaggtatccgagacagaaatttctactaaagaaatgaaaaatgga

SEQ ID NO: 143267 - DNA, 230 bp, Glycine max
attggaaaaagtttcctctacaaaagcacaatttgttagtggaaaaaccttcaaatatgatataattggtgctggttcacattcttcaggagattttcctgaaaaggaagatcaagaaaaaccccaaaagattgataccagattggcgacaagaatagatcctcaatacaaatgaggttcaggctcagatggaaacaaatttgtttaaattgtctcttgatgatgttgaa

SEQ ID NO: 143268 - DNA, 253 bp, Glycine max
aaagaaatgtggataagactgtcttttgccagatagatctcgatgaagcaaaggtgaaacagttcaaggatgcaatagagaataattactggtttgaattcttcatggatgatctacctttgtggggatatgttggtgagttacatcctgataagaacagtgataatggcaagcatgtcatttacacacacaaaaacattgttgttaaatacaacaatgatcagattattcatgttaatctcactcaggatat

SEQ ID NO: 143269 - DNA, 256 bp, Glycine max
cagaatttggaacttccaaagcctaatctgatgaggaaacaacaacaacaacaacaacaacaaactcagccgaattcagagtctttgaagtgtccaagatgtgactctaccaacacaaaattttgttactacaacaactacaacaagtctcagcctcgccatttctgcagggcttgcaagaggcactggaccaaaggtggaacgctacgcaatgttccagttggtggtggaaggaagaacaagagggtaagaaaat

SEQ ID NO: 143270 - DNA, 254 bp, Glycine max
atcatttgtgtcactggatggactgccaccccaatgcaggatgttcaggttacaattgattggtttatttcctctcaggaatgtgttcccaggacctattgtgttttaaatccacaaaatccttttgtgttaaataggtggatgggaaaactgactttccctcagggcacttcccgaagtgttaagagaatgcctctttctatagggggaggagctggtgcaaagaatgctattctcatgaatatgccaaatgc

SEQ ID NO: 143271 - DNA, 255 bp, Glycine max
  unsure (1)..(255): unsure at all n locations
gaaaaagtttcctctacaaaagcacaatttgttagttggnaaaccttcaaatatgatataatgggtgctggttcacattcgtcaggagattttcctgaaaaggaagatcaagaaaaacccaaaaagattgataccagattgagacaaagaatagatcctcaatacaatgaggttcaggctcagatggaaacaaatttgtgtaaattgtctcttgatgatgttgaaactcctaaaggttctatgttggatcttaaa

SEQ ID NO: 143272 - DNA, 252 bp, Glycine max
tgactacaactgatgagagattggtaggcacagaacatgagggatatgatccttttcttggtggaattcaaaaatatgccactcccatgatgcccctagatgaagaaattctttctaaggttgcacaagatatggttgaggaatggtttgattgtgttgatgaggaggattcctttgaggaagtttctttgagtgcagcacttaatggtgttgagggtttggactatatggaaagaattcctcttgccacat

SEQ ID NO: 143273 - DNA, 252 bp, Glycine max
atggaatttcgatgctcagtcatctcttttaccattctcttctctcttgctcttgcaggagagagccatgtccatgcatcgctacctgaggaagattattgggaagctgtttggccaaacactcccattcccactgcactgcgagagcttctaaagccgctccctgcaggtgttgaaatcgatgaactccctaagcaaattgatgatacacagtacccaaaaacattcttctataaagaagaccttcatcca

SEQ ID NO: 143274 - DNA, 250 bp, Glycine max
agaatgcattaacagctgttaaaaacatgtcatctgaaactcaagaaagtggatcaattggtcatgttgctgaaatgctgaaagctaatgctagtgaaatgtcaaacataacttctgcttcagctgttatcttgaaaggagggtcaattggaacttcaaggctttctgatgttaccactctagctattggatatgtttttatattgactctaattttctgctactttggaattgttgctttaattcgtta

SEQ ID NO: 143275 - DNA, 246 bp, Glycine max
ggctgatgacaccatcaattttgaggcttttccccacaagctggtgcagtttggagagattcaggaaaaagttgtgttgaaattttcacaagaggaatttcttacagcttggtcaactcaggtgcgtcccgcaacgactctgttggctgatgggtgcccatatttgtatgctatggtgcatgatagttcagtgtctacaataccaggtgattttgtcattggtgttaagttgacaaccataaacaa

SEQ ID NO: 143276 - DNA, 254 bp, Glycine max
cactattctccctatcgagtttaatcttgtggtccgtcagaagttttcaaatgttgtgaggttcattatgatgtggatccactagcttagttgtcaagttggaatcaacccatactccatggaatggactggtttggccaataggttactgagtaagggcaacgatattctgtgttgtgattatgctagttttgatggtttgattaccaagcaagttatgagcaagatggcagaaatgataaacagtctttgtg

SEQ ID NO: 143277 - DNA, 252 bp, Glycine max
cctctttttcttctctctcaacaacttcaccttcttcctcctcgatcatgtctcacttcaagggcaagtaccatgatgagcttatcgccaatgctgcgtacattggcactcctggaaagggtattcttgctgctgatgagtcaacagggacaattggcaagcgtttggccagcatcagtgtagagaacattgaatccaacaggcgagctcttagggagctgcttttcactgctcctggtgttcttcaatatc

SEQ ID NO: 143278 - DNA, 246 bp, Glycine max
gtttgggattgtcaataaggaaactcaaatagtctacagtttttgatattctcttgggaatctctcaagattttgaaattgctggtaatactcttatgccagctttttctgttccacaggctactgccagatcttctgaaaatgcggaatcctctgcatgatctggaattcgtgttttctgtcgcttgttcgtttgtttaattcaataaaggaaattaggcatgaccctcttgttgagtatgctct

SEQ ID NO: 143279 - DNA, 251 bp, Glycine max
tgagggtttggactatatggaaagaattcctcttgccacatctgagggttttcctcatgtgctttcacgtaaaaatggtgaaaaaggcaagaggagatttgtttctggggatggtgaagagatgacattgattccgggaaccagtgttgaagaggcttacaacaagctaatagttgaacttgagaatggtgttcccacattggttggcattgaatgtcccaaggatgaaaaacttcctcgtcgcaaaattt

SEQ ID NO: 143280 - DNA, 245 bp, Glycine max
cagttggtattcctgagaatacaggtatagcattggcctgtgtcatgaatagttcttttagggggcgcgccagttctgatatttacaccatctgctctcaagactgtgaattatggaatcctgcttgcacaaaagcaatgactatgtcatttaatccaaacccgtgttctgatgcatggagtttggaatttctgaagcgtaccggatttcattgtgatatcatttgtgtcactggatggactgcc

SEQ ID NO: 143281 - DNA, 249 bp, Glycine max
caaccataaacaatatgtgtgcatatgggcttaatcctggtatttcaggttctcgtcttttgggcaccattcctcagtccatttcacagcaaactgtttggaatcaaatggcaacagtgagaacaccattgaattttgattctagcaagcagagcttttgtcaattttctatcgaccttctcggtggaggaattttagtggacaaaactggagattggatcacacttatacaaaattctccaattagta

SEQ ID NO: 143282 - DNA, 248 bp, Glycine max
gcttttcaatttagaaccactaaagtaaggcttgtgattttctcaagagaaactttaagcagatgtctaatgttttatgggtggctcctgaggacaaggcgagtttatggtcacaacttcattatgtttcgtgcaataatctggaaatgcaagaagcttatcttgtcaatctcgtaaatgtgttacgagaattgtatttgcacagtccagaggaagctcgccaattgagaaggaaagctctctctcgt

SEQ ID NO: 143283 - DNA, 101 bp, Glycine max
atttgaaattttaataaaccgcgatcacaggttgccgcaccttagaaccggaaacaaaagcactcgttacttgatttcaagaatttctcaatttcttccta

SEQ ID NO: 143284 - DNA, 249 bp, Glycine max
gagaaacttcctcgtcgcaaaatttttgacaaacctaagacgcgctgcttcactattctccctatggagtttaatcttgtggtccgtcaaaagtttttaaattttgtgaggttcattatgaagaaaagggacaagcttagttgtcaagttggaatcaacccatactccatggaatggactggtttggccaatagattactgagtaagggcaatgatattctgtgttgcgattatgctagttttgatggt

SEQ ID NO: 143285 - DNA, 252 bp, Glycine max
gtggtggtgatacagagggtgctggttgtgagccgaagtgtagtggtgatggagagcataatgctttaggagaaaacacagaaggcgagagaaaatctgatcgatcagtaagtaatgacagcacaaagtctgattcagcgctagatgatgttgctgagtatgatattccgtgggatgaaattgcggtgggagagcgtattggacttggatcatatggggaagtttaccgtggtgaatggcatggaactgaag

SEQ ID NO: 143286 - DNA, 249 bp, Glycine max
cgcaacttcgaccgcgggatccacggcaagggcgtcgccgtgaaattcgccggagatggttcgacaccgaacaaggctttgttgatgcgcgcagaaacgaacatgatgctgatgagtcccttaaacgacggaaagccccacgcttcgaagcttcaccagctcgacattgaaacggggaagattgttacggagtggaagtttggaaaagacggtgctgacttaacgatgagggatatcaccaatgacacc

SEQ ID NO: 143287 - DNA, 249 bp, Glycine max
ctcaacaattgagatctcacactgcaattccgtcttctcccagaatcggtcactaaatccgcaatcatgaagctcgataccaccggtctcgaatcgtttcccacactgcttgcgcctcaaaacgacgtcgttggagaactctccgccgctccatccttcgaccttccgaattccaacgatttcgatgggtttgtgaaagaagctattcagatggtgaagcccgcgaagggtactacgactcttgctttt

SEQ ID NO: 143288 - DNA, 119 bp, Glycine max
tgaaattttaataaaccgcgatcacaggttgccgcaccttaaaaccggaaacagaagcagtcgtgacttgatgtcaagaatttctcaatttcttcctacttctttgtgtacgatttctt

SEQ ID NO: 143289 - DNA, 248 bp, Glycine max
gcaagtcgaaaagttcctctctctctcacacacacacatcccagccatgagcctcttcggtataggcagaaaccagagaacattccgcccgaaaaaaagtactccttctggaagtaagggagctcaacttcgaaaacatattgatgccacgttaggtagtggaaatctgagggaagcagtaaagctacctcctggggaggatttaaatgagtggctagctgtcaacactgttgatttcttcaatcagg

SEQ ID NO: 143290 - DNA, 245 bp, Glycine max
gtgatgataacttaattagtgttcatgaatatgtcaagccttactttagtggttctaaattgaaaagctttctagctggtcataatatcaccattactgatggtattgacaaaactagtgcaactttgcaatttagaaagttagcagattgtgattttctcaagagaaactttaagcagatgtctaatgttttatgggtggctcctgaggacaaggcgagtttatggtcacaacgtcattatgtt

SEQ ID NO: 143291 - DNA, 249 bp, Glycine max
gtgttgatgaggaggattcctttgaggaagtttctttaagtgcagcacttaatggtgttgagggtttggactatatggaaagaattcctcttgccacatctgagggttttcctcatgtgctttcacgcaaaaatggcgagaaaggcaaaaggagatttgtctctggggatggtgaagagatgacattgattccaggaaccagtgttgaagaggcttacaacaagctaatagttgaacttgagaaaagtg

SEQ ID NO: 143292 - DNA, 248 bp, Glycine max
gcctgctgcacactacgtgcggcacgccggcctatgtcgcgcccgaggtgattgggaaaagaggctacgacggcgccaaggccgatatttggtcttgtggcgtaatcctctacgtacttcttgctggttttttacccttccaggatgacaacctggtggccttgtacaagaaaatttaccgcggtgacttcaagtgtccgccgtggttctcctccgaggcgcggaggctcatcaccaagctcctcgac

SEQ ID NO: 143293 - DNA, 247 bp, Glycine max
ttcgtctcaaatctcttcgttccttcgtgtcgttccatttcttccaaaatggccgaagacccagttcgcgttctcgtcactggagctgcagggcaaattgggtatgctcttgtccctatgattgctaggggagtgatgttgggtcctgaccagcccgtgatcctccacatgcttgacattcctccggcagcagagtcattgaatggggttaaaatggaattggtggatgctgcattccctcttctta

SEQ ID NO: 143294 - DNA, 244 bp, Glycine max
  unsure (1)..(244): unsure at all n locations
tgtgaacagggtctgtggttctgatagggccacagctctacattgtgcggttgccgggggctctgaatcctcacttgagattgtcaagctcttgcttgatgctggggctgatgccgagtgccttgatgccagtggcaacaagccggtcaatctgattgctcctgcctttgattctttgtcaaantcgcgaaggaaggccatggagatgttcctcaggggtggtggggaaagagacgatgaactc

SEQ ID NO: 143295 - DNA, 243 bp, Glycine max
cacttatacaaaattctccaattagtaacttgttgagagttgctgcttggaagaaaggttgtttaatggtcaagattgtgatgtctgggaatgcagcagtcaaaaggagtgattgggcctcattggtacaagtgtttttaacaaacagcaacagtacagagcattttgatgcatgtaagtggacaaaatcagaaccacattcctgggaattaatcttcccaatagaggtatgtggtcctaata

SEQ ID NO: 143296 - DNA, 243 bp, Glycine max
ggagctccaccggtcggagttcctcaaaagggaggagaggattctttcaacactgaaatgtcctcaaattgtggcctaccgaggctgtgacaacacgttcgagaacggcgtgcagtggttcaacatgttcatggagtacgcgcctcacgggaccctggcggagcgcggtggcgggatggaagaagcggtggtggggtcctgcacgcgccaaattctgcagggcctgaactaccttcactccaa

SEQ ID NO: 143297 - DNA, 242 bp, Glycine max
gagatgtgtctctggggatggtgaagagatgacattgattccaggaaccagtgttgaggaggcttacaacaagctaatagttgaacttgagaaaagtgttcctacattggttggcattgaatgtcccaaggatgagaaacttcctcgtcgcaaaatttttgacaaacctaagacgcgctgcttcactatttgccctatggagtttaatcttgtggtccgtcaaaagtttttaaattttgtga

SEQ ID NO: 143298 - DNA, 243 bp, Glycine max
ggagttcacagtcagagagggtcattattgtcctgcattgtcaaaagctgttaaaaccatgaagaagggagagaaagtgcttttgacagttaagccacaatatggatttggtgagaaggggaagccagaacaaggtgatgaaggtgcagttccaccaaatgcaacattgcagattactcttgaattagtttcatggaaaactgtttctgaagtaactgatgacaagaaggtcataaagaagat

SEQ ID NO: 143299 - DNA, 242 bp, Glycine max
ctcgagccgattcggctgagaagaaattcctcttgtgaaaatagcttacagcttggtcaactcaggtgcgtcccgcaaagactctgttggctgatgggtgcccatatttgtatgctatggtgcatgatagttcagtgtctacaataccaggtgattttgtcattggtgttaagttgacaaccataaacaatatgtgtgcatatgggctcaatcctggtatttcaggttctcgtcttttgggc

SEQ ID NO: 143300 - DNA, 245 bp, Glycine max
gcttggattagttctgcagttaacaatcgctcctcagacatcaacaaaaggattcgcacagcacttgggaaaggtaagaaaattgtttttcttactagagttgatccttttccagtagctttattggctgttctttttggcgttaagaatgaaattctgagttctaacgccactaaccctatgctgacgcgacttcttgagaactgtaagagtctcaaatatctggttgatgagtgtccttttgc

SEQ ID NO: 143301 - DNA, 244 bp, Glycine max
gcattttgatgcatgtaagtggacaaaatcagaaccacattcctgggaattaatcttcccaatagaggtatgtggtcctaataatggttttgaaatgtggagttctgagtgggcaaatcaaacttcatggcatttgagtttccttattgacaatcccaaacagtctacagttttggatatgctcttgggaatctctcaagattttgaaattgctggtaatactcttatgccagctttttctgtt

SEQ ID NO: 143302 - DNA, 243 bp, Glycine max
atggttttgaaatgtggagttctgagtgggcaaatcaaacttcatggcatttgagtttccttattgacaatcccaaacagtctacagtttttgatattctcttgggaatctctcaagattttgaaattgctggtaatactcttatgccagctttttctgttccacaggctactgccagatcttctgaaaatgcggaatcctctgcatgatctggaatttatgttttctttcgcttgttcgttc

SEQ ID NO: 143303 - DNA, 195 bp, Glycine max
caggctactgccagatcttctgaaaatgcggaatcctctgcatgatctggaattcgtgttttctttcgcttgttcgtttgtttaattcaataaaggaaattaggcatgaccctcttgttgagtatgctctgcctatctgaaaatttccacacctcttttaattgtcgtaatgatgtgtgaagtgtgtgttatttt

SEQ ID NO: 143304 - DNA, 242 bp, Glycine max
cggatctagagtcttcagtttctcctcgttgttcttcgctttcctgttttcaatttcgattctttcgttaatttaataagatgtttgggagggcaccgaagaagagcgataatacgaggtactacgaaatcctcggcgtctccaagaacgcttcgcaggatgatctgaagaaggcttacaagaaagccgccattaagaatcaccccgacaagggcggtgatcccgagaagtttaaagagctg

SEQ ID NO: 143305 - DNA, 241 bp, Glycine max
caaaaggagatttgtctctggggatggtgaagagatgacattgattccaggaaccagtgttgaagaggcttacaacaagctaatagttgaacttgagaaaagtgttcctacattggttggcattgaatgtcccaaggatgagaaacttcctcgtcgcaaaatttttgacaaacctaagacgcgctgcttcactattctccctatggagtttaatcttgtggtccgtcaaaagtttttaaat

SEQ ID NO: 143306 - DNA, 240 bp, Glycine max
ccaaggttggaaatcacaaacaaattgttggtttccatgttgctggaagcagaggaagactgggatatgcttcattgataccatatgttgagccagttgtgcaagctcaaagtgctgaagtttactttgacttcttccctgtggaggttgatagtcaagagggagttgctcacattggtgaattgaaatgtggtgtctatgttccactgaataaaaaatttaaaaagatggaaactccca

SEQ ID NO: 143307 - DNA, 245 bp, Glycine max
taccaataccaataccaattctattctatggcttgctcaagcgcccaaatacacggtctcggaaccccttcctcccgaaccctatttttaggtcagaggctaaataccaaggccgcctttatcaagctcaagtccacacctagaagactccgccctctcagagtggttaatgagaaagtcgtcggtatcgatttgggaaccaccaactccgccgtggctgccatggaaggcggcaagcccactat

SEQ ID NO: 143308 - DNA, 157 bp, Glycine max
gaaattttaataaaccgcgatcacaggttgccgcaccttaaaaccggaaacaaaagcaatcgttacttggtttcaagaatttctcaatttcttcctacttctttgtgtacgatttcttaagggaaagaaaatcactctctgtgctggtcacagactt

SEQ ID NO: 143309 - DNA, 243 bp, Glycine max
catctgtataccttgttgatctacattctcccatcttttctcactgctgaaattaaatataagcggaatttgagtaatattcatatttccggcttattttacgacggcagatacaaattctggactaaacacgagaaaaatcttgctttgacagaagaggaaaagatggaagtgattagaaatagaggcattcctgctgatgttcttgcaaagcgagctcatgaatttgaaaaacatgttgct

SEQ ID NO: 143310 - DNA, 200 bp, Glycine max
ctttgcaatttagaaagttagcagattgtgcagttctcaagagaaactttaagcagatgtctaatgttttgtgggtggctcctgaagacaaggcgagtttatggtcacaacttcattatgtttcgtgtaataatctggaaatgcaagaagcttatcttgtcaatctcgtaaatgtgttaccagaactgtatttgcacagt

SEQ ID NO: 143311 - DNA, 174 bp, Glycine max
aaccgcgatcacaggttgccgcaccttaaaaccggaaacaaaagcaatcgttacttgatttcaagaatttctcaatttcttcctacttctttgtgtacgatttcttaagggaaagaaaatcactctctgtgctggtcacagacttcgtgaatcattttcttttccacacaacat

SEQ ID NO: 143312 - DNA, 239 bp, Glycine max
ctcgagccgctcgagccgttaaaatggtggccacagttggtattcctgagaatacaggtatagcattggcctgtgctatgaatagttcttttagggggcgcgccagttctgatatttacaccatctgctctcaagactgtgaattatggaatcctgcttgcacaaaagcaatgactatgtcatttaatccaaacccgtgttctgatgcatggagtttggaatttctgaagcgtaccgga

SEQ ID NO: 143313 - DNA, 238 bp, Glycine max
catgaatatgccaaatgctgttctttcaatgtggagatattttgttggagatctcgtctttgaagtttctaagatgacttctccctacattaaatgtacagtctctttcttcatagcatttggaaatttggctgatgacaccatcaattttgaggcttttccccacaagctggtgcagtttggagagattcaggaaaaagttgtgttgaaattttcacaagaggaatttcttacagct

SEQ ID NO: 143314 - DNA, 236 bp, Glycine max
gtatggtgatgataacttaattagtgttcatgaatatgtcaagccttactttagtggttctaaattgaaaagctttctagctggtcataatatcaccattactgatggtattgacaaaactagtgcaactttgcaatttagaaagttagcagattgtgattttctcaagagaaactttaagcagatgtctaatgttttatgggtggctcctgaggacaaggcgagtttatggtcac

SEQ ID NO: 143315 - DNA, 239 bp, Glycine max
gaaaaacccaaaaagattgataccagattgagacaaagaatagatcctcaatacaatgaggttcaggctcagatggaaacaaatttgtttaaattgtctcttgatgatgttgaaactcctaaaggttctatgttggatcttaaaatttctcaatctaaaattgcacttcccaagaacacagttggaggaaccattctgcgtagtgatctattggcaaattttttgacagagggcaattt

SEQ ID NO: 143316 - DNA, 252 bp, Glycine max
cgactctgttggctgatgggtgcccatatttgtatgctatggtgcatgatagttcagtgtctacaataccaggtgattttgtcattggtgttaagttgacaaccataaacaatatgtgtgcatatgggctcaatcctggtatttcaggttctcgtcttttgggcaccattcctcagtccatttcacagcaaactgtttggaatcaaatggcaacagtgagaacaccattgaattttgattctagcaagcaga

SEQ ID NO: 143317 - DNA, 252 bp, Glycine max
aagtggacaaaactggagattggatcacacttatacaaaattctccaattagtaacttgttgagagttgctgcttggaagaaaggttgtttaatggtcaagattgtgatgtctgggaatgcagcagtcaaaaggagtgattgggcctcattggtacaagtgtttttaacaaacagcaacagtacagagcattttgatgcatgtaagtggacaaaatcagaaccacattcctgggaattaatcttcccaatag

SEQ ID NO: 143318 - DNA, 251 bp, Glycine max
actgagcgaatcggctcgacacaaaatccttttgtgttaactaggtggatgggaaaactgactttcccccagggacacttcccgaagtgttaagagaatgcctctttctatagggggaggagctggtgcaaagaatgctattctcatgaatatgccaaatgctgttctttcaatgtggagatattttgttggagatctcgtctttgaagtttctaagatgacttctccctacattaaatgtacagtctctt

SEQ ID NO: 143319 - DNA, 251 bp, Glycine max
aaagcacattgttcatatgtgtatgagtgcaattctggtcagcattgaaatgggtcaatttcctcatgttacaagctatgttagcaaggcagaacagtcaccagatgcccttgaagcagtaacagttgcaaagctacgatgtgctgcaggattggctaatctagaagccaaaaagtacaagcttgctgcccgaaagtttctagaaacaggacctgaactgggaagtcactataatgacgtaattgcacctc

SEQ ID NO: 143320 - DNA, 244 bp, Glycine max
agcatttggaaatttggctgatgacaccatcaattttgaggcttttccccacaagctggtgcactttggagagattcaggaaaaagttgtgttgaaattttcacaagaggaatttcttacagcttggtcaactcaggtgcgtcccgcaacgactctgttggctgatgggtgcccatatttgtatgctatggtgcatgatagttcagtgtctacaataccaggtgattttgtcattggtgttaag

SEQ ID NO: 143321 - DNA, 244 bp, Glycine max
gcttttggttgatacttatcataccaatcctgaaaatgcagttcgtagtatttttgttgcgcctttcagaggcggaaggcccattcgggtggatacatttccgaataccattgtgcagagtgaaccagacatgaattcaaggtttcagcttttgagtaccactaccaatggtgattttgttcaagggacagatctcgcaatggttaaagtgaatgtagcatgtgctgctgttggcttgacatca

SEQ ID NO: 143322 - DNA, 244 bp, Glycine max
aggagatggaagttgaagggtcatcgaagaagatgatagcgactcaggaggagatggtggaggccagggttcctctggcctacagggaccagtgcgcccacttgctcatccctctcaacaagtgcaggcaggccgagttctacctcccatggaagtgccaggaccagcgtcactcctacgaaaagtgccagtacgagctcgttatggagagaatgctccagatgcaaaagatccgcgagcacca

SEQ ID NO: 143323 - DNA, 243 bp, Glycine max
cgtcttttgggcaccattcctcagtccatttcacagcaaactgtttggaatcaaatggcaacagtgagaacaccattgaattttgattctagcaagcagagcttttgtcaattttctattgaccttctcggtggaggaattttagtggacaaaactggagattggatcacacttatacaaaattctccaattagtaacttgttgagagttgctgcttggaagaaaggttgtttaatggtcaag

SEQ ID NO: 143324 - DNA, 249 bp, Glycine max
aaaaaccttcaaatatgatataattggtactggttcacattcttcaggagattttcctgaaaaggaagatcaagaaaaacccaaaaagattgataccagattgagacaaagaatagatcctcaatacaatgaggttcaggctcagatggaaacaaatttgtttaaattgtctcttgatgatgttgaaactcctaaaggttctatgttggatcttaaaatttctcaatctaaaattgcacttcccaagaa

SEQ ID NO: 143325 - DNA, 253 bp, Glycine max
agaaattgagaatggaatgctgtgggaagttgaggggaagtgggttgttaaaggagcagttgatgtagacattggtgcaaacccttctgctgagggtggaggagaagatgagggagttgatgatgcagctgttaaggttgttgacattgttgacacattcagacttcaggagcaacccgcattcgataagaagcagtttgttaccttcatgaagaggtttatcaagaatttgactcccaagctcgatgcagag

SEQ ID NO: 143326 - DNA, 250 bp, Glycine max
tatggggccaaaaatcatcaggagctgtgccatttggcacaatgtttgctctgatctttttatggtttgggatctcggttccacttgtttttgtgggtagctatgttggattcaagaagcctgcaattgagaatcctgtgaaaacgaacaagatcccaagacagatcccggagcaggcatggtacatgaacccagtgttctcagttctgattggtggaatactcccatttggagctgttttcattgagct

SEQ ID NO: 143327 - DNA, 246 bp, Glycine max
ggacgccatcacgcgaatggcgaacaatgaaggcgtcactagcctttggagaggctcatcgcttacggtgaaccgcgccatgctcgtgacggcgtcgcagctcgcgtcgtacgaccagttcaaagaaacgatcttggagaacggcatgatgcgcgacgggctcgggacccatgtcacggcgagcttcgcggcggggttcgtggcggcggtggcgtcgaaccccgtcgacgtgatcaagacgagggt

SEQ ID NO: 143328 - DNA, 248 bp, Glycine max
ctcacagcttatccagatacaaattgaagtttagtgcagagaaggtggataccatgattgtccaggccattggtttactagatgatcttgataaagagttgaatacctatgccatgagggttcgagaatggtatggttggcattttcctgagcttactaaaataatacaggataacatcctatatgccagggcagtcaagttgatgggtgatcgtgttaatgcagctagcctggatttctctgagatt

SEQ ID NO: 143329 - DNA, 218 bp, Glycine max
attttctctcctatagataaagaaacagagagagagagaaaaaaatgcctgcggtaggaggtattagcaacggagggggcaaggagtaccctggaagcctcactccttttgtgacggtaacatgtatagttgcagccatgggtgggttaatcttcggttacgatatcggaatttcaggtggggtgacatccatggtagcgtttctgctcaagtttttc

SEQ ID NO: 143330 - DNA, 245 bp, Glycine max
atcacaacttcaagtgtgcttgaggcccaaagtagaaagcccaacagatatgaagtttcccaatacagatatcgcaatgtgccaataaagcgcagagcatgggttgaaggccagatgtctttcgatcagtctgtagtagcaattatgtctaaatgcaaagccagcatgagaatgggaaacactgatgctcaaattttgatggttccagggcgcagattcatagctcatggacattttttcaaaaa

SEQ ID NO: 143331 - DNA, 243 bp, Glycine max
agctactggggcaaacgttcaacaggtgtcctattctgttggtacagactcaaggattggacccaagtttctcaatgccagtgttggttttggtggatcctgcttccagaaggatatcttgaaccttgtttacatctgtgagtgcaatggccttccagaggtggctgagtattggaaacaagtgatcaagatcaatgattatcagaagagccgatttgtgaaccgtgttgttgcatcaatgtt

SEQ ID NO: 143332 - DNA, 249 bp, Glycine max
atagcagattgtgattttctcaagagaaactttaagcagatgtctaatgttttatgggtggctcctgaggacaaggcgagtttatggtcacaacttcattatgtttcgtgcaataatctggaaatgcaagaagcttatcttgtcaatctcgtaaatgtgttacgagaattgtatttgcacagtccagaggaagctcgccaattgagaaggaaagctctctctcgtattgaatggctgcaaaaagctgat

SEQ ID NO: 143333 - DNA, 252 bp, Glycine max
ctcccacctaccagacctgctgcatcttcttcttcttcttctacgccggcaaagaagacaaagcccgcagctgccaagtccaagcctaagcctaagcccaagcccgctgcgaaagccaaggatactaaggcaactaaatcgaaggcaccagctaagcccaagccagctgctaagcctaaagccaaagctccagccaaggccaaacccgctgctaaaccaaaggcttctgctgctgccaagcccaagcctgct

SEQ ID NO: 143334 - DNA, 244 bp, Glycine max
attaaatgtacagtctctttcttcatagcatttggaaatttggctgatgacaccatcaattttgaggcttttccccacaagctggtgcactttggagagattcaggaaaaagttgtgttgaaattttcacaagaggaatttcttacagcttgggcaactcaggtgcgtcccgcaacgactctgttggctgatgggtgcccatatttgtatgctatggtgcatgatagttcagtgtctacaatac

SEQ ID NO: 143335 - DNA, 117 bp, Glycine max
ttgaaattttaataaaccgcgatcacaggttgccgcaccttaaaaccggaaacaaaagcaatcgttacttgatttcaagaatttctcaatttcttcctacttctttgtgtacgattt

SEQ ID NO: 143336 - DNA, 247 bp, Glycine max
ccagaaactgtattttggccagttttcatagtggccactcttgctgccattgttggaagtcaagcagtgatttcggctaccttttccattgtaagccagtgttgtgcactaaattgttttcctccggttaagattgttcatacttcaagcagaatatacggacagatttatgtcccagaagtcaattggatattaatgtgcctttgtttagctgtgacaattggcctaagggatattgacatgatgg

SEQ ID NO: 143337 - DNA, 244 bp, Glycine max
aatttagaaagttagcagattgtgattttctcaagagaaactttaagcagatgtctaatgttttgtgggtggctcctgaagacaaggcgagtttatggtcacaacttcattatgtttcgtgtaataatctggaaatgcaagaagcttatcttgtcaatctcgtaaatgtgttaagataactgtatttgcacagtccagaggaagctcgccaattgagaaggaaagctctctctcgtattgaatg

SEQ ID NO: 143338 - DNA, 156 bp, Glycine max
aataaacaaccaagatgtccaaatctctgccgcatgacattaggtggcatctgtataccttgttgatttgacattctcccatcttttctcactgctgaaattaagtataagcggaatctgagtaatattcatatttccggcttattttacgacggc

SEQ ID NO: 143339 - DNA, 241 bp, Glycine max
atcccaaggatgagaaacttcctcgtcgcaaaatttttgacaaacctaagacgcgctgcttcactattctccctatggagtttaatcttgtggtccgtcaaaagtttttaaattttgtgaggttcattatgaagaaaagggacaagcttagttgtcaagttggaatcaacccatactccatggaatggactggtttggccaatagattactgagtaagggcaatgatattctgtgttgcga

SEQ ID NO: 143340 - DNA, 239 bp, Glycine max
caaaactagtgcaactttgcaatttagaaagttagcagattgtgattttctcaagagaaactttaagcagatgtctaatgttttatgggtggctcctgaggacaaggcgagtttatggtcacaacttcattatgtttcgtgcaataatctggaaatgcaagaagcttatcttgtcaatctcgtaaatgtgttacgagaattgtatttgcacagtccagaggaagctcgccaattgagaa

SEQ ID NO: 143341 - DNA, 111 bp, Glycine max
agatttgaaattttaataaaacgcgatcacaggttgccgcaccttaaaaccggaaacaaaagcaatcgttacttaatttcaagaatttctcaatttcttcctacttctttg

SEQ ID NO: 143342 - DNA, 224 bp, Glycine max
aatggggctaaaaatcatcaggagctgtgccatttggcacaatgtttgctctgatctttttatggtttgggatctctgttccacttgtttttgtgggtagctatgttggattcaagaagcctgcaattgagaatcctgtgaaaacgaacaagatcccaagacagatcccggagcaggcatggtacatgaacccagtgttctcagttctgatttggggaatactc

SEQ ID NO: 143343 - DNA, 244 bp, Glycine max
caaatcacccaacaagcacaaccgtctgtacatggaagcaagaccattggaggaaggtcttgctgaggccattgatgatggcaagattggaccaagggatgaccccaaggttcgttccaagatcttgtctgaagagttcggttgggacaaggatcttgccaagaaaatctggtgctttggccctgagacccttggacccaacatggtggttgatatgtgcaagggagtccagtatttgaatgaa

SEQ ID NO: 143344 - DNA, 240 bp, Glycine max
cacttatacaatattctccaattagtaacttgttgagagttactgcttggaagaaaggttgtgtaatggtcaacattgtgatgtctgggaatgcagcagtcataaggagtgattgggcctcattggtacaagtgtttttaacaaacagcaacagtacagagcattttgatgcatgtaagtggacaaaatcagtggcacattcctgggaatgaatcttcccaatagaggtatgtggtccta

SEQ ID NO: 143345 - DNA, 240 bp, Glycine max
aagatgcgagaaatgataaacagtctttgtggtggtgatgaaaaattgatgcgtgaaaggacgcacctgctgttggcttgttgttcaaggatggcaatttgtaagaaagatgtttggagagttgaatgtggaatcccttctggatttccgctcacagttatttgcaatagcatttttaatgagatgctcattagatatagctatgaaaaattactgcgccaggctaaagctccaagtatg

SEQ ID NO: 143346 - DNA, 239 bp, Glycine max
aacataatgaagttgtgaccataaactggaaatgcaagaagcttatcttgtcaatctcgtaaatgtgttacgagaattgtatttgcacagtccagaggaagctcgccaattgagaaggaaagctctctctcgtattgaatggctgcaaaaagctgatgtgcctaccatagcacagattgaagagttccattcgatgcagaggatgatgaatgctcctgattcaaatgataatattgatc

SEQ ID NO: 143347 - DNA, 243 bp, Glycine max
aacacacacacacacaaattctcaaacccaaatcccaagtctcctaaaaccctaattcgcagtgaaaatgagagaaatcttgcacatccagggagggcaatgcggtaaccagatcggagcgaagttctgggaggtgatatgcgacgagcacggcatcgaccacaccggaaagtacagcggcgactccgagctccaattggagcgcatcaatgtttattacaatgaagccagcggcggaaggta

SEQ ID NO: 143348 - DNA, 241 bp, Glycine max
  unsure (1)..(241): unsure at all n locations
canagagggtatctcatactgaaatattgtgacattctcagagtncctttcagaacagaaaagggaattgttcgcaaatggatctcaagattcgaagtctggccatacctagagacttacactgaggatgtcgcccttgaacttgcnaaggngtncaagcaagncagatctgattgtnggaactacagtgatggaaacatggttgccncttgttagcacatnaattaggagtnactcagtg

SEQ ID NO: 143349 - DNA, 243 bp, Glycine max
cttcctcaccgattgctagcctggaatttcgatgctcagtcatctcttttaccattctcttctctcttgctcttgcaggagagagccatgtccatgcatcgctacctgaggaagattattgggaagctgtttggccaaacactcccattcccactgcactgcgagaacttctaaagcctctccctgcaggtgttgaaatcgatgaactccctaagcaaattgatgatacacagtacccaaaaa

SEQ ID NO: 143350 - DNA, 241 bp, Glycine max
atatgcaggtcgtagtatttttgttgcgcctttcagaggcggaaggctcatgcgggtgggtacatttcccaatatcagtgggcacgttgaaccagacatggatgacttgtttcagcttttgagtaccactaccaatggtgattttgttcaagggaaagatctcgcaatggttaaagttaatgtagcatgtgctgctgtttgcttgacatcaagttacactccaactccattgttggaatct

SEQ ID NO: 143351 - DNA, 243 bp, Glycine max
caggaatttcttacagcttggtcaactcaggtgcgtcccgcaacgactctgttggctgatgggtgcccatatttgtatgctatggtgcatgatagttcagtgtctacaataccaggtgattttgtcattggtgttaagttgacaaccataaacaatatgtgtgcatatgggctcaatcctggtatttcaggttctcgtcttttgggcaccattcctcagtccatttcacagcaaactgtttgg

SEQ ID NO: 143352 - DNA, 244 bp, Glycine max
actcgagccgattcggctcgacgagggttatcatttctccattaccattttctctctcaaccttcaagaatcgtaagctactgggaaagtcttacccaactgtgagtgctgattaccagaaggccgttgagaaggcgaagaagaagctcagaggcttcatcgctgagaagagatgcgctcctctaatgctccgtttggcatggcactctgctggaacctttgacaagggcacgaagaccggtgg

SEQ ID NO: 143353 - DNA, 151 bp, Glycine max
actcaagaaatgaaactagcttggtcaccagagagagcatccaaagcatacatcgacacagtccaatcttgccaggttttccgcgaatccggagtggcggagtttatttcggccatggcggcggggtggaactcgcagctcatagtggaga

SEQ ID NO: 143354 - DNA, 239 bp, Glycine max
aaaactcccaaggaatggcaactggatctaccttgtgacaaaattcctagtgtcttgactacaactgatgagagattggtaggcacagaacatgagggatatgatccttttcttggtggaattcaaaaatatgccactcccatgatgcccctagatgaagaaattctttctaaggttgcacaagatatggttgaggaatggtttgattgtgttgatgaggaggattcctttgaggaagt

SEQ ID NO: 143355 - DNA, 238 bp, Glycine max
ctcgagcgtttggaatcaaatggcaacagtgagaacaccattgaattttgattctagcacagcagagcttttgtcaattttctattgaccttctcggtggaggaattttagtggacaaaactggagattggatcacacttatacaaaattctccaattagtaacttgttgagagttgctgcttggaagaaaggttgtttaatggtcaagattgtgatgtctgggaatgcagcagtcaa

SEQ ID NO: 143356 - DNA, 234 bp, Glycine max
attcattggttgttgccaaggttggaaatcacaaacaaattgttggtttccatgttgctggaagcaaaggaagactgggatatgcttcattgataccatatgttgagccagttgtgcaagctcaaagtgctgaagtttactttgacttcttccctgtggaggttgatagtcaagagggagttgctcacattggtgaattgaaatcaggtgtctatgttccactgcctacaaaaa

SEQ ID NO: 143357 - DNA, 240 bp, Glycine max
atcgagccgtttcctttgatattaaatctcgctctagattggaaaaagtttcctctacaaaagcacaatttgttagtggaaaaaccttcaaatatgatataattggtgctggttcacattcttcaggagattttcctgaaaaggaagatcaagaaaaacccaaaaagattgataccagattgagacaaagaattaatcctcaatacaatgaggttcaggctcagatggaaacaaatttgt

SEQ ID NO: 143358 - DNA, 108 bp, Glycine max
cttcgacaacgtggtgtcggtgatcttaaacttcttactgctacgaagttgtatgagcgctaacatattcctgtatctaatattgagtgcaggggagaatcatgtagt

SEQ ID NO: 143359 - DNA, 243 bp, Glycine max
atgatgagccactatgccgaaatgtttcgcatgaactctgctgctgcaaaagcagatgttttctatgttatgtccggtatgtggaaaacaacagctgaaagatttttcctgtggattggaggctttcacccctcggagcttctaaaggttcttggtcccctgattgaacccctgacggagcaacagcgcttgaatatctataaccttggacaatcatgtcagcaagcagaagatgccctttca

SEQ ID NO: 143360 - DNA, 242 bp, Glycine max
atcgagtttcacagcagcaatggtgtacgtcaaggctcagaaatcaaaagcctacttcaagagatatcaagtcaagttcaagagaagaagagagggaaaaaccgattaccgtgccaggattcggttgattaatcaggacaagaacaaatataacactccgaaataccgatttgttgttcgctttagcaacaaggacattgttgcacaaataatatctgctagcattgctggcgatattgttc

SEQ ID NO: 143361 - DNA, 242 bp, Glycine max
actcgagccgctcgagccgctcgagccggttgtattctactaaggttaataagtttgcaaaaattatgaaccttagacaaagtgttgttggtgatcttaaacttcttactgatgggaagttgtatgagggtaagcatattcctgtatctaatattagtgcaggggaaaatcatgtagttcaaatacccttaatggcacaggaggaaattctgtcttctagtgcaagtgatttcagaactgca

SEQ ID NO: 143362 - DNA, 240 bp, Glycine max
aaccaactccgccgcctcaacatccacgagtaccagggcgctgaattgatgagcaaacacggagttaatgttccgagaggcgtggctgtttcctctgttgaagaggtcagaaaggccatcaaggaccttttccctaatgaaaatgagttggtggttaagagtcaaattttagccggtggaagaggtttgggaactttcaaaagcggccttaagggaggagtgcacattgttaagactgac

SEQ ID NO: 143363 - DNA, 237 bp, Glycine max
ctcgagccgaaattgaaaagctttctagctggtcataatatcaccattactgatggtatacgacaaaactagtgcaactttgcaatttagaaagttagcagattgtgattttctcaagagaaactttaagcagatgtctaatgttttatgggtggctcctgaggacaaggcgagtttatggtcacaacttcattatgtttcgtgcaataatctggaaatgcaagaagcttatcttgt

SEQ ID NO: 143364 - DNA, 234 bp, Glycine max
cctcgctctatttctcagtctctgtgtttgcggctgaggattccgaacgagtgaccttcttcgtttctcgcaaagtttaagtaatcatgggtaaggaaaaggttcacatcaacattgtcgtcattggacatgtcgactctgggaagtcaactaccactggtcacttgatctacaagcttggaggtattcacaagcgtgtgattgagaggttcgagaaggaggctgccgagatga

SEQ ID NO: 143365 - DNA, 235 bp, Glycine max
cgccccccaattaacggttacgcttattggcttggcctcggagtttaccattctggtgttcaagttcatggggttgaatatggatttggagcacacgaacgcgacacgactgggatttttgaagtggagcctagacactgccctggattcaccttcaggaaatcaattttcattggatcaacggatatggggccgaagatgttcgcgcgttcatggagaggctggctgaagagta

SEQ ID NO: 143366 - DNA, 234 bp, Glycine max
aaatcttgctttgacagaagaggaaaagatggaagtgattagaaatagaggcattcctgctgatgttcttgcaaagcgagctcatgaatttgaaaaacatgttgctcatgaaagcctcaaggatcaaattcctgctgttgacaagttgtattctactaaggttaataagtttgcaaaaattatgaaccttagacaaagtgttgttggtgatcttaaacttcttactgatgggaa

SEQ ID NO: 143367 - DNA, 259 bp, Glycine max
ctatatggaaagaattcctcttgccacatctgagggttttcctcatgtgctttcacgtaaaaatggtgaaaaaggcaagaggagatttgtttctggggatggtgaagagatgacattgattccgggaaccagtgttgaagaggcttacaacaagctaatagttgaacttgagaaaagtgttcccacattggttggcattgaatgtcccaaggatgaaaacttcctcgtcgcaaaatttttgacaaacctaagacgcgct

SEQ ID NO: 143368 - DNA, 254 bp, Glycine max
ctgggatatgcttcattgataccatatgttgagccagttgtgcaagctcaaagtgctgaagtttactttgacttcttccctgtggaggttgatagtcaagagggagttgctcacattggtgaattgaaatctggtgtctatgttccactgcctacaaaaactaatttgatggaaactcccaaggaatggcaactggatctaccttgtgacaaattcctagtgtcttgactacaactgatgagagattggtaggc

SEQ ID NO: 143369 - DNA, 236 bp, Glycine max
actcttcttctcttgcggctagggttttagcgcagttcttctagatttaaggaagatgggtaaggaaaaggttcacatcagtattgtggtcattggccatgtcgactctgggaaatccactaccactggtcacctgatttacaagcttggaggcattgacaagcgtgttattgagaggtttgagaaggaagctgctgagatgaacaagagtctttcaagtatgcctgggtgctgga

SEQ ID NO: 143370 - DNA, 254 bp, Glycine max
ggcgagtttatggtcacaacttcattatgtttcgtgcaataatctggtaatgcaagaagcttatcttgtcaatctcgtaaatgtgttacgagaattgtatttgcacagtccagaggaagctcgccaattgagaaggaaagctctctctcgtattgaatggctgcaaaaagctgatgtgcctaccatagcacagattgaagagttccattcgagcagaggatgatgaatgctcctgattcaaatgataatattga

SEQ ID NO: 143371 - DNA, 255 bp, Glycine max
ttttactagaggtggcatgtggactcagaccacttgagccaaaggcaatgccggaagatatggttttggttgattgtgtttggaacaaattcaaacaagggagcatactcgatttggtggaccctaaactaaatggtgtttttaatgaaagagagatgctcatggtgttgaaattagggcttctgtgttcaaacagtgcacccactgctaggctagcatgagacaggtggtgagatttttagaaggagaagttgg

SEQ ID NO: 143372 - DNA, 258 bp, Glycine max
atccgcattgccgttcaaagtggtcttatttgaaaaacacttgggcgttggtgcaaatgtttgcttcgttaattttctctggagacaacaggctcactgagaaaacaatttttacttgcagagatttggagatcttggttgtctattatacaatagcaactcaatttagaagatttctaccgcattacattaggtggcatctgtataccttgttatctacattctcccatcttttctcactgctgaaatgaaatataa

SEQ ID NO: 143373 - DNA, 259 bp, Glycine max
ctcttctgttgagtgggggcccgtcaaggaaggagggcgcgtgacgctcaagactcgttacgggaattttctcagagctaacggcgggttgccgccgtggagaaactccgttacgcatgatattccgcacaggaccgccacgcaggattggatcctatgggacgtggatgttgttgagatttatgtgaactctcccgcgagtcatgatagaccctcgctccgccgttgccggttgaggactctgttcccatactaacga

SEQ ID NO: 143374 - DNA, 261 bp, Glycine max
agagaatgcctctttctatagggggaggagctggtgcaaagaatgctattctcatgaatatgccaaatgctgttctttcaatgtggagatatttggttggagatctcgtctttgaagtttctaagatgacttctccctacattaaatgtacagtctctttcttcatagcatttggaaatttggctgatgacaccatcaattttgaggcttttccccaaagctggtgcagtttggagagattcaggaaaaagttgtgttgaa

SEQ ID NO: 143375 - DNA, 250 bp, Glycine max
caacccatagtccatggaatggactggtttggccaatagattactgagtaatggcaatgatattctgtgttgcgattatgctagttttgatggtttgattaccaagcaagttatgagcaagatggcagaaatgataaacagtctttgtggtggtgatgagaaattgatgcgtgaaaggacgcacctgctgttggcttgttgttcaaggatggcaattgtaagaagatgtttggagagttgatgtggatcc

SEQ ID NO: 143376 - DNA, 260 bp, Glycine max
gaagcgatgtcggaaaacggcaattctctcgctgaagaaatccagtcctgagcttcctgagctcctgacgcaattttctgccggcattgctggtactggccttgcagtcctgctatccgtgatgtgtaacctagcttgtggaagggctaccttttgtacttctagcttgttcaacaccgggtttggacttgggttggtttggctttctggggtagtaataagctaagggccacaattgtcaacatcagcaagaatgcagg

SEQ ID NO: 143377 - DNA, 256 bp, Glycine max
cttcccaagaacacagttggaggaaccattctgcgtagtgatttattggcaaattttttgacagagggcaattttagagcaagtgttgatttgcagcgcactcatcgtattagaggaatgattaaaatggtggccacagttggtattcctgagaatacaggtatagcattggcctgtgctatgaatagttcttttagggggcgcgccagttctatatttacaccatctgctctcaagactgtgaattgtggaatcc

SEQ ID NO: 143378 - DNA, 247 bp, Glycine max
aagaaaagggacaagcttagttgtcaagttggaatcaacccatactccatggaatggactggtttggccaatagattactgagtaagggcaatgatattctgtgttgcgattatgctagttttgatggtttgattaccaagcaagttatgagcaagatggcagaaatgataaacagtctttgtggtggtgatgaaaaattgatgcgtgaaggacgcacctgctgttggcttgttgttcaaggatggc

SEQ ID NO: 143379 - DNA, 250 bp, Glycine max
gtaagatgtcagcattgaatatgatgcatgtacaattccaaatgattgtggttctttggttgttgccaaggttggaaatcacaaacaaattgctggtttccatgttgctggaagcaaaggaagactgggatatgcttcattgataccatatgttgagccagttgtgcaagctcaaagtgctgaagtttactttgacttcttccctgtggaggttatagtcaagagggagttgctcacattggtgaattga

SEQ ID NO: 143380 - DNA, 257 bp, Glycine max
  unsure (1)..(257): unsure at all n locations
gctgtgtttttaattgatggatttgcttgcagatnncgcttatcgccaatgctgcgtacattggcactcctggaaagggtattcttgctgctgatgagtcaacagggacaattggcaagcgtttggccagcatcagtgtagagaacattgaatccaacaggcgagctcttagggagctgcttttcactgctcctggtgttcttcaatatctcatggtgtcatcctctttgaggaaaccctctaccagagcacagctg

SEQ ID NO: 143381 - DNA, 252 bp, Glycine max
gaaattatcattgatagtttcgcaagtcctgattgcaacatagttggtgcaatgcttttggttgatacttatcataccaatcctgaaaatgcagttcgtagtatttttgttgcgcctttcagaggcggaaggcccattcgggtggttacatttccgaataccattgtgcagattgaatcagacatgaattcaaggtttcagcttttgagtacactaccaatggtgattttgttcaaggtatcaatctcgcaa

SEQ ID NO: 143382 - DNA, 251 bp, Glycine max
cagctcgccaatatgaccaccgacgacgtcgtcagagcttctcgtcttctcgacaacgagattcgcatcctcaaagaagagttgcagaggaccaatttggagttggaatcgtacaaggacaagatcaaggagaatcaggagaagattaagctcaataagcagttgccctacctcgttgggaacatcgttgagatattggaaatgaaccagaagacgaagctgaagaagatggtgccaatattgatcttgac

SEQ ID NO: 143383 - DNA, 251 bp, Glycine max
ggaggggcaaaaaacatcaattttcaggagctggcatcagatttagctcaaattacctttgattatccttttaggatacccccatactttgcccttataattagagctattggggttctggaagggatagctttagtaggaaattctgaatttgccattgttgacgaggcttatccttatattgcacagaggctcctcacagatgaatctctcggctaagggatgctctgcgttacactatatatgggaaa

SEQ ID NO: 143384 - DNA, 257 bp, Glycine max
cagttcctgaattgcacatttctcaaagcttgttgtccaataaaatatcatggccacgtctctcattttatggagataacatgttacttgagcaagattccaaagtatatgaaagtgcaagctctctgtctttggcaacatttgcttcccttttgatagagtttgttgcaaggcttcaaaatcttgtggatgaattccaagatctcagtgagaagccaatttcaaagacccctttgaccaaacagtgttgaagtagg

SEQ ID NO: 143385 - DNA, 257 bp, Glycine max
atttgttagtggaaaaaccttcaaatatgatataattggtgctggttcacattcttcaggagattttcctgaaaaggaagatcaagaaaaacccaaaaagattgataccagattgagacaaagaatagatcctcaatacaatgaggttcaggctcagatggaaacaaatttgtttaaattgtctcttgatgatgttgaaactcctaaaggtttatgttggatcttaaaatttctcaatctaaaattgcacttcccaa

SEQ ID NO: 143386 - DNA, 222 bp, Glycine max
atagttgttgcaatgcttctggttgatacttaccataccaaacctgaaaattcagttcatactatttttgttacgtctttcaaaggcgaacggctcatacgggtggttacatttccgagtaccattgtgcagattgaaccatacatgaatacgaggtttcaccctttgagtaccactaccaatcgtgagtttgttcaaaggaaagatctccaatggttaaag

SEQ ID NO: 143387 - DNA, 249 bp, Glycine max
caagagtgttgagaagaaagagcccaccggagccaaggtcaccaaggccgctgctaagaagaagtgattgcatttgggcaattttgctagcacatgtgatcatcatcgtggttactcctttatagtagttttatccttgcagagtcttacgtgttttgtttaagttatatttttaagtttctgccgatttcatgtagccgtaacttcagaactaggttcttgatcggcggtggtcaattttcattgctg

SEQ ID NO: 143388 - DNA, 249 bp, Glycine max
atgcagcaaggaaagccaacagctcaaagacatggaaggaagtttgctttgcttgtgttgatgcagaggagtttcgtttggcccaaatttgtggactaaacattattattcaggtggatgacttggaagaagtcagtgaatattaccaaaacagaggttgcttcaatgagctcatatctctcatggagagtggtttagggttagaagggcacatatgggcatctttactgagttaggagttctgtacgc

SEQ ID NO: 143389 - DNA, 228 bp, Glycine max
ctaattgtttaaacctaattctcatttcttcatcgttcgattcttctcctcctaaagatgcagatcttcgtgaaaactttgaccggtaagaccatcacccttgaggtggagtcctccgacaccatcgataacgtgaaagctaagattcaagacaaggaagggatcccacctgaccagcagagacttatctttgcgggtaaacagcttgagatggtcgaaccttgccga

SEQ ID NO: 143390 - DNA, 257 bp, Glycine max
  unsure (1)..(257): unsure at all n locations
aaggccccttcgccactgtttccgatgaggaacnccagaaacagcaactccaatcaatcagtgcgtacgttngcgtcgttgacganggaccccagggcctaaggtggtgaaaggagacccanccactaaggcagagaaggggacacatgttcatcaccatccgcaaccacattactttncttcaacggcgtttnatgtcagtgacagtgcgcnaaattcacccacgtcctctacaatctctcccccgctgagctgta

SEQ ID NO: 143391 - DNA, 260 bp, Glycine max
gacgatgatgttatgctgcttgattgggtaaaaggacttctgaaagagaaaaagcttgaaatgttggtagatcctgatctacaaaccaactatatagaaactgaggtagaacagttaatccaggttgcactactctgcacacaaggttccccgatggaccgacctaagatgtcagaagtggtgagaatgcttgaaggtgctggcttggcagaaaatgggatgagtggcaaaaggtggaagttctccggcaggaggtggag

SEQ ID NO: 143392 - DNA, 257 bp, Glycine max
agcgatatcattgtctctccgtccattctttctgcaaacttttcaaaattgggagagcaggtgaaagcagtggaattggctggttgtgattggattcacgttgatgtaatggatggtcgctttgttccaaatattacaattggacctcttgtggttgatgcattgcgccctgtgacagatcttcctttggatgtacacctgatgattgtagacctgaacaaagggtaccagattttattaaggcaggagctgatata

SEQ ID NO: 143393 - DNA, 252 bp, Glycine max
gttcatgaatatgtcaagccttactttagtggttctaaattgaaaagctttctagctggtcataatatcaccattactgatggtattgacaaaactagtgcaactttgcaatttagaaagttagcagattgtgattttctcaagagaaactttaagcagatgtctaatgttttatgggtggctcctgaggacaaggcgagtttatggcacaacttcattatgtttcgtgcaataatctctgaaatgcaagaa

SEQ ID NO: 143394 - DNA, 238 bp, Glycine max
gaggaatttcttacagcttggtcaactcaggtgcgtcccgcaacgactctgttggctgatgggtgcccatatttgtatgctatggtgcatgatagttcagtgtctacaataccaggtgattttgtcattggtgttaagttgacaaccataaacaatatgtgtgcatatgggctcaatcctggtatttcaggttctgtcttttgggcaccattcctcagtccatttcacagcaaactgt

SEQ ID NO: 143395 - DNA, 250 bp, Glycine max
ctttatctttctttccccaatttgtgagtgttactgttgaatcgattggattggcattaggttgatctgaaatacgcaattgacatggcgagcgcgatggtagaggacgcgaacttcgaagatgaccaactagccaatatgaccaccgacgacatcgtcagagcttctcgtcttctcgacaacgagattcgcatcctcaaggaagattgcagaggaccaatttggaattggaatcgtacaaggacaagat

SEQ ID NO: 143396 - DNA, 252 bp, Glycine max
agcatttggaaatttggctgatgacaccatcaattttgaggcttttccaaactgcaccagcttgtggggaaaagcctcaaaattgctggtgtagtttggagagattcaggaaaaagttgtgttgaaattttcacaagaggaatttcttacagcttggtcaactcaggtgcgtcccgctacgactctgttggctgatgggtgcccatattgtatgctatggtgcatgatagttcagtgtctacaataccaggt

SEQ ID NO: 143397 - DNA, 177 bp, Glycine max
gatttgaaattttaataaaccgcgatcacaggttgccgtaccttaaaaccggaaacaaaagcaatcgttacttgatttcaagaatttctcaatttcttcctacatctttgtgtacgatttcttaagggaaagaaaatcactctctgtgctggtcacagacttcgtgaatcattttct

SEQ ID NO: 143398 - DNA, 253 bp, Glycine max
tcggggcacagtctgaatctgaaatccatcttcataatctcaattcaatataggagggatctgtagccctgcgccgacgctataaaaatgtcgctgaatatgaaatcccaaacccaagcatgtgcgacgatcgcggcggtgatcgttacgtctgtgctgacgacggtgcccgatctgacgtgtccgctggcacttcaggactacgagctctcgaccagatcggctccgcggggtccgggctcgcctggagact

SEQ ID NO: 143399 - DNA, 167 bp, Glycine max
cacaggttgccgcaccttaaaaccggaaataaaagcaatcgttacttgatttcaagaatttctcaatttcttcctacttctttgtgtacgatttcttaagggaaagaaaatcactctctgtgctggtcacagacttcgtgaatcattttcttttccacacaacatac

SEQ ID NO: 143400 - DNA, 230 bp, Glycine max
tggaaacaaatttgtgtaaattgtctcttgatgatgttgacactcctaaaggttctatgttggatcttaaaatttctcaatctaaaattgcacttcccaagaacacagttcgaggaaccattctgcgtagtgatctattggcaaattttctgacagagggcaattttagagccagtgttgatttgcagcgcactcatcgtataaaggaatgattaacgtcgtggccacag

SEQ ID NO: 143401 - DNA, 243 bp, Glycine max
gttggatcttaaaatttctcaatctaaaattgcacttcccaagaacacagttggaggaaccattctgcgtagtgatctattggcaaattttttgacagagggcaattttagagcaagtgttgatttgcagcgcactcatcgtattaaaggaatgattaaaatggtggccacagttggtattcctgagactacaggtatagcatggcctgtgctatgaatagttcttttagggggcgcgccagt

SEQ ID NO: 143402 - DNA, 181 bp, Glycine max
tctcgagccatttcggctcgaggacattttgataaaccgcgatcacatgttcacgaaccttaaaaccggaaacaatatcaatcgttacttgatttcaccaatctctcaatttattcctacttctatgtgtacgtattcttaagggatagtaaatcactctctatgctggccacagacttcg

SEQ ID NO: 143403 - DNA, 277 bp, Glycine max
agacaacattgcactctctggatttactcccttcacttccaagtttgtttccagtgaagaggaatatttcgattcagatgatgtcatgacaaaccgtcttctccgcacacgttctactgctttacagtctttcccttctcatgaaccaacattcccatggttcctgccgctagcacaaagcaagagtttaggaggagatatgtcccacatggatggcctcataaactggatccacttgagccagttttattgttcaccaaacctctacttccagata

SEQ ID NO: 143404 - DNA, 287 bp, Glycine max
ttcggctcgaggacctattgtgttttaaatccacaaaatccttttgtgttaaataggtggatgggaaaactgactttccctcagggcacttcccgaagtgttaagagaatgcctctttctatagggggaggagctggtgcaaagaatgctattctcatgaatatgccaaatgctgttctttcaatgtggagatattttgttggagatctcgtctttgaagtttctaagatgacttctccctacattaaatgtacagtctctttcttcatagcatttggaaatttggc

SEQ ID NO: 143405 - DNA, 183 bp, Glycine max
ttaagatttgaaattttaataaaccgcgatcacaggttgccgcaccttaaaaccggtaacaatagcaatcgttacttgatttcaagaatttctcaatttcttcctacttctttgtgtacgattacttaagggagaatcactcttgtgctggtcacagacgtcgtgaatcattttcttttccac

SEQ ID NO: 143406 - DNA, 274 bp, Glycine max
aagaaacatggtattctgggatgaaggaaaaatttgtacaaatgatgaagagcatctatgaaacagaagttacagattggccagtaccactgaaaatcatttctggaaccattcttgcaacaattttgggaacaaccttctgaaactcttttcctttcttagagatgctggtaatgggggagtttttgttggcaatgttgcttcagcattcacaacttcaagtttgcttgaggcccaaagtagaaagcccaacagatatgagagttcccagtac

SEQ ID NO: 143407 - DNA, 272 bp, Glycine max
ctcgagccgcaagactgtgaattgtggaatcctgcttgcacaaaagcaatgactatgtcatttaatccaaacccgtgttctgatgcatggagtttggaatttttgaagcgtaccggatttcattgtgatatcatttgtgtactgggtggactgccaccccaatgcaggatgttcaggttacaattcattggtttatttcctctcaggaatgtgttcccaggacctattgtgttttacatccacaaaatccttttggtgttaaataggtggat

SEQ ID NO: 143408 - DNA, 274 bp, Glycine max
ggatgttcaggttacaattgattggtttatttcctctcaggaatgtgttcccaggacctattgtgttttaaatccacaaaatccttttgtgttaaataggtggatgggaaaactgactttcccccagggcacttcccgaaggttaagagaatgcctctttctatagggggaggagctggtgcaaagaatgctattctcatgaatatgccaaatgctgttctttcaatgtggagatattttgttggagatctcgtctttgaagtttctaagatga

SEQ ID NO: 143409 - DNA, 273 bp, Glycine max
ggaaaactgagagctcagagagccaagtccatgaaattcaaggatggatacatgatttcttctggacaacctgtcaaggattacattgactcagcagtgagacatgtgctactaagacagggtgttcttggtatcaaggtaagatcatgcttgattgggatcctaaagggaaacagggtcctaaaactccccttcctgatcttgtcacgatccacactccaaaggaggaagaagaatacaaccggcctcctgctgtgttggcaaatgatattg

SEQ ID NO: 143410 - DNA, 265 bp, Glycine max
caaaatctagcagaagcaaattcacttctaagatacacatattaagttcaccagagtgagagagagacattaatcaagatgggtacgtggttcacaaatgcaaggccgtatctgctgttagtggcggttcaatttggctcagcaggcatgttcatatttgcgatggatgctataaagaagggtatgagccattacgtgttcatcgtctatcgtaatgccatcgcctctgtatctcttgctcccttcgcattcgttttagaaagga

SEQ ID NO: 143411 - DNA, 269 bp, Glycine max
atttgaaattttaataaaccgcgatcacaggttgccgcaccttaaaaccggaaacaaaagcaatcgttacttgatttcaagaatttctcaatttcttcctacttctttgtgtacgatttcttaagggaaagaaaatcatctctgtgctggtcacagacttcgtgaatcattttcttttccactcctagtttatgtcttgaacactctcctatttgatataggacttcgtgtcagatttaaacttgttctgtttctgtctcagttctctg

SEQ ID NO: 143412 - DNA, 265 bp, Glycine max
ctgaaatggacgttgctttcaaagacgcaaaccccaaagcccctctctgggaacaagtctcaaggaagttagcagagctaggatataatagaagtgctaagaagtgcaaggagaaattcgagaacgtttacaagtaccaaggagaaccaaagaaggtcgttttggaaaatcaaacggtgcaaaaacttatcgatttttcgagcagttggaagccttagacggaaaccactcacttcctcctccgacaaaaacaaccgacaacaac

SEQ ID NO: 143413 - DNA, 271 bp, Glycine max
gaagtggccaatgaagttaattcatgggctgaaaaggagacaaatggacttgttaaagaccttcttcctcctggatcagttgacagttcaaccagactcatctttgcaaatgcactgtacttcaaaggagcatggaatgaaagtttgattcttcgataacaaaagactatgattttcaccttcttgatggccgttcaatcagggttcccttcatgacgagcaggaagaatcagtttattagggcttttgatggtttcaaagtccttggtct

SEQ ID NO: 143414 - DNA, 273 bp, Glycine max
ggtttttagggtttacaccgagcagcgacacctccctcccgcagtagccatggttctcaaaactgaactatgccgattcagtggtgccaagatctaccccggaaagggcatcagatttgttccgttgtgattctcaggttctcctgtttgccaactcaaaatgtaagccgtaattccacaaccgcctgaagccctcaaagctcacctggactgctatgtacagaaagcaacacaaaaaggacattgctcaagaagctgtgaagaagaggagac

SEQ ID NO: 143415 - DNA, 274 bp, Glycine max
tacaggaaaactgctgaggctgtaatgtgtggtcttcttccggattctccaacagccacaaaaagcagaacagatgatggtcttatatgggtgagccaatggaactctttgcaacatcctgttgcatccgcattcttagctgctgtttacagtgactatatgctaacatcgcagacaccaaaactaaaatgtggttcagattcctttaccccatcagatcttcgagactttgccaaatctcaggctgattacgtattgggcaagaatcctatgc

SEQ ID NO: 143416 - DNA, 273 bp, Glycine max
gcactattgctatgatgatgctgaccttaaaaagcttcaaagatcattccctgctaatgcatcatacaacatgcaaaggttcaaagggttgggagagatgatgcctttacaactatgggaaacaaccatggatccagaacgcaggttattgaagcaattaaaagttgaggatgcagcagaagcaaatattgttttttcgtctcttatgggtactagggtggatgttcggaaggaactcatacgaaattctgcaagcctgattgatcttcatca

SEQ ID NO: 143417 - DNA, 271 bp, Glycine max
gggagatggtcgggctaagatactcaacaatggagagcttctcactctgtcacttgacaaagcctctggctcgggtttccactccaagaacgaatacctttattggcaaaattgacatgcaactcaaactagtccctggaactctgctcgacccgtcactgcctactatttgtcttcaaaaggagcgacatgggatgagattgactttgaattcttgggcaatttgagcggcgacccatacatccttcacaccaacgtgtttagccaaggc

SEQ ID NO: 143418 - DNA, 269 bp, Glycine max
tattattctcctcattccttcatttttaaacctagctccatctccctccactcaccataacatgccatcagaagcacatgctgccaacaccaacttctgtgtaaatgttagcaacaatggctacattagtgctaatgacccttgaactggggtgcggcggcggaggctatggctgggagccacctcgacgaggtcaagcgcatgctagaggagtaccggtagcccgtcgtcaagctcggtggagagaccctgaccatctcgcaggtcgc

SEQ ID NO: 143419 - DNA, 268 bp, Glycine max
cgcttcctactcctccctttcaccacttttctgctcccccttgagaaagaatttgaatcatcaaaattaaaaactcgcaccaacaatggccccaagagacagccgagccaccgcgttcgccggaccaggcccaggccatcaccggcccacaaagagatccgctaccgaggcgtccggaaacgcccctggggccgctacgccgccgagatccgcgaccccggcaagaaaacgcgcgtctggctcggcaccttcgacacagccgaggaag

SEQ ID NO: 143420 - DNA, 266 bp, Glycine max
tgacatgcctatggttagaaggtcggctgcatcaaatcttgggaaatttgctgcaactgttgaatatgctcatttgaaggctgatctcatgtcaatttttgatgatcttactcaagatgatcaagattctgtcagatgttggctgtggagggctgtgctgcttctggcaaactgttggagcctcaagattgtagtgcacatatactcccggttaattgtaacttctcccaggataagtcttggcgcgcgcgttacatggttacaaa

SEQ ID NO: 143421 - DNA, 267 bp, Glycine max
gctgctgatatcagtcactgcaacaccccctcacaagtcagggatttcactggagcttctgagttggcgaattgtttgaaggatgtgaatgttgttgtcatacccgccggtgttccaaggaagcctggcatgactctgatgaccttttcaacatcaatgccggcatagtcagggacttggtttctgctgttgcggataatagccctgatgcttttattcaaatcatcagtatacctgtgaactctaccgtgcctattgccgcagaag

SEQ ID NO: 143422 - DNA, 268 bp, Glycine max
cttgcacaaaagcaatgactatgtcatttaatccaaacccgtgttctgatgcatggagtttggaatttctgaagcgtaccggatttcattgtgatatcatttgtgtcactggatggactgccaccccaatgcaggtgttcaggttacaattgattggtttatttcctctcaggaatgtgttcccaggacctattgtgttttaaatccacaaaatccttttgtgttaaataggtggatgggaaaactgactttccctcagggcacttcc

SEQ ID NO: 143423 - DNA, 264 bp, Glycine max
agattgagacaaagaatagatcctcaatacaatgaggttcaggctcagatggaaacaaatttgtttaaattgtctcttgatgatgttgaaactcctaaaggttctatgttggatcttaaaatttctcaatctaaattgcacttcccaagaacacagttggaggaaccattctgcgtagtgatctattggcaaattttttgacagagggcaattttagagcaagtgttgatttgcagcgcactcatcgtattaaagggatgatta

SEQ ID NO: 143424 - DNA, 269 bp, Glycine max
gttctgagtgggcaaatcaaacttcatggcatttgagtttccttattgacaatcccaaacagtctacagtttttgatattctcttgggaatctctcaagattttgaaattgctggtaatactcttatgccagctttgactgttccacaggctactgccagatcttctgaaaatgcggaatcctctgcatgatctggaattcgtgttttctttcgcttgtacgtttgtttaattcaataaaggaaattaggcatgacgctcttgttgagt

SEQ ID NO: 143425 - DNA, 268 bp, Glycine max
ttgagcggttggaaatcgcttttgaatttggcaattccaagttgcatttccgtatgcctcgagtggtggtggtacgaaatcatgattttactttgcgggttattgattaatccccaagcaacggttgcatcaatggggttctgatacaaaccactgctctgatatacattttcccatcttccctgagctttgcggtttccacacgtgtcggaaatgaactgggtgcggagaatcccaaaaaggcaaaagtcgcagcactggtggggtt

SEQ ID NO: 143426 - DNA, 267 bp, Glycine max
aaattttgtgaggttcattatgaagaaaagggacaagcttagttgtcaagttggaatcaacccatactccatggaatggactggtttggccaatagattactgagtaagggcaatgatattctgtgttgcgattagctagttttgatggtttgattaccaagcaagttatgagcaagatggcagaaatgataaacagtctttgtggtggtgatgaaaaattgatgcgtgaaaggacgcacctgctgttggcttgttgttcaaggatg

SEQ ID NO: 143427 - DNA, 267 bp, Glycine max
ctttattctaatcccactttggaagatatcccacattcagcttgggaccttttttgctgggacagtgagaaaactttgccaaataatttttctgcagaattgctctcttgcaaattggatactgttactggccaaattatcctgagtgggctccaattaattgtcgagttcatcgacaaccaattcacatcactgaaggaaattatgtcagacagcaagatgtcagcattgaatatgatgcatgtacaattccaaatgattgtggtt

SEQ ID NO: 143428 - DNA, 263 bp, Glycine max
tttgcagaaggtgtcttctgatctcagggcatccatctggaagcagatggctgatgctgggatcaagtacatccccagcaacactttctctcactatgaccaggttctcgacgccaccgccaccctcggtgccgtccaccaaggtacggctgcttcggcggcgagattgggtttgatacctacttctccatggccagaggtaatgctaccgtgccagctatggagatgaccaagtggttcgacacaactaccaccccattgtc

SEQ ID NO: 143429 - DNA, 260 bp, Glycine max
atgagaatgggaaacactgatgctcaaattttgatggttccagggcgcagattcatagctcatggacattttttcaaaaatctgactcagaaagtgcgagtccaaattgttacatctgaaaagagttactggctgtgtatgatcctgacaagtttcagatgtttgacaacagtgaaataggtctttattctaatcccactttggaagatatcccacattcagcttgggaacttttttgctgggacagttgagaaactttg

SEQ ID NO: 143430 - DNA, 267 bp, Glycine max
ccaacattctcacaagtcacagccaaacaccatttcattaattcttgcagaatattgcttagttttgttttatctgaatttggaaacagcttttgaatggctttttcaagagttgcactgctaatatgcacggtcgggtattttgtgattgcctctgccggcaatttccaccaagattttgatatcacatggggagatggtcgggctaagatactcaacaatggagagcttctcactctgtcacttgacaaagcctctggctcgggt

SEQ ID NO: 143431 - DNA, 265 bp, Glycine max
tatttttgttgcgcctttcagaggcggaaggcccattcgggtggttacatttccgaataccattgtgcagattgaaccagacatgaattcaaggtttcagcttttgagtaccactaccaatggtgattttgttaagggaaagatctcgcaatggttaaagttaatgtagcatgtgctgctgttggcttgacatcaagttacactccaactccattgttggaatctggtttgcaaaaagacagagggttaattgtggagtattttg

SEQ ID NO: 143432 - DNA, 268 bp, Glycine max
ccaatggtgattttgttcaagggaaagatctcgcaatggttaaagttaatgtagcatgtgctgctgttggcttgacatcaagttacactccaactccattgttggaatctggtttgcaaaaagacagagggttattgtggagtattttggaaggatgtcttacgttgctcataacgttaatcagccccaagagaaagatttgttagagggaaatttttcctttgatattaaatctcgctctagattggaaaaagtttcctctacaaaa

SEQ ID NO: 143433 - DNA, 260 bp, Glycine max
ctcaatttagaaaatttctaccgcattacattaggtgacatctgtatagcttgttgatctacaatctcccatcgtttctcactgctgaaattaaatatatgcgggatttgagtaatattcatatgaccggcttatgttacgacggcagatacaaattctggactacacacgaggcgaatctagattcgacagaagaggttaagctggacatgattacaaatagaggcattactgcaggtagacttgcaaagcgagctcat

SEQ ID NO: 143434 - DNA, 266 bp, Glycine max
ccctacctctcctttcaagatgcagatcttcgtcaagaccctcaccggaaagaccatcacccttgaggtggaaagctctgacaccatcgacaacgtcaaggccaagatccaggacaaggaaggaattcccccggatcagcaacgtctcatcttcgccggaaagcagctcgaggacggccgtaccctcgccgactacaacatccagaaggagtcaacccttcaccttgtccttcgtctccgtggtggcatgcagatcttcgtcaaga

SEQ ID NO: 143435 - DNA, 255 bp, Glycine max
ctttgctgtaagtttctgattcctttcttcagaattccaagttttcatttcgttagggacaaaagattgtgagatacagtatggctggaaaaggcgagggtcctgctatcggaatcgatttgggaacgacgtatctcgcgtcggcgtgtggcaacacgatcgtgttgaaatcatagccaacgatcagggtaatagaactacgccatcctacgtggctttcaccgatacagaacggttgatcggcgatgcggcgaa

SEQ ID NO: 143436 - DNA, 261 bp, Glycine max
acagtacagagcattttgactgctgcattcccagacatcacaatcttgaccattatacaaaattctccaattagtaacttgttgcgagttgctgcttggaagaaaggttgtttaatggtcaagattgtgatgctgggaatgcagcagtcaaaaggagtgattgggcctcattggtacaagtgtttttaacaaacagcaacagtacagagcattttgatgcatgtaagtgggctgaatcagaaccacattcctgggaattaa

SEQ ID NO: 143437 - DNA, 265 bp, Glycine max
ccgattgctagaatggaatttcgatgctcagtcatctcttttaccattctcttctctcttgctcttgcaggagagagccatgtccatgcatcgctacctgaggaagattattgggaagctgtttggccaaacctcccattcccactgcactgcgagagcttctaaagcctctccctgcaggtgttgaaatcgatgaactccctaagcaaattgatgatacacagtacccaaaaacattcttctataaagaagaccttcatccagg

SEQ ID NO: 143438 - DNA, 176 bp, Glycine max
aaaccgcgatcacaggttgccgcaccttaaaaccggaaacaaaagcaatcgttacttgatttcaagaatttctcaatttcttcctacttctttgtgtacgatttcttaagggaaagaaaatcactctctgtctggtcacagacttcgtgaatcattttcttttccacacaacatat

SEQ ID NO: 143439 - DNA, 261 bp, Glycine max
ggcataccttgttggactctttgaggatactaatctgtgtgccattcacgctaagcgtgtaactattatgcccaaagatatccagctggcaagaaggattcgtggtgagcgtgcttgatgtggtggtggtgtggtggttgtgaagatgatgatgggtggctgcggatggtgttttgttattcagatttcttttttattcaaagatagggttgttagggagtaggtattaattgtgatacgggcaaatactgctaagtgtcc

SEQ ID NO: 143440 - DNA, 259 bp, Glycine max
gaattccagatcatgcagaggattcgtgttttctttcgcttgttcgtttgtttaattcaataaaggaaattaggcatgaccctcttgttgagtatgctctgcctatctgaaaatttccacacctcttttaatgtcgtaatgatgtgtgaagtgtgtgttattttaaaaaaaaaaaaaaaaaaaaaaaaaaaaaaagggggggcccccgattatggacctcttcccccggggatttattccgggacggtttcttgggggg

SEQ ID NO: 143441 - DNA, 260 bp, Glycine max
ctttagtggttctaaattgaaaagctttctagctggtcataatatcaccattactgatggtattgacaaaactagtgcaactttgcaatttagaaagttagcagattgtgattttctcaagagaaactttaagcagatgtctaatgttttatgggtggctcctgaggacaaggcgagtttatggtcacaacttcattatgtttcgtgcaatatctggatatgcaagaagctatcttgtcatctctaaatgtgttacgaga

SEQ ID NO: 143442 - DNA, 261 bp, Glycine max
gttggaggaaccattctgcgtagtgatctattggcaaattttttgacagagggcaattttagagcaagtgttgatttgcagcgcactcatcgtattaaaggcatgattaggatggtggccacagttggtatcctgagaatacaggtatagcattggcctgtgctatgaatagttcttttagggggcgcgccagttctgatatttacaccatctgctctcaagactgtgcattatggaatcctgcttgcacaaaagccatga

SEQ ID NO: 143443 - DNA, 150 bp, Glycine max
ctgccaccccaatgcaggatgttcaggttacaattgattggtttatttcctctcaggaatgtgttcccaggacctattgtgttttaaatccacaaaatccttttgtgttaaataggtggatgggaaaactgctttccctcttaacacttc

SEQ ID NO: 143444 - DNA, 263 bp, Glycine max
cttgactttccaaagaacattagtgtcattgctgtgtgcccaaagggaatgggtccatctgtaaggaggctctatgtccaaggcaaagagataaatggtgctggaattaatgcaagttttgcagtccaccagatgtggatggcagggctactgatgttgctttgggatggtctgttgcccttggttctccattcacttttgccactacattagagcaggaatacaggagtgatatctttggggagagaggcattttacttggt

SEQ ID NO: 143445 - DNA, 266 bp, Glycine max
  unsure (1)..(266): unsure at all n locations
caggactttaccgtgttgttcacggtattgatccatttgatccaaagttcaacattgtctntcccggtgcagacatgggtatatacttcccatanactgaaactgagcgtaggttaacagaattccactctgacattgaangcgcttntttacagctcagtggagaatgaggaacacatatgcgtattgaaggaccgcaacaaaccantaatnttcaccanggcnaggcttgacgatgtgaagaacatcncggggcttgtcgngtt

SEQ ID NO: 143446 - DNA, 264 bp, Glycine max
ggagagagagagagagagagagaggagggaaaggatgggttgttgccaatcatcgacgttgctgagagtgggagagagggagactcaccctgaaaaggaaaaggaaaaagaccaccagaggctctctgaggccgagaaagagggctttgatttctccttctctgagttctcgctggctgagctgaaggcggccaccaacaatttcagctctgactatatcgtgtctgagagtggggagaaggcacccaaccttgtttacaaggg

SEQ ID NO: 143447 - DNA, 260 bp, Glycine max
ctcaaagtgctgaagtttactttgacttcttccctgtggaggttgatagtcaagagggagttgctcacattggtgaattgaaatctggtgtctatgttccactgcctacaaaaactaatttgatggaaatcccaaggaatggcaactggatctaccttgtgacaaaattcctagtgtcttgactacaactgatgagagattggtaggcacagaacatgagggatatgatccttttcttggtggaattcaaaaatatgcca

SEQ ID NO: 143448 - DNA, 261 bp, Glycine max
atccgcattgccgttcaaagtggtcttatttgaaaaacacttgggcgttggtgcaaatgtttgcttcgttaattttctctggagacaacaggctcactgagaaaacactttttacttgcagagatttggcatcttggttgtctattatacaatagcaactcaatttagaaaatttctaccgcattacattaggtggcatctgtataccttgttgatctacattctcccatcttttctcactgctgaaattaaatataagcg

SEQ ID NO: 143449 - DNA, 260 bp, Glycine max
gcacgaaacataatgaagttgtgaccataaactggaaatgcaagaagcttatcttgtcaatctcgtaaatgtgttacgagaattgtatttgcacagtccagaggaagctcgccaattgagaaggaaagcctctctcgtattgaatggctgcaaaaagctgatgtgcctaccatagcacagattgaagagttccattcgatgcagaggatgatgaatgctcctgattcaaatgataatattgatctactgttgagcattga

SEQ ID NO: 143450 - DNA, 262 bp, Glycine max
taaaggttctatgttggatcttaaaatttctcaatctaaaattgcacttcccaagaacacagttggaggaaccattctgcgtagtgatctattggcaaattttttgacagagggcaattttagagcaagtttgatttgcagcgcactcatcgtattaaaggaatgattaaaatggtggccacagttggtattcctgagaatacaggtatagcattggcctgtgctatgaatagttcttttagggggcgcgccagttctgata

SEQ ID NO: 143451 - DNA, 236 bp, Glycine max
aaaagcacaatttgttagtggaaaaaccttcaaatatgatataattggtgctggttcacattcttcaggagattttcctgaaaaggaagatcaagaaaaacccaaaaagattgataccagattgagacaagaatagatcctcaatacaatgaggttcaggctcagatggaaacaaatttgtttaaattgtctcttgatgatgttgaaactcctaaaggttctatgttggatcttaa

SEQ ID NO: 143452 - DNA, 262 bp, Glycine max
ctcccaaggaatggcaactggatctaccttgtgacaaaattcctagtgtcttgactacaactgatgagagattggtaggcacagaacatgagggatatgatccttttcttggtggaattcaaaaatatgcactcccatgatgcccctagatgaagaaattctttctaaggttgcacaagatatggttgaggaatggtttgattgtgttgatgaggaggattcctttgaggaagtttctttaagtgcagcacttaatggtgtt

SEQ ID NO: 143453 - DNA, 262 bp, Glycine max
ttcttcaggagattttcctgaaaaggaagatcaagaaaaacccaaaaagattgataccagattgagacaaagaatagatcctcaatacaatgaggttcaggctcagatggaaacaaatttgtttaaatttctcttgatgatgttgaaactcctaaaggttctatgttggatcttaaaatttctcaatctaaaattgcacttcccaagaacacagttggaggaaccattctgcgtagtgatctattggcaaattttttgacag

SEQ ID NO: 143454 - DNA, 261 bp, Glycine max
gcaaagccagcatgagaatgggaaacactgatgctcaaattttgatggttccagggcgcagattcatagctcatggacattttttcaaaaatctgactcagaaagtgcgagtccaaattgttacatctgaaagagttactggcatgtgtatgatcctgacaagtttcagatgtttgacaacagtgaaataggtctttattctaatcccactttggaagatatcccacattcagcttgggaccttttttgctgggacagtga

SEQ ID NO: 143455 - DNA, 261 bp, Glycine max
agcccatatgcacacatattgtttatggttgtcaacttaacaccaatgacaaaatcacctggtattgtagacactgaactatcatgcaccatagcatactgtttggaatcaaatggcaacagtgagaaaccattgaattttgattctagcaagcagagcttttgtcaattttctattgaccttctcggtggaggaattttagtggacaaaactggagattggatcacacttatacaaaattctccaattagtaacttgttg

SEQ ID NO: 143456 - DNA, 260 bp, Glycine max
tgaaaaacacagaatcgcgtttgcgactgaggaatgagtttcctgcagggtatcgttgattccttcaactccatcttcatacccgataacaacaattatcacgacaccaattctccttcttcttcttctcctcaacgaatcgaatggaagcttctcctcctcctcctcctcttcctccttcggtttcgaacgagcgcgttgcctacaagctcaaaggctacttcgatttggcgacgcaggagatcgcgaagggcgttagg

SEQ ID NO: 143457 - DNA, 260 bp, Glycine max
attctctctactactgctagctgtgacttgttttgagttcaatcaaatcgcattggtatctgaaatcaggaaagatggttagcgtactgagatcaggcaggcacaaagggcagaaggcccagcaacctccttgccattggaactgcaaacccaccaaaccgtgttgatcagagcacctatcctgattactacttcagaatcaccaacagtgaccacatgaccgagctcaaagagaaatttcagcgcatgtgtgacaagtc

SEQ ID NO: 143458 - DNA, 260 bp, Glycine max
gggtttggactatatggaaagaattcctcttgccacatctgagggttttcctcatgtgctttcacgcaaaaatggcgataaaggcaaaaggagatttgtctctggggatggtgaagagatgacattgatccaggaaccagtgttgaagaggcttacaacaagctaatagttgaacttgagaaaagtgttcctacattggttggcattgaatgtcccaaggatgagaaacttcctcgtcgcaaaatttttgacaaacctaa

SEQ ID NO: 143459 - DNA, 260 bp, Glycine max
gcttcataaactccatgtcccttaaatgtgtggttgacttaggcataccagatatcatacacaactatggccaacccatgccactctcaaacctcattgcttcactaccaatccacccatccaaaactgcttcgtccattgcttgatgcgaatcatgatccattctggcttcttctctcaacaaaaccatgacttggagaatgagctagaagccaagtatgtgctaaccgatgcatctgtactattgcttaagaaccatc

SEQ ID NO: 143460 - DNA, 259 bp, Glycine max
cttcttcagtggtggaagctactagaacactagtttgttgagcactgcgatgaggaagtggacggttgcttccgctctccttcttctctctctcctctttctctttgcagatcaaggtcgaaagtttaggcgaatgccgagggagattccgacgagcttgtagatcctccgaaggtggaggacaagatcggtgctgtgcctcatggcctttccaccgattcagatgtcctcaagagggagtcggagtcgatctcgaaga

SEQ ID NO: 143461 - DNA, 258 bp, Glycine max
gctggtgcagtttggagagattcaggaaaaagttgtgttgaaattttcacaagaggaatttcttacagcttggtcaactcaggtgcgtcccgcaacgactctgttggctgatgggtgcccatatttgtatgctatggtgcatgatagttcagtgtctacaataccaggtgatattgtcattggtgttaagttgacaaccataaacaatatgtgtgcatatgggctcaatcctggtatttcaggttctcgtcttttggg

SEQ ID NO: 143462 - DNA, 260 bp, Glycine max
aaaagattcaagatatattagtgaggcttctttccgtttcttgtaatacaatcatgatgtaaattaagtgtaaaagtttcaagatatactaacttgcaagtatcaaagaataaaagaatgaacatccatacaaatgaaaaccaattcaatcatgatgcttggcactctgggggaaggccttgtggaaatctattggtgtcagtgcagtaattgtaaatcatgtaattcttctgcacccaactcagtctgtcttggcttgt

SEQ ID NO: 143463 - DNA, 256 bp, Glycine max
ccaggacctattgtgttttaaatccacaaaatccttttgtgttaaataggtggatgggaaaactgactttccctcagggcacttcccgaagtgttaagagaatgcctctttctatagggggaggagcggtgcaaagaatgctattctcatgaatatgccaaatgctgttctttcaatgtggagatattttgttggagatctcgtctttgaagtttctaagatgacttctccctacattaaatgtacagtctctttc

SEQ ID NO: 143464 - DNA, 264 bp, Glycine max
ctttcttcactttcttcctccacatggcagagatacttaccctcagaatccacgaagtctgccccatctcgccgccacaagaaaccccatcaaccactattcccttcaccttcttcgacgtcctatggctacgcctccccccagtggagcgtctgttcttctattccttcccaaacccaacaacaacctcttcattcttcgacaccaccattctcccaaatctcaaacactccctctccctcactctccaccacttccctcctc

SEQ ID NO: 143465 - DNA, 259 bp, Glycine max
aaattttgataaaccgcgatcacaggttgccgcaccttaaaaccggaaacaaaagcaatcgttacttgttctcaagaatcttcaaactttcttctgttttctctgcactcggttctttaggaaaagaaaatcactctctgtattgattacagacttcgtgaatcattttcttttcaactttcagttcacttgctgaacactctcctataaatatataggacttcgtgtcagatttgaacttttcctgtctctttctcgg

SEQ ID NO: 143466 - DNA, 259 bp, Glycine max
catctgtataccttgttgatctacattctcccatcttttctcactgctgaaattaaatataagcggaatttgagtaatattcatatttccggcttattttacgacggcagatacaaattctggactaaacacgagaaaaatcctgctttgacagaagaggaaaagatggaagtgattagaaatagaggcattcctgctgatgttcttgcaaagcgagctcatgaatttgagaaacatgttgctcatgaaagcctcaagg

SEQ ID NO: 143467 - DNA, 258 bp, Glycine max
caaaacttatcaaaatctcatatactgattcagttctatacataaccatcgagatttactatcaaaccaaaaattctcaaaatctcttcacctctgtgatgaccatggaatacagaaccttagaactcaacatcatatccgcaaaggacatcaagaacgttaacctcttctccaagatggacgtatacgcgtcgttacgctctccggcgaccctctccaccctcagggcgccaccacccacgtccacaaagacgccgg

SEQ ID NO: 143468 - DNA, 262 bp, Glycine max
catcgcaacaccgatagaatctcctcaccttttcgactctacacgctctcatctcgtcaccatgcagatcttcgtcaagactctcaccggcaagaccatcaccctcgaggtcgagtcgtcggacaccatcgacaacgtcaagagcaagatccaggacaaggaaggcattcccccggatcagcagcgcctcatcttcgctggcaagcagcttgaggatggccgcactctcagcgactacaacatccagaaggagtcgaccctt

SEQ ID NO: 143469 - DNA, 262 bp, Glycine max
cgcccggtggcacagacagcatcctcatcaacgccggcaccgactgcaccgaggagttcgaagccatccactccgacaaagccacgcaaatgcttgcagactaccgaatcggcgagctcaccaccacctgctacaactctgattcttcatcgtcaaacccctccctgcatggcagctccgacaccatcccttgacccccatcaaggaagtgattacaccaatgcgaactgtggctcttaacccacgcgagaaaatcccatgc

SEQ ID NO: 143470 - DNA, 258 bp, Glycine max
atcctgagtgggctccaattaattgtcgagttcatcgacaaccaattgacatcactgaaggaaattatgtcagaaagcaagatgtcagcattgaatatgatgcatgtacaattccaaatgcttgtggttcattggttgttgccaaggttggaaatcacaaacaaattgttggtttccatgttgctggaacaaaggaagactgggatatgcttcattgataccatatgttgagccagttgtgcaagctcaaagtgctga

SEQ ID NO: 143471 - DNA, 164 bp, Glycine max
taaaccgcgatcacaggttgccgcaccttaaaaccggaaacaagagcaatcgttacttgatttcaagaatttctcaatttcttcctacttctttgtgtacgatttcttaagggaaagaaaatcactctctgtgctggtcacagacttcgtgaatcattttcttt

SEQ ID NO: 143472 - DNA, 257 bp, Glycine max
tctcgagcgaatcggctcaggcctctttctatagggggaggagctggtgcaaagaatactattctcatgaatatgccacaatgctgttctttcaatgtggagatattttgttggagatctcgtctttgaagtttctaagatgacttctccctacattaaatgtacagtctctttcttcatagcatttggaaatttggctgatgacaccatcaattttgaggcttttccccacaagctggtgcagtttggagagattc

SEQ ID NO: 143473 - DNA, 259 bp, Glycine max
ccattaagtgctgcacttaaaggtgttgagggtttggactatatggaaattcctcttgccacatctgagggttttcctcatgtgctttcacgcaaaaatggcgacaaaggcaaaaggagatttgtctctggggatggtgaagagatgacattgattccaggaaccagtgttgaagaggcttacaacaagcaatagttgaacttgagaaaagtgttcctacattggttggcattgaatgtcccaaggatgagaaacttcc

SEQ ID NO: 143474 - DNA, 256 bp, Glycine max
caggaatgtgttcccaggacctattgtgttttaaatccacaaaatccttttgtgttaaataggtggatgggaaaactgactttcccccagggcacttcccgaagtgttaagagaatgcctcttacctatagggggaggagctggtgcaaagaatgctattctcatgaatatgccaaatgctgttgcttcaatgtggagatattttgttggagatctcgtctttgaagtttctaagatgacttctccctacattaaa

SEQ ID NO: 143475 - DNA, 255 bp, Glycine max
ggtcaacattgagcaacagagcccggatatcgcccagggtgtgcacggccacttcaccaagcgcccagaggaggttggtgctggtgaccagggtcacatgtttgggtatgccaccgatgaaacccccgagtacatgcccctcagccatgtccttgcaaccaaacttggtgctcgcctcacagaggctaggaagaatggcacctgtgcttggttgaggccagatggtaagacacaagtaaccgtcgagtactacaa

SEQ ID NO: 143476 - DNA, 257 bp, Glycine max
gctggtgcaaagaatgctattctcatgaatatgccaaatgctgttctttcaatgtggagatattttgttggagatctcgtctttgaagtttctaagatgacttctccctacattaaatgtacagtctctttcttcatagcatttggaaatttggctgatgacaccatcaattttgaggcttttcccacaagctggtgcagtttggagagattcaggaaaaagttgtgttgaaattttcacaagaggaatttcttaca

SEQ ID NO: 143477 - DNA, 253 bp, Glycine max
cctcgagcccaatcggctcgagtgttgttggagtgagcgaagaacatgtattctagagatccatggggtggaccgttggagataaacgcgacggactcggcgacggaggacgagcggaccggaacctgcaggacgttgacagggcagcgctgtcgcgtcccttggatgagacgcagcagagctgggctccttggccccggcgagcagaagaagaagaagtacgtcgatctcggctgcatcatcggcagccgca

SEQ ID NO: 143478 - DNA, 257 bp, Glycine max
aaaaatagcaagcctcaagctactgcaatgcatgtgggagctatagaaattatcattgatagtttcgcaagtcgtgactgcaacatagttggtgcaatgcttttggttgatacttatcataccaatcctgaaaatgcagttcgtagtatttttgttgcgcctttcagaggcggaaggcccatatcggtggttacatttccgaataccattgtgcagattgaaccagacatgaattcaaggtttcagcttgtgagtac

SEQ ID NO: 143479 - DNA, 260 bp, Glycine max
cccaggacctattgtgttttaaatccacaaaatccttttgtgttaaataggtggatgggaaaactgactttccctcagggcacttcccgaagtgttaagagaatgcctctttctatagggggagcgagctggtgcaaagaatgctattctcatgaatatgccaaatgctgttctttcaatgtggagatttttgttggagatctcgtctttgaagtttctaagatgacttctccctacattaaatgtacagtctctttctt

SEQ ID NO: 143480 - DNA, 258 bp, Glycine max
aatttttgacaaacctaagacgcgctgcttcactattctccctatggagtttaatcttgtggtccgtcaaaagtttttaaattttgtgaggttcattatgaagaaaagggacaagcttagttgtcaagttggaatcaacccatactccatggaatggactggtttggccaatagattactgagtaagggaatgatattctgtgttgcgattatgctagttttgatggtttgattaccaagcaagttatgagcaagatg

SEQ ID NO: 143481 - DNA, 249 bp, Glycine max
cagatagggcacgtctctcgcggcctcttctctccctcgcgccgcccacactaaaaggtgattgctctattattgtttgacgatggctgatgctcatgggactgataagaacattgaggtgaggaaaatcaagaaattgatcaaagctcttgaggctgccagaggaaatgggacaagtatgatttcccttatcatgcctccacgtgatcaaatatctcgtgtcaccaagatgcttggtgatgagtttgg

SEQ ID NO: 143482 - DNA, 170 bp, Glycine max
gaaattttaataagccgcgatcacaggttgccgcaccttaaaaccggtaacaaaagcaatcgttacttgatttcaagaatttctcaatttcttcctacttctttgtgtacgatttcttaagggaaagagaatcactctctgtgctggtcacagacttcgtgaatcatttt

SEQ ID NO: 143483 - DNA, 254 bp, Glycine max
tccacctacctacgcaccgagcctaagatggcataacccaagtacttgaccggcgataagcccgcgatcgaggaatttctcagcaagttcgatacttttctctttgactgcgatggcgtactatggtccggcgatcacctctatgaccgtgttccggagacactagagatgttgaggagcaaggcaaacaactcgtcttcgtcaccaacaacagcaccaagagtcgcgccgactacaagcagaaatttgacaag

SEQ ID NO: 143484 - DNA, 254 bp, Glycine max
ggtgaccaagtttgtcagtttgggaaaacaaattgctagcatttgtcatggacagttgattctggctgctgctggagtggttaaaggccgcacgtgcacggcttttcctcctgttaaacccgtgctagttgctgctggtgctcattgggttgaacctgacactgaggcagcaacagtggtagatggtgatctcattactgcagctacttatgaggggcaccggagctcattcgccatttcgtgaaggcattagg

SEQ ID NO: 143485 - DNA, 254 bp, Glycine max
accaattcacatcactgaaggaaattatgtcagaaagcaagatgtcagcattgaatatgatgcatgtacaattccaaatgattgtggttcattggttgttgccaaggttggaaatcacaaacaaattgttggtttccatgttgctggaagcaaaggaagactgggatatgcttcattgataccaatgttgagccagttgtgcaagctcaaagtgctgaagtttactttgacttcttccctgtggaggttgatag

SEQ ID NO: 143486 - DNA, 255 bp, Glycine max
acatggcttccttaagctccttagtgctgctccttgcagctctaattctatcccctcaagttcttgcaaactatgagaatcccccagtgtacaagcctcccactgagaaaccaccagtttataagcccccagttgagaagcctcctgtttacaagcctccagttgagaagcctccagtttataagctccagtagagaagccaccagtgtacaagcccccagttgagaatcctccagtgtacaagccgccagttga

SEQ ID NO: 143487 - DNA, 252 bp, Glycine max
tccacctacctacgcaccgagcctaagatggcagaacccaagtacttgaccggcgataagcccgcgatcgaggaatttctcagcaagttcgatacttttctctttgactgcgatggcgtactatggtccggcgatcacctctatgaccgtgttccggagacactagagatgttgaggagcagggcaaacaactcgtcttcgtcaccaacaacagcaccaagagtcgcgccgactacaagcagaaatttgaca

SEQ ID NO: 143488 - DNA, 255 bp, Glycine max
tctcgagccgattcggctcgagttctcatgaatatgccaaatgctacttctttcaatgtggagatattttgttggagatctactctttgaagtttctaagatgacttctccctacattaaatgtacagtctctttcttcatagcatttggaaatttggctgatgacaccatcaattttgaggcttttcccgacaagctggtgcagtttggagagattcaggaaaaagttgtgttgaaattttcacaagaggaatt

SEQ ID NO: 143489 - DNA, 254 bp, Glycine max
cttgggagaagaggtcgagtttcacagcagcaatggtgtacgtcaaggctcagaaatcaaaagcctacttcaagagatatcaagtcaagttcaagagaagaagagagggaaaaaccgattaccgtgccaggattcggttgattaatcaggacaagaacaaatataacactccgaaataccgattgttgttcgctttagcaacaaggacattgttgcacaaataatatctgctagcattgctggcgatattgttc

SEQ ID NO: 143490 - DNA, 254 bp, Glycine max
agctcatctccgaccgcaccctcggcgacaccgtcatcggcaccgtccatgttcctctcagggaactcctggataaccccggcgatgacagctccttccgccaagtcagttatcaggtgatgaagcaatcaagaaaatccaagggatccttgaatttctcctacaaattcggcgaacatgttccgccccggccgccaagacacccaaagcggccaaggcgggacaagagccggtgatggcttatcctcctgctg

SEQ ID NO: 143491 - DNA, 251 bp, Glycine max
cggcacacacagacacacacatttcgtcggaatgggaagggtgattcgcgcacagcgtaagggtgcggggtcggtgttcaagtcccacacccaccaccgcaagggtccggcgaggttccgcagcctcgacttcggcgagcgcaacggctacctcaaaggggtcgtcaccgatatcatccacgaccctggtcgcggtgctcctctagccaaggtggcgttccgccacccttccgctacaagaagcagatgga

SEQ ID NO: 143492 - DNA, 250 bp, Glycine max
tcaacccatactccatggaatggactggtttggccaatagattactgagtaagggcaatgatattctgtgttgcgattatgctagttttgatggtttgattaccaagcaagttatgagcaagatggcagaaatgataaacagtctttgtggtggtgatgaaaaattgatgcgtgaaaggaccacctgctgttggcttgttgttcaaggatggcaatttgtaagaaagatgtttggagagttgaatgtgga

SEQ ID NO: 143493 - DNA, 252 bp, Glycine max
ctcttgccacatctgagggttttcctcatgtgctttcacgcaaaaatggcgacaaaggcaaaaggagatttgtctctggggatggtgaagagatgacattgattccaggaaccagtgttgaagaggcttacaacaagctaatagttgaacttgagaaaagtgttcctacattggttggcattaatgtcccaaggatgagaaacttcctcgtcgcaaaatttttgacaaacctaagacgcgctgcttcactat

SEQ ID NO: 143494 - DNA, 257 bp, Glycine max
cgatgaagacgaggaggagttgaagaagaagccctttgggttctctcgctccagcaacaaggctgcttctaagcctctctctcgtggatcagcaactgtggaatcaaaggggcaagctgagaagtgtgccaagagaaagaggaagaaccagtatcgtggaatccgtcagcgtccatggggaaagtgggctgctgagatccgtgacccaagaaaaggggttcgtgtttgggcttgaactttcagcactgctgaagaag

SEQ ID NO: 143495 - DNA, 250 bp, Glycine max
agctggtgcagtttggagagattcaggaaaagttgtgctgaaattcctcttgtgaaaatttcaacacaagaggaatttcttacagcttggtcaactcaggtgcgtcccgcaacgactctgttggctgatgggtgcccatatttgtatgctatggtgcatgatagttcagtgtcgccaataccaggtgactttgtcattggtgttaagttgacaaccataaacaatatgtgtgcatatgggctcaatcctg

SEQ ID NO: 143496 - DNA, 251 bp, Glycine max
gtaagtcaattaccttcagaagctgtcgttgtaaatgttacatgtggtagtggacgtggtggtttacccaccactgcttggattagttctgcagttaacaatcgctcctcagacatcaacaaaaggattcgcacagcacttgggaaaggtaagaaaattgtttttcttactagagttgatccttatacagtagctttattggctgttctttttggcgttaagaatgaaattctgagttctaacgccactaa

SEQ ID NO: 143497 - DNA, 246 bp, Glycine max
attaagcatggtcataaattgagaatagtatggccagtaacccctgaaattcatcattacactgaagggccatgcaggtatcttggtcatctgattggtcatgaaggagaagggtctttatattacatattgaaaaaattgggatgggctacgatattgtatgctggcgaatcagattggagtttggactgttctttctttaaagttgtaattgatcttactgatgctggtcatgagcacatacaa

SEQ ID NO: 143498 - DNA, 249 bp, Glycine max
gtgtgcatatgggctcaatcctggtatttcaggttctcgtcttttgggcaccattcctcagtccatttcacagcaaactgtttggaatcaaatggcaacagtgagaacaccattgaattttgattctagcaagcagagcttttgtcaattttctattgaccttctcggtggaggaatttagtggacaaaactggagattggatcacacttatacaaaattctccaattagtaacttgttgagagttgct

SEQ ID NO: 143499 - DNA, 248 bp, Glycine max
cctcaagctactgcaatgcatgtgggagctatagaaattatcattgatagtttcgcaagtactgattgcaacatagttggtgcaatgcttttggttgatacttatcataccaatcctgaaaatgcagttcgtagtatttttgttgcgcctttcagaggcggaaggcccattcgggtggtacatttccgaataccattgtgcagattgaaccagacatgaattcaaggtttcagcttttgagtaccact

SEQ ID NO: 143500 - DNA, 249 bp, Glycine max
gggcacttcccgaagtgttaagagaatgcctctttctatagggggaggagctggtgcaaagaatgctattctcatgaatatgccaaatgctgttctttcaatgtggagatattttgttggagatctcgtctttgaagtttctaagatgacttctccctacattaaatgtacagtctctttctcatagcatttggaaatttggctgatgacaccatcaattttgaggcttttccccacaagctggtgcag

SEQ ID NO: 143501 - DNA, 247 bp, Glycine max
gttactattgaatcgattggattgacatggcgagcgcgatggttgaggacgccaacttcgaagatgaccagctcgccaatatgaccaccgacgacgtcgtcagagcttctcgtcttctcgacaacgagattcgcatcctcaaagaagagttgcagaggaccaatttggagttggaacgtacaaggactagatcaaggagaatcaggagaagattaagctcaataagcagttgccctacctcgttggg

SEQ ID NO: 143502 - DNA, 249 bp, Glycine max
aatgaggttcaggctcagatggaaacaaatttgtttaaattgtctcttgatgatgttgaaactcctaaaggttctatgttggatcttaaaatttctcaatctaaaattgcacttcccaagatcactacgcagaatggttcctccaactgtgttcttcggaagtgcaattttagattgaggaaccattctgcgtagtgatctattggcaaattttttgacagagggcaattttagagcaagtgttgattt

SEQ ID NO: 143503 - DNA, 247 bp, Glycine max
cagcttttgagtaccactaccaatggtgattttgttcaaggaaaagatctcgcaatggttaaagttaatgtagcatgtgctgctgttggcttgacatcaagttacactccaactccattgttggaatctggtttgcaaaaagacagagggttaattgtagagtattttggaaggatgtctacgttgctcataacgttaatcagccccaagagaaagatttgttggagggaaatttttcctttgatat

SEQ ID NO: 143504 - DNA, 246 bp, Glycine max
ccacgttttgctcagatgatgtggcggcttaatttttttgtggccttctgttgtattgtgcttaacaatgcctatatgctctactatatatgcccaatgcacacgcttttcactttgatggtgtatggagcattgggtatatataacaagtataatgaaattccctctgtaatggctgcaaagattttggcatgctttcttgtggtgatcttggtttgggaaatccctggattctttgacatattt

SEQ ID NO: 143505 - DNA, 244 bp, Glycine max
gtttggggtgtgctgcaagagagggaggagggagtatatggaggatcgttacacagctggggataatcttcgcggagaacacaaactggctttttttggcatatttgatgggcacggtggtgcaaaagctgctgaatttgctgcaagtaacttagaaaagaatgtgttagatgaagtaatcgtgagagatgaagataatgttgaggaggcagtgaagcgagggtacctaaacaccgattcggat

SEQ ID NO: 143506 - DNA, 243 bp, Glycine max
gtttgtttactctcttgactatgcccgtacccgtcttgccaatgatgcaaaggctgcaaaaaagggtggagagagacaattcaatggtctcgttgatgtctacaggaagacattggcatctgatggtgttgccgggctctaccgtggtttcaacatctcatgtgttggaatcatcggtatcgtggtctgtactttggattgtatgattctgttaaaccagttgtcctcacagggtcattgcag

SEQ ID NO: 143507 - DNA, 247 bp, Glycine max
taaggttagctacgatacactgcggttaccgcacaaggttctggctcaagagtctgacggctccgttaaattcggtcacggcgattcctccgcctacctgtttgatcctgatatttacactgatggtaggatctccgttcagggaattgacggcgttcttatccctcctgaagaagagaagaacgcactcgccgcaccactccacttgttaaggttgctgctcctaaaccaagaagagggaagttga

SEQ ID NO: 143508 - DNA, 251 bp, Glycine max
tctcgagccgaatcggctcgagaatgggttcttcttctattacaacactcgcccgcaaccatgaccatggctgcgatcgtgctcctgttcacggtctttgccgtttcctccgccctagacatgtcgataatctcgtacgacagcgcccacgcggacaaggccgccacgttgcgcaccgaggagcagctgatgtccatgtacgagcagtggctcgtgaagcacgggaaggtgtacaacgcgctcggcgagaa

SEQ ID NO: 143509 - DNA, 255 bp, Glycine max
tcttgggaatctctcaagattttgaaattgctgttaatactcttatgccagctttttctgttccacaggctactgccagatcttctgaaaatgcggaatcctctgcatgatctggaattcgtgttttctttcgcttgttcgtttgtttaattcaataaaggaaattaggcatgaccctcttgttgagtatgctctgcctatctgaaaatttccacacctcttttaattgtcgtaatgatgtgtgaagtgtgtgtt

SEQ ID NO: 143510 - DNA, 242 bp, Glycine max
aactggtgacccagatgctgggattagcatccaccagaattgcattaccagttgagcttgcagaagatgggcccatttatgtcaatgccaaacaataccatggtatactgagaaggcgacagtcacgagcaaagcttaaggctcaaaacaaactcatcaaaagtcgtaaggtatgcttcacaaattacagttatacattattttgattcaccctgtttatcctaccttattcgtgtatggtc

SEQ ID NO: 143511 - DNA, 159 bp, Glycine max
aagataaaccgcgatcacaggttgccgcaccttaaaaccggaaacaaaagcaatcgttacttgatttcaagaatacctcaatttcttcctacttctttgtgtaccctttcttaagggaaagaaaatcactctctgtgctggtcacagacttcgtgaatc

SEQ ID NO: 143512 - DNA, 247 bp, Glycine max
caccgaagaagagcgataatacgaggtactacgaaatcctcggcgtctcgaagaacgcttcgcaggatgatctgaagaaggcttacaagaaagccgccatcaagaatcaccctgacaagggcggtgatcccgagaagtttaaagagctggcacaagcatatgaggttctgagtgaccctgagaagcgtgagatatatgatcagtatggtgaagatgcgcttaaggaaggaatgggtggtggcggtgg

SEQ ID NO: 143513 - DNA, 249 bp, Glycine max
tttaattttaataaaccgcgatcacaggttgccgcactttaaaaccggaaacaaaagcaatcgttacttgatttcaagaatttctcaatttcttcctacttctttgtgtacgatttcttaagggcaagaaattcactctctgtgctggtcacagacttcgtgactcattttcttttccactcctagtttatcacttgaacactctcctatttgatataggacttcgtgtcagatttaaactttttctgt

SEQ ID NO: 143514 - DNA, 249 bp, Glycine max
atccgcattgccgttcaaagtggtcttatttgaaaaacacttgggcgttggtgcaaatgtttgcttcgttaattttctctggagacaacaggctcactgagaaaccaatttttacttgcagagatttggacatcttggttgtctattatacaatagcaactcaatttagaaaatttctaccgcattacattaggtggcatctgtataccttgttgatctacattctcccatcttttctcactgctgaaa

SEQ ID NO: 143515 - DNA, 173 bp, Glycine max
gaaattttaataaaccgcgatcacaggttgccacaccttaaaaccggaaacaaaagcaatcgttacttgatttcaagaatttctcaatttcttcctacttctttgtgtacgatttcttaagggaaagaaaatcactctctgtgctggtcacagacttcgtgaatcattttctt

SEQ ID NO: 143516 - DNA, 251 bp, Glycine max
caattttagagcaagtgttgatttgcagcgcactcatcgtattaaaggaatgattaaaatggtggccacagttggtattcctgagaatacaggtatagcattggcctgtgctatgaatagttcttttagggggcgcgccagttctgatatttacaccatctgctctcaagactgtgaattatggaatcctgcttgcacaaaagcaatgactatgtcatttaatccaaacccgtgttctgatgcaggagttt

SEQ ID NO: 143517 - DNA, 228 bp, Glycine max
cccgcatgtgccgtagcagttgagctgaaaccgagaagaagaagatggagatgtatcagatctggagcaggagaatagcgttgggagcgttcgcgtttgttctgcttttcctatcggcctcagcagacgacgtcgttgtgctctctgaagataacttcgagaaggaagttggtcaggacagaggagctctcgttgagttctatgctccttggtgtggacactgcaaaa

SEQ ID NO: 143518 - DNA, 250 bp, Glycine max
gtgtatgctattattagaattgctcttgttggttgtgtagtttgagctcatcatatatttacagttggtatagatttagattcgcgagcttattttactagagcaactataattattgcggttcccactgctgtaaagatttttagttgattaagaacattatttggtaacaaatttattaatcaatctgttttatactgggttttaggttttatttttttatttactgttgggggtttaactggagtaa

SEQ ID NO: 143519 - DNA, 251 bp, Glycine max
ctcagatggaaacaaatttgtttaaattgtctcttgatgatgttgaaactcctaaaggttctatgttggatcttaaaatttctcaatctaaaattgcacttcccaagaacacagttggaggaaccattctgcgtagtgatctattggcaaattttttgacagagggcaattttagagcaagtgttgatttgcagcgcactcatcgtattaaaggaatgattaaaatggtggccacagttggtattcctgag

SEQ ID NO: 143520 - DNA, 251 bp, Glycine max
aagggaaagatctcgcaatggttaaagttaatgtagcatgtgctgctgttggcttgacatcaagttacactccaacttcattgttggaatctggtttgcaaaaagacagagggttaattgtggagtattttggaaggatgtcttacgttgctcataacgttaatcagccccaagagaaagatttgttagagggaaatttttcctttgatattaaatctcgctctagattggaaaaagtttcctctacaaaa

SEQ ID NO: 143521 - DNA, 250 bp, Glycine max
ctttcttcactttcttcctccacatggcagagtcatcgaccctacgaatccacgaagtctgccccatctcgccgccacaagaaaccccatcaaccactattcccttcaccttcttcgacgtcctatggctacgcctccccccagtggagcgtctgttcttctattccttcccaaacccaacaacaacctcttcatacctcgacaccaccattctcccaaatctcaaacactccctctccctcactctcca

SEQ ID NO: 143522 - DNA, 246 bp, Glycine max
gaatagttctttcaatgtggagatattttgttggagatctcgtctttgaagtttctaagatgacttctccctacattaaatgtacagtctctttcttcatagcatttggaaatttggctgatgacaccatcaattttgaggcttttccccacaagctggtgcagtttggagagattcaggaaaaagttgtgttgaaattttcacaagaggaatttcttacagcttggtcaactcaggtgcgtcccg

SEQ ID NO: 143523 - DNA, 250 bp, Glycine max
caaagcattgaattcaaaaacttaagttcattccttgtgttttgctttcttcctcaaaaccaaacatgtcgaacacatgcggcaactgcgactgcgctgacaagactagctgcaccaagggaaacagctatggtgttattgtagagactgagaagagttacatcgagactgttgtcatggatgttccagcagctgagcatgatgggaagtgcaagtgtggcactaactgcacttgcacggactgcacctg

SEQ ID NO: 143524 - DNA, 249 bp, Glycine max
ggtttatgttcttccaaaaggcatgaatctaagagtgctggaattgaaatggtgactgaaaaggagcagggagagttgacggcaagagataatcctttgtgttcttcttgtcagatgcttgttctttggatccagaatcaactaaaacaaaaggcaacgaaggacagagtattcaactatgtgaatcacatgtgtgagagcctaccaagtccatctggagagtcagtgataagctgtaatagtctttcc

SEQ ID NO: 143525 - DNA, 170 bp, Glycine max
attttaataaaccgcgatcacaggttgccgcaccttaaaaccggaaacaaaagcaatcgttacttgatttcaagaatttctcaatttcttcctacttctttgtgtacgatttcttaagggaaagaaaatcactctctgtgctggtcacagacttcgtgaatcattttctt

SEQ ID NO: 143526 - DNA, 252 bp, Glycine max
gtttcctctacaaaagcacaatttgttagtggaaaaaccttcaaatatgatataattggtgctggttcacattcttcaggagattttcctgaaaaggaagatcaagaaaaacccaaaaagattgataccagattgagacaaagaatagatcctcaatacaatgaggttcaggctcagatggaaacaaatttgtttaaattgtctcttgatgatgttgaaactcctaaaggttctatgttggatcttaaaatt

SEQ ID NO: 143527 - DNA, 250 bp, Glycine max
ctcaaatcgtagatctacggttaaattggtgtagtgtggtaagatgggaggaggatttagagtgcttcacttagttaggccatttctctcgtttcttcctgaagttcaaactgctgacaggaaagtgccatttagagagaaggtcatatacactgtgatctctcttttcattttcctggtttgtagtcagctccctctatatgggatacactcaacaacaggtgctgatccattctattggatgcgtgtt

SEQ ID NO: 143528 - DNA, 246 bp, Glycine max
cttcattatgtttcgtgcaataatctggaaatgcaagaagcttatcttgtcaatctcgtaaatgtgttacgagaattgtatttgcacagtccagaggaagctcgccaattgagaaggaaagctctctctcgtattgaatggctgcaaaaagctgatgtgcctaccatagcacagattgaagagttccattcgatgcagaggatgatgaatgctcctgattcaaatgataatattgatctactgttg

SEQ ID NO: 143529 - DNA, 245 bp, Glycine max
  unsure (1)..(245): unsure at all n locations
gnacaacttctgctacttcctactccaaccgcacttctgctccgcaattatcatgggcaaggtcaagatcggaatcaacggatttggaagaattggccgtttggtagccagagtggctctgcagagagacgatgttgaactcgttgccgttaacgaccctttcatcaccaccgattacatgacatacatgtttaaatacgacagtgttcaggacactgggaagcatcacgatgtcaccgttaagg

SEQ ID NO: 143530 - DNA, 245 bp, Glycine max
gttcatccatgaatctgtgagacttatgcatgaggctggttatgagattgggaatttagatgctacattgatacttcagaggccaaaactaagcccacacaaggatgctatcaaggccaacttatctgcactgcttggggtggactcttctgtagtaaatatcaaagcaaaaactcatgaaaaggtagacagccttggagaaaatagaagtatagcggctcacacagtggttcttctaatgaaga

SEQ ID NO: 143531 - DNA, 245 bp, Glycine max
ggtcaactcaggtgcgtcccgcaacgactctgttggctgatgggtgcccatatttgtatgctatggtgcatgatagttcagtgtctacaataccaggtgattttgtcattggtgttaagttgacaaccataaacaatatgtgtgcatatgggctcaatcctggtatttcaggttctcgtcttttgggcaccattcctcagtccatttcacagcaaactgtttggaatcaaatggcaacagtgaga

SEQ ID NO: 143532 - DNA, 247 bp, Glycine max
ctacaactgatgagagattggtaggcacagaacatgagggatatgatccttttcttggtggaattcaaaaatatgccactcccatgatgcccctagatgaagaaattctttctaaggttgcacaagatatggttgaggaatggtttgattgtgttgatgaggaggattcctttgaggaagtttctttaagtgcagcacttaatggtgttgagggtttggactatatggaaagaattcctcttgccac

SEQ ID NO: 143533 - DNA, 248 bp, Glycine max
gaaattgagtttctgagataaccacttttctctttgattcatcaatggcaaccgcgaggaccgtgaaggatgtttcgcctcacgatttcgtgaaggcttacgcctcccatctcaagcgttccggcaagatggagcttcctgagtggactgatattgtaaaaacagcaaaatttaaggaattggctccatatgatcctgactggtattatgttagggctgcctcaatggcaagaaagatttatttgaga

SEQ ID NO: 143534 - DNA, 246 bp, Glycine max
cacctttgttcactcttcttctcttgcggctagggttttagcgcacttcttctagatttaaggaagatgggtaaggaaaaggttcacatcagtattgtggtcattggccatgtcgactctgggaaatccactaccactggtcacctgatttacaagcttggaggcattgacaagcgtgttattgagaggtttgagaaggaagctgctgagatgaacaagaggtctttcaagtatgcctgggtgctg

SEQ ID NO: 143535 - DNA, 244 bp, Glycine max
ctcgagccgtgcagtttggagagattcaggaaaaagttgtgttgaaattttcacaagaggacatttcttacagcttggtcaactcaggtgcgtcccgcaacgactctgttggctgatgggtgcccatatttgtatgctatggtgcatgatagttcagtgtctacaataccaggtgattttgtcattggtgttaagttgacaaccataaacaatatgtgtgcatatgggctcaatcctggtattt

SEQ ID NO: 143536 - DNA, 114 bp, Glycine max
cataaacaatatgtgtgcatatgggctcaatcctggtatttcaggttctcgtctttagggcaccattcctcagtccatttcacagcaaactgtttggaatcaaatggactgagt

SEQ ID NO: 143537 - DNA, 246 bp, Glycine max
actcgagccgcggctcgagatgatattctgtgttgcgattatgctacttttgatggtttgactaccaagcaagttatgacgcaagatggcagaaatgataaacagtctttgtggtggtgatgaaaaattgatgcgtgaaaggacgcacctgctgttggcttgttgttcaaggatggcaatttgtaagaaagatgtttggagagttgaatgtggaatcccttctggatttccgctcacagttatttg

SEQ ID NO: 143538 - DNA, 248 bp, Glycine max
atttgtttaaattgtctcttgatgatgttgaaactcctaaaggttctatgttggatcttaaaatttctcaatctaaaattgcacttcccaagaacacagttggaggaaccattctgcgtagtgatctattggcaaattttttgacagagggcaattttagagcaagtgttcgatttgcagcgcactcatcgtattaaaggaatgattaaaatggtggccacagttggtattcctgagaatacaggtat

SEQ ID NO: 143539 - DNA, 249 bp, Glycine max
ggagctggtgcaaagaatgctattctcatgaatatgccaaatgctgttctttcaatgtggagatattttgttggagatctcgtctttgaagtttctaagatgacttctccctacattaaatgtacagtctctttcttcatagcatttggaaatttggctgatgacaccatcaattttgaggcttttccccacaagctggtgcagtttggagagattcaggaaaaagttgtgttgaaattttcacaagag

SEQ ID NO: 143540 - DNA, 248 bp, Glycine max
ctcaaagtgctgaagtttactttgacttcttccctgtggaggttgatagtcaagagggagttgctcacattggtgaattgaaatctggtgtctatgttccactgcctacaaaaactcaatttgatggaaactcccaaggaatggcaactggatctaccttgtgacaaaattcctagtgtcttgactacaactgatgagagattggtaggcacagaacatgagggatatgatccttttcttggtggaat

SEQ ID NO: 143541 - DNA, 238 bp, Glycine max
caatatgtgtgcatatgggctcaatcctggtatttcaggttctcgtcttttgggcaccattcctcagtccatttcacagcaaactgtttggaatcaaatggcaacagtgagaacaccattgaattttgattctagcaagcagagcttttgtcaattttctattgaccttctcggtggaggaattttagtggacaaaactggagattggatcacacttatacaaaattctccaattagt

SEQ ID NO: 143542 - DNA, 242 bp, Glycine max
cgttaatcagccccaagagaaagatttgttagagggaaatttttcctttgatattaaatctcgctctagattggaaaaagtttcctctacaaaagcacaatttgttggtggaaaaaccttcaaatatgatataattggtgctggttcacattcttcaggagattttcctgaaaaggaagatcaagaaaaacccaaaaagattgataccagattgagacaaagaatagatcctcaatacaatg

SEQ ID NO: 143543 - DNA, 240 bp, Glycine max
atctgctctcaagactgtgaattatggaatcctgcttgcacaaaagcaatgactatgtcatttaatccaaacccgtgttctgatgcatggagtttggaatttctgaagcgtaccggatttcattgtgatatcatttgtgtcactggatggactgccaccccaatgcaggatgttcaggttacaattgattggtttatttcctctcaggaatgtgttcccaggacctattgtgttttaaat

SEQ ID NO: 143544 - DNA, 239 bp, Glycine max
  unsure (1)..(239): unsure at all n locations
tgggagcatcttcaagcgtcctcagggtcttttcataagtttgaaagagaaggggaagattcttgaagtattgaaaaactggcctgagaaaagtattcaagttattgttgtaacagatggtgaacgaattttgggactggggatctggatgtcaggggatgggaattcctgtnggtaaattggccttgtncacagncactaggagganttanaccatcagccnngtttgnccatccgat

SEQ ID NO: 143545 - DNA, 150 bp, Glycine max
atttaaataaaccgcgatcacaggttgccgcaccttaaaaccggaaacaaaagcaatcgttacttgatttcaagaatttctcaatttcttcctacttacttgtgtacgatttcttaagggaaagaaaatcactctctgtgctggtcacag

SEQ ID NO: 143546 - DNA, 222 bp, Glycine max
gtcgagccgaaaaaccttcaaatatgatataattggtgctggttcacattcttcaggagatacttcctgaaaaggaagatcaagaaaaacccaaaaagattgataccagattgagacaaagaatagatcctcaatacaatgaggttcaggctcagatggaaacaaatttgtttaaattgtctcttgatgatgttgaaactcctaaaggttctatgttggatc

SEQ ID NO: 143547 - DNA, 157 bp, Glycine max
  unsure (1)..(157): unsure at all n locations
cgaattttaatataccgtgatcacaggttgccgcaccttaaaaccggtcacgaatgcactcgctacttgatttcaagaatttatcaatttcttcctacttctttgtgtacgatttctaatcggnnagaaaatcactctctgtgctggtcacagactt

SEQ ID NO: 143548 - DNA, 244 bp, Glycine max
gtttccttattgacaatcccaaacagtctacagtttttgatattctcttgggaatctctcaagattttgaaattgctggtaatactcttatgccagctttttctgttccacaggctactgccagatcttctgaaaatgcggaatcctctgcatgatctggaattcgtgttttctttcgcttggtcgtttgtttaattcaataaaggaaattaggcatgaccctcttgttgagtatgctctgcct

SEQ ID NO: 143549 - DNA, 242 bp, Glycine max
ttgaaacaacagcaacggagaggatgagaagagagtgaagtttgtgaaagagatggcactcgtaacaacaaacccaaccatcaatgaggggcctctgttcgccgaagttgacatgggttccgacttcaacgccccaacggttcgagctaccgttgttcaagcctccaccatcttctacgacacaccagccaccttagataaggctgagaggttgttggctgaagctactagctatgggtccc

SEQ ID NO: 143550 - DNA, 248 bp, Glycine max
aaaggatgttgttaaaggtttaaagaagcggattggaagtaaagttcctagagttcaaattcttgcactgactctgctggagacaatcataaagaattgtggggacattatccacatgcatgttgccgagagagatgttcttcatgagatggtgaaaatagtaaagaagaagcctgattaccatgtcagagagaagatattgattcttatagatacttggcaagaagcttttggagggccaagggcaa

SEQ ID NO: 143551 - DNA, 235 bp, Glycine max
cgcaatggttaaagttaatgtagcatgtgctgctgttggcttgacatcaagttacactccaactccattgttggaatctggtttgcaaaaagacagagggttaattgtggagtattttggaaggatgtcttacgttgctcataacgttaatcagccccaagagaaagatttgttagagggaaatttttcctttgatattaaatctcgctctagattggaaaaagtttcctctaca

SEQ ID NO: 143552 - DNA, 238 bp, Glycine max
gttgatttgcagcgcactcatcgtattaaaggaatgattaaaatggtggccacagttggtattcctgagaatacaggtatagcattggcctgtgctatgaatagttcttttagggggcgcgccagttctgatatttacaccatctgctctcaagactgtgaattatggaatcctgcttgcacaaaagcaatgactatgtcatttaatccaaacccgtgttctgatgcaggagtttgga

SEQ ID NO: 143553 - DNA, 240 bp, Glycine max
aggagtttgtgctgcggacagggagtgttggtgctgggtgctctcaattgctctcagatatgcaggctttcaaggctgcaaatcctggatgtattttggaggattttgtaagatggcactctcctcctgattggacagataatgaagcaagtacagaggatagtgatgtttttgatagtggtgagccattgtctgccagaggtcagctaagtcggcgaatgcaaaaagaaggtaatttat

SEQ ID NO: 143554 - DNA, 236 bp, Glycine max
ccgattgctagaatggaatttcgatgctcagtcatctcttttaccattctcttctctcttgctcttgcaggagagagccatgtccatgcatcgctacctgaggaagattattgggaagctgtttggccaaacactcccattcccactgcactgcgagagcttctaaagcctctccctgcaggtgtagaaatcgatgaactccctaagcaaattgatgatacacagtacccaaaaac

SEQ ID NO: 143555 - DNA, 240 bp, Glycine max
ctcgagccgtcaggaatgtgttcccaggacctattgtgttttaaatccacaaaatccttttgtgttaaataggtggatgggaaaactgactttccctcagggcacttcccgaagtgttaagagaatgcctctttctatagggggaggagctggtgcaaagaatgctattctcatgaatatgccaaatgctgttctttcaatgtggagatattttgttggagatctcgtctttgaagtttc

SEQ ID NO: 143556 - DNA, 238 bp, Glycine max
gttcagtgtctacaataccaggtgattttgtcattggtgttaagttgacaaccataaacaatatgtgtgcatatgggctcaatcctggtatttcaggttctcgtcttttgggcaccattcctcagtccatttcacagcaaactgtttggactcaaatggcaacagtgagaacaccattgaattttgattctagcaagcagagcttttgtcaattttctattgaccttctcggtggagg

SEQ ID NO: 143557 - DNA, 241 bp, Glycine max
gccttactttagtggttctaaattgaaaagctttctagctggtcataatatcaccattactgatggtattgacaaaactagtgcaactttgcaatttagaaagttagcagattgtgattttctcaagagaaactttaagcagatgtctaatgttttatgggtggctcctgaggacaaggcgagtttatggtcacaacttcattatgtttcgtgcaataatctggaaatgcaagaagcttat

SEQ ID NO: 143558 - DNA, 240 bp, Glycine max
aacaaatttgtttaaattgtctcttgatgatgttgaaactcctaaaggttctatgttggatcttaaaatttctcaatctaaaattgcacttcccaagaacacagttggaggaaccattctgcgtagtgatctattggcaaattttttgacagagggcaattttagagcaagtgttgatttgcagcgcactcatcgtattaaaggaatgattaaactggtggccacagttggtattcctga

SEQ ID NO: 143559 - DNA, 244 bp, Glycine max
ggaaataacgatgacactaaccgtaaagaagtttatatcgtctatatgggagccgcggattcaacaaatgtttctcttcgcaatgaccacgctcaggttctcaatttagttctaagaaggaatgagaatgccctagtacggaactacaagcatggtttctcaggattcgcagctcgtctatcaaaggaggaggcagcctcaattgctcacaaacctggtgtggtgtctgttttccctgacccca

SEQ ID NO: 143560 - DNA, 241 bp, Glycine max
gggcacttcccgaagtgttaagagaatgcctctttctatagggggaggagctggtgcaaagaatgctattctcatgaatatgccaaatgctgttctttcaatgtggagatattttgttggagatctcgtctttgaagtttctaagatgacttctccctacattaaatgtacagtctctttcttcatagcatttggaaatttggctgatgacaccatcaattttgaggcttttccccacaag

SEQ ID NO: 143561 - DNA, 250 bp, Glycine max
gattactgagtaagggcaatgatattctgtgttgcgattatgctagttttgatggtttgattaccaagcaagttatgagcaagatggcagaaatgataaacagtctttgtggtggtgatgaaaaattgatgcgtgaaaggacgcacctgctattggcttattgttcaaggatggcaatttgtaagaaagatgtttggagagttgaatgtggaatcccttctggatttccgctcacagttatttgcaatag

SEQ ID NO: 143562 - DNA, 236 bp, Glycine max
tgtcttacagcttggtcaactcgggtgcgtcccgcatcgactctgttggctggtcggtgcccatatttgtatgctatggcgcatgatagttcagtgtctacaataccaggtgattttgtcattggtgttctcttgacaagcataaacactatgtgtgcatatgggctcaatcctggtatttcaggttctcgtcttttgggcaccattcctcagtccatttcacagcaaactgtttg

SEQ ID NO: 143563 - DNA, 243 bp, Glycine max
tttcttacagcttggtcaactcaggtgcgtcccgcaacgactctgttggctgatgggtgcccatatttgtatgctatcgtgcatgatagttcagtgtctacaataccaggtgattttgtcattggtgttaagttgacaaccataaacaatatgtgtgcatatgggctcaatcctggtatttcaggttctcgtcttttgggcaccattcctcagtccatttcacagcaaactgtttggaatcaa

SEQ ID NO: 143564 - DNA, 239 bp, Glycine max
tgttcttgcaaagcgagctcatgcctttgaccaacatgttgctcatgaacgccccacggatcacattcctgctgttgacaaattgtattctactaaggttaataagtttgcagaaattatgaaccttagacaaagtgttgttggtgatcttaaacttcttactgatgggaagttatatgagggtacgcatatgtctgtatctaatattagtgcaggggtctctcatgtagttcaaatac

SEQ ID NO: 143565 - DNA, 245 bp, Glycine max
gttgacaaccataaacaatatgtgtgcatatgggctcaatcctggtatttcaggttctcgtcttttgggcaccagtcctcagtccatttcacagcaaactgtgtggcatcaaatggcaacagtgagaacaccattgaattttgattctagcaagcagagcttttgtcaattttctattgaccttctcggtggaggacttttcgtggacaaaactggcgattggatcacacttatacaaaattctc

SEQ ID NO: 143566 - DNA, 166 bp, Glycine max
attttaataaaccgcgatcacaggttgccgcaccttaaaaccggaaacaaaagcaatcgttacttgatttcaagaatttctcaatttcttcctacttctttgtgtacgatttcttaagggcaagaaaatcactctctgtgctggtcacagacttcgtgaatcattt

SEQ ID NO: 143567 - DNA, 190 bp, Glycine max
caaaagctcaatttattagtggaaaaaccttcaaatatgatataattaatgctaattcacattcttcagaagattttcctgaaaaggaagatcaagaaaaacccaaaaagattaatgccagattgagacaaagaatagatcctacaatacaataaggttcaagctcagatggaaacaaatttatttaaat

SEQ ID NO: 143568 - DNA, 238 bp, Glycine max
tcgagcatatattgagccagttgtgcaagctcaaagtgctgaggtttactttaacttcttccctatggaggttgatagtcaagcgggagttgctcacattggtgaattgaaatctggtgtctatgttccactgcctacgaaaactcaatttggtggaaactcccaaggaatggcaactggatctaccttatagacaaattcctagtgtcttgactacaactgatgagagattggtagg

SEQ ID NO: 143569 - DNA, 238 bp, Glycine max
gtaagctcgtgatcgatggtccttatggagctccagcacaagactacaaaaactacgaagtaatccttctcgtgggactaggaattggtgccacccctttgattagtattctcaaagatgtgctaaacaacatgaaacaacagaaagacatagaagaagggatggtagaaagtggagtcaagaacaagaggaaaccgtttgccaccaaccgcgcctatttctactgggttactcgtga

SEQ ID NO: 143570 - DNA, 243 bp, Glycine max
ctttaagcagatgtctaatgttttatgggtggctcctgaggacaaggcgagtttatggtcacaacttcattatgtttcgtgcaataatctggaaatgcaagaagcttatcttgtcaatctcgtaaatgtgttacgagaattgtatttgcacagtccagaggaagctcgccaattgagaaggaaagctctctctcgtattgaatggctgcaaaaagctgatgtgcctaccatagcacaattgaa

SEQ ID NO: 143571 - DNA, 240 bp, Glycine max
gctttctagctggtcataatatcaccattactgatggtattgacaaaactagtgcaaccttgcaatttagaaagttagcagattatgattttctcaagagaaactttaagcagatgtctaatattttatgggtggctcctgaggacaaggcgagtttatggtcacaacttcattatatttcgtgcaataatctggaaatgcaagaagcttatcttatcaatctcgtaaatgtgttacgag

SEQ ID NO: 143572 - DNA, 248 bp, Glycine max
ccctctttttttctctctcttgcaaaacctaattttcatttcttccctcaaatttcaaaatgcgtgagatccttcacatccagggtggccaatgcgacaaccagatcggcgccaagttctgggaggtggtttgcgcggagcccgggatcgaccctaccggaaggtacggtggggactcggagttgcagctcgagaggatcaatgtctactacaacgaggccagttgcggtcgagttcgtgccgcgcgc

SEQ ID NO: 143573 - DNA, 230 bp, Glycine max
cgctaatccgcattgccgttcacagtggtcttatttgaacaacacttgggcgttggtgcaaatgtttgcttcgttacctttctctggagactacaggctcactgagcacacactttttacttgcagcgctttggacatcttggttgtctattccacaatcgcaactcaatttagaaactttctaccgcattacattaggtggcatctgtatcccttgttgatctacattc

SEQ ID NO: 143574 - DNA, 249 bp, Glycine max
gtattatcataccaatcctgaaaatgcagttcgtagtatttttattgcgcctttcagaggcggaaggcccattcgggtggttacatttccgaataccattgtgcagattgaaccagacatgaattcaaggtttcagcttttgagtaccactaccaatggtgattttgttcaagggaaagatctcgcaatggttaacgttaatgtagcatatgactgctattagcttcgacatcaagttacactccaact

SEQ ID NO: 143575 - DNA, 228 bp, Glycine max
tatttagtggacaaaactggagattggatcacacttatacaaaattctccaattagtaacttattgagagttgctacttagaagaaaggctatttaatggtcaagattatgatatctaggaattcagcagtcaaaaggagtgattaggcctcattagtacaagtatttttaacaaacagccacagtacagagcattttgatgcatgtacatggacaacatcagaacca

SEQ ID NO: 143576 - DNA, 246 bp, Glycine max
  unsure (1)..(246): unsure at all n locations
cggttgctctgcggcggataaactgaactcaacatggcgggcagctttcatgaaggcatacaaggctatggccaaagagctcaggtctcatccgaatctggattgcttctgtagtgggagcactgctatgactatagtgaagcagggttcaaatctgttcatgggctatatcggggattctcgcgcaatcatggcaccncaggatagcaatgactccatggtggctattcagttgactgttgattt

SEQ ID NO: 143577 - DNA, 247 bp, Glycine max
tgttatttgcaatagcatttttaatgagatgctcattagatatagctatgaaaaattactgcgccaggctaaagctccaagtatatttttacaatccttcaaaaattttatttctttgtatgtgtatggtgatgataacttaattagtgttcatgaatatgtcaagccttactttagtggttctaaattgaaaagctttctagctggtcataatatcaccattactgatggtattgacaaaactatg

SEQ ID NO: 143578 - DNA, 244 bp, Glycine max
gtagttatgagcaagatggcagagatgataaacagtctttgtggtggtgatgaaaaattgatgcatgaaaggacgcacctgctgttggcttattgttcaaggatggcaatttgtaagaaagatgtttggagagttgaatgtggaatcccttctggatttccgctcacagttatttgcaatagcatttttactgagatgctcattagatatagctatgaaaaattactgcgccaggctaaagctc

SEQ ID NO: 143579 - DNA, 241 bp, Glycine max
ctcgagcgaatcggctcagaaatccttttgtgttaaataagtggatgggaaaactgactttccctcagggcacttcccgaagtgttaagagaatgcctctttctatagggggaggagctggtgcaaagaatgctattctcatgaatatgccaaatgctattctttcaatgtggagatattttgttggagatctcgtctttgaagtttctaagatgacttctccctacattaaatgtacagt

SEQ ID NO: 143580 - DNA, 216 bp, Glycine max
ggttgttgccaaggttggaaatcacaaacaaattattggtttccatgttgctggaagcaacggcagactgggatatgcttcattgataccctatgttgagccagttgtgcaagctcaaagtgctgaagtttactttgacttcttccctgtggaggttgatagtcaagagggagttgctcacattggtgaattgaaatctggtgtctatgttccaca

SEQ ID NO: 143581 - DNA, 268 bp, Glycine max
gctcgattctcggctcgtggcttacaggttagtttactcaagtgcatgccataacgcatctagtaggctgattcagtgtgcctatttatattgtcatggtgcaagataattcagtatctacaagacccggtgattttatcattggtgttaagttgacaaccataaacactatgtgtgcatatgggctcaatcctggtatttcaggttctcgtcttttggagcacattcctcagtccatttcacagcaaactgtttggactcaaatggc

SEQ ID NO: 143582 - DNA, 196 bp, Glycine max
aaggtacagcacttaataatattaagggtttagactatatagaaagaattcctcttaccacatctaaggattttcctcatatactttcacacaaaaatggcgaaaaaggcaaaaggagatttatctctagggatggtgaagagatgacattaattaccaggaaccagtattagaagaggacttacaacaagctaat

SEQ ID NO: 143583 - DNA, 241 bp, Glycine max
cggctcgagggagagattcaggaaaaagttatattgaaattttcacaagaggaatttcttacagcttagtcaactcaggtgcgtcctgcaacaactctgttggctgatgggtgtccatatttgtatgctatggtgcatgatagttcagtgtctacaataccaggtgattttgtcattggtgttaagttgacaaccataaacaatatgtgtgcatatgggcttaatcctggtatttcaggtt

SEQ ID NO: 143584 - DNA, 160 bp, Glycine max
taaaccgcgatcacagattaccgcaccttaaaaccggaaacaaaagcaatcgttacttgatttcaagaatttctcaatttcttcctacttctttatatacgatttcttaagggaaagaaaatcactctctatgctagtcacagacttcataaatcatttt

SEQ ID NO: 143585 - DNA, 239 bp, Glycine max
cggacaccatcaattttgaggcttttccccacaacctagtacggccgcagagagattcaggaacaagttgtgttgaaattttcacacgaggcattacttacagcttggtcaactcaggtgcgtcccgcaacgactcatctggctaataggtgcccatatttgtatactatggtgcatgctagttcagtgtctacaataccaggtgattttatcattagtgttaagttgacaaccataaa

SEQ ID NO: 143586 - DNA, 240 bp, Glycine max
  unsure (1)..(240): unsure at all n locations
ctcattggtgccaccttcaaaagcagtcaaccaacgtgatgcagatctcatccatttttgggataagttccgcaaagctcctgtgggttcttctaggaaagctgcagctgagaaacaaattcttgaagcaatgtctcacagaatgcatatagatgacagcatgaaacgtattggaaagctcttctttggcattacgttnggtccagaactgcttagcagtgttagacctgctgggcaacc

SEQ ID NO: 143587 - DNA, 189 bp, Glycine max
gattctagcaagcagagcttctgtcaattttctattgaccttctcggtggaggaattttagtggataaaactggagattggatcacacttatacaaaattctccaattagtaacttgttgagagttgctgcttgtgaagaaaggttgtttaatggatcaagattgatagatgtctagggaatgacagca

SEQ ID NO: 143588 - DNA, 236 bp, Glycine max
gcggaatttgagtaatattcatatttccggcttattttacgacggcagatacaaattctggactaaacacgagccaaatcttgctttaacagacgaggaaaagatggaagtgattagaaatagaggcattcctgctgatattcttgcaaagcgagctcatgaatttgaaaaacatgttgctcatgaaagcctcaaggatccaattcctactgttgacaagttgtattctactaagg

SEQ ID NO: 143589 - DNA, 243 bp, Glycine max
cgatttttattgcgcctttcagcggcggaaggcccattcgggtgattacatttccgaataccattgtacagattgcaccagacatgaattcaaggtttcagcttttgagtaccactaccaatagtgattttgttcacgggaaagatctcgcaatggttaaagttactgtagcatgtgctgctgttggcttgacatcaagttacactccaactccattgttagactctggtttgcaaaaagaca

SEQ ID NO: 143590 - DNA, 243 bp, Glycine max
ggtcatcgttgggatctccatacgccggatctgctaaaatacgcttgatccatatgggcctcctcgaccacttgtgggacgacaccgtcgccggcccaaggccggaaaacggtctcggcaagctccgaaaacaccacaccttcactttccgacctagctccggcaaggaaacggagggcgggagcgtgagatcgtaccgagacgaatcgtcggcggaagcgacgagcatgacgcgtcatatca

SEQ ID NO: 143591 - DNA, 260 bp, Glycine max
tcagaattcggctcgcaatgcttctggttaatccttctcataccaatcctgaaaatgcaattcgtagtatctttgctgcgcctttcagcggcggaaggcccattcgggtggttacatttccgaataccattgtgcagattgacccagacatgaattcaacgtttcagcttttgagtaccactactaatggtgattttgttcaagggaaagatctcgcaatggttaaagttcaatgcagcatgtgctgctgttggcttgac

SEQ ID NO: 143592 - DNA, 242 bp, Glycine max
gtataggtggatgggaaaactgactttccctcagggcacttcccgaagtgttaagagaatgcctctttctatagggggaggagctggtgcaaagaatgctattctcatgaatatgccaaatgctgttctttcaatgtggagatattttgttggagatctcgtctttgaagtttctaagatgacttctccctacattaaatgtacagtctctttcttcatagcatttggaaatttggctgatg

SEQ ID NO: 143593 - DNA, 245 bp, Glycine max
cgacaacataattcgcctgaagagctgttacggcaagtacctcaccgcttccaaccacctcttcctcgtgggcgtgacgggccacaaggttctccagacgcttccctcgaggctggactcttctgtcgagtgggaacccgtcaaggacggagggcgcgtgaagctcaagtcccgttacgggaatttcctcagggcaaatggcgggttgccgccgtggagaaactccgttactcatgatattccgc

SEQ ID NO: 143594 - DNA, 243 bp, Glycine max
ctttgatattaaatctcgctctagattggaaaaagtttcctcgacaaaagcacaatttgttagtggaaaaaccttcaaatatgatataattggtgctggttcacattcttcaggagattttcctgaaaaggaagatcaagaaaaacccaaaaagattgataccagattgagacaaagaatagatcctcaatacaatgaggttcaggctcagatggaaacaatttgtttaaatgtctacttgat

SEQ ID NO: 143595 - DNA, 244 bp, Glycine max
cagaaatatgatataattggtgctggttcacattcttcaggagattttcctgcaaaggaagatcaagaaaaacccaaaaagattgataccagattgagacaaagaatagatcctcaatacaatgcggttcaggctcagataggaacaaatttgtttaaattatctcttgatgatgttgaaactcctaaaggttctatgttggatcttaaaatttctcaatctaaaattgcacttcccaagaaca

SEQ ID NO: 143596 - DNA, 185 bp, Glycine max
aagatttgaaattttaataaaccacgatcacaggttaccgcaccttaaaaccggaaacaaaagcaatcgttacttgatttcaagaatttctcaatttcttcctacttctttatatacaatttcttaagggaaagaaaatacactctctatgctaatcacagacttcatgaatcattttcttttcc

SEQ ID NO: 143597 - DNA, 256 bp, Glycine max
cttacagcttagtcaactcaggtgcgtcccgcaacgactctattagctgatgggtgcccatatttatatgctatggtgcatgatagttcagtgtctacaataccaggtgattttgtcattggtgttaagttgacaaccataaacaatatgtgtgcatatgggctcaatcctggtatttcaggttctcgtcttttgggcaccattcctcagtccatttcacagcaaactgtttggactcaaatggcaacagtgagaa

SEQ ID NO: 143598 - DNA, 239 bp, Glycine max
gctggttaaggatagagtatagcatggcacagtctagttgcaaaactttggtgcagtggttggtagcagcattgctcattgccttgttgggtggtgcacaagctgttgcaatatgtaacatagactcaagtcaattaaacttgtgtcgtgctgcagttactggtcaaaaccctccaccaccggatgagaaatgttgtgcagttgttcgccaagccaatttgcgttgcctctgcagttac

SEQ ID NO: 143599 - DNA, 91 bp, Glycine max
cttctccctacattaaatgtacagtctctttcttcatagcatttggaaatttggctgatgacaccatcaattttgaggcttttccacacaa

SEQ ID NO: 143600 - DNA, 241 bp, Glycine max
ctacaataccaggtgcttttgtcattggtgttaagttgacaaccataaacaatatgtgtgcatatgggctcaatcctggtatttcaggttctcatcttttgggcaccattcctcagtccatttcacagcaaactgtttggcatcaaatggcaacagtgcgaacaccattgaattttgattctagcaagcagagcttttgtcaattttctattgaccttctcggtggaggaattttagtgga

SEQ ID NO: 143601 - DNA, 245 bp, Glycine max
atagaagacaacctgcatatgaggtgatgggccattatgtatgcatggccaaaggtgcagccgaaacacttaaattgaacatggctattatcttgctaccggtttgccgaaacaccatcacttggctaaggaataagaccaagcttggcattatggttccttttgatgacaacctcaatttccacaagtgtatcgccaccgcaataacaattggagttggtatacatggcatctaccatcttgct

SEQ ID NO: 143602 - DNA, 189 bp, Glycine max
cctcgagcgattcggctcagtcaattgttctatttgaagacgacatcattgctgtcttgtctgaagttatttcacggatttttgctgaagttatgcaaggaaagcctgaattcactgaccatttgactcataaactaaagcaccaccctggtcagattgaagctgctgctattatggaccacattttgg

SEQ ID NO: 143603 - DNA, 245 bp, Glycine max
gggttttcctcatgtgctttcacgtaacaatggtgacaaaggcaagaggagatttatttctggggatggtgaagagctgacattgattccgggaaccagtgttgaagaggcttacaacaagctaatagttgaacttgagaaaagtgttcccacattggttggcattgaatgtcccaaggatgaaaaacttcctcgtcgcaaaatttttgacaaacctaagacgcgctgcttcactattctcccta

SEQ ID NO: 143604 - DNA, 148 bp, Glycine max
ttgaaattttaataaaccgcgatcacaggttgccgcaccttaaaaccggaaacaaaagcaatcgttacttgatttcaagaatttctcaatttcttcctacttctttgtgtacgatttcttaagggaaagaaaatcactctctgtgctg

SEQ ID NO: 143605 - DNA, 251 bp, Glycine max
tttagattactgagtaagggcaatgatattctgtgttgcgattatgctagttttgatggtttgattaccaagcaagttatgagcaagatggcagaaatgataaacagtctttgtggtggtgatgaaaaattgatgcgtgaaaggacgcacctgctgttggcttgttgttcaaggatggcaatttgtaagaacgatgtttggagagttgaatgtggaatcccttctggatttccgctcacagttatttgcaa

SEQ ID NO: 143606 - DNA, 246 bp, Glycine max
ctctaacgcgtgcatagcagagtcagagacagagacgcagccatggggaggagacctgcgaggtgttataggcaaattaagaacaagccataccccaagtcacgtttctgccgtggtgttcctgatcccaagatcaggatttatgatgttggtatgaagaagaagggtgttgatgagtttcctttctgtgtccatctggttagttgggagaaggaaatgtttcaagtgaggcctggaagctgctcg

SEQ ID NO: 143607 - DNA, 253 bp, Glycine max
tttgagagttttgacattcttactgatggagaagttcgtcaagggcttaaggtttattcaaactggtccagttatcctcaactgtatatcaagggtgagcttattggtggatcagatattgtgttggagatgcaaaaaagcggagaacttaggaagaatttacacgagaaagggattcttcctgcagagaccattcaagatcgactgaagaatttgattgcctcgtcccctgtgatgctgttcatgaagggta

SEQ ID NO: 143608 - DNA, 253 bp, Glycine max
ccggcatccacccataccaccagcaatgggctccggcggctgccgctcctcctcctcctccggcagccgcgggcggtcctcctcctcaccctggggaggaggttcgaacgatattcataactggtcttccggaagacgtgaaagagagagagctgcagaatctgctgagatggctgcccggtttcgaagcatctcaactgaatttcaaagctgagaagccaatgggttttgctctcttctccgcaccacacca

SEQ ID NO: 143609 - DNA, 248 bp, Glycine max
gctaccctttttaataagggtcgcagagtccacagttatctttttccccatattccagttaggatgttttaatgcatcagcaactttaacatctttcagtttatcaactggccaatccctgctcgagccgttttaatgagatgctcattagatatagctatgaaaaattactgcgccaggctaaagctccaagtatgtttttacaatccttcaaaaatttgtttctttgtgtgtgtatggtgatgata

SEQ ID NO: 143610 - DNA, 251 bp, Glycine max
cggaaattaggctgcccaacagccgtcaaaggatttggttgggttcctacgacagcgccgaaaaggcggcgcgtgcattcgacgcggccatgttctgcttacgtggcagtggtaccaactttaatttcccgagcgaccggcccaacatcgctggcgggaggaacatgacgccctcgcagattcagatcgccgcggcgcgtttcgccaattcggagccccgaaaggagtgttcgggtataccgtggagtctt

SEQ ID NO: 143611 - DNA, 168 bp, Glycine max
tgaaattttagtaaaccgctatcacaggttgctgcaccttaaaaccggaaacataagcaatcgttacttgatttcaagcgtttctcaatttcttcctacttctttgtgtacgatttcttaagggaaagaaaatcactctctgtgctggtcacagacttcgtgaatcat

SEQ ID NO: 143612 - DNA, 266 bp, Glycine max
tcggctcgagccaattgcaaggcctatttccacagatgcaaagatatttataacctctattcaacctgctatagcggttattggcaggcttccaggaacggctgcattcggcgatgttgaacaatatccaatggctgtcaacattcctggggttttgatagtctctttaaaatcttcttggctttgttttgcaaatgcaaatcttgtagaggaaaggattgagagatgggtgaacaatgcaaaagctaaggatggcaaaggaggag

SEQ ID NO: 143613 - DNA, 246 bp, Glycine max
  unsure (1)..(246): unsure at all n locations
ctcaagactgtgaattatggaatcctgcttgcacaaaagcaatgactatgttctttaatccaaacccgtgttctgatgcatggagtttggaatttctgaagcgtaccggatttcattgtgatatcatttgtgtcactggatggactgccaccccaatgcaggatgttcaggttacaattgattggtttatttcctctcaggaatgtgttctcgngacctattgtgttttaaatccacaaaatcctt

SEQ ID NO: 143614 - DNA, 251 bp, Glycine max
tttctgaaaatgcggaatcctctgcatgatctggaattcgtgttttctttcgcttgttcgtttgtttaattcaataaaggaaattaggcatgaccctcttgttgagtatgctctgcctatctgaaaatttccacacctcttttaattgtcgtaatgatgtgtgaagtgtgtgttattttaaaaaaaaacacaaaaaaaaaaaaaaacaaaaaaaaaaaaaaaaagggggggccccccaaattgtccccccc

SEQ ID NO: 143615 - DNA, 244 bp, Glycine max
caactgatgagagattggtaggcacagaacatgaggcacatgatccttttctaggtggaattcaaaaatatgccactcccatgatgcccctagatgaagaaattctttctaaggttgcaaaagatatggctgaggaatggtttgattgtgttgatgaggaggattcctttgaggaagtttctttaagtgcagcacttaatggtgttgagggattggactatatggaaagcattcctctgccaca

SEQ ID NO: 143616 - DNA, 253 bp, Glycine max
tggagaagggttgaggaagactttagtgcgatgggctgattcaatcactgataagaagggtgataatgacgaacaaattgtgagtcctgctgaacagctttctactgactactgttatgctttcaaagtgcgaaagccaggaatggctccccctgtgaaggagcttcgcaagttattacggatccaagctctgcgttgccatccgatatattgtcaaaatgggacaagactgaatgtcattccagtgctggca

SEQ ID NO: 143617 - DNA, 251 bp, Glycine max
gcatgttattagtggtggctacaacatcgagacaggacctggctgtatgcttgcacttatgaactttgatatgggcggttctgctgcactttttggagcagcaaaagctctaggtcagatcaaatctcttggtgtggaggtctgtcatttatatcattgctcactacttttcattttattgtttcacattatctgttatcttgctaactttcaatctactgttaaaagcctctgcttggtcaatagttagt

SEQ ID NO: 143618 - DNA, 252 bp, Glycine max
tgcttgggccactgacgaccatgccctcgagagagccttctctcagtacggcgaaatcgttgaaacgaaggtctgtttgttgcaggcatcacatctgatctcacacgattcggattcggaattttctcgatcccgttctgatctgtgatctctgatctgtttgcgttacttgatcttatgatacttgtgttactatatgtcatctctattactcacgccaatagattatcaacgatcgtgagactggcagat

SEQ ID NO: 143619 - DNA, 252 bp, Glycine max
actcgagccgattcggctcgaggtgggagggtccgaagttggagctagtgattctggttctgttccgttcttctttctactcacaacaacatccctatcagaaactacaatggccaacactaacttggaagatgttccctctctggatctcatgactgagctccttcgtcgtctcaagtgctcttccctccctgacaagcgtcttattctcattggcccacctggatctggaaaaggcacccagtcaccaat

SEQ ID NO: 143620 - DNA, 221 bp, Glycine max
gtcatttaatccaaacccgtgttctgatgcatggagtttggaatttctgaagcgtaccggatttcattgtgatatcatttgtgtcactggatggactgccaccccaatgcaggatgttcaggttacaattgattggtttatttcctctcaggaatgtgttcccagagactattgtgttttaaatccacaaaatccttttgtgctaaataggtggatgggaa

SEQ ID NO: 143621 - DNA, 247 bp, Glycine max
cataacactaggattgccagttgtaggagggatcagttccgagttttccaacttaaggaaagctgcggttacagattacaaaagttttgttggttcaatctcatcactctcagctaggattgttgagattagagaacttgtttcccagtgtggaaatggcaaaggaggcaactttgtgagagaaatgaacaattttcttgaaaatgctgaggaggaattagattagtgagggaggagcaaacaaggt

SEQ ID NO: 143622 - DNA, 248 bp, Glycine max
ttgaagaatggtgatgctggtatggttaagatggttccaaccaagcccatggtggttgaaactttctctgagtatcctccccttggtcgttttgctgtgagggacatgcgtcagaccgtagctgttggagtcatcaagagtgttgagaagatagaccccaccggagccaaggtcacaaaggctgccgccaagaagaagtgattgcattttggcaattttgctagcactgtgatcatcaagtggtttca

SEQ ID NO: 143623 - DNA, 235 bp, Glycine max
caagtccaacctacccctttttcttctcccaccaacttcaccgtacacttcctcgatcatgtctcacttcaagggcaagtaccatgatgcgtttattgccaatgctgcttacattggcactcctggaaagggtattcttgctgctgatgagtcaacagggacaattggcacgcgtttggccagcatcagtgtagagaatgttgactccaacaggcgtgctcttagggagctgctt

SEQ ID NO: 143624 - DNA, 245 bp, Glycine max
cattaattgcaagaatggcacttcgttgcttggtgatgtccctttctgttctcttcactcttggtcttgcgagagaaagccatgccagagacgaagatttttggcatgctgtttggccaaacactcccattccaagttcattgcgagtccttctaaagcctggccctgcaagtgttgagttcgatgatcaccctatgcaaattgaagaaacacagtacccgaaaacctcttctataagtaagacc

SEQ ID NO: 143625 - DNA, 248 bp, Glycine max
tatgaatatgtcaagccttactttagtggttctaaattgaaaagctttctagctggtcataatatcaccattactgatggtattgacaaaactagtgcaactttgcaatttagaaagttagcagattgtgattttctcaagagaaactttaagcagatgtctaatgttttatgggtggctcctgaggacaaggcgagtttatggtcacagattcattatgtttcgtgcaataactggaaatgcaagaa

SEQ ID NO: 143626 - DNA, 248 bp, Glycine max
gattgtttgttgttgtaactcgttcttcttcttttgttgttctgtgtttgtgcttgttttttctctcacctgaaaatgtcttgctgcggtggtaagtgtggttgcggaagctcctgcaagtgcggcaacggctgcggaggctgcaagatgtacccagacttgagctacactgagtcaaccaccaccgagaccttggtcatgggagtggcacctgttaaggctcaatttgagggtgctgaaatgggtgt

SEQ ID NO: 143627 - DNA, 251 bp, Glycine max
tcttaaaatttctcaatctaaaattgcacttcccaagaacacagttggaggaaccattctgcgtagtgatctattggcaaattttttgacagagggcaattttagagcaagtgttgatttgcagcgcactcatcgacattaaaggaatgattaaacatggtggccacagttggtattcctgagaatacacgtatagcattggcctgtgctatgaatagttcttttagggggcgcgccattctgatatttac

SEQ ID NO: 143628 - DNA, 175 bp, Glycine max
atttgaaattttaataaaccgcgatcacaggttgccgcatcttaaaaccggaaacaaaagcaatcgttacttgatttcaagaatttctcagatttcttcctacttctttgtgtacgatttcttaagggtaagaaaatcaatctctgtgctggtcacagacttcgtgaatcatttt

SEQ ID NO: 143629 - DNA, 240 bp, Glycine max
tgcacgaatatcttgttgtttggagcgatccgagaaaaactctgtaaacatgttggtttaccaggacctccttacaggtgatgagcttctctctgactccttccgttacaaggaaattgagaatggaatgctgtgggaagttgacgggaagtgggttgttaaaggagcagttgatgtagacattggtgcaaacccttctgctgagggtggagctgaagatgatggagttgacgatgcacc

SEQ ID NO: 143630 - DNA, 221 bp, Glycine max
  unsure (1)..(221): unsure at all n locations
gctctgcattccgctcgagtaaaccgcgatcacaggttgccgcaccttaaaaccggaaacaaaagcaatcgttacttgatttcaagaatttctcaatttcttcctacttctttgtgtacgatttcttaagggaaagaaaatcactctctgtgctggtcacagacttcgtgaatcattttcttttccacacaacatacgagacgaagnancggggatgtgat

SEQ ID NO: 143631 - DNA, 194 bp, Glycine max
tccgcattcggctcgaggtcgcgggaatcgacaaggccatagaagacggcgtgaatgttttgtccatgtccattgggggaagactgatggagtattatagagatatcatcgcgattggttccttcaccgccacgtcacacgggattctggtgtccacatcagcaggaaacggtgggcccagccaaggaagtttg

SEQ ID NO: 143632 - DNA, 251 bp, Glycine max
cataacgttaatcagccccaagagaaagatttgttagagacgaaatttttcctttgatattaaatctcgctctagattggaaaaagtttcctctacaaaagcacaatttgttagtggaaaaaccttcaaatatgatataattggtgctggttcacattcttcaggagattttcctgaaaaggaagatcaagaaaaacccaaaaagattgataccagattgagacaaagaattgatcctcaatacaatgagg

SEQ ID NO: 143633 - DNA, 234 bp, Glycine max
gtaacaaagcagcacccatttggatcctctcttctcttctttgatctccgttaccctttttgttttctcaacagagagagagagagagaatctttcgaagttcgtttgcgtgtgttgtgtggtcagtcaccgatggcagcaccacctgcgagggcacgtgccgattacgattacctcatcaagcttcttcttattggcgatacggtgtgggaaagagtgtctgttttgcgattt

SEQ ID NO: 143634 - DNA, 244 bp, Glycine max
gtgtaggcaagtcatgtcttctcctgaggtttgctgatgattcataccttgacagctatatcagtaccattggagtggactttaaaatccgcactgtggagcaggatgggaagactattaaacttcaaatttgggacactgcgggtcaggaacgtttccgaacaatcactagcagctattatcgtggggctcatggcattattgttgtctatgatgtcactgaccaagagagctttaataatgt

SEQ ID NO: 143635 - DNA, 244 bp, Glycine max
caattttagagcaagtgttgatttgcagcgcactcatcgtattaaaggaatgattaaaatggtggccacagttggtattcctgagaatacaggtatagcattggcctgtgctatgaatagttcttttagggggcgcgccagttctcgatatttacaccatctgctctcaagactgtgaattatggaatcctgcttgcacaaaagcaatgactatgtcatttaatccaaacccgtgttctgatgc

SEQ ID NO: 143636 - DNA, 245 bp, Glycine max
ttgaggaggcacaccttcaggagcagtcatggttctcaaaaccgtgctgtgccgattcagcggtgccaagatctacccagggaaaggcatcagatctgttcgtggtgattctcaggttttcctgtttgctaactcaaaatgtaagaggtatttccacaacaggttgaagccgtcaaagctcacgtggactgcaatgtaccgcaagcagcataagaaggatattgctcaagaagctgtgaagaaga

SEQ ID NO: 143637 - DNA, 247 bp, Glycine max
cactcgagccgaatcggctcgagccctatggagtttaatcttgtgattcgtcaaaagtttttacattttgtgaggttcattacgaagaaaagggacaagcttagttgtcaagttggaatcaacccatactccatggaatggactggtttggccaatagattactgagtaagggcaatgatattctgtgttgcgattatgctagttttgatggtttgattaccaagcaagttatgagcaagatggcag

SEQ ID NO: 143638 - DNA, 246 bp, Glycine max
ttaaactggagattggatcacacttatacaaaattctccaattagtaacttgttgagagttgctgcttggaagaaaggttgtttaatggtcaagattgtgatgtctgggaatgcagcagtcaaaaggagtgattgggcctcattggtacaagtgtttttaacaaacagcaacagtacagcgcattttgatgcatgtaagtggacaaaatcagaaccacattcctgggaattaatcttccccataga

SEQ ID NO: 143639 - DNA, 245 bp, Glycine max
tgatgcgtgaaaggacacacctgctgttggcttgttgttcaaggatggcaatttgtaagatagatgtttggagagttgaatgtggaatcccttctggatttccgctcacagttatttgtaatagcatttttaatgagatgctcattagatatagctatgaaaaattactgcgccaggctaaagcctctagtatgtttttacaatccttcaaaaattttgtttctttgtgtgtgtatggtgatgat

SEQ ID NO: 143640 - DNA, 242 bp, Glycine max
gtcaagaacgaggactccgatttgtaccggaagcttgttattgcttccgcttggaggaaacagatgccgaagctcgcgatttcgcttggtctcgctcagcaaatgcctgatatgattgaagagttgatcagcagagggcagcagcttgatgcggttcactttacatatgaagtgggtcttgtggaaaagttccctcctgttcccttgttgaagtcttttctcaaggatgctaagaaattgcg

SEQ ID NO: 143641 - DNA, 238 bp, Glycine max
gtcacatcggcccagcctccgtcccagtcggtggctcctccgcaacccaccagcgccgatgaggtccgtaccctctggatacgtgatttgcagtactggatggacgacaattatctctacacctgtttggcacacaccggcgaggtggcttcagttaaagtcattcggaacaaacaaactagtcaatcggagggatatgggtttattgagtttactagtcgtgctggtgctgagagag

SEQ ID NO: 143642 - DNA, 234 bp, Glycine max
tccaccaggtccaccaatggcaacttgtggaaatccattcttgggtcaacagatgtcatcgcaaaaggattactccatggcaactgcggatgtagtggatgcggaagtgagggaactggtagagagagcatattctagggcaacacatattatctcaactcacattgatatccttcacaagcttgctcaacttctcatagaaaaagaaatgtggatggtgaagagttcatgagt

SEQ ID NO: 143643 - DNA, 173 bp, Glycine max
agatttgaaattttgataaaccgcgatcacaggttgccgcaccttaaaaccggaaacaaaagcatcgttacttgatttcaagaatttctcaatttcttcctacttcttgtgtacgattcttaagggaagaaatcatcctgtgctggcaagattcggatcattctatcaacaca

SEQ ID NO: 143644 - DNA, 261 bp, Glycine max
caggtatagcattggcctgtgctatgaatagttcttttagggggcgcgccagttctgatatttacaccatctgctctcaagactgtgaattatgacatcctgcttgcacaaaagcaatgactatgtcatttaatccaaacccgtgttctgatgcatggactttggaatttctgaagcgtaccggatttcattgtgatatcatttgtgtcactggatggactgccaccccaatgcaggatgttcaggttacaattgattggt

SEQ ID NO: 143645 - DNA, 278 bp, Glycine max
attcggctcgagcaatttgttagtggaaaaaccttcaaatatgatataattggtgctggttcacattcttcaggagattttcctgaaaaggaagatcaagaaaaacccaaaaagattgataccagattgagacaaagaatagatcctcactacaatgaggttcaggctcagatggaaacaaatttgtttaaattgtctcttgatgatgttgaaactcctaaaggttctatgttggatcttaaaatttctcaatctaaaattgcacttcccaagaacac

SEQ ID NO: 143646 - DNA, 266 bp, Glycine max
cactaccaatggtgattttgttcaaggaaaagatctcgcaatggttatagttaatgtagcatgtgctgctgttggcttgacatcaagttacactccaactccattgttggaatctggtttgcaaaaagacagagggttaattgtggagtattctggaacgatgtcttacgctgctcataacgctaatcagccccaagagaaagatttgtcactagggaaatttttcctttgatattaaatctcgctctagattggcaaaagtttcc

SEQ ID NO: 143647 - DNA, 260 bp, Glycine max
gctatctagtaaggatgacaagggacttctcaaggccacggattttggcttgtcagtcttcattgaagaaggaaaggtgtatcgagatatagttggcagtgcttactatgttgctccagaagttctacgtcgtacctatgggaaggaagcagatatatggagtgcaggagttatattgtatatcttacttagtggtgtacctccattttgggcagagacggaaaagggaatatttgatgtcatattgcaaggtcatattg

SEQ ID NO: 143648 - DNA, 169 bp, Glycine max
aattttgataaaccgcgatcacaagttgccgcaccttaaaaccggaaacaaaagcaatcgttacttgatttcaagaatttctcaatttcttcctacttctttgtgtacgatttcttaagggaaagaaaatcactctctgtgctggccacagacttcgtgaatcattttc

SEQ ID NO: 143649 - DNA, 257 bp, Glycine max
aattttagtggacaaaactggagattggatcacacttatacaaaattctccaattagtaacttgttgagagttgctgcttggaagaaaggttgtttaatggtcaagattgtgatgtctgggaatgcagcagtcaaaaggagtgattgggcctcattggtacaagtgtttttaacaaacagcaacagtacagagcattttgatgcatgtaagtggacaaaatcagaaccacattcctgggaattaatcttcccaatag

SEQ ID NO: 143650 - DNA, 171 bp, Glycine max
attttaataaaccgcgatcacaggttgccgcaccttaaaaccggaaacaaaagcaatcgttacttgatttcaagaatttctcaatttcttcctacttctttgtgtacgatttcttaagggaaagaaaatcactctctgtgctggtcacagacttcgtgaatcattttcttt

SEQ ID NO: 143651 - DNA, 269 bp, Glycine max
gaggaaattctgtcttctagtgcaagtgatttcagaactgcaatggtgagtaaaaatagcaaacctcaagctactgcaatgcatgtgggagctatagaaattatcattgatagtttcgcaagtcctgattgcaacatagttggtgcaatgcttttggttgatacttatcataccaatcctgaaaatgcagttcgtagtatttttgttgcgcctttcagaggcggaaggcccattcgggtggttacatttccgaataccattgtgcagat

SEQ ID NO: 143652 - DNA, 267 bp, Glycine max
taccaagcaagttatgagcaagatggcagaaatgataaacagtctttgtggtggtgatgaaaaattgatgcgtgaaaggacgcacctgctgttggcttgttgttcaaggatggcaatttgtaagaaagatgtttggagagttgaatgtggaatcccttctggatttccgctcacagttatttgcaatagcatttttaatgagatgctcattagatatagctatgaaaaattactgcgccaggctaaagctccaagtatgtttttaca

SEQ ID NO: 143653 - DNA, 263 bp, Glycine max
gcaaagaattcgctggagagatacactcattattatgagcggtgggccagcaatcaatcttcaaggcaaaaagctcttgcagatctacagcagatgcaaactgttcatattgagaagcttagtgacatacagtgtcagcctgagtcacagcttaagttcataactgaagcctggctacaaataattgagtgtagaagagtgctgaaatggacctatgcatatgggttctatttgccggagcatgagcatgcaaaaaagcagtt

SEQ ID NO: 143654 - DNA, 258 bp, Glycine max
ggaatttctgaagcgtaccggatttcattgtgatatcatttgtgtcactggatggactgccaccccaatgcaggatgttcaggttacaattgattggtttatttcctctcaggaatgtgttcccaggacctattgtgttttaaatccacaaaatccttttgttttaaataggtggatgggaaaactgactttccctcagggcacttcccgaagtgttaagagaatgcctctttctatagggggaggagctggtgcaaa

SEQ ID NO: 143655 - DNA, 258 bp, Glycine max
gtggctttgtagatttggatggatttcttactggaaactatgtatgcaggatacatgcgggttcttttaaactgttttgccttctcccaatgtttatcaaacaaaatcttattctctattctctattttttaagctttgtatgtgatgctgttgatggctggtgtgcccgcaaattcaatcaagtgtcaacctttggagctgtgctggacatggtaacagacagaattagcactgcttgtctacttgtagtcctttcc

SEQ ID NO: 143656 - DNA, 257 bp, Glycine max
gtggtgccttatcgctgtggttatcatcttcttcttcctctttcttagatctcttctttctctacgccgcacgccgaaaccatggccggaaaaggagagggtcctgctatcggaatcgatctcggaaccacctactcttgcgtcggtgtgtggcaacatgaccgcgttgaaatcatcgccaacgaccaagggaacagaaccacgccgtcttacgtcggattcactgacaccgagcgtctcatcggtgatgcggccaa

SEQ ID NO: 143657 - DNA, 256 bp, Glycine max
gtcaattttctattgaccttctcggtggaggaattttagtggacaaaactggagattggatcacacttatacacaattctccaattagtaacttgttgagagttgctgcttgacagaaaggttgtttaatggtcaagattgtgatgtctgggaatgcagcagtcaaaaggagtgattgggcctcattggtacaagtgtttttaacaaacagcaacagtacagagcattttgatgcatgtaagtggacaaaatcaga

SEQ ID NO: 143658 - DNA, 261 bp, Glycine max
gattatgctagttattgatgggtttgattaccaagcaagttatgagcaagatggcagaaatgataaacagtctttgtggtggtgatgaaaaattgatgcgtgaaaggacgcacctgctgttggcttgttgttcaaggatggcaatttgtaagaaagatgtttggagagttgaatgtggaatcccttctggatttccgctcacagttatttgcaatagcatttttaatgagatgctcattagatatagctatgaaaaattac

SEQ ID NO: 143659 - DNA, 256 bp, Glycine max
tctcgagcgattcggctcgggccacagttggtattcctgagcatacaggtatagcattggcctgtgctatgaatagttcttttagggggcgcgccagttctgatatttacaccatctgctctcaagactgtgaattatggaatcctgcttgcacaaaagcaatgactatgtcatttaatccaaacccgtgttctgatgcatggagtttggaatttctgaagcgtaccggatttcattgtgatatcatttgtgtcac

SEQ ID NO: 143660 - DNA, 259 bp, Glycine max
atcccaattttctagggttttattcattttccgatggcttctgcagatgttgagtaccgttgctttgtcggtgggctcgcttgggccactgacgaccatgccctcgagagagccttctctcagtacggcgaaatcgttgaaacgaagattatcaacgatcgtgagactggcagatccaggggttttggatttgtgaccttcgcctcggagcagtccatgaaagatgcgatcggagcgatgaatcgacagaacttggacg

SEQ ID NO: 143661 - DNA, 263 bp, Glycine max
  unsure (1)..(263): unsure at all n locations
ctcgagcgcaaaattgatggtgtcatcagccaaatttgaggcttttccccacaagctggtngaacttggagagattcaggaaaaagttgtgttgaaattttcacaagaggaatttcttacagcttggtcaactcaggtgcgtcccgcaacgactctgttggctgatgggtgcccatatttgtatgctatggtgcatgatagttcagtgtctacaataccaggtgattttgtcattggtgttcagttgacaaccattaacaata

SEQ ID NO: 143662 - DNA, 254 bp, Glycine max
gcattttgatgcatgtaagtggacaaaatcagaaccacattcctgggaattaatcttcccaatagatgtatgtggtcctaataatggttttgaaatgtggagttctgagtgggcaaatcaaacttcatggcatttgagtttccttattgacaatcccaaacagtctacagtttttgatattctcttgggaatctctcaagattttgaaattgctggtaatactcttatgccagctttttctgttccacaggcta

SEQ ID NO: 143663 - DNA, 253 bp, Glycine max
ggactattctcttgctcatgctcccttctcaggtagcagttatgctgggggtcagtgggctgcaggtgatgaaccactttactatattgtatctctgaaggatgtagttattgccaaaccaagggatactgaagatcatattgcatggcttcttcagcacgggtggcatgaaaaagctttggctgtggttgaatctggccagggacggagtgaactacttgatgaggtgggatctaggtaccttgatcatttg

SEQ ID NO: 143664 - DNA, 255 bp, Glycine max
ttctgatgcatggagtttggaatttctgaagcgtaccggatttcattgtgatatcatttgtgtcactggatggactgccaccccaatgcaggatgttcaggttacaattgattggtttatttcctctcaggaatgtgttcccaggacctattgtgttttaaatccacaaaatccttttgtgttaaataggtggatgggaaaactgactttccctcagggcacttcccgaagtgttaagagaatgcctctttctat

SEQ ID NO: 143665 - DNA, 198 bp, Glycine max
  unsure (1)..(198): unsure at all n locations
ccgcgatcacaggttgccgcaccttaaaaccggaaacaaaagcaatcgttacttgatttcaagaatttctcaatttcttcctacttctttgtgtacgatttcttaagggaaagaaaatcactctctgtgctggtcacagttttcgtgaatcattttcttttccacacaacatacgagtccgngnaagggggatgtgct

SEQ ID NO: 143666 - DNA, 255 bp, Glycine max
ggagtttgtaatttttgaagcgtaccggatttcattgtgatatcatttgtgtcactgtgtggactgccaccccaatgcaggatgttcaggttacaattgattggtttatttcctctcaggaatgtgttcccaggacctattgtgttttaaatccacaaaatccttttgttttaaataggtggatgggaaaactgtctttcccccagggcacttcccgaagtgttaagagaatgcctctttctatagggggaggag

SEQ ID NO: 143667 - DNA, 85 bp, Glycine max
cttctccctacattaaatgtacagtctctttcttcatagcatttggaaatttggctgatgacaccatcaattttgaggcttttcc

SEQ ID NO: 143668 - DNA, 261 bp, Glycine max
gggcaatgatattctgtgttgcgattatgctagttttgatggtttgattaccaagcaagttatgagcaagatggcagaaatgataaacagtctttgtggtggtgatgaaaaattgatgcgtgaaaggacgcacctgctgttggcttgttgttcaaggatggcaatttgtaagaaagatgtttggagagttgaatgtggaatcccttctggatttccgctcacagttatttgcaatagcatttttaatgagatgctcattag

SEQ ID NO: 143669 - DNA, 256 bp, Glycine max
aatttttctgcagaattgctctcttgcaaattggatactgttactggccaatattatcctgagtgggctccaattaattgtcgagttcatcgacaaccaattcacatcactgaatgtcattatgtcagaaagcaagatgtcagcattgaatatgatgacttgtacaattccaaatgattgtggttccttggttgttgccaaggttggaaatcacaaacaaattgttggtttccatgttgctggaagcagaggaaga

SEQ ID NO: 143670 - DNA, 256 bp, Glycine max
caaaaactaatttgatggaaactcccaaggaatggcaactggatctaccttgtgacaaaattcctagtgtcttgactacaactgatgagagattggtaggcacagaacatgagggatatgatccttttcttggtggaattcaaaaatatgccactcccatgatgcccctagatgaagaaattctttctaaggttgcacaagatatggttgaggaatggtttgattgtgttgatgaggaggattcctttgaggaagt

SEQ ID NO: 143671 - DNA, 235 bp, Glycine max
ggaatttctgaagcgtaccggatttcattgtgatatcatttgtgtcactgaatggactgccaccccaatgcaggatgttcaggttacaattgattggtttatttcctctcaggaatgtgtttccaggacctattgtgttttaaatccacaaaatccttttgttttacataggtggatgggaaaactgactttccctcagggcacttcccgaagtgttaagagcatgcctctttct

SEQ ID NO: 143672 - DNA, 253 bp, Glycine max
ttcaacttcctgagattgatctgaaatttttaattgctggggctattgctctgaagggccttggaggggttcttttcatatttggcagctcttttggagctttgcttctgctcctgcaccagctgattgctaccccaatccattatgatttttacaattatgacagtgaggacaaagaatttactcaactgttcatcaaatttacacagaacatggctcttttcggggctctattgtttttcattggcatgaa

SEQ ID NO: 143673 - DNA, 253 bp, Glycine max
aagcggactgatgaagagctgttaaaaacattggattcattcgttgttgtggaaagagaaggtcacataattgcttgtgctgccatttttcctcactttgaggagaattgtggagaggttgcttgtattgcagtatctcctgattgtcgtggccaaggacagggtgacaaattgcttgattatatggagaagaaagcatcatctcttggatttaatatgcttttccttcttacaacacgtactgcagattggt

SEQ ID NO: 143674 - DNA, 257 bp, Glycine max
ctcgagccgctcgagccgttgacaaccataaacaatatgtgtgcatatgggctcaatactggtatttcaggttctcgtcttttgggcaccattcctcagtccatttcacagcaaactgtttggaatcaaatggcaacagtgagaacaccattgaattttgattctagcaagcagagcttttgtcaattttctattgaccttctcggtggaggaattttagtggacaaaactggagattggatcacacttatacaaaa

SEQ ID NO: 143675 - DNA, 242 bp, Glycine max
ttcgagcgaatcggctcgagggatttcattgtgatatcatacgtgtcactggatggactgccaccccaatgcaggatgttcaggttacaattgattggtttatttcctctcaggaatgtgttcccaggacctattgtgttttaaatccacaaaatccttttgtgttaaataggtggatgggaaaactgactttccctcagggcacttcccgaagtgttaagagaatgcctctttctataggg

SEQ ID NO: 143676 - DNA, 261 bp, Glycine max
ggcttttccccacaagctggtgcattttggagagattcaggaaaaagttgtattgaaattttcacaagaggaatttcttacagcttgttcaactcaggtgcgtcctgcaacaactctgttggctgatgggtgtccatatttgtatgctatggtccatgatagttcagtgtctacaataccaggtgattttgtcattggtgttaagttgacaaccataaacaatatgtgtgcatatgggcttaatcctggtatttcaggttc

SEQ ID NO: 143677 - DNA, 177 bp, Glycine max
aaccgcgatcacaggttgccgcaccttaaaaccggaaactaaagcaatcgttacttgatttcaagaattactcaatttcttcctacttctttgtgtacgatttcttaagggatagaaaatcactctctgtgctggtcacagacttcgtgaatcattatcttttccacacaacatacg

SEQ ID NO: 143678 - DNA, 253 bp, Glycine max
gcaagcagagcttttgtcaattttctattgaccttctcggtggaggaattttagtggacaaaactggagattggatcacacttatacaaaattctccaattagtaacttgttgagagttgctgcttggaagaaaggttgtttaatggtcaagattgtgatgtctgggaatgcagcagtcaaaaggagtgattgggcctcattggtacaagtgtttttaacaaacagcaacagtacagagcattttgatgcatg

SEQ ID NO: 143679 - DNA, 254 bp, Glycine max
gttcccaggacctattgtgttttaaatccacaaaatccttttgtgttaaataggtggatgggaaaactgactttccctcagggcacttcccgaagtgttaagagaatgcctctttctatagggggagagagctggtgcaaagaatgctattctcatgaatatgccaaatgctgttctttcaatgtggagatattttgttggagatctcgtctttgaagtttctaagatgacttctccctacattaaatgtacag

SEQ ID NO: 143680 - DNA, 189 bp, Glycine max
gaaattttaataaaccgcgatcacaggttgccgcaccttaaaaccggaaacaaaagcaatcgttacttgatttcaagaatttctcaatttcttcctacttctttgtgtacgatttcttaagggaaagaaaatcactctctgtgctggtcacagacttcgtgaatcattttcttttccacacaacatacg

SEQ ID NO: 143681 - DNA, 255 bp, Glycine max
atcgtattaaaggaatgattaaaatggtggccacagttggtattcctgagaatacaggtatagcattggcctgtgctatgaatagttcttttagggggcgcgccagttctgatatttacaccatctgctctcaagactgtgaattatggaatcctgcttgcacaaaagcaatgactatgtcatttaatccaaacccgtgttctgatgcatggagtttggaatttctgaagcgtaccggatttcattgtgatatca

SEQ ID NO: 143682 - DNA, 258 bp, Glycine max
acgaaatcgcgaacagaacagcaacgttaacaatgggttctcgctacgaggtggaactgaagctctcatcggcacgcgctctcaagaacgtgaactggcgccatggcccgaaccgcccatacgtcgtcgtttgggtcgacccaagcaacaagctctcgacgcgcgtggacgaaagcggcgacactgacgcgaattgggaccaaacgctcacaattccgttgccaccaaagcctctcgaggatcaaacgttgtacatcg

SEQ ID NO: 143683 - DNA, 251 bp, Glycine max
gcccctagatgaagaaattctttctaaggttgcacaagatatggttgaggaatggtttgattgtgttgatgaggaggattcctttgaggaagtttctttaagtgcagcacttaatggtgttgagggtttggactatatggaaagaattcctcttgccacatctgagggttttcctcatgtgctttcacgcaacaatggattcataggcaaaaggagatttgtctctggggatggtgaagagatgacattga

SEQ ID NO: 143684 - DNA, 252 bp, Glycine max
caaatggcaacagtgagaacaccattgaattttgattctagcaagcagagcttttgtcaattttctattgaccttctcggtggaggaattttagtggacaaaactggagattggatcacacttatacaaaattctccaattagtaacttgttgagagttgctgcttggaagaaaggttgtttaatggtcaagattgtgatgtctgggaatgcagcagtcaaaaggagtgattgggcctcattggtacaagtg

SEQ ID NO: 143685 - DNA, 245 bp, Glycine max
tttagaagattctcggcatcactttcatggtcaacgagaatgaaaattgctgttggagctgcgaagggtttagcatttcttcatgaagctgagaagccagtcatctatagagatttcaaagcttccaacatcttgttaggctctgattacaatgcaaagctatctgattttgggttggcaaaagacggtcccgaaggagatgatactcacgtttcaacccgagttatgggtacacacggctacgc

SEQ ID NO: 143686 - DNA, 160 bp, Glycine max
aaattttaataaaccgcgatcacaggttgccgcaccttaaaaccggaaacaaaagcaatcgttacttgatttcaagaatttctcaatttcttcctacttctttgtgtacgatttcttaagggaaagaaaatcactctctgtgctggtcacagacttcgtg

SEQ ID NO: 143687 - DNA, 214 bp, Glycine max
  unsure (1)..(214): unsure at all n locations
gaaattttaataaaccgcgatcacaggttgccgcaccttaaaaccggaaacaaaagcaatcgttacttgatttcaagaatttctcaatttcttcctacttctttgtgtacgatttcttaagggaaagaaaatcactctctgtgctggtcacagacttcgtgaatcattttcttttccacacaacatacgacccctntnaatggggatgtgctgt

SEQ ID NO: 143688 - DNA, 245 bp, Glycine max
attcaacacaatctgtatcatcaaatgagccagttgtatctgtagattggctttatgataacctgaaggagcccgatatcaaggtactagatgcttcgtggtacatgccggatgagcagaggaatccaattcaagaatatcaggttgctcacattcctggtgcccttttctttgacgtagatggaatagcagatcggactacaaaattaccacatatgctgccatcagaggaagcttttgctgct

SEQ ID NO: 143689 - DNA, 249 bp, Glycine max
ggagtttggaatttctgaagcgtaccggatttcattgtgatatcatttgtgtcactggatggactgccaccccaatgcaggatgttcaggttacaattgattggtttatttcctctcaggaatgtgttcccaggacctattgtgttttaaatccacaaaatccttttgtgttaaataggtggatgggaaaactgactttccctcagggcacttcccgaagtgttaagagaatgcctctttctatagggg

SEQ ID NO: 143690 - DNA, 248 bp, Glycine max
  unsure (1)..(248): unsure at all n locations
cttgtggagacagctgactttgcaaggaactcaaatgacagnattgcagcaccatcatctgacacataacaggatactttatccacaggatagtccacagcaagaatagaaagcactgtattagccgtgatcaatggtggttctttcagaggatggtgctgcaatgctgtcatttgagtcccttgtggagacagctgactttgcaagaaagtgggttccattttgcaaaaagttttcaattgaaccac

SEQ ID NO: 143691 - DNA, 162 bp, Glycine max
tttgataaaccgcgatcacaggttgccgcaccttaaaaccggaaacaaaagcaatcgttacttgatttcaagaatttctcaatttcttcctacttctttgtgtacgatttcttaagggaaagaaaatcactctctgtgctggccacagacttcgtgaatcat

SEQ ID NO: 143692 - DNA, 254 bp, Glycine max
gaaaaagtttcctctacaaaagcacaatttgttagtggaaaaaccttcaaatatgatataattggtgctggttcacattcttcaggagattttcctgaaaaggaagatcaagaaaaacccaaaaagattgataccagattgagacaaagaatagatcctcaatacaatgaggttcaggctcagatggaaacaaatttgtttaaattgtctcttgatgatgttgaaactcctaaaggttctatgttggatcttaa

SEQ ID NO: 143693 - DNA, 260 bp, Glycine max
ggactatatggaaagaattcctcttgccacatctgagggttttcctcatgtgctttcacgcaaaaatggcgataaaggcaaaaggagatttgtctctggggatggtgaagagatgacattgattccaggaaccagtgttgaagaggcttacaacaagctaatagttgaacttgagaaaagtgttcctacattggttggcattgaatgtcccaaggatgagaaacttcctcgtcgcaaaatttttgacaaacctaagacgc

SEQ ID NO: 143694 - DNA, 258 bp, Glycine max
gctatgttgatttatgccgtggtgtttggaggatccagggatctcttgctgtgtctaggggaattggagatagacacctgaaacaatgggtgacagcagagcctgagaccaaagttctcagaattgaacctgaacatgacttgttaatcttagcttcagatggattatgggataaggtatagaacttgaccatttcacttcaatgttaatagtgtctttttaagtattttttaatattgttgctcatgcattggactg

SEQ ID NO: 143695 - DNA, 258 bp, Glycine max
ctactattggcatggacgaaacaatagaactatatatgaattaagtcccaagacactgtcatctggatttgatgattatccacgtgcttcacacccaagtgcagatgagcgccacgtggatcttagatgttggatgttacttgcaaccgattgtctgcaatacattgaagagttgttggataaggaaactaaacctggcaaagtataaatttgaaaaaattatggttctactgctaaattgctatcagatgtcgagtt

SEQ ID NO: 143696 - DNA, 259 bp, Glycine max
cttcttccctgtggaggttgatagtcaagagggagttgctcacattggtgaattgaaatctggtgtctatgttccactgcctataagaactcaatttgatggaaactcccaaggaatggcaactggatctaccttgtgacaaaattcctagtgtcttgactacaactgatgagagattggtaggcacagaacatgagggatatgatccttttcttggtggaattcaaaaatatgccactcccatgatgcccctagatga

SEQ ID NO: 143697 - DNA, 261 bp, Glycine max
  unsure (1)..(261): unsure at all n locations
gtaaatgtcggattcggggtatttggtcttctcaagtgcatgagcaatggtacactgagtgactcctaatttatgtgccaacaaagaggcaacaatgtttccatcactgtagtttccnacaatcagatctcattatcaccagtaccttccaggagattgctggaagcaaggacactgttggacagtatgaactctcacacagcctttacccttcctggactctaccgtgttgtgcacggcattgatgtctttgatccaaaa

SEQ ID NO: 143698 - DNA, 260 bp, Glycine max
ggaatttctgaagcgtaccggatttcattgtgatatcatttgtgtcactgaatggactgccaccccaatgcaggatgttcaggttacaattgattggtttatttcctctcaggaatgtgttcccaggacctattgtgttttaaatccacaaaatccttttgtgttaaataggtggatgggaaaactgactttccctcagggcacttcccgaagtgttaagagaatgcctctttctatagggggaggagctggtgcaaaga

SEQ ID NO: 143699 - DNA, 262 bp, Glycine max
aggtcaagaactttcgaccttgagaggtaattttgctgaaagaacgaatctgatacggcagagaagtctggacgtgtggccacctgccacggatgatgaaaagattgatgtttctacctcaagaaggtatgggtcagacagctggatgtcaatgggaaggcatgaaccaacatatccagatctactttcaggctttggggcccacggagatcattcatcccatccatcatttgttgatcaaaatggtcctgtagctaacctt

SEQ ID NO: 143700 - DNA, 259 bp, Glycine max
tgagaacttcagcaatagaatgaaccctccaagggtctctgtggacaatgctagttgccatgattgtacactgattaagattgatagtgttaacaaacctggaattctgctggaagttgtgcaaatcttgacagaccttgacttcgtaattaccaaagcttacatatcttctgatgggggttggtttatggatgtatttcatgtcacggaccagcaaggaaaaaagataacagatagcaaaaccatcgacctcattgaa

SEQ ID NO: 143701 - DNA, 181 bp, Glycine max
atcttctgaaaatgcggaatcctctgcatgatctggaattcgtgttttctttcgcttgttcgtttgtttaattcaataaaggaaattaggcatgaccctcttgttgagtatgctctgcctatctgaaaatttccacacctcttttaattgtcgtaatgatgtgtgaagtgtgtgttatttt

SEQ ID NO: 143702 - DNA, 257 bp, Glycine max
ctattggactcctcaattacagcttttagtgaccgagtttgccccaaatggtagcttgcaagccaagctacatgaaaggcttccttcaagtcctcctctttcttgggctataaggttcaaaatcttgcttggaacagcaaaggggcttgctcatttgcaccactctttccgtccgccgatcatccactacaacataaagccaagtaacattttgcttgacgaaaattacaatgccaagatctcggatttcgggttgg

SEQ ID NO: 143703 - DNA, 259 bp, Glycine max
ctacaataccaggtgattttgtcattagtgttatgttgacaactataaacaatatgtgtgcatatgggctcaatcctggtattacaggttctcgtcttttgggcaccattcctcagtccatttcacagcaaactgtttggaatcaaatggcaacagtgagaacaccattgaattttgattctagcaagcagagcttttgtcaattttctattgaccttctcggtggaggcattttagtggacaaaactggagattggat

SEQ ID NO: 143704 - DNA, 258 bp, Glycine max
gctggtgcaaagaatgctattctcatgaatatgccaaatgctgttctttcaatgtggagatattttgttggagatctcgtctttgaagtttctaagatgacttctccctacattaaatgtacagtctctttcttcatagcatttggaaatttggctgatgacaccatcaattttgaggcttttccccacaagctggtgcagtttggagagattcaggaaaaagttgtgttgaaattttcacaagaggaatttcttaca

SEQ ID NO: 143705 - DNA, 255 bp, Glycine max
ttcagaactgcaatggtgagtaagaatagcagacctcaagctactgcaatgcatgtgggagctataggtattatcattgatagtgtcgcaagtcctggctgcaacatagttgtgtgaatgcttttggttgagacttatcataccaatcctgataatgcagttcgtagtatttttgttgcgcctttcagaggcggaaggcccattcgggtggttacatttccggataccattgtgcagattgaaccagacatgaat

SEQ ID NO: 143706 - DNA, 168 bp, Glycine max
gcggaatcctctgcatgatctggaattcgtgttttctttcgcttgttcgtttgtttaattcaataaaggaaattaggcatgaccctcttgttgagtatgctctgcctatctgaaaatttccacacctcttttaattgtcgtaatgatgtgtgaagtgtgtgttatttt

SEQ ID NO: 143707 - DNA, 256 bp, Glycine max
gtctctatcctgtaagtcaattaccttcagaagctgtcgttgtaaatgttacatgtggtagtggacgtggtggtttacccaccactgcttggattagttctgcagttaacaatcgctcctcagacatcaacaaaaggattcgcacagcacttgggaaaggtaagaaaattgtttttcttactagagttgatccttttccagtagctttattggctgttctttttggcgttaagaatgaaattctgagttctaacgc

SEQ ID NO: 143708 - DNA, 258 bp, Glycine max
agaatttctcaatctagaattgcacttcccaagaacacagttgcaggaaccattctgcgtagtgatctattggcaaattttttgacagagggcaattttagagcaagtgttgatttgcagcgcactcatcgtattaaaggaatgattaaaatggtggccacagttggtattcctcccaatacaggtatagcattggcctgtgctatgaatagttcttttcgggggcgcgccagttctgatatttacaccatctgctct

SEQ ID NO: 143709 - DNA, 254 bp, Glycine max
agaagcttatcttgtcaatctcgtaaatgtgttacgagaattgtatttgcacagtccagaggaagctcgccaattgagaaggaaagctctctctcgtattgaatggctgcaaaaagctgatgtgcctaccatagcacagattgaagagttccattcgatgcagaggatgatgaatgctcctgattcaaatgataatattgatctactgttgagcattgatttgttgggtttacaaggagcaggtaaagcttttc

SEQ ID NO: 143710 - DNA, 253 bp, Glycine max
attggagcctctgaggctgaagcggttgttagttcttctttggcttgtcttactagaaaacaatcaggtgataagtgttcagcacctgcatcggcatttgcccagtgtcaattgttaaatattagttactgccctccagcagaagacaacattccagaggctaagagtttagtagtagtggtgtataacccacttgggtggaatcgtactgatattgtcaaaataccagttaatgatgctaatcttgttgtca

SEQ ID NO: 143711 - DNA, 255 bp, Glycine max
ttgaaccagacatgaattcaaggtttcagcttttgagtaccactaccaatggtgattttgttcaagggaaagatctcgcaatggttaaagttaatgtagcatgtgctgctgttggcttgacatcaagttacactccaactccattgttggaatctggtttgcaaaaagacagagggttaattgtggagtattttggaaggatgtcttacgttgctcataacgttaatcagccccaagagaaagatttgttagagg

SEQ ID NO: 143712 - DNA, 254 bp, Glycine max
gttaagttgacaaccataaacaatatgtgtgcatatgggctcaatcctggtatttcaggttctcgtcttttgggcaccattcctcagtccatttcacagcaaactgtttggaatcaaatggcaacagtgagaacaccattgaattttgattctagcaagcagagcttttgtcaattttctattgaccttctcggtggaggaattttagtggacaaaactggagattggatcacacttatacaaaattctccaat

SEQ ID NO: 143713 - DNA, 232 bp, Glycine max
tgaaattttaataaaccgcgatcacaggttgccgcaccttaaaaccggaaacaaaagcaatcgttacttgatttcaagaatttctcaatttcttcctacttctttgtgtacgatttcttaagggaaagaaaatcactctctgtgctggtcacagacttcgtgaatcattttcttttccacacaacatacgagtccgcgatagggggatgtgctggatagcccagacggacag

SEQ ID NO: 143714 - DNA, 257 bp, Glycine max
gttctttcttctcttaggtttccgcaagatctgcaaaccatggcttccaggaaattcgacaaccctcactccggcgacggcgccagtccaggcaaaatcttcatcggagggttagccaaagacaccaccctagagacgttcgtgaagtactttgagaagtacggggagataacggactccgttataatgaaagaccgtcacacgggtcggccaaggggattcggcttcatcacctacgccgatccctccgtcgttga

SEQ ID NO: 143715 - DNA, 254 bp, Glycine max
actcgagccgaatcggctcgagatccaaacccgtgttctgatgcatggagtttggaatttatgaagcgtaccggatttcattgtgatatcatttgtgtcactggatggactgccaccccaatgcaggatgttcaggttacaattgattggtttatttcctctcaggaatgtgttcccaggacctattgtgttttaaatccacaaaatccttttgccctaaataggtggatgggaaaactgactttccctcaggg

SEQ ID NO: 143716 - DNA, 251 bp, Glycine max
cattggtcagcattgaatgtcccaaggatgagaaacttcctcgtcgcaaaatttttgacaaacctaagacgcgctgcttcactattctccctatggagtttaatcttgtggtccgtcaaaagtttttaaattttgtgaggttcattatgaagaaaagggacaagcttagttgtcaagttggaatcaacccatactccatggaatggactggtttggccaatagattactgagtaagggcaatgatattctg

SEQ ID NO: 143717 - DNA, 247 bp, Glycine max
catatgttgagccagttgtgcaagctcaaagtgctgaagtttactttgacttcttccctgtggaggttgatagtcaagagggagttgctcacattggtgaattgaaatctggtgtctatgttccacacaacatacgagagagcgaaatggggattcgctgggaatggcaactggatctaccttgtgacaaaattcctagtgtgctgactacaactgatgagagattggtaggcacagaacatgaggg

SEQ ID NO: 143718 - DNA, 252 bp, Glycine max
cgtcaaaaacattcccgagaatgttaccactgaacaattgaaggaactattccgccgtcatggagaagtaacaaaagtggtcatgccacctggcaaagctggagggaaacgtgattttggtttcattcattatgcagagaggtcaagtgcattgaaagctgtaaaagatacagagaaatatgaaattgatggccaaatgcttgaagttgttcttgctaagcctcaagctgataaaaaacctgatggaggtta

SEQ ID NO: 143719 - DNA, 254 bp, Glycine max
  unsure (1)..(254): unsure at all n locations
ggtgttttnagttttgatcaatgagactagccatgtctactccttccaagagcataattctgtnccaagtgaagatgattatgaacttagaagagggccatggagtgttgaagaggattatcttctcacccattacattgccaatcatggngaagggagatggaatttgctagctatacgttcaggactaaggagaacaggtaagagttgcagattgagatggctcaattatctaaagccaaatgttaagagag

SEQ ID NO: 143720 - DNA, 251 bp, Glycine max
gtgatgataacttaattagtgttcatgaatatgtcaagccttactttagtggttctaaattgaaaagctttctagctggtcataatatcaccattactgatggtattgacaaaactagtgcaactttgcaatttagaaagttagcagattgtgattttctcaagagaaactttaagcagatgtctaatgttttatgggtggctcctgaggacaaggcgagtttatggtcacaacttcattatgtttcgtgc

SEQ ID NO: 143721 - DNA, 252 bp, Glycine max
ggagattcacagaagaagataagggatgtttgtgttaatcggaagaaaggccaatttgttggtaggatcgggaacaagaagaaggtggttgagcttcgcagcaacagccacaaccacttctaatggtggtgccatggaggagttgctttcgcaactccaatctaatgtccaaaaggctcttgctggtggaggacccgaggcagtgaagaggaacaagagtaggaacaaatttctgccccgccaaagaatcga

SEQ ID NO: 143722 - DNA, 254 bp, Glycine max
ggtttgattaccaagcaagttatgagcaagatggcagaaatgataaacagtctttgtggtggtgatgaaaaattgatgcgcgaaaggacacacctgctgttggcttgttgttcaaggatggcaatttgtaagaaagatgtttggagagttgaatgtggaatcccttctggatttccgctcacagttatttgcaatagcatttttaatgagatgctcattagatatagctatgaaaaattactgcgccaggctaa

SEQ ID NO: 143723 - DNA, 253 bp, Glycine max
ccttgatgagattgtgttgagggttttcaatggaggtatacatgatgaaaatgaccatgtttattgccctaaaattgtgcggattggtctcaaagcacatcattctatcaaggctgtttccctggatgaacttatgaaacaaaaacgttccagtgccaacaaatcatctaccaataaacagagtaacaacggtcccgcaggaagtaatgatgatagtctccgggctgcaattttagatgaggccacaattgtc

SEQ ID NO: 143724 - DNA, 205 bp, Glycine max
tgataaaccgcgatcacaggttgccgcaccttaaaaccggaaacaaaagcaatcgttacttgatttcaagaatttctcaatttcttcctacttctttgtgtacgatttcttaagggaaagaaaatcactctctgtgctggccacagacttcgtgaatcattttcttttccacacaacatacgagtccgcgatagggggatgtgct

SEQ ID NO: 143725 - DNA, 249 bp, Glycine max
ccggaatttaagtactattcatatacccggagtattctccgacggctgttgcgacttctggactgaccatgtgtcgaatctggctcacatacaggagttcacgatggtatgagctagactacgctgcgtccatacggatgttcatgcagggcgacagcacatagcagattgccttcggtcccggattcacgtctagcagcgcagtctggaaggctctcaggaccatcatccctgctagagagagtagtc

SEQ ID NO: 143726 - DNA, 248 bp, Glycine max
tgaatatgtcaagccttactttagtggttctaaattgaaaagctttctagctggtcataatatcaccattactgatggtattgacaaaactagtgcaactttgcaatttagaaagttagcagattgtgattttctcaagagaaaccttaagcagatgtctaatgttttatgggtggctcctgaggacaaggcgagtttatggtcacaacttcattatgtttcgtgcaataatctggaaatgcaagaag

SEQ ID NO: 143727 - DNA, 251 bp, Glycine max
atcgttgtcaaaactcagtcttcaatctcccactatggaattcgccttactgtcaaaggatccgtcaacttgcaggttcgtggaggatcagctggggttgttgaatcattctacggtgttattaagcccatccctattgtgaataggaccattgaggttaaatcttctggaaagattggttctggtacatcagagataccattctcagtgaatcttagacagcgggatgaaaatttagaaagattttatga

SEQ ID NO: 143728 - DNA, 247 bp, Glycine max
agacgatacttgttagcagtgctggtaatagcgggccatgattgatcactgttggtgcacctggtggtacatcttcaagtatcataggtgttggcgcatatgtgtctcctgctatggctgccggtgctcattgtgttgttgaacctccatctgatgggcttgaatacacttggtctagccgaggaccaacagctgatggagaccttggtgtttgtgtgagtgctcccggtggtgctgttgctcctgt

SEQ ID NO: 143729 - DNA, 248 bp, Glycine max
aattaaaaagcgtgaaggacagtgataggtttggtttggaaggaagaagaaaatgaaggccatagtgataacgaggccaggaggtcccgaagtgctccaacttgaggaagtggaagatcccctagtcggagacgacgagcttctcatcggagtccacgccacttcccttaacagagccgatacctttcagaggaaaggctcctaccctccccctaagggcgccacccttacctcggtctcgaatgttc

SEQ ID NO: 143730 - DNA, 249 bp, Glycine max
aacatgctctcttggagtttgcttcaagtgtcccacatgccccaaggctcaactggaagaatgactctgcttcaatttgcacctcatgggttggtgtgacatgcaactccaacggcacacgtgtcgtaggcctccatcttccagggatgggattaaccgggaccattccagagaacagcatagttaaactagatgctcttagggtcctgagtcttcattctaatggacttataggaagtcttccttcta

SEQ ID NO: 143731 - DNA, 249 bp, Glycine max
caaaatttttgacaaaccgaagacgcgctgcttcactattctccctatggagtttaattttgtggtccgtcaaaagtttttaaattttgtgaggttcattatgaagaaaagggacaagcttagttgtcaagttggaatcaacccatactccatggaatggactggtttggccaatagattactgagtaagggcaatgatattctgtgttgcgattatgctagttttgatggtttgattaccaagcaagg

SEQ ID NO: 143732 - DNA, 251 bp, Glycine max
ctcgagccggaaaagctttctagctggtcataatatcaccattactgatggtattgacaaaactagtgcaactttgcaatttagaaagttagcagattgtgattttctcaagagaaactttaagcagatgtctaatgttttatgggtggctcctgaggacaaggcgagtttatggtcacaacttcattatgtttcgtgcaataatctggaaatgcaagaagcttatcttgtcaatctcgtaaatgtgttac

SEQ ID NO: 143733 - DNA, 250 bp, Glycine max
taaatatagttctgagggtcagttagaagctgtacttcaaaagatgtagcaatacaaagtaagagcaatggctgacatagttattaatcatcgtactggcaccacccaaggacgcggagggatgtataatcgttttgatggaattccattaggttgggatgaacgtgctgggacatcagattctggaggactgggtaatcgaagcacaggagccattttccaagggtttcccaatattgaccatactcaa

SEQ ID NO: 143734 - DNA, 247 bp, Glycine max
cggagcctctcttcaggtcaccatctagactgcaatcatggctgatggaccacagcatccatcagttgttcagaagctagctggacagtcttacctggtgtccaggcttagccccaactttaactctaggaattattctgcaactggttcttacgtcaatggcggaatgcactcgcctgggttggctgttgtgtcacctgtatctccagttactgtgcatgctccagcagagaaaggagtgagtgga

SEQ ID NO: 143735 - DNA, 246 bp, Glycine max
aaaaagtttcctctactaaagcacaatttgttagtggataaaccttcaaatatgatataattagcgctggatcacatacttcaggatatattccatagaaggaagatctagatcaatccaaaaagattgataccagattgagacaaagaatagatcctctatacaatgaggttcaggctcagatggaaacaactttgtgtaaattgtcacttgatgatgttgaaactcctataggtgctatgttgg

SEQ ID NO: 143736 - DNA, 246 bp, Glycine max
tggacaacacctactagtctatgagtttcataaaaatggatcacttcatgacttccttcacctacctgatgagtatagtaaaccattgatatggaattctcgtgtgaagattgctttggggattgctcgtgctttagagtacctacatgaagtttgttcaccatctgttgttcataagaatataaagtcggccaacatattgcttgatacagattttaatcctcatctttccgacagtggattggc

SEQ ID NO: 143737 - DNA, 242 bp, Glycine max
cctagatgaagaaattctttctaaggttgcacaagatatggttgaggaatggtttgattgtgttgatgaggaggattcctttgaggaagtttctttaagtgcagcacttaatggtgttgagggtttggactatatggaaagaattcctcttgccacatctgagggttttcctcatgtgctttcacgcaaaaatggcagccaaggcaaaaggagatttgtctctggggatggtgaagagatga

SEQ ID NO: 143738 - DNA, 98 bp, Glycine max
tgaaattttaataaaccgcgatcacaggttgccgcaccttaaaaccggaaacaaaagcaatcgttacttgatttcaagaatttctcaatttcttccta

SEQ ID NO: 143739 - DNA, 248 bp, Glycine max
gcttttggacaacacaagtgttacacacctctttcccatcaccaagtaccttggtttataggctactggcatgacagctgatgctaggacactggtccaacaagcaagaaatgaagcagctgagtttcgctttacatatggatatgaaatgcctgtagatgtattagctaaatggattgcagacaaatcacaagtctatactcaacatgcttatatgagaccacttggagtagttgccatggttttgg

SEQ ID NO: 143740 - DNA, 247 bp, Glycine max
gcgtgaagtgtaatgaaataaaattctatcgattttattatttttagaggtggtatccagattattactcgaaattatgaataatttatggttggcttgattgaaccaataaaataaagtacccaggctctgtttagaaaaaaccaattggtaatatatctacgatcaccacttctatcatatccgtatattttacagaaaatattaaataagaaattcagaaaaggaagaagttttaacaaaaata

SEQ ID NO: 143741 - DNA, 248 bp, Glycine max
cgcacactctctctcaccaaagccttcctagaacgaaaaaaaaaagaagagcaattttccctcaccaaagaagaagaagcaaacaatggccgatcaacttaccgatgaacagatctccgagttcaaggaagccttcagcttgttcgacaaggacggcgatggttgcatcacaaccaaggagcttggaactgttatgcgttcattggggcaaaacccaactgaggcagagctccaggacatgatcaatg

SEQ ID NO: 143742 - DNA, 246 bp, Glycine max
ggaaaattagcctcacaaaagcaaagatcaaacaaaccaaggacgagaacacgatgttgcttgaacttgcacttggtttattggttttggctctgtttctgcacttgcgtcccacacccactgcaaaatcaaaagcacttcgccatctcccaaacccaccaagcccaaagcctcgtcacctcttcataggacaccttcatctcttaaaagacaaacttctccactacgcactcatcgacctctcca

SEQ ID NO: 143743 - DNA, 245 bp, Glycine max
ccgattgctagaatggaatttcgatgctcagtcatctcttttaccattctcttctctcttgctcttgcaggagagagccatgtccatgcatcgctacctgaggaagattattgggaagctgtttggccaaacactcccattcccactgcactgcgagagcttctaaagcctctccctgcaggtgttgcaatcgatgaactccctaagcaaattgatgatacacagtacccaaaaacattcttcta

SEQ ID NO: 143744 - DNA, 187 bp, Glycine max
gcgactgggtgatggagagcatggacaagggcactgacagctacggcgtcaccactgggttcggtgctacctcccaccggagaaccaaacaaggcggtgccttgcagaaggagctaattaggtttttgaatgctggaatatttggcaatggtacagagtccaattgcaccctactccacacaacata

SEQ ID NO: 143745 - DNA, 243 bp, Glycine max
gtgttgccaagttccttggttttgaacagactttaaagaatgacttatcaccatacaaattaggaggagcagctggtggaagtgatttcgatccaaaaggaaaaagtgataatgagattatgcgattctgccaaagtttcatgagcgaaatgtatcgctacctggggcctgacaaggaccttccgtctgaggaaatgggtgttggtactcgagaaatggggtatctttttggacagtataggc

SEQ ID NO: 143746 - DNA, 245 bp, Glycine max
ctgttttggatgaactggagaaaaacttgcagctatctccttggcatatggagccttcaagaatgacactctatcgattcggaaacacctccagcagttcactttggtatgagctggcttacactgaggccaaagggaggatcaaaaagggagacagaacatggcaaattgcattcggttctggattcaagtgtaacagtgcagtgtggaaggctctcaggaccatcaaccctgctaaagagaaa

SEQ ID NO: 143747 - DNA, 246 bp, Glycine max
ttcctctcaggaatgtgttcccaggacctattgtgttttaaatccacaaaatccttttgtgttaaataggtggatgggaaaactgactttccctcagggcacttcccgaagtgttaagagaatgcctctttctatagggggaggagctggtgcaaagaatgctattctcatgaatatgccaaatgctgttctttcaatgtggagatattttgttggagatctcgtctttgaagtttctaagatgac

SEQ ID NO: 143748 - DNA, 244 bp, Glycine max
attgtattgaggatctattctttgtctcaatctgggcctgaacctcattgtattgaggatctattctttgtctcaatctggtatcacatgtgtttaaattgtctcttgatgatgttgaaactcctaaaggttctatgttggatcttaaaatttctcaatctaaaattgcacttcccaagaacacagttggaggaaccattctgcgtagtgatctattggcatattttttgacagagggcaattt

SEQ ID NO: 143749 - DNA, 244 bp, Glycine max
ctcccatgatgcccctagatgaagaaattctttctaaggttgcacaagatatggttgaggaatggtttgattgtgttgatgaggaggattcctttgaggaagtttctttaagtgcagcacttaatggtgttgagggtttggactatatggcaagaattcctcttgccacatctgagggttttcctcatgtgctttcacgcaagaatggcgagacaggcaaaaggagatttgtctctggggatgg

SEQ ID NO: 143750 - DNA, 244 bp, Glycine max
gattcaattaaaccatggtaggcctcagcctctccaatatgtggtcaatgcggcctttttggctgccctatatagtgattatcttgatgctgctgatacacctggatggtattgtggacctaatttcttttcaaccgacgtgctccgtagctttgccaagtcccagattgattacatccttggaaataacccaaggaaaatgagttatgtcgtaggttttggtaatcattacccaaaacacgtc

SEQ ID NO: 143751 - DNA, 201 bp, Glycine max
ctcgagccgaatcggctcgagtaataaaccgcgatcacaggttagcgcaccttaaaaccggaaacaaaagcaatcgttacttgatttcaagaatttctcaatttcttcctacttctttgtgtacgatttcttaagggcaagacaatcactctctgtgctggtcacagacttcgtgaatcattttcttttccacacaacata

SEQ ID NO: 143752 - DNA, 242 bp, Glycine max
ggcctgtgctatgaatagttcttttagggggcgcgccagttctgatatttacaccatcttctctcaagactgtgaattatggaatcctgcttgcacaaaagcaatgactatgtcatttaatccaaacccgtgttctgatgcatggagtttggaatttctgaagcgtaccggatttcattgtgatatcatttgtgtcactggatggactgccaccccaatgcaggatgttcaggttacaattg

SEQ ID NO: 143753 - DNA, 145 bp, Glycine max
cggaaacaaaagcaatcgttacttgatttcaagaatttctcaatttcttcctacttctttgtgtacgatttcttaagggaaagaaaatcactctctgtgctggtcacagacttcgtgaatcattttcttttccacacaacatacg

SEQ ID NO: 143754 - DNA, 242 bp, Glycine max
attccagaagtatttgagtggcatttccttggaagcaaggccattttatgggtacccaatttatctgtggacactgcctatcagaccaacattgttgcttaattagtccatgcatcttgagcaccatgagaatgagattgtggctaaaataaattatcatgtgctgtgtgttgtgcaagtactaccttctctagctagattgctagagctagaatttcaacctacctatgtgtactgataag

SEQ ID NO: 143755 - DNA, 242 bp, Glycine max
cttgtttttcaaccagcagaagaaggaggtggaggggctaagaaaattttagatgctggagtcttggaaaatatctctgccatatttggattgcatattgtacctacctatcctattggtgaagtggcctcaaggtcgggtcccatatttgctggaagcggcttctttgaagcaacaataaatggcaggggaggccatgcagctatccctcagcactctatagatccaatattggctgcttc

SEQ ID NO: 143756 - DNA, 241 bp, Glycine max
cagtaatggtgatattatgaccagctagtgcaactttgcaatttagaaagttagcagattgtgattttctcaagagaaactttaagcagatgtctaatgttttatgggtggctcctgaggacaaggcgagtttatggtcacaacttcattatgtttcgtgcaataatctggaaatgcaagaagcttatcttgtcaatctcgtaaatgtgttacgagaattgtatttgcacagtccagagga

SEQ ID NO: 143757 - DNA, 248 bp, Glycine max
ttttgttggagatctcgtctttgaagtttctaagatgacttctccctacattaaatgtacagtctctttcttcatagcatttggaaatttggctgatgacaccatcaattttgaggcttttccccacaagctggtgcagtttggagagattcaggaaaaagttgtgttgaaattttcacaagaggactttcttacagcttggtcaactcaggtgcgtcccgcaacgactctgttggctgatgggtgcc

SEQ ID NO: 143758 - DNA, 247 bp, Glycine max
atttgagtttccttattgacaatcccaaacagtctacagtttttgatattctcttgggaatctctcaagattttgaaattgctggtaatactcttatgccagctttttctgttccacaggctactgccagatcttctgaaaatgcggaatcctctgcatgatctggaattcgtgttttctttcgcttgttcgtttgtttaattcaataaaggaaattaggcatgaccctcttgttgagtatgctctg

SEQ ID NO: 143759 - DNA, 224 bp, Glycine max
gatatctatgacagatatgaaccggtcaatgaacccactttggacaactgctttgtatcaacaagttatgatgctactactcactttgagtcgaccgtggatgatgttctcaacatgtatacattgataactggaaaggttattgacctgagtgtggatcttagtgctgctagtgctgcagaagagtaaagcaaaactcggtgatgtgcctttccttccatgat

SEQ ID NO: 143760 - DNA, 240 bp, Glycine max
caaacccgtgttctgatgcatggagtttggaatttctgaagcgtaccggatttcattgtgatatcatttgtgtcactggatggactgccaccccaatgcaggatgttcaggttacaattgattggtttatttcctctcaggaatgtgttcccaggacctattgtgttttaaatccacaaaatccttttgtgttaaataggtggatgggaaaactgactttccctcagggcacttcccgaa

SEQ ID NO: 143761 - DNA, 241 bp, Glycine max
cttaacatagatggtctcctcttctcaaaatcaaggcctctggttctggataacgtcagatttgcatcactcactgttgcccttattggtgttatcttcctgggagcaaatttcatacctagcatttgggatgccttccagtttactggagcaactgccgcagtctgtataggattcatttttccagctgccatcacgcttaaggaccgctacaacattgctactaaatcagacaagattt

SEQ ID NO: 143762 - DNA, 241 bp, Glycine max
cttgacttgcagctttactcctggttcttgttctttaactgcatataagctcactccatctggttatgaatgggggcgtgttaataaggatacgggaagcaatccacatggttaccttcccacccattatgagaaggttcagatgctccttagtgatcgcttccttggtttctacatggttcctgataatggtccatggaattacaacttcatgggggtgagacacgcatcagggatgaaa

SEQ ID NO: 143763 - DNA, 238 bp, Glycine max
gcgacaaatgcttctgggcttcaacaggttcaacatcctcaatttctggaacagagtcacgcgggtcttgttccgcaaacgttggaaggagtttctcaggttccgcaaggagcaaaaggacgtgtttgttccgcttataagagccaggaagcaaaagcgagacaagaaaggttgtgatggcttcgtagtttcctatgttgacacgttattggatttggagttgcctgaggagaaacgc

SEQ ID NO: 143764 - DNA, 240 bp, Glycine max
atctaaaattgcacttcccaagaacacagttggcggaaccattctgcgtagtgatctattggcaaattttttgacagagggcaattttagagcaagtgttgatttgcagcgcactcatcgtattaaaggaatgattaacatggtggccacagttggtattcctgagaatacaggtatagcattggcctgtgctatgaatagttcttttagggggcgcgccagttctgatatttacaccat

SEQ ID NO: 143765 - DNA, 245 bp, Glycine max
ggcacagaacatgagggatatgatccttttcttggtggaattcaaaaatatgccactcccatgatgcccctagatgaagaaattctttctaaggttgcacaagatatggttgaggaatggtttgattgtgttgatgaggaggattcctttgaggaagtttctttaagtgcagcacttaatggtgttgagggtttggactatatggaaagaattcctcttgccacatctgagggttttcctcatgt

SEQ ID NO: 143766 - DNA, 247 bp, Glycine max
cccaggacctattgtgttttaaatccacaaaatccttttgtgttaaataggtggatgggaaaactgactttccctcagggcacttcccgaagtgttaagagaatgcctctttctatagggggaagcgctggtgcaaagaatgctattctcatgaatatgccaaatgctgttctttcaatgtggagatattttgttggagatctcgtctttgcagtttctaagatgacttctccctacattaaatgta

SEQ ID NO: 143767 - DNA, 238 bp, Glycine max
ttagaaagttagcagattgtgattttctcaagagaaactttaagcagatgtctaatgttttatgggtggctcctgaggacaaggcgagtttatggtcacaacttcattatgtttcgtgcaataatctggaaatgcaagaagcttatcttgtcaatctcgtaaatgtgttacgagaattgtatttgcacagtccagaggaagctcgccaattgagaaggaaagctctctctcgtattga

SEQ ID NO: 143768 - DNA, 240 bp, Glycine max
aacaaatggtaatgcccggacaccgtgagtcaaacttgcagaaagagctgaatcgatacattcccactgccgcagcatttggaggcatctgtattggtgccctgacagtgttggcagatttcatgggggccatcggttcaggaacaggaatattgcttgcagtaaccatcatctatcagtactttgagacatttgagaaggggagagctagcgagcttggcttctttggtttctaagttc

SEQ ID NO: 143769 - DNA, 240 bp, Glycine max
ggcaattttagagcaagtgttgatttgcagcgcactcatcgtattaaaggaatgattaaaatggtggccacagttggtattcctgagaatacaggtatagcattggcctgtgctatgaatagttcttttagggggcgcgccagttctgatatttacaccatctgctctcaagactgtgaattatggcatcctgcttgcacaaaagcaatgactatgtcatttaatccaaacccgtgttct

SEQ ID NO: 143770 - DNA, 239 bp, Glycine max
gtttctaagatgacttctccctacattaaatgtacagtctctttcttcatagcatttggccatttggctgatggtgtcatcagccaaatttgaggcttttccccacaagctggtgcagtttggagagattcaggaaaaagttgtgttgaaattttcacaagaggaatttcttacagcttggtcaactcaggtgcgtcccgcaacgactctgttggctgatgggtgcccatatttgtatg

SEQ ID NO: 143771 - DNA, 238 bp, Glycine max
attttgttggagatctcgtctttgaagtttctaagatgacttctccctacattaaatgtacagtctctttcttcatagcatttggaaatttggctgatgacaccatcaattttgaggcttttccccacaagctggtgcagattggagagattcaggaaaaagttgtgttgaaattttcacaagaggaatttcttacagcttggtcaactcaggtgcgtcccgcaacgactctgttggc

SEQ ID NO: 143772 - DNA, 239 bp, Glycine max
ttttgacaaacctaagacgcgctgcttcactattctccctatggagtttaatcttgtggtccgtcaaaagtttttaaattttgtgaggttcattatgaagaaaagggacaagcttagttgtcaagttggaatcaacccatactccatggaatggactggtttggccaatagattactgagtaagggcaatgctattctgtgttgcgattatgctagttttgatggtttgagtaccaagc

SEQ ID NO: 143773 - DNA, 105 bp, Glycine max
ggcaaaatcaatgcacggcacagtgatccaagtctgagaaaccggactgggccagttcagctgccatacactttgatgccatcgttgcaagtcgaggacagggtt

SEQ ID NO: 143774 - DNA, 242 bp, Glycine max
agaggttccatgttggctcttaaaatttctcaatctaaaattgcacttcccaagaacacagttgagtcgtaccagtctgcgtaatgatttattggcaaattttttgacaaagggcaattttagagcgagtgttgatttgcagcgcactcatcgtattcgaggaatgattaacctggtggccacagttagtattcctgagcatacaggtatagcattggcctggtgccataatagttctttta

SEQ ID NO: 143775 - DNA, 245 bp, Glycine max
ctcgagccgcgcgttggtgcaaagcatccttcgcttcaatctctctctctctctttgcgcgctctgcaaaccgaacatttcatctccaaaggtcgaaggagaaatggggctgacattcacgaagcttttcagccggcttttcgcgaagaaggaaatgcgaattctgatggttggtcttgatgctgctggtaagaccactctcctctacaagctcaagctcggagagatcgttactacaattccta

SEQ ID NO: 143776 - DNA, 243 bp, Glycine max
ctcttgggaatctctcaagattttgaaattgctggtaatactcttatgccagctttttctgttccacaggctactgccagatcttctgaaaatgcggaatcctctgcatgatctggaattcgtgttatctttcgcttattcgtttatctaattcaataacggaaattaggcatgaccctcttgttgagtatgctctacctatctgaaaatttccacacctcttctaattgtcgtaatgatgtg

SEQ ID NO: 143777 - DNA, 237 bp, Glycine max
gaagaataatcaaatttctcagatctatccgacgtcgtcgcagatccaccaaccgttatggctgccttcagcggtgatgaaacggctccgtttttcggcttccttggagccgcagctgccctcgtcttctcctgtatgggagctgcctatggcacagcaaagagtggtgtaggcgtggcttccatgggtgtaatgcgacctgagctggtgatgatgtctattgttcctgttatcatg

SEQ ID NO: 143778 - DNA, 238 bp, Glycine max
attttgtgaggttcattatgaagaaaagggacaagcttagttgtcaagttggaatcaacccatactccatggaatggactggtttggccaatagattactgagtaagggcaatgatattctgtgttgcgattatgctagttttgatggtttgattaccaagcaagttatgagcaagatggcagaaatgataaacagtctttgtggtggtgatgaaaaattgatgcgtgaaaggacgca

SEQ ID NO: 143779 - DNA, 229 bp, Glycine max
cagttgacaaccataaacaatatgtgtgcatatgggctcaatcctggtatttcaggttctcgtcttttgggcaccattcctcagtccatttcacagcaaactgtttggaatcaaatggcaacagtgagaacaccattgaattttgattctagcaagcagagcttttgtcaattttctattgaccttctcggtggaggaattttagtggacaaaactggagattggatca

SEQ ID NO: 143780 - DNA, 244 bp, Glycine max
acctagatagagacattgctcttgcagaaatagagacagcggaacgattgtctaatgtgaaggcttgggaagacagtgaaaaatccaaagcagagaataaaacccaaaagcagctctctgctgttgctgcttgggaaaacagcaagaaagcagctcttgaagctcagctgagaaaaattgaggcacaactagagaaaacgcaagcagaatatggtgaaaacatggccaccaaaatagccttagt

SEQ ID NO: 143781 - DNA, 242 bp, Glycine max
ttgatgccaagtttgagtctcaagaagaccctttgttcattcaggccaccaggtttaactccgagagaagccgtttggcgcagagttttgaatacaattacggggattttatacccttgctccggccattcttgagagggtacctcaacaagtgcaaggacttgcagtctaggaggttagacattttcaacacccactacgttgagaaaagaagacaaataatggctgccaatggggagaag

SEQ ID NO: 143782 - DNA, 241 bp, Glycine max
ctcgagccgtttggtgctcagatcactactaagaaggatgattctgagtatcttcttctaaagtcagttggtgggatcctgggattgagtagtcaagaaatagtggaagtgcacaggggtctaactgagcaggcttttaggcaacaggctgaggtagttttagccgatggacagttgacaaaggccagggtggagcagcttaataacctccagaaacaagtaggcttacctcaagaatatg

SEQ ID NO: 143783 - DNA, 176 bp, Glycine max; identical to SEQ ID NO: 142765

SEQ ID NO: 143784 - DNA, 235 bp, Glycine max
aatcgctcctcagacatcaacaaaaggattcgcacagcacttgggaaaggtaagaaaattgtttttcttactagagttgatccttttccagtagctttattggctgttctttttggcgttaagaatgaaattctgggttctaacgccactaaccctatgctgacgcgacttcttgagaactgtaagagtctcaaatatctggttgatgagtgtccttttgcatttgtgaactagt

SEQ ID NO: 143785 - DNA, 240 bp, Glycine max
cacacatattgtttatgggctcaatcctggtatttcaggttctcgtcttttgggcaccattcctcagtccatttcacagcaaactgttcggaatcaaatggcaacagtgagaacaccattgaattttgattctagcaagcagagcttttgtcaattttctattgaccttctcggtggaggaattttagtggacaaaactggagattggatcacacttatacaaaattctccaattagtaa

SEQ ID NO: 143786 - DNA, 239 bp, Glycine max
gcgagttccagcttggctatcgcttctcgcaccagaagtccctcccacctcgtattttctcaaagaaacccgtgctcgatagcttcttccttgccaaacccatatggccattcatcggaagttgggttatcaagtaaaagccgtggctttccttagaaacatgatgagaaaaatatccatggtgctagtacaagttatggtgcaattgaagccaaggggaatccgccgataactccagc

SEQ ID NO: 143787 - DNA, 238 bp, Glycine max
gtggagttctgagtgggcaaatcaaacttcatggcatttgagtttccttattgacaatcccaaacagtctacagtttttgatattctcttgggaatctctcaagattttgaaattgctggtaatactcttatgccagctttttctgttccacaggctactgccagatcttctgaaaatgcggtgtcctctgcatgatctggaattcgtgttttctttcgcttgttcgtttgtttaatt

SEQ ID NO: 143788 - DNA, 232 bp, Glycine max
ccattgtgcagattgaaccagacatgaattcaaggtttcagcttttgagtaccactaccaatggtgattttgttcaagggatagatctcgcaatggttaaagttaatgtcgcatgtgctgctgttggcttgacatcatgttacactccaactccattgttggaatctggtttgcacaaagacagagggttaattgtggagtattttggaaggatgtcttacgttgctcataa

SEQ ID NO: 143789 - DNA, 232 bp, Glycine max
gaaactttaagcagatgtctaatgttttatgggtggctcctgaggacaaggcgagtttatggtcacaacttcattatgtttcgtgcaataatctggaaatgcaagaagcttatcttgtcaatctcgtaaatgtgttacgagaattgtatttgcacagtccagaggaagctcgccaattgagaaggaaagctctctctcgtattgaatggctgcaaaaagctgatgtgcctac

SEQ ID NO: 143790 - DNA, 230 bp, Glycine max
ctcgagtcgctcttctgagagtgtttggttgaaagtagcacagatgtttcctttcgggccaaagggtcataagatcaaggggactatggtggttatgcagaagcatgtgttggatatcaacagcatcaccagtgttggagggatcgttgaccaaggcttaggcttcataggcagtgcagtcgatgcacttacttttgcagccaccaaaatctccatccagttgattagtg

SEQ ID NO: 143791 - DNA, 234 bp, Glycine max
atcctgagtgggctccaattaattgtcgagttcatcgacaaccaattcacatcactgaaggaaattatgtcagacagcaagatgtcagcattgaatatgatgcatgtacaattccaaatgattgtggttcattggttgttgccaaggttggaaatcacaaacaaattgttggtttccatgttgctggaagcaaaggaagactgggatatgcttcattgataccatatgttgagc

SEQ ID NO: 143792 - DNA, 239 bp, Glycine max
ccatactccatggaatggactggtttggccaatagattactgagtaagggcaatgatattctgtgttgcgattatgctagttttgctggtttgattaccaagcaagttatgagcaagatggcagacatgataaacagtctttgtggtggtgatgaaaaattgatgcgtgaaaggacgcacctgctgttggcttgttgttcaaggatggcaatttgtaagaaagatgtttggagagttga

SEQ ID NO: 143793 - DNA, 259 bp, Glycine max
tacatttccttttctgctcatgctgactctgctcaaacaagtgcgttcttagaagagctcaatcctcctaacataattcttgttcatggagaagctaatgagatgggcaggctcaagcagaagctcataagtcaatttgctgatcgcaacactaaaattcttactccaaaaaactgtcaatctgttgaaatgtatttcaattcgcagaaaatggcaaaaaccatagggaagctggctgaaaaaacaccagaagttggtg

SEQ ID NO: 143794 - DNA, 253 bp, Glycine max
  unsure (1)..(253): unsure at all n locations
tttgacaaacttgaagctgaactagctaaagctgctatgtcattgcctgcaaccaagggctttcagtttggtagtgggtttgcaggcacctttttgactgggagtgaacacaatgatgagttctatatagatgaacatggaaacacaagaacaagaacaaatcgctctggtgggatacagggtggaatttccaatggggaaatcattaatatgagaatagctttcnagccaacatcaacaattggaaagaagc

SEQ ID NO: 143795 - DNA, 254 bp, Glycine max
cgagtttatggtcacaacttcattatgtttcgtgcaataatctggaaatgcaagaagcttatcttgtcaatctcgtaaatgtgttacgagaattgtatttgcacagtccagaggaagctcgccaattgagaaggaaagctctctctcgtattgaatggctgcaaaaagctgatgtgcctaccatagcacagattgaagagttccattcgatgcagaggatgatgaatgctcctgattcaaatgataatattgat

SEQ ID NO: 143796 - DNA, 252 bp, Glycine max
ccagggcgcagattcatagctcatggacattttttcaaaaatctgactcagaaagtgcgagtccaaattgttacatctgaaaagagttactggcatgtgtatgatcctgacaagtttcagatgtttgacaacagtgaaataggtcttaattctaatcccactttggaagatatcccacattctgcttgggaccttttttgctgggacagtgagaaaactttgccaaataatttttctgcagaattgctctct

SEQ ID NO: 143797 - DNA, 174 bp, Glycine max
taagatttgaaattttaataaaccgcgatcacaggttgccgcaccttaaaaccggaaacaaaagcaatcgttacttgatttcaagaatttctcaatttcttcctacttctttgtgtaccatttcttaaggtaaagaaaatcactctctgtgctggtcacagacttcgtgaatca

SEQ ID NO: 143798 - DNA, 249 bp, Glycine max
gtatgcctatgcttgtttatcattttcttactttcctctcacgctctgccacaaaactccgtctccgcaataacggaataaaaaaacaagtttaatcactattatggcgccgagggatcataagacaagcaacgctaaggctaacggtaacggtaacagcggggtgaaggaggtgcattttcgtggagtgagacagaggccgtgggggagatacgccgcggagatcagagatcccggcaagaagagccg

SEQ ID NO: 143799 - DNA, 251 bp, Glycine max
agagatgctggtaatgggggagtttttgttggcaatgttgcttcagcattcacaacttcaagtgtgcttgaggcccaaagtagaaagcccaacagatatgaagtttcccagtacagatatcgcaatgtgccaataaagcgcagagcatggtctgaaggccagatgtctaaacatcagtctgtagtagcaattatgtctaaatgcaaagccagcatgagaatgggaaacactgatgctcaaattttgatggt

SEQ ID NO: 143800 - DNA, 250 bp, Glycine max
cttcaccctctgctgctgcttcttcatcttcttctccttcttctccgtttcggcttcgccttcccatgcctcccaccgtgttctctgcttcttcttctgcttcgtctacctctccgaacggcaccgttttgaagaggaagcgacccgctaggttggacatacccgtttcctctctcacccttgcggttccgcccacgccctccgcggcggcgcgtgacttggtcgaggctgaggaagatgggtttggggt

SEQ ID NO: 143801 - DNA, 252 bp, Glycine max
attttgtgaggttcattatgaagaaaagggacaagcttagttgtcaagttggaatcaacccatactccatggaatggactggtttggccaatagattactgagtaagggcaatgatattctgtgttgcgattatgctagttttgatggtttgattaccaagcaagttatgagcaagatggcagaaatgataaacagtctttgtggtggtgatgaaaaattgatgcgtgaaaggacgcacctgctgttggctt

SEQ ID NO: 143802 - DNA, 251 bp, Glycine max
gagaatacaggtatagcattggcctgtgctatgaatagttcttttagggggcgcgccagttctgatatttacaccatctgctctcaagactgtgaattatggaatcctgcttgcacttcccgaagtgttaagagaatgcctctttctatagggggaggagctggtgcaaagaatgctattctcatgaatatgccaaatgctgttctttcaatgtggagatattttgttggagatctcgtctttgaagtttc

SEQ ID NO: 143803 - DNA, 251 bp, Glycine max
gatcccggtggccttttccctctctttctctggaaaattcccccgattttctcgagaaagtgaaacggaattatgagctttcaggacatcgaggctgggcggcccttcagttcgaggcgcgggttgatgaacgggaaactagacccgacgcaagcggtggctgccggaatattccagatcaacaccgccgtctccaccttccagagactcgtcaacaccctcggaacccccaaagacacccccgacctccg

SEQ ID NO: 143804 - DNA, 251 bp, Glycine max
ttcttgcaacaattttgggaacaaccttctggaaactcttttcctttcttagagatgctggtaatgggggagtttttgttggcaatgttgcttcagcattcacaacttcaagtgtgcttgaggcccaaagtagaaagcccaacagatatgaagtttcccagtacagatatcgcaatgtgccaataaagcgcagagcatgggttgaaggccagatgtctttcgatcagtctgtagtagcaattatgtctaaa

SEQ ID NO: 143805 - DNA, 252 bp, Glycine max
gagcgagcgagcgagcagtttcaaagagaggatttgggattgggaaggcgagggattgcgctgcgtctcttcctcttctctttcgattcatccctcattcataatcttccaatccaacaacctcagcctcacactcacacatacacacatctgaacgcgtatcgtccctcccatggcttcaaagcgcatcctcaaggagctcaaggacttgcagaaagacccaccaacttcttgcagcgctggtccagtagc

SEQ ID NO: 143806 - DNA, 250 bp, Glycine max
tttctaaggttgcacaagatatggttgaggaatggtttgattgtgttgatgaggaggattcctttgaggaagtttctttaagtgcagcacttaatggtgttgagggtttggactatatggaaagaattcctcttgccacatctgagggttttcctcatgtgctttcacgcaaaaatggaaccaaaagcaaaaggagatttgtctctggggatggtgaagagatgacattgattccaggaaccagtgttga

SEQ ID NO: 143807 - DNA, 251 bp, Glycine max
atgggggtcggtctgttccttagccttgggaatctgtcaagccaatatgcatttgcttttgttgggctatctgttactgaagtgatcacggcaagcataactgttgttataggcacaaccttgaattactttttggatgacaaaatcaacaaagctgagatccttttcccaggagttggttgctttttgattgcagtttttctaggctctgctgttcattcatctaatgctgctgataataaagcaaagct

SEQ ID NO: 143808 - DNA, 248 bp, Glycine max
tgaagatgtgaatctcatgaagatccacagagttagcattgacgatttcgagattttgaaggttgttgggcagggtgcatttgcaaaagtttatcaggtgaggaaaaagggtacttctgaaatatatgctatgaaggttatgcggaaggacaagattatggagaagaaccatgctgaatacatgaaagctgagagggatatttggacaaagatagaacacgcatttgttgttcaactcagatactctt

SEQ ID NO: 143809 - DNA, 249 bp, Glycine max
caaaaagattgataccagattgagacaaagaatagatcctcaatacaatgaggttcaggctcagatggaaacaaatttgtttaaattgtctcttgatgatgttgaaactcctaaaggttctatgttggatcttaaaatttctcaatctaaaattgcacttcccaagaacacagttggaggaaccattctgcgtagtgatctattggcaaattttttgacagagggcaattttagagcaagtgttgattt

SEQ ID NO: 143810 - DNA, 248 bp, Glycine max
gagatttgtctctggggatggtgaagagatgacattgattccaggaaccagtgttgaagaggcttacaacaagctaatagttgaacttgagaaaagtgttcctacattggttggcattgaatgtcccaaggatgagaaacttcctcgtcgcaaaatttttgacaaacctaagacgcgctgcttcactattctccctatggagtttaatcttgtggtccgtcaaaagtttttaaattttgtgaggttca

SEQ ID NO: 143811 - DNA, 172 bp, Glycine max
attttaataaaccgcgatcacaggttgccgcaccttaaaaccggaaacaaaagcaatcgttacttgatttcaagaatttctcaatttcttcctacttctttgtgtacgatttcttaagggaaagaaaatcactctctgtgctggtcactgacttcgtgaatcattttctttt

SEQ ID NO: 143812 - DNA, 247 bp, Glycine max
tgatgaagttggaagacttgaagtccttcgcgtacataccaaaaacatgaagctttcagataatgttgatctagagagaattgcaaaagatactcatggatatgttggtgctgaccttgctgccctttgcactgaagctgctctacaatgcatcagggagaagatggatctcattgatttggaagatgagagtattgatgctgaagtactgaattctatggcagtttcaaatgagcatttccatatt

SEQ ID NO: 143813 - DNA, 249 bp, Glycine max
gcgacgggctcgggacccatgtcacggcgagcttcgcggcggggttcgtggcggcggtggcgtcgaaccccgtcgacgtgatcaagacgagggtgatgaacatgagggtggagcccggggcgacgccgccctacgccggcgcgttagattgtgctctgaagactgtgcgcgcggagggtcccatggcgctttataaggggtttattcctacgatctcgaggcagggaccgttcactgtggtgctgttcg

SEQ ID NO: 143814 - DNA, 248 bp, Glycine max
gtcgggatcggaggacgagggaggagaagagtacctcttcaagatcgtcataatcggagactctgcggtgggcaaatccaaccttctctcccgctacgcccggaacgagttcaacatgcactccaaggccaccataggtgtcgagttccagactcagtgcttggaaatcgactccaaggaagtcaaggctcagatttgggacaccgccggccaagagcgattccgcgccgtcacctccgcctactacc

SEQ ID NO: 143815 - DNA, 246 bp, Glycine max
catatgttgagccagttgtgcaagctcaaagtgctgaagtttactttgacttcttccctgtggaggttgatagtcaagagggagttgctcacattggtgaattgaaatctggtgtctatgttccactgaatataaaaaagaataagatgggaactcccaaggaatggcaactggatctaccttgtgacaaaattcctagtgtcttgactacaactgatgagagattggtaggcacagaacatgagg

SEQ ID NO: 143816 - DNA, 249 bp, Glycine max
tgtttgttctctctttagttcatatctatgctagggaatccactcttaccattaaactgaaattgtgacagaaaaaaggcaaaatggagagccagccactagaaaaagcaaaaccaaaatacagaaaaggcttatggtcacctgaagaagataataaactcagaaaccatatcattaagcatggtcatggctgctggagctctgtccctattaaggcaggcttgcaaagaaatgggaagagctgtagac

SEQ ID NO: 143817 - DNA, 252 bp, Glycine max
agttaatgtagcatgtgctgctgttggcttgacatcaagttacactccaactccattgttggaatctggtttgcaaaaagacagagggttaattgtggagtattttggaaggatgtcttacgttgctcataacgttaatcagccccaagagaaagatttgttagagggaaatttttcctttgatattaaatctcgctctagattggaaaaagtttcctctacaaaagcacaatttgttagtggaaaaacttc

SEQ ID NO: 143818 - DNA, 250 bp, Glycine max
taaataggtggatgggaaaactgactttccctcagggcacttcccgaagtgttaagagaatgcctctttctatagggggaggagctggtgcaaagaatgctattctcatgaatatgccaaatgctgttctttcaatgtggagatattttgttggagatctcgtctttgaagtttctaagatgacttctccttacattaaatgtacagtctctttcttcatagcatttggaaatttggctgatgacaccat

SEQ ID NO: 143819 - DNA, 246 bp, Glycine max
caaaaattttgtttctttgtgtgtgtatggtgatgataacttaattagtgttcatgaatatgtcaagccttactttagtggttctaaattgaaaagctttctagctggtcataatatcaccattactgatggtattgacaaaactagtgcaactttgcaatttagaaagttagcagattgtgattttctcaagagaaactttaagcagatgtctaatgttttatgggtggctcctgaggacaaggc

SEQ ID NO: 143820 - DNA, 130 bp, Glycine max
ggttgccgcaccttaaaaccggaaacaaaagcaatcgttacttgatttcaagaatttctcaatttcttcctacttctttgtgtacgatttcttaagggaaagaaaatcactctctgtgctggtcacagac

SEQ ID NO: 143821 - DNA, 248 bp, Glycine max
ccggagcaaaaaaacttgttacgatggtttcttccgacaaggatccacgagaggaagtccttcaagcatggtacatggatgatagtgatgaagatcaaagactcccccaccacaaagaacccaaggagtttgtctcgttggaccaacttgctgaacttggagtccttagctggaaattagatgctgataaccatgaaaatgatccagagctgaaaaagattcgtgaagagcgtggctacacctacatg

SEQ ID NO: 143822 - DNA, 245 bp, Glycine max
caaggaatggcaactggatctaccttgtgacaaaattcctagtgtcttgactacaactgatgagagattggtaggcacagaacatgagggatatgatccttttcttggtggaattcaaaaatatgccactcccatgatgcccctagatgaagaaattctttctaaggttgcacaagatatggttgaggaatggtttgattgtgttgatgaggaggattcctttgaggaagtttctttaagtgcag

SEQ ID NO: 143823 - DNA, 250 bp, Glycine max
atcgtaaaatcttctcctactgcctccccgccacctccagctccaccggccgcctctccttcggcaccaccaccacttcctacgtcaagtacacccccttctccaccatctcccgcggctcctccttctacggcctcgacatcaccggcatctccgtgggcggcgccaaactcccagtctcctcctccaccttctccaccggcggtgcaatcatcgactccggcaccgtgatcacccgcctcccccccac

SEQ ID NO: 143824 - DNA, 247 bp, Glycine max
tgaagatgggaatctcatgaagatccacagagttagcattgacgatttcgagattttgaaggttgttgggcagggtgcatttgcaaaagtttatcaggtgaggaaaaagggtacttctgaaatatatgctatgaaggttatgcggaaggacaagattatggagaagaaccatgctgaatacatgaaagctgagagggatatttggacaaagatagaacacccatttgttgttcaactcagatactct

SEQ ID NO: 143825 - DNA, 245 bp, Glycine max
cagagagaggaattgaagcatgggaagagggaaggtggttctggagagaatacagaacaagatcaatcgccaagtaaccttctcaaagcgcagaaatggtttgctcaagaaagctttcgagctatctgttctatgcgatgctgaaatcgctctcgtcatcttctccagccgtggcaagctttttcagtatagtagcactgacattaacagaatcattgagaagtatcgtcaatgctgcttcaaca

SEQ ID NO: 143826 - DNA, 245 bp, Glycine max
gggctccaattaattgtcgagttcatcgacaaccaattcacatcactgaaggaaattatgtcagaaagcaagatgtcagcattgaatatgatgcatgtacaattccaaatgattgtggttcattggttgttgccaaggttggaaatcacaaacaaattgttggtttccatgttgctggaagcaaaggaagactgggatatgcttcattgataccatatgttgagccagttgtgcaagctcaaagt

SEQ ID NO: 143827 - DNA, 221 bp, Glycine max
atttgaaattttaataaaccgcgatcacaggttgccgcaccttaaaaccggaaacaaaagcaatcgttacttgatttcaagaatttctcaatttcttcctacttctttgtgtacgatttcttaagggaaagaaaatcactctctgtgctggtcacagacttcgtgaatcattttcttttccacacaacatacaaaccaaaaaaagggggatgtgctggata

SEQ ID NO: 143828 - DNA, 242 bp, Glycine max
catggaatggactggtttggccaatagattactgagtaagggcaatgatattctgtgttgcgattatgctagttttgatggtttgattaccaagcaagttatgagcaagatggcagaaatgataaacagtctttgtggtggtgatgaaaaattgatgcgtgaaaggacgcacctgctgttggcttgttgttcaaggatggcaatttgtaagaaagatgtttggagagttgaatgtggaatcc

SEQ ID NO: 143829 - DNA, 243 bp, Glycine max
cccaaatattgtggttttaaagcataatgtatggcgtgtgaagggtcttattcaagtttctagatctattggtgatgtatatttgaaaaaggccgagttcaatagagaaccactatatgctaagtttcgacttcgtgaaccatacaagatgccaatactaagctcagaaccatcaatatcagtgcatcatttgcagccacatgatcaatttattatatttgcatctgatggactctgggagca

SEQ ID NO: 143830 - DNA, 244 bp, Glycine max
gtcagcattgaatatgatgcatgtacaattccaaatgattgtggttcattggttgttgccaaggttggaaatcacaaacaaattgttggtttccatgttgctggaagcaaaggaagactgggatatgcttcattgataccatatgttgagccagttgtgcaagctcaaagtgctgaagtttactttgacttcttccctgtggaggttgatagtcaagagggagttgctcacattggtgaattga

SEQ ID NO: 143831 - DNA, 247 bp, Glycine max
tgcttttattcgcaccgcaaacagtgaggcatggccgtcggaaagaacaagcgcatctccaaggggaagaagggtggcaagaagaaggcagctgatccctttgccaagaaggattggtatgacattaaggctccttctgtttttcaagtgaaaaatgttggcaaaaccctcgtctctcgtactcagggtaccaagattgcttctgaaggactcaagcatagagtgtttgaggtctccttggctgatc

SEQ ID NO: 143832 - DNA, 248 bp, Glycine max
gaaactggtcgctcatcagcaggtccattccgggccggtctcggacgccatgcaggcttcggtggtgcaaccagctgtcgccccaggtcgagcaccgggccttcacaccggaagaggacgagaccattattcgggcccatgcccggtttggtaacaagtgggccaccattgcgcgcctcctctcgggccgcaccgataacgccatcaagaatcactggaactcaaccctaaaacgcaagtgcgcgtcc

SEQ ID NO: 143833 - DNA, 239 bp, Glycine max
ccaagtcatactttggaggatgaatgacacaaaggcatgggaagtggacaccttgagagggcacatgaataatgtttcatgtgttatgttccatgccaagcaggatatcattgtgtcaaattccgaagataaaagtattcgcatatgggatgcaacaaagagaactggaattcaaacattccgccgaaagcatgacaggttttggattcttgcagcccatcctgaaatgaatctgctgg

SEQ ID NO: 143834 - DNA, 243 bp, Glycine max
tcttgatcggctcaaactgctttgcgaatcaaaattgtgtgaagaaatcaatactgacaatgtggccacaacacttgcgctggcagagcaacatcactgtccacagcttaaggcaatctgtttaaaatatattgcaaatcctgcaaacttgggagctgtaatgcagtcagaagcttttgtgcatttgaaagagagctgcccctcaatgctgttggaattgctggagacatttgcatcagtgga

SEQ ID NO: 143835 - DNA, 242 bp, Glycine max
aacaaatttgtttaaattgtctcttgatgatgttgaaactcctaaaggttctatgttggatcttaaaatttctcaatctaaaattgcacttcccaagaacacagttggcggaaccattctgcgtagtgatctattggcaaattttttgacagagggcaattttagagcaagtgttgatttgcagcgcactcatcgtattaaaggaatgattagaatggtggccacagttggtattcctgaga

SEQ ID NO: 143836 - DNA, 243 bp, Glycine max
cccaaatattgtggttttaaagcataatgtatggcgtgtgaagggtcttattcaagtttctagatctattggtgatgtatatttgaaaaaggccgagttcaatagagaaccactatatgctaagtttcgacttcgtgaaccattcaagatgccaatactaagctcagaaccatcaatatcagagcctcatttgcagccacatgatcaatttattatatttgcatctgatggactctgggagca

SEQ ID NO: 143837 - DNA, 243 bp, Glycine max
ggcaattttagagcaagtgttgatttgcagcgcactcatcgtattaaaggaatgattaaaatggtggccacagttggtattcctgagaatacaggtatagcattggcctgtgctatgaatagttcttttagggggcgcgccagttctgatatttacaccatcacgtctcaagactgtgaattatggaatcctgcttgcacaaaagcaatgactatgtcatttaatccaaacccgtgttctgat

SEQ ID NO: 143838 - DNA, 243 bp, Glycine max
attgtttgttgttgtaactcgttcttcttcttttgttgttctgtgtttgtgtttgttttttctctcacctgaaaatgtcttgctgcggtggtaactgtggttgcggaagctcctgcaagtgcggcaacggctgcggaggctgcaagatgtacccagacttgagctacactgagtcaaccaccaccgagaccttggtcatgggagtggcacctgttaaggctcaatttgagggtgctgaaatgg

SEQ ID NO: 143839 - DNA, 244 bp, Glycine max
gactgatgcattcgatggaaatattttgagccttgagtttgataattttgctgaagtgcacaaactctatgaaggtggagttacactacctacaaactttcttagcaagatcgcccctataccagtgatcaaggaaatttttcgaactgatggcgaacagttcctcaagtatccaccacctaaagtgatgcaggtggataagtctgcatggatgactgatgaagaatttgcaagagaaacgatt

SEQ ID NO: 143840 - DNA, 244 bp, Glycine max
actgaaaatcatttctggaaccattcttgcaacaattttgggaacaaccttctggaaactcttttcctttcttagagatgctggtaatgggggagtttttgttggcaatgttgcttcagcattcacaacttcaagtgtgcttgaggcccaaagtagaaagcccaacagatatgaagtttcccagtacagatatcgcaatgtgccaataaagcgctttttctttggttgaaggccagatgtcttt

SEQ ID NO: 143841 - DNA, 242 bp, Glycine max
gaaattgagtttctgagataaccacttttctctttgattcatcaatggcaaccgcgaggaccgtgaaggatgtttcgcctcacgatttcatgaaggcttacgcctcccatctcaagcgttccggcaagatggagcttcctgagtggactgatattgtaaaaacagcaaaatttaaggaattggaccaatatgatcctgactggtattatgttagggctgcctcaatggcaagaaagatttat

SEQ ID NO: 143842 - DNA, 241 bp, Glycine max
tttttcctttgatattaaatctcgatctagattggaaaaagtttcctctacaaaagcacaatttgttagtgggaaaaccttcaaatatgatataattggtgctggtgcacattcttcaggagagttacctgagaagggagatcaagaaaaacccaaaaagattgataccagattgagacaaagactagatcctcaatacaatgaggttcaggctcagatggtgacgaatttgttctaaatt

SEQ ID NO: 143843 - DNA, 230 bp, Glycine max
ttcttgcaacaattttgggaacaaccttctggaaactcttttccttacttagagatactggtactgagggaatctttgttggcaatgttgctgcagcattcacaacttcaagtgtgcttgaggcccaaagtagaaagcccatcagatatgacgtttcccagtacagatatcgcaatgtgccatttaatcgcagtgcattggttaaaggccagatgtcgtacgatcagtct

SEQ ID NO: 143844 - DNA, 238 bp, Glycine max
gactcctatagtttcctctgctaattccatatccccgttttccttcactcttgaaccccgattcatttccaccagcacaagaagacaaaatgcaatatcaataccttctcacatgaaagcttggacatactctgagtatggaaaatccaaggaagttctcaagtttaatcagagtgtggctttgcctgaggtgaaggaagaccaggtcctcatcaaggtcgctgctgcttcccttaac

SEQ ID NO: 143845 - DNA, 135 bp, Glycine max
caggttgccgcaccttaaaaccggaaacaaaagcaatcgttacttgatttcaagaatttctcaatttcttcctacttctttgtgtacgatttcttaagggaaagaaaatcactctctgtgctggtcacagacttc

SEQ ID NO: 143846 - DNA, 239 bp, Glycine max
tggtgttggaatcagtggggttgaaggtatgcaggcagtaatggctagtgactttgctattgcccagttccggtttttggagcggcttctggtagtccatggacactggtgctacaagagaattgcacaaatgatatgttatttcttctacaaaaatatagcatttggcctcaccatattctattttgagccctttgcgggcttctctggacaatctgtttatgatgactggtacatga

SEQ ID NO: 143847 - DNA, 241 bp, Glycine max
ggaagactgggatatgcttcattgataccatatgttgagccagttgtgcaagctcaaagtgctgaagtttactttgacttcttccctgtggaggttgatagtcaatagggagttgctcacattggtgaattgaaatctggtgtctatgttccactgcctacaaaaactaatttgatggaaactcccaaggaatggcaactggatctaccttgtgacaaaattcctagtgtcttgactacaa

SEQ ID NO: 143848 - DNA, 240 bp, Glycine max
cgaaaaaggcaaaaggagatttgtctctggggatggtgaagagatgacattgattccaggaaccagtgttgaagaggcttacaacaagctaatagttgaacttgagaaaagtgttcctacattggttggcattgaatgtcccaaggatgagaaacttcctcgtcgcaaaatttttgacaaacctaagacgcgctgcttcactattctccctatggagtttaatcttgtggtccgtcaaaa

SEQ ID NO: 143849 - DNA, 156 bp, Glycine max
aataaaccgcgatcacaggttgccgcaccttaaaaccggaaacaaaagcaatcgttacttgatttcaagaatttctcaatttcttcctacttctttgtgtacgatttcttaagggaaagaaaatcactctctgtgctggtcacagacttcgtgaat

SEQ ID NO: 143850 - DNA, 243 bp, Glycine max
atcaaatggcaacagtgagaacaccattgaattttgattctagcaagcagagcttttgtcaattttctattgaccttctcggtggaggaattttagtggacaaaactggagattggatcacacttatacaaaattctccaattagtaacttgttgagagttgctgcttggaagaaaggttgtttaatggtctagattgtgatgtctgggaatgcagcagtcaaaaggagtgattgggcctcat

SEQ ID NO: 143851 - DNA, 270 bp, Glycine max
cacctttgttcactcttcttctcttgcggctagggttttagcgcacttcttctagatttaaggaagatgggtaaggaaaaggttcacatcagtattgtggtcattggccatgtcgactctgggaaatccactaccactggtcacctgatttacaagcttggaggcattgacaagcgtgttattgagaggtttgagaaggaagctgctgagatgaacaagaggtctttcaagtatgcctgggtgctggacaaacttaaggctgagcgtgaa

SEQ ID NO: 143852 - DNA, 272 bp, Glycine max
taatgttttatgggtggctcctgaggacaaggcgagtttatggtcacaacttcattatgtttcgtgcaataatctggaaatgcaagaagcttatcttgtcaatctcgtaaatgtgttacgagaattgtatttgcacagtccagaggaagctcgccaattgagaaggaaagctctctctcgtattgaatggctgcaaaaagctgatgtgcctaccatagcacagattgaagagttccattcgatgcagaggatgatgaatgctcctgattcaa

SEQ ID NO: 143853 - DNA, 270 bp, Glycine max
tgtgaactttatcatttggtactggtaaaattatctccgtataggatcaggaaactgctaagaccatgttgtttatgtagtatgtaatttctgtatgtatgcttgacatatacaagtgggaaatccaaggaaatgtgtggtcctaaaaatggtgcaagataagcaactctctatggagattggcggggtggggttgtttcaaactgcaacaggggaatacttgccactgattatgtctcagttattgcataattaaactaatatacgtgc

SEQ ID NO: 143854 - DNA, 267 bp, Glycine max
agaacagcctttgttggtaacggagcctaaagaagaaaagaaggatgaccccaacgcgatttccaacttcaggatttcggaaccattgagggagaaattgaaggagaagggtatcgaatcgctgtttcccattcaggccatgaccttcgacaccgttctcgatggttctgatttggttggccgtgctcgcactggtcagggtaaaactctggcatttgtgttgcccatattagagtctttaataaatggtccagcaaaatctgcgag

SEQ ID NO: 143855 - DNA, 272 bp, Glycine max
actgaaaatcatttctggaaccattcttgcaacaattttgggaacaaccttctggaaactcttttcctttcttagagatgctggtaatgggggagtttttgttggcaatgttgcttcagcattcacaacttcaagtgtgcttgaggcccaaagtagaaagcccaacagatatgaagtttcccagtacagatatcgcaatgtgccaataaagcgcagagcatgggttgaaggccagatgtctttcgatcagtctgtagtagcaattatgtcta

SEQ ID NO: 143856 - DNA, 267 bp, Glycine max
gtttgcaaaaattatgaaccttagacaaagtgttgttggtgatcttaaacttcttactgatgggaagttgtatgagggtaagcatattcctgtatctaatattagtgcaggggaaaatcatgtagttcaaatacccttaatggcacaggaggaaattctgtcttctagtgcaagtgatttcagaactgcaatggtgagtaaaaatagcgaacctcaagctactgcaatgcatgtgggagctatagaatatatcattgatagtttcgc

SEQ ID NO: 143857 - DNA, 264 bp, Glycine max
tttttaatgagatgctcattagatatagctatgaaaaattactgcgccaggctaaagctccaagtatgtttttacaatccttcaaaaattttgtttctttgtgtgtgtatggtgatgataacttaattagtgttcatgaatatgtcaagccttactttagtggttctaaattgaaaagctttctagctggtcataatatcaccattactgatggtattgacaaaactagtgcaactttgcaatttagaaagttagcagattgtg

SEQ ID NO: 143858 - DNA, 267 bp, Glycine max
gtgtttcgaatagattatcctaagtctttgggaatagtgctgcaatggcttcaagtcaggaggaggtgacccttttgggagctactggaagcccatttgtgtgcagggttcatattgccctcaagttgaagggagttcaatacaaatatgtcgaagaaaatttgaggaacaagagtgaactgcttctcaaatccaacccagttcacaagaaggttccaatgtttattcacaatgagaagcccatagcagagtctcttgtgattgttg

SEQ ID NO: 143859 - DNA, 268 bp, Glycine max
aagttggaatcaacccatactccatggaatggactggtttggccaatagattactgagtaagggcaatgatattctgtgttgcgattatgctagttttgatggtttgattaccaagcaagttatgagcaagatggcagaaatgataaacagtctttgtggtggtgatgaaaaattgatgcgtgaaaggacgcacctgctgttggcttgttgttcaaggatggcaatttgtaagaaagatgtttggagagttgaatgtggaatcccttc

SEQ ID NO: 143860 - DNA, 267 bp, Glycine max
attctctctactactgctagctgtgacttgttttgagttcaatcaaatcgcattggtatctgaaatcaggaaagatggttagcgtactgagatcaggcaggcacaaagggcagaaggcccagcaaccatccttgccattggaactgcaaacccaccaaaccgtgttgatcagagcacctatcctgattactacttcagaatcaccaacagtgaccacatgaccgagctcagagagaaatttcagcgcatgtgtgacaagtctatgat

SEQ ID NO: 143861 - DNA, 267 bp, Glycine max
cttaacatagatggtctcctcttctcaaaatcaaggcctctggttctggataacgtcagatttgcatcactcactgttgcccttattggtgttatcttcctgggagcaaatttcatacctagcatttgggatgccttccagtttactggagcaactgccgcagtctgtataggattcatttttccagctgccatcactctttaggaccgctacaacattgctactaaatcagacaagattttgtctgtcattatgatagtccttgca

SEQ ID NO: 143862 - DNA, 208 bp, Glycine max
ggaatggtttgattgtgttgatgaggaggattcctttgaggaagtttctttaagtgcagcacttaatggtgttgagggtttggactatatggaaagaattcctcttgccacatctgagggttttcctcatgtgctttcacgcaaaaatggagagaaaggcaaaaggagatttgtctctggggatggtgaaaagatgacattgattcca

SEQ ID NO: 143863 - DNA, 266 bp, Glycine max
caacagtgaaataggtctttattctaatcccactttggaagatatcccacattcagcttgggatcttttttgctgggacagtgagaaaactttgccaaataatttttctgcagaattgctctcttgcaaattggatactgtagatggccaatattatcctgagtgggctccaattaattgtcgagttcatcgacaaccaattcacatcactgaaggaaattatgttcgaaagcaggatttcagcattgaatatgatgcatgtacaa

SEQ ID NO: 143864 - DNA, 270 bp, Glycine max
gtgtttcgaatagattatcctaagtctttgggaatagtgctgcaatggcttcaagtcaggaggaggtgacccttttgggagctactggaagcccatttgtgtgcagggttcatattgccctcaagttgaagggagttcaatacaaatatgtcgaagaaaatttgaggaacaagagtgaactgcttctctaatccaacccagttcacaagaaggttccagtgtttattcacaatgagaagcccatagcagagtctcttgtgattgttgaat

SEQ ID NO: 143865 - DNA, 269 bp, Glycine max
ttgaaggccagatgtctttcgatcagtctgtagtagcaattatgtctaaatgcaaagccagcatgagaatgggaaacactgatgctcaaattttgatggttccagggcgcagattcatagctcatggacattttttcaaaaatctgactcagaaagtgcgagtccaaattgttacatctgaaaagagttactggcatgtgtatgatcctgacaagtttcagatgtttgacaacagtgaaataggtctttattctaatcccactttggaa

SEQ ID NO: 143866 - DNA, 265 bp, Glycine max
taaataggtggatgggaaaactgactttccctcagggcacttcccgaagtgttaagagaatgcctctttctatagggggaggagctggtgcaaagaatgctattctcatgaatatgccaaatgctgttctttcaatgtggagatattttgttggagatctcgtctttgaagtttctaagatgacttctccttacattaaatgtacagtctctttcttcatagcatttggaaatttggctgatgacaccatcaattttgaggcttt

SEQ ID NO: 143867 - DNA, 266 bp, Glycine max
gtcgtctctaactgcggcgactcccgcgccgtcctctgccgcaacggcgtcgccatccctctctcctccgatcacaagccggatcgacccgacgaattactccgagtccaatccaagggagggcgcgtgatttactgggacggtccgagagtgcttggtgtgttagcaatgtctcgagccataggtgacaattatctgaagccgtacgtgatttcagaaccggaggtgatggtgacggagcggacggaggaggacgagtgtttgat

SEQ ID NO: 143868 - DNA, 267 bp, Glycine max
cgtctttgaagtttctaagatgacttctccctacattaaatgtacagtctctttcttcatagcatttggaaatttggctgatgacaccatcaattttgaggcttttccccacaagctggtgcagtttggagagattcaggaaaaagttgtgttgaaattttcacaagaggaatttcttacagcttggtcaactcaggtgcgtcccgcaacgactctgttggctgatgggtgcccatatttgtatgctatggtgcatgatagttcagt

SEQ ID NO: 143869 - DNA, 265 bp, Glycine max
ggcaactggatctaccttgtgacaaaattcccagtgtcttgactacaactgatgagagattggtaggcacagaacatgagggatatgatccttttcttggtggaattcaaaaatatgccactcccatgatgcccctagatgaagaaattctttctaaggttgtcacaagatatggttgaggaatggtttgattgtgttgatgaggaggattcctttgaggaagtttctttaagtgcagcacttaatggtgttgagggtttggact

SEQ ID NO: 143870 - DNA, 265 bp, Glycine max
ctgacatgcaatgctacaacgaatttatgcattatctggaggaaaagaagcgtgccgcagtttccaagttggatgacaagaccactttatttcttgttcctccatcagagttctcagagaaaatactgaaggtacctggtaggttgagcatatctggtgttattctgaggttggagaaccctggtttaaatcatggtcctgaacacattcaaagagatatgacaaacgaaaacctgctgtcctataatgagaatatactgcatcc

SEQ ID NO: 143871 - DNA, 249 bp, Glycine max
agcagattgtgattttctcaagagaaactttaagcagatgtctaatgttttgtgggtggctcctgaagacaaggcgagtttatggtcacaacttcattatgtttcgtgtaataatctggaaatgcaagaggcttatcttgtcaatctcgtaaatgtgttacgagaactgtatttgcacagtccagaggaagctcgccaattgagaaggaaagctctctctcgtattgaatggctgcaaaaagctgatgt

SEQ ID NO: 143872 - DNA, 271 bp, Glycine max
ttcgtctttgaagtttctaagatgacttctccctacattaaatgtacagtctctttcttcatagcatttggaaatttggctgatgacaccatcaattttgaggcttttccccacaagctggtgcagtttggagagattcaggaaaaagttgtgttgaaattttcacaagaggaatttcttacagcttggtcaactcaggtgcgtcccgcaacgactctgttggctgatgggtgcccatatttgtatgctatggtgcatgatagttcagtgt

SEQ ID NO: 143873 - DNA, 263 bp, Glycine max
gggatatgtttacgagtatgtaccacctcacctgggtcttccagtttttgacccttcttcttggaaatatgggtttcatcctcctcggaggcaaggcacttaaggcaataaactcagaatttagtgattctcccttgaggctccaatactacatagtcatcacaggagctgcttatttcttgtattccttcttcattccaacaatatctgcgatgagaaattggttgggagcttcagcggtgctcactttcacatatattata

SEQ ID NO: 143874 - DNA, 264 bp, Glycine max
gcgttatgctattagcttcttgtaatgtacattggaagttgcttttgtcttataaatttctgagactcgcagatcgttgatttgtagttagttagtcatgcgtgctttagtggtatttatgctaatattttgaaatgattattattgaatttatgtaattgtttcaaatctaaaacaaccctggcattcccactaggtgggattggataaatgcaagatagatcatttacctcttaatccctcttagtggtttaaccttataat

SEQ ID NO: 143875 - DNA, 263 bp, Glycine max
cagcggggttttccttgacactttgcttgaattcgctgaggatgagaccatggagatcaaaatcaccaaggaccagatcaagggtcttgttgtcgactttttctcggcaggaacagactccacagcggtggcaacagagtcggcattggcagaactcatcaacaatcctaaggtgttggaaaaggctcgtgaggaggtctacagtgttgtgggaaaggacagacttgtggacgaattgacactcaaaacctgtccttacatta

SEQ ID NO: 143876 - DNA, 263 bp, Glycine max
gctgttggcttgttgttcaaggatggcaatttgtaagaaagatgtttggagagttgaatgtggaatcccttctggatttccgctcacagttatttgcaatagcatttttaatgagatgctcattagatatagctatgaaaaattactgcgccaggctaaagctccaagtatgtttttacaatccttcaaaaattttgtttctttgtgtgtgtatggtgatgataacttaattagtgttcatgaatatgtcaagccttacttta

SEQ ID NO: 143877 - DNA, 171 bp, Glycine max
ctcgagccgggttaattgcaaggcaatcatgtattatgatgaaggatctgttataccttcattattccaatttgctacatctggtctgtataagaaatcactcatgtcatgaatcatgatcgataattacattcctactaaatagtaattactaaaacatgttttacatct

SEQ ID NO: 143878 - DNA, 170 bp, Glycine max
atcacaggttgccgcaccttaaaaccggaaacaaaagcaatcgttacttgatttcaagaatttctcaatttcttcctacttctttgtgtacgatttcttaagggaaagaaaatcactctctgtgctggtcacagacttcgtgaatcattttcttttccacacaacatacg

SEQ ID NO: 143879 - DNA, 264 bp, Glycine max
gttcaagggaaagatctcgcaatggttaaagttaatgtagcatgtgctgctgttggcttgacatcaagttacactccaactccattgttggaatctggtttgcaaaaagacagagggttaattgtggagtattttggaaggatgtcttacgttgctcataacgttaatcagccccaagagaaagatttgttagagggaaatttttcctttgatattaaatctcgctctagattggaaaaagtttcctctacaaaagcacaattt

SEQ ID NO: 143880 - DNA, 263 bp, Glycine max
agcagattgtgattttctcaagagaaactttaagcagatgtctaatgttttatgggtggctcctgaggacaaggcgagtttatggtcacaacttcattatgtttcgtgcaataatctggaaatgcaagaagcttatcttgtcaatctcgtaaatgtgttacgagaattgtatttgcacagtccagaggaagctcgccaattgagaaggaaagctctctctcgtattgaatggctgcaaaaagctgatgtgcctaccatagcac

SEQ ID NO: 143881 - DNA, 263 bp, Glycine max
atgcttcattgataccatatgttgagccagttgtgcaagctcaaagtgctgaagtttactttgacttcttccctgtggaggttgatagtcaagagggagttgctcacattggtgaattgaaatctggtgtctatgttccactgcctacaaaaaataataagatggaaactcccaaggaatggcaactggatctaccttgtgacaaaattcctagtgtcttgactacaactgatgagagattggtaggcacagaacatgaggga

SEQ ID NO: 143882 - DNA, 164 bp, Glycine max
attttaataaaccgcgatcacaggttgccgcaccttaaaaccggaaacaaaagcaatcgttacttgatttcaagaatttctcaatttcttcctacttctttgtgtacgatttcttaagggaaagaaaatcactctctgtgctggtcacagacttcgtgaatcat

SEQ ID NO: 143883 - DNA, 263 bp, Glycine max
tgtgagagacatggcttccttaagctccttagtgctgctccttgcagctctaattctatcccctcaagttcttgcaaactatgagaattccccagtgtacaagcctcccactgagaaaccaccagtttataagccccgagttgagaagcctcctgtttacaaacctccagttgagaagcccccaatttataagcctccagtagagaagccaccagtgtacaagcccccagttgagaagcccccagtttacaagcccccagttg

SEQ ID NO: 143884 - DNA, 257 bp, Glycine max
attcctttgaggaagtttctttaagtgcagcactcaatggtgttgagggtttggactatatggaaagaattcctcttgccacatctgagggttttcctcatgtgctttcacgtaaaaatggtgaaaaaggcaagaggagatttgtttctggggatggtgaagagatgacattgattccgggaaccagtgttgaagaggcttacaacaagctaatagttgaacttgagaaaagtgttcccacattggttggcattgaa

SEQ ID NO: 143885 - DNA, 258 bp, Glycine max
tttttcctttgatattaaatctcgctctagattggaaaaagtttcctctacaaaagcacaatttgttagtggaaaaaccttcaaatatgatataattggtgctggttcacattcttcaggagattttcctgaaaaggaagatcaagaaaaacccaaaaagattgataccagattgagacaaagaatagatcctcaatacaatgaggttcaggctcagatggaaacaaatttgtttaaattgtctcttgatgatgttga

SEQ ID NO: 143886 - DNA, 257 bp, Glycine max
aaatccttttgtgttaaataggtggatgggaaaactgactttccctcagggcacttcccgaagtgttaagagaatgcctctttctatagggggaggagctggtgcaaagaatgctattctcatgaatatgccaaatgctgttctttcaatgtggagatattttgttggagatctcgtctttgaagtttctaagatgacttctccctacattaaatgtacagtctctttcttcatagcatttggaaatttggctgatg

SEQ ID NO: 143887 - DNA, 260 bp, Glycine max
attttcaatggctcaatcccattctggaaaaacctcttccatgacttcaatactcctcctgtttatgcttcttatcagtaatacaggcacaacaggtgcacaatctggtgtatgctatggaagagttggcaacaatctgccatcgccacaagaagtagtttccctttttaaacagtacggcttccaaaggatgagaatctatgatcgaaaccatgaagtcctccaagctctgagagattccaacattgagttgctgctag

SEQ ID NO: 143888 - DNA, 261 bp, Glycine max
attggagagaagcaaccaccaaattaaaagatctaccatggcaaacaagtaccataagcttcgctcaataagtttgccttctagatctcatcctagcaccgttagagtagaggaggagctgagaaagatcaaaacttgggaaggaacatccacaatatccacatcaaagtctattcacacaggcctttcattgcttgaagatttgtacatttgcttggatgatcttctcaacatggcatccacccaaaaggtgatttctca

SEQ ID NO: 143889 - DNA, 261 bp, Glycine max
agttctgctgcctacaagaacttttggcgctttgacatggatagcctccctgcagatctcatccgcaggggaatggccgtacctgacccaacacagccacatggtctatttctcatattggaagactacccttatgcagctgatggaatactaatctggtctgcaatagaagactgggttcgaacctatgtgaaccattactaccctcactcaagccttatatgcaatgacaaagagttacaatcttggtactctgagtca

SEQ ID NO: 143890 - DNA, 172 bp, Glycine max
attttaataaaccgcgatcacaggttgccgcaccttaaaaccggaaacaaaagcaatcgttacttgatttcaagaatttctcaatttcttcctacttctttgtgtacgatttcttaagggaaagaaaatcactctctgtgctggtcacagacttcgtgaatcattttctttt

SEQ ID NO: 143891 - DNA, 259 bp, Glycine max
attccaatatattccattctctctgtgtatttccctacctctcccttcaagatgcagatcttcgtcaagaccctcaccggcaagaccatcacccttgaggtggaaagctctgacaccatcgacaacgtcaaggccaagatccaggacaaggaaggaatccccccggaccagcaacgtctcattttcgccggaaagcaacttgaggacggccgtacccttgctgactacaacattcagaaggagagtactcttcacctcg

SEQ ID NO: 143892 - DNA, 257 bp, Glycine max
cactaccaatggtgattttgttcaagggaaagatctcgcaatggttaaagttaatgtagcatgtgctgctgttggcttgacatcaagttacactccaactccattgttggaatctggtttgcaaaaagacagagggttaattgtggagtattttggaaggatgtcttacgttgctcataacgttaatcagccccaagagaaagatttgttagagggaaatttttcctttgatattaaatctcgctctagattggaaa

SEQ ID NO: 143893 - DNA, 259 bp, Glycine max
aattgtctctatcctgtaagtcaattaccttcagaagctgtcgttgtaaatgttacatgtggtagtggacgtggtggtttacccaccactgcttggattagttctgcagttaacaatcgctcctcagacatcaacaaaaggattcgcacagcacttgggaaaggtaagaaaattgtttttcttactagagttgatccttttccagtagctttataggctgttctttttggcgttaagaatgaaattctgagttctaacg

SEQ ID NO: 143894 - DNA, 184 bp, Glycine max
aattttgataaaccgcgatcacaggttgccgcaccttaaaaccggaaacaaaagcaatcgttacttgatttcaagaatttctcaatttcttcctacttctttgtgtacgatttcttaagggatagaaaatcactctctgtgctggccacagacttcgtgaatcattttcttttccacacaacat

SEQ ID NO: 143895 - DNA, 129 bp, Glycine max
aaaaccggaaacaaaagcaatcgttacttgatttcaagaatttctcaatttcttcctacttctttgtgtacgatttcttaagggaaagaaaatcactctctgtgctggtcacagacttcgtgaatcatt

SEQ ID NO: 143896 - DNA, 259 bp, Glycine max
agctgagctaaatgcagttcagagtgctgcattagctgctggagcttatgatgctgtaatttgtacccatcatgcgcacggtggcaaaggagctgttgacctgcgcattgcagttcaaaaagcctgcaagaatgtgacacagccattgaagttcctgtatcctgttgaactgagtataaaagagaaaatagaggcaatagcaaagtcatatggagccaggggtgttgagtactcagaacaggctgagaagcagattgag

SEQ ID NO: 143897 - DNA, 260 bp, Glycine max
agggttcctctttccttctctagcacaatttacaatctcaatggctggaatttgctgtggtgttgttggagaaggtgacactccggctccactcgagcccactcctcgcccctccaggcgccggagtttggacatcttacctttaaaatatatcgccgacatgcccatgccgccgccggaggctttacggaagcgtcccaagctcaacctcagggactgcgataacgcaattgaaaattgcgacgaatccactggacaca

SEQ ID NO: 143898 - DNA, 261 bp, Glycine max
cggctcgagcggctcgagtaacactatagacttcattggtcatgctttggcgcttcatagtgatgatcgctagttggctgagccagcactggacactgtgaagagaatgaagttatatgcagagtctcttgcacgctttcaaggagggtcaccttacatatatcctttgtatggtttaggagatgttccccaggcatttgcacggcttagtgctgtttatggtgggacatatatgttgaataagcctgagtgcaaggtaga

SEQ ID NO: 143899 - DNA, 259 bp, Glycine max
aaaactctccctcaaatggtccaggatacataggcacctcagtgttgcaaacttctctccatgattttattgaggttattttccagaacaacgaaaacaccatgcaatcttggcatcttgatggttatgatttttgggtcattggtcatggtttcggccagtggacagatgccagcaggaaaacatataatctagtggatgccctgactagacacactacacaggtgtatccaaaatcctggactactatattggtgtc

SEQ ID NO: 143900 - DNA, 222 bp, Glycine max
tcggaaaagaagagattctgtacagagatgctctgaaacggtgctactacactctggagcaagggtataactcaatgccaattaacgttccgggaacactgttccacaaggcgatgaaggcaaggaaggagcttgcacaaatcgtggcccagataatctggagcaggaggcagaggaagatgattgattacaaggacttgttgggttcattcatggatgaga

SEQ ID NO: 143901 - DNA, 275 bp, Glycine max
  unsure (1)..(275): unsure at all n locations
ctcggtggaggaattttagtggacaaaactggagattggatcacacttatacataattctccaattagtaacttgttgagagttgctgcttggaagtacngttgnttaatggtctagattgtgatgtctgggaatgcagcagtcaaaaggagtgattgggcctcattggtacaagtgtttttaacaaacagcaacagtacagagcattttgatgcatgtaagtggacaaaatcagaaccacattcctgggaattaatcttcccaatagaggtatg

SEQ ID NO: 143902 - DNA, 281 bp, Glycine max
aaagtttttaaattttgtgaggttcattatgaagaaaagggacaagcttagttgtcaagttggaatcaacccatactccatggaatggactggtttggccaatagattactgagtaagggcaatgatattctgtgttgcgattatgctagttttgatggtttgattaccaagcaagttatgagcaagatggcagagatgataaacagtctttgtggtggtgatgaaaaattgatgcgtgaaaggacgcacctgctgttggcttgttgttcaaggatggcaa

SEQ ID NO: 143903 - DNA, 276 bp, Glycine max
attattcctgcagatggaatctgacagcaaatgctgctaggcctaacccacaagggtcattccattatgggaagattactcctacaaaagtaattaagttggccaattcagcacctttgatcaatggaaagctccgttatgctgttaacagggtctcctatgttaccctggaccccctctaaagcttgctgatacttcaacattccgggaatcttcagtgtgaatttactccaaaactctccctcaaatggtccaggatacataggcacctcagtg

SEQ ID NO: 143904 - DNA, 268 bp, Glycine max
ggtaggcacagaacatgagggatatgatccttttcttggtggaattcaaaaatatgccactcccatgatgcccctagatgaagaaattctttctaaggttgcacaagatatggttgaggaatggtttgattgtgttgatgaggaggattcctttgaggaagtttctttaagtgcagcacttaatggtgttgagggtttggactatatggaaagaattcctcttgccacatctgagggttttcctcatgtgctttcacgcaaaaatggc

SEQ ID NO: 143905 - DNA, 160 bp, Glycine max
ggttgccgcaccttaaaaccggaaacaaaagcaatcgttacttgatttcaagaatttctcaatttcttcctacttctttgtgtacgatttcttaagggaaagaaaatcactctctgtgctggtcacagacttcgtgaatcattttcttttccacacaaca

SEQ ID NO: 143906 - DNA, 231 bp, Glycine max
actcgagcgaatcggctcgagtggatcttaaaatttctcaatctgaaattgcacttcccaacaacacagttggcggaaccattctgcgtagtgatttagttggcaaattttttgacagagggcaattttagagcaagtgttgatttgcagcgcactcatcgtattagaggaatgattaaaatcgtggccacagttggtattcctgagaatagcagtttagcattggcctgt

SEQ ID NO: 143907 - DNA, 284 bp, Glycine max
agttctgctgcctacaagaacttttggcgctttgacatggatagcctccctgcagatctcatccgcaggggaatggccgtacctgacccaacacagccacatggtctaaagctcatattggaagactacccttatgcagctgatggaatactaatctggtctgcaatagaagactgggttcgaacctatgtgaaccattactaccctcactcaagccttatatgcaatgacaaagagttacaatcttggtactctgagtcaatcaatgtaggccatgctgatct

SEQ ID NO: 143908 - DNA, 277 bp, Glycine max
gagaatttcaggaagaagcacatgacatactcctactgctatgacaaagtcagatacaaagtccctccttcagagtgtgtcatcaattcccaagaagctgagaggctgaggaggtttgatcccgtcacgttcggtggtggccgccgtcaccatggaaaacgacaccgtcgcagcagaggaagccagacagaaacttctgcttcatcattttaagagggttccataacttccattcatccttgatttagtttcactacctggggtttatattttctaa

SEQ ID NO: 143909 - DNA, 273 bp, Glycine max
caaaaattttgtttctttgtgtgtgtatggtgatgataacttaattagtgttcatgaatatgtcaagccttactttagtggttctaaattgaaaagctttctagctggtcataatatcaccattactgatggtattgacaaaactagtgcaactttgcaatttagaaagttagcagattgtgattttctcaagagaaactttaagcagatgtctaatgttttatgggtggctcctgaggacaaggcgagtttatggtcacaacttcattatgt

SEQ ID NO: 143910 - DNA, 161 bp, Glycine max
aaggaaattttgataaaccgcgatcacaggttgccgcaccttaaaaccggaaacaaaagcaatcgttacttgatttcaagaatttctcaatttcttcctacttctttgtgtacgatttcttaagggaaagaaaatcactctctgtgctggccacagacttc

SEQ ID NO: 143911 - DNA, 158 bp, Glycine max
aattttgataaaccgcgatcacaggtttgcgcaccttaaaaccggaaacttaagcaatcgttacttgatttcaagaatttctcaatttcttcctacttctttgtgtacgatttcttaagggaaagagaatcactctctgtgctggccacagacttcgt

SEQ ID NO: 143912 - DNA, 274 bp, Glycine max
tctgggatgaaggaaaaatttgtacaaatgatgaagagcatctatgaaacagaagttacagattggccagtaccactgaaaatcatttctggaaccattcttgcaacaattttgggaacaaccttctggaaactcttttcctttcttagagatgctggtaatgggggagtttttgttggcaatgttgcttcagcattcacaacttcaagtgtgcttgaggcccaaagtagaaagcccaacagatatgaagtttcccagtacagatatcgcaatg

SEQ ID NO: 143913 - DNA, 278 bp, Glycine max
cacaattcacaatcccaacacccattttggagaatcagaatctaactagccaatagccatgaagagacagagagagaacgaagtaacaacgttggaaagctgggacatgcaaatttgttcaacttcaatcacacccgacacaagtgtttccagttccaccatatctccggaagatgtatttgagtgcaaaacgtgcaaccgcaagttcaactcttttcaagcgctgggtggccatagggcttgtcacaacaagagggtgaagatggaaggtgaagaac

SEQ ID NO: 143914 - DNA, 275 bp, Glycine max
gctggtgcaaagaatgctattctcatgaatatgccaaatgctgttctttcaatgtggagatattttgttggagatctcgtctttgaagtttctaagatgacttctccctacattaaatgtacagtctctttcttcatagcatttggaaatttggctgatgacaccatcaattttgaggcttttccccacaagctggtgcagtttggagagattcaggaaaaagttgtgttgaaattttcacaagaggaatttcttacagcttggtcaactcaggt

SEQ ID NO: 143915 - DNA, 271 bp, Glycine max
agacgcgctgcttcactattctccctatggagtttaatcttgtggtccgtcagaaattttgcgacgaggaagtttttcatccttgggacattcaatgccaaccaatgtgggaacacttttctcaagttcaactattagcttgttgtaagcctcttcaacactggttcccggaatcaatgtcatctcttcaccatccccagaaacaaatctcctcttgcctttttcaccatttttacgtgaaagcacatggggaaaaccctcagatgtggca

SEQ ID NO: 143916 - DNA, 272 bp, Glycine max
ggtgaaccctgactgtgggctcaagacccgtaagtacactgaggtgaagccagccctcacaaacatggttgccgcagcaaaactcatccgcaacgaacttgccaagtgaatggtataagaaagtagaatcttccaagtcatttggttctgctttatattataatacaccaaagaaaaattttctctatattgggttgtttcaataactgtgtgtggaatatttaggtgtcttagcatgctctgtgagcaattgattcttcctcaacccctcc

SEQ ID NO: 143917 - DNA, 263 bp, Glycine max
gggatatgtttacgagtatgtaccacctcacctgggtcttccagtttttgacccttcttcttggaaatatgggtttcatcctcttcggaggcaaggcacttaaggcaataaactcagaatttagtgattctcccttgaggctccaatactacatagtcagcacaggagctgcttatttcttgtattccttcttcattccaacaatatctgcgatgtgaaattggttgggagcttcagcggtgctcactttcacatatattata

SEQ ID NO: 143918 - DNA, 271 bp, Glycine max
ctcgagccgaatcggctcgaggatgacaccatcaattttgaggcacttccccacaagctgatgcactttggagagattcaagaaaaagttgtgttgaaattttcacaagaggaatttcttacagcttggtcaactcaggtgcgtcccgcaacgactctgttggctgatgggtgcccatatttgtatgctatggtgcatgatagttcagtgtctacaataccaggtgattttgtcattggtgttaagttgacaaccataaacaatatgtgtg

SEQ ID NO: 143919 - DNA, 205 bp, Glycine max
tacactttgactccatcgttcaagtgaggaagggttgactttcaaaggaattcccaacagtatctctatctaattaaaaagagtttgtggtttcctagtctatgttgtacttctgaataacatagactttatgcatgtctatgcgtaattattgcctgaacttctgcactattgtatttggatgctctcggttttcatataataa

SEQ ID NO: 143920 - DNA, 283 bp, Glycine max
ttcggctcgaataagatggcctgcaggagcagtgtatgaagggggtttctctggtggatatatccatagtacgggcacatacattcggtctgataaattggaatataatgggagatgaaggttgaatcgtaaacatggtttggggttgcaagtttatcctaatggagatacctttgaagggtcttggatgcagagaacacaagaggagcctggcaagtatacctggaccagtggaaatgtgtatgtgaggaatgtgaaaggtgggataatgtcaggaaaagga

SEQ ID NO: 143921 - DNA, 274 bp, Glycine max
cacacatattgtttatgggctcaatcctggtatttcaggttctcgtcttttgggcaccattcctcagtccatttcacagcaaactgtttggaatcaaatggcaacagtgagaacaccattgaattttgattctagcaagcagagcttttgtcaattttctattgaccttctcggtggaggaattttagtggacaaaactggagattggatcacacttatacaaaattctccaattagtaacttgttgagagttgctgcttggaagaaaggttgt

SEQ ID NO: 143922 - DNA, 277 bp, Glycine max
cctaagacggaccacaagattaaactccatagggagaatagtgaagcagcgcgtcttaggtttgtggtccgtcaaaagtttttaaattttgtgaggttcattatgaagaaaagggacaagcttagttgtcaagttggaatcaacccatactccatggaatggactggtttggccaatagattactgagtaagggcaatgatattctgtgttgcgattatgctagttttgatggtgtgattaccaagcaagttatgagcaagatggcagaaatgataa

SEQ ID NO: 143923 - DNA, 274 bp, Glycine max
caaagaatagatcctcaatacaatgaggttcaggctcagatggaaacaaatttgtttaaattgtctcttgatgatgttgagactcctaaaggttctatgttggatcttaaaatttctcaatctaaaattgcacttcccaagaacacagttggaggaaccattctgcgtagtgatctattggcaaatcgtttgacagagggcaattttagagcaagtgttgatttgcagcgcactcatcgtattaaaggaatgattaagatggtggccacagttg

SEQ ID NO: 143924 - DNA, 258 bp, Glycine max
ctcttgggaatctctcaagattttgaaattgctggtaatactcttatgccagctttttctgttccacaggctactgccagatcttctgaaaatgcggaatcctctgcatgatctggaattcgtgttttctttcgcttgttcgtttgtataattcaataaaggaaattaggcatgaccctcttgttgagtatgctctgcctatctgaaaatttcaaaactcttgtaattgtcgtattgatgtgtgaatgtgtgtaattt

SEQ ID NO: 143925 - DNA, 261 bp, Glycine max
tctcgcgtcgctgctccgtaccagtttcactgcataaatttgagagaaaactctgcaaacatgttggtttatcaggacctccttacaggtgatgagcttctctcggactccttccgttacaatgaaattgagaatggaatgctgtgggaagttgaggggaagtgggttgttaagggagcagttgatgttgacattggtgcaaacccttctgctgaggggtggaaaagttgagggagtcgatgacgcagctgtaaaggtttt

SEQ ID NO: 143926 - DNA, 252 bp, Glycine max
cgagaatgtcgaaggaagtgagccagcagaggaaggactacgtagaccctccgccagcccccctcatcgacttggccgagattaagctctggtccttctacagagccctcatcgccgagtttatcgccacactcctcttcctctacgtcaccgtcgccaccgtcattggccacaaaaaacagaccggaccatgtgacggcgttggccttctcggcatcgcataggccttcggtggcatgatctttgtcctcg

SEQ ID NO: 143927 - DNA, 268 bp, Glycine max
cttcaccctctgctgctgcttcttcatcttcttctccttcttctccgtttcggcttcgccttcccatgcctcccaccgtgttctctgcttcttcttctgcttcgtctacctctccgaacggcaccgttttgaagaggaagcgacccgctaggttggacatacccgtttcctctctcacctttgcggttccgcccacgccctccgcggcggcgcgtgacttggtcgaggctgaggaagatgggtttggggtgtactgcaagagaggcag

SEQ ID NO: 143928 - DNA, 267 bp, Glycine max
ggcatctccatgtatatagctggcctgggggcgaactgagacaaacaatggaccttggtgattcagggcttatacccttagagataaggtttttgcatgatcctgctaaagatacaggttttgtcggcagtgcattgacaagtaacatgatacgattttttaagacccaagatgaatcatggagccatgaggttgccatatcagtgaaaccattgaaagtgcaaaactggattcttcctgaaatgcctgggcttataactgattttc

SEQ ID NO: 143929 - DNA, 228 bp, Glycine max
cgtcatggttgctcctcttattggacccgacactgtatcaaccatgccagaccaagcccttcaagcatttattgatcatggtaccgtatccaggacaatagactcaaatgtgcttcatggagtcatttatttagacgatagtgatacaatgtaaatgggaaaaattgtccgcttcaagtcaagcgttttgttttttccccactatacaatggttgtgcgtttatgttt

SEQ ID NO: 143930 - DNA, 272 bp, Glycine max
ctcgagccgaatcggctcgagaatgggttcttcttctattacaacgtcgccctcaaccatgagcatggctgcgatcgtgctcctgttcacggtctttgccgtttcctccgccctagacatgtcgataatctcgtacgacagcgcccacgcggacaaggccgccacgttgcgcaccgaggaggagccgatgtccatgtacgagcagtggctcgtgaagcacgggaaggtgtacaacgcgctcggcgagaaggagaagcgcttccagatcttca

SEQ ID NO: 143931 - DNA, 269 bp, Glycine max
gtggtggaagaactctggtgtaaggcattagactttgcttctcttaaacggagctctgtttcattctttgatgtggagaaacacgaaaccgccgtgtcacggtggacaagagcaaagacaagagcagctaaggttggaaaaggtttgtctaaggatgataaggcacaaaaattggccttgcaacattggctcgaagctattgacccacgtcatcgctatgggcacaatttgcacatgtattacgatacttggtttgaataccaaagcac

SEQ ID NO: 143932 - DNA, 244 bp, Glycine max
caaaggtcgatgagccatcaaaatatggtgtggttgtgatggaggagactaccgggcaggttgagagatttgtagagaaaccaaagttgtttgttggcaacaaaatcaatgctggaatctacctattgaacccctcagttttggatcgaattgaactgaggcccacttctatcgagaaagaggtgtttccaaagattgcagcagataaaaagctatatgcgatggtcctgccaggattctggat

SEQ ID NO: 143933 - DNA, 263 bp, Glycine max
gtaaagtttgtagctcagggtgaatcattcctaactgcttcagcagataagacagttcgtctatggcaagggtcagatgatggtaactataactgcaggcacatcttaaaggatcattcagctgaggtgcaagctgtcactgtccatgcaaccaataattactttgtgactgcttcacttgatggctcttggtgcttttatgaactttcttcagggacgtgtttaactcaggtttatgacacttcaggttcttcggaagggta

SEQ ID NO: 143934 - DNA, 175 bp, Glycine max
tgaaaatgcggaatcctctgcatgatctggaattcgtgttttctttcgcttgttcgtttgtttaattcaataaaggaaattaggcatgaccctcttgttgagtatgctctgcctatctgaaaatttccacacctcttttaattgtcgtaatgatgtgtgaagtgtgtgttatttt

SEQ ID NO: 143935 - DNA, 265 bp, Glycine max
ctcgagccgaatcggctcgagagaaaagggacaagcttagttgtcacgttggaatcaacccatactccatggaatggactgatttggccaatagattactgagtaagggcaatgatattctgtgttgcgattatgctagttttgatggtttgattaccaagcaagttatgagcaagatggcagtaatgataaacagtctttgtggtggtgatgaaaaattgatgcgtgaaaggacgcacctgctgttggcttgttgttcaaggat

SEQ ID NO: 143936 - DNA, 263 bp, Glycine max
acaccatcacttttgaggcttttccccacaagctggtgcattttggagagattcaggaaaaagttgtgttgaaattttcacaagaggaatttcttacagcttggtcaactcaggtgcgtcccgcaacgactctgttggctgatgggtgcccatatttgtatgctatggtgcatgatagttcagtgtctacaataccaggtgattttgtcattggtgttaagttgacaaccataaacaatatgtgtgcatatgggctcaatcct

SEQ ID NO: 143937 - DNA, 265 bp, Glycine max
ggctcattaaatcagttatagtttgtttgatggtatctactactcggataaccgtagtaattctagagctaatacgtgcaacaaaccccgacttctggaagggatgcatttattagataaaaggtcaacacaggctctgcctgttgctttgatgattcatgataactcgtcggatcgcactgcctttgtgccggcgacgcatcattcaaatttctgccctatcaactttcgctggtaggatagtggcctaccatggtggtgacgg

SEQ ID NO: 143938 - DNA, 267 bp, Glycine max
gacaagttgtattctactaaggttaataagtttgcaaaaattatgaaccttagacaaagtgttgttggtgatcttaaacttcttactgattggaagttgtatgagggtaagcatattcctgtatctaatattagtgcaggggataatcatgtagttcaaatacccttaatggcacaggaggaaattctgtcttctagtgcaagtgatttcagaactgcaatggtgagtaaagatagcaaacctcaagctactgcaatgcatgtggga

SEQ ID NO: 143939 - DNA, 265 bp, Glycine max
caaccaagaatgccaaggctattaatcgatggaccttatggagctccagcacaggactacaaaaattatgatgtaatccttctggtggggctaggaattggtgccacccctttgataagcatactcaaagacgtgctaaacaacatcaagcaacataaagatgtagaagaaggagaggtggaaaaggacaagagaaaaccttttgccactaagcgagcttatttctactgggttacccgtgaggatagtcctttgaatggttaaa

SEQ ID NO: 143940 - DNA, 267 bp, Glycine max
gcgacaaatgcttctgggcttcaacaggttcaacatcctcaatttctggaacagagtcacgcgggtcttgttccgcaaacgttggaaggagtttctcaggttccgcaaggagcaaaaggacgtgtttgttccgcttataagagccaggaagcaaaagcgagacaagaaaggttgtgatggcttcgtagtttcctatgttgacacgttgttggatttggagttgcctgaggagaaacgcaagctgagcgaagaggaaatggtgtcgct

SEQ ID NO: 143941 - DNA, 264 bp, Glycine max
tgtgtgtgtatggtgatgataacttaattagtgttcatgaatatgtcaagccttactttagtggttctaaattgaaaagctttctagctggtcataatatcaccattactgatggtattgacaaaactagtgcaactttgcaatttagaaagttagcagattgtgattttctcaagagaaactttaagcagatgtctaatgttttatgggtggctcctgaggacaaggcgagtttatggtcacaacttcattatgtttcgtgca

SEQ ID NO: 143942 - DNA, 264 bp, Glycine max
atggactggtttggccaatagattactgagtaagggcaatgatattctgtgttgcgattatgctagttttgatggtttgattaccaagcaagttatgagcaagatggcagaaatgataaacagtctttgtggtggtgatgaaaaattgatgcgtgaaaggacgcacctgctgttggcttgttgtgcaaggatggcaatttgtaggttcagatgtttggagagttgaatgtgggatcccttctagatttccgctcacagtaattt

SEQ ID NO: 143943 - DNA, 168 bp, Glycine max
cgcgatcacaggttgccgcaccttaaaaccggaaacaaaagcaatcgttacttggagtttcaagaatttctcaatttcttcctacttctttgtgtacgatttcttaagggaaagaaaatcactgctctgtgctggtcacagacttcgtgaatcattttcttttccaga

SEQ ID NO: 143944 - DNA, 149 bp, Glycine max
aagggttgccgcaccttaaaaccggaaacaaaagcaatcgttacttgatttcaagaatttctcaatttcttcctacttctttgtgtacggtttcttaagggaaagaaaatcactctctgtgctggtcacagacttcgtgaatcattttc

SEQ ID NO: 143945 - DNA, 263 bp, Glycine max
tgtgccaaatccttccacttggattttccagcagtttttaactttggtgattcaaattctgatactggtgctcttattgccgcttcttttgagagcctttacccaccaaatggacaaacttacttccaaaaaccatcggggagatactctgatggccgtctcatcatcgatttccttatggatgctatggacttgccattcctaaatgcctatctggattcgttgggtttgccaaattttaggaagggaagcaactttgccgc

SEQ ID NO: 143946 - DNA, 225 bp, Glycine max
agcgaaagcggggagttccgtggacggaggaagagcacaagctgtttttggttggattgcagaaggtagggaaaggtgattggagaggaatctccaaaaactacgtcaaaacgcgaacgccaacgcaggttgcgagccatgctcagaagtactttctccgacgaagcaacctcaatcgccgtcgccgtagatccagcctctttgacatcaccaccgacacggtct

SEQ ID NO: 143947 - DNA, 242 bp, Glycine max
ttcagtgagtgatcggtgttcacttgatctcatcataatcgtcagcgtcaattgaagaagatgccgatcagaaacatcgccgtcggaaggcctgaagaggcgactcaccccgacacgttgaaggcggcttggctgagttcatctcaaccttcatcttcgtgttcgccggctcaggctccggcatcgcctacaacaagctcaccgacaacggcgctgccacctatgccggcctcatctccgcc

SEQ ID NO: 143948 - DNA, 222 bp, Glycine max
ataccctgttgatatatcgctgcctgacatcaacaacggtgtatatggaacagatgagtttaggatgtacaacttcaaggtgaagccttgctcaagggcttactcccatgactggactgagtgtccattcggtcatccaggggagaatgcgaggaggagagacccacggaaaatacccttacagctgtgttccttgtccatgagtttccgtaaagggacctg

SEQ ID NO: 143949 - DNA, 236 bp, Glycine max
ctcgagcgttttgttggagatctcgtctttgaagtttctaagatgacttctccctacattaaatgtacagtctctttcttcatagcatttggaaatttggctgatgacaccatcaattttgaggctttccccacaagctggtgcagtttggagagattcaggaaaaagttgtgttgaaattttcacaagaggaatttcttacagcttggtcaactcaggtgcgtcccgcaacgact

SEQ ID NO: 143950 - DNA, 168 bp, Glycine max
ttcagtgagtgatcggtgttcacttgatctcatcataatcgtctgcgtcaattgaagaagatgccgatcagaaacatcgccgtcggaaggcctgaagaggcgactcaccccgacacgttgaaggcggcttggctgagttcatctcaaccttcatcttcgtgttcgccg

SEQ ID NO: 143951 - DNA, 235 bp, Glycine max
caaattctgtgattcgggtaatggccaccagtggaggcgatgaggggcagaacaaccctgccctcgacccggatttggatgctccggatgacccggatcacgagttcgctgagttcgggtcgggttgttctggggtgctgagttggcctttcagcgagttgtgggtgtggtgaagactgaggttggttacactcagggtcacactccggatccgaattacaaactggtttgcacc

SEQ ID NO: 143952 - DNA, 172 bp, Glycine max
gcttgacatatacaagtgggaaatccaaggaaatgtgtggtcctaaaaatggtgcaagataagcaactctctatggagattggcggggtggggttgtttcaaactgcaacaggggaatacttgccactgattatgtctcagttattgcataattaaactaatatacgtgcca

SEQ ID NO: 143953 - DNA, 224 bp, Glycine max
ggaattcgtgttttctttcgcttgttcgtttgtttaattcaacaagatggtcatgcctaatttcctttattgaattaaacaaacgaacaagcgaaagaaaattaggcatgaccctcttgtagagatgctctgcctatctgaaaatttccacacctcttttaattctcgtaatgatgtgtgaagtgtgtgttattttaaaaaaaaaaaaaaaaagggcggccgcc

SEQ ID NO: 143954 - DNA, 146 bp, Glycine max
gaaattttaataaaccgcgatcacaggttgccgcaccttaaaaccggaaacaaaagcaatcgttacttgatttcaagaatttctcaatttcttcctacttctttgtgtacgattacttaagggaagaaaatcactctctgtgctgg

SEQ ID NO: 143955 - DNA, 235 bp, Glycine max
gatattttgttggagatctcgtctttgaagtttctaagatgacttctccctacattaaatgtacagtctctttcttcatagcatttggaaatttggctgatgacaccatcaattttgaggcttttcccacaagctggtgcagtttggagagattcaggaaaaagtggtgttgaaattttcacaagaggaatttcttacagcttggtcaactcaggtgcgtcccgcaacgattctg

SEQ ID NO: 143956 - DNA, 235 bp, Glycine max
caggctcactgagaaaacaatatttacttgcagagatttggacttcttggttgtctattatacaatagcacttcaatttagaaaatttctactgcattacattaggtggcatctgtataccttgttatcttcattctcccatcttttctcactgctgaaattaaatataagcggaatttgagtaatattcatatttccggcttattttacgacggcagatacaaattctggacta

SEQ ID NO: 143957 - DNA, 152 bp, Glycine max
atttgaaattttgataaaccgcgatcacaggttgccgcaccttaaaaccggaaacaaaagcaatcgttacttgatttcaagaatttctcaatttcttcctacttctttgtgtacgatttcttaagggaagaaaatcactctctgtgctggcc

SEQ ID NO: 143958 - DNA, 231 bp, Glycine max
cagagccatgatgacggcaaggactaccaggatccggcgccggcgccactggttgagccgacggagtttacgtcatggtccttttacagagcagggatagcagagtttgtggccacttttctgttctatacatcactgtctttaccgtcatgggagtcgccggggctaagtctaagtgcagtaccgttggctgtcgaggaatcgcttgggccttcggtggcatgatcttcg

SEQ ID NO: 143959 - DNA, 140 bp, Glycine max
caaagaatagatcctcaatacaatgaggttcaggctcagatggaaacaaatttgtttaaattgtctcttgatgatgttgaaactcctaaaggttctatgttggatcttaaaatttctcaatcaaaattgcacttcccaag

SEQ ID NO: 143960 - DNA, 238 bp, Glycine max
attggtgttaagttgacaaccataaacaatatgtgtgcatatgggctcaatcctggtatttcaggttctcgtcttttgggcaccattcctcagtccatttcacagcaaactgtttggaatcaaatggcaacagtgagaacaccattgaattttgattctagcaagcagagcttttgtcaattttctattgaccttctcggtggaggaattttagtggacaaaactggagattggatca

SEQ ID NO: 143961 - DNA, 226 bp, Glycine max
gtgatttcttcaagagaaactttaagcagatgtctaatgttttatgggtgtctcctgaggacaatgcgagtttatggtcacaacttcattatgtttcgtgcaataatctgtaaatgcaaaagcttatcttgtcaatctcgtagatgtgttacgagaattgtatttgcacagtccagaggaagctcgccaattgagaagtaaagctctctctcgtattgaatggctg

SEQ ID NO: 143962 - DNA, 224 bp, Glycine max
cgtcatggatgctcctcttattggacccgacactgtatcaaccatgccagaccaagcccttcaagcatttattgatcatggtaccgtatccaggacaatagactcaaatgtgcttcatggagtcatttatttagacgatagtgatacaatgtacttgggaaaaattgtccgcttcaagtcaagcgttttgttttttccccactatacaatggttgtgcgattat

SEQ ID NO: 143963 - DNA, 219 bp, Glycine max
gcacgaaacataatgaagttgtgaccataaactggaaatgcaagaagcttatcttgtcaatctcgtaaatgtgttacgagaattgtatttgcacagtccagaggaagctcgccaattgagaaggaaagctctctctcgtattgaatggctgcaaaaagctgatgtgcctaccatagcacagattgaagagttccattcgatgcagaggatgatgaatgc

SEQ ID NO: 143964 - DNA, 236 bp, Glycine max
gtgttgaagaggcttacaacaagctaatagttgaacttgagaaaagtgttcctacattggttggcattgaatgtcccaaggatgagaaacttcctcgtcgcaaaatctttgacaaacctaaagagcgctgcttcactatcctccctatggagtttaatcttgtggtccgtcaaaaggtttttaaattttgtgaggttcattatgaagaaaagggacaagcttagttgtcaagttgg

SEQ ID NO: 143965 - DNA, 229 bp, Glycine max
  unsure (1)..(229): unsure at all n locations
ggacaaagaggggattccactagaccagcagactcntatctttgctgggaagcagctggaagatggtcgtactcttgctgattataatatccagaaggagtccactctgcatttggtgttgaggcttcgtggaggtatgcagatatttgtgaagactctgacagggaagaccattaccttggaggtggaaagctctgatactattgacaatgtgaaagctaagattcag

SEQ ID NO: 143966 - DNA, 226 bp, Glycine max
ctctggggatggtgaagagatgacattgattccaggaaccagtgttgaagaggcttacaacaagctaatagttgaacttgagaaaagtgttcctacattggttggcattgaatgtcccaggatgagaaacttcctcgtcgcaaaatttttgacaaacctaagacgcgctgcttcactattctccctatggagtttaatcttgtggtccgtcaaaagtttttaaatt

SEQ ID NO: 143967 - DNA, 224 bp, Glycine max
gtgttgaagaggcttacaacaagctaatagttgaacttgagaaaagtgttcctacattggttggcattgaatgtcccaaggatgagaaacttcctcgtcgcaaaatttttgacaaactaagacgcgctgcttcactattctccctatggagtttaatcttgtggtccgtcaaaagtttttaaattttgtgaggttcattatgaagaaaagggacaagcttagtt

SEQ ID NO: 143968 - DNA, 205 bp, Glycine max
gggaagagagatttgaaatgtaaatgccaagtgaaagtgaaaagtacagtccagttttagtgatctctttaatttatttgttcatagattaatatgatggtgtatgattgcttttctatttattgtggcatttttgtgttgtaccctgttgttgtgtttgcaataagtattagtaataaagcagcaaattcaatttcagttcacg

SEQ ID NO: 143969 - DNA, 226 bp, Glycine max
cgcccctataccagtgatcaaggaaatttttcgaactgatggcgaacagttcctcaagtatccaccacctaaagtgatgcaggtggataagtctgcatggatgactgatgaagaatttgcaagagaaacgattgctggtttaaatccaaatgtcattaagattatagaggagttcccactaagtagcaagctagttattcaagcctatggtgatcatacctgtata

SEQ ID NO: 143970 - DNA, 223 bp, Glycine max
atttgtatgctatggtgcatgatagttcagtatatacaaatccaggtgattttgtcattggtgttaagttgacaactataaacaatatgtgtgcatcatgggctcaatcctggtatttaggttctcgtcttttgggcaccattcctcagtccatttcacagcaactggtttggaatcaatggcaacagtgagaacaccattgaattttgattctagcaagcag

SEQ ID NO: 143971 - DNA, 222 bp, Glycine max
gatagagctaaggcaaaggcatttggatccgacgacctcgttggttttcctttgtaagttgtaagcatttggcaccagcaagccctgtcttcttcttcgatcagattagggcatttctttctgcgatggccgcagcacccgctagagctcgtgccgattacgattacctcatcaagcttcttcttatcggagacagcggtgtcgggaagcgttctgtgcttt

SEQ ID NO: 143972 - DNA, 205 bp, Glycine max
  unsure (1)..(205): unsure at all n locations
gttttgcttctagagaatgtgagnntctacaaggaggaagacgaagaatgatcctgaattanccaaagaagttggcttctctagctgatctctatgtgaatgatgcatttggcactgcccacagagctcatgcttctacagaaggagttgccaaatacttgaagccctctgttgcaggattcctaatgcagaaggagcttgatta

SEQ ID NO: 143973 - DNA, 222 bp, Glycine max
tctcgagccgaatcggctcgagagagaaactttaagcagatgtctactgttttatgggtggagtcctgaggacaaggcgagtttatggtcacaacttcattatgtttcgtgcaatatctggaaatgcaagaagcttatcttgtcaatctcgtaaatgtgttacgagaattgtatttgcacagtccagaggaagctcgccaattgagatggaaagctctctct

SEQ ID NO: 143974 - DNA, 219 bp, Glycine max
ctcagggggacacataaacccggcggtgacatttgggctgtttttggcgaggaagttgtcgttgcccagggcgattttctacatcgtgatgcaatgcttgggtgctatttgtggcgctggcgtggtgaagggtttcgaggggaaaacaaaatacggtgcgttgaatggtggtgccaactttgttgcccctggttacaccaagggtgatggtcttggtgc

SEQ ID NO: 143975 - DNA, 259 bp, Glycine max
gtcatttaatccaaacccgtgttctgatgcatggagtttggaatttctgaagcgtaccggatttcattgtgatatcatttgtgtcactggatggactgccaccccaatgcaggatgttcaggttacaattgattggtttatttcctctcaggaatgtgttcccaggacctattgtgttttaaatccacaaaatccttttgtgttaaataggtggatgggaaaactgactttccctcagggcacttcccgaagtgttaag

SEQ ID NO: 143976 - DNA, 283 bp, Glycine max
gtacgtaatcacgcgaatgtgatcgcgagaagcatggtgcaggaagctgagaagtacaaggctgaggatgaggagcataagaagaaagtggaggccaaaaatacattggagaattacgcctataacatgaggaacacaattaaagatgataagattgcttccaagctgtctgctgatgataagaagaaaattgaggatgcaattgagcaggctatccaatggctcgatggaaaccaacttgctgaagctgacgaattcgaggacaagatgaaggagttggaga

SEQ ID NO: 143977 - DNA, 251 bp, Glycine max
gacaatcccaagagaatatcaaaaactgtagactgtttgggattgtcaataaggaaactcaaatgccatgaagtttgatttgcccactcagtctacagtttttgatattctcttgggaatctctcaagattttgaaattgctggtaatactcttatgccagctttttctgttccacaggctactgccagatcttctgaaaatgcggaatcctctgcatgatctggaattcgtgttttctttcgcttgttcg

SEQ ID NO: 143978 - DNA, 251 bp, Glycine max
gggaggagctggtgcaaagaatgctattctcatgaatatgccaaatgctgttctttcaatgtggagatattttgttggagatctcgtctttgaagtttctaagatgacttctccctacattaaatgtacagtctctttcttcatagcatttggaaatttggctgatgacaccatcaattttgaggcttttccccacaagctggtgcagtttggagagattcaggaaaaagttgtattgaaattttcacaag

SEQ ID NO: 143979 - DNA, 252 bp, Glycine max
caaacagtttgctgtgaaatggcaacagtgagaacaccattgaattttgattctagcaagcagagcttttgtcaattttctattgaccttctcggtggaggaattttagtggacaaaactggagattggatcacacttatacaaaattctccaattagtaacttgttgagagttgctgcttggaagaaaggttgtttaatggtcaagattgtgatgtctgggaatgcagcagtcaaaaggagtgattgggcc

SEQ ID NO: 143980 - DNA, 250 bp, Glycine max
aattttgtgaggttcattatgaagaaaaggtacaagcttagttgtcaagttggaatcaacccatattccatggaatggactggtttggccaataggttactgagtaagggcaacgatattctgtgttgcgattatgctagttttgatggtttgattaccaagcaaggtatgagcatgatggcagaaatgataaacagtctttgtggtggtgatgaaaaattgatgcgtgaaaggacacacctgctgttgg

SEQ ID NO: 143981 - DNA, 255 bp, Glycine max
gttttggaagaaagtgtatgttatatacagctttttctttgttcgcaaaatcatcgcccacatggtcaccttcttcttctactgtgttgtgattccccttacaatcctggtccctgaggttcatgttccaatctggggagctgtttatattccttctgtcatcaccattctcaattcagttggaacaccaaggtccattcaccttctgttctattggatcctctttgagaatgtgatgtctttgcaccgtaccaa

SEQ ID NO: 143982 - DNA, 257 bp, Glycine max
gaaagttagcagattgtgattttctcaagagaaactttaagcagatgtctaatgttttatgggtggctcctgaggacaaggcgagtttatggtcacaacttcattatgtttcgtgcaataatctggaaatgcaagacgcttatcttgtcaatctcgtaaatgtgttacgagaattgtatttgcacagtccagaggatgctcgccaattgagaaggaaagctctctctcgtattgaatggctgcaaaaagctgatgtg

SEQ ID NO: 143983 - DNA, 256 bp, Glycine max
ctcttgatgatgttgaaactcctaaaggttctatgttggatcttaaaatttctcaatctaaaattgcacttcccaagaacacagttggaggaaccattctgcgtagtgatctattggcaaattttttgacagagggcaattttagagcaagtgttgatttgcagcgcactcatcgtattaaaggaatgattaaaatggtggccacagttggtattcctgagaatacaggtatagcattggcctgtgctatgaatag

SEQ ID NO: 143984 - DNA, 257 bp, Glycine max
ggatccaccaccctctaagtccgtaatcgaagcatcggacgcccttgccctggcggagtccgccgccgtgaccctcccggaactcctccccaccctggtccccgccgcccagcccctcgcccgatcccccatctccaagttctccgtggccgccgtgggcctggccccctccggccgcatcttcgtcggcgtcaacctggagttccctgggctccccctccaccactccgtccacgccgaacagttcctcatcacca

SEQ ID NO: 143985 - DNA, 260 bp, Glycine max
cgaggattgcagtcatgataaacagtctttgtggtggtgatgaaaaattgatgcgtgaaaggacacacctgctgttggcttgttgttcaaggatggcaatttgtaagaaagatgtttggagagttgaatgtggaatcccttctggatttccgctcacagttatttgtaatagcatttttaatgagatgctcattagatatagctatgaaaaatgactgcgccaggctaaagctccaagtatgtttttacaatccttcaaa

SEQ ID NO: 143986 - DNA, 257 bp, Glycine max
agcaagcagagcttttgtcaattttctattgaccttatcggtagaggaattttagtggacaaaactggagattggatcacacttatacaaaattctccaattagtaacttgttgagagttgctgcttggaagaaaggctgtttaatggttaagattgtgatgtctgggaatgcagcagtcaaaaggagtgattgggcctcattggtacaagtgtttttaacaaacagcaacagtacagagcattttgatgcatgtaa

SEQ ID NO: 143987 - DNA, 253 bp, Glycine max
gtggagatttttgttggagatctcgtctttgaagtttctaagatgacttctccctacattaaatgtacagtctctttcttcatagcatttggaaatttggctgatgacaccatcaattttgaggcttttccccacaagctggtgcactttggagagattcaggaaaaagttgtgttgaaattttcacaagaggtctttcttacagcttggtcaactcaggtgcgtcccgcaacgactctgttggctgatgggt

SEQ ID NO: 143988 - DNA, 187 bp, Glycine max; identical to SEQ ID NO: 142659

SEQ ID NO: 143989 - DNA, 96 bp, Glycine max
ttaggcatgaccctcttgttgagtatgctctgcctatctgaaaatttccacacctcttttaattgtcgtaatgatgtgtgaagtgtgtgttatttt

SEQ ID NO: 143990 - DNA, 250 bp, Glycine max
aaatctcgctctagattggaaaaagtttcctctacaaaagcacaatttgttagtggaaaaaccttcaaatatgatataattggtgctggttcacattcttcaggagattttcctgaaaaggaagatcaagaaaaacccaaaaagattgataccagattgagacaaagaatagatcctcaatacaatgaggttcaggctcagatggaaacaaatttgtttaaattgtctcttgatgatgttgaaactccta

SEQ ID NO: 143991 - DNA, 145 bp, Glycine max
taattttaataaaccgcgatcacaggttgccgcactctaaaaccggaaacaaaagcaatcgttacttgatttcaagactttctcaatttcttcctacttctttgtgtacgatttcttaagggaaagaaaatcactctctgtgctg

SEQ ID NO: 143992 - DNA, 249 bp, Glycine max
cgggactctcggaccgtgttccgctgtacaggatcaagaagggggacacgctgtactacatcgcgacgacgacgttcgcgggtctgatgaagtggccgcagatccaggtggccaataacatagccaacgcgaataatatcacgaccggggacatgctttatattccgctgccgtgtagctgcgacgaggtgggtgggaagagtgtggtgcactatgcgcatcttgtggcgccgcagagcaccgtggagg

SEQ ID NO: 143993 - DNA, 248 bp, Glycine max
attgaattttgattctagcaagcagagcttttgtcaattttgtattgaccttctcggtggaggaattttagtggacaaaactggagattggatcacacttatacaaaattctccaattagtaacttgttgagagttgctgcttggaagaaaggttgtttaatggtcaagattgtgatgtctgggaatgcagcagtcaaaaggagtgattgggcctcattggtacaagtgtttttaacaaacagcaaca

SEQ ID NO: 143994 - DNA, 243 bp, Glycine max
tgggaatctctcaagattttgaaattgctggtaatactcttatgccagctttttctgttccacaggctactgccagatcttctgaaaatgcggaatcctctgcatgatctggaatttatgttttctttcgcttgttcgttcgtttaattcaataaaggaaattgggcatgaccctcttgttgagtatgctctgcctatttgaaaatttccacacctcttttaattgtcgtaatgatgtgtgaa

SEQ ID NO: 143995 - DNA, 248 bp, Glycine max
atttttgtgaattgtctctatcctgtaagtcaattaccttcagaagctgtcgttgtaaatgttacatgtggtagtggacgtggtggtttacccaccactgcttggattagttctgcagttaacaatcgctcctcagacatcaacataaggattcgcacagcacttgggaaaggtaagaaaattgtttttcttactagagttgatccttttccagtagctttattggctgttctttttggcgttaagaa

SEQ ID NO: 143996 - DNA, 250 bp, Glycine max
tgaatgcctctttctatagggggaggagctggtgcaaagaatgctattctcatgaatatgccaaatgctgttctttcaatgtggagatattttgttggagatctcgtctttgaagtttctaagatgacttctccctacattagatgtacagtctctttcttcatagcatttggaaatttggctgatgactccatcaattttgaggcttttccccacaagctggtgcagtttggagagattcaggaaaaag

SEQ ID NO: 143997 - DNA, 245 bp, Glycine max
gtcatggatgtcttcatcaaggctgctgaatatatggaaattccagttcgtaggactgatgatgaacctcttcagaagctttttatgttggtaaggagtgagttgaatcttgacctcaaaaacatcaagcaggagcaggctaaattttggaagcaacatccttcactggttaagacagagctgttagttcaagctcagttgactcgtgaacttgcagccttgtctccatctttacaaagtgattt

SEQ ID NO: 143998 - DNA, 251 bp, Glycine max
ccaattagtaacttgttgagagttgctgcttggaagaaaggttgtttaatggtcaagattgtgatgtctgggaatgcagcagtcaaaaggagtgattgggcctcattggtacaagtgtttttaacaaacagcaacagtacagagcattttgatgcatgtaagtggacaaaatcagaaccacattcctgggaattaatcttcccaatagaggtatgtggtcctaataatggttttgaaatgtggagttctga

SEQ ID NO: 143999 - DNA, 240 bp, Glycine max
ggtgagtaaaaatagcaaacctcaagctactgcaatgcatgtgggagctatagaaattatcattgatagtttcgcaagtcctgattgcaacatagttggtgcaatgcttttggttgatacttatcataccaatcctgaaaatgcagttcgtagtatttttgttgcgcctttcagaggcggaaggcccattcgggtggttacatttccgaataccattgtgcagattgaaccagacatgaa

SEQ ID NO: 144000 - DNA, 240 bp, Glycine max
ctgatgagagattggtaggcacagcacatgagggatatgatcctcatcttggataaattcaaaaatatgccactcccatgatgcccctagatgaagaaattctttctaaggttgcacaagatatggttgaggaatggtttgattgtgttgatgaggaggattcctttgaggaagtgtctttaagtgcagcacttaatggtgttgagggtttggactatatggaaagaagtcctcttgcca

SEQ ID NO: 144001 - DNA, 246 bp, Glycine max
ctcgagccgagctttttctgttccacaggctactgccagatcttctgaaaatgcggaatcctctgcatgatctggaattcgtgttttctttcgcttgttcgtttgtttaattcaataaaggaaattaggcatgaccctcttgttgagtatgctctgcctatctgaaaatttccacacctctgttaattgtcgtaatgatgtgtgaagtgtgtgttattttaaaaaaaaaaaaaaaggggggccgcc

SEQ ID NO: 144002 - DNA, 245 bp, Glycine max
cggcagatacaaattctggactaaacacgagaaaaatcttgctttgacagaagaggaaaagatggaagtgattagaaatagaggcattcctgctgatgttcttgcaaagcgagctcatgaatttgaaaaacatgttgctcatgaaagcctcaaggatcaaattcctgctgttgacaagttgtattctactaaggttaataagtttgcaaaaattatgaaccttagacaaagtgttgttggtgatc

SEQ ID NO: 144003 - DNA, 246 bp, Glycine max
gacttaacaacagcacaaagcgggttactgtctgttcaagctaccatctctctctctctttcttagtgcctccttgccagaagttaaaatggcccaagaaactttcctattcacatctgaatcagtgaacgaggggcaccctgacaagctctgtgaccagatctccgatgctgtgctcgatgcatgcttggagcaggaacaagacagcaaggttgcctgtgaaacctgcaccaagaccaacatggt

SEQ ID NO: 144004 - DNA, 259 bp, Glycine max
cgaggcgaatcggatcgaccaaggaattgtgattctagcaagatgagcttttgtcaatattctatcgaccttctcggtggaggaattttaatagacaaaactggagattggatcacacttatacaaaattctccaattagtaacttgttgagagttgctgcttggaagaaaggctgtttaatggtcaagattgtgatgtctgggaatgcagcagtcaaaaggagtgattgggcctcattggtacaagtgtttttaacaa

SEQ ID NO: 144005 - DNA, 281 bp, Glycine max
agaagatggtgcaggaagctgagaagtacaaggctgaggatgaggagcataagaagaaagtggaggccaaaaatacattggagaattacgcctataacatgaggaacacaattaaagatgataagattgcttccaagctgtctgctgatgataagaagaaaattgaggatgcaattgagcaggctatccaatggctcgatggaaaccaacttgctgaagctgacgaattcgaggacaagatgaaggagttggagagcatttgtaaccccatcatagcaaag

SEQ ID NO: 144006 - DNA, 277 bp, Glycine max
gcatgatagttcagtgtctacaataccaggtgattttgtcattggtgttaagttgacaaccataaacaatatgtgtgcatatgggctcaatcctggtatttcaggttctcgtcttttgggcaccattcctcagtccatttcacagcaaactgtttggaatcaaatggcaacagtgagaacaccattgaattttgattctagcaagcagagcttttgtcaattttctattgaccttctcggtggaggaattttagtggacaaaactggagattggatc

SEQ ID NO: 144007 - DNA, 250 bp, Glycine max
ggaggaaattctgtcttctagtgcaagtgatttcagaactgcaatggtgagtagaaatagcaagcctcaagctactgcaatgcatgtgggagctatagaaattatcattgatagtttcgcaagtcctgactgcaacatagttggtgcaatgcttttggttgatacttatcataccaatcctgaaaatgcagttcgtagtatttttgttgcgcctttcagaggcggaaggcccattcgggtggttacattt

SEQ ID NO: 144008 - DNA, 244 bp, Glycine max
atgcggctctagcaccagttgtagcaatagtgcagaatccgatcgtaatgcttgaagctgcattcggtagagagagagcatgtgaattgggatttcaggttaagccatggattaaaataagccttgccccagggtctggtgtcttgagcaagtatgtggcgaggagtgggttgcagaagtatttgaatgagctaggggtcaatatagttgtgtatggattcacaaatccattggaaattcaggg

SEQ ID NO: 144009 - DNA, 273 bp, Glycine max
cagacataattatagtttctgctggatttgatgcagctgttggtgaccctctgggaggatgccgtgtcacaccatttggttattctgttctgttagagaagttgatgaattttgctgaaggtaggattgtactgattttagaaggaggatataaccttgattccatcgcaaaatcaatgcatgcctgcttggaagttttgctagaggacaagcctgttattggatcctcagaggcctatccatttgaatctacgtggcgtgtgattaaagcgg

SEQ ID NO: 144010 - DNA, 273 bp, Glycine max
ggaaaactgactttccctcagggcacttcccgaagtgttaagagaatgcctctttctatagggggaggagctggtgcaaagaatgctattttcatgaatatgccaaatgctgttctttcaatgtggagatattttgttggagatctcgtctttgaagtttctaagatgacttctccctacattaaatgtacagtctctttcttcatagcatttggaaatttggctgatgacaccatcaattttgaggcttttccccacaagctggtgcagttt

SEQ ID NO: 144011 - DNA, 274 bp, Glycine max
cttcagcaattcaaagcaacaacttgaaggctcccataacaacggaatcagggtcggtagccacaccttatgactatggagcaggggaaatgacaacatctgaaccattgcaaccggggctagtttatgaaaccagctccgttgactacttgaacttcttgtgttacattggattcaacgtaaccacggttaaagtcatctccaaaaccgtccctcgtaatttcaattgccccaaggatttgagctctgatcatatctctaacatcaactaccc

SEQ ID NO: 144012 - DNA, 275 bp, Glycine max
cttggttaccaatttttgtgaattgtctctatcctgtaagtcaattaccttcagaagctgtcgttgtaaatgttacatgtggtagtggacgtggtggtttacccaccactgcttggattagttctgcagttaacaatcgctcctcagacatcaacaaaaggattcgcacagcacttgggaaaggtaagaaaattgtttttcttactagagttgatccttttccagtagctttattggctgttctttttggcgttaagaatgaaattctgagttct

SEQ ID NO: 144013 - DNA, 277 bp, Glycine max
tgctgctgttggcttgacatcaagttacactccaactccattgttggaatctggtttacaaaaagacagatggttaattgtggagtattttggaaggatgtcttacgttgctcataacgttaatcagccccaagagaaagatttgttagagggaaatttttcctttgatattgaatctcgctctagattggaaaaagtttcctctacaaaagcacaatttgttagtggaaaaaccttcaaatatgatataattggtgctggttcacattcttcagga

SEQ ID NO: 144014 - DNA, 280 bp, Glycine max
cgccgaagaaggtattgacgtcgatgatgaaaatgaaattggtgaaaacattactgcttctcctttgtgtgaaactcttctgttatgcagtgattggtgctcctcaaacttgtcctgctaacaatgaggataaatgcggcgattcagatgaatggaaaggggagtttttccctgacattcccaaaattaaatatgagggtccgtcaagtaagaatgtgctttcatttaaatggtataatgcagaggaggaaattcttgggaagaagatgaaggattggtt

SEQ ID NO: 144015 - DNA, 277 bp, Glycine max
tggtaacaaatttgtttccatctgagcttgatcctcattgtattgaggatctattctttgtctcaatctggcatcaatgacctgaggttcaagctcagatggaaacaaatttgtttaaattgtctcttgatgatgttgaaactcctaaaggttccatgttggatcttaaaatttctcaatctaagattgcacttcccaagaacacagttggaggaaccattctgcgtagtgatttattggcaaattttttgacagagggcaattttagagcaagtgt

SEQ ID NO: 144016 - DNA, 275 bp, Glycine max
ggagaaggatatgaagggaaggatgtggtgtatgaaaatttgaggcagttgtgtgttcatagagttgccaatgagagcaaccgttcatgggtctggtgggattatgtgacagatttccatgtcagatgttttatgaaggagaaaagatacagcaaggattgtgctgaggaagtcatgaaatcattagatctgcctatggataatattaagacatgcatggaagatcctgaagcagatgtggagaatgaagtgctaaagaatgagccacaagtcca

SEQ ID NO: 144017 - DNA, 272 bp, Glycine max
caatgccaagaacaccatggaaattggtgtctacactggatattcacttcttgccaccgctctcgctcttcctgaagatggaaagatcttggccatggatattaacagggagaattatgaattgggtttgccagtaattaagaaagctggtgttgaccacaaaattgaattcagagaaggtcctgctctcccagttcttgatgaaatggttacagatgagaagaaccatgggagctatgacttcatctttgtggacgcagacaaggacaact

SEQ ID NO: 144018 - DNA, 274 bp, Glycine max
atgtaagtggacaaaatcagaaccacattcctgggaattaatcttcccaatagaggtatgtggtcctaataatggttttgaaatgtggagttctgagtgggcaaatcaaacttcatggcatttgagtttccttattgacaatcccaaacagtctacagtttttgatattctcttgggaatctctcaagattttgaaattgctggtaatactcttatgccagctttttctgttccacaggctactgccagatcttctgaaaatgcggaatcctct

SEQ ID NO: 144019 - DNA, 273 bp, Glycine max
agaggtatgtggtcctaataatggttttgaaatgtggagttctgagtgggcaaatcaaacttcatggcatttgagtttccttattgacaatcccaaacagtctacagtttttgatattctcttgggaatctctcaagattttgaaattgctggtaatactcttatgccagctttttctgttccacaggctactgccagatcttctgaaaatgcggaatcctctgcatgatctggaatttatgttttctttcgcttgttcgttcctttattgaa

SEQ ID NO: 144020 - DNA, 276 bp, Glycine max
caatatgtgtgcatatgggctcaatcctggtatttcaggttctcgtcttttgggcaccattcctcagtccatttcacagcaaactgtttggaatcaaatggcaacagtgagaacaccattgaattttgattctagcaagcagagcttttgtcaattttctattgaccttctcggtggaggaattttagtggacaaaactggagattggatcacgcttatacaaacttctccaattagtaacttgttgagagttgctgcttggaagaaaggttgttt

SEQ ID NO: 144021 - DNA, 256 bp, Glycine max
ggatgatagtctagtgtgtacaataccaggtgattttatcattggtgttaagttgacaaccataaacaatatgtgtgcatatgggctcaatcctggtatttcaggttctcgtctctttgggcagcattcctcagtccagttcacagcaaactgtttggaatcaaatggcaacagtgagaacaccattgaattttgattctagcaagcagagcttttgtcagattgctgatgaccttctcggtggaggaatgtagtg

SEQ ID NO: 144022 - DNA, 270 bp, Glycine max
caaatggcaacagtgagaacaccattgaattttgattctagcaagcagagcttttgtcaattttctattgaccttctcggtggaggaattttagtggacaaaactggagattggatcacacttatacaaaattctccaattagtaacttgttgagagttgctgcttggaagaaaggttgtttaatggtcaagattgtgatgtctgggaatgcagcagtcaaaaggagtgattgggcctcattggtacaagtgtttttaacaaacagcaac

SEQ ID NO: 144023 - DNA, 265 bp, Glycine max
atttggttacagtgctgctgatgattcacagaagtttctgtcacttgcagaagagcttgcttggacatgttataacttctaccaatcaactccaacaaaattggctggagagagctatttctttcattctgggcaggacatgagtgtgggtacatcatggaacatactgaggccagagacagttgagtccctcttttacctttggcgtctaactggcaacaaaacataccaggaatggggttggaatatatttcaagcttttgag

SEQ ID NO: 144024 - DNA, 275 bp, Glycine max
tgcctgtgcattattgcataggcaggaagtctttcagccattcaagaatcatccacgcttcaatgaactgattgataacatttatactgtattagattttttcaatagtcgtatggatgctcaaagagaggatggtgactggtcagtccacgaagtgctacaagtcataattgtcaattgtcgttcttggaggggtgatggaatgaagatgtctactcaactgcgcttcacatatgaacaagagagtcatccagaggagttttttatcccatatg

SEQ ID NO: 144025 - DNA, 278 bp, Glycine max
ctctaattgaagcccatgtggatgtgaagacaactgataactacacattgaggatgttttgcattggatttaccaagagaagagctaaccaagtgaagagaacctgctatgcacaatcaagccagattagacagattcgtaggaagatgagggagatcatgaccaaccaggcaacatcctgtgatttgaaggagttggtccgcaagtttattcctgagattattggaaaagagattgagaaggcgacatctagtatttaccctctgcagaatgtgttt

SEQ ID NO: 144026 - DNA, 269 bp, Glycine max
agcagtcaaaaggagtgattgggcctcattggtacaagtgtttttaacaaacagcaacagtacagagcattttgatgcatgtaagtggacaaaatcagaaccacattcctgggaattgatcttcccaatagaggtatgtggtcctaataatggttttgaaatgtggagttctgagtgggcaaatcaaacttcatggcatttgagtctccttattgacaatcccaaacagtctacagtttttgatattctcttgggaatctctcaagatt

SEQ ID NO: 144027 - DNA, 267 bp, Glycine max
cgtctttgaagtttctaagatgacttctccctacattaaatgtacagtctctttcttcatagcatttggaaatttggctgatgacaccatcaattttgaggcttttccccacaagctggtgcactttggagagattcaggaaaaagttgtgttgaaattttcacaagaggaatttcttacagcttggtcaactcaggtgcgtcccgcaacgactctgttggctgatgggtgcccatatttgtatgctatggtgcatgatagttcagt

SEQ ID NO: 144028 - DNA, 265 bp, Glycine max
tgacacaagatggaaagatggaagtgagtagaagtagatgcagtccagctgaaggtcatgcaaatcgagctcatgacgttgtaaatcatgcatctcatgaaagcctcaaggatcaaattcctgctgctgagaagaggtatgctactaaggataacaagtcagccatcattatgaagcttagacaaagagttgttggtgatcataaacttcttactgatagtaaagtgtatcagggtacagcttactccagtatctgatattagtg

SEQ ID NO: 144029 - DNA, 181 bp, Glycine max
tgtatgtaaagatgtaaaattatgattattaggtggaccatgtgtctcgtcatgggccaatgttatcctctgcttttaagttggaagaggcccaactcatgtgtgatgtacggctgtgattgtgtaatttaatttgcaaaatcaaaaataacaccagagtcatataaagaaaaaaagaaaa

SEQ ID NO: 144030 - DNA, 264 bp, Glycine max
agcaagcagagcttttgtcaattgtctattgaccttctcggtggaggaattttagtggacaaaactgtagattggatcacacttataccaaattctccaattagtcacttgttgagagttgctgccttgaagaaatgtagattgatggtcaagcattgtgatgtctgggaatgcagcagtcctcaggagtgattgggcctcattggtaccagtgtttttaacttccagctacagtacagagtatcatgatgcatgtgagtggac

SEQ ID NO: 144031 - DNA, 273 bp, Glycine max
caattagtaacttgttgagagttgctgcttggaagaaaggttgtttaatggtcaagattgtgatgtctgggaatgcagcagtcaaaaggagtgattgggcctcattggtacaagtgtttttaacaaacagcaacagtacagagcattttgatgcatgtaagtggacaaaatcagaaccacattcctgggaattaatcttcccaatagaggtatgtggtcctaataatggttttgaaatgtggagttctgagtgggcaaatcaaacttcatggc

SEQ ID NO: 144032 - DNA, 265 bp, Glycine max
gttgaatgtggaatcccttctggatttccgctcacagttatttgcaatagcatttttaatgagatgctcattagatatagctatgaaatattactgcgccaggacaaagctccaagtatgtttttacaatgccttcagaaattttgtttctttgtgtgtgtatggtgatgataacttaattagtgttcatgaatatgtcaagccttactttagtggttctaaattgaaaagctttctagctggtcataatatcaccattactgat

SEQ ID NO: 144033 - DNA, 262 bp, Glycine max
ctcggtatcgctcgccaacgtcaggccattgtggatggactgagggacagcgtgcttgctttctctgagaacgtgcccgggacatcagctaaagatgtcatggacatggtgctggtgactcaatactttgacaccatgaaagagataggagcatcgtcaaggtcctcgtctgtgttcatacctcacggtcctggggcagttaaagacattgccgtgcaaattcgggatggtctccttcaggccactgcctcacagaattaag

SEQ ID NO: 144034 - DNA, 263 bp, Glycine max
  unsure (1)..(263): unsure at all n locations
cagcagagcgaaagatggaagtgattagagatagaggcattcctgctgatgtactttgaaagcgaggtcatgaatttgaaaaacatgttgctcatggaagcctcaaggatcaaattcgcggtgttgacaagttgtattctagtaaggttaataagtttgcaaaaattatgaagctcagacgaagtgttgttgtgtgatctgagacttcttactgatgggcaagcgtnccgggcgtaagcatattcctgtatctgatattagtg

SEQ ID NO: 144035 - DNA, 107 bp, Glycine max
aataaaggaaattaggcatgaccctcttgttgagtatgctctgcctatctgaaaatttccacacctcttttaattgtcgtaatgatgtgtgaagtgtgtgttatttt

SEQ ID NO: 144036 - DNA, 251 bp, Glycine max
caaatgattcgtctggagaagtgctcgcttgcagattggatactatgactgtgcaatattatcctgagtggggtccaattgattgtctagttcatcgacaaccaattcacatcactgcaggggattagttcagaaagcaagatgtcagcattgagtatgatgcatgtacgattccagatgattgtggtgccctagttgttgccaaggttggagatcacagacaaattgttggtgtccatgttgctggaagc

SEQ ID NO: 144037 - DNA, 270 bp, Glycine max
tagaatgacagttggcaggaataacaaattgtaataagacaagcattcaaaggaaaggaaacaatacgtggaactgatctagaagaacttaggtacctaaagtcagtgatcaaagaaacgttaaggttacaccctccttctcagttgatccctagagaatgtatcaaatcaaccaacattgatgggtacgaaataccaataaagagtaaagtcatgataaacacatgtggcaattgtgaagagatccccaatattggagtgatgctgaga

SEQ ID NO: 144038 - DNA, 264 bp, Glycine max
gttgctgcttggaagaaaggttgtttaatggtcaagattgtgatgtctgggaatgcagcagtcaaaaggagtgattgggcctcattggtacaagtgtttttaacaaacagcaacagtacagagcattttgatgcatgtaagtggacaaaatcagaaccacattcctgggaattaatcttcccaatagaggtatgtggtcctaataatggttttgaaatgtggagttctgagtgggcaaatcaaacttcatggcatttgagtttc

SEQ ID NO: 144039 - DNA, 260 bp, Glycine max
acaaggacacaagaagtacgacaaattaagacagggcctaagagaaggtgttgtagagaggatacagcgagagcaaaatgtattctcattgggttcgattgatgcttctcattgcttgcattcttccagctttggttgaatgcagagagaggcactacaaatttcatgtggtgtctaaacaaactaatagattgtgttcaagcaaatctattgtcaccattaatggcaagttcccgggacccactctttacgccagggaa

SEQ ID NO: 144040 - DNA, 220 bp, Glycine max
gggtcagttgttgttgccaaggttggaaatcacagacaaattgttggtttccatgttgctggaagcataggaagactgtgatatgcttcattgatacctcatgttgagccatttgtgcaagctcaaagtgctgaagtttactttgacttcttccctgtggaagttgatagtcaccagggatttgctcacattggtgaattgcaatctggtgtctatgttc

SEQ ID NO: 144041 - DNA, 257 bp, Glycine max
ctgcgccaggctaaagctccaagtatgtttttacaatccttcaaaaattttgtttctttgtgtgtgtatggtgatgataacttaattagtgttcatgaatatgtcaagccttactttagtggttctaaattgaaaagctttctagctggtcataatatcaccattactgatggtattgacaaaactagtgcaactttgcaatttagaaagttagcagattgtgattttctcaagagaaactttaagcagatgtctaa

SEQ ID NO: 144042 - DNA, 216 bp, Glycine max
tgaaattttaataaaccgcgatcacaggttgccgcaccttaaaaccggaaacaaaagcaatcgttacttgatttcaagaatttctcaatttcttcctacttctttgtgtacgatttcttaagggaaagaaaatcactctctgtgctggtcacagacttcgtgaatcattttcttttccacacaacatacgattcctctaaagggggatgtgcggca

SEQ ID NO: 144043 - DNA, 261 bp, Glycine max
gtggattcttggttaccaatttttgtgaattgtctctatcctgtaagtcaattaccttcagaagctgtcgttgtaaatgttacatgtggtagtggacgtggtggtttacccaccactgcttggattagttctgcagttaacaatcgctcctcagacatcaacaaaaggattcgcacagcacttgggaaaggtaagaaaattgtttttcttactagagttgatccttttccagtagctttattggctgttctttttggcgtt

SEQ ID NO: 144044 - DNA, 165 bp, Glycine max
tgtatgtaaagatgtaaaattatgattattaggtggtgcatgtgtcgcgtcatgggccaatgttatcctctgcttttaagttggaagaggcccaactcatgtgtgatgtacggctgtgattgtgtaatttaatttgcaaaatcaaaaataacaccagagtcatat

SEQ ID NO: 144045 - DNA, 264 bp, Glycine max
ggaccacatcaagggtcttgttgtcgactttttctcggcaggaacagactccacagcggtggcaacagagtgggcattggcagaactcatcaacaatcctaaggtgttggaaaaggctcgtgaggaggtctacagtgttgtgggaaaggacagacttgtggacgaagttgacactcaaaaccttccttacattagagcaatcgtgaaggagacattccgcatgcacccgccactcccagtggtcaaaagaaagtgcacagaaga

SEQ ID NO: 144046 - DNA, 254 bp, Glycine max
ttgatgatgttgaaactcctaaaggttctatgttggatcttaaaatttctcaatctaaaattgcacttcccaagaacacagttggaggaaccattctgcgtagtgatctattggcaaattttttgacagagggcaattttagagcaagtgttgatttgcagcgcactcatcgtattaaaggaatgattaaaatggtggccacagttggtattcctgagaatacaggtatagcattggcctgtgctatgaatagt

SEQ ID NO: 144047 - DNA, 236 bp, Glycine max
cttgaccagcgttttctattccacaggctactgccagatcttctgaaagtgcggaatcctcggcatgatctggaattcgtgtgttctttcgcttgttcgtttgtttagattcaataaaggaaattaggcatgaccctcttgttgagtatgctctgcctatctgaaaatttccacacctcttttagttgtcgtaatgatgtgtgcagtgtgtgttatttgaaaaagaaacaaaaagg

SEQ ID NO: 144048 - DNA, 246 bp, Glycine max
ccacaagctggtgcagtttggagagattcaggaaaaagttgtgttgaaattttcacaagaggaatttcttacagcttggtcaactcaggtgcgtcccgcaacgactctgttggctgatgggtgcccatatttgtatgctatggtgcatgatagttcagtgtctacaataccaggtgattttgtcattggtgttaagttgacaaccataaacaatatgtgtgcatatgggctcaatcctggtatttc

SEQ ID NO: 144049 - DNA, 257 bp, Glycine max
  unsure (1)..(257): unsure at all n locations
gcttcttcactttctctcgtttcaatcgaaaaaaatcatgggcagaaaattcttcgtcggtggcaactggaaatgcaatgggaccactgaggaggtgaagaagattgtnactacnttaaatgaagctaaaagtccctggaggaagatgttgtagaagttggttgtgaagcccctccctntttggtgtgcttncctttntgtaaaaaanttgctgcgncctgattttcccngntctcggcccaaaattgtgggttcgc

SEQ ID NO: 144050 - DNA, 164 bp, Glycine max
aatgcggaatcctctgcatgatctggaattcgtgttttctttcgcttgttcgtttgtttaattcaataaaggaaattaggcatgaccctcttgttgagtatgctctgcctatctgagaatttccacacctcttttaattgtcgtaatgatgtgtgaagtgtgtg

SEQ ID NO: 144051 - DNA, 244 bp, Glycine max
attctttctaaggttgcacaagatatggttgaggaatggtttgattgtattgatgaggaggattcctttgaggaagtttctttaagtgcagcacttaatggtgttgagggtttggactatatggaaagaattcctcttgccacatctgagggttttcctcatgtgctttcacgcaaaaatggcgaaaaaggcaaaaggagatttgtctctggggatggtgaagagatgacattgattccaggaa

SEQ ID NO: 144052 - DNA, 246 bp, Glycine max
gaggcgtttccccacaagctggtgcagtttggagagattcaggaaaaagttgtgttgaaattttcacaagaggaatttctgacagcttggtcaactcaggtgcgtcccgcaacgactctgttggctgatgggtgcccatatttgtatgctatggtgcatgatagttcagtgtctacaataccaggtgattttgtcattggtgttaagttgacaaccataaacaatatgtgtgcatatgggctcaat

SEQ ID NO: 144053 - DNA, 264 bp, Glycine max
cgcgattctgctctaggtttgcaaatcatacttcatggcatttgattttccttattgacaatcccaaacagtctacagtttttgatattctcttgggaatctctcaagattttgaaattgctggtaatactcttatgccagctttttctgttccacaggctactgccagatcttctgaaaatgcggaatcctctgcatgatctggaattcgtgttttctttcgcttgttcgtttgtttaattcaataaaggaaattaggcatga

SEQ ID NO: 144054 - DNA, 246 bp, Glycine max
gttgtgagcatagctttcttcatcacttcatagtaagcactatagaaaaaacgacattcattcatctatggctacccttattgctcccagcaaccactctccccaagaagacgctgaggctctcagaaaggcttttgaaggatgggggactgatgagaaaactgtcatagtaatattgggtcatagaactgtttatcagaggcagcaaatcagaagagtctatgaggcaattttccaggaggatct

SEQ ID NO: 144055 - DNA, 248 bp, Glycine max
ctctagagtaattgcggaatctgctagaattttctaataatggcgaaagacgttgagcaggtcacagagcaaggtgaatactccgcgaaggactaccatgaccctcctccggcaccgttgatcgacccagatgagctcacaaagtggtccttgtacagagccgccatagctgagttcatagcaacactcctttttctttacatcaccgtgttgaccattattggctacaagagacagagtgacaccaa

SEQ ID NO: 144056 - DNA, 249 bp, Glycine max
ctctctctgctcaactgaataaagcagagaagaataagagaatgggtgtgttcagtacagtgctgctgtgccttatgtccctaatgtggatggtggatgctcgaattccaggcgtatactctggcggcgcttggcaaaatgctcacgctacgttctacggaggatccgatgcttccggcaccatgggtggagcatgtgggtacgggaacctgtacagccaagggtacggagtgaacactgcagcgttga

SEQ ID NO: 144057 - DNA, 253 bp, Glycine max
atctctctggcccaatacccgattttttcgcgcaactcaagaacctcgacgatatcgacctttcctgtaacaacctctccggccccataccaagctcgcttggtaaactgcctaaactcgcgtatctagatttgagccgcaacaagctcacgggctcaattccggcctcatttggatccttccaaaagcccgggccggctattatgctctctaaaaaccagctttcagggcgccttcctgcttctttggccaa

SEQ ID NO: 144058 - DNA, 255 bp, Glycine max
agtggacaaaactggagattggatcacacttatacaaaattctccaattagtaacttgttgagagttgctgcttggaagaaaggttgtttaatggtcaagattgtgatgtctgggaatgcagcagtcaaagggagtgattgggcctcattggtacaagtgtttttaacaaacagcaacagtacagagcattttgatgcatgtaagtggacaaaatcagaaccacattcctgggaattaatcttcccaatagaggt

SEQ ID NO: 144059 - DNA, 251 bp, Glycine max
ctcttgggaatctctcaagattttgaaattgctggtaatactcttatgccagctttttctgttccacaggctactgccagatcttctgaaaatgcggaatcctctgcatgatctggaattcgtgttttctttcgcttgttcgtttgtttaattcaataaaggaaattaggcatgaccctcttgttgagtatgctctgcctatctgaaaatttccacacctcttttaattgtcgtaatgatgtgtgaagtgt

SEQ ID NO: 144060 - DNA, 245 bp, Glycine max
agataagggataagactcccaattcttatatgcttcagcaatttgaaaatcctgccaacccaaaggtccattatgaaaccactggaccagagatctggaagggctctagtgggaaggttgatgctcttgtctctgggattgggactggaggtacagtaacaggtgctggaaaatatctgaaagagcagaatcctgatataaagctatatggcattgaaccagtagaaagtccaatactgtctggg

SEQ ID NO: 144061 - DNA, 247 bp, Glycine max
agttgacaaccataaacaatatgtgtgcatatgggctcaatcctggtatttcaggttctcgtcttttgggcaccattcctcagtccatttcacagcaaactgtttggcatcaaatggcaacagtgagaacaccattgaattttgattctagcaagcagagcttttgtcaattttctattgaccttctcggtggaggaatttgagtggacaaaactggagattggatcacacttagacaaaattctcc

SEQ ID NO: 144062 - DNA, 124 bp, Glycine max
attaaacaaacgaacaagcgaaagacaattaggcatgaccctcttgttgagtatgctctgcctatctgaaaatttccacacctcttttaattgtcgtaatgatgtgtgaagtgtgtgttatttt

SEQ ID NO: 144063 - DNA, 248 bp, Glycine max
tgtcattcatgttaagttgacaaccataaacaatatgtgtgcatatgggctcaatcctggtatttcaggttctcgtcttttgggcaccattcctcagtccatttcacatcgaactgtttgcaatcaaatggcaacagtgataacaccattgaattttgattctagcaagcagagcttgtgtcaattttctattgaccttctcggtggaggaattttagtggacaaaactggagattggatcacactta

SEQ ID NO: 144064 - DNA, 242 bp, Glycine max
caaattagttcattctctttgcgcagttccctacctctcctttcaagatgcagatcttcgtcaagaccctcaccggaaagaccatcacccttgaggtggaaagctctgacaccatcgacaacgtcaaggccaagatccaggacaaggaaggaattcccccggatcagcaacgtctcatcttcgccggaaagcagctcgaggacggccgtaccctcgccgactacaacatccagaaggagtca

SEQ ID NO: 144065 - DNA, 242 bp, Glycine max
gtgaattgaaatctggtgtctatgttccactgcctacaagaactaatttgatggaaactcccaaggaatggcaactggatctaccttgtgacaaaattcctagtgtcttgactacaactgatgagagattggtaggcacagaacatgagggatatgatccttttcttggtggaattcaaaaatatgccactcccatgatgcccctagatgaagaaattctttctaaggttgcacaagatatg

SEQ ID NO: 144066 - DNA, 124 bp, Glycine max
cttgatttcaagaatttctcaatttcttcctacttctttgtgtacgatttcttaagggaaagaaaatcactctctgtgctggtcacagacttcgtgaatcattttcttttccacacaacatacg

SEQ ID NO: 144067 - DNA, 180 bp, Glycine max
taataaaccgcgatcacaggttgccgcaccttaaaaccggaaactaaagcaatcgttacttgatttcaagaatttctcaatttcttcctacttctttgtgtacgatttcttaagggaaagaaaatcactctctgtgctggtcacagacttcgtgaatcattttcttttccacacaacata

SEQ ID NO: 144068 - DNA, 242 bp, Glycine max
acagcaaactgtttggaatcaaatggcaacagtgagaacaccattgaattttgattctagcaagcagagcttttgtcaattttctattgaccttctcggtggaggaattttagtggacaaaactggagattggatcacacttatacaaaattctccaattagtaacttattgagagttgctgcttggaagaaaggttgtttaatggtcaagattgtgatgtctgggaatgcagcagtcaaaa

SEQ ID NO: 144069 - DNA, 240 bp, Glycine max
atggttttgaaatgtggagttctgagtgggcaaatcaaacttcatggcatttgagtttccttattgacaatcccaaacagtctacagtttttgatattctcttgggaatctctcaagattttgaaattgctggtaatactcttatgccagctttttctgttccacaggctactgccagatcttctgaaaatgcggaatcctctgcatgatctggaattcgtgttttctttcgcttgttcg

SEQ ID NO: 144070 - DNA, 240 bp, Glycine max
ggaatttttgaagcgtaccggatttcattgtgttatcatctgtgtcactgggtggactgccaccccaatgcaggatgttcaggttacaattgattggtttatttcctctcaggaatgtgttcccagaacctattgtgttttaaatccacaaaatccttttgtgttaaataggtggatgggaaaactgactttcccccagggcacttcccgaagtgttaagagaatgcctctttctatagg

SEQ ID NO: 144071 - DNA, 238 bp, Glycine max
tttgtagattgagtaacaagatggggttggaggctgcagtagaggcagcggcagaattccttaacaaggcagtgataccagtgctggtgggtggtcctaaactgagggtggcaacggcatctgatgcctttgttgaactggctgatgcgtgtggttatgcgcttgctgtgatgccatcggctaaagggcaggttccagagcaccatccccatttcatcggaacttattggggtgctgt

SEQ ID NO: 144072 - DNA, 248 bp, Glycine max
caagaacgtgaactggcgccatggcccgaaccgcccatacgtcgtcgtttgggtcgacccaagcaacaagctctcgacgcgcgtggacgaaagcggcgacactgacgcgaattgggaccaaatgctcacaattccgttgccaccaaagcctctcgaggatcaaacgttgtacatcgacgtggtccacgccggctcggaggaggacaccaagccgcttatcggctcggctcggctcaagctggtggaca

SEQ ID NO: 144073 - DNA, 242 bp, Glycine max
attgatacacatgatcgttatgccaacaggaacacagttttcttggatattaacatgaagggtctagatggtattcaaggtcctgtatatgtggggactggatgtgttttcaggaggcaagctttgtatggctataatcctcccaagggtccaaagcgtccaaaaatggtaagctgtgattgttgcccgtgttttggaagccgcaagaagtataaggagaagaatgatgcaaatggagaggc

SEQ ID NO: 144074 - DNA, 203 bp, Glycine max
  unsure (1)..(203): unsure at all n locations
tttcaatgaactcattgaatttttagtttatttttcgactatatattttggagaattttgagagttactataatttgatnttgtacatagtacttggaagttttgttggaccgtaccggacccagttctctggttgaggttgtactttcacaacagtggcagatttgcaattcaattcaatttatttgtttattttaattagt

SEQ ID NO: 144075 - DNA, 234 bp, Glycine max
gttggaggaaccattctgcgtagtgatctattggcaaattttttgacagagggcaattttagagcaagtgttgatttgcagcgcactcatcgtattaaaggaatgattaaaatggtggccacagttggtattcctgagaatacaggtatagcattggcctgtgctatgaatagttcttttagggggcgcgccagttctgatatttacaccatctgctctcaagactgtgaatta

SEQ ID NO: 144076 - DNA, 240 bp, Glycine max
gagagagcgagcagtttcagacacagagagaggggtttgggattggagggattgacgctgcgtctcttcctcttctctttcgatccatccctcattcctaatcctccaatccaaccacctcagcctcacactcacatatacacatatctgaacgcgtatcgtccctcctatggcttcaaagcgcatcctcaaggagctcaaggacttgcagaaagacccaccaacttcttgcagcgctgg

SEQ ID NO: 144077 - DNA, 239 bp, Glycine max
accagattgagacaaagaatagatcctcaatacaatgaggttcaggctcagatggaaacaaatttgtttaaattgtctcttgatgatgttgaaactcctaaaggttctatgttggatcttaaaatttctcaatctaaaattgcacttcccaagaacacagttggaggaaccattctgcgtagtgatctattggcaaattttttgacagagggcaattttagagcaagtgttgatttgca

SEQ ID NO: 144078 - DNA, 240 bp, Glycine max
ctcgagccgctggtgatggaaccaaaactcaggcacttgctgtttgccactcagatacttctggaatgaatcatcacatgcttcatgaactcatgggagttgatcctggaactaaccctgtttgccatttccttggaagcaaggccattttatgggtacccaatttatctatggacactgcctatcagactaacgttgttgtttaattagtccatgcatctgcatcttgggcaccataag

SEQ ID NO: 144079 - DNA, 242 bp, Glycine max
cttcattttggctcaaccatggttccgaaggaacaggctgaaactgccccaaaaccctcaagaagctcaccggtttcaatgccttttggtactcccaccacctttttgtcatcgtctatgtgcttttcatcattcacggttacttcctatacctcagcaagacatggtacaagaaaacgacatggatgtatctcgccgttcccatgatactatacggatgcgaaaggctactccgtgcgttt

SEQ ID NO: 144080 - DNA, 241 bp, Glycine max; identical to SEQ ID NO: 143560

SEQ ID NO: 144081 - DNA, 240 bp, Glycine max
tgctattctcatgaatatgccaaatgctgttctttcaatgtggagatattttgttggagatctcgtctttgaagtttctaagatgacttctccctacattaaatgtacagtctctttcttcatagcatttggacatttggctgatgacaccatcaattttgaggcttttccccacaagctggtgcagtttggagagattcaggaaaaagttgtattgaaattttcacaagaggaatttct

SEQ ID NO: 144082 - DNA, 167 bp, Glycine max
gcgatcacaggttgccgcaccttaaaaccggaaacaaaagcaatcgttacttgatttcaagaatttctcaatttcttcctacttctttgtgtacgatttcttaagggaaagaaaatcactctctgtgctggtcacagacttcgtgaatcattttcttttccacacaa

SEQ ID NO: 144083 - DNA, 237 bp, Glycine max
attctactaaggttaataagtttgcaaaaattatgaaccttagacaaagtgttgttggtgatcttaaacttcttactgatgggaagttgtatgagggtaagcatatccctgtatctaatattagtgcaggggaaaatcatgtagttcaaatacccttaatggcacaggaggaaattctgtcttctagtgcaagtgatttcagaactgcaatggtgagtaaaaatagcaaacctcaag

SEQ ID NO: 144084 - DNA, 238 bp, Glycine max
cttcactggtaacccggggaaaacctatatgttcagaatctcaaatgtaggcttttcaacctcaattaacttcagaattcagggtcacaccctaaaattagttgaggttgaaggatcacacactgttcagaacctttacgattcacttgatgtccatgttggccaatcggttgctgtgttagtaaccttaaaccagcctccaaaggactactatattgttgcctcaacaagatttaca

SEQ ID NO: 144085 - DNA, 208 bp, Glycine max
gaacggggaaacgggtcgggtcttgcccaaatgcaatcacagtttccatactgagtgcatcgatgtgtggtttcagtctcatgccacgtgtccgctttgcagggaaaccgtggaggctatgcccgagcgagaaacccgatccgaggtggctgttattgtgtgcgagaccgaaccggttcgagaagaggtgaaccggtctggaccggtg

SEQ ID NO: 144086 - DNA, 238 bp, Glycine max
atggaatggactggtttggccaatagattactgagtaagggcaatgatattctgtgttgcgattatgctagttttgatggtttgattaccaagcaagttatgagcaagatggcagaaatgataaacagtctttgtggtggtgatgaaaaattgatgcgtgaaaggacgcacctgctgttggcttgttgttcaaggatggcaatttgtaagacagatgtttggagagttgaatgtggaa

SEQ ID NO: 144087 - DNA, 242 bp, Glycine max
gtttcctctacaaaagcacaatttgttagtggaaaaaccttcaaatatgatataattggtgctggttcacattcttcaggagattttcctgaaaaggaagatcaagaaaaacccaaaaagattgataccagattgagacaaagaatagatcctcaatacaatgaggttcaggctcagatggaaacaaatttgtctaaattgtctcttgatgatgttgaaactcctaaaggttctatgttgga

SEQ ID NO: 144088 - DNA, 238 bp, Glycine max
caggtgcgtcccgcaacgactctgttggctgatgggtgcccatatttgtatgctatggtgcatgatagttcagtgtctacaataccaggtgattttgtcattggtgttaagttgacaaccataaacaatatgtgtgcatatgggctcaatcctggtatttcaggttctcgtcttttgggcaccattcctcagtccatttcacagcaaactgtttggaatcaaatggcaacagtgagaa

SEQ ID NO: 144089 - DNA, 236 bp, Glycine max
gttgttcctaaggacgtgaatgctgctgttgccaccatcaagactaagaggactgttcagtttgttgattggtgtccaactggattcaagtgtggtatcaactaccagcctccttctgttgttcctggtggtgaccttgccaaggtgcagcgggctgtatgcatgatcagcaacaacactgcagttgctgaggtgttctctcgcattgaccacaaatttgatctgatgtatgccaa

SEQ ID NO: 144090 - DNA, 236 bp, Glycine max
agaatgcctctttctatagggggaggagctggtgctaagaatgctattctcatgaatatgccaaatgctgttctttcaatgtggagatattttgttggagatctcgtctttgaagtttctaagatgacttctccctacattaaatgtacagtctctttcttcatagcatttggaaattcggctgatgacaccagcttgtggggaaaagcctcaaaattgatggtgtcatcagccaa

SEQ ID NO: 144091 - DNA, 235 bp, Glycine max
tatcggtcatgggtgcttttgcttttgatgaggaaaactcctccaccgtggctccggcaacactctacaaagctctgacaaaagatgctgacactatcatcccaaagattattggggccatccaaactattgaaatcgttgaaggaaatggaggacccggaaccgtcaagaagataacagctagtgaaggtgaccaaaccagtttcgtgctgcaaaaagtggatgcaattgacga

SEQ ID NO: 144092 - DNA, 233 bp, Glycine max
gcttcagaccctcgaatctgataaagatgtattgcataagcagcttgaaggagtgaagaaggaactcgagaaaacaaccgataacgtatcttctaatcacgcgtgtaataataacaataacaacaagttgtcgtcgaatcagccggcgttaattgacttggttgagatggacgtgaagatcattgggtgggacgcgatgataacgatcacatgcagcaagaagaaccaccccg

SEQ ID NO: 144093 - DNA, 233 bp, Glycine max
gcatgagccttatgtgttgcaaagctcaaggcgtagtatactgccttggaggaagaggaagttgagtttcagatctcctaaatctaagggggagccattgttgaagaaggcttatggcgaagaaggcggtgatgacattgattatgatcgcagacagcttagctctgatgaatccctttcactcgggaacactgaggatgattcaggtgcaaatcgatcatcggtgtccgaat

SEQ ID NO: 144094 - DNA, 236 bp, Glycine max
cggtcctattcaagaaggagaaggcgatgcttgtgcagcctgatcgggtggtgatcgcaaatggacctgcatttggttgtgtgctgatgaaggatttccttaaggcacttgcaaagcgcctcaagcacaacaatactgcatatgaaaattaccacaggatatttgtccctgaaggacatcctttgaaggctacacccagagagcctttgagggttaatgttcttttccaacatata

SEQ ID NO: 144095 - DNA, 241 bp, Glycine max
ctcgagcgcaagccttactttagtggttctaaattgaaaagctttctagctggtcatactatcaccattactgatggtattgacaaaactagtgcaactttgcaatttagaaagttagcagattgtgattttctcaagagaaactttaagcagatgtctaatgttttgtgggtggctcctgaagacaaggcgagtttatggtcacaacttcattatgtttcgtgtaataatctggaaatgc

SEQ ID NO: 144096 - DNA, 236 bp, Glycine max
cacgcgctgaaagcgtccacagggctcccctgacttcatcctcatcgattgccccgccggcatcgacgccggcaccatcaccgccatcactcccgccaacgaggccgtcctcatcaccacccccgacatcaccagcctccgcgacgccgaccgcgtcaccggcctcctcgaatgcgacggaatccgggacatcaagatgatcgtcaaccgggttcgaaccgatatgataaaaggag

SEQ ID NO: 144097 - DNA, 162 bp, Glycine max
gcgcactcatcgtattaaaggaatgactaaaatggtggccacagttggtattcctgagaatacaggtatagcattggcctgtgctatgaatagttcttttagggggcgcgccagttctgatatttacaccatctgctctcaagactgtgaattatggaatcc

SEQ ID NO: 144098 - DNA, 232 bp, Glycine max
ccaaacccgtgttctgatgcatggagtttggaatttctgaagcgtaccggatttcattgtgatatcatttgtgtcactggatggactgccaccccaatgcaggatgttcaggttacaattgattggtttatttcctctcaggaatgtgttcccaggacctattgtgttttaaatccacaacttccttttgtgttaaataggtggatgggaaaactgactttccctcagggca

SEQ ID NO: 144099 - DNA, 234 bp, Glycine max; identical to SEQ ID NO: 144075

SEQ ID NO: 144100 - DNA, 235 bp, Glycine max
ctcgagcctcaactttgcaatttagaaagttagcagattgtgattttctcaagagaaacgttaagcagatgtctaatgttttatgggtggctcctgaggacaaggcgagtttatggtcacaacttcattatgtttcgtgcaataatctggaaatgcaagaagcttatcttgtcaatctcgtaaatgtgttacgagaattgtatttgcacagtccagatgaagctcgccaattgag

SEQ ID NO: 144101 - DNA, 238 bp, Glycine max
taaatccctggttgatgttggtggaggaactggagctgtagtcaacatgattgtctcaaagtatcccactattaagggcattaattttgatttgccccatgtcattgaagatgccccatcttatccaggagtggaacatgttggtggagatatgtttgtcagtgttccaaaagctgatgctatttttatgaagtggatttgccacgattggagtgatgagcactgcttgaagtttttg

SEQ ID NO: 144102 - DNA, 235 bp, Glycine max
ttcttcctcttcctcagtagtgcgattttcgattctcttctctgcaactatgcctaaccctaaggtcttcttcgacatgaccatcggcggtcaacctgccggccgcatcgtgatggagctctacgccgacgtgactccgagcaccgccgagaacttccgcgcgctctgcaccggcgagaagggcgccgggcggagcggcaagcccctccactacaaaggctcgtccttccaccgc

SEQ ID NO: 144103 - DNA, 233 bp, Glycine max
aagctttctatgcttagaaatgctacctggacactttcaaacttctgcaggggcaagccacagcctccttttgatcaggttaaacctgcacttcctgctcttgcccgtcttatccattcaaacgatgaagtagtattgactgatgcatgttgggcactgtcatatctttctgatggcacaaatgataaaattcaagctgtaattgaagctggtgtttgtccccgacttgttga

SEQ ID NO: 144104 - DNA, 190 bp, Glycine max
gaaattttaataaaccgcgatcacaggttgccgcaccttaaaaccggaaacaaaagcaatcgttacttgatttcaagaatttctcaatttcttcctacttctttgtgtacgatttcttaagggaaagaaaatcactctctgtgctggtcacagacttcgtgaatcattttcttttccacacaacatacga

SEQ ID NO: 144105 - DNA, 229 bp, Glycine max
cagtctacagtttttgatattctcttgggaatctctcaagattttgaaattgctggtaatactcttatgccagctttttctgttccacaggctactgccagatcttctgaaaatgcggaatcctctgcatgatctggaattcgtgttttctttcgcttgttcgtttgtttaattcaataaaggaaattaggcatgaccctcttgttgagtatgctctgcctatctgaaa

SEQ ID NO: 144106 - DNA, 232 bp, Glycine max
gaacaacaaccacactctctacaaaattgatggtcccaccgacgagcgggtgccggaatcggaggccatgaacggcggtgccaccaccgccaccttccgatccatcctcgacaagcccctcaaccagctcaccgaggatgacatttctcagctcactcgcgaagactgtcgcagattcctcaaagcaaaagggatgcgcaggccttcctggaacaaatcgcaggcgatccaa

SEQ ID NO: 144107 - DNA, 230 bp, Glycine max
ctattgtgttttacatccacaaaagccttttgtgttacataggtggatgggaaaactgactttccctcagggcacttcccgaagagttaagagaatgcctctttctatagggggaggagctggtgcaaagaatgctattctcatgaatatgccaaatgctgttctttcaatgtggagatattttgttggagatctcgtctttgaagtttctaagatgacttctccctaca

SEQ ID NO: 144108 - DNA, 191 bp, Glycine max
gcgatcacaggttgccgcaccttaaaaccggaaacaaaagcaatcgttacttgatttcaagaatttctcaatttcttcctacttctttgtgtacgatttcttaagggaaagaaaatcactctctgtgctggtcacagacttcgtgaatcattttcttttccacacaacatacgagaccgcgaaagggggat

SEQ ID NO: 144109 - DNA, 229 bp, Glycine max
ggagttctgagtgggcaaatcaaacttcatggcatttgagtttccttattgacaatcccaaacagtctacagtttttgatattctcttgggaatctctcaagattttgaaattgctggtaatactcttatgccagctttttctgttccacaggctactgccagatcttctgaaaatgcggaatcctctgcatgatctggaattcgtgttttctttcgcttgttcgtttg

SEQ ID NO: 144110 - DNA, 139 bp, Glycine max
tttctattgaccttctcggtggaggaattttagtggacaaaactggagattggatcacacttatacaaaattctccaattagtaacttgttgagagttgctgcttggaagaaaggttgtttaatggtcaagattgtgat

SEQ ID NO: 144111 - DNA, 232 bp, Glycine max
ctgctcgagcggctcgagcccaaacagtctacagtttttgatattctcttgggaatctctcaagattttgaacattgctggtaatactcttatgccagctttttctgttccacaggctactgccagatcttctgaaaatgcggaatcctctgcatgatctggaattcgtgttttctttcgcttgttcgtttgtttaattcaataaaggaaattaggcatgaccctcttgttg

SEQ ID NO: 144112 - DNA, 231 bp, Glycine max
ggcagcgatggaagaagacttcgacatccccggcggcgaggaaatggatctcggcgaagacgaggtcggcgaggagagggagatcggctctggcggcctcaagaagaagctcctcaaggaaggtcaaggctgggaaacccccgaagtcggtgacgaagtccaagttcattacacggggactttgctcgacgggactaagttcgattcgagccgcgacagggattctccctt

SEQ ID NO: 144113 - DNA, 221 bp, Glycine max
gagtaaacccgtaaggcgcagggaagctgattggtgggatccccctgtgggtcgcaccgccgaccgaccctgatcttctgtgaatgccacgagtgagagcatacctgtcgggacccgaaagatggtgaactatgcctgagcggggcgaaccataaggaaactctggtggaggcccgcagcgatactgacgtgcaaatcgttcgtctgacttgggtataggg

SEQ ID NO: 144114 - DNA, 231 bp, Glycine max
atacaaggccactttggcttcagttgatttccagaccaaggcggttgaagtgacaaatgaagttaattcatgggctgaaaaggagacaaatggccttgttaaagaccttcttcctcctggatcagttgacaattcaaccagacttatctttgcaaatgcactgtacttcaaaggagcatggaatgagaagtttgatgcttcaataacaaaagactacgattttcaccttct

SEQ ID NO: 144115 - DNA, 228 bp, Glycine max
ctcgagccgttcagctgccaccccagaaaactcatcaatatcaattggagatgatgattttgagcagagttcccaaaagtgtaaatcaggaggggatgaatatgatgaagatgaacctgatgccaaaagatggaaaattgaaggtgaaaatgagggtatgtcagcccctggaagtagaacagtgagagaacctagagttgtagttcagacaaccagtgacattgatat

SEQ ID NO: 144116 - DNA, 227 bp, Glycine max
atatgatccggaagaatgctgtggaaagtatattagcagaacgtgatatcttaattacagtacgcaacccttttgtggttcgattcttctattcttttacatgtcgtgagaacttatatcttgtcatggaatatcttaatggaggtgacctgtattcactattaaggaatttaggttgcctagatgaggaagtcgcccgtgtatatattgctgaagtggtgcttgcg

SEQ ID NO: 144117 - DNA, 210 bp, Glycine max
ggagttctgagtgggcaaatcaaacttcatggcatttgagtttccttattgacaatcccaaacagtctacagtttttgatattctcttgggaatctctcaagattttgaaattgctggtaatactcttatgccagctttttctgttccacaggctactgccagatcttctgaaaatgcggaatcctctgcatgatctggaattcgtgttt

SEQ ID NO: 144118 - DNA, 207 bp, Glycine max
aatgtacagtctctttcttcatagcatttaatctaggataaagtcatcttagaaacttcaaagacgagatctccaacaaaatatctccacattgaagtttctaagatgacttctccctacataaaatgtacagtctctttcttcatagcatttggaaatttggctgatgacaccatcaattttgaggcttttccccacaagctggtg

SEQ ID NO: 144119 - DNA, 220 bp, Glycine max
attttaataaaccgcgatcacaggttgccgcaccttaaaaccggaaacaaaagcaatcgttacttgatttcaagaatttctcaatttcttcctacttctttgtgtacgatttcttaagggaaagaaaatcactctctgtgctggtcacagacttcgtgaatcattttcttttccacacaacatacgagtctgcgaaagggggatgtgctgtaccgcgata

SEQ ID NO: 144120 - DNA, 231 bp, Glycine max
actgactttccctcagggcacttcccgaagtgttaagagaatgcctctttctatagggggaggagctggtgcaaagaatgctattctcatgaatatgccaaatgctgttctttcaatgtggagatattttgttggagatctcgtctttgaagtttctaagatgacttctccctacattaaatgtacagtctctttcttcatagcatttggaaatttggctgatgacaccat

SEQ ID NO: 144121 - DNA, 233 bp, Glycine max
gtgaaagcaagcaacaaggggtatctaatatggggttgggcaccacaacttctcatactagagcatcatgccattggagctgtggtgacacactgtggatggaacacaataatcgaaagtgttaatgctggtttgccaatggctacttggcctctgtttgctgagcagttttacattgagaagttgctggctgaggtgctgagaattggggtgccagtgggggcaaaggaatg

SEQ ID NO: 144122 - DNA, 236 bp, Glycine max
gtgaaagcaagcaacaaggggtatctaatatggggttgggcaccacaacttctcatactagagcatcatgccattggagctgtggtgacacactgtggatggcacacaataatcgaaagtgttaatgctggtttgccaatggctacttggcctctgtttgctgagcagttttacaatgagaagttgctggctgaggtgctgagaattggggtgccagtcggggcaaaggaatggac

SEQ ID NO: 144123 - DNA, 277 bp, Glycine max
ttttactgttgtcttgggcccttgcaattataaatttataattgttatagatttgtcatatatatgtaacatactttccctttgatgaacagaccactgtaattgatccagcagatgttggagccttggaatctgcattggagcagcacaatgtgtctctattcttcactgagtctcctaccaatccattcctgagatgtgttgatattaagctggtttcagagctttgccacaagaaggggactttgctctgtattgatggtacatttgcaactcc

SEQ ID NO: 144124 - DNA, 280 bp, Glycine max
tttttcccgcagtcatgggcaaggtcaagatcggaatcaacggatttggaagaattggccgtttggtggccagggtggctctgcagagagacgatgttgaactcgttgccgttaacgatcctttcattaccaccgattacatgacatacatgtttaaatacgacagtgttcacgggcactggaagcatcacgatgtcaccgttaaggatgagaagacccttctcttcggtgacaagccagtcactgtttttggacacaggaaccctgaagagatcccatg

SEQ ID NO: 144125 - DNA, 276 bp, Glycine max
ggggaatgatttcttgaagaagaggttggagcctggttcacactcccaggttagtcctcaggcactggagagcatcaaaagggttaagaagttgaccaagatgtctgagaaggttgccactggtgtcctctctggggttgtcaaggtgtctggattcttcacaagttctgtagtcaactccaaagctggaaagaagttctttagccttcttccaggggaaattgtccttgctaccatggatggattcaataaggttttggatgctgcagaagtagc

SEQ ID NO: 144126 - DNA, 277 bp, Glycine max
gaaggcttttgatgcttacgccagtgcagcaaagcagattgatgagctggttgctttttacaattggtgtaaggatactggtgtggcgaggtcctcagagtatcctgaggttcagaagattaccagcaagttgcttgagacgttggaggaatttgtgagggatagggccaagaggccaaagagtcccgagagaaaagaggaggctccaccagtggagaaggtagaggaggagccagcaccagatatgaatgacatcaaggcactgcctccgccggag

SEQ ID NO: 144127 - DNA, 273 bp, Glycine max
cggatatggcaacgtcattatcacatacttgcaaaaaggatgttaacaaaggagtatgtggttgaagacgctgatggagagctgactggatcggattggtctcccccggctctcccacccgaacatgttcagcagttgaaaacattgggcctactatgagtccatgagtttggaagagtcatcagtcatctacttgatgacgtgaatgccactaaaatgtagatatacattggccctccccatgttttggtaagctggtccttttcatgaaga

SEQ ID NO: 144128 - DNA, 210 bp, Glycine max
attttaataaaccgcgatcacaggttgccgcaccttaaaaccggaaacaaaagcaatcgttacttgatttcaagaatttctcaatttcttcctacttctttgtgtacgatttcttaagggaaagaaaatcactctctgtgctggtcacagacttcgtgaatcattttcttttccacacaacatacaaatccaaaaaacggggatgtgctg

SEQ ID NO: 144129 - DNA, 283 bp, Glycine max
cttgtggagttccatttgaattccgcagtgctgcaatatctggctgtgaggttgtacgaggaaatattgaagttctacccggagaagctctggctgtaagttttccctatgttttgcaccacatgcctgatgagagtgtgagcactgagaatcacagagatagattgctgaggttggttaagaggttgtctcccaaggttgttaccattgttgagcaagaatccaacaccaacacgtccccattctttcacaggtttgttgagaccctggattattatactgc

SEQ ID NO: 144130 - DNA, 281 bp, Glycine max
aaaattgcacttcccaagaacacagttggcggaaccattctgcgtagtgatctattggcaaattttttgacagagggcaattttagagcaagtgttgatttgcagcgcactcatcgtattaaaggaatgattaaaatggtggccacagttggtattcctgagaatacaggtatagcattggcctgtgttatgaatagttcttttagggggcgcgccagttctgatatttacaccatctgctctcaagactgtgaattatggaatcctgcttgcacaaaagc

SEQ ID NO: 144131 - DNA, 279 bp, Glycine max
gcaaactgtttggaatcaaatggcaacagtgagaacaccattgaattttgattctagcaagcagagcttttgtcaattttctattgaccttctcggtggaggaattttagtggacaaaactggagattggatcacacttatacaaaattctccaattagtaacttgttgagagttgctgcttggaagaaaggttgtttaatggtcaagattgtgatgtctgggaatgcagcagtcaaaaggagtgattgggcctcattggtacagtgtttttaacaaac

SEQ ID NO: 144132 - DNA, 278 bp, Glycine max
ctctttggcacgtcaagtttttgatggcgttgccaagaaggatgctgtcttgtgaaactgtttaatagggaattatgcaagaactggaatggttggagaagcactggcttcattcgagcaaatgagtgttcgaggaatgaaacctaattcttctaccttgtcagggctgctctctgcttgccctgcgtctggatcagtacaagtagttcgtcatgtcgctagttttgttgaagagcagaaagtaaaactggatgcggttcttggaacggctcttgttg

SEQ ID NO: 144133 - DNA, 273 bp, Glycine max
atcctgaaaaggagaatttatgtctgtatggattccccactgaacaatgggaagtaaatttgcctgctgaagaagttcccccagaacttcccgagccagcactgggcataaattttgctagggatgggatgcaagaaaaggactggctatctttagttgctgtacacagtgatgcatggctacaatcagtggctttctactttggggcaagattcggttttgataaagctgacagaaagcgcctgttcactatgattaatgatttgcctacaa

SEQ ID NO: 144134 - DNA, 221 bp, Glycine max
aatagattactgagtaagaggcaatgaatattctgtgttgcgattatgctagttttgatggtttgattaccaagcaagttatgagcaagatggcagaaatgataaacagtctttgtggtggtgatgaaaaattgatgcgtgaaaggacgcacctgctgttggcttgttgttcaaggatggcaatttgtaagaaagatgtttggagagttgaatgtggaatc

SEQ ID NO: 144135 - DNA, 205 bp, Glycine max
ggaattccgctcgagtgaaattttaataaaccgcgatcacaggttgccgcaccttcaaaccggacacacaagcaatcgttacttgatttcaagaatttctcaatttcttcctacttcttcgtgtacgatttcttaagggaaagaaaatcactctctgtgctggtcacagacttcgtgaatcattttcttttccacacaacatacg

SEQ ID NO: 144136 - DNA, 278 bp, Glycine max
ctcaatctagatttgtgtgcggtgcgtctccggtgaagagaagaagatggcgaccgtaccaggacagctcatatgggaggtcgtaaagaagaacaactctttcttggtgaaagagttcggaaggtgcactcagagcgtgcagttcagcagagagcccaacaatctctacaacctcaacactttcaagtactccggtttggcgaacaagaaaactgtcactgttcaacctgcgggtaaagaccagtctgtgttgctggcaaagtcaagacaaagaagca

SEQ ID NO: 144137 - DNA, 266 bp, Glycine max
atattctcttgggaatctctcaagattttgaaattgctggtaatactcttatgccagctttttctgttccacaggctactgccagatcttctgaaaatgcggaatcctctgcatgatctggaattcgtgttttctttcgcttgttcgtttgtttaattcaataaaggaaattaggcatgaccctcttgttgagtatgctctgcctatctgaaaatttccacacctcttttaattgtcgtaatgatgtgtgaagtgtgtgttatttt

SEQ ID NO: 144138 - DNA, 282 bp, Glycine max
aatcttttgcaacaagacagagggttaattgtagagtattttggaaggatgtcttacgttgctcataacgttaatcagcaccaagagaaagatttgttggagggaaatttttcctttgatattaaatctcgctctagattggaaaacgtttcctctacaaaagctcaatttgttagtggaaaaaccttcaaatatgatataattggtgctggttcacattcttcagaagattttcctgaaaaggaagatcaagaaaaacccacaaagattgatgccagattg

SEQ ID NO: 144139 - DNA, 277 bp, Glycine max
catttctgctcctattaagatcaatgaaaagaattcaagaggagcaaagggacacaaggttgtttctgatttagtcaagcctattgacgtggttcctggatctgagcctgaaattcaggctcctccttttactgttagtaatggatctgaaaatctggtggaaagtagcatcaaggagggcttactcgtagaggttttcaaagatgaggaagggttcaaagctgcctggttctcagccaatattttgactttgaaggataataaagcttatgtaggc

SEQ ID NO: 144140 - DNA, 279 bp, Glycine max
gcaattttagagcaagtgttgatttgcagcgcactcatcgtattaaaggaatgattaaaatggtggccacagttggtattcctgagaatacaggtatagcattggcctgtgctatgaatagttcttttagggggcgcgccagttctgatatttacaccatctgctctcaagactgtgaattatggaatcctgcttgcacaaaagcaatgactatgtcatttaatccaaacccgtgttctgatgcatggagtttggaatttctgaagcgtaccggatttc

SEQ ID NO: 144141 - DNA, 164 bp, Glycine max
tagaaaacacgaattccagatcatgcagaggattccgcattttcgtttgtttaattcaataaaggaaattaggcatgaccctcttgttgagtatgctctgcctatctgaaaatttccacacctcttttaattgtcgtaatgatgtgtgaagtgtgtgttatttt

SEQ ID NO: 144142 - DNA, 270 bp, Glycine max
ggcttacaacaagctaatagttgaacttgagaaaagtgttcctacattggttggcattgaatgtcccaaggatgagaaacttcctcgtcgcaaaatttttgacaaacctaagacgcgctgcttcactattctccctatggagtttaatcttgtggtccgtcaaaagtttttaaattttgtgaggttcattatgaagaaaagggacaagcttagttgtcaagttggaatcaacccatactccatggaatggactggtttggccaatagatt

SEQ ID NO: 144143 - DNA, 275 bp, Glycine max
ctgtgtgttactggaagttcaacacttttgatgcccacaagtttcctatattatctaaccagttgttcacggccagtggacataaatatgacaccaccaagatcttaaccccagagtatgaccttaatgttgatgcatacaacaaatacagcaagttatacctcagccctctgtttgcattatctattggatcaggttttgcaagatttacggcaaccctcactcatgtagcactgttttatggacgagacatttggagacagagtagatcggca

SEQ ID NO: 144144 - DNA, 277 bp, Glycine max
tctcttgtcacataaaagtcatctaagaagaattacaagatcatcatcacaataacaagatgagttcaggaattagagcatggagtgtggcagcaagtgttggaattgtggaggccttgaaagaccaaggcatatgcaggtggaatcatgccttaagatcagctcaacaccatctcaaaaaccatgttggctcattctctcaggctaacaagctttcttcttctgctatgatatccacaacactaaaacatgagaaggcaaatcaatcagaagagtc

SEQ ID NO: 144145 - DNA, 280 bp, Glycine max
ctttcttctaaaccctatggccgacgaagccatagccaaaggcaacgcagccttctcctccggggactatcctgccgccatccaccacttctccgatgccatcgccctggctccctccaaccatgtcctctattccaaccgatccgccgcatacgcctccctcaaaaactacgcagatgcattagcggatgcgaaaaagacagttgaactcaagcccgactggtccaagggttacagccgtctcggtgccgcgcatcttggcctttcccaatacgatgat

SEQ ID NO: 144146 - DNA, 276 bp, Glycine max
cgatcaaacacaaaatggaaaagaatgtggggattctcgccattgacatctacttccctcccgcttgcgttcagcaggaagcattggagactcatgatggtgccagtaaagggaagtataccattggacttggccaagactgcatgtcattctgtaccgaagtagaagatgtcatctcaatgagtttgacagtggttacttctcttcttgagaagtatgggattgatcctaaacaaatcggtcgtctggacattggaagcgagaccgtgatagaca

SEQ ID NO: 144147 - DNA, 271 bp, Glycine max
gcaagtgttgatttgcagcgcactcatcgtattaaaggaatgattaaaatggtggccacagttggtattcctgagaatacaggtatagcattggcctgtgctatgaatagttcttttagggggcgcgccagttctgatatttacaccatctgctctcaagactgtgaattatggaatcctgcttgcacaaaagcaatgactatgtcatttaatccaaacccgtgttctgatgcatggagtttggaatttctgaagcgtaccggatttcatt

SEQ ID NO: 144148 - DNA, 270 bp, Glycine max
cgtgcatgagggacagttacggggttatagtaaacacctttgatgctatcgaaagtagggttatagaagcgttcaacgaagggttgatggaaggaactacgccaccagtgttttgcattggaccggtggtttcggctccttgtagaggcgatgataacgggtgtttgagttggctcgattcacaaccgagtcagcgcgttgttttcttgagtttcggaagcatggggagattctcgaggactcagttgagagagattgctattgggttgg

SEQ ID NO: 144149 - DNA, 270 bp, Glycine max
ggagacattctgcgtagtgatctattggcaaattttttgacagagggcaattttagagcaagtgttgatttgcagcgcactcatcgtattaaaggaatgattaaaatggtggccacagttggtattcctgagaataacggtatagcattggcctgtgctatgaatagttcttttagggggcgcgccagttctgatatttacaccatctgctctcaagactgtgaattatggcatctcgcttgcacaaaagcaatgactatgtcatttaat

SEQ ID NO: 144150 - DNA, 272 bp, Glycine max
cagcctaatcgggtaaccattggcaatggtccttccttgggctgggttttcatggctgatttcttaactgcattggctaaaaaagtgaagaccaacaccgcagctgtggagaattaccggcgtatctatgtcccaccaggcattcctctgaggcgagagcaggatgaaccacttagagttaatgttctattcaagcacattcaagaactgctaagcggagatactgctgtaatagctgaaactggagactcatggttcaactgtcagaagct

SEQ ID NO: 144151 - DNA, 270 bp, Glycine max
ctcgagacgattcggctcgagctcgagccgctcgagccgattcggactcgagagttttgaaaagctggagttctgagtgggctacatcaaacttcatggcatttgagtttccttattgacaatcccaaacagtctacagttagttgatattctcttgggaatctctcaagattttgaaattgctggtaatactcttatgccagctttttctgttccacaggctatgccagatctctgaaatgcggaatccctgcatgactggaattctgt

SEQ ID NO: 144152 - DNA, 267 bp, Glycine max
ctcgagccgttctcttgggaatctctcaagattttgaaattgctggtaatactcttatgccagctttttctgttccacaggctactgccagatcttctgaaaatgcggaatcctctgcatgatctggaattcgtgttttctttcgcttgttcgtttgtttaattcaatataggaaattaggcatgaccctcttgttgagtatgctctgcctatctgaaaatttccacacctcttttaattgtcgtaatgatgtgtgaagtgtgtgtt

SEQ ID NO: 144153 - DNA, 269 bp, Glycine max
tgtttttttaagcaaatagaagttaacatttttcatattgtctcaaacacgttacacgtacgtacacaaggatggaagaaatatgttgtgctaataattttggcaagaattacttcaccaaggcaaagccatatttcttaacggtggcactgcagtttggtttcgcaggagggtacatcttcaccgtagccagtttcaacagtggaatgtgtcgttttgtgttcattgtctatcgcaatgccttcgctgcattggccctcgctcctttt

SEQ ID NO: 144154 - DNA, 276 bp, Glycine max
  unsure (1)..(276): unsure at all n locations
gaagatgggaacaacaacgatgtacccttacacaaattcaaagacagcaatccaaaccctgaagagttncgatgcaaagggttacagcctcagcggaaaaatcatgctttcagcaataatccttcttttcttcgtcgtcgttttgatgttgtgccttcatatctacgcgcgctggtacctccggcgtgctcgccgccgccagctccggcgccaacgcgagctccgccgcacccagcttgtcttttaacaacgacgacgccacccccgcagccgtgt

SEQ ID NO: 144155 - DNA, 216 bp, Glycine max
aacgccttcagaacccgtgaacggcaagcactcggatacgggtatggatgaacgatacgtgtacggtgtctctgaaatgcagggctggcgcatcagcatggaggatgcgcacgcgaccgtactcaagctggatccgcagactaataatgcgttctttgctgtattcgacggccatggaggctccaccatagccaagtattccggctcccatattca

SEQ ID NO: 144156 - DNA, 264 bp, Glycine max
gaggagtacctgttcaagatagtgctgattggggactccgcggtggggaagtccaacctcctctcgcggttcgcgcggaacgagttcgatagcaactccaaggccaccattggggtcgagttccagacgcagctcgtcgagatcgacggcaaagagatcaaggcgcagatctgggacactgcgggacaagagaggtttcgagctgtcacctctgcttactacagaggcgctgttggtgcgctcgttgtttacgatatcagcagg

SEQ ID NO: 144157 - DNA, 262 bp, Glycine max
gcatgatagttcagtgtctacaataccaggtgattttgtcattggtgttaagttgacaaccataaacaatatgtgtgcatatgggctcaatcctggtatttcaggttctcgtcttttgggcaccattcctcagtccatttcacagcaaactgtttggaatcaaatggcaacagtgagaacaccattgaattttgattctagcaagcagagcttttgtcaattttctattgaccttctcggtggaggaattttagtggacaaa

SEQ ID NO: 144158 - DNA, 266 bp, Glycine max
gaattttgattctagcaagcagagcttttgtcaattttctattgaccttctcggtggaggaattttagtggacaaaactggagattggatcacacttatacaaaattctccaattagtaacttgttgagagttgctgcttggaagaaaggctgtttaatggttaagattgtgatgtctgggaatgcagcagtcaaaaggagtgattgggcctcattggtacaagtgtttttaacaaacagcaacagtacagagcattttgatgcat

SEQ ID NO: 144159 - DNA, 267 bp, Glycine max
aattcagatcgcagacagacacagagagtgagagagggagatggggagcgacaggagagcagagaagtcggtgcagaaagagaaggagaagaagaagatgttggccctggctcccattgctaaacctcttgctgggaagaagctttgcaagcgaaccctaaaacttgttcgtagagctgccgaacacaaatgcttgaaaagaggagtgaaggaggtcgttaaaagtataaggagaggtcataaaggattgtgtgtgattgctgggaa

SEQ ID NO: 144160 - DNA, 199 bp, Glycine max
cggctcgagtaagatttgaaattttaataaaccgcgatcacaggttgccgcaccttaaaaccggaaacaaaagcaatcgttacttgatttcaagaatttctcaatttcttcctacttctttgtgtacgatatcttaagggaaagaaaatcactctctgtgctggtcacagacttcgtgaatcattttcttttccacaca

SEQ ID NO: 144161 - DNA, 270 bp, Glycine max
ggacattgaacaagattctctacctcaggccccctaagaacatttactcgttcaacgagcttgtggccttgtgggagaacaagattggcaagaccctcgaaaaaatttatgtaccagaggagaaggttctcaaggacatcgaagaggcacctcttccaatcaatgtggtattagcaatcaaccactcagtgttcgtgaagggtgaccacaccaactttgagattgagccatctttcggggttgaggcttctgagttgtacccggatgtca

SEQ ID NO: 144162 - DNA, 262 bp, Glycine max
tctcgagccgaatcggctcgagcggctcgagtgaaattgctggtaatactcttatgccagcttactctgttccacaggctactaccagatcttctgaaaatgcggaatcctctgcatgatctggaattcgtgttttctttcgcttgttcgtttgtttaattcaataaaggaaattaggcatgaccctcttgttgagtatgctctgcctatctgaaaatttccacacctcttttaattgtcgtaatgatgtgtgaagtgtgtg

SEQ ID NO: 144163 - DNA, 269 bp, Glycine max
caagaacacagttggaggaaccattctgcgtagtgatcttgggaagtgcaattttagattgagaaattttaagatccaacatagaacctttaggagtttcaacatgcgtcaagagacgattgcacttcccaagaacacagttggaggaaccattctgcgtagtgatctattggcaaattttttgacagagggcaattttagagcaagtgttgatttgcagcgcactcatcgtatgctaggaatgattaacatggtggccacagttggta

SEQ ID NO: 144164 - DNA, 269 bp, Glycine max
tccatatattggtctcttggcacaatgttgtcgattttccggcaatacacgttcgacgactcgttctcgcaagtgtttgtgtcggcgaaattcctgaaggagtaccagatcgctctgaccttcgccagcgactacgacgacgagggtgcccccaccaacggcgttttccgaccgacctgggacctgagcaaggtcacccccgaatccatcgcgcgcttcaaggacaagaaccccaacgttgacatcaaagtcttcatcagcatcggcaa

SEQ ID NO: 144165 - DNA, 269 bp, Glycine max
ccattcctcagtccatttcacagcaaactgtttggaatcaaatggcaacagtgagaacaccattgaattttgattctagcaagcagagtttttgtcaattttctatcgaccttctcggtggaggaattttagtggacaaaactggagattggatcacacttatacaaaattctccaattagtaacttgttgagagttgctgcttggaagaaaggctgtttaatggtcaagattgtgatgtctgggaatgcagcagtcaaaaggagtgat

SEQ ID NO: 144166 - DNA, 270 bp, Glycine max
aattgaaaagctttctagctggtcataatatcaccattactgatggtattgacaaaactagtgcaactttgcaatttagaaagttagcagattgtgattttctcaagagaaactttaagcagatgtctaatgttttatgggtggctcctgaggacaaggcgagtttatggtcacaacttcattatgtttcgtgcaataatctggaaatgcaagaagcttatcttgtcaatctcgtaaatgtgttacgagaattgtatttgcacagtccag

SEQ ID NO: 144167 - DNA, 259 bp, Glycine max
gttgatttgcagcgcactcatcgtattaaaggaatgattaaaatggtggccacagttggtattcctgagaatacaggtatagcattggcctgtgctatgaatagttcttttagggggcgcgccagttctgatatttacaccatctgctctcaagactgtgaattatggaatcctgcttgcacaaaagcaatgactatgtcatttaatccaaacccgtgttctgatgcatggagtttggaatttctgaagcgtaccggat

SEQ ID NO: 144168 - DNA, 133 bp, Glycine max
atgagaaacttcctcgtcgcaaaatttttgacaaacctaagacgcgctgcttcactattctccctatggagtttaatcttgtggtccgtcacaagtttttaaactatgtgaggttcattatgaagaaaaggga

SEQ ID NO: 144169 - DNA, 132 bp, Glycine max
tctagcaagcagagcttttgtcaattttctatcgaccttctcggtggaggaattttagtggacaaaactggagattggatcacacttatacaaaattctccaattagtaacttgttgagagttgctgcttgg

SEQ ID NO: 144170 - DNA, 244 bp, Glycine max
gaaaactttgccaaataatttttctgcagaattgctctcttgcaaattggatactgttactggccaatattatcctgagtgggctccaattaattgtcgagttcatcgacaaccaattcacatcactgaaggaaattatgtcagaaagcaagatgtcagcattgaatatgatgcatgtacaattccaaatgattgtggttcattggttgttgccaaggttggaaatcacaaacaaattgttggt

SEQ ID NO: 144171 - DNA, 241 bp, Glycine max
gtttacactcttgagatgtgcatgactggcctggatagagagaaagcacaggttttctacaaagaacaatctgcttcagctgccatgatgactgttaattccggcattagaaaaattcttccagattccgagatttgtgactttgactttgaaccatgtggttattcaatgaactctgttgaaggcgctgctgtttctacgattcatgttaccccagaagatggtttcagttatgcaagct

SEQ ID NO: 144172 - DNA, 238 bp, Glycine max
gcattttgatgcatgtaagtggacaaaatcagaaccacattcctgggaattaatcttcccaatagaggtatgtggtcctaataatggttttgaaatgtggagttctgagtgggcaaatcaaacttcatggcatttgagtttccttattgacaatcccaaacagtctacagtttttgatattctcttgggaatctcacaagattttgaaattgctggtaatactcttatgccagctttt

SEQ ID NO: 144173 - DNA, 154 bp, Glycine max
acgcgtaggaagtcggctcgagaattttgaggcttttccccacaagctggtgcagtttggagagattcaggaaaaagttgtgttgaaattttcacaagaggaatttcttacagcttggtcaactcaggtgcgtcccgcaacgactctgttggct

SEQ ID NO: 144174 - DNA, 242 bp, Glycine max
attttgaaattgctggtaatactcttatgccagctttttctgttccacaggctactgccagatcttctgaaaatgcggaatcctctgcatgatctggaattcgtattttctttcgcttgttcgtttgtttaattcaataaaggaaattaggcatgaccctcttgttgagtatgctctgcctatctgaaaatttccacacctcttttaattgtcgtaatgatgtgtgaagtgtgtgttatttt

SEQ ID NO: 144175 - DNA, 245 bp, Glycine max
ctctctttgaacaacatctcacaattcattcaccttttaattcatctcactcacaaatcacaatgctcttcctttcttccttaataataataccataataatctgttacgttacggggcccaaatgtctgttacggagctcaaggagcgtcactctgctgccaccgacaccgtcaacaatctcagacaccgtttaaagcagaagcgcctttcgttgctcgacacagatatttctgggtatgcaag

SEQ ID NO: 144176 - DNA, 243 bp, Glycine max
ggcagattcaaggacatatttcaagaagtctatgcggcatgctatatagcaaagtttgaggctgctggtatatggtatgagcatcgactcaatgatgatatggtggcgtatgcacttaagagtgaaggaggttatgtatgggcatgcaaaaactatgatggagatgtccagagtgatttcttagctcaaggttttggatcactgggtttgatgacatctgtattggtttgccctgatggaaag

SEQ ID NO: 144177 - DNA, 126 bp, Glycine max
ctcgagcggcattacccgttttcacgtttgcaaatcaagctggacttgacatgcttgagacaactttggttgcacttcaagacatcactctggaaaagatttttgatgacaatggaaagaaaactc

SEQ ID NO: 144178 - DNA, 123 bp, Glycine max
aataaaccgcgatcacaggttgccgcaccttaaaaccggaaacaaaagcaatcgttacttgatttcaagaatttctcaatttcttcctacttctttgtgtacgatttcttaagggaaagaaaa

SEQ ID NO: 144179 - DNA, 247 bp, Glycine max
ctggatggactgccaccccaatgcaggatgttcaggttacaattgattggtttatttcctctcaggaatgtgttcccaggacctattgtgttttaaatccacaaaatccttttgtgttaaataggtggatgggaaaactgactttccctcagggcacttcccgaagtgttaagagaatgcctctttctatagggggaggagctggtgcaaagaatgctattctcatgaatatgccaaatgctgttct

SEQ ID NO: 144180 - DNA, 128 bp, Glycine max
aattttgataaaccgcgatcacaggttgccgcaccttaaaaccggaaacaaaagcaatcgttacttgatttcaagaatttctcaatttcttcctacttctttgtgtacgatttcttaagggaaagaaa

SEQ ID NO: 144181 - DNA, 235 bp, Glycine max
caaactctcagataactcaagcagtgtttgagaaggagaaaggagaattccaggtgaaggttgtgaagcagatcttatgggtaaatggaatgaggtatgaactgcaggagatatatggtattggaaattcagtggagagtgatgtggatgggaatgacccaggaaaagagtgtgttatatgcttgtcagagcctcgggacacaactgtccttccatgccgccacatgtgtatgtg

SEQ ID NO: 144182 - DNA, 123 bp, Glycine max
attttgataaaccgcgatcacaggttgccgcaccttaaaaccggaaacaaaagcaatcgttacttgatttcaagaatttctcaatttcttcctacttctttgtgtacgatttcttaagggaaa

SEQ ID NO: 144183 - DNA, 115 bp, Glycine max
acaccattgaattttgattctagcaagcagagcttttgtcaattttctattgaccttctcggtggaggaattttagtggacaaaactggagattggatcacacttatacaaaatt

SEQ ID NO: 144184 - DNA, 141 bp, Glycine max
gcggacttcggctcgagctcgagccgtttgagtttccttattgacaatcccaaacagtctacagtttttgatattctgcttgggaatctctcaagattttgaaattgctggtaatactcttatgccagctttttctgttcc

SEQ ID NO: 144185 - DNA, 243 bp, Glycine max
caccaccatgcagagttccatctataactctttcaagacatcttttgaagatgctgctgtggctatgaacatcaccagagtggcctcggtggcaccctttgagctttgtttcagttccaggggctcgcaagtggggcccagtatgccggttattgagttggtgctgcagagtgagatggtgaagtggaccatacatggaagaaactccatggtgagagtgagcgatgaagtactgtgcttggg

SEQ ID NO: 144186 - DNA, 241 bp, Glycine max
aaaagatctcgcaatggttaaagttaatgtagcatgtgctgcagttggcttgacatcaagttacactccaactccattattggaatctggtttgcaaaaagacagagggttaattgtagagtacggtggaaggatgtcatacgttgcacataacgttaatcagccccaagagatagatttgttggagggaaattgttcctttgatattaaatctcgctctagattggaaaacggatcctct

SEQ ID NO: 144187 - DNA, 237 bp, Glycine max
atcgagcttcagcaatggtgtacgtcaaggctcagaaatcaaaagcctacttcaagagatatcaagtcaagttcaagagaagaagagagggaaaaaccgattaccgtgccaggattcggttgattaatcaggacaagaacaaatataacactccgaaataccgatttgtggttcgctttagcaacaaggacattgttgcacaaataatatctgctagcattgccggcgatttagttc

SEQ ID NO: 144188 - DNA, 236 bp, Glycine max
ccggatttcattgtgatatcatttgtgtcactggatggactgccaccccaatgcatgatgtttaggttacaattgattggtttatttcctctcaggaatgtgtttccaggacctattgtgttttaaatccacaaaatccttttgttttaaataggtggatgggaaaactgactttccctcagggcacttcccgaagtgttaagagaatccctctttctatagggggaggagctggt

SEQ ID NO: 144189 - DNA, 235 bp, Glycine max
tgaggcgccactcgatgtttccatttgcctgcatgcctttggtattgtggggtgtggttcgtttagtggtgtcaagtcttgcgaacgtgagggtgcatgagtggtaatcgggatgtttttgttgcacggctccatgcttgcgcatgcaacgtgtgacatgcatccttttcattgtcaccttagccttcgtggcttaggtgctgacgattggttcctgtgttgcctacctaccaaa

SEQ ID NO: 144190 - DNA, 233 bp, Glycine max
agctggtgcaaagaatgctattctcatgaatatgccaaatgctgttctttcaatgtggagatattttgttggagatctcgtctttgaagtttctaagatgacttctccctacattaaatgtacagtctctttcttcatagcatttggaaatttggctgatgacaccatcaattttgaggcttttccccacaagctggtgcaatttggagagattcaggaaaaagttgtgttga

SEQ ID NO: 144191 - DNA, 230 bp, Glycine max
gtgttgatgaggaggattcctttgaggaagtttctttaagtgcagcacttaatggtgttgagggtttggactatatggaaagaattcctcttgccacatctgagggttttcctcatgtgctttcacgcaacattggagttaaaggacggaggagatttgtctctggggatggtgaagagatgacattgattccaggtaccagtgttgaagaggcttacaacaggctatta

SEQ ID NO: 144192 - DNA, 156 bp, Glycine max
gcatgatctggaattcgtgttttctttcgcttgttcgtttgtttaattcaataaaggaaattaggcatgaccctcttgttgagtatgctctgcctatctgaaaatttccacacctcttttaattgtcgtaatgatgtgtgaagtgtgtgttatttt

SEQ ID NO: 144193 - DNA, 237 bp, Glycine max
gttggtacatggttaaaggaaattaaagacactactaaagaaggatatagttttgaagagctatgcatcaagaaagaagccattgagggagaagagaagttttgtgcaaaatccttgggaacagtaattggttttgccatttcaaagctgggaaagaacattcaagtactttcaagttcctttgtcaataagcaagaccaatacactgtggaaggagtgcagaatcttggagacaaa

SEQ ID NO: 144194 - DNA, 234 bp, Glycine max
tgctcctctcatccgtgatgggcgtatggagaagttctactgggcacctacaagggatgaccgagttggtgtctgcaagggaattttccgcactgacaatgttcctgaggatgaaattgtcaagcttgttgacaccttccctggccaatctattgatttctttggtgcactcagggctagagattatgacgatgaagtgaggaagtggatttctggtgttggtgttgacttgat

SEQ ID NO: 144195 - DNA, 221 bp, Glycine max
ctaacctgaacttgaaaggttatcttcagaatgcctatgttcacccagtttttaaggacagcatggatgacgatgatgacgaggaagatagactcagtatagacttggaaactgaaagtgtgactgtgcgcacaaaacgccaatcacgaaggaatacaccattgccaagcaaaacaaatgatgcatcatctccttctctgtctgatggtattggaaatcat

SEQ ID NO: 144196 - DNA, 189 bp, Glycine max
gttgctgcttggaagaaaggttgtttaatggtcaagattgtgatgtctgggaatgcagcagtcaaaaggagtgattgggcctcattggtacaagtgtttttaacaaacagcaacagtacagagcattttgatgcatgtaagtggacaaaatcagaaccacattcctgggaattaatcttcccaatagag

SEQ ID NO: 144197 - DNA, 232 bp, Glycine max
aattaccattgatattgctttgtggaagtttgaaaccaccaagtactactgcacagtcatcgatgcccccggacatcgtgactttatcaagaacatgattactggtacctcccaggctgattgtgctgtccttatcattgactccaccactggtggttttgaagctggtatttctaaggatggacagactcgtgagcatgctcttcttgctttcacccttggtgtgaagcag

SEQ ID NO: 144198 - DNA, 230 bp, Glycine max
  unsure (1)..(230): unsure at all n locations
ggagggtcctagacctcgaatgctaggaaacattgagctgattttcagttcataacaaataatcaaggcaaaatatggacaagatgcatgtaatgttggagatgaaggaggatttgctcccagtgttcaagataacagggaggggtttgttttactcgtggatgccattgagaaggctggttatactggcaagattanaattggtatggatgttgcagcttcagagttta

SEQ ID NO: 144199 - DNA, 233 bp, Glycine max
tatggtgattgtgtcattggtgtaaagttgacaaccataaacaatatgtgtgcatatgggctcaatcctggtatttcaggttctcgtcttttgggcaacattcctcagtccatttcacatcaaactgtttgtaatcaaatggcaacagtgagaacaccattgaattttgattctagcaagcagagcttttgtcaattttctattgaccttctcggtggaggaattttagtgga

SEQ ID NO: 144200 - DNA, 227 bp, Glycine max
tggtgatgaaaaattgatgcgtgaaaggacgcacctgctgttggcttgttgttcaaggatggcaatttgtaagaaagatgtttggagagttgaatgtggaatcgcttctggatttccgctcacagttatttgcaatagcatttttaatgagatgctcattagatatagctatgaagaattactgcgccaggctaaagctccaagtatgtttttacaatccttcaaaa

SEQ ID NO: 144201 - DNA, 228 bp, Glycine max
gtttgttgtaggaagaggaatcttgagaaatggcaggggacagcaagagcaagattctgttcatcggagggactggttacatcggaaaattcatcgtggaagccagcgccaaagctggccacccaactttccttttggtgagggagtccactctctccaaccccgcaaaatcacccctcatcgacaatttcaaaggcctcggtgtcaatcttgttttaggagatctat

SEQ ID NO: 144202 - DNA, 193 bp, Glycine max
ggagtttggaatttctgaagcgtaccggatttcattgtgatatcatttgtgtcactggatggactgccaccccaatgcaggatgttcaggttacaattgattggtttatttcctctcaggaatgtgttcccaggacctattgtgttttaaatccacaatatcctttggtgttaaatagggggtagggaaaact

SEQ ID NO: 144203 - DNA, 234 bp, Glycine max
gtgatgtctgggaatgcagcagtcaaaaggagtgattgggcctcattggtacaagtgtttttaacaaacagcaacagtacagagcattttactgcatgtaagtggacaaaatcagaaccacattcctgggaattaatcttcccaatagaggtatgtggtcctaataatggttttgaaatgtctaatcctgagtgggcaattcaaacttcatggcatttgagtttccttattgac

SEQ ID NO: 144204 - DNA, 231 bp, Glycine max
gactattcgtccatgtctggttgagctcagtgaggatcccgatgttgacgtgcgatttttctccaaccaagcactgcaggcaattgatcatgtcatgatgtctagctaggcagaaatggttccacacgcaattaattaggttgaagacgtcggaagagatgctaatatttccaactaccataaataatactgcatatttatgtttagtgcttttcaattatagctgaatgg

SEQ ID NO: 144205 - DNA, 124 bp, Glycine max
ctgccaccccaatgcaggatgttcaggttacaattgattggtgtatttcctctcaggaatgtgttcccaggacctattgtgtttgaaatccacaaaatccttttgtgttaaataggtggatggg

SEQ ID NO: 144206 - DNA, 225 bp, Glycine max
cctacggcgaaatgctggagcagggccaactcatcacccaagccgtttccattcccgtcattggcgacgccgacaacggctacggcaatgccatgaacctcaagcgaaccgtcaagggtttcattgccgccggtttcgcaggaatcattctggaagaccagattgcgccgaaagcgtgtgggcacacgcgcgggaggaaagtgataccgagagaggagggcgtta

SEQ ID NO: 144207 - DNA, 148 bp, Glycine max
tgaaattttgataaaccgcgatcacaggttgccgcaccttaaaaccggaaacaaaagcaatcattacttgatttcaagaatttctcaatttcttcctacttctttgtgtacaatttcttaagggaaagaaaatcactctctgtgctgg

SEQ ID NO: 144208 - DNA, 254 bp, Glycine max
gtcttggtgtagtgtagctagggagggatatatatctgagtaagatggcatcagagcttgaattgcccccaggcttcagattccatccaacggacgaggcgctggtgttgcactatctctgccgcaaatgcgcgtcgcagccaatcgccgttcccatcatcgccgaaatcgacctctacaaataccacccgggggacttcacccggattggctacttatggagagaaagagtggtacttcttttcaccacggga

SEQ ID NO: 144209 - DNA, 266 bp, Glycine max
taagactgaagataatcatgaaaaccttggaggatgtgccacttctaatgtagcagacaatgcaagagctgttaatgggaacatttcttgtgctccaaacaattaccgtcagaaaggtcctcggattgcaaaggttgtccggcgcatcaactgcaatgttgaaccattagaatttggagtagtgctttctggaaagtcttggtgcagtagtcaggctatatttccaaagggatttagaagccgtgttagatacataaatgtcttag

SEQ ID NO: 144210 - DNA, 248 bp, Glycine max
caggaatgtggtcctaataatggttttgaaatgtggagttctgagtgggcaaatcaaacttcatggcatttgagtttccttattgacaatcccaaacagtctacagtttttgatattctcttgggaatctctcaagattttgaaattgctggtaatactcttatgccagctttttctgttccacaggctactgccagatcttctgaaattgcggaatcctctgcatgacctgagattcgtgtttcctt

SEQ ID NO: 144211 - DNA, 249 bp, Glycine max
gacagacaaaggtgaagctcaggctcaggattggagaggcagaccctccaaccctgccaaacacggtggaatgattcccgctgcttttgttcttgggttgcaagcttttgagataatggcaatagccgcagtggggacacaatctgataacctacgtgacgagtgagatgcacttccctttgtccaaggctgccaacctagtcactaactttgttgggaccatctttctcctcgccctcctcggcggct

SEQ ID NO: 144212 - DNA, 255 bp, Glycine max
ctctgttggctgatgggtgcccatatttgtatgctatggtgcatgatagttcagtgtctacaataccaggtgattttgtcattggtgttaagttgacaaccataaacaatatgtgtgcatatgggctcaatcctggtatttcaggttctcgtcttttgggcaccattcctcagtccatttcacagcaaactgtttggaatcaaatggcaacagtgagaacaccattgaattttgattctagcaagcagagctttt

SEQ ID NO: 144213 - DNA, 257 bp, Glycine max
ggagctagggtttatcgagggtttcgttccttcctctctgcaacaacaatggcgaaacctgggcgaggtcgtcgctctccctccggttccgtttccggctcctcctctcgctcctcttccccctccgactctcgttcctcctctcgctcgcgctccctttctcggtcccgttctccctcgcgctccagatcctcttccccctcctcctcctcttcctcccgaagctcccgcagccgcagccctcccccgcagaggcg

SEQ ID NO: 144214 - DNA, 254 bp, Glycine max
tttgatcaatatacaaatgattctctcaatgtgatggatacaagcgtatctgctcaaggaattgcagatttggctctgtccatggtcagatggattcctactcaaattacaaaagttgtgaattttggggtaggatcggtcatagaatccttttcagaacattttaataagctcataatgcaatattgtccaatagtgttccaagcttttagctgggttaacaatatttggaccatggttaaagaatggattga

SEQ ID NO: 144215 - DNA, 250 bp, Glycine max
ccaagctgcatcaaggtgaagactggcatcacgacgagacagtcatgcactgggcttataccatagatggtaaggttacaacatgactggagagtattgactccattgatgagcagagcaacacaatcacctacaagctcttcagtggtgacattgatcataattataagaactttaagttcatctttcaagccattgatgataatgatcatggcggtagtattatcaaatggaccgttgaatacgagag

SEQ ID NO: 144216 - DNA, 253 bp, Glycine max
ggcacataacggacatgtacttgtacttctcattgctcttgttacctcattcattattatcacagaaggcgttactacccctaatcctgaaatagcatctctgaatcggaatagtttcccaactggcttcatctttggcacagcatcctcggcatatcaatacgaaggtgcagcaaatgagggtggtagaggaccaagtatttgggataccttcacccataaatatccagataagataaaggatagagacagt

SEQ ID NO: 144217 - DNA, 251 bp, Glycine max
atcgaatactccttctgctgttaacatcaaatctactaccttctccagacaagagtcgacggattcgaatgtgggttcgccgccaaagaagatggaggggaggactatatactaccacgttgcagaagataatggggatgtggatgatgagaatgtgcagggttattctttgaatttcaaagggaatggggttgagcagttagctcgaaagtttgaggaagagactgggcttgagggagttattgtgtgca

SEQ ID NO: 144218 - DNA, 254 bp, Glycine max
tgtgaggctgctgaaagaggaaggggaagtggtagccatgactggggatggtgttaatgatgctcctgccttgaagcttgcagacattggtattgcaatgggcattgcagggacagaggtggcaaaggaagcttcagatatggtgttggcagatgataattttagttcaattgttgctgctgttggtgagggtagatctatctacaataatatgaaggcctttatcaggtatatgatctcttccaatattggcg

SEQ ID NO: 144219 - DNA, 220 bp, Glycine max
ctcctaaaggttccatgttggatcttaaattttctcaatctaaaattgcacttcccaagaacacagttggtggaaccattctgcgtagtgatttattggcaaattttttgacagagggcaattttagagcaagtgttgatttgcagcgcactcatcgtattagaggaatgattaaactggtggccacagttggtattcctgagaatacaggtatcgcatt

SEQ ID NO: 144220 - DNA, 256 bp, Glycine max
aaaggcttatggtggatacctaggcacccagagacgaggaagggcgtagtaagcgacgaaatgcttcggggagttgaaaataagcgtagatccggggattcccgatataggtcaacctttcgaactgctgctgaatccacgggcaggcaagagacaacctggtgaactgaaacatcttagtagccagaggaaaagaaagcaaaagcgattcccgtagtagcggcgagcgaaatgggagcagcctaaaccgtgaaaa

SEQ ID NO: 144221 - DNA, 136 bp, Glycine max
aagaaaggttgtttaatggtcaagattgtgatgtctgggaatgcagcagtcaaaaggagtgattgggcctcattggtacaagtgtttttaacaaacagcaacagtacagagcattttgatgcatgtaagtggacaa

SEQ ID NO: 144222 - DNA, 254 bp, Glycine max
atcaccattactgatggtattgacaaaactagtgcaactttgcaatttagaaagttagcagattgtgattttctcaagagaaactttaagcagatgtctaatgttttatgggtggctcctgaggacaaggcgagtttatggtcacaacttcattatgtttcgtgcaataatctggaaatgcaagaagcttatcttgtcaatctcgtaaatgtgttacgagaattgtatttgcacagtccagaggaagctcgcca

SEQ ID NO: 144223 - DNA, 255 bp, Glycine max
aattctcacaggggacaacttgatgtattcctatggacttttatatctccctctttcctcctattctctactatgtgccacccaattagtcttcaacgcggtgttctctttcttcctcaattcccagaaattcacagcattcataatcaattctgtcgtcctccttaccatatcagcttctctgcttgcaatcaactccgattccgacgaggactcaaccggtctttccagagaaaagcatgtaattggattctt

SEQ ID NO: 144224 - DNA, 174 bp, Glycine max
ctcatatggctttgccacagcaacatacggttgactatcccagtttcaagcttgtcatcgtaggcgacggaggaactgggaaaaccacttttgtcaagagacacataacgggagagtttgagaagaaatatgaaccaaccattggtgtggaggttcatccactagacttccata

SEQ ID NO: 144225 - DNA, 251 bp, Glycine max
caactgtgttcttgggaagtgcaattttagattgagaaattttaagatccaacatagaacctttaggagtttcaacatcatcaagagactattggaggaaccattctgcgtagtgatctattggcaaattttttgacagagggcaattttagagcaagtgttgatttgcagcgcactcatcgtattatcggaatgattaaaatggtggccacagttggtattcctgagaatacaggtatagcattggcctg

SEQ ID NO: 144226 - DNA, 250 bp, Glycine max
gcatttttaatgagatgctcattagatatagctatgaaaaattactgtgagcgaatatattccattctctctgtgtatttccctacctctcccttcaagatgcagatcttcgtcaagaccctcaccggcaagaccatcacccttgaggtggaaagctctgacaccatcgacaacgtcaaggccaagatccaggacaaggaaggaatccccccggaccagcaacgtctcattttcgccggaaagcaacttg

SEQ ID NO: 144227 - DNA, 250 bp, Glycine max
tagaatggctcccatgggttttacctttctggctgtgttaatatgcgtttcagcactgtcactgagttcttctgttgcgggggaagggcaaaataatggccttgttatgaacttctacaaggaatcatgccctcaggctgaagacatcatcacagaacaagtcaagcttctctacaagcgccacaagaacactgctttctcctggctcaggaacatcttccatgactgtgctgtttagagttgtgatgct

SEQ ID NO: 144228 - DNA, 250 bp, Glycine max
tgattttgtccacttacatgcatcaaaatcagaaccacattcctgggaattaatcttcccaatagaggtatgtggtcctaataatggttttagaaatgtggagttctgagtgggcaaatcaaacttcatggcatttgagtttccttattgacaatcccaaacagtctacagtttttgatattctcttgggaatctctcaagattttgaaattgctggtaatactcttatgccagctttttctgttccaca

SEQ ID NO: 144229 - DNA, 258 bp, Glycine max
ggcaattccaggctctttctgttttagagggattggcaacacaactcactttcttttgtgacacatctttgattgccatgggaaaaacttgcacagcattcaatcaaatttgcactgctgggaaaaatgttaaagtgattgctggcagattgttggatgtagtttccaattttgtgaggaaacttttgggattggatagtgcttttcttagagatgcagcgcttatcttctctcaagatgttgatggttggctgcgca

SEQ ID NO: 144230 - DNA, 263 bp, Glycine max
cagcttcccgcatacatgctgcacttagggaacactctctaaaactgagaactaaggcggttgcatcttccaatccagaggctcaagcacgcaaaatagttgcagcaatgaagattcagcatgcctttaggaaccacgagacaaagaaaatgatggcagctgccgctcgcattcagtgtacataccgtacatggaagattcgtaaagaatttcttaacatgcgtcgtcaggctgttaaaattcaagctgcattccggtgcttt

SEQ ID NO: 144231 - DNA, 237 bp, Glycine max
ctcgagccgaatcggctcgagggcaattttagagcaagtgttgatttgcagcgcactcatcgtattaaaggaatgattaaaatggtggccacagttggtattcctgagaatacaggtatagcattggcctgtgctatgagtagttcttttagggggcgcgccagttctgatatttacaccatctgctctcaagactgtgaattctggaatcctgcttgcacaaaagcaatgactatg

SEQ ID NO: 144232 - DNA, 250 bp, Glycine max
tcaacagttatatgcacatatcaagagaggaagcatttggacctgttgcaccccttttgagattcaaaactgaagaggaagctatcagaattgctaatgacactaacgcaggtttgggttcatatgtatttacaaacagtatccaacgatcatggcgtgttgctgaggctcttgaatatggactagtgggtgttaatgaaggagtaatttcaactgaggtggctccatttggtggttttaaacagtctgg

SEQ ID NO: 144233 - DNA, 249 bp, Glycine max
caacgctttgtctaccgctccggcagcgggtagtaggaagaacgcgacgctaatttgcgtcccaataatgggagaatcagttgaaaagatggagattgacgtggacaaagcgaaagccggaggcgcggaccttgttgaaattcgattggattctttgaaaacctttgacccctatcgagatctctacgctttcattcaacaccgttctttacccttgttgttcacttacaggcccaaatgggagggtgg

SEQ ID NO: 144234 - DNA, 248 bp, Glycine max
ggaattttagtggacaaaactcgtgattggatcacacttatacaaaattctcaacaagttactaattggagaattttgtataagtgtgatccaatctccagttagtaacttgttgagagttgctgcttggaagaaaggttgtttaatggtcaagattgtgatgtctgggaatgcagcactcaaaaggagtgattgggcctcattggtacaagtgtttttaacaaacagcaacagtacagagcattttg

SEQ ID NO: 144235 - DNA, 247 bp, Glycine max
cattaattgcaagaatggcacttcgttgcttggtgatgtccctttctgttctcttcactcttggtcttgcgagagaaagccatgccagagacgaagatttttggcatgctgtttggccaaacactcccattccaagttcattgcgagatcttctaaagcctggccctgcaagtgttgaaatcgatgatcaccctatgcaaattgaagaaacacagtacccgaaaaccttcttctataaagaagacct

SEQ ID NO: 144236 - DNA, 230 bp, Glycine max
gaaaaagttgtgttgatattttcacaagaggaatttcttacagcttggtcaactcaggtgcgtcccgaacgactctgttggctgatgggtgcccataattgtatgctatggtggcatgtagttccgtgtcttaaataccaggtgattttgtcattggtgttaagttgacaaccataaacgatatgtgtgcatatgggctcaatcctggtatttcaggttctcgtcttttg

SEQ ID NO: 144237 - DNA, 248 bp, Glycine max
acaaaagcacaatttgttagtggaaaaaccttcaaatatgatataattggtgctggttcacattcttcaggagattttcctgaaaaggaagatcaagaaaaacccaaaaagattgataccagattgagacaaagaatagatcctcaatacaatgaggttcaggctcagatggaaacaaatttgtgtaaattgtctcttgatgatgttgaaactcctaaaggttctatgttggatcttaaaatttctca

SEQ ID NO: 144238 - DNA, 246 bp, Glycine max
ccactctccccaagaagacgctgaggctctcagaaaggcttttgaaggatgggggactgatgagaaaactgtcatagtaatattgggtcatagaactgtttatcagaggcagcaaatcagaagagtctatgaggaaattttccaggaggatcttgtgaaacgcctagagtctgagatcaaatgagactttgagaaagccgtgtaccgatggatactagaacctgcagatcgtgatgctgttttggc

SEQ ID NO: 144239 - DNA, 243 bp, Glycine max
ctcgtggaatgggccaggtctgctttgaatgattcccggaaacttagcagaataatggatccaaggcttgagggtcagtattctgaggttggggcaagaaaagcagctgcattggcttaccaatgccttagccacaggccaaggagtagacccttgatgagcactgtggttaatgttctcgagccacttcaggactttgatgatgttccaattggaccctttgtttacactgttccagctgaa

SEQ ID NO: 144240 - DNA, 248 bp, Glycine max
gtaccacattcctgggaattaatcttcccaatagaggtatgtggtcctaataatggttttgaaatgtggagttctgagtgggcaaatcaaacttcatggcatttgagtttccttattgacaatcccaaacagtctacagtttttgatattctcttgggaatctctcaagattttgaaattgctggtaatactcttatgccagctttttctgttccacaggctactgccagatcttctgaaaatgcgga

SEQ ID NO: 144241 - DNA, 257 bp, Glycine max
catgatagttcagtgtctacaataccaggtgattttgtcattggtgttaagttgacaaccataaacaatatgtgtgcatatgggctcaatcctggtatttcaggttctcgtcttttgggcaccattcctcagtccatttcacagcaaactgtttggaatcaaatggcaacagtgagaacaccattgaattttgattctagcaagcagagcttttgtcaattttctattgaccttctcggtggaggaatttagtggac

SEQ ID NO: 144242 - DNA, 257 bp, Glycine max
ctcgagccgttggtcgtcctattggggagtttcagtttatacaggggaaaattgctgacatgtatacttcattacagtcttctaggtcttatgtgtattcagtagctcgggattgtgacaacggaaaagttgacccaaaggattgtgctggagctatactttgtgcagctgaaagagcaacccaggttgctttgcaggcaatacaatgtttaggtgggaatggttatgtgaatgagtatcctactggtcgtctcttg

SEQ ID NO: 144243 - DNA, 249 bp, Glycine max
gaagaaaagggacaagcttagttgtcaagttggaatcaacccatactccatggaatggactggtttggccaatagattactgagtaagggcaatgatattctgtgttgcgattatgctagttttgatggtttgattaccaagcaagttatgagcaagatggcagaaatgataaacagtctttgtggtggtgatgaaaaactgatgcgtgaaaggacgcacctgctgttggcttgttgttcaaggatggc

SEQ ID NO: 144244 - DNA, 251 bp, Glycine max
gcagagcataccatcgaaatgggcgaacgaaggcgttggttccggaatcggtggtgaagaaggagaagaggaacgaggagtgggctttggagaagaagcaggaactcgatgccgcaaagaaaaagaggttcgaaacgcggaagctgatttttaacagagccaaacagtactcaaaggaatacgacgagcagcaaaaaggagttgattaagttgaaagcgtgaagccaagcctatagggagggttttatgtt

SEQ ID NO: 144245 - DNA, 247 bp, Glycine max
gtgcatgatagttcagtgtctacaataccaggtgattttgtcattggtgttaagttgacaaccataaacaatatgtgtgcatatgggcttaatcctggtatttcaggttctcgtcttttgggcaccattcctcagtccatttcacagcaaactgtttggaatcaaatggcaacagtgagaacaccattgaattttgattctagcaagcagagcttttgtcaattttctatcgaccttctcggtggag

SEQ ID NO: 144246 - DNA, 242 bp, Glycine max
cggctcgagcttgtggtccgtcaaaagtttttaaattttgtgaggttcattatgaagaaaagggacaagcttagttgtcaagttggaatcaacccatactccatggaatggactggtttggccaatagattactgagtaagggcaatgatattctgtgttgcgattatgctagttttgatggtttgattaccaagcaagttatgagcaagatggcagaaatgataaacagtctttgtggtgg

SEQ ID NO: 144247 - DNA, 244 bp, Glycine max
ggtgatgataacttaattagtgttcatgaatatgtcaagccttactttagtggttctaaattgaaaagctttctagctggtcataatatcaccattactgatggtattgacaaaactagtgcaactttgcaatttagaaagttagcagattgtgattttctcaagagaaactttaagcagatgtctaatgttttatgggtggctcctgaggacaaggcgagtttatggtcacaacttcattatg

SEQ ID NO: 144248 - DNA, 242 bp, Glycine max
attttaatataccgcgatcacaggttgccgcaccttaaaaccggtaacaaaagcaatcgttacttgatttcaagaatttctcaatttcttcctacttctttgtgtacgatttcttaagggtaagaaaatcactctctgtgctggtcacagacttcgtgaatcattttcttttccattcctagtttatattctgaacactctcctatttgatataggacttcgtgtcagatttaaactttttc

SEQ ID NO: 144249 - DNA, 264 bp, Glycine max
aattcggctcgattcgaccgcggctcgagcaacatagttggtgcaatgcttttggttgatacttatcataccaatcctgaaaatgcagttcgtagtatttttgttgcgcctttcagaggcggaaggcccattcgggtggttacatttccgaataccattgtgcagattgaaccagacatgaattcaaggtttcagcttttgagtaccactaccaatggtgattttgttcaagggaaagatctcgcaatggttaaagttaatgta

SEQ ID NO: 144250 - DNA, 252 bp, Glycine max
accatcagtaatggtgatattgacaaaactagtgcaactttgcaatttagaaagttagcagattgtgattttctcaagagaaactttaagcagatgtctaatgttttatgggtggctcctgaggacaaggcgagtttatggtcacaacttcattatgtttcgtgcaataatctggaaatgcaagaagcttatcttgtcaatctcgtaaatgtgttacgagaattgtatttgcacagtccagaggaagctcgc

SEQ ID NO: 144251 - DNA, 246 bp, Glycine max
gagcttttgtcaattttctattgaccttctcggtggaggaattttagtggacaaaactggagattggatcacacttatacaaaattctccaattagtaacttgttgagagttgctgcttggaagaaaggttgtttaatggtcaagattgtgatgtctgggaatgcagcagtcaaaaggagtgattgggcctcattggtataagtgtttttaacaaacagcaacagtacagagcattttgatgcatg

SEQ ID NO: 144252 - DNA, 246 bp, Glycine max
gtaaatagtagtaacctaacccttgcgttgcgagtgaggctgaggttgggtttggaaggcaaaggctggtgttgtcccaatccaagagagaagtaaagtaaagcaaaggaatggcgaacatagacatcgaagggatcttgaagcagcagcctgatgatgggcgcgttccgaagacgaaaatagtgtgtactttgggccccgcttctcgatccgtggaaatgactgagaagcttcttagggctggga

SEQ ID NO: 144253 - DNA, 258 bp, Glycine max
cacttcggctcgagcatcttggttgtctattatacaatagcactcaatttataaaatttctaccgcattacattaggtggcatctgtataccttgttgatctacattctcccatcttttctcactgctgaaattaaatataagcggaatttgagtaatattcatatttccggcttattttacgacggcagatacaaattctggactaaacacgactaaaatcttgctttgacagaagaggaaaagatggaagtgatta

SEQ ID NO: 144254 - DNA, 245 bp, Glycine max
ggaggagctggtgcaaagaatgctattctcatgaatatgccaaatgctgttctttcaatgtggagatattttgttggagatctcgtctttgaagtttctaagatgacttctccctacattaaatgtacagtctctttcttcatagcatttggaaatttggctgatgacaccatcaattttgaggcttttccccacaagctggtgcagtttggagagattcaggaaaaagttgtgttgaaattttc

SEQ ID NO: 144255 - DNA, 245 bp, Glycine max
gtgtatggtgatgataacttaattagtgtcatgaatatgtcaagccttactttagtggttctaaattgaaaagctttctagctggtcataatatcaccattactgatggttctaaccataaactcgccttctactcaggatccacccataaaacattagacatctgcttaaagttttatgggtggctcctgaggacaaggcgagtctatggtcacaacttcattatgtttcgtgcaataatctgg

SEQ ID NO: 144256 - DNA, 249 bp, Glycine max
caagacattcaacatcaagaatgacttcaccctgaggaagaggaggaagttcgtagggaaaaccaatgggcgtttgaataagttttatgattctgctgcttttgaaatttcaatgaaaagatatgccctatagtttctagtttatgtttctgactattttgtttgttttatttatgtttcgcgtatcaaacttgtcttcttttttgaacttgggcaatcttgaaattgtaagtaatagttgaatatggt

SEQ ID NO: 144257 - DNA, 161 bp, Glycine max
acgatcacaggttgccgcaccttaaaaccggaacacaaaagcaatcgttacttgatttcaagaatttctcaatttcttcctacttctttgtgtacgatttcttaagggaaagaaaatcactctctgtgctggtcacagacttcgtgaatcattttcttttc

SEQ ID NO: 144258 - DNA, 124 bp, Glycine max
gtttgtttaattcagtaaagggaattatgcatgaccctcttgttgagtatgctctgcctatctgaaaatttccacacctcgtttcattgtcgtaatgatgtgtgaagtgtgtgttattttaaaa

SEQ ID NO: 144259 - DNA, 242 bp, Glycine max
gtggttgatgaggaaaccaacatggaagtgtgtgtctcaagagcttagaatttaaagagcgcaactacatgggattatctgattgttcttctgtggacagctcggttccgtccttctctgaagagactaaaagtaatctgaacctgaaagccactgaactcaggctcgggcttccaggatcacagtctcctgatagagattctgatctttgcttaagaagctcaactcaatttgatgaaaaa

SEQ ID NO: 144260 - DNA, 246 bp, Glycine max
aattagtgttcatgaatatgtcaagcctactttagtggttctaaattgaaaagctttctagctggtcataatatcaccattactgatggtattgacaaaactagtgcaactttgcaatttagaaagttagcagattgtgattttctcaagagaaactttaagcagatgtctaatgttttgtgggtggctcctgaagacaaggcgagtttatggtcacaacttcattatgtttcgtgtaataatctg

SEQ ID NO: 144261 - DNA, 242 bp, Glycine max
gggatattctcttgggaatctctcagattttgaaattgctggtaatactcttatgccagctttttctgttccacaggctactgccagatcttctgaaaatgcggaatcctctgcatgatctggaattcgtgttttctttcgcttgttcgtttgtttaattcaataaaggaaattaggcatgaccctcttgttgagtatgctctgcctatctgaaaatttccacacctcttttaattgtcgta

SEQ ID NO: 144262 - DNA, 243 bp, Glycine max
ttgtggagtattttggaaggatgtctacgttgctcataacgttaatcagccccaagagaaagatttgttagagggaaatttttcctttgatattaaatctcgctctagattggaaaaagtttcctctacaaaagcacaatttgttagtggaaaaaccttcaaatatgatataattggtgctggttcacattcttcaggagattttcctgaaaaggaagatcaagaaaaacccaaaaagattga

SEQ ID NO: 144263 - DNA, 199 bp, Glycine max
cccacatgcattgcagtagcttgtacgagctatagaaattatcattgatagtttcgcaagtgctgattgcaccaactatgttgcaatcaggacttgcgaaactatcaatgataatttcgcaagtcctgattgcaacatagttggtgcaatgcttttggttgatacttatcataccaatcctgaaaatgcagttcgtagt

SEQ ID NO: 144264 - DNA, 268 bp, Glycine max
tcggaattcggtcgagcgttttgccaaatggcgtgcagtgctgaaattggtcccaacgagccatctgagctgtctatccatgagaacgcctatggcttggctagatacgctgtcatatgccaggagaatggcctggttcccattgttgagcctgagatccttgttgatggacctcatgacattcacaagtgtgccgccgtcaccgagcgtgtccttgcagcatgctacaaggctttgaatgatcaccatgtccttcttgagggtacct

SEQ ID NO: 144265 - DNA, 249 bp, Glycine max
cacaaaagcaatgactatgtcatttatccaaacccgtgttctgatgcatggagtttggaatttctgaagcgtaccggatttcattgtgatatcatttgtgtcactggatggactgccaccccaatgcaggatgttcaggttaacattgattggtttatttcctctcaggaatgtgttcccaggacctattgtgttttaaatccacaaaatccttttgtgttaaataggtggatgggaaaactgactttc

SEQ ID NO: 144266 - DNA, 243 bp, Glycine max
caatattcctgtatataatattactgaggggaaaatcatgtagttcaaatacccttaatggcacaggaggaaatactgtcttctagtgcaagtgatttcagaactgcaatggtgagtaaaaataccctacctcaagctaatgcaatgcatgtgggagctatagaaattatcattgatagtttcacaagtcctgattgcaacatagttcgtgcaatgcttttggttgatacttatcataccaat

SEQ ID NO: 144267 - DNA, 246 bp, Glycine max
gggaaatttttcctttgatattaaactcgctctagattggaaaaagtttcctctacaaaagcacaatttgttagtggaaaaaccttcaaatatgatataattggtgctggttcacattcttcaggagattttcctgaaaaggaagatcaagaaaaacccaaaaagattgataccagattgagacaaagaatagatcctcaatacaatgaggttcaggctcagatggaaacaaatttgtttaaattg

SEQ ID NO: 144268 - DNA, 243 bp, Glycine max
cagatgtctaatgttttatgggtgctcctgaggacaaggcgagtttatggtcacaacttcattatgtttcgtgcaataatctggaaatgcaagaagcttatcttgtcaatctcgtaaatgtgttacgagaattgtatttgcacagtccagaggaagctcgccaattgagaaggaaagctctctctcgtattgaatggctgcaaaaagctgatgtgcctaccatagcacagattgaagagttcc

SEQ ID NO: 144269 - DNA, 240 bp, Glycine max
taagtttgcaaaaattatgaacttagacaaagtgttgttggtgatcttaaacttcttactgatgggaagttgtatgagggtaagcatattcctgtatctaatattagtgcaggggaaaatcatgtagttcaaatacccctaatggcacaggaggaaattctgtcttctagtgcaagtgatttcagaactgcaatggtgagtaaaaatagcaaacctcaagctactgcaatgcatgtggga

SEQ ID NO: 144270 - DNA, 241 bp, Glycine max
cggctcgagctcgagccgaatcggtcgagattttaataaaccgcgatcacaggttgccgcaatttacacaccggaaacaaaagcaatcgttacttgatttcaagaatttctcaatttcttcctacttctttgtgtacgatttcttaagggaaagaaaatcactctctgtgctggtcacagacttcgtgaatcattttcttttccactcctagtttatttgctgaacactctcctatttgat

SEQ ID NO: 144271 - DNA, 242 bp, Glycine max
ggagcagattgcctcaatgaaggaatacattgcccgatttggccatggttcggctaaactagctcgccaggcacagagtaaggagaaaacactggcaaaaatggaacgtggtggacttgcagagaaggtggtcagagacaaagttttggtatttcgttttactgatgttgggaaacttccccctccagttctccagtttgttgaggtgtcatttggttatactcctgataatctcatctaca

SEQ ID NO: 144272 - DNA, 244 bp, Glycine max
attctctttccaaagccatggaagagttcagactttggtacgacgagaacaaggcaaagggcaataagccatttcttgaggggatggtgaccaccggatggtataagaaaatgggagagaggatttggacaccttggttcataaagtttattcaatcccgtggttattttaatatctacacaaatcttctgcatgagagagcattaagtgtttctcacagagatgctggagttaactacgggaa

SEQ ID NO: 144273 - DNA, 245 bp, Glycine max
ggagtttaatcttgtggtccgtcagaagtttttaaattttgtgaggttcattatgaagaaaagggacaagcttagttgtcaagttggaatcaacccatactccatggatggactggtttggccaataggttactgagtaagggcaacgatattctgtgttgcgattatgctagttttgatggtttgattaccaagcaagttatgagcaagatggcagaaatgataaacagtctttgtggtggtga

SEQ ID NO: 144274 - DNA, 240 bp, Glycine max
tggcaacagtgagaacaccattgaattttgattctagcaagcagagcttttgtcaattttctattgaccttctcggtggaggaattttagtggacaaaactggagattggatcacacttatacaaaattctccaattagtaacttgttgagagttgctgcttggaagaaaggttgtttaatggtcaagattgtgatgtctgggaatgcagcagtcaaaaggagtgattgggcctcattgg

SEQ ID NO: 144275 - DNA, 241 bp, Glycine max
agcaacagtacagagcattttcatgcatgtaagtggacaaaatcagaaccacattcctgggaattaatcttcccaatagaggtatgtggtcctaataatggttttgaaatgtggagttctgagtgggcaaatcaaacttcatggcatttgagtttccttattgacaatcccaaacagtctacagtttttgatattctcttgggaatctctcaagattttgaaattgctggtaatactctta

SEQ ID NO: 144276 - DNA, 240 bp, Glycine max
tgaaactcctaaaggttctatcttggatcttaaaatttctcaatctaaaattgcacttcccaagaacacagttggaggaaccattctgcgtagtgatctattggcaaattttttgacagagggcaattttagagcaagtgttgatttgcagcgcactcatcgtattaaaggaatgattaaaatggtggccacagttggtattcctgagaatacaggtatagcattggcctgtgctatgaa

SEQ ID NO: 144277 - DNA, 233 bp, Glycine max
gcaaaattgaaggttcttatctgattagctgctatgggatcaaagatctcaatatggatttgccagcaatatctccttctgaatcaatttggtcattaacaatccatgactgccctggatttggcaatgctaaccttgccttacttggaaagctgtgtcctcggcttcagcatgttgaattgagtggacttcagggagtaacagatgcagggtttcttccattgctggagagc

SEQ ID NO: 144278 - DNA, 245 bp, Glycine max
gagaagtcatcttagcatttcgaaatttggctgatgacaccatcaattttgaggcttttccccacaagctggtgcagtttggagagattcaggaaaaagttgtgttgaaattttcacaagaggaatttcttacagcttggtcaactcaggtgcgtcccgcaacgactctgttggctgatgggtgcccatatttgtatgctatggtgcatgatagttcagtgtctacaataccaggtgattttgtc

SEQ ID NO: 144279 - DNA, 234 bp, Glycine max
ccttgtgcaccgtaaggttgtgaagcaggcagagaagagccatggtgcacgtttccttctaccgaaactatgggaaaaccttcaagaagcctcgtcgtccgtacgagaaggagcgtttggacgccgagttgaagctggtcggtgagtacggacttcgctgcaagagggagttgtggagggttcagtacgctctcagccgcatccgtaacaacgccagaaatcttttgaccctcg

SEQ ID NO: 144280 - DNA, 234 bp, Glycine max
cacaagctggtgcagtttggagagattcaggaaaaagttgtgttgaaattttcacaagaggaatttcttacagcttggtcaactcaggtgcgtcccgcaacgactctgttggctgatgggtgcccatatttgtatgctatggtgcatgatagttcagtgtctacaatctcaggtgattttgtcattggtgttaagttgacaaccataaacaatatgtgtgcatatgggctcaat

SEQ ID NO: 144281 - DNA, 238 bp, Glycine max
gcagcgcactcatcgtataaaggaatgattaaaatggtggccacagttggtattcctgagaatacaggtatagcattggcctgtgctatgaatagttcttcttgcggggcgcgccagttctgatatttacaccatctgctctcaagactgtgaattatggaatcctgcttgcacaaaagcaatgactatgtcatttaatccaaacccgtgttctgatgcatggagtttggaatttctg

SEQ ID NO: 144282 - DNA, 242 bp, Glycine max
tctcgagccgactcggctcgagtcgggtggttacatttccgaatagcattgtgcagattgaaccagacatgaattcaaggtttcagcttttgagtaccactaccaatggtgattttgttcaagggaaagatctcgcaatggttaaagttaatgtagcatgtgctgctgttggcttgacatcaagttacactccaactccactgttggaatctggtttgcaaaaagacagagggttaattgtg

SEQ ID NO: 144283 - DNA, 239 bp, Glycine max
atgaaaaattgatgcggaaaggacgcacctgctgttggcttgttgttcaaggatggcaatttgtaagaaagatgtttggagagttgaatgtggaatcccttctggatttccgctcacagttatttgcaatagcatttttaatgagatgctcattagatatagctatgaaaaattactgcgccaggctaaagctccaagtatgtttttacaatccttcaaaaattttgtttctttgtgtg

SEQ ID NO: 144284 - DNA, 239 bp, Glycine max
ttgcaacatagttggtgcaatgcttttggttgatacttatcataccaatcctgaaaatgcagttcgtagtatttttgttgcgcctttcagaggcggaaggcccattcgggtggttacatttccgaataccattgtgcagattgaaccagacatgaattcaaggtttcagcttttgagtaccactaccaatggtgattttgttcaagggaaagatctcgcaatggttaaagttaatgtag

SEQ ID NO: 144285 - DNA, 174 bp, Glycine max
tgaaaatgcggaatctctgcatgatctggaattcgtgttttctttcgcttgttcgtttgtttaattcaataaaggaaattaggcatgaccctcttgttgagtatgctctgcctatctgaaaatttccacacctcttttaattgtcgtaatgatgtgtgaagtgtgtgttatttt

SEQ ID NO: 144286 - DNA, 237 bp, Glycine max
ttgccccagagcaaggtaccgacgcctcattgagggagctctcggctactttagaggtccagctgaagcttcagtcgatgcagttcactttgtcttaaaagaacttgtgaggaaatcaatagctgaaactcaggaactgagacgtttcccaactctccaagccgaaatagctgcaggtacaaatgaggctttagagaggttccgtgaagagagtaagaagacagttatccggcttgt

SEQ ID NO: 144287 - DNA, 235 bp, Glycine max
gagaaactttaagcaatgtctaatgttttatgggtggctcctgaggacaaggcgagtttatggtcacaacttcattatgtttcgtgcaataatctggaaatgcaagaagcttatcttgtcaatctcgtaaatgtgttacgagaattgtatttgcacagtccagaggaagctcgccaattgagaaggaaagctctctctcgtattgaatggctgcaaaaagctgatgtgcctacca

SEQ ID NO: 144288 - DNA, 232 bp, Glycine max
tgccactcccatgatgcccctagatgaagaaattctttctaaggttgcacaagatatggttgaggaatggtttgattgtgttgatgaggaggattcctttgaggaagtttctttaagtgcagcacttaatggtgttgagggtttggactatatggaaagaattcctcttgccacatctgagggttttcctcatgtgctttcacgcaaaaatggcgaaaaaggcaaaaggaga

SEQ ID NO: 144289 - DNA, 159 bp, Glycine max
aaaccgcgatcacggttgccgcaccttaaaaccggaaacaaaagcaatcgttacttgatttcaagaatttctcaatttcttcctacttctttgtgtacgatttcttaagggaaagaaaatcactctctgtgctggtcacagacttcgtgaatcattttc

SEQ ID NO: 144290 - DNA, 237 bp, Glycine max
ctgattcagttctatcataaccatcgcgatttactatcaaaccaaaaattctcaaaatctcttcacctctgtgatgaccatggaatacagaaccttagaactcaacatcatatccgcaaaggacatcaagaacgttaacctcttctccaagatggacgtatacgccgtcgttacgctctccggcgaccctctccaccctcagggcgccaccacccacgtccacaaagacgccggcag

SEQ ID NO: 144291 - DNA, 240 bp, Glycine max
ctcgagccggtctcttgatgatgttgaaactcctaaaggttctatgttggatcttaaaatttctcaatctaaaattgcacttcccaagaacacagttggaggaaccattctgcgtagtgatctattggcaaattttttgacagagggcaattttagagcaagtgttgatttgcagcgcactcatcgtattaaaggaatgattaaaatggtggccagttggtattcctgagaatacaggta

SEQ ID NO: 144292 - DNA, 228 bp, Glycine max
ttttacacttgaacaaaggctcatgtcccttctccaagcactaatgagatggattcatcaaaactgaagaaggaatttcctgagctgttgcctgtcaaggactcattgatcaaatatgtgtttgagccagaaaagaaaagcttggggttttgagtagcataattaaccatatataaatgtatacatttcggtctctatcattttattttcccgtttttggttagtttg

SEQ ID NO: 144293 - DNA, 258 bp, Glycine max
gtcaacttaacaccaatgacaaaatgtgtgcatatgggctcaatcctggtatttcaggttctcgtcttttgggcaccattcctcagtccatttcacagcaaactgtttggaatcaaatggcaacagtgagaacaccattgaattttgattctagcaagcagagcttttgtcaattttctattgaccttctcggtggaggaattttagtggacaaaactggagattggatcacacttatacaaaattctccaattagta

SEQ ID NO: 144294 - DNA, 259 bp, Glycine max
tctcgagccgattcggctcgaggatgacaccatcaattttgaggcgtttccccacaagctgatgcagtttggagagattcaggaaaaagttgtgttgaaattttcacaagaggaatttcttacagcttggtcaactcaggtgcgtcccgcaacgactctgttggctgatgggtgcccatatttgtatgctatcgtgcatgatagttcagtgtctacaataccaggtgattttgtcattggtgttaagttgacaaccata

SEQ ID NO: 144295 - DNA, 254 bp, Glycine max
cactctctctcaccaaagccttcctagaacgaaaaaaaaaagaagagcaattttccctcaccaaagaagaagaagcaaacaatggccgatcaacttaccgatgaacagatctccgagttcaaggaagccttcagcttgttcgacaaggacggcgatggttgcatcacaaccaaggagcttggaactgttatgcgttcattggggcaaaacccaactgaggcagagctccaggacatgatcaatgaagtggatgc

SEQ ID NO: 144296 - DNA, 250 bp, Glycine max
gagcttttgtcaattttctattgaccttctcggtggaggaattttagtggacacaactggagattggatcacacttatacaaaattctccaattagtaacttgttgagagttgctgcttggaagaaaggttgtttaatggtcaagattgtgatgtctgggaatgcagcagtcaaaaggagtgattgggccttcttggtataagtgtttttaacaaacagcatcagtacagagcatttcgatgcatgtaag

SEQ ID NO: 144297 - DNA, 107 bp, Glycine max
tggtgagtaaaaatagcaaacctcaagctactgcaatgcatgtgggagctatagaaattatcattgatagtttcgcaagtcctgattgcaacatagttggtgcaatg

SEQ ID NO: 144298 - DNA, 254 bp, Glycine max
ttcatatttccggcttattttacgacggcagatacaaattctggactaaacacgagaaaaatcttgctttgacagaagaggaaaagatggaagtgattagaaatagaggcattcctgctgatgttcttgcaaagcgagctcatgaatttgaaaaacatgttgctcatgaaagcctcaaggatcaaattcctgctgttgacaagttgtattctactaaggttaataagtttgcaaaaattatgaaccttagacaa

SEQ ID NO: 144299 - DNA, 230 bp, Glycine max
ggcaacagtgagaacaccattgaattttgattctagcaagcagagcttttgtcaattttctattgaccttctcggtggaggaattttagtggacaaaactggagattggatcacacttatacaaaattctccaattagtaacttgttgagagttgctgcttggaagaaaggttgtttaatggtcaagattgtgatgtctgggaatgcagcagtcaaaggggtgattggcc

SEQ ID NO: 144300 - DNA, 245 bp, Glycine max
ggcccaacatcctcccatggaaacatcaagtcatcgaatatccttctcaccaaaacttttgaagctcgtgtctctgactttggccttgcttaccttgctctcccaacctctacaccaaaccgtgtgtctggttaccgtgcgccagaggtcactgatgcacgcaagatatcccaaaaggccgatgtctatagctttggtatcatgcttttggagctgcttacagggaaggctcctactcattcttc

SEQ ID NO: 144301 - DNA, 256 bp, Glycine max
aatcaaacttcatggcatttgagtttccttattgacaatcccaaacagtctacagtttttgatattctcttgggaatctctcaagattttgaaattgctggtaatactcttatgccagctttttctgttccacaggctactgccagatcttctgaaaatgcggaatcctctgcatgatctggaattcgtgttttctttcgcttgttcgtttgtttaattcaataaaggaaattaggcatgaccctcttgttgagta

SEQ ID NO: 144302 - DNA, 255 bp, Glycine max
ctttcttcaaatgattttacaggggagatacctgcatccctttcaaattgtacctatcttaatacaattagacttgaccaaaaccaactcactggtcaaattcctgctaacttgagtcagctcccgcggcttaagttgtttagtgttgccaataatcttttgacagggcaagttccaatctttgcaaatggtgtagctagtgccaatagttatgcaaataattcaggtctgtgtggtaaccccttattggatgct

SEQ ID NO: 144303 - DNA, 259 bp, Glycine max
caaggtatacagatgccaccttttctcactgctgaaattaaatataagcggaatttgagtaatattcatatttccggcttattttacgacggcagatacaaattctggactaaacacgagaaaaatcttgctttgacagaagaggaaaagatggaagtgattagaaatagaggcattcctgctgatgttcttgcaaagcgagctcatgaatttgaaaaacatgttgctcatgaaagcctcaaggatcaaattcctgctg

SEQ ID NO: 144304 - DNA, 255 bp, Glycine max
ggatcacacttatacaaaagtctcaacaagttactaattggagaattttgtataagtgtgatccaattagtaacttgttgagagttgctgcttggaagaaaggttgtttaatggtcaagattgtgatgtctgggaatgcagcagtcaaaaggagtgattgggagctcattggtacaagtgtttttaacaaacagcaacagtacagagcattttgatgcatgtaagtggacaaaatcagaaccacattcctgggaa

SEQ ID NO: 144305 - DNA, 176 bp, Glycine max
tgaaattttaataaaccgcgatcacaggttgccgcaccttaaaaccggaaacaaaagcaatcgttacttgatttcaagaatttctcaatttcttcctacttctttgtgtacgatttcttaagggaaagaaaatcactctctgtgctggtcacagacttcgtgaatcattttctttt

SEQ ID NO: 144306 - DNA, 250 bp, Glycine max
caaatcaccagacaatagcttcagttgcaagaactcatctacagcaacagtggaagatttcacctattctggcataaagtctcctgggaacttcaagcaaactggattctcttctatggcagtgaattcgaatgtctttccgggtttgaacactcttggtgtgtcatttgtgcgagcagattttggtgttggcggcgtcaatgtgccacacttccatccaagagcaacagaggttgcttttgtgctggaa

SEQ ID NO: 144307 - DNA, 253 bp, Glycine max
tctcgagccgaatcggctcgagggacctattgtgctctagatccaccaaatccttttgtgtaaaatacgtgcatgggaacactgactttgcaccagctcctccccctatagaaagaggcattctcttaacactaggggaagtgccctgagggaaagtatgttttcccatccacctatttaacacaaaaggattttgtggatttaaaacacaataggtcctgggaacacattcctgagaggaaataaaccaatc

SEQ ID NO: 144308 - DNA, 253 bp, Glycine max
cgagattccccctaaacccgtttgcgttgttgtttgcgaagaaatggcgactaagaggagcgtgggaacgttgaaggagggtgatttgaaagggaagagggtgttcgtgagggtcgatctgaacgtgcctttggatgacaaccttaacatcaccgatgacactagagtccgtgctgctgttcccaccatcaagtacttaactggtcatggagccaaagtgatcctttctagccacttgggacgtcctaaaggt

SEQ ID NO: 144309 - DNA, 253 bp, Glycine max
gattgcgttcactgagagtgttgatagtcgttttgagggacttgggtggcatgttatttgggtaaagaatggaaataatggctatgatgatattcgtgctgccattaaggaagcaaaagctgtcaaagacaaacccacattgatcaaggtcacaacaaccattggttatggttctcctaacaaggctaactcctacagtgtgcatggaagtgcactgggtgccaaagaagttgatgccacaaggcagaaactt

SEQ ID NO: 144310 - DNA, 257 bp, Glycine max
gagcgtgcatttggtatgttcaaaactgatcgcaccgtgtcgtacgacgttggattaaccaagtctagccagcagactccatcaactagtccaacaactccagcacctaaaactgctggatggtgtatacccaaagctggagtttctgatgctcagttgcaggccaatattgactacgcctgtagccaaggtatagattgcgggccaattcaaccaggaggcgcttgttttgagcctaacacagtagcatcccatgc

SEQ ID NO: 144311 - DNA, 223 bp, Glycine max
gagttactggcatgtgtatgatcctgacaagtttcagatgtttgacaacagtgaaataggtctttattctaatcccactttggaagatatcccacattcagcttgggaccttttttgctgggacagtgagaaaactttgccaaataatttttctgcagaattgctctcttgcaaattggatactgttactggccaatattatcctgagtgggctccaattaat

SEQ ID NO: 144312 - DNA, 179 bp, Glycine max
aattttaataaaccgcgatcacaggttgccgcaccttaaaaccggaaacaaaagcaatcgttaattgatttcaagaatttctcaatttcttcctacttctttgtgtacgatttcttaagggaaagaaaatcactctctgtgctggtcacagacttcgtgaatcattttcttttccacac

SEQ ID NO: 144313 - DNA, 245 bp, Glycine max
atgcttcattgataccatatgttgagccagttgtgcaagctcaaagtgctgaagtttactttgacttcttccctgtggaggttgatagtcaagagggagttgctcacattggtgaattgaaatctggtgtctatgttccactgcctacaagaacgaatttgatggaaactcccaaggaatggcaactggatctaccttgtgacaaaattcctagtgtcttgactaacactgatgagagattggta

SEQ ID NO: 144314 - DNA, 202 bp, Glycine max
atcagggctcaccgacgaccagatttctcatccatgaatgaacccaacaagtccttgtaatcaatcatggatgagaaatcagggctcaccgacgaccatatagcggataatgttattggcgtcattttcgcagctcgtgacaccaccgccagtgtgctgacgtggatcgtcaagtacctcggtgaaaaccccagtgtcctag

SEQ ID NO: 144315 - DNA, 248 bp, Glycine max
tctagactcttctttttctctaagtctaaggggtgccctgagatcactttgagcaatggtgaaggctgtggcagttcttggcagcagcgagggtgtcactggaactattttcttcactcaggagggaaatggtccaaccaccgtaactggatctcttgctggtcttaagcctggtctccatggcttccatgtccatgccttgggggacactaccaatggttgcctgtcaactggagcgcatttcaatc

SEQ ID NO: 144316 - DNA, 248 bp, Glycine max
ctcgagccgtctttttacttcccctatggctcgtcactccttgctcttagccctcctcctcttcgccgccgtggccaccgccgcgatggcggtggcgcgtccgacgccgacgacatcctgatccgtcaggtggtgccagatgttggcgaacgaagaggaggacaacctgctgaacgccgagcaccacttcgcgagcttcaaggccaagttcgccaagaagtacgccaccaaggaggagcacgatcatc

SEQ ID NO: 144317 - DNA, 248 bp, Glycine max
aaaaactgtagactgtttgggatattctcttgggaatctctcaagattttgaaattgctggtaatactcttatgccagctttttctgttccacaggctactgccagatcttctgaaaatgcggaatcctctgcatgatctggaattcgtgttttctttcgcttgttcgtttgtttaattcaataaaggaaattaggcatgaccctcttgttgagtatgctctgcctatctgaaaatttccacacctct

SEQ ID NO: 144318 - DNA, 238 bp, Glycine max
catgaatatgtcaagccttactttagtggttctaaattgaaaagctttctagctggtcataatatcaccattactgatggtattgacaaaactagtgcaactttgcaatttagaaagttagcagattgtgattttctcaagagaaactttaagcagatgtctaatgttttatgggtggctcctgaggacaaggcgagtttatggtcaccaattcattaagtttcgtgcaataatctgg

SEQ ID NO: 144319 - DNA, 254 bp, Glycine max
ggaaagccctggtcaatgcagatggtattatagagaaaacattcttgtggggtaggtactctatggaaatgtccgctgtcatttacaaggactgggttttcactgatcaagcattacctaatgatcttgtaaagagaggagttgctgttaaggacccatctgctccccatggagttcgtcttttgattgaggactatccttatgcttctgatgggctagagatatgggatgccatcaagtcctgggtgcaagaa

SEQ ID NO: 144320 - DNA, 250 bp, Glycine max
atttttgttgcgcctttcagaggcggaaggcccattcgggtggttacatttccgaataccattgtgcagattgaaccagacatgaattcaaggtttcagcttttgagtaccactaccaatggtgattttgttcaagggaaagatctcgcaatggttaaagttaatgtagcatgtgctgctgttggcttgatatcaagttacactccaactccattgttggaatctggtttgcaaaaagacagagggttaa

SEQ ID NO: 144321 - DNA, 248 bp, Glycine max
  unsure (1)..(248): unsure at all n locations
ggagatcaggcacagtcaatgagtggaaatggcgctatggcatttgatgtagagtacgcacgatggttagaagagcataatagacaaaccantgagctaatggctgcaataaattctcatgctggagatattgaacttcgnaccattgttgacantttcatgacacaatttgatgatatcttcaggctgnaaggtattgcagcaaaagctgangttttccncattcngtcaggnangtggaagactcc

SEQ ID NO: 144322 - DNA, 250 bp, Glycine max
gatgaagtgatactgagcgagttggaagatgagaagcctaaggaagtggacatgctccctgcatcagagaggcagaaacgtatcgcgcacttgcaacaaagactgctccaagcagctgcagaaggagcagtgagggttaagagaaggagaggaccacacagaggggaagatttcaccttgacacaagcattgatcaaagcagacttttggcttcttttcatttccatgatcatgggttctggatccggat

SEQ ID NO: 144323 - DNA, 248 bp, Glycine max
tgcttatagggtgagccgagcttccatttatttgggttcatagtatgcattgcagctactgcggcacgtgacttaaaatctgtgttacaaggaattttgctttcttctgaaggagagaagttgaattctatgaaccttcttctttacatggctccaattgctgttgttttccttcttcctgctacacttataatggaagaaaatgtggtaggtattacattggctcttgccagagatgatgtgaagat

SEQ ID NO: 144324 - DNA, 238 bp, Glycine max
cacttatacaaaattctccaattagtaacttgttgagagttgctgcttggaagaaaggttgtttaatggtcaagattgtgatgtctgggaatgcagcagtcaaaaggagtgattgggcctcattggtacaagtgtttttaacaaacagcaacagtacagagcattttgatgcatgtaagtggacaaaatcagaaccacattcctgggaattaatcttcccaatagaggtatgtggtcc

SEQ ID NO: 144325 - DNA, 257 bp, Glycine max
agaagtcatcttagcatttggaaatttggctgatgacaccatcaattttgaggcttttccccataagctggtgcagtttggagagattcaggaaaaagttgtattgaaattttcacaagaggaatttcttacagcttggtcaactcaggtgcgtcctgcaacaactctgttggctgatgggtgtccatatttgtatgctatggtgcatgatagttcagtgtctacaataccaggtgattttgtcattggtgttaagt

SEQ ID NO: 144326 - DNA, 249 bp, Glycine max
aaaaactgtagactgtttgggatattctcttgggaatctctcaagattttgaaattgctggtaatactcttatgccagctttttctgttccacaggctactgccagatcagctgaaaatgcggaatcctctgcatgatctggaattcgtgttttctttcgcttgttcgtttgtttaattcaataaaggaaattaggcatgaccctcttgttgagtatgctctgactatctgaaaatttccacacctctt

SEQ ID NO: 144327 - DNA, 244 bp, Glycine max
tctcgagccgaatcgctcgagcggcaaatcagaatgcatacttcaaacgattattttatgcaacttctactgcagctaccgctatgagtaatctgataccggcattaacgtttgtaattgcagcaattgcgggatttgagaaagttgacataagcttaagaagcacggccaagatattagggacagtttgttccgtggctggagccttaaccatggcattggtcaaaggacagaagctgttaca

SEQ ID NO: 144328 - DNA, 243 bp, Glycine max
gctgaagcctcttctgaagaggatttctctggcaaagttggtcagtcaactgttcttagaattacaggacttggatcaaaaagggttggattgattggtcttggtcagtcaccttccactcctgcaccttttaagagtactggcgaggccattgtggcggctgccaagtcttctcaagcaagcagtgttgctgttgctcttgcctcttctgaaggactctccgcacaatcaaagcttagcact

SEQ ID NO: 144329 - DNA, 243 bp, Glycine max
tacaaaagctcaatttgttagtggaaaaaccttcaaatatgatataattggtgctggttcacattcttcagaagattttcctgaaaaggaagatcaagaaaaacccaaaaagattgatgccagattgagacaaagaatagatcctcaatacaatgaggttcaggctcagatggaaacaaatttgtttaaattgtctcttgatgatgttgaaactcctaagggttccatgttggatcttaaaat

SEQ ID NO: 144330 - DNA, 248 bp, Glycine max
ggctgttgcattcttttttctcaccttcttttttatgatcccaattgcaattgtacaaggtcttgcaagtattgacggaatccagaaaagagcgccatggttgaatcctcttattgaaattcctttcattaagtcattcattcaaggttttctaccgggtattgcattgaagctttttctcatctttttgccaacaatattgatgatcatgtcaaaatttgaaggcttcggatctatttcatctctgg

SEQ ID NO: 144331 - DNA, 248 bp, Glycine max
atttcctctcaggaatgtgttcccaggacctattgtgttttaaatccacaaaatccttttgtgttaaataggtggatgggaaaactgactttcccccagggcacttcccgaagtgttaagagaatgcctctttctatagggggaggagctggtgcaaagaatgctattctcatgaatatgccaaatgctgttctttcaatgtggagatattttgttggagatctcgtctttgaagtttctaagatgac

SEQ ID NO: 144332 - DNA, 249 bp, Glycine max
ggagctcgatttgcgagatgatgggtatcaaattcagagtgttcttctggatttgataggtagaaggacagtcccgcaagtatttgtgaatggcaaacatattggtggatcagatgatctcagtgctgccgtccaaagtggtgaattgcagaaacttctcagtgcaagttgatggtgtactagagatttacgagcactgacatccttcatggataatgaagttgtcaagcttttagaagcataatatgt

SEQ ID NO: 144333 - DNA, 251 bp, Glycine max
tgaaattcccgaaagaaggttcagtggcacaattgtgggtgttggagataataaatcatcgtcggtctggcctgattctgagtggcgatcattaaaggtgcaatgggatgaaccatcctcaattttgcgtcctgacagagtttcatcatgggaattggagccacttgtgtctaccactcttgcaaactcgcagccaacccaaagaaacaagagggcacggcctctcattctaccttctacaatgcccgatt

SEQ ID NO: 144334 - DNA, 236 bp, Glycine max
caaaagcaatgactatgtcatttaatccaaacccgtgttctgatgcatggagtttggaatttctgaagcgtaccggatttcattgtgatatcatttgtgtcactggatggactgccaccccaatgcaggatgttcaggttacaattgattggtttatttcctctcaggaatgtgtccccaggacctattgggtttaaaatcccaaaatccttttgtggtaaataggtggatgggaa

SEQ ID NO: 144335 - DNA, 252 bp, Glycine max
gagaatggctcccaagggtttaatctttttggctgtgttatgcttctcagcactgtcactgagtcgttgtcttgcggaggataatggacttgttatgaacttctacaaggaatcatgccctcaggctgaagacatcatcaaagaacaagtcaagcttctctacaagcgccacaagaacactgctttctcctggctcagaaacatcttccatgactgtgctgttcagagttgtgatgcttcactgttgctgga

SEQ ID NO: 144336 - DNA, 246 bp, Glycine max
caccggcgggtgctcgtactgctactgtcatgcctagaagggcggcggtcatcgtgtcggcggcgacggcggagacgccgaagaagaagggcgaatcgaaagggttcgtggaagagatgaggttcgtggcgatgaggctgcacacgagggaccaggccacggagggcgagaaggaggtcaagcagcccgaggagaaagccgttaccaagtggggacccatcggtcgaagggtaactgaaatttctt

SEQ ID NO: 144337 - DNA, 245 bp, Glycine max
aaacaatatgtgtgcatatgggctcaatcctggtatttcaggttctcgtcttttgggcaccattcctcagtccatttcacagcaaactgtttggaatcaaatggcaacagtgagaacaccattgaattttgattctagcaagcagagcttttgtcaattttctattgaccttctcggtggaggaattttagtggacaaaactggagattggatcacacttatacaaaattctccaattagtaact

SEQ ID NO: 144338 - DNA, 247 bp, Glycine max
gtcggtgaaggagtgcgagcaccacaaggggaagaagaggaagatcttccggcaagtgttctggtgcttagtggtgttccttttcatcgtgctggtcacaattcttttgatatgggcaatccttagacccaccaaacccaccttcacgctccaagacgtcaccgtctacgccttcaacgccaccgtggcgaacttcctcacttcgaattttcaggtcacgctcatctcgcgtaacccgaacgaccgc

SEQ ID NO: 144339 - DNA, 252 bp, Glycine max
tctcgagccgattcggctcgagattgctggtaatactcttatgccagctttttctgttccacaggctactgccagatcttctgaaaatgcggaatcctctgcatgatctggaattcgtgttttctttcgcttgttcgtttgtttaattccataaagggaattaggcaataacctcctgtttgagtatgctctgcctatctgaaaatttccacacctcttttaattgtcgtaatgatgtgtgaagtgtgtgtt

SEQ ID NO: 144340 - DNA, 249 bp, Glycine max
taatttttctgcagaattgctctcttgcaaattggatactgttactggccaatattatcctgagtgggctccaattaattgtcgagttcatcgacaaccaattcacatcactgaaggaaattatgtcagaaagcaagatgtcagcattgaatatgatgcatgtacaattccaaatgattgtcgttcattggttgttgccaaggttggaaatcacaaacaaattgttggtttccatgttgctggaagcaa

SEQ ID NO: 144341 - DNA, 256 bp, Glycine max
cctagatgaagaaattctttctaaggttgcacaagatatggttgaggaatggtttgattgtgttgatgaggaggattcctttgaggaagtttctttaagtgcagcactcaatggtgttgagggtttggactatatggaaagaattcctcttgccacatctgagggttttcctcatgtgctttcacgtaaaaatggtgaaaaaggcaagaggagatttgtttctggggatggtgaagagatgacattgattccggga

SEQ ID NO: 144342 - DNA, 254 bp, Glycine max
caccggcgggtgctcgtactgctactgtcatgcctagaagggcggcggtcatcgtgtcggcggcgacggaggagacgccgaagaagaagggcgaatcgaaagggttcgtggaagagatgaggttcgtggcgatgaggctgcacacgagggaccaggccagggagggcgagaaggaggtcaagcagcccgaggagaaagccgttaccaagtgggacccatccgtcgaagggtacctgaaatttcttgtggacagt

SEQ ID NO: 144343 - DNA, 247 bp, Glycine max
agatgacattgattccaggaaccagtgttgaagaggcttacaacaagctaatagttgaacttgagaaaagtgttcctacattggttggcattgaatgtcccaaggatgagaaacttcctcgtcgcaaaatttttgacaaacctaagacgcgctgcttcactattctccctatggagtttaatcttgtggtccgtcaaaagtttttaaattttgtgaggttcattatgaagaaaagggacaagcttag

SEQ ID NO: 144344 - DNA, 241 bp, Glycine max
caaaagtttttaaattttgtgaggttcattatgaagaaaagggacaagcttagttgtcaagttggaatcaacccatactccatggaatggactggtttggccaatagattactgagtaagggcaatgatattctgtgttgcgattatgctagttttgatggtttgattaccaagcaagttatgagcaagatggcagaaatgataaacagtctttgtggcggtgatgaaaaattgatgcgtg

SEQ ID NO: 144345 - DNA, 240 bp, Glycine max
gcttatcttgtcaatctcgtaaatgtgttacgagaattgtatttgcacagtccagaggaagctcgccaattgagaaggaaagctctctctcgtattgaatggctgacaaaagctgatgtgcctaccatagcacagattgaagagttccattcgatgcagaggatgatgaatgctcctgattcaaatgataatattgatctactgttgagcattgatttgttgggtttacaaggagcaggt

SEQ ID NO: 144346 - DNA, 245 bp, Glycine max
gtacagagcattttgatgcatgtactgttgctgtttgttaaaaacacttgtaccaatgaggcccaagtgtttttaacaaacagatccagtacagagcattttgatgcatgtaagtggacaaaatcagaaccacattcctgggaattaatcttcccaatagaggtatatcgtcctaataatggttttgaaatgtggagttctgagtgggcaaatcaaacttcatggcatttgagtttccttattga

SEQ ID NO: 144347 - DNA, 244 bp, Glycine max
gttttctttgcagtgtcggattttccgggaatccggggtggcggagctggtgtcggcgatggcggcggggtggaacgcgcagctaatcgtggagacgtggtcggaggggggagtgatagcgacgagcgtgggtttagccgtggcgagaactcacacgtgcgggaggcacgtgtgcgtggtgcccgacgagaggtcgagggcggagtacgcggagagaatgggggaggcggggatgtcgccggag

SEQ ID NO: 144348 - DNA, 132 bp, Glycine max
ggttgccgcaccttaaaaccggaaacaaaagcaatcgttacttgatttcaagaatttctcaatttcttcctacttctttgtgtacgatttcttaagggaaagaaaatcactctctgtgctggtcacagactt

SEQ ID NO: 144349 - DNA, 244 bp, Glycine max
caaagcattgaattcaaaaacttaagttcattccttgtgttttgctttcttcctcaaaaccaaacatgtcgaacacatgcggcaactgcgactgcgctgacaagactagctgcaccaagggaaacagctatggtgttattgtagagactgagaagagttacatcgagactgttgtcatggatgttccagcagctgagcatgatgggaagtgcaagtgtggcactaactgcacttgcacggactg

SEQ ID NO: 144350 - DNA, 235 bp, Glycine max
tgcttggactcatctgaagagcatcaaggttgcactgagcggacagaaaaccttattcttgcatcagatcctgatcgtgagggggaggctattgcttggcacatcattgagatgttacaacaacagggtgctctacatgataatatttctttagcaagagtagtctttcacgaaataactgaaatatctataaaaggttccacacaacatacgagatagctataggtggatgtgc

SEQ ID NO: 144351 - DNA, 239 bp, Glycine max
tctcgagcgattcggctcagattgctggtaatactcttatgctagctttttctgttcatcaggctactgccagatcttctgaaaatgcggaatcctctgcatgatctggaattcgtgttttctttcgcttgttcgtttgtttaattcaataaaggaaattaggcatgatcctcttgttgagtatgctctgcctatctgaaaatttccacacctcttttaattgtcgtaatgatgtgtga

SEQ ID NO: 144352 - DNA, 238 bp, Glycine max
tgctgcacgtcagttaatgaagtaatctgccatggaattcctgatgcaaggaagcttgaggatggtgacattgtaaatgttgatgtcactgtgtactataaaggtgttcatggtgatctcaatgaaacatactttgtgggaaatgttgatgaagagtctcgccaactagtaaaatgcacatatgagtgcctggagaaggcaatatccattgttaaacctggggtacgattccgtgaaa

SEQ ID NO: 144353 - DNA, 230 bp, Glycine max
ggcatttgatgtcaaagttactcctgaggctagggaattggcagatgaattgggagtgaagatatttattgctgatatcatttatcatctgtttgaccaatttaaagcttatattgacaacattaaggaggagaaaaagagagaagctgctgatgaggcagtcttcccatgtgttatgagtatcttaccaaattgcattttcaacaagaaggacccaattgttttgggag

SEQ ID NO: 144354 - DNA, 235 bp, Glycine max
gtgaccataaactggaaatgcaagaagcttatcttgtcaatctcgtaaatgtgttacgagaattgtatttgcacagtccagaggaagctcgccaattgagaaggaaagctctctctcgtattgaatggctgcaaaaagctgatgtgcctaccatagcacagattgaagagttccattcgatgcagaggatgatgaatgctcctgattcaaatgataatattgatctactgttgag

SEQ ID NO: 144355 - DNA, 166 bp, Glycine max
attttaataaaccgcgatcacaggttgccgcaccttaaaaccggaaacaaaagcaatcgttacttgatttcaagaatttctcaatttcttcctacttctttgtgtacgatttcttaagggaaagaaaatcactctctgtgctggtcacagacttcgtgaatcattt

SEQ ID NO: 144356 - DNA, 246 bp, Glycine max
catggcttatttctctttcaccaggaacatcttacaagggaaacctattaccgtttaccgcggtaaaaaccatgtcgacctggctagggatttcacctacattgatgatattgtgaagggttgcgtcgggtcgttggatacttcggctaagagtaccgggtcgggtgggaagaagcgtggacccgctccgtatagaatatttaacctggggaatacttcgccggttactgttcctactcttgtgag

SEQ ID NO: 144357 - DNA, 240 bp, Glycine max
cttttgcttccttaacctattttgttatcctcaattttcaatggctcaatcccattctggaaaaacctcttccatgacttcaatactcctcctgtttatgcttcttatcagtaatacaggcacaacaggtgcacaatctggtgtatgctatggaagagttggcaacaatctgccatcgccacaagaagtagtttccctttttaaacagtacggcttccaaaggatgagaatctatgatcg

SEQ ID NO: 144358 - DNA, 233 bp, Glycine max
gttctttcaatgtggagatattttgttggagatctcgtctttgaagtttctaagatgacttctccctacattaaatgtacagtctctttcttcatagcatttggaaatttggctgatgacaccatcaattttgaggcttttccccacaagctggtgcagtttggagagattcaggaaaaagttgtattgaaattttcacaagaggaatttcttacagcttggtcaactcaggt

SEQ ID NO: 144359 - DNA, 235 bp, Glycine max
cacaaggggaagaagaggaagatcttccggcaagtgttctggtgcatagtggtgttcctcttcctcgtgctgctcacaattcttttgatatgggcaatccttagacccaccaaacccaccttcaccctccaagacgtcacggtctacgccttcaacgccaccataccgaacttcctcacttcgaattttcaggtcacgctcatctcgcgcaacccgaacgacaacatcggtgttt

SEQ ID NO: 144360 - DNA, 244 bp, Glycine max
tcggcttcaaccacaccattattacagcatcatcgtacggcgaccactggcgcaacttacgtcgtataagctcgctcgagattctctccaaccaccgtctcaactcctttttaggggtccgaaaggacgagaccatgaagttgcttcgaaagctggctaagggttctgataaagacttcaggagagtggagctgaggccaatgttttcggagttaacgttcaacattatcataaaaatggtgtg

SEQ ID NO: 144361 - DNA, 164 bp, Glycine max
gaaattttaataaaccgcgatcacaggttgccgcaccttaaaaccggtaacaaaagcaatcgttacttgatttcaagaatttctcaatttcttcctacttctttgtgtacgatttcttaagggaaagaaaatcactctctgtgctggtcacagacttcgtgaat

SEQ ID NO: 144362 - DNA, 237 bp, Glycine max
  unsure (1)..(237): unsure at all n locations
gaaatgcaagaaccaagcttgggattgatgggtgaggtctccggcgatcaccaccgtcagctgaaggcggagataacgactcatccgctgtacgagcagcttctggcagcacacgtggcatgcctccgtgtggccaccccgatcgaccagcttccactcatcgatgctcanttatctcagtctcaccatcttctacgctcttatgtctcacacaacactcattctctctcccctcat

SEQ ID NO: 144363 - DNA, 235 bp, Glycine max
aaggatacataaccatcaagtttcagttccaaacaaaacccatcaaagtctttctccctcagtgatcatatattcattcagttctatacaaaatcctcaaaaactcttcctctctgccatgaccatggaatacagaaccttagaactcaacatcatatccgcaaaggacatcaagaatgttaatctcttctccaagatggacgtatacgccgccgtttcgctctccggtgaccct

SEQ ID NO: 144364 - DNA, 232 bp, Glycine max
aaaaaacaattagaaagtagtagagtgtttttttttctttttttcgtttgttttacttttaagatgggtgagaagagcaacgttggcggcgacgcgattaacacgacactgcttcacgggaagtacgagctgggccggctgttaggccacggaaccttcgcgaaggtgtaccacgcgcgccacctgaagacgggaaagagcgtggcgatgaaggtggtgggcaaagagaagg

SEQ ID NO: 144365 - DNA, 234 bp, Glycine max
acatcctgcattggggtggcagtccatccagtgacacaaatgattggtttatttcctctcaggaatgtgttcccaggacctattgtgttttaaatccacaaaatccttttgtgttaaataggtggatgggaaaactgactttccctcagggcacttcccgaagtgttaagagaatgcctctttctatagggggaggagctggtgcaaagaatgctattctcatgaatatgccaa

SEQ ID NO: 144366 - DNA, 239 bp, Glycine max
cacttatacaaaattctccaattagtaacttgttgagagttgctgcttggaagaaaggttgtttaatggtcaagattgtgatgtctgggaatgcagcagtcaaaaggagtgattgggcctcattggtacaagtgtttttaacaaacagcaacagtacagagcattttgatgcatgtaagtggacaaaatcagaaccacattcctgggaattaatcttcccaatagaggtatgtggtcct

SEQ ID NO: 144367 - DNA, 244 bp, Glycine max
  unsure (1)..(244): unsure at all n locations
gaaatgcaagaaccaagcttgggattgatgggtgaggtctccggcgatcaccaccgtcagctgaaggcggagataacgactcatccgctgtacgagcagcttctggcagcacacgtggcatgcctccgtgtggccaccccgatcgaccagcttccactcatcgatgctcagtttatctcagtctcaccatcttctacgctcttatgtctcacacaacactcattntctctcccctcatcaccgc

SEQ ID NO: 144368 - DNA, 246 bp, Glycine max
atgaggttcaggctcagatggtaacaaatttgtgtaaattgtctcttgatgatgttgaaactcctaaaggttctatgttggatcttaaaatgtctcaatctaaaattgcacttcccaagaacacagttggaggaaccattctgcgtagtgatctattggcaaatttgttgacagagggcaattctagagcaagtgtcgatttgcagcgcactcatcgtattagaggaatgattaaaatggtggcca

SEQ ID NO: 144369 - DNA, 242 bp, Glycine max
atgcaccaaaaccaacttggtcatggtcttcggagaaatcacgaccaaggccaacgttgactacgagaagatagtgcgtgacacctgcaggaacatcggcttcgtctcaaatgatgtgggactggatgccgacaactgcaaggtcctcgtcaacattgagcagcagagccctgatattgctcagggtgtacacggccaccttaccaaaaaacctgaagaaattggtgctggtgaccagggtc

SEQ ID NO: 144370 - DNA, 237 bp, Glycine max
cgagaatgcctctttctatagggggaggcgctggtgcaaagaatgctattctcatgagtatgccaaatgccgttctttcaatgtggagatattttgttggcgatctcgtctttgaagtctctaagatgacttctccctacattaaatgtacagtctctttctacatagcatcttgaaatttggctgatgacaccatcaattccgaggcttttccccacaagctggtgctgtttggag

SEQ ID NO: 144371 - DNA, 237 bp, Glycine max
cttaatcctggtatttcaggttctcgtcttttgggcaccattcatcagtccatttcacagcaaactgtttggaatcaaatggcaacagtgagaacaccattgaattttgattctagcaagcagagcttttgtcaattttctatcgaccttctcggtggaggaattttagtggacaaaactggagattggatcacacttatacaaaattctcctattagtaacttgttgagagttgct

SEQ ID NO: 144372 - DNA, 233 bp, Glycine max
catagcttgaaaacacagtgcttgtttagactagtatcttccatggctccgaaagatagaatcctggttttgggacccacaggagccattggaagacacatagtttgggcaagtgtaaaggcagggaatcccacttttatattggttagggacacccctgcctctgttaacaagccaaggcttgtcactgctgctaatcctgaaaccagggaatagctcattcagagcttcca

SEQ ID NO: 144373 - DNA, 232 bp, Glycine max
ggttgtgcagcatgacgtggatgctggtgtgttgaagaaagtggtgttggctgagggagcagcggttaccgtcaaaggtgcaagatccgttagtcttcggcaacctcttgatttccctcttccgttaaaccgaacggagaatggttttgctaacggtcttttaactttggctgagcatcttcgccatgcttctagaacccagggttctccgattctctcgctgagaatcgtt

SEQ ID NO: 144374 - DNA, 231 bp, Glycine max
agatggcagaaatgataaacagtctttgtggtggtgatgaaaaattgatgcgtgaaaggacacacctgctgttggcttgttgttcaaggatggcaatttgtaagaaagatgtttggagagttgaatgtggaatcccttctggatttccgctcacagttatttgtaatagcatttttaatgagatgctcattagatatagctatgaaaaattactgcgccaggctaaagctc

SEQ ID NO: 144375 - DNA, 232 bp, Glycine max
aggagagagaaagtagcagatcctccatggcctccaccaaggaacgtgaaaacttcgtctacgtcgccaagctcgccgaacaagccgaacgctatgaagaaatggtggaagcaatgaagaatgtggcgaactaaacgtggaattgacggtagaggagcggaaccttctgtcggttgggtacaagaacgtggtgggtgctcgtagggcttcgtggaggattctttcctcgatt

SEQ ID NO: 144376 - DNA, 155 bp, Glycine max
attttaataaaccgcgatcacaggtttccgcaccttaaaaccggaatcataagcaatcgttacttgattgcaagaatttctcaatttcttccgattgctttgtgtacgatttcttaagggaaagaaaatcactctctgtgctggtcacagacttc

SEQ ID NO: 144377 - DNA, 233 bp, Glycine max
cacaagctggtgcagtttggagagattcaggaaaaagttgtgttgaaattttcacaagaggaatttcttacagcttggtcaactcaggtgcgtcccgcaacgactctgttggctgatgggtgcccatatttgtatgctatggtgcatgatagttcagtgtctacaataccaggtgattttgtcatcggtgttaagttgacaaccataaacaatatgtgtgcatatgggctcaa

SEQ ID NO: 144378 - DNA, 244 bp, Glycine max
gtttgttgttgtaactcgttcttcttcttttgttgttctgtgtttgtgtttgttttttctctcacctgaaaatgtcttgctgcggtggtaactgtggttgcggaagctcctgcaagtgcggcaacggctgcggaggctgcaagatgtacccagacttgagctacactgagtcaaccaccaccgagaccttggtcatgggagtggcacctgttaaggctcaatttgagggtgctgaaatgggtgt

SEQ ID NO: 144379 - DNA, 235 bp, Glycine max
ttacaatccttcaaaaattgtgtttctttgtgtgtgtatggtgatgataacttaattagtgttcatgaatatgtcaagccttactttagtggttctaaattgaaaagctttctagctggtcataatatcaccattactgatggtattgacaaaactagtgcaactttgcaatttagacagttagcagattgtgattttctcaagagaaactttaagcagatgtctaatgttttat

SEQ ID NO: 144380 - DNA, 234 bp, Glycine max
caccattactgatggtattgacaaaactagtgcaactttgcaatttagaaagttagcagattgtgattttctcaagagaaactttaagcagatgtctaatgttttatgggtggctcctgaggacaaggcgagtttatggtcacaacttcattatgtttcgtgcaataatctggaaatgcaagaagcttatcttgtcaatctcgtaaatgtgttacgagaattgtatttgcacag

SEQ ID NO: 144381 - DNA, 231 bp, Glycine max
cgtaaatcacattcttttttaaaatttttcatgaaaaggatatacagagatatatttctatatatcagttgtattccgaggatcaatatacaactttttcttgaattaacaaaaaaatttttaaataaatccatttacgataatgaagcaaatgcagaaagaatttataaaacaaatcaaagtataattcgctgtatttcaattttacacaaatattttcatactagaaat

SEQ ID NO: 144382 - DNA, 234 bp, Glycine max
ctggccttgatggtgttgtgaagcaatgccgtggcaagaacctcttcttcagcactgatgttgaaaagcatgtctttgaggctgacatagtgtttgtctctgtcaacaccccaaccaaaactcagggtcttggagctggtaaagcagcagatttgacatattgggagagcgcagctcgcatgattgctgatgtttcgaagtctgacaagatcgttgtagagaaatccacagtcc

SEQ ID NO: 144383 - DNA, 236 bp, Glycine max
ctcgagccgcacagaacatgagggatatgatccttttcttggtggaattcaaaaatatgacactcccatgatgcccctagatgaagaaattctttctaaggttgcacaagatatggttgaggaatggtttgattgtgttgatgaggaggattcctttgaggaagtttctttaagtgcagcacttaatggtgttgagggtttggactatatggaaagaattcctcttgccacatctg

SEQ ID NO: 144384 - DNA, 237 bp, Glycine max
atcttaataaaccgcgatcacatgttcccgcaccttaaaaccggaaacaaaagcaatcgttacttgatttcaagaattgctcaatttcttcctacttctttgtgtacgatttcttaagggaaagaaaatcactctctgtgctggtcacagacttcgtgaatgcttttcttttccactcctagtgtatgttctgaacactctcctatttgatataggacttcgtgtcagattccaact

SEQ ID NO: 144385 - DNA, 242 bp, Glycine max
gattttctcaagagaaactttaagcagatgtctaatgttttatgggtggctcctgaggacaaggcgagtttatggtcacaacttcattatgtttcgtgcaataatctggaaatgcaagaagcttatcttgtcaatctcgtaaatgtgttacgagaattgtatttgcacagtccagaggaagctcgccaattgagaaggaaagctctctctcgtattgaatggctgcaaaaagctgatgtgcc

SEQ ID NO: 144386 - DNA, 262 bp, Glycine max
acaatgatgagtttttggacgttacagttcctgaaattcagagatcttcccttgctggcagtgttctttacttaaagtcattggacctcccagatattgacattctaaaatttgactttctggatcctccatcatctgagtccttacaagatgccttgaagcagttatttctgattgatgctattgatgaaaatggtgcaattacaagtattggacagaaaatggctgagcttcccttagaaccatcattggcaaaaacttt

SEQ ID NO: 144387 - DNA, 259 bp, Glycine max
  unsure (1)..(259): unsure at all n locations
gtgatatcatttgtgtcactgggtggactgccacccnaatgcaggatgttcaggttacaattgattggtttatttcctctcaggaatgtgttcccaggacctattgtgttttaaatccacaaaatccttttgtgttaaataggtggatgggaaaactgactttcccccagggcacttcccgaagtgttaagagaatgcctctttctatagggggaggagctggtgcaaagaatgctattctcatgaatatgccaaatgc

SEQ ID NO: 144388 - DNA, 262 bp, Glycine max
gtttaaattgtctcttgatgatgttgaaactcctaaaggttctatgttggatcttagaatttctcaatctaaaattgcacttcccaagaacacagttggaggaaccattctgcgtagtgatctactggcaaatttgttgacagagggcaattttagagcaagtgttgatttgcagcgcactcatcgtattaaaggaatgatcaaaatggtggccacagttggtattcctgagaatacaggtatagcattggcctgtgctatt

SEQ ID NO: 144389 - DNA, 261 bp, Glycine max
  unsure (1)..(261): unsure at all n locations
gaagagaaaaagaactagctagcttgctagagtgtgagaactctagcatatactagtnactactacattccttcatcttccttttnattnttcaccataaaaanacaagagcacaaagatggtgagagctccttnntgtganaagatgggtttgaagaagggtccttgggctaccgaggaagatcnaattctcacatcttacatccaaaaacatggccatggcaattggcgtgccctcccaaagcaagcaggccttctaag

SEQ ID NO: 144390 - DNA, 259 bp, Glycine max
tcagaagctgtcgttgtaaatgtcacatgtggtagtggacgtggtggtttacccaccactgcttggattagttctgcagttaacaatcgctcctcagatatcaacaaaaggattcgcacagcacttgggaaaggtaagaaaattgtttttcttactagcgttgatccttttccagtagctttactggctgttctttttggtgttaagaatgaaattctgagttctaacgccactaatcctatgctgacgcgacttcttg

SEQ ID NO: 144391 - DNA, 262 bp, Glycine max
ctctgtgtatttccctacctctcccttcaagatgcagatcttcgtcaagacgctcaccggcaagaccatcacccttgaggtggaaagctctgacaccatcgacaacgtcaaggccaagatccaggacaaggaaggaatccccccggaccagcaacgtctcattttcgccggaaagcaacttgaggacggccgtacccttgctgactacaacattcagaaggagagtactcttcacctcgtcctccgtctccgtggtggcatg

SEQ ID NO: 144392 - DNA, 267 bp, Glycine max
gcaaatgtttgcttcgttaattttctcttgagacaacaggctcactgagaaaacaatttttacttgcagagatttggacatcttggttgtctattatacaatagcaactcaatttagaaaatttctaccgcattacattaggtggcatctgtataccttgttgatctacattctcccatcttttctcactgctgaaattaaatataagcggaatttgagtaatattcatatttccggcttattttacgacggcagatacaaattctg

SEQ ID NO: 144393 - DNA, 269 bp, Glycine max
cggctcgagcaaagccacagtgaacatgctgcacagagttgagccgtatgtgacttatggatacccaaatctcaagagtgtgagagaacttatttacaagagagggtatggaaagctaatgaagcagaggactgctctaactgacaactctatcattgagcaggctctgggcaagtatggaatcatatccactgaagatctgatccatgagatcatcactgttggacctcactttaaggaggctaacaacttcctttggccatttaagc

SEQ ID NO: 144394 - DNA, 273 bp, Glycine max
caagaacacagttggaggaaccattctgcgtagtgatctattggcacaatttttttgacacgagggcaattttagagcaagtgttgatttgcagcgcactcatcgtattacaggaatgattaacatggtggcccagttggtattcctgagaatacaggtatagcattggcctgtgctatgaatagttcttttagggggcgcgccagttctgatatttacaccatctgctctcaagactgtgaattatggttccttgcttgcacaaaagcaatg

SEQ ID NO: 144395 - DNA, 259 bp, Glycine max
atccggggttcaatccctctgttctggtctcaggaagcctctagatttaatataaaacctgacattatattatcaaggaaggactctaatgttgaagccacaagacttcattttgaaaatcttgtcgagagatatggaaatccaattattatactgaacttgataaagacacgtgagaagaagcctcgagaaactattctgcgagccgagtttgcgaatgctgttaggtctcttaataaaaatttgacaggcgaatatc

SEQ ID NO: 144396 - DNA, 257 bp, Glycine max
ctcaagtccaacctacccctttttcttctcccaccaacttcagcgtcctcttcctcgatcatgtctcacttcaagggcaagtaccatgatgagcttattgccaatgctgcttacattggcactcctggaaagggtattcttgctgctgatgagtcacaaggacaattggccagcggtttggccaccatcaatgtagagattgtggattccaacaggcgtgctcttagggagctgcttttcaccgctcccggtgctct

SEQ ID NO: 144397 - DNA, 259 bp, Glycine max
cgcctttctctctcttctttttactctctctctgtctctctctacgctttctcgttcgagatccctcaagggatccactaactgaaggagaaatggggttgacattcaccaagcttttcagccggcttttcgccaagaaggaaatgcgaattctgatggtgggtctcgatgcagctggtaagaccaccatcctgtacaagctcaaacttggagagatcgttaccacaattcccaccattgggttcaatgtggagactgt

SEQ ID NO: 144398 - DNA, 261 bp, Glycine max
caaaggtcttagatccagttgcatctatcaaatctaaggcagtctctgtgaaacatgaactgaaggtagaggaatatcatcagagatcggagcgtggaacctctctctctctctctctctctctgcggaaaccggaatatctcagttctctgatcagatccatccgacgtcgtttcagtgataatggctccgttcagcggcgatgagacggcaccgtttttcggcttccttggagccgcagctgccctcgtcttctcctgt

SEQ ID NO: 144399 - DNA, 256 bp, Glycine max
taaaccgcgatcacaggttgccgcaccttagaaccggttatggtagcgttcgttacttgatttcaataatttctcaattgtcttcctacttctttgtgtacgatttcttaagggatagaaaatcactctctgtgctggtcacagacttcgtgcatcattttcttttccacgcctagtttagagctcgaacactctccgatttgatataggacttcgtgtcagagttaaactttttctgtttctttctcagttctct

SEQ ID NO: 144400 - DNA, 262 bp, Glycine max
cttagatgacaaatggaaggtatacctacgcaggaaccgtgagggacaaatggatcctaaaggtgatatatgggctgccccatatcgatggggctgcatggtaatagcatacaagacaaataaattccaaaagcataaattggctccggtagaggactgggcagatctgtggcggcccgatcttgcagggaggatttcaatggttgattctccccgagaagttattggcgcagttttgaagtatatgggggcttcctacaat

SEQ ID NO: 144401 - DNA, 265 bp, Glycine max
gggatattctcttgggaatctctcaagattttgaaattgctggtaatactcttatgccagctttttctgttccacaggctactgccagatcttctgaaaatgcggaatcctctgcatgatctggaattcgtgttttctttcgcttgttcgtttgtttaattcaataaaggaaattaggcatgaccctcttgttgagtatgctctgcctatctgaaaatttccacacctcttttaattgtcgtaatgatgtgtgaagtgtgtgtta

SEQ ID NO: 144402 - DNA, 273 bp, Glycine max
cataaacaatatgtgtgcatatgggctcaatcctggtatttcaggttctcgtcttttgggcaccattcctcagtccatttcacagcaaactgtttggcatcaaatggcaacagtgagaacaccattgaattttgattctagcaagcagagcttttgtcaattttctattgaccttctcggtggaggaattttagtggacaaaactggagattggatcacacttatacaaaattctccaattagtaacttgttgagagttgctgcttggaagaa

SEQ ID NO: 144403 - DNA, 257 bp, Glycine max
tggatggaggcatctgctgttggcttgctgcgcaagggtggccattagttgggtcagaggcctggagagttgaatgtggagtgcccttctggatttccgcacacagttatttgtgatcgcattgttgacgagatgctcattagctgtagctatgagaaatgactgcgccatgcttatgctcctagtatgactgtaggatcctacaaagcttgtgcatctttgcgcgtgtatggtgttgctaacttcattagtgtcca

SEQ ID NO: 144404 - DNA, 226 bp, Glycine max
agatctgagctcgtatcaagtcgcgagcttctgttgatgcactttaaaaccgtgggctttgacgatttgtacatggaattcctgaatctctcaactccttcctactgccgcgcgcatgatctagtcatggctagtgtatctcactctgtgctggttatatactgcgagaatcagtatctttccaactccagttatagattgggtatacgcatcgatcttctaaaca

SEQ ID NO: 144405 - DNA, 257 bp, Glycine max
ttggcattgaatgtcccaaggatgagaaacttcctcgtcgcaaaatttttgacaaacctaagacgcgctgcttcactattctccctatggagtttaatcttgtggtccgtcaaaagtttttaaattttgtgaggttcattatgaagaaaagggacaagcttagttgtcaagttggaatcaacccatactccatggaatggactggtttggccaatagattactgagtaagggcaatgatattctgtgttgcgattat

SEQ ID NO: 144406 - DNA, 240 bp, Glycine max
agtttgtactattgatgtctggtgtgatgaatgtggtgtcccttctggatttccgcgcagagttatttgcaatagcattttctatgtgatgctcattagatatggctatgactaattacttcgccatgctagagctccaagtctgtgtttacaatccttcatgaatgttctttctgtgtgtgtgtatggtgatgataacttaattagtgttcatgaacatgtcaagccttactttagtgg

SEQ ID NO: 144407 - DNA, 259 bp, Glycine max
gctggtaatactcttatgccagctttttctgttccacatgctactgccagatcttctgaaaatgcggaatcctctgcatgatctggaatttatgttttctttcgcttgttcgttcgtttaattcaataaaggaaattgggcatgaccctcttgttgagtatgctctgcctatttgaaaatttccacacctcttttaattgtcgtaatgacgtgtgaagtgtgtgttattttaaaaaaaaaaaaaaaaagggcggccgcc

SEQ ID NO: 144408 - DNA, 263 bp, Glycine max
ggagcagattgcctcaatgaaggaatacattgcccgatttggccatggttcggctaaactagctcgccaggcacagagtaaggagaaaacactggcaaaaatggaacgtggtggacttgcagagaaggtggtcagagccaaagttttggtatttcgttttactcatgttgggaatcttccccctccagttctccagtttgttgaggtgtcatttggttatactcctgataatctcatctacaagaacattgactttggggttg

SEQ ID NO: 144409 - DNA, 178 bp, Glycine max
aatcgcgatcacagcttggcttaccttaaaagctgtttacgaaagcaagcgttacggtatttcaagaatttctcaatttcttccgacgtctttgtgtacgattgcttaacggatagaagatcactctctgttctggacacagacggcgggaatcattttctcttccacacaatatacg

SEQ ID NO: 144410 - DNA, 250 bp, Glycine max
atcagtgaacgaggggcacctgacaagctctgtgaccagatctccgatgctgtgctcgatgcatgcttggagcaggaccctgacagcaaggttgcctgtgaaacctgcaccaagaccaacatggtgatggttttcggagagatcacaaccaaggccaacgtggactatgagaagattgtgcgtgacacatgcaggaacattggttttgtctctgatgatgttggtcttgatgctgacaactgcaaggtcc

SEQ ID NO: 144411 - DNA, 262 bp, Glycine max
aggaaactgactttcccccagggcacttcccgaagtgttagatagatgcctctttcaatacggggaggagctggtgcaaagaatgctattctcataaatatgccaaatgctgttctttcaatgtggagatattttgttggagacctcgtctttgaagtttctaagatgacttctccctacattaaatgtacagtctctttcttcatagcatttggaaatttggctgatgacaccattaattttgaggcttttccccacaagc

SEQ ID NO: 144412 - DNA, 264 bp, Glycine max
caagcttagttgtcaagttggaatcaacccatactccatggaatggactggtttggccaatagattactgagtaagggcaatgatattctgtgttgcgattatgctagttttgatggtttgattaccaagcaagttatgagcaagatggcagaaatgataaacagtctttgtggtggtgatgaaaaattgatgcgtgaaaggacgcacctgctgttggcttgttgttcaaggatggcaatttgtaagacagatgtttggagagt

SEQ ID NO: 144413 - DNA, 268 bp, Glycine max
agcagaacctggcaaactgctgataagatgaagtcacaaagaggaccactgcagcctggtgaagacaatgacaactttcggatcaagcgttatgttgcaaagtataccataaatccagctatagcgaatggtttgtcgcaatatgttggttcagttgaggcgggtaagttggctgatcttgtattatggaagccgtcattttttggagcaaaaccagaaatggtgatcaaaggtggtgaggttgcatatgctaacatgggtgacccaa

SEQ ID NO: 144414 - DNA, 187 bp, Glycine max
gattaaatatcagcggaatttgaggcatattcttatttccggcttattttacgacggcaatacaaattctggactagatacgagagaaatcttgctttgacagaagaggaaaagatggaagtgattagaaatagaggcattcctgctgatgttcttgcaaatcgagctcatgaatttgaaaaacatg

SEQ ID NO: 144415 - DNA, 254 bp, Glycine max
tctcaaaattgatggtgtcatcaattttgaggcttttccccacaagcacgtgcagtttggagagattcaggaaaaagttgtgttgaaattttcacaagaggaatttcttacagcttggtcaatcaggtgcgtcccgcaacgactctgttggctgatgggtgcccatatttgtatgctatggtgcatgatagttcagtgtctacaataccaggtgattttgtcattggtgtcaagttgacaaccataaacaatat

SEQ ID NO: 144416 - DNA, 255 bp, Glycine max
aaggaacttatgatgctgttatagtggattcatccgatcctattggtcctgctcaagagctttttgaaaagcccttcttttcgtcagttgcaaaggctcttcgtccaggtggagttgtgtgcactcaggcagaaagcatatggcttcatatggatataattgaggacattgtggctaattgtcgccagattttttaaggctctgtcaactatgcttggactactgttcctacatacccaagtgggatgattggtt

SEQ ID NO: 144417 - DNA, 257 bp, Glycine max
aaggaacttatgatgctgttatagtggattcatccgatcctattggtcctgctcaagagctttttgaaaagcccttcttttcgtcagttgcaaaggctcttcgtccaggtggagttgtgtgcactcaggcagaaagcatatggcttcatatggatataattgaggacattgtggctaattgtcgccagatttttaaaggctctgtcaactatgcttggactactgttcctacatacccaagtgggatgattggtttt

SEQ ID NO: 144418 - DNA, 257 bp, Glycine max
catatgagaaataacagcaacgtattctttaatctacttttttttagcatacttttcactcttggctaaaatttgttgagactcaggaaattacgagtgatagtagttaaataaaaatcgagacccatgtcattttgtgaaaaaaaaaaaaaaaaaaaaaaaaaaaaaaaaaaaaaaagaaaaaaaaaaaaaaaaagaaaaaaaaaaaagaggggggggcaagaggggtagggtgtggttcccgggtgggttttggg

SEQ ID NO: 144419 - DNA, 250 bp, Glycine max
ctcggaagtctgctcgatatgccacttgcattcgttgcgagattaagctttgtagactttgacgccatcgaggtgttgtggagatttagatattctggtgtctccttctagaagggaatttcaaagatatatatgttgtcttcgaattcatgggatctgattgacatcaggtcatcaaagctaattatgatctgagtaccagaacattaccagtttgacttgtatcagcttctacgaggcttggtgtata

SEQ ID NO: 144420 - DNA, 253 bp, Glycine max
atcaccgaaacccttcttccattaccggcgaacgaactcggtggcagaaaaggaacaacctcgattcccaaatcgtaaaatccgatgacgaccgctgcaagacccacatgggcacctgctaaaggtggcaatgaacaaggcggtactcgaattttcggtccctcacaaaagtactcttctagggacatcgcatcgcacaccactctcaagcccaggaaggaagggcaggacactcaggctgaattaaagagaa

SEQ ID NO: 144421 - DNA, 259 bp, Glycine max
actgcctcctcaacgtcgccgaccaccgttcagctctagtgatcagcagcaatggggggggaaagtggcaaaggcagcttatgatgcaaagatgctgaagcttctgaaagagtacagtcaggtgctggtggtttcatcagacaatgtgggttccaaccagcttcagggcatacggaggggacttaatgctgattcggtggtggtgatgggaaagaactccatgatgaaacgctctatcatcttggatgctcagaagact

SEQ ID NO: 144422 - DNA, 250 bp, Glycine max
tctgaggttcattctgaagccaagggacaagcctagttgtcacgtttgtatcgtcccatactccatggaatggtctggttttgccaatagattactgagtcagggcgatgatattctgtgctgagattatgctagttttgatggtctgattaccaagcacgctatgagcacgctggcagttatgataaacagtctacgtcgtggtgatgaacaattgctgcgcgacaggacgcacctgctgttcgcttgt

SEQ ID NO: 144423 - DNA, 249 bp, Glycine max
  unsure (1)..(249): unsure at all n locations
ctggctcagaagtaagaccaagttaggcatggctgttccttttgatgacaacatcaactttcacaaggtgatagcttttggcattgcaattggggttgggatacatgcaattgcacatttaacgtgtgacttcccaaggttgttccacacaacatacgatccgcatnancncatgaanccattttttggagaatatangnacaacaatgactggtggttcgggaaaggaaccgagggttgtaccgggat

SEQ ID NO: 144424 - DNA, 259 bp, Glycine max
cccatatgcacacatattgtttatgggctcaatcctggtatttcaggttctcgtcttttgggcaccattcctcagtccatttcacagcaaactgtttggaatcaaatggcaacagtgagaacaccattgaattttgattctagcaagcagagcttttgccaattttctattgaccttctcggtggaggaattttagtggacaaaactggagattggatcacacttatacaaaattctccaattagtaacttgttgagag

SEQ ID NO: 144425 - DNA, 266 bp, Glycine max
  unsure (1)..(266): unsure at all n locations
gcgattgcgatggtgaaatcgaacgagaacggttctggttccgttncggtggnctccgttcctngaanaaatgttacgatatggtggaagaccgcaacactgnttctatcatccgttggagcgatggcggtgacagctttgtcatctccgacatcactcaattctccgtcacgctccttcccacctatttcaaacacaacantttctccagtttcatcagacaactcaatatctatggtttcaggaaaattgatacggattgctgg

SEQ ID NO: 144426 - DNA, 254 bp, Glycine max
caaaatcagatccgcattcctgggaattaatctgcccaatagaggtatgtggtcctaataatggttttgaaatgtggagttctgagtgggcaaatcaaacttcatggcatttgagtttccttattgacaatcccaaacagtctacagtttttgatattctcttgggaatctctcaagattttgaaattgctggtaatactcttatgccagctttttctgttccacaggctactgccagatcttctgaaaatgcg

SEQ ID NO: 144427 - DNA, 173 bp, Glycine max
gcatgaccctcttgttgagtatgctctgcctaatttcctttattgaattaaacaaacgaacaagcgaaagataattaggcatgaccctcttgttgagtatgctctgcctatctgaaaatttccacacctcttttaattgtcgtaatgatgtgtgaagtgtgtgttattttaac

SEQ ID NO: 144428 - DNA, 257 bp, Glycine max
gtagcattcagtgcaacactagctagggtattgggagctctcgttgtctcggagttagggaccttacgcagccatggccactgctacgaatgccgccgccggcccaccacgccagctctcccagaaggaagctgacatccagatgatgttggccgccgacgtccacctcggcaccaagaactgcgacttccaaatggaacgttacatcttcaagcgccgcaacgacgggatttacattattaaccttgggaagacgt

SEQ ID NO: 144429 - DNA, 258 bp, Glycine max
gcaaggaaagcctgaattcactgaccatttgactcataaactaaagcaccaccctggtcagattgaagctgctgctattatggaacacattttggaaggaagctcttacgtgaaagctgctaagaagttgcatgagattgatcctttacaaaagcctaaacaggaccgttatgctcttaggacttcaccacaatggcttggtcctctaattgaagtgattagattctctaccaagtcaattgagagggagattaactc

SEQ ID NO: 144430 - DNA, 258 bp, Glycine max
tgtcaattttctattgaccttctcggtggaggaattttagtggacaaaactggagattggatcacacttatacaaaattctccaattagtaacttgttgagagttgctgcttggaagaaaggttgtttaatggtcaagattgtgatgtctgggaatgcagcagtcaaaaggagtgattgggcctcattggtacaagtgtttttaacaaacagcaacagtacagagcattttgatgcatgtaagtggacaaaatcagaa

SEQ ID NO: 144431 - DNA, 260 bp, Glycine max
ctcagcgatggtgttggatccgccggccttcctcccgtcgacaaagtccgcctacctccaaggcggcgacgccacggccttcgatgaggaagatctctacagccgcctcaaatccctagtgcgtcactcgagttcgtcgacatccaggaggagtatgtgaaggacgaactgaagaatctcaggcgcgagctcctccgcgcgatggaggaggtgaagcggatccagtcggtgccgctcgtcataggccagttcatggagat

SEQ ID NO: 144432 - DNA, 261 bp, Glycine max
ggattacaaggatggcaaatactctcaagttgtgtctaatgctcttgatatgaagctcagggatgatcttgagagactcaagaaaatcagaaaccaccgtggtttgaggcattactggggccttcgtgtccgtggtcagcacaccaagactactggccgtaggggaaagactgttggtgtctctaagaagcgttaagctattatgtttggcttggagattagattttgttgagaaggaaagtttgaagtacactagacatg

SEQ ID NO: 144433 - DNA, 267 bp, Glycine max
gcactttgacttcttccctgtggaggttgatagtcaagagggagttgctcacattggtgaattgaaatctggtgtctatgttccactgcctacaaaaaccaatttgatggaaactcccaaggaatggcaactggatctaccttgtgacaaaattcctagtgtcttgactacaactgatgagagattggtaggcacagaacatgagggatatgatccttttcttggtggaattcaaaaatatgccactcccatgatgcccctagatga

SEQ ID NO: 144434 - DNA, 268 bp, Glycine max
caattcttcagggtctttgcttgtagaaatgccactgcacatgaagaggcgatgctagccatcggagcccttgcctactcgattggccatgagtttgccaagtacatgccagaattttacaagtttctcgagatggaccttcagaactttgaggagtaccaagtttgtgctgtcactgttggtgtggtaggggacatatgcagggcattggaggaaaaaatactgccctattgtgatgggattatgacacaacttctcaagaatttgt

SEQ ID NO: 144435 - DNA, 265 bp, Glycine max
acatggtcaccttcttcttctactgtgttgtgattccccttacaatcttggtcccagaggttcatgttccaatctggggagctgtttatattccttctgtcatcaccattctcaattcagttggaacaccaaggtccattcaccttctgttctattggatcctctttgagaatgtgatgtctttgcatcgtaccaaggcaacatttataggtctcttagagtatgggagggctaatgaatgggttgtgactgaaaaacttggtga

SEQ ID NO: 144436 - DNA, 268 bp, Glycine max
caacagcacaaagcgggttactgtctgttcaagctaccatctctctctctctttcttagtgcctccttgccagaagttaaaatggcccaagaaactttcctattcacatctgaatcagtgaacgaggggcaccctgacaagctctgtgaccagatctccgatgctgtgctcgatgcatgcttggagcaggaccctgacagcaaggttgcctgtgaaacctgcaccaagaccaacatggtgatggttttcggagagatcacaaccaagg

SEQ ID NO: 144437 - DNA, 269 bp, Glycine max
tctcaattgagaaagcgaaacgcatagaatcgaaagaggggaaaagaaaaagaaaagttagggttagggattttgagagatggcatcgactaagaagatcaccctgaagagttcggacggtgaggccttcgaggtggaggaggcggtggcgctggagtcgcagacgatcaagcacatgatcgaggacgactgcgccgacagtggaatccctctccccaatgtcaccagcaagattctggcgaaggttatcgagtactgcaagaagcacg

SEQ ID NO: 144438 - DNA, 269 bp, Glycine max
tcgtattccacccaccacggaggctaaagccaaagatcctgcggacattgtaagtcaatcttatgaagctggagatgactaactaatgttaccgagtatgaggcaattgcaaaggaaaaattgccaaagatggtttatgactactatgcatcaggggcagaggatcagtggactttgaaggagaaccgaaatgcattctcaaggattctgttccggccgcgtattcttgttgatgtgagcaagatagacttgactgcaactgtattggg

SEQ ID NO: 144439 - DNA, 274 bp, Glycine max
caaattagttcattctctttgcgcagttccctacctctcctttcaagatgcagatcttcgtcaagaccctcaccggaaagaccatcacccttgaggtggaaagctctgacaccatcgacaacgtcaaggccaagatccaggacaaggaaggaattcccccggatcagcaacgtctcatcttcgccggaaagcagctcgaggacggccgtaccctcgccgactacaacatccagaaggagtcaacccttcaccttgtccttcgtctccgtggtgg

SEQ ID NO: 144440 - DNA, 277 bp, Glycine max
cccaagtgcacacaaaagaatggggcttcaaatcaaggaaccgctccttttcactcttgtaacaatatcacttatttcaattacaaaactcttgcattcttatttttctataccttactctccatccaatctttccattgctattgcgaccctcatttttgttctaatctcatacaaattttcctcatcctctataaaacactcttccactactctgctcccagatcctctatctgttccaatatttggtaactggctactagttggcaatgacctt

SEQ ID NO: 144441 - DNA, 283 bp, Glycine max
  unsure (1)..(283): unsure at all n locations
caaattcaacattgtctcccctggagctgatcaaaccatttacttcccccacactgaaaccagccgtaggttgacatccttccaccctgaaatcgaagaactcctttacagctcagtggagaatgaagaacacatatgtgtgctgaaggaccgcagcaagccaattatcttcaccatggcaaggttggatcgagtgaagaacatcacaggacttgtggagtggtacggtaagaacgcgaantgagggagctggtgaaccttgtggttgttgctggagacagga

SEQ ID NO: 144442 - DNA, 267 bp, Glycine max
ggcaatttgtaagagagatgtttggagagttgaatgtggaatcccttctggatttccgctcacagttatttgcaatagcatttttaatgagatgctcattagatatagctatgaaaaattactgcgccaggctaaagctccaagtatgtttttacaatccttcaaaaattttgtttctttgtgtgtgtatgtcaatgataacttaattagtgttcatgaatatgtcaagccttactttagtggttctaaattgaaaagctttctagc

SEQ ID NO: 144443 - DNA, 264 bp, Glycine max
gatctattggcaaattttttgacagagggcaattttagagcaagtgttgatttgcagcgcactcatcgtattaaaggaatgattaaaatggtggccacagttggtattcctgagaatacaggtatagcattggcctgtgctatgaatagttcttttagggggcgcgccagttctgatatttacaccatctgctctcaagactgtgaattatggaatcctgcttgcacaaaagcaatgactatgtcatttaatccaaacccgtgt

SEQ ID NO: 144444 - DNA, 263 bp, Glycine max
gttctatgttggatcttaaaatttctcaatctaaaattgcacttcccaagaacacagttggaggaaccattctgcgtagtgatctattggcaaattttttgacagagggcaattttagagcaagtgttgatttgcagcgcactcatcgtattaaaggaatgattaagatggtggccacagttggtattcctgagaatacaggtatagcattggcctatgctatgaatagttcttttagggggcgcgccagttctgatatttac

SEQ ID NO: 144445 - DNA, 262 bp, Glycine max
gcttggattagttctgcagttaacaatcgctcctcagacatcaacaaaaggattcgcacagcacttgggaaaggtaagaaaattgtttttcttactagagttgatccttttccagtagctttattggctgttctttttggcgttaagaatgaaattctgagttctaacgccactaaccctatgctgacgcgacttcttgagaactgtaagagtctcagatatctggttgatgagtgtccttttgcatttgtgaactagtatg

SEQ ID NO: 144446 - DNA, 278 bp, Glycine max
cacttaattagtgttcatgaatatgtcaagccttactttagtggttctaaattgaaaagctttctagctggtcataatatcaccagtactgatggtattgacaaaactagtgcaactttgcaatttagaaagttagcagattgtgattttctcaagagaaactttaagcagatgtctaatgttttatgggtggctcctgaggacaaggcgagtttatggtcacaacttcattatgtttcgtgcaataatctggaaatgcaagaagcttatcttgtcaa

SEQ ID NO: 144447 - DNA, 268 bp, Glycine max
caagcagattcctgttcgtccctttagacacaatgaatatgaaagatttataccagcagcttatccctattatggagcagcattttcaatgatggcaggcttcttcatcttcaccgcagttcatctatacagcaagtagatgtaaacctttgctttaaaatactgtagtctgtagtacggggttttggacttattttgagataaaaaattttgattaggcaatgatattaactgatgtttctaatttattatagatgcattacttttc

SEQ ID NO: 144448 - DNA, 253 bp, Glycine max
cttccaacgctccacctcctgcacatagccttcgccacctctgtctccggccgccgtgacctcgtcggagacattctccggctgccctccgaaactgataacgacgacaacttcaagggcacccggtgggccgtcctcctcgccggttccaatggttactggaattacagacatcaggctgatgtttgtcacgcctatcaaatattgaggaaaggtggtctgaaagaagaaaatattattgtttttatgtatg

SEQ ID NO: 144449 - DNA, 261 bp, Glycine max
aggagagaagaaaagatcatagaaagtggtgattcttcgaatattgaagagagaaatatggggttgagattgaaggagacattctacttgtcccatggagcaccaactcttgccgtagatgattcaatccctgcgtggaacttcttcaattcgtggaaggagcagtttccgacgagaccctcttccattcttattatctccgcccactgggacacccatgttcccaccgtcaacgtcgttcaccagaatgataccatctac

SEQ ID NO: 144450 - DNA, 260 bp, Glycine max
cgagaatgcctctttctatagggggaggcgctggtgcaaagaatgctattctcatgaatatgccaaatgctgttctttcaatgtggagatattttgttggagatctcgtctttgaagtttctaagatgacttctccctacattaaatgtacagtctctttcttcatagcatttggaaatttggctgatgacaccatcaattttgaggcttttccccacaagctggtgcagtttggagagattcaggaaaaagttgtgttg

SEQ ID NO: 144451 - DNA, 264 bp, Glycine max
caattttgtgaggttcattatgaagaaaagggacaagcttagttgtcaagttggaatcaacccatactccatggaatggactggtttggccaatagattactgagtaagggcaatgatattctgtgttgcgattatgctagtttttatggtttgattaccaagcaagttatgagcaagatggcagaaatgataaacagtctttgtggtggtgatgaaaaattgatgcgtgagaggacgcacctgctgttggcttgttgttcaag

SEQ ID NO: 144452 - DNA, 265 bp, Glycine max
catgttcgtgtccattcctagtgctgatgctatttacatgaagtggattctgcatgactggagcgacgagcactgcatcaagatcttgaagaactgcaggaaggcaataccagagaagacaggaaaagtcataatcgtggatcacgttcttcgacccgaaggcaacgaactcttcacagacgttggcatcgcattcgacatgatgcttctcgctcacaacgccggtggcaaagagaggaccgaagagaactggaagtggctgttc

SEQ ID NO: 144453 - DNA, 270 bp, Glycine max
aattcccccggatcagcaacgtctcatcttcgccggaaagcagctcgaggacggccgtaccctcgccgactacaacatccagaaggagtcaacccttcaccttgtccttcgtctccgtggtggcatgcagatcttcgtcaagactctcactggcaaaaccataaccctagaggtcgaaagctctgacaccattgacaacgccaaggccaagatccaggacaaggagggaatccccccagaccagcaacgtctcatcttcgccggaaagca

SEQ ID NO: 144454 - DNA, 273 bp, Glycine max
ggcctgtgctatgaatagttcttttagggggcgcgccagttctgatatttacaccatctgctctcaagactgtgaattatggaatcctgcttgcacaaaagcaatgactatgtcatttaatccaaacccgtgttctgatgcatggagtttggaatttctgaagcgtaccggatttcattgtgatatcatttgtgtcactggatggactgccaccccaatgcaggatgttcaggttacaattgattggtttatttcctctcaggaatgtgttcc

SEQ ID NO: 144455 - DNA, 277 bp, Glycine max
gaaaagatatattggacaaggttgagaaatggatgtcagcatgtgaagaagaaagttggcttgaagattataatcgggatgataacaggtataatgcaagcagaggtgcacacttaaacctcaaacgtgcagagaaagctcggatattggtcaacaaaattccagctttggtcgatacattggttgctaaaactcgtgcatgggaagaagatcatggcatgtcatttacatatgatggtgtacctcttcttgccatgttagatgaatatgccatgct

SEQ ID NO: 144456 - DNA, 262 bp, Glycine max
gtccaatgttttgtgggtggctcctgaggacaaggcgagtttatggtcacaacttcattatgtttcgtgtaataatctggaaatgcaagaagcttatcttgtcaatctcgtaaatgtgttacgagaattgtatttgcacagtccagaggaagctcgccaattgagaaggaaagctctctctcgtattgaatggctgcaaaaagctgatgtgcctaccatagcacagattgaagagttccattcgatgcagaggatgatgaat

SEQ ID NO: 144457 - DNA, 262 bp, Glycine max
ctctctctctctctcaaatctcaattcactcattcatttcccctttcttctctttctcaatttcgctttgtattgtcttcaattcagtaaaccgcaccaattccgatggcggcgtcgcggcggctccgggacctccaatcccaaccggcgaacaagatctgcgtcgactgttcccagaagaacccgcaatgggcctcggtttcctacggcgtcttcatgtgcctggagtgctccggcaagcaccgcggcctcggcgtgcaca

SEQ ID NO: 144458 - DNA, 258 bp, Glycine max
caaccttgaatgtttaccgccccgccggataaggagaaggagaaggaggatctgcgtcgcaggcactgttcatcgccatgtctcgggttgataacagaaattcctcagccaccaagcgtgctaggactgatggtagtcgtagggaagatgattggacatgccccagctgtggcaatgtcaatttctctttcaggacaacttgtaacgtgcgtaattgcactcaaccaaggccggctgatcataattcgaaatctgctg

SEQ ID NO: 144459 - DNA, 258 bp, Glycine max
ggacttgacaagagtgactactaaagagttgatagcaaaatacggccttgatgataacactatagacttcattggtcatgctttggcgcttcatagcgatgatcgctacttggctgagccagcactggacaccgtgaagagaatgaagttatatgcagagtctcttgcacgctttcaaggagggtcaccttacatatatcctttgtatggtttaggagagcttccccaggcatttgcacggcttagtgctgtttatgg

SEQ ID NO: 144460 - DNA, 173 bp, Glycine max
aattttaataaaccgcgatcacaggttgccgctccttaaaaccggttacaaaagcaatcgttacttgatttcaagaatttctcaatttcttcctacgtctttgtgtacgatttcttaagggaaagaaaatcactctctgtgctggtcacagacttcgtgaatcattttctttt

SEQ ID NO: 144461 - DNA, 255 bp, Glycine max
ctattgtgttttagatccacaaaagccgtttgggttacataggagggtgggaaaagtgaatttcgctcagggcacttcccgaagagttaagagaatgcctctttctatagggggaggagctggtgcaaagaatgctattctcatgaatatgccaaatgctgtactttcaatgtggagatattttgttggagatctcgtctttgaagtttctaagatgacttctccctacattaaatgtacagtctctttcttcat

SEQ ID NO: 144462 - DNA, 268 bp, Glycine max
ggatcacacttatacaaaattctccaattagtaacttgttgagagttgctgcttggaagaaaggttgtttaatggtcaagattgtgatgtctgggaatgcagcagtcaaaaggagtgattgggcctcattggtacaagtgtttttaacaaacagcaacagtacagagcattttgatgcatgtaagtggacaaaatcagaaccacattcctgggaattaatcttcccaatagaggtatgtggtcctaataatggttttgaaatgtggag

SEQ ID NO: 144463 - DNA, 229 bp, Glycine max
gtttgtccttctttttgaccataaatgctgtcatgtggttcttctatggccttctcctcaaggactactacatcgcactcccaaatactcttgggtttctattcggcataatccagatggtgctgtatttgatttatagaaacgccaagccacaaggattagaggagccaacgaaggttcaggaactaaatggccatattattgacgttgtgaagccgaatcatgtaac

SEQ ID NO: 144464 - DNA, 189 bp, Glycine max
gaaattttaatataccgcgatcacaggttgccgcaccttaaaaccggaaacaaaagcaatcgttacttgatttcaagaatttctcaatttcttcctacttctttgtgtacgatttcttaagggaaagaagatcactctctgtgctggtcacagacttcgtgaatcattttcttttccacacaacatacg

SEQ ID NO: 144465 - DNA, 255 bp, Glycine max
ggaacatacaccacagtccagacaacttcaaggagccagaaaaatttgatccctcaatatttgaggctgctccaaagcccaacacttttatgccatttggcagtgggatccacatgtgtccagggaatgaattagccaagttggagattttggtcctcctacatcatctgaccacaaagtacaggtggtctgttgtgggtgcaaagaatgggattcaatatggcccttttgctcttccccaaaacggcttaccca

SEQ ID NO: 144466 - DNA, 256 bp, Glycine max
ctgggaattaatcttcccaatagaggtatgtggtcctaataatggttttgaaatgtggagttctgagtgggcaaatcaaacttcatggcatttgagtttccttattgacaatcccaaacagtctacagtttttgatattctcttgggaatctctcaagattttgaaattgctggtaatactcttatgccagctttttctgttccacaggctactgccagatcttctgaaaatgcggaatcctctgcatgatctgga

SEQ ID NO: 144467 - DNA, 188 bp, Glycine max
tgaaattttaataaaccgcgatcacaggttaccgcacgttaaaaccggaaacaaaagcaatcgttacttgatttcaagaatttctcaatttcttcctacttctttgtgtacgatttcttaagggacagaaaatcactctctgtgctggtcacagacttcgtgaatcattttcttttccacacaacata

SEQ ID NO: 144468 - DNA, 184 bp, Glycine max
ctcgagccgtgaaaatgcggaatcctctgcatgatctggaattcgtgttttctttcgcttgttcgtttgtttaattcaataaaggaaattaggcatgaccctcttgttgagtatgctctgcctatctgagaatttccacacctcttttaattgtcgtaatgatgtgtgaagtgtgtgttatttt

SEQ ID NO: 144469 - DNA, 243 bp, Glycine max
catgaacactaattaagtggttctaaattgaaaagctttctagctggtcataatatcaccattactgatggtattgacaaaactagtgcaactttgcaatttagaaagttagcagattgtgattttctcaagagaaactttaagcagatgtctaatgttttatgggtggctccaagagacaaggcgagtttgtggtcacaacttcattatgtttcgtgcaataatctggaaatgcaagaagct

SEQ ID NO: 144470 - DNA, 252 bp, Glycine max
gctttaccctgactattgccctccattttcctctgctggaggtaatggatccttggtgatcaatgattgcagcgagtatgatgttgatggggccgaagaagagctgaactttgatgtggaggaccggaagcctgaccatcttcttccatcaaacctcgggatggagagaatgaggggaaggatgccaattcagcaaccttctcatccaatgaagggagatgttgtcacaaacctagatttctgccggaagag

SEQ ID NO: 144471 - DNA, 252 bp, Glycine max
cgctcgagccgattcggctcgagccaacatggaacctttaggagttacaacatcatcaagagaccatttaaactcctaacggacccatgttggatcttaaaatttctcaatctaaaattgcacttcccaagaacacagttggcggaaccattctgcgtagtgatttattggcaaattttgtgacagagggcaattttagagcaagtgttgatttgcagcgcactcatcgtattagaggaatgattaacatgg

SEQ ID NO: 144472 - DNA, 263 bp, Glycine max
aaatcgactgagcgaaaaaggaagccccagactctcttgttagagtgcaactatggaatcagatgagattcacccggccttctcaaattagaggcaccaaccctgtgtaggatgacgagcttatgtttgtggccgccgagccatttgaggattttatcattgtcactgttgatgaccaagttggtcctaatagggaaatcttaggaagggagatcatatccgtcagaagtgtacgacccagacacgagtccaacaagaagctc

SEQ ID NO: 144473 - DNA, 251 bp, Glycine max
agacaaccaagatgtccaaatctctgccgcattacattaggtggcatgtgtataccttgttgatctacattctcccatcttttctcactgctgaaattaaatataagcggaatttgagtcatattcatatttccggcttattttacgacggcagatacaaattctggactaaacacgagacaaatcttgctttgacagaagaggaaaagatggaagtgattagaaatagaggcattcctgctgatgttctt

SEQ ID NO: 144474 - DNA, 250 bp, Glycine max
caacacgagagaaatcttgctttgacagaagaggaaaagatggaagtgattagaaatagaggcattcctgctgatgttcttgcaaagcgagctcatgaatttgaaaaacatgttgctcatgaaagcctcaaggatcaaattcctgctgttgacaagttgtattctactaaggttaataagtttgcaaaaattatgaaccttagacaaagtgttgttggtgatcttaaacttcttactgatgggaagttgt

SEQ ID NO: 144475 - DNA, 267 bp, Glycine max
ctcgagccgattcggctcgaggacctattgtgttttaaatccacaggatccttttgtgttagctaggtggatgggaaaactgcctttccctcagggcacttcccgaagtgttaagagaatgcctactttctatagggggaggagctggtgcaaagaatgctattctcatgaatatgccaaatgctgttctttcaatgtggagatattttgttggagatctcgtctttgaagtttctaagatgacttctccctacattaaatgtacag

SEQ ID NO: 144476 - DNA, 266 bp, Glycine max
tagacagggacagtgggaatctcgttaatccattcatgcgcgtcactaattagatgacgaggcatttggctaccttaagagagtcatagttactcccgccgtttacccgcgcttggttgaatttcttcactttgacattcagagcactgggcagaaatcacactcgagccgattcggctcgagctcgagccgtcaatgtggagatattttgttggagatctcgtctttgaagtttctaagatgacttctccctacattaaatgtac

SEQ ID NO: 144477 - DNA, 266 bp, Glycine max
cgacacaagaggctggatagataatgtattggggaaattggtatcagtctctggtgatccaatccagaggttgggtgcttacttgttagaggggcttagagcaaggttggaatcatcagggaatctcatctacaaatcccttaagtgtgaacaaccaacaagcaaagagctaatgagttacatgcacattttgtaccagatttgcccatactggaagtttgcatacatatctgcaaatgctgtcatccaagaaacaatggcaaatg

SEQ ID NO: 144478 - DNA, 261 bp, Glycine max
ctgtcgtaagtcctgactgcaacatagttggtgcaatgcttttggttgatacttatcataccaatcctgaaaatgtagttcgtagtatttttgttgcgcctttcagaggcggaaggcccattcgggtggttacatttccgaataccattgttcagattgaaccagacatgagttcaaggtttcagcttttgagtaccactaccaatggtgattttgttcaagggaaagatctcgcaatggttaaagttaatgtagcatgtg

SEQ ID NO: 144479 - DNA, 264 bp, Glycine max
caacaattgaaaggttttcatcatctgtgacttcaaaaactaaaatgaagggtcttttggagattctgtcttcagcttcagagtatgctcagcttccaatacgacctggagaggaagaggttgttcgtaagttaattaatcaccagaggttttcctttgaaaaccccaaggttacagatccgcatgttaaagctaatgctttgcttcaggcccatttctctaggcaatttgttggtgggaacttgcattggaccagaaggaggt

SEQ ID NO: 144480 - DNA, 268 bp, Glycine max
gccacagttggtattcctgagaatacaggtatagcattggcctgtgctatgaatagttcttttagggggcgcgccagttctgatatttacaccatctgctctcaagactgtgaattatggaatcctgcttgcacaaaagcaatgactatgtcatttaatccaaacccgtgttctgatgcatggagtttggaatttctgaagcgtaccggatttcattgtgatatcatttgtgtcactggatggactgccaccccaatgcaggatgttc

SEQ ID NO: 144481 - DNA, 254 bp, Glycine max
tctcgcgccgattcggctctaggatagctgcagtttatgtagaaaccattcaaggagaagatggaatttacagtgccacaacagaatttctacagtctctgcatagtgcttgttatgaagctggggctcttctcgctctcgatgaggttcaatgtggtttaggtagatcagggttactttgggcccatgaggcatttggtgtcttcccggatatgatgacccttgcaaagcctcttgctggaggcctacctatt

SEQ ID NO: 144482 - DNA, 263 bp, Glycine max
gatggcagaaatgataaacagtctttgtggtggtgatgaaaaattgatgcgtgaaaggacgcacctgctgttggcttgttgttcaaggatggcaatttgtaagagagatgtttggagagttgaatgtggaatcccttctggatttccgctcacagtgatttgcaatagcatctttaatgagatgctcattagatatagctatgacaaattactgcgccaggctaaagctccaagtatgtttttacaatccttcaaaaattttg

SEQ ID NO: 144483 - DNA, 263 bp, Glycine max
ctgatattgcccagggtgtgcacggccaccttaccaaaagacccgaggaaatcggtgctggagaccagggtcacatgtttggctatgccacggacgagaccccagaattgatgccattgagtcatgttcttgcaactaaactcggtgctcgtctcaccgaggttcgcaagaacggaacctgcccatggttgaggcctgatgggaagacccaagtgactgttgagtattacaatgacaacggtgccatggttccagttcgtgtc

SEQ ID NO: 144484 - DNA, 257 bp, Glycine max
gcgctgcttcactattctccctatggagtttaatcttgtggtccgtcaaaagtgtttaaattttgtgaggttcattatgaagaaaagggacaagcttagttgtcaagttggaatcaacccatactccatggaatggactggtttggccaatagattactgagtaagggctatgatattctgttttgcgattatgctagttttgatggtttgattaccaagcaagttatgagcaagatggcagaaatgataaacagtc

SEQ ID NO: 144485 - DNA, 259 bp, Glycine max
ggaaatttggctgatgacaccatcaattttgaggcttttccccacaagctggtgcaatttggagagattcaggaaaaagttgtgttgaaattttcacaagaggaatttcttacagcttggtcaactcaggtgcgtcccgcaacgactctgttggctgatgggtgcccatatttgtatgctatggtgcatgatagttcagtgtctacaataccaggtgattttgtcattggtgttaagttgacaaccataaacaatatgt

SEQ ID NO: 144486 - DNA, 257 bp, Glycine max
aattttcacaagaggaatttcttacagcttggtcaactcaggtgcgtcccgcaacgactctgttggctgaagggtgcccatatgtgtatgctatggtgcatgatagttcagtgtctacaataccaggtgattttgtcataggtgttaagttgacgaccataaacaatatgtgtgcatatgggctcaatcctggtatttcaggtactcgactttcgggcaccatacctcagtccattgcacagcatactgttttgaat

SEQ ID NO: 144487 - DNA, 256 bp, Glycine max
aatcaatcaatcttctgagagtgtttggttgaaagtagcaaagatgtttcctttcgggcaaaagggtcaaaagataaaggggactatggtggttatgcagaagaatgtgttggatatcaacagcatcaccagtgttggagggatcgttgaccaaggcttaggcttcataggcagtgcagtcgatgctcttgctcttgcagccaccaaaatctccatccagttgattagtgctaccaaggctgatggtgggaaagga

SEQ ID NO: 144488 - DNA, 259 bp, Glycine max
aattttcacaagaggaatttcttacagcttggtcaactcaggtgcgtcccgcaacgactctgttggctgatgggtgcccatatttgtatgctatggtgcatgatagttcagtgtctacaataccaggtgattttgtcattggtgttaagttgacaaccataaacaatatgtgtgcatatgggctcaatcctggtatttcaggttctcgtcttttgggcaccattcctcagtccatttcacagcaaactgtttggaatca

SEQ ID NO: 144489 - DNA, 266 bp, Glycine max
atttcctctcaggaatgtgttcccaggacctattgtgttttaaatccacaaaatccttttgtgttaaatatctcgatgggaaaactgactttccctcagggcacttcccgaagtgttaagagaatgcctctttctatagggggaggagctggtgcaaagaatgctattctcatgaatatgccaaatgctgttctttcaatgtggagatattttgttggagatctcgtctttgaagtttctaagatgacttctccctacattaaatg

SEQ ID NO: 144490 - DNA, 266 bp, Glycine max
taaaatttctcagtctaaaattgcacttcccaagaacacagttggaggaaccattctgcgtagtgatctattggcaaattttttgacagagggcaattttagagcaagtgttgatttgcagcgcactcatcgtattaaaggaatgattaaaatggtggccacagttggtattcctgagaatacaggtatagcattggcctgtgctatgaatagttcttttagggggcgcgccagttctgatatttacaccatctgctctcaagact

SEQ ID NO: 144491 - DNA, 263 bp, Glycine max
tttgacttcttccctgtggaggttgatagtcaagagggagttgctcacattggtgaattgaaatctggtgtctatgttccactgcctacaatagctaatttgatggaaactcccaaggaatggcaactggatctaccttgtgacagaatgcctagtgtcttgactacaactgatgagagattggtaggcacagtaacatgagggatatgatcctcttcttggtggaattcagaaatatgccactcccatgatgcccctagatg

SEQ ID NO: 144492 - DNA, 262 bp, Glycine max
cctacattaaatgtacagtctctttcttcatagcatttggaaatttggctgatgacaccatcaattttgaggcttttccccacaagctggtgcagtttggagagattcaggaaaaagttgtgttgaaattttcacaagaggaatttcttacagcttggtcaactcaggtgcgtcccgcaacgactctgttggctgatgggtgcccatatttgtatgctatggtgcatgatagttcagtgtctacaataccaggtgattttgt

SEQ ID NO: 144493 - DNA, 259 bp, Glycine max
ctgtctctctctctctctctcgatcaatcatggctttgcccaatcagcaaaccgtcgattaccctagtttcaaactcgtcatcgtcggtgacggtggtacaggaaagacaacgttcgtgaaaaggcatcttaccggtgaatttgagaagaaatacgaaccgaccattggagtggaggttcacccattggatttcttcacaaactgtggaaagattcgcttctactgttgggatactgccggacaagagaagtttggtgg

SEQ ID NO: 144494 - DNA, 262 bp, Glycine max
atgaaggtttctataagacatcttggcccatccatgattcagcagatgcagcatgcctgcaatgaatgtaagggtactggagaaactatcaatgacagagatcgctgcccacagtgcaagggagagaaggttgtgcaggagaagaaagtccttgaagttattgtagaaaaggggatgcagaatgggcataagataacattccctggcgaactagatgaagcgccggacacaattactggggatatcgtctttgtccttcagc

SEQ ID NO: 144495 - DNA, 260 bp, Glycine max
aaagttagcagattgtgattttctcaagagaaactttaagcagatgtctaatgttttatgggtggctcctgaggacaaggcgagtttatggtcacaacttcattatgtttcgtgcaataatctggaaatgcaagaagcttatcttgtcaatctcgtaaatgtgttacgagaattgtatttgcacagtccagaggaagctcgccaattgagaaggaaagctctctctcgtattgaatggctgcaaaaagctgatgtgccta

SEQ ID NO: 144496 - DNA, 251 bp, Glycine max
ctgcatttttgttgcgcctttcagaggcggaaggcccattcgggtggttacatttccgaataccattgtgcagattgaaccagacatgaattcaaggtttcagcttttgagtaccactaccaatggtgattttgttcaaggaaaagatctcgcaatggttaaagttaatgtagcatgtgctgctgttggcttgacatcaagttacactccaactccattgttggaatctggtttgcaaaaagacagagggt

SEQ ID NO: 144497 - DNA, 255 bp, Glycine max
  unsure (1)..(255): unsure at all n locations
cttccangtaaaaaatcatttcccattctttgacatggcttatnaaggattttcaagtggggatcttgacaaggatgcaatagcacttcgaattttccttgaagatgggcatttgattggttgtgctcaatcttttgcaaagaacatgggattatcagaacataaagctggttgtcttaggtaagaatagtcctatatcctagtgagtagagnttcagaggcagagcatattctatgacacgtataatagaagtt

SEQ ID NO: 144498 - DNA, 263 bp, Glycine max
tatgattcaaattactgggctgaggttaccgttgcaaaccataacccacttgggaggcttgataactgtaggttgagctgggactggatgaatgatgagtttatatattcaatgaaaggggcttatccttcggttgtggatgcttctgattgtctctttggtaagcaaggaactttctatagggatcttgactttgcccttgtgttgaattgtgagagaaggccaaccataattgatctccctcccaccaagttcaatgattc

SEQ ID NO: 144499 - DNA, 261 bp, Glycine max
caatgaaagatgggaaggtgttcctttcatactaaaagcagggaaggcactaaattctagaaaggcagagataagggttcaattcaaggatgtccctggtgatattttcaagtgtaaaaagcaggggagaaatgagtgtgttatccgcctacagccttcagaagctatttacatgaagcttacggtcaagcaacctggactggagatgtctacggttcaaagtgagcttgacttgtcatatggacaacggtatcaaggagt

SEQ ID NO: 144500 - DNA, 259 bp, Glycine max
gaaattttcacaagaggaatttcttacagcttggtcaactcaggtgcgtcccgcaacgactctgttggctgatgggtgcccatatttgtatgctatggagcatgatagttcagtgtctacaaaatcacctggtattgtagacactgaactatcatgcaccatagcaggtgattttgtcattggtgttaagttgacaaccataaacaatatgtgtgcatatgggctcaatcctggtatttcaggttctcgtcttttgggg

SEQ ID NO: 144501 - DNA, 257 bp, Glycine max
gcaagtgatttcagaactgcaatggtgagtaaaaatagcaaacctcaagctactgcaatgcatgtgggagctatagaaattatcattgatagtttcgcaagtcctgactgcaacatagttggtgcaatgcttttggttgatacttatcataccaatcctgaaaatgcagttcgtagtatttttgttgcgcctttcagtcgcggaatgcccattcgggtggttacatttccgaataccattgtgcagatggaaccaga

SEQ ID NO: 144502 - DNA, 260 bp, Glycine max
attttagtggacaaaactggagattggatcacacttatacaaaattctccaattagtaacttgttgagagttgctgcttggaagaaaggttgtttaatggtcaagattgtgatgtctgggaatgcagcagtcaaaaggagtgattgggcctcattggtacaagtgtttttaacaaacagcaacagtacagagcattttgatgcatgtaagtggacaaaatcagaaccacattcctgggaattgatcttcccaatagaggt

SEQ ID NO: 144503 - DNA, 177 bp, Glycine max
ccgcgatcacaggttgccgcaccttaaaaccggaaacaaaagcaatcgttacttgatttcaagaatttctcaatttcttcctacttctttgtgtacgatttcttaaggtaaagaaaatcactctctgtgctggtcacagacttcgtgaatcattttcttttccacacaacatacgag

SEQ ID NO: 144504 - DNA, 253 bp, Glycine max
ccgcaccagtttcaccgcacgaatatcttgttgtttggagcgatccgagaaaaactctgtaaacatgttggtttaccaggacctccttacaggtgatgagcttctctctgactccttccgttacaaggaaattgagaatggaatgctgtgggaagttgaggggaagtgggttgttaaaggagcagttgatgtagacattggtgcaaacccttctgctgagggtggaggagaagatgagggagttgatgatgca

SEQ ID NO: 144505 - DNA, 123 bp, Glycine max
ggttgccgcaccttaaaaccggaaacaaaagcaatcgttacttgatttcaagaatttctcaattgcgtccgacttctttgtgtacgatttcttaagggaaagagaatcactctctgtgctggt

SEQ ID NO: 144506 - DNA, 281 bp, Glycine max
tattcggctcgagcatgttcgcaagaggagcttcttacagcttggtcaactcaggtgcgacgcgcaacgccactgctagatgattggtagtgacaccttgaactgaggttcggcggcggaggctatggctgggagccacctcgacgaggtcaagcgcatgctagaggagtaccggaggcccgtcgtcaagctcggtggatagaccctgaccatctcgcaggtcgcggcgatcgcggtccatgagcacggggtgaaggtggagctggcggagtcctccaggg

SEQ ID NO: 144507 - DNA, 257 bp, Glycine max
ttctctctgcagcaacaagatgtggaaccaaccattgggaaaaaccgatttggaaagcggttctcgcccgctgtatccgatgatgcttgagagccccgaactgcgctggtctttcatcagaaaagtatactccataatcgccatacagttgctcgtaaccatcgtcgtcggcgccgtcgtcgtcaccgtccgcccaatcagcgtcttcttcgccaccaccggcgccggattggctctctacatcgtcctcatctttg

SEQ ID NO: 144508 - DNA, 257 bp, Glycine max
gtttggctatgccactgatgaaacccctgagtacatgcccctcagccatgtccttgcaaccaaactcggtgctcgcctcaccgaggttaggaaaaatggtacctgtgcttggctgaggccagatggcaagacaccagtaactgttgagtactacaatgacaatggtgccatggttccagttcgtgtccacactgtcctaatttccacccaacatgatgagcctgtgagcaatgaccaaattgctgctgaccttaaag

SEQ ID NO: 144509 - DNA, 256 bp, Glycine max
caaatcatgggtttcttgcaagcacaagaaaatcaggtacttgtgggtgtggccgtggccgttgtagccattgggctaggtgcagtatatctctattcatccaagaagaccaaaggttgcttggacccagagaactttaaggcattcaaacttgttaagcgtgcacagctgagccataatgttgcaaagttcacatttgcactcccaacacctacatctgttttgggtcttccaattgggcaacacataagttgca

SEQ ID NO: 144510 - DNA, 251 bp, Glycine max
gccatttctttcgtcttaatttgttctcttcagccatggcgatggtgcaagatgaacgatgcgttcagaaaagctactggattgaacatacgacggacttgtccgtagagtcaatgatgctcgattccaacgcctctgatctcgacaaggaggagagacccgaagttttgtccctactaccaccatatgaaggaaaatcagttgtagaacttggagcaggtattggaagattcacagttgaattggccaag

SEQ ID NO: 144511 - DNA, 248 bp, Glycine max
  unsure (1)..(248): unsure at all n locations
tttacttaaattgcagtggtctgacaagaaggcctatcaagatacacgcttganactagcaagcttattcaagaagaattttgatggattcacgacctacaagataggaggggatcagaagttgactgaagagattgtctctgctggtcctatattctgatgagagcatttcctatttagcgaaaanaaaaatgaagtccaaaagcattcggttgattatttctacttaaaggtttcactgtatttag

SEQ ID NO: 144512 - DNA, 198 bp, Glycine max
gtattttggaaggatgtcttacgttgctcataacgttaatcagccccaagagaaagatttgttggagggaaatttttcctttgatattaaatctcgctctagattggaaaaagtttcctctacaaaagcacaatttgttagtggaaaaaccttcaaatatgacataattggtacgctggttcagcattgctatcagaa

SEQ ID NO: 144513 - DNA, 261 bp, Glycine max
aggtgtgtttatggtcacaacttcattatgtttcttgcatttccagattattgcacgaaacataatgaagttgtgaccataaactggaaatgcaagaatgttatcttgtcaatctcgtaaatgtgttacgagaattgtatttgcacagtccagaggaagctcgccaattgagaaggaaagctctctctcgtattgaatggctgcaaaaagctgatgtgcctaccatagcacagattgaagagttccattcgatgcagagga

SEQ ID NO: 144514 - DNA, 258 bp, Glycine max
gcctctttctatagggggaggagctggtgcaaagaatgctattctcatgaatatgccaaatgctgttctttcaatgtggagatattttgttggagatctcgtctttgaagtttctaagatgacttctccctacattagatgtacagtctctttcttcatagcatttggaaatttggctgatgacaccatcaattttgaggcttttccccacaagctggtgcagtttggagagattcaggaaaaagttgtgttgaaatt

SEQ ID NO: 144515 - DNA, 254 bp, Glycine max
gatgctcattagatatagctatgaaaaattactgcgccaggctaaagctccaagtatgtttttacaatccttcaaaaattttgtttttttgtgtgtgtatggtgatgataacttaattagtgttcatgaatatgtcaagccttactttagtggttctaaattgaaaagctttctagctggtcataatatcaccattactgatggtattgacaaaactagtgcaactttgcaatttagaaagttagcagattgtg

SEQ ID NO: 144516 - DNA, 255 bp, Glycine max
  unsure (1)..(255): unsure at all n locations
tgcnacantgtcagggacacggtcaagtgcaagtttccattcatcgaaaaacgaaccgagactgcatccaaggaacttgagaaaaaggcttcctctctgagaaaccttgagaggaagttctacagctcatattctatggtaggcattagccttcctgattctgcacctgacaatggacaagttttggatgcacgcgacccacttgctgagaaaaaactggaactggcaacctgnccaaaggcgtgttgaagatga

SEQ ID NO: 144517 - DNA, 248 bp, Glycine max
gaaagaattcctcttgccacatctgagggttttcctcatgtgctttcacgcagaaatggcgaagaaggcacaaggagatttgtctctggggatggtgaagagatgtcattgattccaggaaccagtgttgaagaggcttaccacaagctaatagttgaacttgagaaaagtgctcctacattggttggcattgaatgtcccaaggatgagaaacttcctcgtcgcaaaatttttgacaaacctaagac

SEQ ID NO: 144518 - DNA, 247 bp, Glycine max
caacctcctttctctctatctctagctcggatgagtgctctctctaactccagtagtagccacggcaattccttcctcaagatgcccgccatcaagtttaccaagctcttcatcaatggagattttgttgattccatatcaggaaggacatttgagactatagaccccagaaaagaagaggtaattgcaagagttagtgagggagataaagaagacattgatattgctgttaaagcagcacgtcagg

SEQ ID NO: 144519 - DNA, 246 bp, Glycine max
attttaataaaccgcgatcacaggttgccgcaccttaaaaccggaaacaaaagcaattgttacttgatttcaagaatttctcaatttcttcctacttctttgtgtacgatttcttaagggaaagaaaatcactctctgtgctggtcacagacttcgtgaatcattttcttttccattcctagtttatttgctgaacactctcctatttgatataggacttcgtgtcagatttaaacgttttctgtt

SEQ ID NO: 144520 - DNA, 254 bp, Glycine max
tgaactacaagcatggtggaaggaagctgtggagaagggtcatggtgacttaaaagaaaagccttggtggcctaaaatgcagacaactgaagatctcattcaatcatgctctattatcgtttggacagcttcggctctccatgctgctgttaattttggacaatatccttatgggggcttaatcctgaaccgtccaactctagccagaaggtttatcccagctgaaggaaccccagagtatgatgagatggtga

SEQ ID NO: 144521 - DNA, 296 bp, Glycine max
gtgggcttgaacatgctagccccctggctaccggtggaatattttcaaatggaggtgccgatgtgaacggatgggcatcacgatttcaatcagaaagacctagcttgttacagtccctcttcaacacaaagctggctgagtccacaaggtagctcatctggtattattgttaaaaagacggtcagagtagatattcctgtggacgcatatcctaattttaactttgttggtcgcctcctaggccctagaggaaattctctaaagcgtgtagaagcaagtaccgagtgtcgtgtctt

SEQ ID NO: 144522 - DNA, 256 bp, Glycine max
ttggagacagacaaacgggtaaaacagcagtagccacagatagtattctcaatcaacagggacaaaatgtaatatgtgtttatgtagctaattggtcaaaagcatcttctgtggctcaagtggtgaataccttacaagaaagaggagcaatggaatacactattgtagtagctgaaacagcggattctccagctacattacaatacgtcgccccttatacaggagcagctctggctgaatattttatgtaccgtga

SEQ ID NO: 144523 - DNA, 289 bp, Glycine max
ttggagagttgaatgtggaatcccttctggatttccgctcacagttatttgcaatagcatttttaatgagatgctcattagatatagctatgaaaaattactgcgccaggctaaagctccaagtatgtttttacaatccttcaaaaattttgtttctttgtgtgtgtatggtgatgataacttaattagtgttcatgaatatgtcaagccttactttagtggttctaaattgaaaagcttctagctggtcataatatcaccattactgatggtattgacaaaactagtg

SEQ ID NO: 144524 - DNA, 279 bp, Glycine max
agcagatgtctaatgttttatgggtggctcctgaggacaaggcgagtttatggtcacaacttcattatgtttcgtgcaataatctggaaatgcaagaagcttatcttgtcaatctcgtaaatgtgttacgagaattgtatttgcacagtccagaggaagctcgccaattgagaaggaaagctctctctcgtattgaatggctgcaaaaagctgatgtgcctaccatagcacagattgaagagttccattcgatgcagaggatgatgaatgctcctgatt

SEQ ID NO: 144525 - DNA, 288 bp, Glycine max
atataattggtgctggttcacattcttcaggagattttcctgaaaaggaagatcaagaaaaacccaaaaagattgataccagattgagacaaagaatagatcctcaatacaatgaggttcaggctcagatgcgaaacaaatttgtttaaattgtctcttgatgatgttgaaactcctaaaggttctatgttggatcttaaaatttctcaatctaaaattgcacttcccaagaacacagttggaggaaccatctgcgtagtgatctattggcaaatttttgacagaggg

SEQ ID NO: 144526 - DNA, 285 bp, Glycine max
gctcgtttgattctgatttccagtacgaatacgaaccgtgaaagcgtggcctatcgatcctttagtccttcggaatttgaagctagaggtgtcagaaaagttaccacagggataactggcttgtggcagccaagcgttcatagcgacgttgctttttgatccttcgatgtcggctcttcctatcattgtgaaccagaattcaccaagtgttggattgttcacccaccaatagggaacgtgagctggggttagaccgtcgtgagacaggttagttttaccctactg

SEQ ID NO: 144527 - DNA, 235 bp, Glycine max
ctcgagccgctttaagcagatgtctaatgttttatgggtggctcctgagggacaggcgagtttatggtcacaacttcattatgtttcgtgcaataatctggaaatgcaagaagcttatcttgtcaatctcgtaaatgtgttacgagaattgtatttgcacagtccagaggaagctcgccaattgagaaggaaagctctctctcgtattgaatggctgcaaaaagctgatgtgcct

SEQ ID NO: 144528 - DNA, 278 bp, Glycine max
tgtcgagttgttatgcattcccgttctgtgtgcatatgggctcgctcctggtatctcaggttctcgtcttctgggcacgaatcctcagtcgatttcacagttaactgtttggaatctggtggcagcagtgagagcatcattggatttggagtctagcaatcagaggttgtggcgatttcctatcgatcttctcggtggtggactattagtgggcttgactggcgattggatcgcacttatagctgggtgtcgagcgacgagcttgttgagagttgctg

SEQ ID NO: 144529 - DNA, 273 bp, Glycine max
taaattttgataaacagcgatcacaggatgccgcatcttaaaaccggtaccaagagcaatcgttacttgttctcaagaatcttcaaactttcttctgttttctctgcactcggttcttcagcaaaagaaaatccatctcctgtattgattacagacttcgtgaatcattttcttttcaactttcagttcacttgatgaacactctcctctaaatatataggacttcgtgtccgatttgaattttcctggtgctttctcggttttctttcttat

SEQ ID NO: 144530 - DNA, 286 bp, Glycine max
  unsure (1)..(286): unsure at all n locations
tgaaattttaataaaccgcgatcacaggttgccgcaccttaaaaccggaaacaaaagcaatcgttacttgatttcaagaatttctcaatttcttcctacttctttgtgtacgatttcttaagggaaagacaatcactctctgtgctggtcacagacttcgtgaatcattttcttttccacacaacatacgagcctangnaacggggatgtgctgnaaaagagatgaataatgaaaccaggctcggcggatcatatagaataaaaataaaaaaaacccccccccccc

SEQ ID NO: 144531 - DNA, 287 bp, Glycine max
caagaactactccatgaatgctgtaactgtttggacaagtctttcgttgatgcaggctacaccagttcgcgcaaagtgaactgcattggtgccctcgaactacgacttgttcggagaggaacattccagaagattcttgatcattacctaggactaggaaccgctgttagtcagtacaagacaccaagatgtgttggtcctacaaacaccagagtgttgcaaatcttgagtgaaaatgttgtcaacaactatctcagtaccgctttcaattgaataaaatttgggaa

SEQ ID NO: 144532 - DNA, 285 bp, Glycine max
ggagattggatcacacttatacaaaattctccaattagtaacttgttgagagttgctgcttggaagaaaggttgtttaatggtcaagattgtgatgtctgggaatgcagcagtcaaaaggagtgattgggcctcattggtacaagtgtttttaacaaacagcaacagtacagagcattttgatgcatgtaagtggacaaaatcagaaccacattcctgggaattaatcttcccaatagaggtagtggtcctaataatggttttgaaatgtggagttctgagtggg

SEQ ID NO: 144533 - DNA, 282 bp, Glycine max
ggaatggactggtttggccaatagattactgagtaagggcaatgatattctgtgttgcgattatgctagttttgatggtttgattaccacgccagttatgagcaagatggcagacatgataaacagtctttgtggtggtgatgaaaaattgatgcgtgaaaggacgcacctgctgttggcttgttgttcaaggatggcaatttgtaagaacgatgtttggagagttgaatgtggaatccctatggatttccgctcacagttatttgcaatagcatttttaat

SEQ ID NO: 144534 - DNA, 277 bp, Glycine max
ggtatgttagctagaggtgtagctgttggggcattcttctgtggaagtacatctgttgatcctgaacaagtggtggatattgcgtgcttgatgaatcttgattcttccttgaacgcgatgccagatcagaaccagattcatgcacttattcagcattatggtcccactgtgtactttcatcctgatgagaagtacttggcctcatcagtgcaatggttttttaagaatggagcagtttttgatgcagcaggcaataagaaaggtatagctatagatt

SEQ ID NO: 144535 - DNA, 285 bp, Glycine max
tggcaatttgtaagaaagatgtttggagagttgaatgtggaatcccttctggatttccgctcacagttatttgcaatagcatttttaatgagatgctcattagatatagctatgaaaaattactgcgccaggctaaagctccaagtatgtttttacaatccttcaaaaattttgtttctttgtgtgtgtatggtgatgataacttaattagtgttcatgaatatgtcaagccttactttagtggttctaaattgaaaagctttctagctggtcataatatcacca

SEQ ID NO: 144536 - DNA, 283 bp, Glycine max
caaaagtttttaacattttgtgaggttcattatgaagaaaagggacaagcttagttgtcaagttggaatcaacccatactccatggaatggactggtttggccaatagattactgagtaagggcaatgatattctgtgttgcgattatgctagttttgatggtttgattaccaagcaagttatgagcaagatggcagaaatgataaacagtctttgtggtggtgatgaaaaattgatgcgtgaaaggacgcacctgctgttggcttgttgttcaaggatggca

SEQ ID NO: 144537 - DNA, 283 bp, Glycine max
tccaattcaatggagaaacctcacgtagcagtggttccaagtcctggcttcacccatctggttccaattcttgagttctccaaacgccttcttcatctccacccagagtttcacatcacttgtttcattccctcagttgggtcatccccgacttcctccaaagcatacgttcaaacccttccaccaaccataacttcacttttccttcccccaatcacccttgaccatgtgtcagatccctcagtccttgcactccaaattgaactctcagtgaatctctctc

SEQ ID NO: 144538 - DNA, 258 bp, Glycine max
  unsure (1)..(258): unsure at all n locations
ctcgtctttgaagtttctaagatgacttctccctacattaaatgtagagtatctttcttcataggatttggaaatttggctgatgacaccatcaattttgaggcttttccacacaacatgggaccccttggagagatttaggagtgagttgtgttgaagttttcacaagagggatttgttacagcttggttaactcaggtgcgtccagcaacgacctgnatggctgatgggtgcccatatagtatgtatggtgcatga

SEQ ID NO: 144539 - DNA, 282 bp, Glycine max
gatttattggcaaattttttgacagagggcaattttagagcaagtgttgatttgcagcgcactcatcgtattagaggaatgattaaaatggtggccacagttggtattcctgagaatacaggtatagcattggcctgtgctatgaatagttcttttagggggcgcgccagttctgatatttacaccatctgctctcaagactgtgaattgtggaatcctgcttgcacaaaagcaatgactatgtctttaatccaaacccgtgttctgatgcatggagtttgg

SEQ ID NO: 144540 - DNA, 234 bp, Glycine max
attcttcaggagattttcctgacaaggaagatcaagacaaaccccaaaaagactgataccagaattgagacacagaatagatcctcaatacaatgaggttcaggctcagatggaaacaaatttgtttgaattgtctcttgatgatgttgaaactcctaaaggttctatgttggatcttaaaatttctcaatctacaattgcacttcccaagaacacagttggaggaaccattct

SEQ ID NO: 144541 - DNA, 278 bp, Glycine max
agtggacaaaactggagattggatcacacttatacaaaattctccaattagtaacttgttgagagttgctgcttggaagaaaggttgtttaatggtcaagattgtgatgtctgggaatgcagcagtcaaaaggagtgattgggcctcattggtacaagtgtttttaacaaacagcaacagtactgagcattttgatgcatgtaagtggacaaaatcagaaccacattcctgggacataatcttcccaatagaggtatgtggtcctaataatggttttg

SEQ ID NO: 144542 - DNA, 123 bp, Glycine max
caataaaggaaattaggcatgaccctcttgttgagtatgctctgcctatctgaaaatttccacacctcttttaattgtcgtaatgatgtgtgaagtgtgtgttattttaaaaaaaaacaaaac

SEQ ID NO: 144543 - DNA, 279 bp, Glycine max
tggacacaactttgtttacattgtctcttgatgatgttgaaactcctcaaggttctatgttggatcttcaaatttctcaatctacaattgcacttcccaagaccaccagttggaggaaccattctgcgtagtgatctattggcacattttttgacagagggcaattttagagcaagtgttgatttgcagcgcactcatcgtattaaaggaatgattaacatggtggccacagttggtattcctgagcatacaggtatagcattggcctgtgctatgaat

SEQ ID NO: 144544 - DNA, 275 bp, Glycine max
tggtgatgaaaaattgatgcgtgaaaggacacacctgctgttggcttgttgttcaaggatggcaatttgtaagaaagatgtttggagagttgaatgtggaatcccttctggatttccgctcacagttatttgtaatagcatttttaatgagatgctcattagatatagctatgaaaaattactgcgccaggctaaagctccaagtatgtttttacaatccttcaaaaattttgtttctttgtgtgtgtatggtgatgataacttaattagtgttc

SEQ ID NO: 144545 - DNA, 220 bp, Glycine max
tgaaattttaataaaccgcgatcacaggttgccgcaccttcaaaccggaaacaaaagcaatcgttacttgatttcaagaatttctcaatttcttcctacttctttgtgtacgatttcttaagggaaagaaaatcactctctgtgctggtcacagacttcgtgaatcattttcttttccacacaacatacgagtctgcgacagggggatgtgatgacaagg

SEQ ID NO: 144546 - DNA, 280 bp, Glycine max
gacaggttcaaaccggagcaaaaaaacttgttacgatggtttcttccgacaaggatccacgagaggaagtcttcaagcatggtacatggatgatagtgatgaagatcaaagactcccccaccacaaagaacccaaggagtttgtctcgttggaccaacttgctgaacttggagtccttagctggaaattagatgctgataaccatgaaaatgatccagagctgaaaaagattcgtgaagagcgtggctacacctacatggatgtttgtgaggtctgccca

SEQ ID NO: 144547 - DNA, 281 bp, Glycine max
ctgcgccaggctaaagctccaagtatgtttttacaatccttcaaaacttttgtttctttgtgtgtgtatggtgatgataacttaattagtgttcatgaatatgtcaagccttactttagtggttctaaattgaaaagctttctagctggtcataatatcaccattactgatggtattgacaaaactagtgcaactttgcaatttagaaagttagcagattgtgattttctcaagagaaactttaagcagatgtctaatgttttatgggtggctcctgagga

SEQ ID NO: 144548 - DNA, 280 bp, Glycine max
attactgatggtattgacaaaactagtgcaactttgcaatttagaaagttagcagattgtgattttctcaagagaaactttaagcagatgtctaatgttttatgggtggctcctgaggacaaggcgagtttatggtcacaacttcattatgtttcgtgcaataatctggaaatgcaagtaagcttatcttgtcaatctcgtaaatgtgttacgagaattgtatttgcacagtccagaggaagctcgccaattgagaaggaaagctctctctcgtattgaa

SEQ ID NO: 144549 - DNA, 280 bp, Glycine max
gagagttgaatgtggaatcccttctggatttccgctcacagttatttgtactagcatttttaatgagatgctcattagatatagctatgaaaaattactgcgccaggctaaagctccaagtatgtttttacaatccttcaaaaattttgtttctttgtgtgtgtatggtgatgataacttaattagtgttcatgaatatgtcaagccttactttagtggttctaaattgaaaagcttctagctggtcataatatcaccattactgatggtattgacaaaa

SEQ ID NO: 144550 - DNA, 281 bp, Glycine max
tatcaccattactgatggtattgacaaaactagtgcaactcttgcaatttaggaaagttagcagattgtgattttctcaagagaaactttaagcagatgtctaatgttttatgggtggctcctgaggacaaggcgagtttatggtcacaacttcattatgtttcgtgcaataatctggaaatgcaagaagcttatcttgtcaatctcgtaaatgtgttacgagaattgtatttgcacagtccagaggaagctcgccaattgagaaggaaagtctctctcgt

SEQ ID NO: 144551 - DNA, 217 bp, Glycine max
  unsure (1)..(217): unsure at all n locations
gcaattttgataaaccgcgatcacaggttgcacgcacctctgaaaaccggaaaacaaaagcaatcgttacttgatttcaagaatttctcaaattcttcctacttctttgtgtacgatttcttaagggaaagaaaatcactctctgtgctggccacagacttcgtgaatcattttcttttccacacaacatacgagtcctangacacggggatgtgct

SEQ ID NO: 144552 - DNA, 256 bp, Glycine max
gaagcagagggagtagcggcattaaaaatgcagatcttcgtgcaaactctggacagggaagactataaccctcgaggtcgagagcagcgacaccatcgacaatgtcaaggccaagattcaagacaaggaaggcatacctccggatcagcagcgtttgattttcgccggaaaacagcttgaagatggaagcgaccctggccgattacaacatccagaaggaatcaacccttcatctcgtcctcaggcttcgtggtgg

SEQ ID NO: 144553 - DNA, 228 bp, Glycine max
ctgcaacatagttggtgcaatgcttttggttgatacttatcataccagtcctgaaaatgcagttcttacgtatactgtagcgcctttcagaggcggaaggcccattcgggtggttacatttccgaataccattgtgcaaattgaaccagacatgaattcaaggtttcagcttttgagtaccactaccaatggtgattttgttcaagggaaagatctcgcaatggttaa

SEQ ID NO: 144554 - DNA, 225 bp, Glycine max
atttttatttatcagtcaccgaaacaactatggatacaatcaagtccttcaagggctacggcagagttgacgagttggcgcagcaagcctatcagaagaagacaacgtaagcgcctcataataatcacagtctcttcaatcgttctaattgcggtgatcatcgccgctatcgcaggggttgtcatacacaagcgcaacacctcatcatctccctcatccgactcg

SEQ ID NO: 144555 - DNA, 277 bp, Glycine max
gtttatggtcacaacttcattatgtttcgtgcaataatctggaaatgcaagaagcttatcttgtcaatctcgtaaatgtgttacgagaattgtatttgcacagtccagaggaagctcgccaattgagaaggaaagctctctctcgtattgaatggctgcaaaaagctgatgtgcctaccatagcacagattgaagagttccattcgatgcagaggatgatgaatgctcctggatctaatgataatattgatctactgttgagcattgatttgttggg

SEQ ID NO: 144556 - DNA, 278 bp, Glycine max
gaaactgcactgaagaattttcaacgagctgttcaactgaatcccagatttgcatatgcacacaccctttgtggacatgagtatgttgcactagaagattttgagaatggaatcaaatgctaccagagtgcgctcacagttgatgcaaggcattataatgcttggtatggacttggaatggtatatcttcgccaagaaaagtttgagttctctgaacatcattttcggatggctttccatatcaatccacgctcatctgttataatgtcataccttgg

SEQ ID NO: 144557 - DNA, 278 bp, Glycine max
attcttcaggagattttcctgaaaaggaagatcaagacaaacccaaaaagattgatacccgattgagccaaagaatagatcctcaatacaatgaggttcaggctcagatggaaacaaatttgtttaaattgtctcttgatgatgttgaaactcctaaaggttctatgttggatcttaaaatttctcaatctaaaattgcacttcccaagaacacagttggaggaaccattctgcgtagtgatctattggcaaattttttgacagagggcaattttaga

SEQ ID NO: 144558 - DNA, 276 bp, Glycine max
aaaatggtggccacagttggtattcctgagaatacaggtatagcattggcctgtgctatgaatagttcttttagggggcgcgccagttctgatatttacaccatctgctctcaagactgtgaattatggaatcctgcttgcacaaaagcaatgactatgtcatttaatccaaacccgtgttctgatgcatggagtttggaatttctgaagcgtaccggatttcattgtgatatcattgtgtcactggatggactgccaccccaatgcaggatgttc

SEQ ID NO: 144559 - DNA, 274 bp, Glycine max
ggaaaaagttgtgttgaaattttcacaagaggaatttcttacagcttggtcaactcaggtgcgtcccgcaacgactctgttggctgatgggtgccctatttgtatgctatggtgcatgatagttcagtgtctacaataccaggtgattttgtcattggtgttaagttgacaaccataaacaatatgtgtgcatatgggctcaatcctggtatttcaggttctcgtcttttgggcaccatcctcagtccatttcacagcaaactgtttggaatca

SEQ ID NO: 144560 - DNA, 274 bp, Glycine max
tggaagtacagcttgatttcttgcaattgggtgaagtgtaaggagatgaaccgtcctcgctgcttgttcggatctggcaatcttggttcaattgctattgttgctggtggaagtgataaatatggaaatgttcttgaatcggcagagttgtatgactcaaattcaggtacatgggaactattgccaaacatgcatacaccacgtagattgtgctctggtttttttatggatggcaattctatgtgattggtggcatgtcaagtcctattgtttc

SEQ ID NO: 144561 - DNA, 121 bp, Glycine max
cgtttgtttaattcaataaaggacattaggcatgaccctcttgttgagtatgctctgcctatctgaaaatttccacacctcttttaattgtcgtaatgatgtgtgaagtgtgtgttatttt

SEQ ID NO: 144562 - DNA, 252 bp, Glycine max
tactcgagccgctcgagccgctcgagccgcaattttctattgagcttctcggtggaggaatcacacttcaatgctgttctcactgttcgccatttgattccaaacagtttgctgtgaaatggactgaggaatggtgcccaaaagacgagaacctgaaataccaggattgagcccatatgcacacatattgtttatggttgtcaacttaacaccaatgacaaaatcacctggtattgtagacatgaactatca

SEQ ID NO: 144563 - DNA, 273 bp, Glycine max
gtcctaataatggttttgaaatgtggagttctgagtgggcaaatcaaacttcatggcatttgagtttccttattgacaatcccaaacagtctacagtttttgatattctcttgggaatctctcaagattttgaaattgctggtaatactcttatgccagctttttctgttccacaggctactgccagatcttctgaaaatgcggaatcctctgcatgatctggaattcgtgttttctttcgcttgttcgtttgtttaattcaataaaggaaat

SEQ ID NO: 144564 - DNA, 270 bp, Glycine max
ataccatttaccaaactcactcatcaattctcatctttcttctcactaactattaattcatcatgtcgagcacagctggccaagtcatcaaatgcaaagctgcggtttcatgggaggcagggaagccacttgtgattgaagaagtagaggttgcgccaccacaagctggtgaagtgcgtttgaagatcctctacacctctctttgccacactgatgtttacttctgggaagctaagggccaaactccattgtttcctcgtatatttggtc

SEQ ID NO: 144565 - DNA, 276 bp, Glycine max
tctcgagccgattcggctcgagacaaaattctccaattagtaacttgatgagagttgctgcttacaagaaaggttgtttaatgatcaagattgtgatgtctgggaatgcagcagtcaaaaggagtgattgggcctcattggtacaagtgtttttaacaaacagcaacagtacagagcattttgatgcatgtaagtggacaaaatcagaaccacattcctgggaattaatcttcccaatagaggtatgtggtcctaataatggttttgaaatgtgga

SEQ ID NO: 144566 - DNA, 258 bp, Glycine max
gaatcctgcttgcacaaaagcaatgactatgtcatttaatccaaacccgtgttctgatgcatggagtttggaatttctgaagcgtaccggatttcattgtgatatcatttgtgtcactggatggactgccaccccaatgcaggatgttcaggttacaattgattggtttatttcctctcaggaatgtgttcccaggacctattgtgttttaaatccacaaaatccttttgtgttaaataggtggatgggaaaactgac

SEQ ID NO: 144567 - DNA, 239 bp, Glycine max
atggaaagaattcctcttgccacatagtccaaactctcaacaccaataaagtgctgcacttaacactgttgagggtttggactatatggaaagaattcctcttgccacatctgagggttttcctcatgtgcttcaacgcaaaaatggcgcaaaaggcagaaggagatttgactctggggatggtgaagagatgacattgaatccaggaaccagtgttgaagaaggcttacaacacgcta

SEQ ID NO: 144568 - DNA, 280 bp, Glycine max
attgaattttgattctagcaagcagagcttttgtcaattttctattgaccttctcggtggaggaattttagtggacaaaactggagattggatcacacttatacaaaattctccaattagtaacttgttgagagttgctgcttggaagaaaggttgtttaatggtcaagattgtgatgtctgggaatgcagcagtcaaaaggagtgattgggcctcattggtacaagtgtttttaacaaacagcaacagtacagagcattttgatgcatgtaagtggaca

SEQ ID NO: 144569 - DNA, 275 bp, Glycine max
tagtatacgagttcttcacagcacagagccgagcagcgttattattttttattattattacaagaaatgggagttggaggtacattggagtacttgtctgatctaatgggcagtggccaccaccaccacaagaagaagaagaagcagttccaaaccgtggagctaaaggtgagaatggattgtgatggttgtgagcttaaggtaaaaaacgctctctcttcactaagtggggtgaatctgtggagataaaccgaaaacagcagaaagttacagta

SEQ ID NO: 144570 - DNA, 274 bp, Glycine max
tacatttgtctcatacactatggggatggtgagaaaaaatatattttacaccccagaggggctataattggagataccattgtttctggtacagaagttcctataaaaatgggaaatgccctacctttgagtgcggtttgaactattgatttacgtcattggaagtaaccaactaggtttacggcgaaacctagagcatcgatcactgatccaattggagtacctctacaggtagacctcaacagaaaactgaagagtaacggcagcacgtgat

SEQ ID NO: 144571 - DNA, 238 bp, Glycine max
aaatggtcttgttctgtatactggcacaatcgtgactgatgatgggaaggaaaagaaggtgactattgattttgagcctttcagacctattaatgcatccctttatctttgtgacaataagtttcatactgaagctttgaatgaactcctagagtctgatgacaagtttggatttattgtcatggatggcaatggtactttgtttgggaccttgagtggtaatacggagaagtgcttc

SEQ ID NO: 144572 - DNA, 150 bp, Glycine max
tgaaatttcaataaaccgcgatcacaggttgccgcaccttaaaaccggaaacaaaagcaatcgttacttgatttcaagaatttctcaatttcttcctacttctttgtgtacgatttcttaagggaaagaaaatcactctctgtgctggtc

SEQ ID NO: 144573 - DNA, 261 bp, Glycine max
ggttaaagttaatgtagcatgtgctgctgttggcttgacatcaagttacactccaactccattgttggaatctggtttgcaaaaagacagagggttaattgtggagtattttggaaggatgtcttacgttgctcataacgttaatcagccccaagagaaagatttgttagagggaaatttttcctttgatattaaatctcgctctagattggaaaaagtttctctacaaaagcacaatttgttagtggaaaaaccttcaaa

SEQ ID NO: 144574 - DNA, 260 bp, Glycine max
tgttcaaggatggcaatttgtaagaaagatgtttggagagttgaatgtggaatcccttctggatttccgctcacagttatttgcaatagcatttttaatgagatgctcattagatatagctatgataaattactgccccacgctaaatctccaagtatgtttttacaatccttcaaaaattaagttctcatcaccatacacacacaaagaaacaaaattctgaaggattgtaaaaacatacttggagctctcgcctggcg

SEQ ID NO: 144575 - DNA, 258 bp, Glycine max
ctcgagccgtgtcaattttctattgaccttctcggtggaggaattttagtggacaaaactggagattggatcacacttatacaaaattctccaattagtaacttgttgagagttgctgcttggaagaaaggttgtttaatggtcaagattgtgatgtctgggaatgcagcagtcaaaaggagtgattgggcctcattggtacaagtgtttttaacaaacgcaacagtacagagcattttgatgcatgtaagtggacaa

SEQ ID NO: 144576 - DNA, 260 bp, Glycine max
gttggaggaaccattctgcgtagtgatttattggcaaattttttgacagagggcaattttagagcaagtgttgatttgcagcgcactcatcgtattagaggaatgattaaaatggtggccacagttggtattcctgagaatacaggtatagcattggcctgtgctatgaatagttcttttagggggcgcgccagttctgatatttacaccatctgctctcagactgtgaattgtggaatcctgcttgcacaaaagcaatg

SEQ ID NO: 144577 - DNA, 264 bp, Glycine max
aatcaacccatactccatggaatggactggtttggccaataggttactgagtaagggcaacgatattctgtgttgcgattatgctagttttgatggattgattaccaagcaagttatgagcaagatggcagaaatgataaacagtctttgtggtggtgatgaaaaattgatgcgtgaaaggacacacctgctgttggcttgttgttcaaggatggcaatttgaagaaagatgtttggagagttgaatgtggaatcccttctgga

SEQ ID NO: 144578 - DNA, 261 bp, Glycine max
caagaacaaagtgcggtctgactttgtgagggaccgcaggcgagtaaagcgtgagtatgatgagttcaaggttcggattaatggcactcctgattcgattcggcgccgatctgatgcttataatgccagagacgaaatgaatgcaatgaagaagtggagagagaatggaaatgaagaaccaatggagagtttgaagattcctaaagccacatggatggctgtaaagaacccagctgctggcctggtacctggacaactgct

SEQ ID NO: 144579 - DNA, 260 bp, Glycine max
tacccctcttagtcccaattttctagggttttattcattttccgatggcttctgcagatgttgagtaccgttgctttgtcggtgggctcgcttgggccactgacgaccatgccctcgagagagccttctctcagtacggcgaaatcgttgaaacgaagattatcaacgatcgtgagactggcagatccaggggttttggatttgtgaccttcgcctcgggcagtccatgaaagatgcgatcggagcgatgaatggacaga

SEQ ID NO: 144580 - DNA, 261 bp, Glycine max
  unsure (1)..(261): unsure at all n locations
tgcacttggtttattggttttggctctgtttctgcacttgcgtcccacacccactgcaacaccaaaagcacttcgccatctcccaaacccaccaagcccaaagcctcgtcttcccttcataggnacccttcatctcttaaaagacaaacttctccactacgcactcatcgacctctccaaaaaacatggtcccttattctctctctactttggctccatccaaccgttgttgcctccacaccagaattgttcaagctcttc

SEQ ID NO: 144581 - DNA, 139 bp, Glycine max
attttgataaaccgcgatcacaggttgccgcaccttaaaaccggaaacaaaagcaatcgttacttgatttcaagactttctcaatttcttcctacttctttgtgtacgatttcttaagggcaagaaaatccactctctg

SEQ ID NO: 144582 - DNA, 150 bp, Glycine max
  unsure (1)..(150): unsure at all n locations
tgaaattttaataaaccgcgatcacaggttgccgcacctcaaaaccgganacaacagcactcgttacttgatttcaagaatttctcaattgactcctacttctttgtgtacgatttcttaagggcaagaagatcactctctgtgctggtc

SEQ ID NO: 144583 - DNA, 260 bp, Glycine max
gttggaatcaacccatactccatggaatggactggtttggctaatagattactgagtaagggcaacgatattctgtgttgcgattatgctagttttgatggtttgattaccaagcaagttatgagcaagatggcagaaatgataaacagtctttgtggtggtgatgaaaaattgatgcgcgaaaggacacacctgctgttggcttgttgttcaaggatggcatttgtaagaaagatgtttggagagttgaatgtggaatc

SEQ ID NO: 144584 - DNA, 264 bp, Glycine max
tacggttaccgttttccgcgttgagaagactcttgaaacgaatgtcactgccactgaccttgttgtgcagtggcagaaagtggcgccaaatactgatgataggcttttcatgaggctgttattgcagcctgtgagttccaaggttgtgaagggaacaataactgttagagcctcggatgtggctttgttcctcggaggggctaatgaggttgtgtcgattttgctaaacaattttcgcttctaggattaaaaaaggagaattgc

SEQ ID NO: 144585 - DNA, 261 bp, Glycine max
gtcaagccttactttagtggttctaaattgaaaagctttctagctggtcataatatcaccattactgatggtattgacaaaactagtgcaactttgcaatttagaaagttagcagattgtgattttctcaagagaaactttaagcagatgtctaatgttttatgggtggctcctgaggacaaggcgagtttatggtcacaacttcattatgtttcgtgcaatactggaaatgcaagaagcttatctgtcaatctcgtaaat

SEQ ID NO: 144586 - DNA, 188 bp, Glycine max
gaaattttaatacaccgcgatcacaggttgccgcaccttaaaaccggccacaaaagcaatcgttacttgatttcaagaatttctcaatttcttcctacttctttgtgtacgatttcttaagggaaagaaaatcactctctgtgctggtctcagccttcgtgaatcattttcttttccacacaacatac

SEQ ID NO: 144587 - DNA, 121 bp, Glycine max
cgtttgtttaattcaataaaggaaattaggcatgaccctcttgttgagtatgctctgcctatctgaaaatttccacacctcttttaattgtcgtaatgatgtgtgaagtgtgtgttatttt

SEQ ID NO: 144588 - DNA, 259 bp, Glycine max
ctcgagccgacaatatgtgtgcatatgggctcaatcctggtatttcaggttctcgtcttttcgggcaccattcctcagtccatttcacagcaaactgtttggcatcaaatggcaacagtgagaacaccattgaattttgattctagcaagcagagcttttgtcaattttctattgaccttctcgatggaggaattttagtggacaaaactggagattgatcacacttatacaaaattctccaattagtaacttgttgag

SEQ ID NO: 144589 - DNA, 258 bp, Glycine max
gctctcaagactgtgaattatggaatcctgcttgcacaaaagcaatgactatgtcatttaatccaaacccgtgttctgatgcatggagtttggaatttctgaagcgtaccggatttcattgtgatatcatttgtgtcactggatggactgccaccccaatgcaggatgttcaggttacaattgattggtttatttcctctcaggaatgtgttcccagaccgattgtgttttaaatccacaaaatccttttgtgttaaa

SEQ ID NO: 144590 - DNA, 257 bp, Glycine max
aagtgattagaaatagaggcattcctgctgatgttcttgcaaagcgagctcatgaatttgaaaaacatgttgctcatgaaagcctcaaggatcaaattcctgctgttgacaagttgtattctactaaggttaataagtttgcaaaaattatgaaccttagacaaagtgttgttggtgatcttaaacttcttactgatgggaagttgtatgagggtaacatattcctgtatctactattagtgcaggggaaaatcatg

SEQ ID NO: 144591 - DNA, 256 bp, Glycine max
tatggttttgaaatgtggagttctgagtgggcaaatcaaacttcatggcatttgagtttccttattgacaatcccaaacagtctacagtttttgatattctcttgggaatctctcaagattttgaaattgctggtaatactcttatgccagctttttctgttccaaaggctactgccagatcttctgaaaatgcggaatcctctgcatgatctggaatcgtgttttccttcgcttgttcggttgtttaattcaata

SEQ ID NO: 144592 - DNA, 252 bp, Glycine max
ccttgttgatctacattctcccatcttttctcactgctgaaattaaatataagcggaatttgagtaatattcatatttccggcttattttacgacggcagatacaaattctggactaaacacgagaaaaatcttgctttcacagaagaggataagatggaagtgattagacatagaggcattcctgctgatgttcttgcaaagcgagctcatgaattgataaacatgttgctcatgaaagcctcaaggatca

SEQ ID NO: 144593 - DNA, 257 bp, Glycine max
gttttgaaatgtggagttctgagtgggcaaatcaaacttcatggcatttgagtttccttattgacaatcccaaacagtctacagtttttgatattctcttgggaatctctcaagattttgaaattgctggtaatactcttatgccagctttttctgttccacaggctactgccagatcttctgaaaatgcggaatcctctgcatgatctggaattcgtttttctttcgcttgttcgtttgtttaattcaataaagga

SEQ ID NO: 144594 - DNA, 263 bp, Glycine max
caagctggtgcagtttggagagattcaggaaaaagttgtgttgaaattttgaggcttttccccacaagctgatgcagtttggagagattcaggaaaaagttgtgttgaaattttcacaagaggaatttcttacagcttggtcaactcaggtgcgtcccgcaacgactctgttggctgatgggtgcccatatttgtatgctatggtgcatgatagttcagtgctacaataccaggtgattttgtcattggtgttaagttgacaa

SEQ ID NO: 144595 - DNA, 256 bp, Glycine max
gaaagatttgttagagggaaatttttcctttgatattaaatctcgctctagattggacaaagtttcctctacaaaagcacaatttgttactggaaaaaccttcaaatatgatataattggtgctggttcacattcttcaggagattttcctgaaaaggaagatcaagaaaaacccaaaaagattgataccagattgagacaaagaatagatcctcaatacaatgagttcaggctcagatggcaacaatttgtttaa

SEQ ID NO: 144596 - DNA, 259 bp, Glycine max
ctggtgcagtttggagagattcaggaaaaagttgtgttgaaattttcacaagaggaatttcttacagcttggtcaactcaggtgcgtcccgcaacgactctgttggctgatgggtgcccatatttgtatgctatggtgcatgatagttcagtgtctacaataccaggtgattttgtcattggtgttaagttgacaaccataaacaatatgtgtgcatagggctcaatcctggtatttcaggttctcgtcttttgggcac

SEQ ID NO: 144597 - DNA, 258 bp, Glycine max
gctagttttgatggtttgattaccaagcaagttatgagcaagatggcagacatgataaacagtctttgtggtggtgatgaaaaattgatgcgtgaaaggacgcacctgctgttggcttgttgttcaaggatggcaatttgtaagaaagatgtttggagagttgaatgtggaatcccttctggatttccgctcacagttatttgcaatagcatttttatgagatgctcattagatatagctatgaaaaattactgcgcc

SEQ ID NO: 144598 - DNA, 252 bp, Glycine max
ctcgttcttcttcttttgttgttctgtgtttgtgtttgttttttctctcacctgaaaatgtcttgctgcggtggtaactgtggttgcggaagctcctgcaagtgcggcaacggctgcggaggctgcaagatgtacccagacttgagctacactgagtcaaccaccaccgagaccttggtcatgggagtggcacctgttaaggctcaatttgaggtgctgaaatgggtgtgcccgctgagaacgatggctgca

SEQ ID NO: 144599 - DNA, 253 bp, Glycine max
attctcatgaatatgccaaatgctgttctttcaatgtggagatattttgttggagatctcgtctttgaagtttctaagatgacttctccctacattaaatgtacagtctctttcttcatagcatttggaaatttggctgatgacaccatcaattttgaggcttttccccacaagctggtgcagtttggagagattcaggaaaaagttgtgttgaattttcacaagaggaatttcttacagcttggtcaactca

SEQ ID NO: 144600 - DNA, 254 bp, Glycine max
gaacaactcttcacacaacaaaacttttttctggcattgtagcatcatgactggcagagaaatcctccatatgatgaaggtgaaagcagggtttggaacaccagacacagggaatggaaaaggcaaaatatcaaaacacattacacatggctttcacttgatgaagggcaaatcagcgcatcctatggaagattatttagtttcagaatttaagaagaaaaggacagagaattaggcttgtttgcaatatttga

SEQ ID NO: 144601 - DNA, 254 bp, Glycine max
ggtattgacaaaactagtgcaactttgcaatttagaaagttagcagattgtgattttctcaagagaaaccttaagcagatgtctaatgttttatgggtggctcctgaggacaaggcgagtttatggtcacaacttcattatgtttcgtgcaataatctggaaatgcaagaagcttatcttgtcaatctcgtaaatgtgttacgagaattgtattgcacagtccagaggaagctcgccaattgagaaggaaagct

SEQ ID NO: 144602 - DNA, 161 bp, Glycine max
gttgccgcaccttaaaaccggaaacaaaagcaatcgttacttgatttcaagaatttctcaatttcttcctacttctttgtgtacgatttcttaagggaaagaaaatcactctctgtgctggtcacagacttcgtgaatcattttcttttccacacaacata

SEQ ID NO: 144603 - DNA, 259 bp, Glycine max
aggtatggcaactggatctaccttgtgacaaaattcctagtgtcttgactacaactgatgagagattggtaggcacagaacatgagggatatgatccttttcttggtggaattcaaaaatatgccactcccatgatgcccctagatgaagaaattctttctaaggttggacaagatatggttgaggaatggtttgattgtgttgatgaggaggattctttgaggaagtttctttaagtgcagcacttaatggtgttgag

SEQ ID NO: 144604 - DNA, 257 bp, Glycine max
atagctatgaaaaattactgcgccaggataaagctccaagtatgtttttacaatccttcaaaaattttgtctctgtgtgtgtgtatggtgatgataacttaattagtgttcatgaatatgtcaagccttactttagtggttctaaattgaaaagctttctagctggtcataatatcaccattactgatggtattgacaaaactagtgcaactttgcaattagaaagttagcagattgtagatttctcaagagaaact

SEQ ID NO: 144605 - DNA, 197 bp, Glycine max
ctcgaaccggatattttaataaaccgcgatcacaggttgccgcaccttaaaaccggaaacaaaaacaatcgttacttgatttcaagaatttctcaatttcttcctacttctttgtgtacgatttcttaagggaaagaaaatcactctctgtgctggtcacagacttcgtgaatcattttcttttccacacaacatac

SEQ ID NO: 144606 - DNA, 175 bp, Glycine max
aaccgcgatcacaggttgccgcaccttaaaaccggaaacaaaagcaatcgttacttgatttcaagaatctctcaatttcttcctacttctttgtgtacaatttcttaagggaaagaaaatcactctctgtgctggtcacagacttcgtgaatcatgttcttttccacacaacata

SEQ ID NO: 144607 - DNA, 256 bp, Glycine max
gtgaatgccattgcaaaggaagcaatgaggctgcaccctgtggcaccaatgttgttgccaagactagccagagaggattgccaagttggagggtatgacatccccaaagggacacaagtgcttgtgaatgtgtggactattgggagagacccttcaattctgggacaaccctacagagttccaaccagagaggtttcttactaaggagattgatttaaaggacatgactatgagctattgccatttggtgctggga

SEQ ID NO: 144608 - DNA, 250 bp, Glycine max
attgttggaatctggtttgcaaaaagacagagggttaattgtggagtattttggaaggatgtcttacgttgctcataacgttaatcagccccaagagaaagatttgttagagggaaatttttcctttgatattaaatctcgctctagattggaaaaagtttcctctacaaaagcacaatttgacagtggaaaaaccttcaaatatgatataatggtgctggttcacattcttcaggagattttcctgaaa

SEQ ID NO: 144609 - DNA, 253 bp, Glycine max
ggaaaaaccttcaaatatgatataattggtgctggttcacattcttcaggagattttcctgaaaaggaagatcaagaaaaacccaaaaagattgataccagattgagacaaagaatagatcctcaatacaatgaggttcaggctcagatggaaacaaatttgtttaaattgtctcttgatgatgttgaaactcctaaaggttctatgttggacttaaaatttctcaatctaaaattgcacttcccaagaacac

SEQ ID NO: 144610 - DNA, 252 bp, Glycine max
gctcaatcctggtatttcaggttctcgtcttttgggcaccattcctcagtccatttcacagcaaactgtttggactcaaatggcaacagtgagaacaccattgaattttgattctagcaagcagagcttttgtcaattttctattgaccttctcggtggaggaattttagtggacaaaactggagattggatcacacttatacaaaattctcaattagtaacttgttgagagttgctgcttggaagaaagtt

SEQ ID NO: 144611 - DNA, 256 bp, Glycine max
ctcgagccgggaaaaagttgtgttgaaattttcacaagaggaatttcttacagcttggtcaactcaggtgcgtcccgcaacgactctgttggctgatgggtgcccatatttgtatgctatggtgcatgatagttcagtgtctacaataccaggtgattttgtcattggtgttaagttgacaaccataaacaatatgtgtgcatatgggctcaatctggtatttcaggttctcgtcttttgggcaccattcctcagt

SEQ ID NO: 144612 - DNA, 257 bp, Glycine max
acaatatgtgtgcatatgggctcaatcctggtatttcaggttctcgtcttttgggcaccattcctcagtccatttcacagcaaactgtttggaatcaaatggcaacagtgagaacaccattgaattttgattctagcaagcagagcttttgtcaattttctattgaccttctcgttggaggaattttagtggacaaaactggagattggatcacactatacaaaattctccaattagtaacttgttgagagttgctg

SEQ ID NO: 144613 - DNA, 259 bp, Glycine max
ctggaggatggtcactgaacatagttgtgtctgagagtggatggccttcttctggtggaactgcaacttcacttgataatgcaagaacttacaacacaaacttggttcggaatgtgaagcaaggaacaccaaaaaggcctggtagaccccttgaaacttatgtgtttgccatgtttgacgaaaatcagaagcagccagagtattagaagttttgggggccttccttccaaataaacagctcaatactcaattaatttga

SEQ ID NO: 144614 - DNA, 261 bp, Glycine max
tggcaacagtgagaacaccattgaattttgattctagcaagcagagcttttgtcaattttctattgaccttctcggtggaggaattttagtggacaaaactggagattggatcacacttatacaaaattctccaattagtaacttgttgagagttgctgcttggaagaaaggttgtctaatggtcaagattgtgatgtctgggaatgcagcagtcaaaaggatgattgggcctcattggtacagtgtttttaacaaacagc

SEQ ID NO: 144615 - DNA, 253 bp, Glycine max
ctggaagatggtcactgaacatagttgcgtctgagagtggatggccttcttctggtggaactgcaacttcacttgataatgcaagaacttacaacacaaacttggttcggaatgtgaagcaaggaacaccaaaaaggcctggtagaccccttgaaacttatgtgtttgccatgtttgaagaaaatcagaagcagccagagtattagacgttttggggctcttccttccaaataaacagctcaaatactctatt

SEQ ID NO: 144616 - DNA, 252 bp, Glycine max
aggacctattgtgttttaaatccacaaaatccttttgtgttaaataggtggatgggaaaactgactttccctcagggcacttcccgaagtgttaagagaatgcctctttctatagggggaggagctggtgcaaagaatgctattctcatgaacatgccaaatgctgttctttcaatgtggagatattttgttggagatctcgtctttgaagttctaagatgacttctccctacattaaatgtacagtctctt

SEQ ID NO: 144617 - DNA, 252 bp, Glycine max
ctcgagccgctcgagccggtttggaatcaaatggcaacagtgagaacaccattgaattttgattctagcaaacagagcttttgtcaattttctattgaccttctcggtggaggaattttagtggacaaaactggagattggatcacacttatacaaaattctccaattagtaacttgttgagagttgctgcttggaagaaaggttgtttatggtcaagattgtgatgtctgggaatgcagcagtcaaaagga

SEQ ID NO: 144618 - DNA, 250 bp, Glycine max
ctcgagccgaatcggctcgagtttcttcatagcatttggaaatttgactgatgacaccatcaattttgaggcttttccccacacgctggtgcagtttggagagattcaggaaaaagttgtgttgaaattttcacaagaggaatttcttacagcttggtcaactcaggtgcgtcccgcaacgactctgttggctgatgggtgcccatatttgatgctatggtgcatgatagttcagtgtctacaataccag

SEQ ID NO: 144619 - DNA, 222 bp, Glycine max
tactcttatgccagctttttctgttccacaggctactgccagatcttctgaaaatgcggaatcctctgcatgatctggaattcgtgttttctttcgcttgttcgtttgtttaattcaataaaggaaattaggcatgaccctcttgttgagtatgctctgcctatctgaaaatttccacacctcttttaattgtcgtaatgatgtgtgaatgtgtgttatttt

SEQ ID NO: 144620 - DNA, 249 bp, Glycine max
cccatactccatggaatggactggtttggccaatagattactgagtaagggcaatgatattctgtgttgcgattatgctagttttgatggtttgattaccaagcaagttatgagcaagatggcagaaatgataaacagtctttgtggtggtgatgaaaaattgatgcgtgaaaggacgcacctgctgttggcttgttgttcaaggatgcaatttgtaagaaagatgtttggagagttgaatgtggaatc

SEQ ID NO: 144621 - DNA, 255 bp, Glycine max
cgataccaccaagtatgggcaggttcaggcccgggtacgcaaagcacgtgttgggcccaatgctgaagtttctgagggagacgagatcacccttgatggtgaacccgtacccgtacttcggttacaacgggaaaaacgtgaactttcttctgttcaggcccaaccgaggcttgtacgacaggtacacgaagaggagttacacgaaccagttcgcgctctgatggacgcggtgcactcggcgatgaatgctttggg

SEQ ID NO: 144622 - DNA, 258 bp, Glycine max
ggttcccaatacacccacctcatcactcgccgcatccgcagcctctcggtgttctccctatgcatctccggcacctcctctctttcaaccatcaccgacctcaacccctccgtcgtcattctctccgggggcccccactccgtccacaccccggactccccctccttccccgacggcttcctccagtgggcccattccaatggcgtcaccgtcctggcatctgctacggcctccagctcctcgttcagcgcctcggcg

SEQ ID NO: 144623 - DNA, 256 bp, Glycine max
ggaatgattaaaatggtggccacagttggtattcctgagaatacaggtatagcattggcctgtgctatgaatagttcttttagggggcgcgccagttctgatatttacaccatctgctctcaagactgtgaattatggaatcctgcttgcacaaaagcaatgactatgtcatttaatccaaacccgtgttctgatgcatggagtttggaatttctaagcgtaccggatttcattgtgatatcatttgtgtcactgg

SEQ ID NO: 144624 - DNA, 263 bp, Glycine max
attgtgttttaaatccacaaaatccttttgtgttaaataggtggatgggaaaactgactttccctcagggcacttcccgaagtgttaagagaatgcctctttctatagggggaggagctggtgcaaagaatgctattctcatgaatatgccaaatgctgttctttcaatgtggagatattttgttggagatctcgtctttgaagtttctaagatgacttctccctacattaaatgtacagtctctttcttcatagcatttgga

SEQ ID NO: 144625 - DNA, 246 bp, Glycine max
gagttctaacgccactaaccctatgctgacgcgacttcttgagaactgtaagagtctcaaatatctggttgatgagtgtccttttgcatttgtgaactagtatgtaatattttattcacttaaataaagcgcattactatgtgcaatgagtgtgtttaaatataaaagaaaaaaaaaaaaaaaaaaaaaaaaaaaaaaaaaaaaaaaaaaaaaaaaaaaaagaaaaaggaaaaagaaaagggagag

SEQ ID NO: 144626 - DNA, 261 bp, Glycine max
attacattggtggccacagttggtattcctgcgactacaggtatagcattggcctgtgctatgaataattctattagggggcgcgccagttctaatatttacaccatctgctctcaagactatgaattgtggaatcctgcttggacaaaagcaatgccgatgtcattgactccaaacccgtgttctgctgcatggcgtctggcattgttgtagcgtaccggatttcattgtgatatcatatatgtcactcggtagactgcc

SEQ ID NO: 144627 - DNA, 263 bp, Glycine max
caatcacaatttcctatcttgtgagaactcaagttgtcacgcgcactgtcacaaatgttgccgaggaggaaacctatgtgatcagcagccagaatggaacctgctgttgccattgaagtcaaccctccagcaatgactatcaaagcgggcgcatcgcgtcagttttcggtgtcacttacagtgcgctcagtgacaagaaggtatagttttggagaggttttgatgaaagggagcagagggcacaaggtgaggattcctgttct

SEQ ID NO: 144628 - DNA, 259 bp, Glycine max
tggtgatgataacttaattagtgttcatgaatatgtcaagccttactttagtggttctaaattgaaaagctttctagctggtcataatatcaccattactgatggtattgacaaaactagtgcaactttgcaatttagaaagttagcagattgtgattttctcaagagaaactttaagcagatgtctaatgttttatgggtggctcctgaggacaaggcgagtttatggtcacaacttcattatgtttcgtgcactaat

SEQ ID NO: 144629 - DNA, 256 bp, Glycine max
agtgtctacaataccaggtgattttgtcattggtgttaagttgacaaccataaacaatatgtgtgcatatgggctcaatcctggtatttcaggttctcgtcttttgggcaccattcctcagtccatttcacagcaaactgtttggaatcaaatggcaacagtgagaacaccattgaattttgattctagcaagcagagcgtttgtcaattttctattgaccttctcggtggaggcattttagtggacaaaactgga

SEQ ID NO: 144630 - DNA, 241 bp, Glycine max
ttttgaaattgctggtaatactcttatgccagctttttctgttccacaggctactgccagatcttctgaaaatgcggaatcctctgcatgatctggaattcgtgttttctttcgcttgttcgtttgtttaattcaataaaggaaattaggcatgaccctcttgttgagtatgctctgcctatctgaaaatcgctacacctcttttaattgtcgtaatgatgtgtgaagtgtgtgttatttt

SEQ ID NO: 144631 - DNA, 258 bp, Glycine max
aacacgagaaaaatcttgctttaacagaagaggaaaagatggaagtaattagagatagaggcattcctgctgatgttcttgcaaagcgagctcatgaatttgaaaaacatgttgctcatgaaagcctcaaggatcaaattcctgctgttgacaagttgtattctactaaggttaataagtttgcaaaaattatgaaccttagacaaagtgttgttggtgatcttaaacttcttactgatgggaagttgtatgagggta

SEQ ID NO: 144632 - DNA, 241 bp, Glycine max
ttttgaaattgctggtaatactcttatgccagctttttctgttccacaggctactgccagatcttctgaaaatgcggaatcctctgcatgatctggaattcgtgttttctttcgcttgttcgtttgtttaattcaataaaggaaattaggcatgaccctcttgttgagtatgctctgcctatctgaaaatttccacacctcttttaattgtcgtaatgatgtgtgaagtgtgtgttatttt

SEQ ID NO: 144633 - DNA, 245 bp, Glycine max
ccaacaaaatatctccagattgaaagaacagtcgctttcttcatagcatttggaaatttggctgatgacaccatcaattttgaggcttttccccacaagctggtgcagtttggagagcttcaggaaaaagttgtgttgaaattttcacaagaggaatttcttacagcttggtcaactcaggtgcgtcccgcaacgactctgttggctgatgggtgcccatattggtatgctatggtgcttgatag

SEQ ID NO: 144634 - DNA, 266 bp, Glycine max
gatctttggcttgtcagagatgtttacagccattggccttcttttggataaccccacaatacttgatctttggcttgtcagagatgtttacagccattggccttcttgagttcttctacaaacagtccttgaaagggatgcaagcattcttgacagccatcacatattgctcctactcctttggcttttacttgagcacacttttggtttctttggtcaataagatcacttcaacttcgtcttcagctgctggctggcttcacaac

SEQ ID NO: 144635 - DNA, 261 bp, Glycine max
taatacttagctttgaatctccctgttgacatacatgggtttgcttctctgattacaaaaatcacttttggggagatggggaggttcgaaaaccatgttgtcaaaggaggcatcaagttgccaattgggttcaggttttgtcccaccgatgaagagcttctccttcactacctcaagaagaaggcgtttgctcaacaattacccgcttcagtcatttcagagtttgacgtgtttcagactgagccatggaaacttccaggt

SEQ ID NO: 144636 - DNA, 254 bp, Glycine max
gagaatacaggtatagcattggccgatgctatggctagttcgtttagggggcgcgccaggtctgatatgtagaccagctgctctcaagactgtgaatggtggaatcctgcttgcagagcagcaatgacgatagcatttaatccgaacccgtgttctgatgcatggagtttagaatttcttgaagcgtaccggatttcaatgggatatcatttgggtcactgggtggactgccaccccaatgcaagatgttcagg

SEQ ID NO: 144637 - DNA, 259 bp, Glycine max
agaccttcaaatatgatataattggtgctggttcacattcttcaggagattttcctgaaaaggaagatcaagagaaacccaagcagattgataccagattgagacaaagaatagatcctcaatacaatgaggttcaggctcagatggagacaaatttgtttaaattgtctcttgatgatgttgaaactcctaaaggttctatgttggatcgtaaaatttctcaatctaaaattgcacttcccaagaacacagttggagg

SEQ ID NO: 144638 - DNA, 259 bp, Glycine max
cccagacccacctcaaagttgaaagcagccatgggttttttcttgaaatgggtcaacttgtttgtcttttttcatttccttgctgcaacacccatcttctcagattcctcctccagctcaaatgcaatcgccaccaccaagttccttgatttagccaaggatcctcgggtttttgattggatggttggtatcaggcggaagattcatgagaatccagaactgggttatgaggaatttgagaccagtaagctgattagag

SEQ ID NO: 144639 - DNA, 256 bp, Glycine max
cggctcgagaattactgacttcaagttagtgtaactagctgccaagttgtgatggcattggtctctggaagaagttctgctctgaacccaaatgcacctatgttcatacctgctgcacttcgtcaggtggaggatttttcacctcaatggtgggatcttgtgaaatcttcaacatggtttcgtgattattggttgagccaacataaggaggaagaatttgaagaagttgccaatgactctactaatgatgatatgg

SEQ ID NO: 144640 - DNA, 234 bp, Glycine max
gctactacatttttaacttcctctttctacatttcattcagaacaatcatggcttctcttcattccattacattttcaacaaaaactgtcctttatgtatttgtattagcctcttccatcgcagcctctgctggcaacttctaccaggattttgacgtaacttggggagatggtcgtgccaagatactcagcaacggcgatcttctcactctttcccttgacaaagcctctggc

SEQ ID NO: 144641 - DNA, 264 bp, Glycine max
ggacatcttggttgtctattatacaatagcaactcaatttagaaaatttctaccgcattacattaggtggcatctgtataccttgttgatctacattctcccatcttttctcactgctgaaattaaatatacgcggaatttgagtactattcatatttccggcttattttacgtcggcagatacatattctggagtaaacatgagaaatatcttgctttgatagtagaggtcaagctggtagtgcttcgccatcgctgcattcc

SEQ ID NO: 144642 - DNA, 262 bp, Glycine max
gtgagaacaccattgaattttgattctagcaagcagagcttttgtcaattttctattgaccttctcggtggaggaattttagtggacaaaactggagattggatcacacttatacaaaattctccaattagtaacttgttgagagttgctgcttggaagcaaggttgtttaatggtcaagattgtgatgtctgggaatgcagcagtcaaaaggagtgattgggcctcattggtacaagtgtttttaacaaacagcaacagta

SEQ ID NO: 144643 - DNA, 254 bp, Glycine max
acttgttgagagttgctgcttggaagaaaggttgtttaatggtcaagattgtgatgtctgggaatgcagcagtcaaaaggagtgattgggcctcattggtacaagtgtttttaacaaacagcaacagtacagagcattttgatgcatgtaagtggacaaaatcagaaccacattcctgggaattaatcttcccaatagaggtatgtggtcctaataatggttttgaaatgtggagttctgagtgggcaaatcaa

SEQ ID NO: 144644 - DNA, 246 bp, Glycine max
ccatatgacgagatcctgagataccaggattaagcccatatgcacacatattgtctatgggcttaatcctggtatttcaggttctcgtcttttgggcaccattcctcagtccatttcatcgcaaactgtttggcatcaaatggcaacagtgcgcacaccattgaattttgattctagcaagcagagcttttgtcaattttctatcgaccttctcggtggaggaattttagtggacaaaactggaga

SEQ ID NO: 144645 - DNA, 252 bp, Glycine max
gttctgagtgggcaaatcaaacttcatggcatttgagtttccttattgacaatcccaaacagtctacagtttttgatattctcttgggaatctctcaagattttgaaattgctggtaatactcttatgccagctttttctgttccacaggctactgccagatcttctgaaaatgcggaatcctctgcatgatctggaatttatgttttctttcgcttgttcgttcgtttaattcaataaaggaaattgggca

SEQ ID NO: 144646 - DNA, 255 bp, Glycine max
cagatacaattgttaacttgtattttcatggtgcaccaatcgaagatctttgcttagattttactcgccctggttatcctgaatacaccttgaagccaggagatgaaattgttgatatcaacaatttggaggagtatatatccttggtgatcgatgcaactgtcaagactggaatcatgcggcaaatagaagcatttagagcagggtttaaccaggtttttgatatctcatctttacaaatttttactcctcaag

SEQ ID NO: 144647 - DNA, 255 bp, Glycine max
gaaatgtggagttctgagtgggcaaatcaaacttcatggcatttgaatttccttattgacaatcccaaacagtctacagtttttgatattcgcttgggaatttctcaagattttgaaattgctggtaatactcttatgccagctttttctgtcccacaggctactgccagatcttctgaaaatgcggaatcctctgcatgatctggaatttgtgttttctctcgcttgttcgtttgtgtaagtcaataaaggaaa

SEQ ID NO: 144648 - DNA, 261 bp, Glycine max
ttcttttagggggcgcgccagttctgatatttacaccatctgctctcaagactgtgaattatggaatcctgcttgcacaaaagcaatgactatgtcatttaatccagacccgtgttctgatgcatggagtttggaatttctgaagcgtaccggatttcattgtgatatcatttgtgtcactggatggactgccaccccaatgcaggatgttcaggttacaattgattggtttatttcctctcaggaatgtgttcccaggac

SEQ ID NO: 144649 - DNA, 257 bp, Glycine max
ggaacattctgcgtagtgatctattggcaaattttttgacagagggcaattttagagcaagtgttgatttgcagcgcactcatcgtattaaaggaatgattaaaatggtggccacagttggtattcctgagaatacaggtatagcattggcctgtgctatgaatagttcttttagggggcgcgccagttctgatatttacaccatctgctctcaagactgtgaattatggaatcctgcttgcacaaaagcaatgact

SEQ ID NO: 144650 - DNA, 260 bp, Glycine max
agatattcattccccttatctttctctcttctctctccccgcccaaaccctaactccctaccctattccgctttctctcatccatcatgaaaggaggaaagtccaagaccgaatctaagagagccgatgccaaacttgctgtgaataagaagggcgccgccaccaagactaggaaacccgccggaaaggggaaggcagcgaaagatcctaacaagccaaagaggcctccaagtgctttcttcgttttcatggaggaattc

SEQ ID NO: 144651 - DNA, 256 bp, Glycine max
aaaggaatgattaaaatggtggccacagttggtattcctgagaatacaggtatagcattggcctgtgctatgaatagttcttttagggggcgcgccagttctgatatttacaccatctgctctcaagactgtgaattatggaatcctgcttgcacaaaagcaatgactatgtcatttaatccaaacccgtgttctgatgcgtggcgtttggaatttctgaagcgtaccggatttcattgtgatatcatttgtgtca

SEQ ID NO: 144652 - DNA, 256 bp, Glycine max
tgactacaactgatgagagattggtaggcacagaacatgagggatatgatccttttcttggtggaattcaaaaatatgccactcccatgatgcccctagatgaagaaattctttctaaggttgcacaagatatggttgaggaatggtttgattgtgttgatgaggaggattcctttgaggaagtttctttaagtgcagcacttaatggtgttgagggtttggactatatggaaagaattcctcttgccacatctga

SEQ ID NO: 144653 - DNA, 246 bp, Glycine max; identical to SEQ ID NO: 144048

SEQ ID NO: 144654 - DNA, 253 bp, Glycine max
cagattgtgattttctcaagagaaactttaagcagatgtctaatgttttatgggtggctcctgaggacaaggcgagtttatggtcacaacttcattatgtttcgtgcaataatctggaaatgcaagaagcttatcttgtcaatctcgtaaatgtgttacgagaattgtatttgcacagtccagaggaagctcgccaattgagaaggaaagctctctctcgtattgaatggctgcaaaaagctgatgtgcctac

SEQ ID NO: 144655 - DNA, 254 bp, Glycine max
gagagggagaaatgaaggttgtttacttcttcgttgtgctattggctttggcatcctccattgcctttgcttatgatccaagccccctgcaagacttttgtgtggctatcaatgataccaaaactggtgtgttcgtgaatggaaaattttgcaaggatccaaagcttgctaaggctgaagatttcttctttcctggattgggacccggaaacacttcaaaccccctaggctcaaaggtgacagctgtcacggtt

SEQ ID NO: 144656 - DNA, 253 bp, Glycine max
ggaatggactggtttggccaataggttactgagtaagggcaacgatattctgtgttgcgattatgctagttttgatggtttgattaccaagcaagttatgagcaagatggcagaaatgataaacagtctttgtggtggtgatgaaaaattgatgcgtgaaaggacacacctgctgttggcttgttgttcaaggatggcaatttgtaagacagatgtttggagagttgaatgtggaatcccttctggatttccg

SEQ ID NO: 144657 - DNA, 252 bp, Glycine max
cggctcgagtaaatattgatgcacagaagatacgtcatctgacaataatgagaagaaaggtcaatattccaagttctggaatgagtttggtaaatccattaaacttggtatcatcgaggatgccaccaacagaaatcgagtggcaaaactgctcagatttgagagcaccaagtctgagggtaaattgacatctctggatcagtacatatctagaatgaaagctgggcagaaggatatcttttacataactgg

SEQ ID NO: 144658 - DNA, 245 bp, Glycine max
gcaagaggctctagacacgctaattatgggaaacaagactactattttaatagcacatagggctgcaatgatgaggcatgtggacaatattgtagtgcttaatggaggacggatagtggaggagggcagtcatgatacattggtagccaagaatggtttgtatgtccgactgatgcaacctcattttggtaaggctttgcgtcaacatcggcttgtttaggatgggagtatgtgatgttgtgaga

SEQ ID NO: 144659 - DNA, 248 bp, Glycine max
ccttttaactggattggacctcgaatggatttcattcctggcattgatggtccaagtgagggtgttcctcgggttcttacatgcttgagcaataatcttctcagaggagagcccctcaagcttgtggacggtggccagtcccagagaacctgtgtttacattaaagatgctagtgaagctgtcttgctgatgcttgaaaaccctgccagggccaatggccacatatttaatgtgggtaacccaaacaa

SEQ ID NO: 144660 - DNA, 255 bp, Glycine max
gttatgagcaagatggcagaaatgataaacagtctttgtggtggtgatgaaaaattgatgcgtgaaaggacgcacctgctgttggcttgttgttcaaggatggcaatttgtaagaaagatgtttggagagttgaatgtggaatcccttctggatttccgctcacagttatttgcaatagcatttttaatgagatgctcattagatatagctatgaaaaattactgcgccaggctaaagctccaagtatgttttta

SEQ ID NO: 144661 - DNA, 249 bp, Glycine max
gaaattttcacaagaggaatttcttacagcttggtcaactcaggtgcgtcccgcaacgactctgttggctgatgggtgcccatatttgtatgctatggtgcatgatagttcagtgtctacaataccaggtgattttgtcattggtgttaagttgacaaccataaacaatatgtgtgcatatgggctcaatcctggtatttcaggttctcgtcttttgggcaccattcctcagtccatttcacagcaaac

SEQ ID NO: 144662 - DNA, 252 bp, Glycine max
gcacaccacacaaaaaagcaaaataagagagaacaactgttactcacacacgccatgggtaaatgactggttttacgagcaacagcagttaaaagagaaaagggattcagcgaagatgacatcggttggtgtggcaccaacttcgggtttgagagaagccagtgggcatggagcagcagctgcggatagattgccagaggagatgaacgatatgaaaattagggatgatagagaaatggaagccacagttgt

SEQ ID NO: 144663 - DNA, 237 bp, Glycine max
tgtagttcaaatacccttaatggcacaggaggaaattctgtcttctagtgcaagtgatttcagaactgcaatggtgagtaaaaatagcaaacctcaagctactgcaatgcatgtgggagctatagaaattatcattgatagtttcgcaagtcctgactgcaacatagttggtgcaatgcttttggttgatacttatcataccaatcctgaaaatgcagttcgtagtatttttgttgc

SEQ ID NO: 144664 - DNA, 234 bp, Glycine max
cggctcgagcggctcgagagtggcttagccgcaattctcaaaggagcacaccctcagtggagccctgccgccatcaggtccgcactcatgacaacagcgtacacgagttataaaaacggtgaaacgattcaagatatttcaacaggacaacctgggacgccgtttgattacggtgccggacacgtcgatcccgtggccgctcttgatcctggtctcgtctacgatgccaacgtg

SEQ ID NO: 144665 - DNA, 231 bp, Glycine max
gtgttgtcccaaagaaagagcatctttctcctttctttcatcaccgttggaagagactgagatgggttcaaaaaccaagacttttacctttgaggaggtggctaagcacaatcacaggaaggattgctggattatagtcaaagggaaggtgtatgatgtcaccccatttttggatgatcatccaggaggtgatgaagttttagtgactgcaacagagaaggatgccaccac

SEQ ID NO: 144666 - DNA, 233 bp, Glycine max
gagaaactttaagcagatgtctaatgttttatgggtggctcctgaggacaaggcgagtttatggtcacaacttcattatgtttcgtgcaataatctggaaatgcaagaagcttatcttgtcaatctcgtaaatgtgttacgagaattgtatttgcacagtccagaggaagctcgccaattgagaaggaaagctctctctcgtattgaatggctgcaaaaagctgatgtgccta

SEQ ID NO: 144667 - DNA, 236 bp, Glycine max
atcgggaatctctctcttcaccaaatccacgttcctcacttccgagcgatccactctccaacgattcctcgttgccccttccatttccttcgcctccagaaattacgccaacgtgccggggcaaaaggaaaacaaagttaaggtccctctggctttgtttggaggttcaggaaactatgcctctgctttgtatattgcatctgtgaaagctaatgcagtggcaaaggttgagtctg

SEQ ID NO: 144668 - DNA, 240 bp, Glycine max
ggcaaaaggagatttgtctctggggatggtgaagagatgacattgattccaggaaccagtgttgaagaggcttacaacaagctaatagttgaacttgagaaaagtgttcctacattggttggcattgaatgtcccaaggatgagaaacttcctcgtcgcaaaatttttgacaaacctaagacgcgctgcttcactattctccctatggagtttaatcttgtggtccgtcaaaagttttta

SEQ ID NO: 144669 - DNA, 253 bp, Glycine max
tcatgacccatgattcaataggacttggagaagatgggccaacccaccagcctattgagcacctagcaagcttccgggcaatgccaaacattttgatgcttcgtcccgccgacggtaacgaaacagccggagcatacaaagtggccgtgctcaacaggaagagaccctccattcttgccctatccaggcaaaaactgccccagcttcccggaacttccattgaaggagttgaaaagggtggttacaccatttc

SEQ ID NO: 144670 - DNA, 248 bp, Glycine max
cctttgcactttcctcctcttccttgtgatttttgtttgcatcacagggagaaactgagacacagaagatgagagagataattagtattcatattggacaagctggaattcaggtggggaattcatgctgggagttgtattgccttgagcatggaattaaccctgatggcaccatgcctagtgatacctcagttggtgtagcacatgatgctttcaacaccttcttcagcgagacgggatccggcaag

SEQ ID NO: 144671 - DNA, 239 bp, Glycine max
ctcgagcgctcgagccgtttcacagcaaactgtttggaatcaaatggcaacagtgagcacaccatagaattttgattctagcaagcagagcttttgtcaattttctattgaccttctcggtggaggaattttagtggacgaaactggagattggatcacacttatacaaaattctccaattagtaacttgttgagagttgctgcttggaagaaaggttgtttaatggtcaagattgtga

SEQ ID NO: 144672 - DNA, 237 bp, Glycine max
  unsure (1)..(237): unsure at all n locations
taccacttctcttgccaattcacagctgatctatttgccatgaaccacacagatttcattanccaccagtaccttccaggagattgctggaagcaaggacactgttggacagtatgagtctcacacagcctttacccttcctggactctaccgtgttgtgcacggcattgatgtctttgatccaaaattcaacattgtctcccctggagctgatcaaaccatttacttcccccccac

SEQ ID NO: 144673 - DNA, 234 bp, Glycine max
gacttaacaacagcacaaagcgggttactgtctgttcaagctaccatctctctctctctttcttagtgcctccttgccagaagttaaaatggcccaagaaactttcctattcacatctgaatcagtgaacgaggggcaccctgacaagctctgtgaccagatctccgatgctgtgctcgatgcatgcttggagcaggaccctgacagcaaggttgcctgtgacacctgcaccaa

SEQ ID NO: 144674 - DNA, 229 bp, Glycine max
accgcatcgagtctgtcccggagctcccccttgtcgtcagcgactccgccgaaggagtcgagaagacaaaagaagcgatcaaagtcctcaagcagatcggagcattcccggacgccgaaaaggctaaagacagccgcagcattcgtcccggcaagggaaaaatgcgtaaccgccgctacatctctcgccggggaccacttgtggtgtacggaaccgaagtgcgaaggcc

SEQ ID NO: 144675 - DNA, 228 bp, Glycine max
gcagaagatgcttttaagggatttagaccagggccaggtagaattacagcatacttgccatctggaggtccatttgttagaatggatagccatgtttatcctgattatgtggttcctccaagctatgactcccttcttggaaagctgattgtatgggctccaacaagagaaaaagcaattgaacgcatgaaaagggcacttgatgacactattatcacaggagttcct

SEQ ID NO: 144676 - DNA, 152 bp, Glycine max
tgaggaatggtttgattgtgttgatgaggaggattcctttgaggaagtttctttaagtgcagcacttaatggtgttgagggtttggactatatggaaagaattcctcttgccacatctgagggttttcctcatgtgcttccacacaacatac

SEQ ID NO: 144677 - DNA, 236 bp, Glycine max
ctgatggttcctacaatgttccagctggacttatatattcattccccgtcacttgtgccaatggggaatgggcaatagttcaaggactttccattgatgagttctcaaggaagaagttggacttgactgcagaagagctttctgaggagaaggcattggcttactcatgcctaaattagacaccattgctttttgtctactgtccttgttagtaggttcccatgttttgcctatag

SEQ ID NO: 144678 - DNA, 244 bp, Glycine max
cactcatcgtattaaaggaatgattaaaatggtggccacagttggtattcctgagaatacaggtatagcattggcctgtgctatgaatagttcttttagggggcgcgccagttctgatatttacaccatctgctctcaagactgtgaattatggaatcctgcttgcacaaaagcaatgactatgtcatttaatccaaacccgtgttctgatgcatggagtttggaatttctgaagcgtaccgga

SEQ ID NO: 144679 - DNA, 233 bp, Glycine max
agagattcaggaaaaagttgtgttgaaattttcacaagaggaatttcttacagcttggtcaactcaggtgcgtcccgcaacgactctgttggctgatgggtgcccatatttgtatgctatggtgcatgatagttcagtgtctacaataccaggtgattttgtcattggtgttaagttgacaaccataaacaatatgtgtgcatatgggctcaatcctggtatttcaggttctc

SEQ ID NO: 144680 - DNA, 229 bp, Glycine max
agaaattgggcgtgtgggagttgttgaatcgggaagcaaaaaaaatgagaatccatcacatagcatgcctccaagacaattattcctatctgatcgtagacgagagcacgaaggaagccgcggcggtggacccggtcgaaccggagaaggttcttgaagttgccagctcgcacggcctcactctcaaattcgtcctcaccacccaccatcactgggatcatgctggtgg

SEQ ID NO: 144681 - DNA, 226 bp, Glycine max
tcttcttctcttgcggctagggttttagcgcagtttcctctagatttaaggaagatgggtaaggaaaaggttcacatcagtattgtggtcattggccatgtcgactctgggaaatccactaccactggtcacctgatttacaagcttggaggcattgacaagcgtgttattgagaggtttgagaaggaagctgctgagatgaacaagaggtctttcaagtatgcct

SEQ ID NO: 144682 - DNA, 246 bp, Glycine max
gaaattgtaataaaccgcgatcacatgttgccgcaccttaaaaccggaaacaaaagcaatcgttacttgatttcaagaatttctcaatttcttcctacttctttgtgtacgatttcttaagggaaagaaaatcactctctgtgctggtcacagacttcgtgaatcattttcttttccactcctagtttattttctgaacactctcctatttgatataggacttcgtgtcagatttaaactttttct

SEQ ID NO: 144683 - DNA, 237 bp, Glycine max
gtcgtcgcgtgtactttcttgcgaaacagaagggcgaaggggcaaacacaacttttttgtttttttgtagagcgagagagaaaaaaatgttggggatcttcagcagttccgtggtgtcgccgccggaggagctggtggctgccggcagcagaacgccgtcgccgaagacgacggcggggaagctgctgaaccggttcgtggagaacaaggcgtcggcggtgtcgctgcaggtgggag

SEQ ID NO: 144684 - DNA, 236 bp, Glycine max
ctgggaaatgtatgccattggtggaagtgccaatccaaccatcaactgccaaggcaacagatttgttgcacccgatgacagattcagcaaagaggtgacaaaacgtgaagataccccagagagtgagtggcaggattggaattggaggtcagaaggggacttgttagtaaacggtgcctttttcacagcatcgggtgctggagcctcctctagctatgcaagggcttctagcttaa

SEQ ID NO: 144685 - DNA, 231 bp, Glycine max
ctctctctctcgctctttcagctttgactttggtggaaactaaagactagtcaaaatggtgaagttcacagctgaagagctgcgtcgcattatggactataagcataatatccgtaatatgtctgtcattgctcatgttgatcacggaaaatcaaccctgactgattctcttgtggctgctgctggtattattgctcaagaagttgcaggtgatgtccgtatgactgatac

SEQ ID NO: 144686 - DNA, 227 bp, Glycine max
ggctcccaagggtttaatctttttggctgtgttatgcttctcagcactgtcactgagtcgttgtcttgcggaggataatggacttgttatgaacttctacaaggaatcatgccctcaggctgaagacatcatcaaagaacaagtcaagcttctctacaagcgccacaagaacactgctttctcctggctcagaaacatcttccatgactgtgctgttcagagttgtg

SEQ ID NO: 144687 - DNA, 223 bp, Glycine max
caaaattgatggtgtagtttggagagattcaggaaaaagttgtgttgaaattttcacaagaggaatttcttacagcttggtcaactcaggtgcgtcccgcaacgactctgttggctgatgggtgcccatatttgtatgctatggtgcatgatagttcagtgtctacaataccaggtgattttgtcattggtgttaagttgacaaccataaacaatatgtgtgc

SEQ ID NO: 144688 - DNA, 223 bp, Glycine max
atttgagtttccttattgacaatcccaaacagtctacagtttttgatattctcttgggaatctctcaagattttgaaattgctggtaatactcttatgccagctttttctgttccacaggctactgccagatcttctgaaaatgcggaatcctctgcatgatctggaattcgtgttttctttcgcttgttcgtttgtttaattcaataaaggaaattaggcat

SEQ ID NO: 144689 - DNA, 224 bp, Glycine max
catagtagctattatactctctagagtaattgcggaatctgctagaattttctaataatggcgaaagacgttgagcaggtcacagagcaaggtgaatactccgcgaaggactaccatgaccctcctccggcaccgttgatcgacccagatgagctcacaaagtggtccttgtacagagccgccatagctgagttcatagcaacactcctttttctttacatcac

SEQ ID NO: 144690 - DNA, 226 bp, Glycine max
aagactgtgaattatggaatcctgcttgcacaaaagcaatgactatgtcatttaatccaaacccgtgttctgatgcatggagtttggaatttctgaagcgtaccggatttcattgtgatatcatttgtgtcactggatggactgccaccttaatgcaggatgttcaggttacaattgattggtttatttcctctcaggaatgtgttcccaggacctattgtgtttt

SEQ ID NO: 144691 - DNA, 230 bp, Glycine max
gaagcttatcttgtcaatctcgtaaatgtgttacgagaattgtatttgcacagtccagaggaagctcgccaattgagaaggaaagctctctctcgtattgaatggctgcaaaaagctgatgtgcctaccatagcacagattgaagagttccattcgatgcagaggatgatgaatgctcctgattcaaatgataatattgatctactgttgagcattgatttgttgggttt

SEQ ID NO: 144692 - DNA, 233 bp, Glycine max
cttaattagtgttcatgaatatgtcaagccttactttagtggtgctaaattgaaaagctttctagctggtcataatatcaccattactgatggtattgacaaaactagtgcaactttgcaatttagaaagttagcagattgtgattttctcaagagaaactttaagcagatgtctaatgttttgtgggtggctcctgaagacaaggcgagtttatggtcacaacttcattatg

SEQ ID NO: 144693 - DNA, 236 bp, Glycine max
atcttaattcagtcagaggtttttctgtggttgatgaaatcaaagctgcggtggacaaagcctgcaaacgccatgtggtctcatgtgcagatatcttggccattgcagcccgtgattctatagccatatatgggggtccacactactggtaccaagtattgttgggcagaagagatgcaagaactgcaagcaaagctgctgcaaactccaatcttcctcctccaacattcagcttc

SEQ ID NO: 144694 - DNA, 229 bp, Glycine max
gcaaaaatggcgaaaaaggcaaaaggagatttgtctctggggatggtgaagagatgacattgattccaggaaccagtgttgaagaggcttacaacaagctaatagttgaacttgagaaaagtgttcctacattggttggcattgaatgtcccaaggatgagaaacttcctcgtcgcaaaatttttgacaaacctaagacgcgctgcttcactattctccctatggagtt

SEQ ID NO: 144695 - DNA, 241 bp, Glycine max
gcttggaagaaaggttgtttaatggtcaagattgtgatgtctgggaatgcagcagtcaaaaggagtgattgggcctcattggtacaagtgtttttaacaaacagcaacagtacagagcattttgatgcatgtaagtggacaaaatcagaaccacattcctgggaattaatcttcccaatagaggtatgtggtcctaataatggttttgaaatgtggagttctgagtgggcaaatcaaactt

SEQ ID NO: 144696 - DNA, 231 bp, Glycine max
ggcattgcaggtctcagatgagggaggtggaattgcaagaagtgggttgcctaaaatttttacatatctatatagtactgcgagaaacccattggatgagcattcggatcttggaataggtgataatgtgacaatggctggatatggatatggtcttcctattagtcgtctatatgctcggtattttggaggtgatcttcaaataatctctatggaaggatatggtgagta

SEQ ID NO: 144697 - DNA, 232 bp, Glycine max
gaaactgcactgaagaatcctcaacgagctgttcaactgaatcccagatttgcatatgcacacaccctttgtggacatgagtatgttgcactagaagattttgagaatggaatcaaatgctaccagagtgcgctcacagttgatgcaaggcattataatgcttggtatggacttggaatggtatatcttcgccaagaaaagtttgagttctctgaacatcattttcggatgg

SEQ ID NO: 144698 - DNA, 228 bp, Glycine max
gaacagagcgacgaataatgggtattggaaggcgacggggaaggatcgtaaaatcaagtctgggacgattttgattggaatgaagaagactttggtgttctacactggtcgagcaatcaaggggaataggaccaattgggttatgcatgagtatcgccccactttgaaggagcttgatggtaccaatcctggacagaatccatatgtcctttgtcgcttgtttaagaa

SEQ ID NO: 144699 - DNA, 224 bp, Glycine max
aaacagcaacagtacagagcattttgatgcatgtaagtggacaaaatcagaaccacattcctgggaattaatcttcccaatagaggtatgtggtcctaataatggttttgaaatgtggagttctgagtgggcaaatcaaacttcatggcatttgagtttccttattgacaatcccaaacagtctacagtttttgatattctcttgggaatctctcaagattttg

SEQ ID NO: 144700 - DNA, 217 bp, Glycine max
gagttttgtttatttgaaattaacaagtagcaaagatgtttggactcatcggaggaaacaagggtcacaagataaaggggaacttggtgattatgcgaaagaatgtgttggatatcaacagcattaccagtgttaagggtgtcatcggaaccggcattaacatcattggaggagtcgtcgacaccgttactgctttggcgtcccacatctccatcca

SEQ ID NO: 144701 - DNA, 214 bp, Glycine max
gcggtaggctcatccgagaccggaagcagcaatggggatcgatctcaaggccggaggtaaaagcaaaaaaaccaaaagaacagcacccaagtccaatgatatctatcttaagctcttggtcaagctttatcgcttccttgttcggagaactggcagcaaatccattgcggtattctccaggagattgttcatgagcaaggttaacaagccccca

SEQ ID NO: 144702 - DNA, 222 bp, Glycine max
cagcaaactgtttggaatcaaatggcaacagtgagaacaccattgaattttgattctagcaagcagagcttttgtcaattttctattgaccttctcggtggaggaattttagtggacaaaactggagattggatcacacttatacaaaattctccaattagtaacttgttgagagttgctgcttggaagaaaggttgtttaatggtcaagattgtgatgtct

SEQ ID NO: 144703 - DNA, 228 bp, Glycine max
aacaatattattcaatagaaaagaaagaaagatgagtccaacatgggtttttgtgttaggtattattgcagcaatgttggtggttgtgaatggacaatcatcagtgaagccattggtgaagacagtgaaggggaagaaggtgtgtgacaaagggtgggagtgcaagggttggtctgcttattgctgcaatgagactatctccgattactttcagacataccagtttga

SEQ ID NO: 144704 - DNA, 190 bp, Glycine max
  unsure (1)..(190): unsure at all n locations
taagatttgaaattttaataaaccgcgatcacaggttgccgcaccttaaaaccggaaacaaaagcaatcgttacttgatttcaagaatttctcaatttcttcctacttctttgtgtacgatttcttaagggaaagaaaatcactctctgtgcctgtcacaganctcgtgaatcatttcgtgtccacacaa

SEQ ID NO: 144705 - DNA, 242 bp, Glycine max
gatactcgcaagatatttggacaaagatagcacacccatttgttgtacaacttagatactcttttcagacaaaatacagactgtatcttgtgctggattttgtaaatgggggccatctgttcttccagctgtatcaccaaggccttttcagagaggatctagcacgcatatacactgctgagattgtttgtgcagtttcccatctccattcaaatggaataatgcacagggatctaaaacct

SEQ ID NO: 144706 - DNA, 269 bp, Glycine max
ggaaagtcgtacttaaatagacagaacaatggacatggaactatgttttcaagacgatttatccatgcaggaccatatgataatctgaaagatattgccatgaagatcttgcaaaaggaggtttcaacagttcctattatccattcatcttctgaagatgcttcatttccacagttactacatctcgcttcactttcaggaatacttaaatgcatttgtaggtattttaggcactgctctagttccctgcctgtacttcaacttccaat

SEQ ID NO: 144707 - DNA, 263 bp, Glycine max
ctgggaatgcagcagtcacaatcttgaccattaaacaacctttcttccaagcagcaactctcaacaagttactaattggagagagttgctgcttggaagaaaggttgtttaatggtcaagattgtgatgtctgggaatgcagcagtcataaggagtgattgggcctcattggtacaagtgtttataacgaacagtaacagtacagagcattgtgatgcatgtaagtggacaaaatcagaaccacattcctgggtattaatctt

SEQ ID NO: 144708 - DNA, 212 bp, Glycine max
attgagacaaagaatagatcctcaatacaatgaggttcaggctcagatggaaacaaatttgtttaaattgtctcttgatgatgttgaaactcctaaaggttctatgttggatcttaaaatttctcaatctaaaattgcacttcccaagaacacagttggaggaaccattctgcgtacgtgatctattgcaaattttttacagagggcaattt

SEQ ID NO: 144709 - DNA, 265 bp, Glycine max
  unsure (1)..(265): unsure at all n locations
gtcaaagcaagataagaaacgaatgcttcatgtcgtctaccgtgttggtgaccttgatcgcaccatcaaattttacacagaatgtttaggaatgaagcttttgaggcaaagagatatcccagaggagaaatatgctaatgcttttcttggatttggccctgaagaatcccattttgttgttgaattaacatataattatgggggtacctcgntatgacatggcgnatggcttgtgacattttgcaatgcaactcaggacggccaa

SEQ ID NO: 144710 - DNA, 205 bp, Glycine max
attctcttgggaatctctcaagattttgaaattgctggtaatactcttatgccagctttttctgttccacaggctactgccagatcttctgaaaatgcggaatcctctgcatgatctggaattcgtgttttctttcgcttgttcgtttgtttaattcaataaaggaaattaggcatgaccctcttgttgagtatgctctgcctat

SEQ ID NO: 144711 - DNA, 269 bp, Glycine max
gggtgcgcttcaagttgaagttctcaatctgattgcaaaggagcaaatgggtgataatgattcgctctccgaattcctcgcatctgcagtcgacgctgcttgcaaagctggtgagcttattcggaaaggtttctatcagaccaagaacgtgcagcacaaaggactggttgatttggtcactgaaactgatcatgcatgtgaagatctcatatctactcatctcaagcaactttactccactcataagtccattggggaggaaccacagc

SEQ ID NO: 144712 - DNA, 130 bp, Glycine max
cgcatcgagcctcactgctgaaattagatataagcggaatttgcgtaatattcatatttccggcgtattgtacgacggcagctacaaattctggactaaacacgagaaacatcttgcgttgacagcagag

SEQ ID NO: 144713 - DNA, 267 bp, Glycine max
ctttaagcagatgtctaatgttttatgggtggctcctgaggacacggcgagtttatggtcacaacttcattatgtttcgtgcaataatctggaaatgcaagaagcttatcttgtcaatctcgtaaatgtgttacgagaattgtatttgcacagtccagaggaagctcgccaattgagaaggaaagctctctctcgtattgaatggctgcaaaaagctgatgtgcctaccatagcacagattgaagagttccattcgatgcagaggat

SEQ ID NO: 144714 - DNA, 248 bp, Glycine max
cagagttgagaccaagacacactcgttcatatatctctctgctcttctcttctcttctacctctcaagtttttgaagtataaagatggcagagacattcctattcacctcggagtcagtgaacgagggacaccctgataagctctgcgaccaaatctccgatgctgtcctcgacgcttgcctcgaacaggaccagacaagaaaggttgcctgcgaaacatgcaccaagaccaacttggtcatggtctg

SEQ ID NO: 144715 - DNA, 265 bp, Glycine max
gtgtttttaacaaacagcaacagtacagagcattttgatgcatgtaagtggacaaaatcagaaccacattcctgggaattaatcttcccaatagaggtatgtggtcctaataatggttttgaaatgtggagttctgagtgggcaaatcaaacttcatggcatttgagtttccttattgacaatcccaaacagtctacagtttttgatattctcttgggaatctctcaagattttgaaattgctggtaatactcttatgccagctt

SEQ ID NO: 144716 - DNA, 267 bp, Glycine max
aaaaaagaataagtacaagagtagtaaagttaaagacacttacagatgatttgttgctgtaacaagatggatgctactacaccaaagtactccaaggccaggtatgatgaaattgtgaaggaagtttcttcctatttgaagaaagtaggatacaaccgtgacaagattccttttgttcctatatctggttttgagggagacaacatgattgagaggtccacaaaccttgactggtcaaagggtcttattctgctagatgcacttgac

SEQ ID NO: 144717 - DNA, 162 bp, Glycine max
caaatcaatctccaggctatctatcaagtaagagagctgttaagaggaggagaatggctgatgatggaagcaggagggaattgatattcaggtcgaagcttccggatatctacatccccaaacatatgcccctccactcttactgcttcgagaatttgagag

SEQ ID NO: 144718 - DNA, 148 bp, Glycine max
atcgaagctctatggcgtaacgagcaattctgggtcattggaggtgtttctgctcacctttttgctgtattccaaggcctcctcaaagttcttggtggagtagacaccaacttcactgtcacagcaaaagcagcagaggacactgaat

SEQ ID NO: 144719 - DNA, 264 bp, Glycine max
tctcgagccgattcggctcgagggtttctatggcttctgaagtaatagagtaccgatgctttgtcggtgggcttgcttgggccaccgacagcgatgctctcgagaaagccttctctcattatggtgagatcgtcgaatcgaaggttatcatcgatcgtgaaactggaagatcgagagggtttggatttgtgaccttcgcctcggagcaggcgatgaaagacgcaatcgaaggaatgaacggtcagaacctcgacggtcgtagta

SEQ ID NO: 144720 - DNA, 261 bp, Glycine max
gcataattgataagaatacataatctctatttgtgcttcttgggtgcagatgtttgtattgttggtgttgcgcggacgccaataggtggtttacttggcaccctatcatctctttctgccacagagttaggctcaattgctattaagagtgctctcgagagagcaaatgttgatccatcgcttgtgcaagaggtgttttttgggaatgttcttagtgccaatttagggcaggctcctgccagacaggctgcattaggtgca

SEQ ID NO: 144721 - DNA, 257 bp, Glycine max
ggcaattttagagcaagtgttgatttgcagcgcactcatcgtattagagtgatgattaaaatggtggccacagttggtattcctgagaatacaggcatagcattggcctgtgctatgaatagttcttttagggggcgcgccagttctgatatttacaccatctgctctcaagactgtgaattgtggaatcctgcttgcacaaaagcaatgactatgtcatttaatccaaacccgtgttctgatgcatggagtttgga

SEQ ID NO: 144722 - DNA, 259 bp, Glycine max
attggacaaaagctattcactttgcaaatgtatacatagataatttatgtgttaagcttaattgcattaataacatgacatgttcttatttactggtatacaaaatgaagcaaaagagaaggaatacatttttcaaacagaacttacaagacatgagaaagaatataattagacagtgacactgcgtacacaacagtctcaacagtgagtccagggccaaaaccaaataacacaccccattcaagtccttcaccagttg

SEQ ID NO: 144723 - DNA, 237 bp, Glycine max
caaccctaacgcgtgcagagcagagagagacgcagccatggggcgaagacccgcgaggtgttataggcaaattaagaacaaaccataccccaagtcacggttttgccgtggtgttcctgatcccaagatcaggatttacgatgttggtatgaagaagaagggtgttgatgagtttcctttctgtgtccatctggttggtatgggagaaggaaaacgtttctagtgaggccctggaag

SEQ ID NO: 144724 - DNA, 263 bp, Glycine max
  unsure (1)..(263): unsure at all n locations
gaagcacttttggatgttgcgtcatgtcttgcaagcagtgctcagacccagaagggatggaatcgcataatatttgagaagccatttggctttgatgcactttcttcccataggctgacacaatatcttctttcaaactttcaggaaaagcaaatatatagaattgancatctactaggaaggaatcncagtnaaaatcctncaggtttaagggtttcaaannnagnttttgagccaccttngagnngnacntnnnnnganna

SEQ ID NO: 144725 - DNA, 177 bp, Glycine max
gatcaaaccatttacttcccccacactgaaaccagccgtaggttgacatccttccaccctgaaatcgaagaactcctttacagctcagtggagaatgaagaacacatatgtgtgctgaaggaccgcagcaagccaattatcttcaccatggcaaggttggatcgagtgaagaacatc

SEQ ID NO: 144726 - DNA, 260 bp, Glycine max
gctaagtacaagagcatctcgtctggttttggagttttgcttaaggagcagggattcaggggcttttttcgtggctgggtgcctaccttgcttggttatagtgctcagggtgcttgcaaatttggattttacgagttctttaagaagtactattctgatattgctggcccagagtatgcaagcaagtacaagaccttgatctaccttgctggttcagcatctgctgaggttattgctgatattgctctatgcccatttga

SEQ ID NO: 144727 - DNA, 197 bp, Glycine max
ggaatgattaaaatggtggccacagttggtattcctgagaatacaggtatagcattggcctgtgctatgaatagttcttttagggggcgcgtcagttctgatatttacaccatctgctctcaagactgtgaattatggaatcctgcttgcacaaaagcaatgactatgtcatttaatccaaacccgtgttctgatgc

SEQ ID NO: 144728 - DNA, 268 bp, Glycine max
atagtttgttacttctcttcgccttttgctttgcaattgtcaccaaacaattcttgcttagctctcacaagcaagcattatcaacaatgaagaaaattgtgttaaaggtggacttacatgatgacaggatcaagcgaaaagctatgaagacagcatctggcctttcgggggttcaatcagtttctgttgacattaatgacaagaaaatgaccttattgggggatgttgatccagtgagtgcagtgtcaaagctacgaaagtggtgtca

SEQ ID NO: 144729 - DNA, 255 bp, Glycine max
ctacaactgatgagagattggtaggcacagaacatgagggatatgatccttttcttggtggaattcaaaaatatgccactcccatgatgcccctagatgaagaaattctttctaaggttgcacaagatatggttgaggaatggtttgattgtgttgatgaggaggattcctttgaggaagtttctttaagtgcagcacttaatggtgttgagggtttggactatatggaaagaattcctcttgccacatctgagg

SEQ ID NO: 144730 - DNA, 255 bp, Glycine max
ggagctggtgcaaagaatgctattctcatgaatatgccaaatgctgttctttcaatgtggagatattttgttggagatctcgtctttgaagtttctaagatgacttctccctacattaaatgtacagtctctttcttcatagcatttggaaatttggctgatgacaccatcaattttgaggctttccccacaagctggtgcagtttggagagattcaggaaaaagttgtgttgaaattttcacaagaggaatttc

SEQ ID NO: 144731 - DNA, 252 bp, Glycine max
atcaaacttcatggcatttgagtttccttattgacaatcccaaacagtctacagtttttgatattctcttgggaatctctcaagattttgaaattgctggtaatactcttatgccagctttttctgttccacaggctactgccagatcttctgaaaatgcggaatcctctgcatgatctggaattcgtgttttctttcgcttgttcgcttgtttaattcaataaaggcaattaggcatgaccctcttgttga

SEQ ID NO: 144732 - DNA, 224 bp, Glycine max
  unsure (1)..(224): unsure at all n locations
ctcgagccgatgatagttcagtgtctacaataccaggtgattttgtcattggtgttaagttgacaaccataaacaatatgtgtgcatatgggctcaatcctggtatttcaggttctcgtcttttgggcaccattcctcagtccatttcacagcaaacatgtttggaagcaaagtgcaacagntagaacaccagtgaattttgactctagcaagcagagcgtttg

SEQ ID NO: 144733 - DNA, 194 bp, Glycine max
tcaaagaaggcgtcttcataaacgcctttcttctccgtttccgtttcctcgttcgaattcgctttttgatctgcgaaaatgagagagtgcatctcgatccacattggtcaggctggtatccaggtcggaaatgcttgctgggagctctactgcctcgagcacggcatcgggcccgatgggcaaatgccaagtga

SEQ ID NO: 144734 - DNA, 254 bp, Glycine max
gaaaaagctggcataagagtattaccagcaatttctgttccacaggctactgccagatcttctgaaaatgcggaatcctctgcatgatctggaattcgtgttttctttcgcttgttcgtttgtttaattcaataaaggaaattaggcatgaccctcttgttgagtatgctctgcctatctgaaaatttccacacctcttttaattgtcgtaatgatgtgtgaagtgtgtgttattttaaaaaaaaaggataagg

SEQ ID NO: 144735 - DNA, 181 bp, Glycine max
aagatttgaaattttaataaaccgcgatcacaggttgtcgcaccttagaaccggatactgtagctatcgttacttgatttcgagattttctcaatttcgtcctactgctttgtgtacgatttcttaagggaaaggaaatcactctctgtgctggtcacagacttcgtgaatcattttcttt

SEQ ID NO: 144736 - DNA, 262 bp, Glycine max
ggaaagttggacttatcttggcagaaatggacttatcaggttgggctgaaaggtgaggccatgaatcttgcatctccaaatggtatctcttctgtagagtggatgcagtctgcattagtttcagagaaaaatcaaccactgacttggcacaagacttattttgatgctccagatggagacgagccgttagcattggacatggagggtatgggttcaggtcaaatatggattaatgggctgagcattggaagatactggactg

SEQ ID NO: 144737 - DNA, 225 bp, Glycine max
  unsure (1)..(225): unsure at all n locations
atgannnnncacatatgtgtattnaaggaccgcaacaagncgaancatcttcaccatggcaagacttgaccgtgtgaagaacatcacgggacttgtggagtggtatggcaagaatgcgcgcctccgcgagttggtaaacctcgtggtggtggccggagacaggaggaaggagaccaaggacttgaagagaaggccgagatgaagaagatgtatggccncatcgag

SEQ ID NO: 144738 - DNA, 237 bp, Glycine max
gaaaaagctggcataagagtattaccagctgtttctgttccacaggctactgccagatcttctgaaaatgcggaatcctctgcatgatctggaattcgtgttttctttcgcttgttcgtttgtttaattcaataaaggaaattaggcatgaccctcttgttgagtatgctctgcctatctgaaaatttccacacctcttttaattgtcgtaatgatgtgtgaagtgtgtgttatttt

SEQ ID NO: 144739 - DNA, 254 bp, Glycine max
gacttaaggcacattcgacggttgcgattctggcccttgaataaagtcctcttggagaagtatgacttgagtgagaaagatgcaaatgatatgacagactttttggttcctatccttgactttgttcctgagaagcggccaacagctggtcagtgccttctccatccatggatgaatgctggtcctcgccttttggagccatctgtgccttctaatcacaaccctgctgctgaaacttccgtttcggatcagaa

SEQ ID NO: 144740 - DNA, 255 bp, Glycine max
ctcgagccgaatcggctcgaggggaatctctcaagattttgaaattgctggtaatactcttactgccagctttttctgttcaacaggctactgccagatcttctgaaaatgcggaatcctctgcatgatctggaatttatgttttctttcgcttgttcgttcgtttaattcaataaaggaaattgggcatgaccctcttgttgagtatgctctgcctatttgaaaatttccacacctcttttaattgtcgtaatg

SEQ ID NO: 144741 - DNA, 207 bp, Glycine max
aaacacgctgttcctacaatcattccaaatgtgcccttccggtcgcaccctcctcccttcctccgtctccgatttccgaccggcattcgacgtcctcgatgccgaccgcgacggcaaaatcagccgcgacgacctccgcgccttctacgccggagtcggcggcggaggagatgacgtgatcggggcaatgatgacagtggctgacac

SEQ ID NO: 144742 - DNA, 259 bp, Glycine max
ggcaacagtgagaacaccattgaattttgattctagcaagcagagcttttgtcaattttctattgaccttctcggtggaggaattttagtggacaaaactggagattggatcacacttatacaaaattctccaattagtaacttgttgagagttgctgcttggaagaaaggttgtttaatggtcaagattgtgatgtctgggaatgcagcagtcaaaaggagtgattgggcctcattggtacaagtgtttttaacaaac

SEQ ID NO: 144743 - DNA, 258 bp, Glycine max
  unsure (1)..(258): unsure at all n locations
gtccaacctacccctttttcttctcccaccaacttcaccgntgcacttcctcgatcatgtctcacttcaagggcaagtaccatgatgagcttattgccaatgctgcttacattggcactcctggaaagggtattcctgctgctgatgagtcaacagggacaattggcaagcgtttggccagcatcagtgtagagaatgttgaatccaacaggcgtgctcttagggagctgcttttcaccgctcccggtgctcttaaat

SEQ ID NO: 144744 - DNA, 259 bp, Glycine max
cggccagccgcggtggccggtggggacacaagaactaacctacgccttcgatcccgataacgctctcgacgacgtgattaagaccgtgtttggcaacgcgtttagcagatggtcagaggtgaccacgatttctttccgcgaaacggcgtcgtatgtggctgcggacataagaacggttttacggtggggaccacggcgacggcgaaccttttgatggcgtgttggggacgttggcgcacgcgttctcgccgacgaacgg

SEQ ID NO: 144745 - DNA, 263 bp, Glycine max
gttaagataagatgtctcgcacgtgctcacagtgcggcaacaacggccacaactcgcggacatgcaccgacggtggcgccgccgcttcctgcggcgggtctcccagggacgaacggcatcatgctgttcggcgtaagagttatgaccgaagctaactcctccttccggaagagcgccagcctgaacaacctctcacagtacgacgcggaatccaacgccgccgacgccggctacgcctccgacgacgttgttcatgcctccgg

SEQ ID NO: 144746 - DNA, 203 bp, Glycine max
agagaattacacaaacactaattaacacactgagtcttaagtttctctgtttatcacaaagatggtgagaaccccatcttgtgacaaaagtggaacgaggaaaggtacttggactccggaggaagatagaaagttaattgcttatgtcactagatatggctcctggaattgcgccaacttcccaggtttctgtctggcaagat

SEQ ID NO: 144747 - DNA, 251 bp, Glycine max
aattttccagtggattcttggttaccaatttttgtgaattgtctttatcctgtaagtcaattaccttcagaagctgtcgttgtaaatgtcacatgtggtagtggacgtggtggtttacccaccactgcttggattagttctgcagttaacaatcgctcctcagatatcaacaaaaggattcgcacagcacttgggaaaggtaagaaaattgtttttcttactagagttgatccttttccagtagctttact

SEQ ID NO: 144748 - DNA, 253 bp, Glycine max
ttggatcacacttatacaaaattctccaattagtaacttgttgagagttgctgcttggaagaaaggttgtttaatggtcaagattgtgatgtctgggaatgcagcagtcaaaaggagtgattgggcctcattggtacaagtgtttttaacaaacagcaacagtacagagcattttgatgcatgtaagtggacaaaatcagaaccacattcctgggaattaatcttcccaatagaggtatgtggtcctaataat

SEQ ID NO: 144749 - DNA, 181 bp, Glycine max
aggccatataatttttttttatttgaaataatgtccgggatcatccacaagattgaggagaccctccatgtgggagggcacaagaaagaggagcacaaaggagaacaccatggtgagcacaaaggtgaacacaaaggagaacaccatggtgagcacaaaggtgaacacaaaggagaacaac

SEQ ID NO: 144750 - DNA, 255 bp, Glycine max
gcaatttgtaagaaagatgtttggagagttgaatgtggaatcccttctggatttccgctcacagttatttgcaatagcatttttaatgagatgctcattagatatagctatgaaaaattactgcgccaggctaaagctccaagtatgtttttacaatccttcaaaaattttgtttctttgtgtgtgtatggtgatgataacttaattagtgttcatgaatatgtcaagccttactttagtggttctaaattgaaa

SEQ ID NO: 144751 - DNA, 231 bp, Glycine max
  unsure (1)..(231): unsure at all n locations
cctaataatggttttgaaatgtggagttctgagtgggcaaatcaaacttcatggcatttgagtttccttattgacaatcaaaaactgtagactgtttgggcttgtcaataaggaaactcaaatgccatgaagtttgagtttccttattgacaatcccaaacagtctacagtttttgatattctcttgggaatctctcaagattttgaattgctngtaatactcttatgcca

SEQ ID NO: 144752 - DNA, 256 bp, Glycine max
gtgatttcagaactgcaatggtgagtaaaaatagcaaacctcaagctactgcaatgcatgtgggagctatagaaattatcattgatagtttcgcaagtcctgattgcaacatagttggtgcaatgcttttggttgatacttatcataccaatcctgaaaatgcagttcgtagtatttttgttgcgcctttcagaggcggaaggcccattcgggtgggtacatttccgaataccattgtgcagattgaaccagacat

SEQ ID NO: 144753 - DNA, 255 bp, Glycine max
gaagaagagcgacgcgctcacggtgcagttccgccagatcctgaagaagatcgtgtccacgaaagaatctatgggcgacatcatgaaaacgtcgtcgttcgcgctcaccgaggcaaaatacgtcgccggcgacaacatcaagcacgtcgtcctcgaaaacgtgaaagaagcctccctccgcgtccggtcgcgccatgagaacgtcgccggagtgaaactcccgaaattcgactacaccgccgacgccgacgccac

SEQ ID NO: 144754 - DNA, 263 bp, Glycine max
ctcttgggagaagaggtcgagtttcacagcagcaatggtgtacgtcaaggctcagaaatcaaaagcctacttcaagagatatcaagtcaagttcaagagaagaagagagggaaaaaccgattaccgtgccaggattcggttgattaatcaggacaagaacaaatataacactccgaaataccgatttgttgttcgctttagcaacaaggacattgttgcacaaataatatctgctagcattgctggcgatattgttcttgctg

SEQ ID NO: 144755 - DNA, 257 bp, Glycine max
caatgtggagatattttgttggagatctcgtctttgaagtttctaagatgacttctccctacattaaatgtacagtctctttcttcatagcatttggaaatttggctgatgacaccatcaattttgaggcttttccccacaagctggtgcagtttggagagattcaggaaaaagttgtgttgaaattttcacaagaggaatttcttacagcttggtcaactcaggtgcgtcccgcaacgactctgttggctgatggg

SEQ ID NO: 144756 - DNA, 249 bp, Glycine max
gaagttgtatgagggtaagcatattcctgtatctaatattagtgcaggggaaaatcatgtagttcaaatacccttaatggcacaggaggaaattctgtcttctagtgcaagtgatttcagaactgcaatggtgagtaaaaatagcaaacctcaagctactgcaatgcatgtgggagctatagaaattatcattgatagtttcgcaagtcctgactgcaacatagttggtgcaatgcttttggttgatac

SEQ ID NO: 144757 - DNA, 187 bp, Glycine max
gaaattttaataaaccgcgatcacaggttgccgcaccttaaaaccggaaacaaaagcaatcgttacttgatttcaagaatttctcaatttcttcctacttctttgtgtacgatttcttaagggaaagaaaatcactctctgtgctggtcacagacttcgtgaatcattttcttttccacacaacata

SEQ ID NO: 144758 - DNA, 245 bp, Glycine max
cggctcgagattgtggttcattggttgttgccaaggttggaaatcacaaacaaattgttggtttccatgttgctggaccaaaggaagactgggatatgcttcattgataccatatgttgagccagttgtgcaagctcaaagtgctgaagtttactttgacttcttccctgtggaggttgatagtcaagagggagttgctcacattggtgaattgaaatctggtgtctatgttccactgcctacaa

SEQ ID NO: 144759 - DNA, 245 bp, Glycine max
ctgctgcatatggacactttggaagagaggaccctgacttcacatgggaagtgatcaagccactcaagtgggaggaggcctaaggccattcattcctcaccgctgtgtgctgggagttttttgagctttgcccttatcatatctataatttgtttcatttattttacttaattcgtgtgtgcttctcactttctcttcctcctctccattctattttgtttcttctatcctcatatgtaattttt

SEQ ID NO: 144760 - DNA, 187 bp, Glycine max
ctcgagccgtgaaattttaataaaccgcgatcacaggttgtcgcaccttaaaaccggaaacaaaagcaatcgttacttgatttcaagaatttctcaatttcttcctacttctttgtgtacgatttcttaagggaaagaaaatcactctctgtgctggtcacagacttcgtgaatcattttcttttcc

SEQ ID NO: 144761 - DNA, 243 bp, Glycine max
cagaagttttgatgaaaccagcagacctaatgcgagcagtggttcctgttttccctccttctgaatcccaccttgttagagatggatacttggaaggtgaaaggaggccgggccatttatgctgcccttcttcagaattttttatgctttttgatgtaaacaatgatgggctgatatcttttaaagagtatatcttttttgtaacactactcagcatcccagaatcaagcttttcagtgacat

SEQ ID NO: 144762 - DNA, 243 bp, Glycine max
agcaaacctcaagctactgcaatgcatgtgggagctatagaaattatcattgatagtttcgcaagtcctgattgcaacatagttggtgcaatgcttttggttgatacttatcataccaatcctgaaaatgcagttcgtagtatttttgttgcgcctttcagaggcggaaggcccattcgggtggttacatttccgaataccattgtgcagattgaaccagacatgaattcaaggtttcagctt

SEQ ID NO: 144763 - DNA, 245 bp, Glycine max
cttacaggatagagacaattaccttcagaagctgtcgttgtaaatgttacatgtggtagtggacgtggtggtttacccaccactgcttggattagttctgcagttaacaatcgctcctcagacatcaacaaaaggattcgcacagcacttgggaaaggtaagaaaattgtttttcttactagagttgatccttttccagtagctttattggctgttctttttggcgttaagaatgaaattctgag

SEQ ID NO: 144764 - DNA, 245 bp, Glycine max
gtgttcccaggacctattgtgttttaaatccacaaaatccttttgtgttaaataggtggatgggaaaactgactttccctcagggcacttcccgaagtgttaagagaatgcctctttctatagggggaggagctggtgcaaagaatgctattctcatgaatatgccaaatgctgttctttcaatgtggagatattttgttggagatctcgtctttgaagtttctaagatgacttctccctacatt

SEQ ID NO: 144765 - DNA, 253 bp, Glycine max
  unsure (1)..(253): unsure at all n locations
cagagcttttgtcaattttctattgaccttctcggtggaggaattttagtggacaaaactggagattggatcacacttatacaaaattctccaattagtaacttgttgagagttgctgcttggaagaaaggttgtttaatggtcaagattgtgatgtctgggaatgcagcagtcaaaaggagtgattgggcctcattggtacaagtgtttttaacaaacagcaacagtacagagcantttgatgcatgtaagt

SEQ ID NO: 144766 - DNA, 114 bp, Glycine max
ctggaagcagatggctgatgctgggatcaagtacatccccagcaacactttctatcactatgacgaggttctcgacgccaacgccaccctcggtgccgttccacaaaagatagg

SEQ ID NO: 144767 - DNA, 246 bp, Glycine max
agaaactttaagcagatgtctaatgttttatgggtggctcctgaggacaaggcgagtttatggtcacaacttcattatgtttcgtgcaataatctggaaatgcaagaagcttatcttgtcaatctcgtaaatgtgttacgagaattgtatttgcacagtccagaggaagctcgccaattgagaaggaaagctctctctagtattgaatggctgcaaaaagctgatgtgcctaccatagcacagatt

SEQ ID NO: 144768 - DNA, 246 bp, Glycine max
  unsure (1)..(246): unsure at all n locations
tgttgaacaagggtttctctgtctgcttcttcactttctctcgtttcaatcgaaaccaaaacaaaaacatgggcagaaaattcttcgtcggtggcaactggaaatgcaatgggaccactgaggaggtaaagaagattgttactactttgaatgaggctaaagtccctggagaagatgtcgtagaagttgntgtgagccctccttttgtgttccttcctgttgtaaaaagtttgctgcgccctgatt

SEQ ID NO: 144769 - DNA, 245 bp, Glycine max
ttctttctctcttctctctctgtccgaagatggcttcacgcaggttcgtatcttctctgattcgatcctcccttcgtagatctcaatcgaaaccctcgatttccgcatccgcatcgaggcacacgtcatccaaccgtgcctctccgcacggttacttgctgaaccgcgtcgccgaatacgctaccgcggcggcggctgctaccgctcctccctctgctccgcctccgggcaagaaggaggttagc

SEQ ID NO: 144770 - DNA, 244 bp, Glycine max
gctcaaggagatcaagcgcttctacgtgcagaacggcaagacgatccccaactcggtgtcgaccatctccggcgtgcccggcaactcggtcaccgactccttctgcaccgcccagaagtccgtcttcggcgacaacaacattttccagaagaggggtggcctggccggcatgtcccaggccctcaacgccggcatggtcctcgtgctctccatctgggacgaccaccacagcaacatgctctgg

SEQ ID NO: 144771 - DNA, 241 bp, Glycine max
gttgaacaagggtttctctgtctgcttcttcactttctctcgtttcaatcgaaaccaaaacaaaaacatgggcagaaaattcttcgtcggtggcaactggaaatgcaatgggaccactgaggaggtaaagaagattgttactactttgaatgaggctaaagtccctggagaagatgtcgtagaagttgttgtgagccctccttttgtgttccttcctgttgtaaaaagtttgctgcgccct

SEQ ID NO: 144772 - DNA, 246 bp, Glycine max
ccaggacctattgtgttttaaatccacaaaatccttttgttgttaaataggtggatgggaaaactgactttccctcagggcacttctcgaagtgttaagagaatgcctctttctatagggggaggagctggtgcaaagaatgctattctcatgaatatgccaaatgctgttctttcaatgtggagatattttgttggagatctcgtctttgaagtttctaagatgacttctccctacattaaatgt

SEQ ID NO: 144773 - DNA, 245 bp, Glycine max
atctgctctcaagactgtgaattatggaatcctgcttgcacaaaagcaatgactatgtcatttaatccaaacccgtgttctgatgcatggagtttggaatttctgaagcgtaccggatttcattgtgatatcatttgtgtcactggatggactgccaccccaatgcaggatgttcaggttacaattgattggtttatttcctctcaggaatgtgttcccaggacctattgtgttttaaatccaca

SEQ ID NO: 144774 - DNA, 185 bp, Glycine max
gatgaagacaaccttctgatccgtcaagtggtgccggacgcggaggaccaccacctgctcaacgcggagcaccacttctccgccttcaagacaaagttcgccaagacctacgccacgcaggaggagcaccctcaccgcttccgtatcttcaagaacaacttgctccgcgccaagtcgcaccagaa

SEQ ID NO: 144775 - DNA, 241 bp, Glycine max
tgaagtttactttgacttcttccctgtggaggttgatagtcaagagggagttgctcacattggtgaattgaaatctggtgtctatgttccactgcctacaaaaattaatttgatggaaactcccaaggaatggcaactggatctaccttgtgacaaaattcctagtgtcttgactacaactgatgagagattggtagtcacagaacatgagggatatgatccttttcttggtggaattcaa

SEQ ID NO: 144776 - DNA, 242 bp, Glycine max
gaaattttaataaaccgcgatcacaggttgccgcaccttaaaaccggaaacaaaagcaatcgttacttgatttcaagaatttctcaatttcttcctacttctttgtgtacgatttcttaagggaaagaaaatcactctctgtgctggtcacagacttcgtgaatcattttcttttccactcctagtatattttctgaacactctcctatttgatataggacttcgtgtcagatttaaacttt

SEQ ID NO: 144777 - DNA, 242 bp, Glycine max
caagcaagttatgagcaagatggcagaaatgataaacagtctttgtggtggtgatgaaaaattgatgcgtgaaaggacgcacctgctgttggcttgttgttcaaggatggcaatttgtaagaaagatgtttggagagttgaatgtggaatcccttctggatttccgctcacagttatttgcaatagcatttttaatgagatgctcattagatatagctatgaaaaattactgcgccaggcta

SEQ ID NO: 144778 - DNA, 241 bp, Glycine max
gccccctcagatgtgggccacatcggcccagcctccgtcccagtcggtggctcctccgcaacccaccagcgccgatgaggtccgtaccctctggatcggtgatttgcagtactggatggacgaaaattatctctacacctgtttggcacacaccggcgaggtggcttcagttaaagtcaagtcggaacaaacaaactagtcaatcggagggatatgggtttattgagtttactagtcgtgc

SEQ ID NO: 144779 - DNA, 240 bp, Glycine max
gtctgggaatgcagcagtcaaaaggagtgattgggcctcattggtacaagtgtttttaacaaacagcaacagtacagagcattttgatgcatgtaagtggacaaaatcagaaccacattcctgggaattaatcttcccaatagaggtatgtggtcctaataatggttttgaaatgtggagttctgagtgggcaaatcaaacttcatggcatttgagtttccttattgacaatcccaaaca

SEQ ID NO: 144780 - DNA, 239 bp, Glycine max
cagatacaattgttaacttgtattttcatggtgcaccaatcgaagatctttgcttagattttactctccctggttatcctgaatacaccttgaagccaggagatgaaattgttgatatcaacaatttggaggagtatatatccttggtgatcgatgcaactgtcaagactggaatcatgcggcaaatagaagcatttagagcagggtttaaccaggtttttgatatctcatctttacaa

SEQ ID NO: 144781 - DNA, 237 bp, Glycine max
gtgagttccttcaccgtgctgtgactctcacactggagatccagaaggagcatggcaaacttctcaaggatttcaacaagggtctcgtcaacaacaaggctattgaagatctcaaagctgatgttgagaagttctctgccttgtttgacatgcctggcttcctggtatctgaaatgaagtacaaggattaggttcaaccataccactttctactaaattgtgtcactcaagttcgac

SEQ ID NO: 144782 - DNA, 242 bp, Glycine max
atttagaaagttagcagattgtgattttctcaagagaaactttaagcagatgtctaatgttttatgggtggctcctgaggacaaggcgagtttatggtcacaacttcattatgtttcgtgcaataatctggaaatgcaagaagcttatcttgtcaatctcgtaaatgtgttacgagaattgtatttgcacagtccagaggaagctcgccaattgagaaggaaagctctctctcgtattgaat

SEQ ID NO: 144783 - DNA, 248 bp, Glycine max
cacatacctctattgggaagattaattcccaggaatgtggtcctaataatggttttgaaatgtggagttctgagtgggcaaatcaaacttcatggcatttgagtttccttattgacaatcccaaacagtctacagtttttgatattctcttgggaatctctcaagattttgaaattgctggtaatactcttatgccagctttttctgttccacaggctactgccagatcttctgaaaatgcggaatcc

SEQ ID NO: 144784 - DNA, 244 bp, Glycine max
ctgggaaatgtatgccattggtggaagtgccaatccaaccatcaactgccaaggcaacagatttgttgcacccgatgacagattcagcaaagaggtgacaaaacgtgaagataccccagagagtgagtggcaggattggaattggaggtcagaaggggacttgttagtaaacggtgcctttttcacagcatcgggtgctggagcctcctctagctatgcaagggcttctagcttaagtgcaaga

SEQ ID NO: 144785 - DNA, 244 bp, Glycine max
cccagtacaaggattccggctccgatcagcttcagagggatcgcttgttggccgccaagaagcagttggaaggaattgtaaggaagaagctctccgccgccgtcgatcagcgcgaccaccccgccattctcaggttcattcggctcttcacaccgctgggtgtggaggaggagggtttgcaggtgtatgttggctacttgaagaaggtgattgcgatgaggtcgaggatggagtttgagcagtt

SEQ ID NO: 144786 - DNA, 190 bp, Glycine max
gaaattttaataaaccgcgatcacaggttgccgcaccttaaaaccggaaacaaaagcaatcgttacttgatttcaagaatttctcaatttcttcctacttctttgtgtacgatttcttaagggaaagaaaatcactctctgtgctggtcacagacttcgtgaatcattttcttttccactcctagtttat

SEQ ID NO: 144787 - DNA, 239 bp, Glycine max
gtgacaaagggtgggagtgcaaaggttggtctgcatattgctgcaatgagactatctccgactacttccagacataccagtttgagaacctcttcgcgaagccaattcgccggtggcacatgctgttggtttctgggactaccgttctttcatcaccgctgctgcactgtaccagcctcacggctttggcaccactgggggaaagaccagtggccagaaggaacttgctgctttctttg

SEQ ID NO: 144788 - DNA, 238 bp, Glycine max
gttggctgatgggtgcccatatttgtatgctatggtgcatgatagttcagtgtctacaataccaggtgattttgtcattggtgttaagttgacaaccataaacaatatgtgtgcatatgggctcaatcctggtatttcaggttctcgtcttttgggcaccattcctcagtccatttcacagcaaactgtttggaatcaaatggcaacagtgagaacaccattgaattttgattctagc

SEQ ID NO: 144789 - DNA, 188 bp, Glycine max
tgaaattttgataaaccgcgatcacaggttgccgcaccttaaaaccggaaacaaaagcaatcgttacttgatttcaagaatttctcaatttcttcctacttctttgtgtacgatttcttaagggaaagaaaatcactctctgtgctggccatagacttcgtgaatcattttcttttccactcaaaata

SEQ ID NO: 144790 - DNA, 238 bp, Glycine max
ccacaaaatccttttgtgttaaataggtggatgggaaaactgactttcccccagggcacttcccgaagtgttaagagaatgcctctttctatagggggaggagctggtgcaaagaatgctattctcatgaatatgccaaatgctgttctttcaatgtggagatattttgttggagatctcgtctttgaagtttctaagatgacttctccctacattaaatgtacagtctctttcttca

SEQ ID NO: 144791 - DNA, 236 bp, Glycine max
ggacgcacctgctgttggcttgttgttcaaggatggcaatttgtaagaaagatgtttggagagttgaatgtggaatcccttctggatttccgctcacagttatttgcaatagcatttttaatgagatgctcattagatatagctatgaaaaattactgcgccaggctaaagctccaagtatgtttttacaatccttcaaaaattttgtttctttgtgtgtgtatggtgatgataac

SEQ ID NO: 144792 - DNA, 237 bp, Glycine max
cccgaagtgttaagagaatgcctctttctatagggggaggagctggtgcaaagaatgctattctcatgaatatgccaaatgctgttctttcaatgtggagatattttgttggagatctcgtctttgaagtttctaagatgacttctccctacattaaatgtacagtctctttcttcatagcatttggaaatttggctgatgacaccatcaattttgaggcttttccccacaagctgg

SEQ ID NO: 144793 - DNA, 238 bp, Glycine max
tccacatccacactcccctctcaggtttttgtggataagattgagctataatggctgccaggagaccgggtttgattgctttgtttgatgttgatggaactcttacagctcccaggaaggtggtcacaccggagatgttgacattcatgcaagaactgcggaaggttgtaactgttggagttgttgggggttctgaccttataaagatatcagagcaacttggcagcacagttaccaa

SEQ ID NO: 144794 - DNA, 243 bp, Glycine max
caccgattgctagaatggaatttcgatgctcagtcatctcttttaccattctcttctctcttgctcttgcaggagagagccatgtccatgcatcgctacctgaggaagattattgggaagctgtttggccaaacactcccattcccactgcactgcgagagcttctaaagcctctccctgcaggtgttgaaatcgatgaactccctaagcaaattgatgatacacagtacccaaaaacattct

SEQ ID NO: 144795 - DNA, 248 bp, Glycine max
ccaaggatgagaaacttcctcgtcacaaaatttttgacaaacctaagacgcgctgcttcactattctccctatggagtttaatcttgtggtccgtcaaaagtttttaaattttgtgaggttcattatgaagaaaagggacaagcttagttgtcaagttggaatcaacccatactccatggaatggactggtttggccaatagattactgagtaagggcaatgatattctgtgttgcgattatgctagt

SEQ ID NO: 144796 - DNA, 187 bp, Glycine max
tgaaattttgataaaccgcgatcacaggttgccgcaccttaaaaccggaaacaaaagcaatcgttacttgatttcaagaatttctcaatttcttcctacttctttgtgtacgatttcttaagggaaagaaaatcactctctgtgctggccacagacttcgtgaatcattttcttttccacacaacat

SEQ ID NO: 144797 - DNA, 235 bp, Glycine max
gtttctttaagtgcagcacttaatggtgttgagggtttggactatatggaaagaattcctcttgccacatctgagggttttcctcatgtgctttcacgcaaaaatggcgataaaggcaaaaggagatttgtctctggggatggtgaagagatgacattgattccaggaaccagtgttgaagaggcttacaacaagctaatagttgaacttgagaaaagtgttcctacattggttg

SEQ ID NO: 144798 - DNA, 240 bp, Glycine max
caagatctaaaggatttgatagaaaaagagtatcgtccatcatttttctacaacgacagaacaaggaaaagccgtccctttaccaatgccttctcgtttttgtgttagtctttaactcatctgtcatgtcaattccattgtttttgaaaccttttcctcccccaccttgaaacaaagtatattttgtctcatgtagttttaagacaacttgattaggctgagtctgttgcgaaaattttc

SEQ ID NO: 144799 - DNA, 236 bp, Glycine max
actttgttggtgataacagatcaagtatttttgatgcaaaggctggaattgcattgaataagaattttgtgaagcttgtctcttggtatgacaacgagtggggatacagttcacgtgtcattgacctgcttgtaatcgttgccaagaagtctttttaattaaggtggttctaacattatgtgctggtcaagctgcgatttagtgtcttgctcgtgcaaaaattgagaagtatgaat

SEQ ID NO: 144800 - DNA, 162 bp, Glycine max
gttgccgcaccttaaaaccggaaacaaaagcaatcgttacttgatttcaagaatttctcaatttcttcctacttctttgtgtacgatttcttaagggaaagaaaatcactctctgtgctggtcacagacttcgtgaatcattttcttttccacacaacatac

SEQ ID NO: 144801 - DNA, 235 bp, Glycine max
aatttgtttggagtatcccctgtgtccgcagataacctcatgtggacatattttctgtttcccatgtattctacagtacttattgatgggtgaagaggatcacaaaggtgatagctggaaaaggtgtcctttgtgctttgtgatgatatctgccaaggatttatatacggtgcacatcacaaatgtcaaacagtatcaagtacgagataatgctgagttcacctttttaacgcgg

SEQ ID NO: 144802 - DNA, 174 bp, Glycine max
cgcgatcacaggttgccgcaccttaaaaccggaaacaaaagcaatcgttacttgatttcaagaatttctcaatttcttcctacttctttgtgtacaatttcttaagggaaagaaaatcactctctgtgctggtcacagacttcgtgaatcattttcttttccacacaacatacg

SEQ ID NO: 144803 - DNA, 234 bp, Glycine max
gtttttaacaaacagcaacagtacagagcattttgatgcatgtaagtggacaaaatcagaaccacattcctgggaattaatcttcccaatagaggtatgtggtcctaataatggttttgaaatgtggagttctgagtgggcaaatcaaacttcatggcatttgagtttccttattgacaatcccaaacagtctacagtttttgatattctcttgggaatctctcaagattttga

SEQ ID NO: 144804 - DNA, 234 bp, Glycine max
ggtgcatgatagttcagtgtctacaataccaggtgattttgtcattggtgttaagttgacaaccataaacaatatgtgtgcatatgggctcaatcctggtatttcaggttctcgtcttttgggcaccattcctcagtccatttcacagcaaactgtttggaatcaaatggcaacagtgagaacaccattgaattttgattctagcaagcagagcttttgtcaattttctattga

SEQ ID NO: 144805 - DNA, 234 bp, Glycine max
caagggggatgttgtgtactatcaaactgactctgagattaatggctcgtccaaatcagagtgaagattaaaattcttttttatatagacaagagagacttatacacaattcttattgctctaaagattgtcttgagtttcttacttagagttgaatccgtcattaataaagggatagatggacggatcatataatttcaattgtaactacatgatataatgtttaggttatat

SEQ ID NO: 144806 - DNA, 238 bp, Glycine max
ccattgttggaatctggtttgcaaaaagacagagggttaattgtggagtattttggaaggatgtcttacgttgctcataacgttaatcagccccaagagaaagatttgttagagggaaatttttcctttgatattaaatctcgctctagattggaggaagtttcctctacaaaagcacaatttgttagtggaaaaaccttcaaatatgatataattggtgctggttcacattcttcag

SEQ ID NO: 144807 - DNA, 242 bp, Glycine max
ctcgagcgtttgagtaatattcatatttccggcttattttacgacggcagatacggattctggactaaacacgagaaaaatcttgctttgacagaagaggaaaagatggaagtgattagaaatagaggcattcctgctgatgttcttgcaaagcgagctcatgaatttgaaaaacatgttgctcatgaaagcctcaaggatcaaattcctgctgttgacaagttgtattctactaaggttaa

SEQ ID NO: 144808 - DNA, 241 bp, Glycine max
gaaagaggaagagaatgatatcaaaccgcgaatctgcacgccgatctcgcatgaggaagcagaagcacttggacgatcttgtttcccaagtggctcagctcagaaaagagaaccaacaaatactcacaagcgtcaacatcaccacgcaacagtacttgcacgttgaggctgagaactcggtgcttagggctcaggtgggtgagttgagtcacaggttggagtctctgaacgagatcgttga

SEQ ID NO: 144809 - DNA, 205 bp, Glycine max
ctcgagccgctcgagccgtgaaattttaataaaccgcgatcacaggttgccgcaccttaaaaccggaaacaaaagcaatcgttacttgatttcaagaatttctcaatttcttcctacttctttgtgtacgatttcttaagggaaagaaaatcactctctgtgctggtcacagacttcgtgaatcattttcttttccacacaacat

SEQ ID NO: 144810 - DNA, 189 bp, Glycine max
tgaaattttaataaaccgcgatcacaggttgccgcaccttaaaaccggaaacaaaagcaatcgttacttgatttcaagaatttctcaatttcttcctacttctttgtgtacgatttcttaagggaaagaaaatcactctctgtgctggtcacagacttcgtgaatcattttcttttccacacaacatac

SEQ ID NO: 144811 - DNA, 233 bp, Glycine max
gaaattcctcttgtgaaaatttcttacagcttggtcaactcaggtgcgtcccgcaacgactctgttggctgatgggtgcccatatttgtatgctatggtattgtagacactgaactatcatgcaccatagcaggtgattttgtcattggtgttaagttgacaaccataaacaatatgtgtgcatatgggctcaatcctggtatttcaggttctcgtcttttgggcaccattcc

SEQ ID NO: 144812 - DNA, 234 bp, Glycine max
gaaattttcacaagaggaatttcttacagcttggtcaactcaggtgcgtcccgcaacgactctgttggctgatgggtgcccatatttgtatgctatggtgcatgatagttcagtgtctacaataccaggtgattttgtcattggtgttaagttgacaaccataaacaatatgtgtgcatatgggctcaatcctggtatttcaggttctcgtcttttgggcaccattcctcagtc

SEQ ID NO: 144813 - DNA, 232 bp, Glycine max
ctatgttccactgcctacaaaaactaatttgatggaaactcccaaggaatggcaactggatctaccttgtgacaaaattcctagtgtcttgactacaactgatgagagattggtaggcacagaacatgagggatatgatccttttcttggtggaattcaaaaatatgccactcccatgatgcccctagatgaagaaattctttctaaggttgcacaagatatggttgaggaa

SEQ ID NO: 144814 - DNA, 231 bp, Glycine max
aatttctgaagcgtaccggatttcattgtgatatcatttgtgtcactggatggactgccaccccaatgcaggatgttcaggttacaattgattggtttatttcctctcaggaatgtgttcccaggacctattgtgttttaaatccacaaaatccttttgtgttaaataggtggatgggaaaactgactttccctcagggcacttcccgaagtgttaagagaatgcctcttt

SEQ ID NO: 144815 - DNA, 234 bp, Glycine max
caatctcgaactcatcagatctgcaaaagttttccattacggatcaatcagtttgatcgtggagccatgcagatcagcacacttgaaggcaatggaagtagccaaggaatctgggtgcttgctctcctatgaccccaaccttcgtctacctttgtggccttcggctgaggaagctcgtaagcaaatactgagcatttgggagaaggctgatttgatcaaggtcagtgatgcgga

SEQ ID NO: 144816 - DNA, 214 bp, Glycine max
tgtaactcgttcttcttcttttgttgttctgtgtttgtgtttgttttttctctcacctgaaaatgtcttgctgcggtggtaactgtggttgcggaagctcctgcaagtgcggcaacggctgcggaggctgcaagatgtacccagattgagctacactgagtcaaccaccaccgagaccttggtcatgggagtggcaactgttaaggctccattt

SEQ ID NO: 144817 - DNA, 264 bp, Glycine max
cacaaacctgcttgctgttcttgttcatcctccggatcatcccgggagaattcctcccgaggggggacaaggcggtgatcatgagataggaaaggatgtgactacacagtatgttgaaggttgggattggatggctcctatagggataggaatactggaatatgggatgaggtttctatttctgttactgggccagtacaaataattgatccacacttggtttcaacattttctgatgattataagaaggcatatctacataca

SEQ ID NO: 144818 - DNA, 256 bp, Glycine max
caaagtggtcttatttgaaaaacacttgggcgttggtgcaaatgtttgcttcgttaattttctctggagacaacaggctcactgagaaaacaatttttacttgcagagatttggacatcttggttgtctattatacaatagaactcaatttagaaaatttctaccgcattacattaggtggtcatctgtataccttgttgatctacattctcccatcttttctcactgctgaaattaaatataagcggaatttgag

SEQ ID NO: 144819 - DNA, 259 bp, Glycine max
ctcgagccgaatacggctcgagcggctcgagaagttgtatgagggtaagcatattcctgtatctaatattagtgcaggagaaaatcatgtagttcaaatacccttaatggcacaggaggaaattctgtcttctagtgcaagtacttcagaactgcaatggtgagtaaaaatagcaagcctcaagctactgcaatgcatgtgggagctatagaatatatcattgatagtttcgcaagtcctgactgcaacatagttggtg

SEQ ID NO: 144820 - DNA, 244 bp, Glycine max
tttgctgaacactctcctatttgatataggacttcgtgtcagatttaaactttttctgtttctttctcagttctctctttaatttcaagttcaagctggtcaactcctcgactagtgctcccactctcctatctggtatcgacttcgtgggtagacttttctacttctctcctttctttcactctcttcttctcactgatccgcattgccgttcaaagtggtcttatttgaaaaacacttgggc

SEQ ID NO: 144821 - DNA, 183 bp, Glycine max
aattttaataaaccgcgatcacaggttgccgcaccttaaaaccggaaacaaaagcaatcgttacttgatttcaagaatttctcaatttcttcctacttctttgtgtacgatttcttaagggaaagaaaatcactctctgtctggtcacagacttcgtgaatcattttcttttccacacaacat

SEQ ID NO: 144822 - DNA, 261 bp, Glycine max
tgtcggaattgcttcatggtcgtcattctaaagctatctggtataaatgctgtgttttatttctcttcaactgtttttaaaagtgctggagtgccatcagacatagcaaatgtctgcataggaattgccaatttggcaggtctatcgtttcaatgggtttgatggataagcttggaaggaaggttctacttttctggagtttctttggcatggcaatagcaatgatccttcaagccacaggagcaacttcacttgtatcaa

SEQ ID NO: 144823 - DNA, 108 bp, Glycine max
actgactttccctcagggcacttcccgaagtgttaagagaatgcctctttctatagggggaggagctggtgcaaagaatgctattctcatgaatatgccaaatgctgt

SEQ ID NO: 144824 - DNA, 258 bp, Glycine max
gtggaatcaacccatactccatggaatggactggtttggccaatagattactgagtaagggcaatgatattctgtgttgcgattatgctagttttgatggtttgattaccaagcaagttatgagcaagatggcagaaatgtaaacagtctttgtggtggtgatgaaaaattgatgcgtgaaaggacgcacctgctgttggcttgttgttcaaggatggcaatttgtaagaaagatgtttggagagttgaatgtggaat

SEQ ID NO: 144825 - DNA, 112 bp, Glycine max
aatctgtgtcttgatccaaaacaaagccgagaagaagggagataggtatgaggcaatctacagcttctactttggggactacggtcacatttcagtgcagggttcatacctg

SEQ ID NO: 144826 - DNA, 256 bp, Glycine max
gtacgagggggattgggtggacgggaagtacgatgggtatggggtggagacgtgggcgcgtgggagccgctaccgtgggtgttactggcaggggctgaggcacgggtttggggtctataggttttacaccggggatgttatgctggagagtggtctaatgggcagagccatgggtctggggttcacacttgcgaggatgggagtcgctatgttggggagtttaagtggggggtcaagcatggccttggccattacc

SEQ ID NO: 144827 - DNA, 257 bp, Glycine max
agaatgcctctttctatagggggaggagctggtgcaaagaatgctattctcatgaatatgccaaatgctgttctttcaatgtggagatattttgttggagatctcgtctttgaagtttctaagatgacttctccctcattaaatgtacagtctctttcttcatagcatttggaaatttggctgatgacaccatcaattttgaggcttttccccacaagctggtgcagtttggagagattcaggaaaaagttgtgttg

SEQ ID NO: 144828 - DNA, 251 bp, Glycine max
aaaaatctaagattataatgaaattggcggatattttgcaatcagataatctgcagaatgtgcaggcattgacgcgtgcacgtgttcccatagtaaagctcatggattcagtgacaggaatatcttgtgacatatgattaacaatctcctagctgttgtgaataccaagcttcttcgggattatgcacacatagatccaaggttgcgtcagtggctttcattattaaacattgggctaagtcaagaagagt

SEQ ID NO: 144829 - DNA, 260 bp, Glycine max
ttcctttgcttccagcaacatggaaacccacaatttgttgagccagttgtgcaagctcaaagtgctgaagtttactttgacttcttccctgtggaggttgatagtcaagagggagttgctcacattggtgaattgaaattggtgtctatgttccactgcctacaaaaactcaatttgatggaaactcccaaggaatggcaactggatctaccttgtgacaaaattcctagtgtcttgactacaactgatgagagattggt

SEQ ID NO: 144830 - DNA, 262 bp, Glycine max
tgctgaaggttgagaatcaggaaggagtcctgaattttgacgaaatcctgcgcgagactgatgcattcatggtggcacgaggtgatcttggaatggagatcccagttgaaaagatattcctggcgcagaagatgatgattacaagtgtaatctggttgggaagccagtggtgactgctacccaaatgcttgaatcaatgataaagtctcccaggccaacccgagctgaagcaactgacgtagccaatgcagttcttgatgga

SEQ ID NO: 144831 - DNA, 259 bp, Glycine max
aaaaaggcaaaaggagatttgtctctggggatggtgaagagatgacattgattccaggaaccagtgttgcagaggcttacaacaagctaatagttgaacttgagaaaagtgtcactacattggttggcattgaatgcccaaggccgagaaacttcctcgtcgcaaaatttttgacaaacctaagacgcgctgcttcactattctccctatggagtttaatcttgtggtccgtcaaaagtttttaaatttcgtgaggttc

SEQ ID NO: 144832 - DNA, 250 bp, Glycine max
catgatgcccctagatgaagaaattctttctaaggttgcacaagatatggttgaggaatggtttgattgtgttgatgaggaggattcctttgaggaagtttctttaagtgcagcacttaatggtgttgagggttggactatatggaaagaattcctcttgccacatctgagggttttcctcatgtgctttcacgcaaaaatggccaataaggcaaaaggagatttgtctctggggatggtgaagagatga

SEQ ID NO: 144833 - DNA, 253 bp, Glycine max
ttcctctcaggaatgtgttcccaggacctattgtgttttaaatccacaaaatccttttgtgttaaataggtggatgggaaaactgactttccctcagggcacttcccgaagtgttaagagaatgcctctttcatagggggaggagctggtgcaaagaatgctattctcatgaatatgccaaatgctgttctttcaatgtggagatattttgttggagatctcgtctttgaagtttctaagatgacttctccct

SEQ ID NO: 144834 - DNA, 259 bp, Glycine max
agctcgccgacaactgcaccggtctccagggtttcctcgtcttcaacgccgtcggtggcggcaccggttctggcttgggctcgcttctcttggagcgtctctccgttgactatggaaaaaagtcaaagctcggtttaccgtttatccatcccctcaggtttcgacctcggtcgtggaaccctacaacagcgtcctttcaacgcattctctcctcgaacacaccgatgttgctgtgcttctcgacaacgaggcaatctac

SEQ ID NO: 144835 - DNA, 255 bp, Glycine max
ttgtactgtctcacctgcccaacttcaactccatttctggtgtatctctggcagcagcagttatgtccttgagttactctacaattgcctgggcagcttctgctcataagggtgttcaagagaatgtagaataggttacaaagctaagagtacatcaggaacagtctcaaacttctttagtgcccttggggatgttgcttttgcctatgctggacacaatgtgatgttggaaatccaagcaacaattccatctac

SEQ ID NO: 144836 - DNA, 253 bp, Glycine max
  unsure (1)..(253): unsure at all n locations
gtgaaaagggaccatggaggcaaattcaggtgccagcgaccgaatttcgagaatcgccggccacctccgcccccagagagaggatgatgtttgtttgaagcgtaggcnttgccgtgcaaaaggtggggtctccgattcaaggtggccatattgggtgccgcagaggcatagggcaacctctggcgatgttgatgaagatgaatccactcgtttcacttctccacctctacgatgttcttaacacccctggcgt

SEQ ID NO: 144837 - DNA, 250 bp, Glycine max
ctcactcacaaacacacactgaactaaaaaacatcaaaagagacatggctgagcaaaccttcatcatgatcaagcctgatggcgtccaaagaggccttattggcgagatcattagcagatttgagaagaaagtttctacttgaaaggtttgaaacttgttactgtggaccgtccttttgctgagaagcactatgctgatttgtctgccaagcctttctttagtggtttggtggattacattatctctggc

SEQ ID NO: 144838 - DNA, 253 bp, Glycine max
acttaatggtgttgagggtttggactatatggaaagaattcctcttgccacatctgagggttttcctcatgtgctttcacgcaaaaatggcgaaaaaggcaaaaggagatttgtctctggggatggtgaagaatgacattgattccaggaaccagtgttgaagaggcttacaacaagctaatagttgaacttgagaaaagtgttcctacattggttggcattgaatgtcccaaggatgagaaacttcctcgtc

SEQ ID NO: 144839 - DNA, 249 bp, Glycine max
tgggaaaactgactttccctcagggcacttcccgaagtgttaagagaatgcctctttctatagggggaggagctggtgcaaagaatgctattctcatgaatatgccaaatgctgttctttcaatgtggaatattttgttggagatctcgtctttgaagtttctaagatgacttctccctacattaaatgtacagtctctttcttcatagcatttggaaatttggctgatgacaccatcaattttgaggc

SEQ ID NO: 144840 - DNA, 252 bp, Glycine max
gactgccatattgatggtggtaacgaatggtacgagaacaccgaaagaagagagaaatcggtggctgaattgggtctgctctaccttgggatgggagtttctggtggtgaggaaggtgctcgtaatggtcctctttgatgcctggtggttcgtttgaggctttcaaatacatagaagatattcttctcaaggtggcagctcaagtccctgacagtggtccttgcgtgacttatattggtaaaggtggctctg

SEQ ID NO: 144841 - DNA, 253 bp, Glycine max
aaattagttcattctctttgcgcagttccctacctctcctttcaagatgcagatcttcgtcaagaccctcaccggaaagaccatcacccttgaggtggaaagctctgacaccatcgacaacgtcaaggccaagtccaggacaaggaaggaattcccccggatcagcaacgtctcatcttcgccggaaagcagctcgaggacagccgtaccctcgccgactacaacatccagaaggagtcaacccttcaccttg

SEQ ID NO: 144842 - DNA, 247 bp, Glycine max
caacgatattctgtgttgcgattatgctagttttgatggtttgattaccaagcaagttatgagcaagatggcagaaatgataaacagtctttgtggtggtgatgaaaaattgatgcgtgaaaggacacactgctgttggcttgttgttcaaggatggcaatttgtcagaaagatgtttggagagttgaatgtggaatcccttctggatttccgctcacagttatttgtaatagcatttttaatgaga

SEQ ID NO: 144843 - DNA, 251 bp, Glycine max
tgatattctcttgggaatttctcaagattttgaaattgctggtaatactcttatgccagctttttctgtcccacaggctactgccagatcttctgaaaatgcggaatcctctgcatgatctggaatttgtttttctctcgcttgttcgtttgtttaattcaattaaggaaattaggcatgaccctcttgttgagtatgctctgcctatttgaaaatttccacacctcttttaattatcgtaatgatgtgtg

SEQ ID NO: 144844 - DNA, 248 bp, Glycine max
gttaataagtttgcaaaaattatgaaccttagacaaagtgttgttggtgatcttaaacttcttactgatgggaagttgtatgagggtaagcatattcctgtatctaatattagtgcaggggaaaatctgtagttcaaatacccttaatggcacaggaggaaattctgtcttctagtgcaagtgatttcagaactgcaatggtgagtaaaaatagcaaacctcaagctactgcaatgcatgtgggagct

SEQ ID NO: 144845 - DNA, 250 bp, Glycine max
aaaaagactacccagactagcgcgtcttaataaacgctcttctctgaaaacccccatttcttttcttctttcttcttctctttcgcttcttcgatcttcgatcttcgtcgctgaaaatgagagagtgcattcaatccacatcggccaggccgggattcaggttggaaacgcctgctgggagctttactgcctcgaacacggcattcagcctgatgggcagatgccaagtgacaagaccgttggtggaggt

SEQ ID NO: 144846 - DNA, 184 bp, Glycine max
ggcattgaatgtcccaaggatgagaaacttcctctgcgcaaaatttttgacaaacctaagacgcgctgcttcactattctccctatggagtttaatcttgtggtccgtcaaacgtttttaaattttggaggttcattatgaagaaaagggacaagcttagttgtcaagttggaatcaccccacc

SEQ ID NO: 144847 - DNA, 241 bp, Glycine max
ctcgagccgttttggtggacatgaaggagaaagtctctttagctggtatagagaaaataagcaaggaaccattgaactgattattgggggaaattctaaaatctatgaagttactgattcagattcaattgtcatttgttgtttggatatacacctgttcgttcagattcagttgtgggagaacttgtcttatctgatccaactaacattgttctcccagagcttccatatgtggagatgc

SEQ ID NO: 144848 - DNA, 247 bp, Glycine max
gatggcagaaatgataaacagtctttgtggtggtgatgaaaaattgatgcgtgaaaggacgcacctgctgttggcttgttgttcaaggatggcaatttgtaagaaagatgtttggagagttgaatgggaatcccttctggatttccgctcacagttatttgcaatagcatttttaatgagatgctcattagatatagctatgaaaaattactgcgccaggctaaagctccaagtatgtttttacaat

SEQ ID NO: 144849 - DNA, 244 bp, Glycine max
agcttagttgtcaagttggaatcaacccatactccatggacttcactggtttggccaatagattactgagtaagggcaatgatattctgtgttgcgattatgctagttttgatggtttgattacaagcaagttatgagcaagatggcagaaatgataaacagtctttgtggtggtgatgaaaaattgatgcgtgaaaggacgcacctgctgttggcttgttgttcaaggatggcaatttgtaag

SEQ ID NO: 144850 - DNA, 244 bp, Glycine max
tttaatgtagggagaagtcatcttagaaacttcaaagacgagatctccaacaaaatatctcaacattgaaagaacagcatttggaaatttggctgatgacaccatcaattttgaggcttttcccacaagctggtgcagtttggagagattcaggaaaaagttgtgttgaaattttcacaagaggaatttcttacagcttggtcaactcaggtgcgtcccgcaacgactctgttggctgatgggt

SEQ ID NO: 144851 - DNA, 242 bp, Glycine max
ggaatgattaaaatggtggccacagttggtattcctgagaatacaggtatagcattggcctgtgctatgaatagttcttttagggggcgcgccagttctgatatttacaccatctgctctcaaactgtgaattatggaatcctgcttgcacaaaagcaatgactatgtcatttaatccaaacccgtgttctgatgcatggagtttggaatttctgaagcgtaccggatttcattgtgatatc

SEQ ID NO: 144852 - DNA, 247 bp, Glycine max
gataacttcgtcttcggccagtccggcgccggaaacaactgggccaaaggtcactacaccgaaggcgctgagttgattgactctgttctcgatgttgtcaggaaggaggcagaaaactgtgactgcttcaagggtttcaggtttgccactctcttggtggtggaactggttctggaatgggaacactgttgatctcgaagatcagggaagaataccctgaccgaatgatgcttacattctctgtgtt

SEQ ID NO: 144853 - DNA, 249 bp, Glycine max
tttcacagcaaactgtttggaatcaaatggcaacagtgagaacaccattgaattttgattctagcaagcagagcttttgtcaattttctattgaccttctcggtggaggaattttagtggacaaaatggagattggatcacacttatacaaaattctccaattagtaacttgttgagagttgctgcttggaagaaaggttgtttaatggtcaagattgtgatgtctgggaatgcagcagtcaaaaggag

SEQ ID NO: 144854 - DNA, 112 bp, Glycine max
gaaccacattcctgggaattaatcttccaatagaggtatgtggtcctaataatggttttgaaatgtggagttctgagtgggcaaatcaaacttcatggcatttgagtttcct

SEQ ID NO: 144855 - DNA, 111 bp, Glycine max
gtggagatattttgttggagatctcgtctttgaagtttctaagatgacttctccctacattaaatgtacagtctctttcttcatagcatttggacatttggctgatgacac

SEQ ID NO: 144856 - DNA, 110 bp, Glycine max
cagaaatcttggattgcggtgaatctgggagttttctgtttaggaactgtcagtggtctttggatttgcttgatgcttgggctcccatgggccccaaggggccggttcgc

SEQ ID NO: 144857 - DNA, 112 bp, Glycine max
agagattcaggaaaaagttgtgttgaattttcacaagaggaatttcttacagcttggtcaactcaggtgcgtcccgcaacgactctgttggctgatgggtgcccatatttgt

SEQ ID NO: 144858 - DNA, 108 bp, Glycine max
agatattttgttggagatctcgctttgaagtttctaagatgacttctccctacattaaatgtacagtctctttcttcatagcatttggaaatttggctgatgacacca

SEQ ID NO: 144859 - DNA, 107 bp, Glycine max
aaatccacaaaatcctcgagctcgaaataggcggatgggaaaactgactttccctcagggcactacccgaagtgacaagagaatgcctctatctatagggggaggag

SEQ ID NO: 144860 - DNA, 109 bp, Glycine max
actcgagccgaatcggctcgagatttgaaattttaataaaccgcgatcacaggttgccgcaccttaaaaccggagacaaaagcaatcgttacttgatttcaagaatttc

SEQ ID NO: 144861 - DNA, 107 bp, Glycine max
atgcttttggttgatacttatctaccaatcctgaaaatgcagttcgtagtatttttgttgcgcctttcagaggcggaaggcccattcgggtggttacatttccacac

SEQ ID NO: 144862 - DNA, 109 bp, Glycine max
gaggcattcctgctgatgttctgcaaagcgagctcatgaatttgaaaaacatgttgctcatgaaagcctcaaggatcaaattcctgctgttgacaagttgtattctact

SEQ ID NO: 144863 - DNA, 107 bp, Glycine max
gatttgaaattttaataaacgcgatcacaggttgccgcaccttaaaaccggtaacaaaagcaatcgttacttgatttcaagaatttctcaatttattcctacttctt

SEQ ID NO: 144864 - DNA, 105 bp, Glycine max
gggaatctctcaagattttaaattgctggtaatactcttatgccagctttttctgttccacaggctactgccagatcttctgaaaatgcggaatcctctgcatga

SEQ ID NO: 144865 - DNA, 107 bp, Glycine max
gggcaattttagagcaagtgtgatttgcagcgcactcatcgtattaaaggaatgattaaaatggtggccacagttggtattcctgagaatacaggtatagcattggc

SEQ ID NO: 144866 - DNA, 104 bp, Glycine max
gtttttgatattctctgggaatctctcaagattttgaaattgctggtaatactcttatgccagctttttctgttccacaggctactgccagatcttctgaaaat

SEQ ID NO: 144867 - DNA, 102 bp, Glycine max
agagaatgcctctttctatagggggaggagctggtgcaaagaatgctattctcatgaatatgccaaatgctgttctttcaatgtggagatattttgttggaa

SEQ ID NO: 144868 - DNA, 102 bp, Glycine max
gcctcaaggatcaaatcctgctgttgacaagttgtattctactaaggttaataagtttgcaaaaattatgaaccttagacaaagtgttgttggtgatcttaa

SEQ ID NO: 144869 - DNA, 100 bp, Glycine max
attttaataaaccgcgtcacaggttgccgcaccttaaaaccggaaacaaaagcaatcgttacttgatttcaagaatttctcaatttcttcctacttcttt

SEQ ID NO: 144870 - DNA, 99 bp, Glycine max
caattttagagcagtgttgatttgcagcgcactcatcgtattagaggaatgattaaaatggtggccacagttggtattcctgagaatacaggtatagca

SEQ ID NO: 144871 - DNA, 97 bp, Glycine max
gaggaaattctgtcttctagtgcaagtgatttcagaactgcaatggtgagtaaaaatagcaaacctcaagctactgcaatgcatgtgggagctatag

SEQ ID NO: 144872 - DNA, 102 bp, Glycine max
cgtctttgaagttctaagatgacttctccctacattaaatgtacagtctctttcttcatagcatttggaaatttggctgatgacaccatcaattttgaggct

SEQ ID NO: 144873 - DNA, 95 bp, Glycine max
atgctgttctttcatgtggagatattttgttggagatctcgtctttgaagtttctaagatgacttctccctacattaaatgtacagtctctttct

SEQ ID NO: 144874 - DNA, 114 bp, Glycine max
gtgatcttaaacttcttactgatgggagttgtatgagggtaagcatattcctgtatctaatattagtgcaggggaaaatcatgtagttcaaatacccttaatggcacaggagga

SEQ ID NO: 144875 - DNA, 255 bp, Glycine max
ctttcagaggcggaaggcccattcgggtggttacatttccgaataccattgtgcagattgaaccagacatgaattcaaggtttcagcttttgagtaccactaccaatggtgattttgttcaaggaaaagatctcgcaatggttaaagttaatgtagcatgtgctgctgttggcttgacatcaagttacactccaactccattgttggaatctggtttgcaaaaagacagagggttaattgtagagtattttggaa

SEQ ID NO: 144876 - DNA, 252 bp, Glycine max
accagacatgaattcaaggtttcagcttttgagtaccactaccaatggtgattttgttcaagggaaagatctcgcaatggttaaagttaatgtagcatgtgctgctgttggcttgacatcaagttacactccaactccattgttggaatctggtttgcaaaaagacagagggttaattgtggagtattttggaaggatgtcttacgttgctcataacgttaatcagccccaagagaaagatttgttagaggg

SEQ ID NO: 144877 - DNA, 251 bp, Glycine max
ctcgaattggggaaaatgtcaagattattaacagtgacaatgtccaagaagctgcaagggaaacagatgggtatttcataaaaagtgggattgtcacagtaatcaaggatgctttaattcctagtggaacagtcatctaaacacaaccacctccccaaaaaatttcttgtaccccaaatcctaatggtgactgcgaactcattactaccgcaggagagtttatcaagctctgcttccacgtctaagatagg

SEQ ID NO: 144878 - DNA, 251 bp, Glycine max
ggaaggcaagggcttgtgttgtcacaatccaagagagaagtaatggcgaacatagacatcgaagggatcttgaagcagcagcagccttatgatgggcgcgttccgaagacgaagatagtgtgtactttgggccctgctctcgatccgtagaaatggaccgagaagcttctgagggcagggatgaacgttgctcgtttcaatttctctcatggcacccacgactatcaccaggaaaccctcaacaatctcaa

SEQ ID NO: 144879 - DNA, 250 bp, Glycine max
ctcgagccggttacaattgattggtttatttcctctcaggaatgtgttcccaggacctattgtgttttaaatccacaaaatccttttgttttaaataggtggatgggaaaactgactttccctcagggcacttcccgaagtgttaagagaatgcctctttctatagggggaggagctggtgcaaagaatgctattctcatgaatatgccaaatgctgttctttcaatgtggagatattttgttggggatc

SEQ ID NO: 144880 - DNA, 233 bp, Glycine max
gaaaagggacaagcttagttgtcaagttggaatcaacccatactccatggaatggactggtttggccaatagattactgagtaagggcaatgatattctgtgttgcgattatgctagttttgatggtttgattaccaagcaagttatgagcaagatggcagaaatgataaacagtctttgtggtggtgatgaaaaattgatgcgaaagggacgcacctgctgttggcttgttg

SEQ ID NO: 144881 - DNA, 253 bp, Glycine max
ctcgcaatggttaaagttaatgtagcatgtgctgctgttggcttgacatcaagttacactccaactccattgttggaatctggtttgcaaaaagacagagggttaattgtagagtattttggaaggatgtcttacgttgctcataacgttaatcagccccaagagaaagatttgttggagggaaatttttcctttgatattaaatctcgctctagattggaaaaagtttcctctacaaaagctcaatttgtta

SEQ ID NO: 144882 - DNA, 251 bp, Glycine max
tgaaggtgaaactaaaggttttgtggaggaatttgagaagagggtgcaagcaagcaacaaagggtatctaatatgcggttgggcaccacaacttctcatactggagcacccttccattggagctgtggtgactcattgtgggatgaacaccgttattgaaagcgtggatgcaggcttgccattggtgacttggccactttttgcagagcagtttttcaatgaaaggttgctggtggatgtgctgaaaatcg

SEQ ID NO: 144883 - DNA, 250 bp, Glycine max
caacgattcactcaatgagcagaatcaaggtcctagaacagctaatgcaataggtgcattaatgtctggaggtaattctgtgagaggctcagccctagttgggagtggaaatgttaccaacaaaatcagggcagatcagtacaaccttcctgattttccaccaaatatgatcatgcacttttctttgtcatcaaatcatacagtgaagatgatatccataagagcatcaagtacaacgtgtgggcaagta

SEQ ID NO: 144884 - DNA, 247 bp, Glycine max
aaaagacagagggttaattgtagagtattttggaaggatgtcttacgttgctcataacgttaatcagccccaagagaaagatttgttggagggaaatttttcctttgatattaaatctcgctctagattggaaaacgtttcctctaaaaagctcaatttgttagtggaaaaaccttcaaatatgatataattggtgctggttcacattcttcagaagattttcctgaaaaggaagatcaagaaaaac

SEQ ID NO: 144885 - DNA, 186 bp, Glycine max
aaattttaataaaccgcgatcacaggttgccgcaccttaaaaccggaaacaaaagcaatcgttacttgatttcaagaatttctcaatttcttcctacttctttgtgtacgatttcttaagggaaagaaaatcactctctgtgctggtcacagacttcgtgaatcatttcttttccacacaacatac

SEQ ID NO: 144886 - DNA, 252 bp, Glycine max
  unsure (1)..(252): unsure at all n locations
tgaaattttaatataccgcgatcacatgttgccgcaccttaaaaccggaaacaaaagcaatcgttacgtgatttcaagaatttctcaatttcttcctacttctttgtgtacgatttcttaagggaaagaaaatcactctctgtgctggtcacagacttcgtgaatcagtttcttttccacacgacatacgagcaatcgncacaggaatgagcagcctcaaccccactaccatcaaacccactctccaactgt

SEQ ID NO: 144887 - DNA, 252 bp, Glycine max
tataattggtgctggttcacattcttcaggagattttcctgaaaaggaagatcaagaaaaacccaaaaagattgataccagattgagacaaagaatagatcctcaatacaatgaggttcaggctcagatggaaacaaatttgtttaaattgtctcttgatgatgttgaaactcctaaaggttctatgttggatcttaaaatttctcaatctaaaattgcacttcccaagaacacagttggaggaaccattct

SEQ ID NO: 144888 - DNA, 250 bp, Glycine max
aatatcaccattactgatggtattgacaaaactagtgcaacattgcaatttagaaagttagcagattgtgattttctcaagagaaactttaagcagatgtctaatgttttgtgggtggctcctgaagacaaggcgagtttatggtcacaacttcattatgtatcgtgtaataatctggaaatgcaagaagcttatcttgtcaatctcgtaaatgtgttacgagaactgtatttgcacagtccagaggaag

SEQ ID NO: 144889 - DNA, 240 bp, Glycine max
gaagcttatcttgtcaatctcgtaaatgtgttacgagaactgtatttgcacagtccagaggaagctcgccaattgagaaggaaagctctctctcgtattgaatggctgcaaaaagctgatgtgcctaccatagcacagattgaagagttccattcgatgcagaggatgatgaatgctcctgattcaaatgataatattgatctactgttgagcattgatttgttgggtttacaaggagca

SEQ ID NO: 144890 - DNA, 132 bp, Glycine max
gagccattggtaaataccctttagtattttcaagcactttcctttctttcagtgtgtgatattttcttttaggtaatttaatctcttgtactcaacgtggaaaaaaatatatataaatccatgcttttactt

SEQ ID NO: 144891 - DNA, 244 bp, Glycine max
ctttttccatacaacatactatcatgcgacatggagattttccgtctccgggttgagtggtactaaatcttacgtagcaatgaatgcaatggacgaagggcctctagccagtcgtaagaagctacttcgtgctcagacataacgagaaattctgcagtctcttgatcacccttttctcccaactttgtacacccattttgagaccgacgaattctcactcttggttatggaactctacccaggt

SEQ ID NO: 144892 - DNA, 248 bp, Glycine max
gtgtgggagagagaagagcggaagagaaaatgacgaccaggttcaagaagaacaggaagaagagaggtcacgtcagcgccggacacggccgtatcggaaagcaccgcaagcatcccggaggtcgcggtaacgccggtggcatgcatcaccaccgtatcctcttcgacaagtaccatcctggtttcttcgggaaggtaggcatgcgctacttccacaaacttcgcaacaaattctacaatccgatcatc

SEQ ID NO: 144893 - DNA, 248 bp, Glycine max
  unsure (1)..(248): unsure at all n locations
actcaacacaaaccaaaactnaagctaaaattctcactctctctctcatctcgagatcatagtatcatattcaatatcatttcataccaaacacatggctttggaagctctcaactcaccaacaacaaccgctccatcttttccctttgacgacccaactattccatgggcgaaacgaaaacgttcaaagcgttctcgcgaccatccttctgaagaagagtacctcgccctctgcctcatcatgctcg

SEQ ID NO: 144894 - DNA, 253 bp, Glycine max
  unsure (1)..(253): unsure at all n locations
gggtagatcgggaagaaaaaaaaatgtcacagcagcagcgttcgaccgccggcgccgttcttgacgaagacgtatctgctggtggatgaccccgccaccgacgacgtcgtttcgtggagcgaaggtggcaatacntcnncgtttggaaacacgccgatttcgctaaggacttgcttccgaagtacttcaagcataataatttctccagcttcgttcgccaactcaacacctatggatccgaaaaatgttcccg

SEQ ID NO: 144895 - DNA, 238 bp, Glycine max
gttgaaactcctaaaggttctatgttggatcttaaaatttctcaatctaaaattgcacttcccaagaacacagttggaggaaccattctgcgtagtgatctattggcaaattttttgacagagggcaattttagagcaagtgttgatttgcagcgcactcatcgtattaaacgaatgattaaactggtggacatgtggttttccctgagaataccggtatagcattggcctgtgctat

SEQ ID NO: 144896 - DNA, 249 bp, Glycine max
aatgaagaagcctaagttggttattctttctagaagtggttcaagagctataactaatgagaatttgcttgtgaagatggcaaaggaaattgggtttttggtgcaagttttgaagcccgacagaacaacagaaatggcaaagatttataggactctcaatgcaagtgatgtcatgattggtgttcatggagcagctatgacacattttctgttcctgagacctggttctgtgtttattcaagtggttcc

SEQ ID NO: 144897 - DNA, 248 bp, Glycine max
aaaagattgataccagatttagacaaagaatagatcctcaatacaatgaggttcaggctcagatggaaacaaatttgtttaaattgtctcttgatgatgttgaaattcctaaaggttctatgttggatcttaaaatttctcaatctaaaattgcacttcccaagaacacagttggaggaaacattctgcgtagtgatctattagcgaattttttgacagagggcaattttagagcaagtgttgatttg

SEQ ID NO: 144898 - DNA, 247 bp, Glycine max
gaatctttgcgggaactgacaatcaatccctttgagtccaccaaccaaatattcgctccaacattttaagaagccctgggctcatgagcatgaacctgttagaaatcttgtagatgctgttaataaaattaagccaacagtgttgattggaacatcgggacaaggaagaacatttactaaagaggtgattgaggcaatggcttctattaacgagagacctattattctttctctttccaaccctacg

SEQ ID NO: 144899 - DNA, 248 bp, Glycine max
accacctcctccttccccagctcctgctcccaagtacatttacaaatcacctccacctccggtttatatctatgcttccccacctccacctatctacaagtaagctcaaattgtgaaagcaccattcatgatgaatcatgttctagttttcatcgaggaataaaggcaagctctattttgagccaagtgaaacatctatcttcctgtctaagttctttgaataaaagtctgaatgtgtcatctctatg

SEQ ID NO: 144900 - DNA, 246 bp, Glycine max
ataaattggttaaagagaggactatatctggagattcatactatggctctcacgtgatgcagtatggtgatgtagggcttagcagagatgttctcttccattatttgggtacagatcctgctaatgataatttcacttttgtggatgaaaactccttatggtcaccttcaaaaccagtcaaccaacgtgatgctgatctcatccatttttgggataagttccgcaaagctcctgagggttctctca

SEQ ID NO: 144901 - DNA, 248 bp, Glycine max
attgagctcgagggtgcatgagaattcagtgtctaacataccaggttgttttgtcattggtgttaagttgacaagcatatacaatatgtgtgcatatgggctcaatcctggtatttcaggttctcgtcttttgggcaccattcctcagtccatttcacagcaaactgtttggaatcaaatggcaacagtgagaacactattgaattttgattctagcaagcagagcttttgtcaattttctattgacc

SEQ ID NO: 144902 - DNA, 242 bp, Glycine max
gaaaacgcagacgagtgcatggtgcttgacaatgaagctttgtatgacatctgctattgtacccgcaagctaaccaccccaagctttggtgacttgaaccatctgatctcagctacaatgtctggtgtcacttgttgtttgaggttccctggtcaacttaactctgatctgcgaaagcttgcagtgaaccttattcccttccctcgcctccacttcttcatggttggatttgctccattgac

SEQ ID NO: 144903 - DNA, 222 bp, Glycine max
tctcacactggtcttcgcttctcattcatcatttctcacctaaccttctcttcctctcagtctcagatcagaaacctcagccagccatggcagcgttccagaagatcaaggtcgtcaaccccatcgtcgagatggacggagatgaaatgactagggttatctggaagtcaatcaaggacaagctcattttgcccttcttggagttggacatcagtattatga

SEQ ID NO: 144904 - DNA, 244 bp, Glycine max
caccattactgatggtattgacaaaactagtgcaactttgcaatttagaaagttagcagattgtgattttctcaagagaaactttaagcagatgtctaatgttttatgggtggctcctgaggacaaggcgagtttatggtcacaacttcattatgtttcgtgcaataatctggaaatgcaagaagcttatcttgtcaataccgtaaatgtgttacgagaattgtatttgcacagtccagaggaa

SEQ ID NO: 144905 - DNA, 244 bp, Glycine max
tgaagaggctgggttgtggggatattggcagtgtttacctctccgagttgagtggaactaaatgttactttgcaatgaaggtaatggacaaagggtctctagcaagtcgtaaaaagctacttcgtgctcagacagaacgagaaattctgcagtctcttgatcacccttttctcccaactttgtacacccattttgagacagaaaaattctcatgcttggttatggaattctgcccaggtggtga

SEQ ID NO: 144906 - DNA, 239 bp, Glycine max
attgtttgttgttgtaactcgttcttcttcttttgttgttctgtgtttgtgtttgttttttctctcacctgaaaatgtcttgctgcggtggtaactgtggttgcggaagctcctgcaagtgcggcaacggctgcggaggctgcaagatgtacccagacttgagctacatgagtcaaccaccaccgagaccttgtcaagggggttgcacctgttaagggccaatttgagggtgctgaaat

SEQ ID NO: 144907 - DNA, 229 bp, Glycine max
ctgttttaaatccacaaaatccttttgtgttaaataggtggatgggaaaactgactttcccccagggcacttcccgaagtgttaagagaatgcctctttctatagggggaggagctggtgcaaagaatgctattctcatgaatatgccaaatgctgttctttcaatgtggagatattttgttgtagatctcgtctttgaagtttctaagatgaattctccctacattaa

SEQ ID NO: 144908 - DNA, 213 bp, Glycine max
  unsure (1)..(213): unsure at all n locations
gcaatggattccttgcgtcagttgtcaatgaaatttctggagcgggaggagttggctaattataattttcaaaatgaatttatgaagcctttcgtcattgttatgcgcaagagtagtgctgttgaaattagagaacttatcattagatgtgtctctcagatggtttatctccgtgacgatattgatcaggatgganagcatgttcatggtatt

SEQ ID NO: 144909 - DNA, 243 bp, Glycine max
  unsure (1)..(243): unsure at all n locations
tcgtattaaaggaatgattaaaatggtggccacagttggtattcctgagaatacaggtatagcattggcctgtgctatgaatagttcttttagggggcgcgccagttctgatatttacaccatctgctctcaagactgtgaattatggaatcctgcttgcacaaaagcaatgactatgtcatttaatccaaacccgtgttctgatgcatgagtttnggaatttctgaagcgtaccggatttca

SEQ ID NO: 144910 - DNA, 244 bp, Glycine max
ggacatcttggttgtttattatacaatagcaactcaatttagaaaatttctaccgcattacattaggtggcatctgtataccttgttgatttacattctcccatcttttctcactgctgaaattaaatataagcggaatctgagtaatattcatatttccggcttattttacgacggcagatacatattctggactaaacacgagaaaaatcttgctttgacagaagaggaaaagatggaagtg

SEQ ID NO: 144911 - DNA, 246 bp, Glycine max
  unsure (1)..(246): unsure at all n locations
gaaagcccacaatacactgatggagttcactctgcacttctagagactggtgattcttcttatgtgttcgaacctgatcgatctgatgtgtctcaggatgaagaagataacttgagcaagacccttctgcctcattacatttttcccaagcttgaagatgttgattactccgacccacctcatggntcatgtaattttggnattccggaggangatcaagccatttggncttggccttactgaatt

SEQ ID NO: 144912 - DNA, 243 bp, Glycine max
gccaaatgctgttctttcaatgtggagatattttgttggagatctcgtctttggagtttctaagatgacttctccctacattaaatgtacagtctctttcttcatagcatttggaaatttggctgatgacaccatcaattttgagggttttccccagaagctggtgcagtttggagagattcaggaaaaagttgtgttgaaattctcaccagaggaatttcttacagcttggtcaactcaggt

SEQ ID NO: 144913 - DNA, 244 bp, Glycine max
gtagctagggagggatatatatctgagtaagatggcatcagagcttgaattgcccccaggcttcagattccatccaacggacgaggtgctggtgttgcactatctctgccgcaaatgcgcgtcgcagccaatcgccgttcccatcatcgccgaaatcgacctctacaaatacgacccctgggacttacccggattggctacttatggagagacagagtggtacttcttttcaccacgggaccgg

SEQ ID NO: 144914 - DNA, 243 bp, Glycine max
gtggaatttgccattctgatctccaccagattaaaaatgatcttggcatgtccaactatcccatggtcccaggacatgaagtggttggtgagttactggaggtgggatcaaacgttagcaggttcagagtgggagagttggtgggagttggactcctcgtaggttgctgcaaaaactgccagccatgccaacaagacattgagaattactgcagcaagaagatctggtcttacaatgatgttt

SEQ ID NO: 144915 - DNA, 162 bp, Glycine max
atcgagccgaatcggctcgagacaggttgccgcaccttaaaaccgactacaaaagcatctctaccttgatttcaagaatttcacaatttcttcctacttctttgtgtacgatttcttaagggaaagaaaatcactctcttgctggtcacagacttcgtgaat

SEQ ID NO: 144916 - DNA, 207 bp, Glycine max
cggctcgagattagatatagctatgaaaaattactgcgccaggctaaagctccaagtatgtttttacaatccttcaaaaattttgtttctttgtgtgtgtatggtgatgataacttaattagggtcaaggatatgtcaagccttactttagtggttctaaattgaaaagctttctagctggcataatatcaccattactgatggtat

SEQ ID NO: 144917 - DNA, 241 bp, Glycine max
gaagagatgacattgattccaggaaccagtgttgaagatgcttacaacaagctaatagttgaacttgagaaaagtgttcctacattggttggcattgaatgtcccaaggatgaggaacttcctcgtcgcaaaatttttgacaaacctaagacgcgctgcttcactattctccctatggagtttaatcttgtggtccgtcaaaagtttgtaaattttgtgaggttcattatgaagaaaaggg

SEQ ID NO: 144918 - DNA, 234 bp, Glycine max
caagttggaatcaacccatactccatggaatggactggtttggccaatagattactgagtaagggcaatgatattctgtgttgcgattatgctagttttgatggtttgattaccaagcaagttatgagcaagatggcagaaatgataaacagtctttgtggtggtgatgaaaaattgatgcgtgaaaggacgcacctgctgttggcttgttgttcaaggatggcaatttgtaag

SEQ ID NO: 144919 - DNA, 239 bp, Glycine max
ggtgcatgatagttcagtgtctacaataccaggtgattttgtcattggtgttaagttgacaaccataaacaatatgtgtgcatatgggctcaatcctggtatttcaggttctcgtcttttgggcaccattcctcagtccatttcacagcaaactgtttggaatcaaatggcaacagtgagaacaccattgaattttgattcagcaagcagagcttttgtcaattttctattgaccttct

SEQ ID NO: 144920 - DNA, 240 bp, Glycine max
ggagttctgagtgggcaaatcaaacttcatggcatttgagtttccttattgacaatcccaaacagtctacagtttttgatattctcttgggaatctctcaagattttgaaattgctggtaatactcttatgccagctttttctgttccacaggctactgccagatcttctgaaaatgcggaatcctctgcatgatctggaattcgtgttttctttcgcatgttcgtttgtttaattcaat

SEQ ID NO: 144921 - DNA, 266 bp, Glycine max
cagaagaggaaaagatggaagtgattagaaatagaggcattcctgctgatgttcttgcaaagcgagctcatgaatttgaaaaacatgttgctcatgaaagcctcaaggatcaaattcctgctgttgacaagttgtattctactaaggttaataagtttgcaaaaattatgaaccttagacaaagtgttgttggtgatcttaaacttcttactgatgggaagttgtatgagggtaagcatattcctgtatctaatattagtgcaggg

SEQ ID NO: 144922 - DNA, 121 bp, Glycine max
cgtttgtttaattcaataaaggaaattaggcatgaccctcttgttgagtatgctctgcctatttgaaaatttccacacctcttttaattgtcgtaatgatgtgtgaagtgtgtgttatttt

SEQ ID NO: 144923 - DNA, 268 bp, Glycine max
caaaaataagacattgtttggtttgcgttacttgctcgaatttcctcgaatcgcttaatttgtatttgattagttaaaccgcaacgcggaatctcttttctcgaactggctaactctcaggcaagtggttcggacgctgattccagcaacaagcggctggtgctcgcactgtatgacgccctaaactccggcgatccgacgccgtcgtcaagatcgtcgccgccgacctcgagtggtggttccatggtccgccctcacaccagttttt

SEQ ID NO: 144924 - DNA, 270 bp, Glycine max
ctaacctacctctttttcttctctctcaacaacttcaccttcttcctcctcgatcatgtctcacttcaagggcaagtaccatgatgagcttatcgccaatgctgcgtacattggcactcctggaaagggtattcttgctgctgatgagtcaacagggacaattggcaagcgtttggccagcatcagtgtagagaacattgaatccaacaggcgagctcttagggagctgcttttcactgctcctggtgttcttcaatatctcagtggtgt

SEQ ID NO: 144925 - DNA, 267 bp, Glycine max
gtccttgttggtggttctaccagaattcccaaggttcaacaactgctgcaggacttctttaatggaaaagagctttgcaagagcattaatcccgatgaggctgttgcatatggtgcggctgttcaggctgcaatcttaagtggtgagggcaatgagaaggttcaggatcttctcctcctggatgtcacccctctgctcttggtttggagactgccggtggtgtgatgactgtcctgatccctaggaacactacaattccaacaaaga

SEQ ID NO: 144926 - DNA, 268 bp, Glycine max
gagaaactttaagcagatgtctaatgttttatgggtggctcctgaggacaaggcgagtttatggtcacaacttcattatgtttcgtgcaataatctggaaatgcaagaagcttatcttgtcaatctcgtaaatgtgttacgagaattgtatttgcacagtccagaggaagctcgccaattgagaaggaaagctcctctcgtattgaatggctgcaaaaagctgatgtgcctaccatagcacagattgaagagttccattcgatgcaga

SEQ ID NO: 144927 - DNA, 263 bp, Glycine max
cagcaacagtacagagcattttgatgcatgtaagtggacaaaatcagaaccacattcctgggaattaatcttcccaatagaggtatgtggtcctaataatggttttgaaatgtggagttctgagtgggcaaatcaaacttcatggcatttgagtttccttattgacaatcccaaacagtctacagtttttgatatctcttgggaatctctcaagattttgaaattgctggtaatactcttatgccagttttttctgttccaca

SEQ ID NO: 144928 - DNA, 277 bp, Glycine max
tattctgctcgagccattctccaccacatctccttcttctacaatctctaccacatatcctcatcaggagtgacgaatctacgagggtgtcattggcatcgatcttggcacaagctactcttgcgttgccaactacgagggcaccaatgtcgagatcattgccaacgagcagggtagcttcaccactccctccttcgtctccttcatgagcgaggagcgtctcatcggtgaggccgctaagaaccaggtcgctatgaacccggagagtactgtcttc

SEQ ID NO: 144929 - DNA, 262 bp, Glycine max
ggctcgagcggctcgagggctactgccagatcttctgaaaatgcggaacagaaattgctggtaatactctactgccagctttttctgttccacaggctactgccagatcttctgaaaatgcggaatcctctgcatgatctggaattcgtgttttctttcgcttgttcgtttgtttaattcaataaaggtaataggcatgaccctcttgttgagtatgctctgcctatctgaaaatttccacacctcttttaattgtcgtaat

SEQ ID NO: 144930 - DNA, 157 bp, Glycine max
taaaccgcgatcacaggttgccgcaccttaaaaccggaaacaaaagcaatcgttacttgatttcaagaatttctcaatttcttcctacttctttgtgtacgatttcttaagggaaagaaaatcactctctgtgctggtcacagacttcgtgaatcat

SEQ ID NO: 144931 - DNA, 266 bp, Glycine max
tgaatatgccaaatgctgttctttcaatgtggagatattttgttggagatctcgtctttgaagtttctaagatcacttctccctacattaaatgtacagtctctttcttcatagcatttggaaatttggctgatgacaccatcaattttgaggcttttccccacaagctggtgcagtttggagagattcaggaaaagttgtgttgaaattttcacaagaggaatttcttacagcttggtcaactcaggtgcgtcccgcaacgactc

SEQ ID NO: 144932 - DNA, 180 bp, Glycine max
tgaaattttaataaaccgcgatcacaggttgccgcaccttaaaaccggaaacaaaagcaatcgttacttgatttcaagaatttctcaatttcttcctacttctttgtgtacgatttcttaagggaaagaaaatcactctctgtgctggtcacagacttcgtgaatcattttcttttccac

SEQ ID NO: 144933 - DNA, 266 bp, Glycine max
gattcgcacgcattgcttcgcctcataacagcagctgcagcagcaatggctcgcaaacgaggtggaaaggctccggctcttgccgctaagaagaagcctgagaaggtcacgaatccgttgttcgagaagcgtccgaagcagttcggaatcggaggggcgttgcctccgaagagagacttgactaggttcgtgagtggccaaagaatgttcaaattcagaggtagaagaggattctgaagcagaggttgaaggttcccccagctttg

SEQ ID NO: 144934 - DNA, 164 bp, Glycine max
ggaattcggatcgagtgaaattttgataaaccgcgatcaaagagtgccgcattttaaacccggcagctttagcaatagttacttgatttcaagaatttctcaatttcttcatacttctgtatgtacgatttgttaagggatcgcaaatcactctctgtgctggc

SEQ ID NO: 144935 - DNA, 268 bp, Glycine max
caagatgatactaggcacagctttggacactcaggaggttttgcctgcccatttgttccattcttacctgctgcatgtattcttataaacacctacttactaatcgatcttggagttgctacatggctgcgagtttcggtatggatgttgataggagtacttgtatacttgttctatggccgcactcacagctcactgttgcatgcaatctatgttccctcagcatatgctgatgaaatccatcgatctcaagcaagtcatcttgcct

SEQ ID NO: 144936 - DNA, 240 bp, Glycine max
caagccttactttagtggttctaaattgaaaagctttctagctggtcataatatcaccattactgatggtattgacaaaactagtgcaactttgcaatttagaaagttagcagattgtgattttctcaagagaaactttaagcagatgtctaatgttttatgggtggctcctgaggacaaggcgagtttatggtcacaacttcattatgtttcgtgcaataatctggaaatgcaagaagc

SEQ ID NO: 144937 - DNA, 258 bp, Glycine max
gtttgattgtgttgatgaggaggattcctttgaggaagtttctttaagtgcagcacttaatggtgttgagggtttggactatatggaaagaattcctcttgccacatctgagggttttcctcatgtgctttcacgcaaaaatggcgacaaaggcaaaaggagatttgtctctggggatggtgaagagatgacattgattccaggaaccagtgttgaagaggcttacaacaagctaatagttgaacttgagaaaagtgt

SEQ ID NO: 144938 - DNA, 259 bp, Glycine max
gcaatttagaaagttagcagattgtgattttctcaagagaaactttaagcagatgtctaatgttttatgggtggctcctgatgacaaggcgagtttatggtcacaacttcattatgtttcgtgcaataatctggaaatgcaagaagcttatcttgtcaatctcgtcaatgtgttacgagccttgtatttgcacagtccagaggaagctcgccaattcagaaggaaacctctctctcgtattgaatggctgcaaaaagct

SEQ ID NO: 144939 - DNA, 260 bp, Glycine max
cttcttctcttgcggctagggttttagcgcagtctcttctagatttaaggaagatgggtaaggccaaggttcacatcagtattgtggtcattggccatgtcgactctgggaaatccactaccactggtcacctgatttacaagcttggaggcattgacaagcgtgttactgagacgttttcgaaggaagtgctgagatcgaacaagaggtctttcaagtatgcctgggtgctggatacattaaggctgagcgtgaaagag

SEQ ID NO: 144940 - DNA, 260 bp, Glycine max
aaaaagttgtgttgaaattttcacaagaggaatttcttacagcttggtcaactcaggtgcgtcccgcaacgactctgttggctgatgggtgcccatatttgtatgctatggtgcatgatagttcagtgtctacaataccaggtgattttgtcattggtgttaagttgacaaccataaacaatatgtgtgcatatgggctcaatcctggtatttcaggttctcgtcttttgggcaccatcctcagtccatttcacagcaaa

SEQ ID NO: 144941 - DNA, 262 bp, Glycine max
aaaaagtttcctctacaaaagcacaatttgttagtggaaaaaccttcaaatatgatataattggtgctggttcacattcttcaggagattttcctgaaaaggaagatcaagaaaaacccaaaaagattgataccagattgagacaaagaatagatcctcaatacaatgaggttcaggctcagatggaaacaatttgtttaaattgtctcttgatgatgttgaaactcctaaaggttctatgttggatcttaaaatttctcaa

SEQ ID NO: 144942 - DNA, 182 bp, Glycine max
tgaaattttaataaaccgcgatcacaggttgccgcaccttaaaaccggaaacaacagcaatcgttacttgatttcaagaatttctcaatttcttcctacttctttgtgtacgatttcttaagggaaagaaaatcactctctgtgctggtcacagacttcgtgaatcattttcttttccactc

SEQ ID NO: 144943 - DNA, 263 bp, Glycine max
taagtttctagctggtcataatatcaccattactgatggtattgacaaaactagtgcaactttgcaatttagaaagttagcagattgtgattttctcaagagaaactttaagcagatgtctaatgttttatgggtggctcctgaggacaaggcgagtttatggtcacaacttcattatgtttcgtgcaataatctggaaatgcaagaagcttatcttgtcaatctcgtaaatgtgttacgagaattgtatttgcacagtccag

SEQ ID NO: 144944 - DNA, 236 bp, Glycine max
acatcactgaaggaaattatgtcagaaagcaagatgtcagcattgaatatgatgcatgtacaattccaaatgattgtggttcattggttgttgccaaggttggaaatcacaaacaaattgttggtttccatgttgctggaagcaaaggaagactgggatatgcttcattgataccatatgttgagccagtgtgcaagctcaaagtgctgaagtttactttgacttcttccctgtgg

SEQ ID NO: 144945 - DNA, 265 bp, Glycine max
accggatttcattgtgatatcatttgtgtcactggatggactgccaccccaatgcaggatgttcaggttacaattgattggtttatttcctctcaggaatgtgttcccaggacctattgtgttttaaatccacaaaatccttttgtgttaaataggtggatgggaaaactgactttccctcagggcacttccgaagtgttaagagaatgcctctttctatagggggaggagctggtgcaaagaatgctattctcatgaatatgcc

SEQ ID NO: 144946 - DNA, 261 bp, Glycine max
gtggacaaaactggagattggatcacacttatacaaaattctccaattagtaacttgttgagagttgctgcttggaagaaaggttgtttaatggtcaagattgtgatgtctgggaatgcagcagtcaaaaggagtgattgggcctcattggtacaagtgtttttaacaaacagcaacagtacagagcattttgatgcatgtaagtggacaaaatcagaaccacattcctgggaattaatcttcccaatagaggtatgtggt

SEQ ID NO: 144947 - DNA, 259 bp, Glycine max
tggtgttaagttgacaaccataaacaatatgtgtgcatatgggctcaatcctggtatttcaggttctcgtcttttgggcaccattcctcagtccatttcacagcaaactgtttggaatcaaatggcaacagtgagaacaccattgaattttgattctagcaagcagagcttttgtctcttttctattgaccttctcggtggaggaattttagtggacaaaactggagattggatcacacttatacaaaattctccaatt

SEQ ID NO: 144948 - DNA, 261 bp, Glycine max
cgattcattccatttcttccaaaatggccaaagacccagttcgcgttctcgtcactggagccgcagggcaaattggatatgctcttgtcctcatgattgctaggggagtgatgctgggtcctgaccagcccgtgatcctccacatgcttgacattcctccagcagcagagtcctctgaatggggttaacatggaattggtggatgctgcattccctcttcttaaaggtgttgttgctacaaccgatgtggttgaggcatgc

SEQ ID NO: 144949 - DNA, 261 bp, Glycine max
atttgtaagaaagatgtttggagagttgaatgtggaatcccttctggatttccgctcacagttatttgcaatagcatttttaatgagatgctcattagatatagctatgaaaaattactgcgccaggctaaagctccaagtatgtttttacaatccttcaaaaattttgtttctttgtgtgtgtatgacatgataacttaattagtgttcatgaatatgtcaagccttactttagtggttctaaattgaaaagctttctag

SEQ ID NO: 144950 - DNA, 258 bp, Glycine max
ctcatgcaaatcgtcctagtgatgatgttatatatcatattggttcctctgttagaagaccactaagatatggcaaacttcaagagtatggatttagatatttcacagcaaaaccatgcataagtaaggatggaaggccagttaaggttggaaaagttacagtactgagcaatatggatagcttcagaagatatatgttcattcgctacctgcttgtgttaaagggacttgagcttgccaatactgcattttgccagt

SEQ ID NO: 144951 - DNA, 173 bp, Glycine max
attttaataaaccgcgatcacaggttgccgcaccttaaaacccgacacaacagcaatcgttacttgatttcaagaatttctcactttcttcctacttctttgtgtaccacttcttaagggacagaaaatcactctctgtgctggtcacagacttcgtgaatcattctcttttc

SEQ ID NO: 144952 - DNA, 258 bp, Glycine max
gcgggtaatagttctgcagaaaacaacgaaagcgtgcaaactgatagtgggattaataagacatccaacattagttcagaggagcaagctgctgctgagcctgctacagagaaaaagctgaaaaagcggacctttagggtaccattaaagattgtagagaagataactggatttggaatgtctctatcacaagattttcttgctgaagccaaaagaaaactacaagtactagataaaaaagatgcagacagaaaaaga

SEQ ID NO: 144953 - DNA, 127 bp, Glycine max
cttgttcgtttgtttaattcaataaaggaaattaggcatgaccctcttgttgagtatgctctgcctatctgaaaatttccacacctcttttaattctcgtaattctgtgtgaagtgtgtgttatttt

SEQ ID NO: 144954 - DNA, 256 bp, Glycine max
cacagaacatgagggatatgatccttttcttggtggaattcaaaaatatgccactcccatgatgcccctagatgaagaaattctttctaaggttgcacaagatatggttgaggaatggtttgattgtgttgatgaggaggattcctttgaggaagtttctttaagtgcagcacttaatggtgttggggtttggactatatggaaagaattcctcttgccacatctgagggttttcctcatgtgctttcacgcaaaa

SEQ ID NO: 144955 - DNA, 259 bp, Glycine max
aaaatatgccactcccatgatgcccctagatgaagaaattctttctaaggttgcacaagatatggttgaggaatggtttgattgtgttgatgaggaggattcctttgaggaagtttctttaagtgcagcacttaatggtgttgagggtttggactatatggaaagaattcctcttgccacatctgagggttttcctcatgtgctttcacgcaaaaatggcgtcaaaggcaaaaggagatttgtctctggggatggtgaa

SEQ ID NO: 144956 - DNA, 253 bp, Glycine max
  unsure (1)..(253): unsure at all n locations
gccctctcttcaggtcaccatctagactgcaatcatggctgatggaccacagcatccatcagttgttcagaagctagctggacagtcttacctggtgtccaggcttagccccaactttaactctaggaattattctgcaactggttcttacgtcaatggcggaatgcactcgcctgggttggctgcgtgtcacctgtatctccagttactgtgcatgctncagcagagaaaggagtgagtggatttctagtgg

SEQ ID NO: 144957 - DNA, 255 bp, Glycine max
gccctctcttcaggtcaccatctagactgcaatcatggctgatggaccacagcatccatcagttgttcagaagctagctggacagtcttacctggtgtccaggcttagccccaactttaactctaggaattattctgcaactggttcttacgtcaatacgcggaatgcactcgcctgggttggctgttgtgtcacctgtatctccagttactgtgcatgctccagcagagaaacgagtgagtggatttctagtgg

SEQ ID NO: 144958 - DNA, 255 bp, Glycine max
gatagttcagtgtctacaataccaggtgattttgtcattggtgttaagttgacaaccataaacaatatgtgtgcatatgggcttaatcctggtatttcaggttctcgtcttttgggcaccattcctcagtccatttcacagcaaactgtttggaatcaaatggcaacagtgagaacaccattgaatttgattctagcaagcagagcttttgtcaattttctatcgaccttctcggtggaggattttagtggacaa

SEQ ID NO: 144959 - DNA, 258 bp, Glycine max
tggtatttcaggttctcgtcttttgggcaccattcctcagtccatttcacagcaaactgtttggaatcaaatggcaacagtgagaacaccattgaattttgattctagcaagcagagcttttgtcaattttctattgaccttctcggtggaggaattttagtggacaaaactggagattggatcaacttatacaaaattctccaattagtaacttgttgagagttgctgcttggaagaaaggctgtttaatggttaag

SEQ ID NO: 144960 - DNA, 258 bp, Glycine max
gtgaaggagattatcaagtggggtactgattattttctcaagagttttaatagcactgctgataccatcaccacccttgctgctcaggttgggcttggagatacttctggtggtgacagtccgaatgatcactattgctggatgcgtccggatcccatggactatgaccgccctgtgactgaatgcacagttgttccgatctcgcggctgagatggctgctgccttggcttctgcttccattgttttcaaggacaaca

SEQ ID NO: 144961 - DNA, 259 bp, Glycine max
cttctggatttccgctcacagttatttgcaatagcatttttaatgcgatgctcattagatatagctatgaaaaattactgcgccaggctaaagctccaagtatgtttttacaatccttcaaaaattttgtttctttgtgtgtgtatggtgatgataacttaattagtgttcatgaatatgtcaagccttactttagtggttctaaattgaaaagctttctagctggtcataatatcaccattactgatggtattgacaa

SEQ ID NO: 144962 - DNA, 259 bp, Glycine max
aacgttaatcagccccaagagaaagatttgttagagggcaatttttcctttgatattaaatctcgctctagattggaaaaagtttcctctacaaaagcacaatttgttagtggaaaaaccttcaaatatgatataattggtgctggttcacattcttcaggagattttcctgaaaaggaagatcaaaaaaacccacaaagattgataccagattgagacaaagcatagatcctcaatacaatgaggttcaggctcagat

SEQ ID NO: 144963 - DNA, 257 bp, Glycine max
aaataggatagagtgacagacagattcgtgatttaccatttaccacaccaaaaccaatccaatcgtttcctctgcggagtcagaaatccatggatccctacaagaatcggccatcaagcgccttcaattctcccttctggactactaattccggtgctcccatctggaacaacaactcatcgctgactgttggatctagaggtccaattctgctggaagattaccatctggtggagaagcttgcaaatttgacaggg

SEQ ID NO: 144964 - DNA, 252 bp, Glycine max
tcccatactccatggaatggagtatgggttgattccaacttgacaactaagcttgtcccttttcttcataatgaacccatactccatactatggactggtttggccaatagattactgagtaagggcaatgatattctgtgttgcgattatgctagttttgatggttcgattaccaagcaagttatgagcaagatggcagaaatgataaacagtctttgtggtggtgatgaaaaatgatgcgtgaaaggacg

SEQ ID NO: 144965 - DNA, 256 bp, Glycine max
cggctcgagagcatttggaaatttggctgatgacaccatcaattttgaggcttttccccacaagctggtgcagtttggagagattcaggaaaaagttgtgttgaaattttcacaagaggaatttcttacagcttggtcaactcaggtgcgtcccgcaacgactctgttggctgatgggtgccctatttgtatgctatggtgcatgatagttcagtgtctacaataccaggtgattttgtcattggtgttaagttga

SEQ ID NO: 144966 - DNA, 251 bp, Glycine max
gtttatggtcacaacttcattatgtttcgtgcaataatctggaaatgcaagaagcttatcttgtcaatctcgtaaatgtgttacgagaattgtatttgcacagtccagaggaagctcgccaattgagaaggaaagctctctctcgtattgaatggctgcaaaaagctgatgtgcctaccatagcacagattgaagagttccattcgatgcagaggatgatgaatgctcctgattcaaatgataatattgat

SEQ ID NO: 144967 - DNA, 255 bp, Glycine max
gtgagaacaccattgaattttgattctagcaagcagagcttttgtcaattttctattgaccttctcggtggaggaattttagtggacaaaactggagattggatcacacttatacaaaattctccaattagtaacttgttgagagttgctgcttggaagaaaggttgtttaatggtcaagattgtgatgtctgggaatgcagcagtcaaaaggagtgattgggcctcattggtacaagtgtttttaacaaacagc

SEQ ID NO: 144968 - DNA, 255 bp, Glycine max
cttctccctacattaaatgtacagtctctttcttcatagcatttggaaatttggctgatgacaccatcaattttgaggcttttccccacaagctggtgcagtttggagagattcaggaaaaagttgtgttgaaattttcacaagaggaatttcttacagcttggtcaactcaggtgcgtcccgaacgactctgttggctgatgggtgcccatatttgtatgctatggtgcatgatagttcagtgtctacaatacc

SEQ ID NO: 144969 - DNA, 258 bp, Glycine max
caaaagactatgattttcaccttcttgatggccgttcaatcagggttcccttcatgacgagcaggaagaatcagtttattagggcttttgatggtttcaaagtccttggtcttccctacaagcaaggtgaagataagcgccaattcaccatgtactttttccttccagaaacaaaagatgggctgttagctttggctgagaagttggcttctgaatctgggttcttggaacgcaagcttcctaataacaaattggaag

SEQ ID NO: 144970 - DNA, 258 bp, Glycine max
agattgaaccagacatgaattcaaggtttcagcttttgagccccactaccaatggtgattttgttcaagggaaagatctcgcaatggttaaagttaatgtagcatgtgctgctgttggcttgacatcaagttacactccaactccattgttggaatctggtttgcaaaaagacagagggttaattgtggagtattttggaaggatgtcttacgttgctcataacgttaatcagccccaagagaaagatttgttagagg

SEQ ID NO: 144971 - DNA, 256 bp, Glycine max
taacctacctctttttcttctctctcaacaacttcaccttcttcctcctcgatcatgtctcacttcaagggcaagtaccatgatgagcttatcgccaatgctgcgtacattggcactcctggaaagggtattcttgctgctgatgagtcaacagggacaattggcaagcgtttggccagcatcatgtagagaacattgaatccaacaggcgagctcttagggagctgcttttcactgctcctggtgttcttcaata

SEQ ID NO: 144972 - DNA, 248 bp, Glycine max
tgctgctgttggcttgacatcaagttacactccaactccattgttggaatctggtttgcaaaaagacagagggttaattgtggagtattttggaaggatgtcttacgttgctcataacgttaatcagccccaagagaaagatttgttagagggaaatttttcctttgatattaaatctcgctctagattggaaaaagtttcctctacaaaagcacaatttgttagtggaaaaacttcaaatatgatat

SEQ ID NO: 144973 - DNA, 254 bp, Glycine max
cactgaaggaaattatgtcagaaagcaagatgtcagcattgaatatgatgcatgtacaattccaaatgattgtggttcattggttgttgccaaggttggaaatcacaaacaaattgttggtttccatgttgctggaagcaaaggaagactgggatatgcttcattgataccatatgttgagccgttgtgcaagctcaaagtgctgaagtttactttgacttcttccctgtggaggttgatagtcaagagggagt

SEQ ID NO: 144974 - DNA, 253 bp, Glycine max
cttctccctacattaaatgtacagtctctttcttcatagcatttggacatttggctgatgacaccatcaattttgaggcttttccccacaagctggtgcagtttggagagattcaggaaaaagttgtgttgaaattttcacaagaggaatttcttacagcttggtcaactcaggtgcgtcccgcacgactctgttggctgatgggtgcccatatttgtatgctatggtgcatgatagttcagtgtctacaata

SEQ ID NO: 144975 - DNA, 259 bp, Glycine max
ggcagaaatgataaacagtctttgtggtggtgatgaaaaattgatgcgtgaaaggacgcacctgctgttggcttgttgttcaaggatggcaatttgtaagaaagatgtttggagagttgaatgtggaatcccttctggatttccgctcacagttatttgcaatagcatttttaatgagatgctcatagatatagctatgaaaaattactgcgccaggctaaagctccaagtatgtttttacaatccttcaaaaatttgt

SEQ ID NO: 144976 - DNA, 271 bp, Glycine max
caacaattcccctttgacatggaatacccgagcacgaatgattgctgaaatcgctagtgctctctgcttcctacattcttttaagcctgaaactattatccatggtgatctgaagccagaaactgtactacttgattcttcactgggttgcaagatgtgtggatttgggctctgcaggctggtgagcgaggagtctctcctccgtcctagtttccgcttgagcactgaaccaaaaggtgctttcacatatacagatccagagtttcagagg

SEQ ID NO: 144977 - DNA, 266 bp, Glycine max
aggaatcagagttaaggagctatggggttgttgttaatagcttctacgaacttgagaaggtttatgcagatcattttaggaacgtacttggaagaaaagcgtggcatattggtcccttatctctatgcaataaagacgcagaagagaaagcacgtagaggaaaggaggcatctattgatgagcatgagtgcctgaagtggctaaacacaaagaaacccaattcagttatttatatatgctttggaagtacagtaaagtttcctgat

SEQ ID NO: 144978 - DNA, 166 bp, Glycine max
ggaatcctctgcatgatctggaattcgtgttttctttcgcttgttcgtttgtttaattcaataaaggaaattaggcatgaccctcttgttgagtatgctctgcctatctgaaaatttccacacctcttttaattgtcgtaatgatgtgtgaagtgtgtgttatttt

SEQ ID NO: 144979 - DNA, 261 bp, Glycine max
tgctcattacatatagctatgaaaaattactgcgccaggctaaagctccaggtatgtttttacaatccttcagaaattttgtttctttgtgtgtgtatggtgatgataacttaattagtgttcatgaatatgtcaagccttactttagtggttctaaattgacaagctttctagctggtcataatctccgttacgggggggattttgaaaaaactattccactttgcaatttagacagttagcagattgtgattttctcaa

SEQ ID NO: 144980 - DNA, 261 bp, Glycine max
tgttctttcaatgtggagatattttgttggagatctcgtctttgaagtttctaagatgacttctccctacattaaatgtacagtctctttcttcatagcatttggaaatttggctgatgacaccatcaattttgaggcttttccccacaagctggtgcagtttggagagattcaggaaaaagttgtgttgaaattttcacaagaggaatttcttacagcttggtcaactcaggtgcgtcccgcaacgactctgttggctga

SEQ ID NO: 144981 - DNA, 276 bp, Glycine max
cagcttgaacacaccgcgtttcggagagagacgtcgcaatggggaggaggcctgcaaggtgttatcggcagataaaaaacaagccataccccaaatcacgcttttgccgtggtgttcctgatcctaagatcagaatttatgatgttggtatgaagaagaaaggtgttgatgagtttcccttctgtgttcatctggttagctgggaaaaagaaaatgtttcaagtgaagcattggaagctgctagaattgcatgcaacaaatatatggcgaaatttg

SEQ ID NO: 144982 - DNA, 271 bp, Glycine max
ggttggttcacaattggctgagccagagataaagatgctgatggaagtggctgatgttgatgggaatggagtacttgactatggagagtttgtagccgtgacaattcacttgcaaagaatggagaatgatgagcatttccgcaaagcattcatgtattttgacaaagatgggagtgggtatatcgagttaggggagctagagaaagcattaacagatgagtcgggagatactgatactgctgtattgaatgacatcatgcgtgaagtcgac

SEQ ID NO: 144983 - DNA, 269 bp, Glycine max
gaacaattactttagtgttttctcttgtcacataaaagtcatctaagaagaattacaagatcatcatcacaataacaagatgagttcaggaattagagcatggagtgtggcagcaagtgttggaattgtggaggccttgaaagaccaaggtatatgcaggtggaatcatgccttaagatcagctcaacaccatctcaaaaaccatgttggctcattctctcaggctaacaagctttcttcttctgctatgatctccacaacactaaaac

SEQ ID NO: 144984 - DNA, 266 bp, Glycine max
gttgaaattttcacaagaggaatttcttacagcttggtcaactcaggtgcgtcccgcaacgactctgttggctgatgggtgcccatatttgtatgctatggtgcatgatagttcagtgtctacaataccaggtgattttgtcattggtgttaagttgacaaccataaacaatatgtgtgcatatgggctcaatcctggtatttcaggttctcgtcttttgggcaccattcctcagtccatttcacagcaaactgtttggaatcaaa

SEQ ID NO: 144985 - DNA, 265 bp, Glycine max
gtgatattatgaccagctagtgcaactttgcaatttagaaagttagcagattgtgattttctcaagagaaactttaagcagatgtctaatgttttatgggtggctcctgaggacaaggcgagtttatggtcacaacttcattatgtttcgtgcaataatctggaaatgcaagaagcttatcttgtcaatctcgtaaatgtgttacgagaattgtatttgcacagtccagaggaagctcgccaattgagaaggaaagctctctctc

SEQ ID NO: 144986 - DNA, 263 bp, Glycine max
gaaaaagttgtgttgaaattttcacaagaggaatttcttacagcttggtcaactcaggtgcgtcccgcaacgactctgttggctgatgggtgcccatatttgtatgctatggtgcatgatagttcagtgtctacaataccaggtgattttgtcattggtgttaagttgacaaccataaacaatatgtgtgcatatgggctcaatcctggtatttcaggttctcgtcttttgggcaccattcctcagtccatttcacagcaaac

SEQ ID NO: 144987 - DNA, 262 bp, Glycine max
ctcgagccgaaatgctgttctttcaatgtggagatattttgttggagatctcgtctttgaagtttctaagatgacttctccctacattaaatgtacagtctctttcttcatagcatttggaaatttggctgatgacaccatcaattttgaggcttttccccacaagctggtgcagtttggagagattcaggaaaaagttgtgttgaaattttcacaagaggaatttcttacagcttggtcaactcaggtgcgtcccgcaacg

SEQ ID NO: 144988 - DNA, 253 bp, Glycine max
cagggatatcattcttaataaaaacaacaaccacactttctccgtttctcgtggttcatgctatggcggcagaggcggctttgttcttttctgtggcatcagtggtggaggacgtgcttcagcagcacggtcctcgcctcaaagatcttgatttggaatctaggaaagccgaagaagctgcatcaagaagatacgaagctgcggggtggttgagaaaaatggttggagttgttgcagccaaagatttaccagc

SEQ ID NO: 144989 - DNA, 261 bp, Glycine max
gacagagggcaattttagagcaagtgttgatttgcagcgcactcatcgtattaaaggaatgattaaaatggtggccacagttggtattcctgagaatacaggtatagcattggcctgtgctatgaatagttcttttagggggcgcgccagttctgatatttacaccatctgctctcaagactgtgaattatggaatcctgcttgcacaaaagcaatgactatgtcatttaatccaaacccgtgttctgatgcatggagttt

SEQ ID NO: 144990 - DNA, 166 bp, Glycine max
ggaatcctctgcatgatctggaattcgtgttttctttcgcttgttcgtttgtttaattcaataaaggaaattaggcatgaccctcttgttgagtatgctctgcctatctgaaaatttctacacctcttttaattgtcgtaatgatgtgtgaagtgtgtgttatttt

SEQ ID NO: 144991 - DNA, 260 bp, Glycine max
atgacttctccctacattaaatgtacagtctctttcttcatagcatttggaaatttggctgatgacaccatcaattttgaggcttttccccacaagctggtgcagtttggagagattcaggaaaaagttgtgttgaaattttcacaagaggaatttcttacagcttggtcaactcaggtgcgtcccgcaacgactctgttggctgatgggtgcccatatttgtatgctatggtgcatgatagttcagtgtctacaatacc

SEQ ID NO: 144992 - DNA, 261 bp, Glycine max
tgaagactggcatcacaacgagacagtcaagcactggacttataccatagatggtaaggttacaacatgtctggagagtattgaatccattgatgaacagagcaaaacaatcacctacaagctcttcagtggtgacattgatcataattataagaactttaagttcatctttcaagccattgatgataatgatcatggcggtactattatcaaatggaccgttgaatacgagaggcttcgtgaggaggttgatcctccata

SEQ ID NO: 144993 - DNA, 259 bp, Glycine max
gcattttgatgcatgtaagtggacaaaatcagaaccacattcctgggaattaatcttcccaatagaggtatgtggtcctaataatggttttgaaatgtggagttctgagtgggcaaatcaaacttcatggcatttgagtttccttattgacaatcccaaacagtctacagtttttgatattctcttgggaatctctcaagattttgaaattgctggtaatactcttatgccagctttttctgttccacaggctactgcc

SEQ ID NO: 144994 - DNA, 190 bp, Glycine max
ttgaaattttaataaaccgcgatcacaggttgccgcaccttaaaaccggaaactatagcaatcgttacttgctgtcaagactttctcaatttcttcctacttctttgtgtacgatttcttaaggggaagaaaatcactctctgtgctggtcacagacttcgtgaatcattttcttttccacacaacatac

SEQ ID NO: 144995 - DNA, 257 bp, Glycine max
cggctcgaggggaatgcagcagtcaaaaggagtgattgggcctcattggtacaagtgtttttaacaaacagcaacagtacagagcattttgatgcatgtaagtggacaaaatcagaaccacattcctgggaattgatcttcccaatagaggtatgtggtcctaataatggttttgaaatgtggagttctgagtgggcaaatcaaacttcatggcatttgagtttccttattgacaatcccaaacagtctacagtttt

SEQ ID NO: 144996 - DNA, 259 bp, Glycine max
cacaggaggaaattctgtcttctagtgcaagtgatttcagaactgcaatggtgagtaaaaatagcaaacctcaagctactgcaatgcatgtgggagctatagaaattatcattgatagtttcgcaagtcctgattgcaacatagttggtgcaatgcttttggttgatacttatcataccaatcctgaaaatgcagttcgtagtatttttgttgcgcctttcagaggcggaaggcccattcgggtggttacatttccgaa

SEQ ID NO: 144997 - DNA, 261 bp, Glycine max
ttctcctcgttgttcttcgctttcctgttttcaatttcgattctgtcgttaatttaataagatgtttgggagggcaccgaagaagagcgataatacgaggtactacgaaatcctcggcgtctccaagaacgcttcgcaggatgatctgaagaaggcttacaagaaagccgccattaagaatcaccccgacaagggcggtgatcccgagaagtttaaagagctggcgcaagcttatgaggttctgagtgaccctgagaagcg

SEQ ID NO: 144998 - DNA, 261 bp, Glycine max
gaatgattaaaatggtggccacagttggtattcctgagaatacaggtatagcattggcctgtgctatgaatagttcttttagggggtgcgccagttctgatatttacaccatctgctctcaagactgtgaattatggaatcctgcttgcacaaaagcaatgactatgtcatttaatccaaacccgtgttctgatgcatggagtttggaatttctgaagcgtaccggatttcattgtgatatcatttgtgtcactggatgga

SEQ ID NO: 144999 - DNA, 259 bp, Glycine max
gaatgattaaaatggtggccacagttggtattcctgagaatacaggtatagcattggcctgtgctatgaatagttcttttagggggcgcgccagttctgatatttacaccatctgctctcaagactgtgaattatggaatcctgcttgcacaaaagcaatgactatgtcatttaatccaaacccgtgttctggtgcatggagtttggaatttctgaagcgtaccggatttcattgtgatatcatttgtgtcactggatg

SEQ ID NO: 145000 - DNA, 255 bp, Glycine max
gctagcgtacatctgaaatgtatgtggtggagagcaaggtgggcgccatagggtgcatgctggtgtccctcttcttcctcgggacatggcctgctgtcatgactctgctagaaaggcgcggtcgtcttcctcaacacacctaccttgattacaccctcaccaacctcatggctgctgttatcattgctttcacctttggtcagattggcaacgctcaacccaacttcttgtctcagctttctcaggataactggc

SEQ ID NO: 145001 - DNA, 254 bp, Glycine max
cgaaataccaattctgtctcacatagttctataacaccacaaactgtccaattccaatggttgttttctcttgtgttaaaacaatggttgtgcttgtccttgcgtttctaatctctgtgccttctatggttgcttctgctgtcagcttgtaccaagatgttgatgtcacgtggggagatggcagaggtaagattctgaacaatggtcagcttcttactctgtctctcgacagagcctctggctctggctttcag

SEQ ID NO: 145002 - DNA, 257 bp, Glycine max
ttggatcacacttatacaaaattctccaattagtaacttgttgagagttgctgcttggaagaaaggttgtttaatggtcaagattgtgatgtctgggaatgcagcagtcaaaaggagtgattgggcctcattggtacaagtgtttttaacaaacagcaacagtacagagcattttgatgcatgtaagtggacaaaatcagaaccacattcctgggaattaatcttcccaatagaggtatgtggtcctaataatggtt

SEQ ID NO: 145003 - DNA, 142 bp, Glycine max
cacactctctctcaccaaagccttcctagaacgataaaaaaaaagcgaagcaattttccctcaccaaagaagaggaagcaaacaatggccgatcaacttaccgatgaacagatctccgagttcaaggaagccttcagcttgt

SEQ ID NO: 145004 - DNA, 261 bp, Glycine max
aattgaaatctgggggcaggcaggattcttttgaagatgaaccatctcaaaatggcagtttggcatatactgctcaaaatgggggactaaatacacctcatacagtagtcaatcaaactatgtctatcatacctatctctgcaggtggtgctcctggagctgttcctggtcccacgacaaacttaaatataggaatggattattggggtacaccagcttcatccaacattcctgcacttggcagaaaggttccatctactg

SEQ ID NO: 145005 - DNA, 260 bp, Glycine max
atcaagaaaaacccaaaaagattgatgccagattgagacaaagaatagatcctcaatacaatgaggttcaggctcagatggaaacaaatttgtttaaattgtctcttgatgatgttgaaactcctaaaggttccatgttggatcttaaaatttctcaatctaaaattgcacttcccaagaacacagttggaggaaccattctgcgtagtgatttattggcaaattttttgacagagggcaattttagagcaagtgttgat

SEQ ID NO: 145006 - DNA, 257 bp, Glycine max
aaccaaagttatggataccctctctcagcttagccttctttgcctttgcctttccttctttccccttttcgcttcccctgctttgctgtttcaggggttcaactgggaatcaagtaagaaaggtggttggtacaactcgctgaagaacactattcctgaccttgcaaatgctggaattacacatgtttggctccctcctccctctcaatctgtttcacctgaaggttatcttccaggaaggctatatgatcttgatg

SEQ ID NO: 145007 - DNA, 237 bp, Glycine max
gacggcgtcgtcggactcgacaacttcaacgactactacgatccgtctctgaaaaaagcccgcaagtccctcctcgccaagcatgacgtcttcatcgtcgatggcgacctcaacgacgccaagctcttggcaaagctcttcgatgtggtcgctttcacccacgtgatgcacctcgcggcgcaggccggggttcgctacgccatggagaatccccactcctacgtccacagcaacatc

SEQ ID NO: 145008 - DNA, 252 bp, Glycine max
aaatccttttgtgttaaataggtggatgggaaaactgactttccctcagggcacttcccgaagtgttaagagaatgcctctttctatagggggaggagctggtgcaaagaatgctattctcatgaatatgccaaatgctgttctttcaatgtggagatattttgttggagatctcgtctttgaagtttctaagatgacttctccctacattaaatgtacagtctctttcttcatagcatttggaaatttggc

SEQ ID NO: 145009 - DNA, 250 bp, Glycine max
aattttcacaagaggaatttcttacagcttggtcaactcaggtgcgtcctgcaacaactctgttggctgatgggtgtccatatttgtatgctatggtgcatgatagttcagtgtctacaataccaggtgattttgtcattggtgttaagttgacaaccataaacaatatgtgtgcatatgggcttaatcctggtatttcaggttctcgtcttttgggcaccattcctcagtccatttcacagcaaactgt

SEQ ID NO: 145010 - DNA, 254 bp, Glycine max
tcaaggatggcaatttgtaagaaagatgtttggagagttgaatgtggaatcccttctggatttccgctcacagttatttgcaatagcatttttaatgagatgctcattagatatagctatgaaaaattactgcgccaggctaaagctccaagtatgtttttacaatccttcaaaaattttgtttctttgtgtgtgtatggtgatgataacttaattagtgttcatgaatatgtcaagccttactttagtggttc

SEQ ID NO: 145011 - DNA, 254 bp, Glycine max
ccgagaacaaaaaaaaaaacgtgattcgctcttctcttcgaataaaccacaaaaccaacaaacgagaagaggattgagagaagatggggttgtcgttcacgaagctgttcagcaggttgtttgcgaagaaggaaatgaggattctgatggtaggtctcgatgctgctggtaagacaaccatcttgtacaagctcaagcttggagaaatcgtcaccaccatcccaaccatcggatttaatgttgagactgtggag

SEQ ID NO: 145012 - DNA, 260 bp, Glycine max
ggaaactcaaatgccatgaagtttccttattgacaatcccaaacagtctacagtttttgatattctcttgagagattcccaagagaatatcaaaaactgtagactgtttgggatattctcttgggaatctctcaagattttgaaattgctggtaatactcttatgccagctttttctgttccacaggctactgccagatcttctgaaaatgcgtaatactctgcatgatctggaattcgtgttttctttcgcttgttcgt

SEQ ID NO: 145013 - DNA, 260 bp, Glycine max
cagtactggtccttcttccgccgcccaaaggagatcgagaccgccgacaaagtccccgacttcgtcgacaccttctacaatctagtcacagacatctacgagtgggggtggggccagtccttccacttctccccctccatccccggcaagtcccaccgcgacgccacgcgcctccacgaggagatggccgtcgatctcatcgaggccaagcccggcaacagaatcctggatgtgggctgtggcgtgggcggtcccatgcg

SEQ ID NO: 145014 - DNA, 255 bp, Glycine max
atcctctttgaggaaaccctctaccagagcacagctgcaggcaagccctttgtgaatgtcttgaaggaagctggtgtgcttcctggcatcaaggttgacaagggcacagtcgagcttgctggaactaatggagaaaccaccactcagggtctagatggccttggtcagcgttgtgccaagtactacgaagctggtgcacgttttgccaaatggcgtgcagtgctgaagattggtcccaacgagccatctgagctg

SEQ ID NO: 145015 - DNA, 251 bp, Glycine max
gcatctagttcaattaaatttgcaaaacatggaatttgataatgaataccattatgcaaaactacttcgagatcaaacccacatatttgatcaaactttcggattcataaactctatgtcccttaaatgtgcaattgatttgtgcatacctgatgtaatacacaagtatggccaacccatgccactctctcaactcattgcttcacttccaattcacccttctaaggcttgcttcattttccgcttgatgc

SEQ ID NO: 145016 - DNA, 247 bp, Glycine max
cccaaattcattagatgggaataaagtcaaaggaaagatcgtggtctgtgatgacaaaaatgataaatattcaactattctagcaacaacatcagttcttgattataagcctgctcccctggtgccaaacttctcatcaagagggccttcatcgctttcaagcaatattctcaagcctgatattgcagctccgggagttaacattctcgctgcatggattggaaatggcacagaagtggttcccaaa

SEQ ID NO: 145017 - DNA, 252 bp, Glycine max
atttgctgaacactctcctatttgatataggacttcgtgtcagatttagactttttctgtgtctttctcagttctctgtttaatttcaagttcaagctggtgaaattttggattagtgctcccactctcctatctggtataggacttcgtgggtagacttttctacttctctcctatctttcactctcttcttctcactgatccgcattgccgttcaaagtggtcttatttgaaaaacacttgggcgttggt

SEQ ID NO: 145018 - DNA, 250 bp, Glycine max
ccacaggctactgccagatcttctgaaaatgcggaacagaaaaagctggtaatactcttatgccagctttttctgttccacaggctactgccagatcttctgaaaatgcggaatcctctgcatgatctggaattcgtgttttctttcgcttgttcgtttgtttaattcggtaaaggaaattaggcatgaccctcttgttgagtatgctctgcctatctgaaaatttccacacctcttttaattgtcgtaa

SEQ ID NO: 145019 - DNA, 250 bp, Glycine max
cttatcttgtcaatctcgtaaatgtgttacgagaattgtatttgcacagtccagaggaagctcgccaattgagaaggaaagctctctctcgtattgaatggctgcaaaaagctgatgtgcctaccatagcacagattgaagagttccattcgatgcagaggatgatgaatgctcctgattcaaatgataatattgatctactgttgagcattgatttgttgggtttacaaggagcaggtaaagcttttcc

SEQ ID NO: 145020 - DNA, 253 bp, Glycine max
caaaaagacagagggttaattgtggagtattttggaaggatgtcttacgttgctcataacgttaatcagccccaagagaaagatttaatatcaaaggaaaaatttccctctaacaaatcttctcttttgattttgataccccttattattatttatttccataccctctcttcacttcttcctcaccaattttctgagcactgacactcttctctccttaaagccaccacattctgatacccttttgatcaat

SEQ ID NO: 145021 - DNA, 252 bp, Glycine max
ggagtttaatcttgtggtccgtcaaaagtttttaaattttgtgaggttcattatgaagaaaagggacaagcttagttgtcaagttggaatcaacccatactccatggaatggactggtttggccaatagattactgagtaagggcaatgatattctgtgttgcgattatgctagttttgatggtttgattaccaagcaagttatgagcaagatggcagaaatgataaacagtctttgtggtggtgatgaaaa

SEQ ID NO: 145022 - DNA, 189 bp, Glycine max
acttcccaagaacacagttggaggaaccattctgcgtagtgatctattggcaaattttttgacagagggcaattttagagcaagtgttgatttgcagcgcactcatcgtattaaaggaatgattaaaatggtggccacagttggtattcctgagaatacaggtatagcattggcctgtgctatgaatag

SEQ ID NO: 145023 - DNA, 223 bp, Glycine max
gctgatgacaccatcaattttgaggcttttccccacaagctggtgcagtttggagagattcaggaaaaagttgtgttgaaattttcacaagaggaatttcttacagcttggtcaactcaggtgcgtcccgcaacgactctgttggctgatgggtgcccatatttgtatgctatggtgcatgatagttcagtgtctacaataccaggtgattttgtcattggtg

SEQ ID NO: 145024 - DNA, 245 bp, Glycine max
cagataagtcttaaagttcaacgtattgcagctgatgcagtaccagacttactagaatatttcaagcagttctttattaacctttttcagtactctgctgagaggcttggttgggagcctaaaccaggagagagtcatgtagatgcaatgttgagaggagaaattttgactgcccttgctatgtttggtcacgatttaacactggatgaagcaagcaagcgttttcaggcattcttagaaaacag

SEQ ID NO: 145025 - DNA, 245 bp, Glycine max
attcttgctaatcatttctgcagcagcagtgggagtatcacttcctttcttgatcggttcaatcttctatagtaaaattgaagggtggttagaaaagtatccaaagagagcttctgttctaagatctgctggtgggggaaattggtttcatcaatttcaggcagttgctttaatcagggtttctccattcccatacataatctacaactattgtgccgtcgcaacaaatgttgagtattggcctt

SEQ ID NO: 145026 - DNA, 239 bp, Glycine max
gcgaattacagttgatgaggcgttgagccacccatacatggcacctctccatgacatcaatgaggaacctgtttgcaccagacctttcagttttgactttgagcaaccatcattcactgaagaagacatcaaggaactcatctggagagaatctgtgaagttcaatcctgttccaccagtctactgagattttgtatttatgttgtatatgcttagtggattatctgatgactaatata

SEQ ID NO: 145027 - DNA, 236 bp, Glycine max
ctctagattggaaaaagtttcctctacaaaagcacaatttgttagtggaaaaaccttcaaatatgatataattggtgctggttcacattcttcaggagattttcctgaaaaggaagatcaagaaaaacccaaaaagattgataccagattgagacaaagaatagatcctcaatacaatgaggttcaggctcagatggaaacaaatttgtttaaattgtctcttgatgatgttgaaa

SEQ ID NO: 145028 - DNA, 230 bp, Glycine max
ctaaagtttacattgtttactattctacgtacggacatgttgagaagttagctgaagagattaaaaagggagctggttccgttgaaggtgtggaagcaaagctatggcaggtacctgaaacactttctgaagaggtccttgggaagatgggtgcacctccaaagagtgatgtaccgattattacacccaacgagctacctgaggtcgagggcttattgcttggtttcccc

SEQ ID NO: 145029 - DNA, 240 bp, Glycine max
gcgaaaagctggtgatgtgtgttttgctgaggtttcccgtgatagtgaagggacttttggcattgttgattacactaattatgacgacatgaagtatgctattcggaaactagatgacactgagtttagaaatccttgggcgagagcttatattcgggtgaggaagtatgagagtagtcgttctaggagccacagcagaagtcccagcaggagcagaagtccaaaaagagttagaagtag

SEQ ID NO: 145030 - DNA, 237 bp, Glycine max
catgaatatgtcaagccttactttagtggttctaaattgaaaagctttctagctggtcataatatcaccattactgatggtattgacaaaactagtgcaactttgcaatttagaaagttagcagattgtgattttctcaagagaaactttaagcagatgtctaatgttttatgggtggctctgaggacaaggcgagtttatggtcacaagcttcattatgtttcgtgcaataatctg

SEQ ID NO: 145031 - DNA, 236 bp, Glycine max
ggtgcatgatagttcagtgtctacaataccaggtgattttgtcattggtgttaagttgacaaccataaacaatatgtgtgcatatgggctcaatcctggtatttcaggttctcgtcttttgggcaccattcctcagtccatttcacagcaaactgtttggcatcaaatggcaacagtgagaacaccattgaattttgattctagcaagcagagcttttgtcaattttctattgacc

SEQ ID NO: 145032 - DNA, 244 bp, Glycine max
gatctcgtctttgaagtttctaagatgacttctccctacattaaatgtacagtctctttcttcatagcatttggaaatttggctgatgacaccatcaattttgaggcttttccccacaagctggtgcagtttggagagattcaggaaaaagttgtgttgaaattttccaagaggaatttcttacagcttgggtcaactcaggtgcgtccggctacgactctgtgggctgatgggtgccatattt

SEQ ID NO: 145033 - DNA, 246 bp, Glycine max
attgaaaagctttctagctggtcataatatcaccattactgatggtattgacaaaactagtgcaactttgcaatttagaaagttagcagattgtgattttctcaagagaaactttaagcagatgtctaatgttttatgggtggctcctgaggacaaggcgagtttatggtcacaacttcattatgtttcgtgcaataatctggaaatgcaagaagcttatcctgtcaatctcgtaaatgtgttacg

SEQ ID NO: 145034 - DNA, 213 bp, Glycine max
tgaagcagcgcgtcttaggtttgtggtccgtcaaaagtttttaaattttgtgaggttcattatgaagaaaagggacaagcttagttgtcaagttggaatcaacccatactccatggaatggactggtttggccaatagattactgagtaagggcaatgatattccgtgttgcgattatgctagttttgatggtttgattaccaagcaagttat

SEQ ID NO: 145035 - DNA, 236 bp, Glycine max
ctgactttccctcagggcacttcccgaagtgttaagagaatgcctctttctatagggggaggagctggtgcaaagaatgctattctcatgaatatgccaaatgctgttctttcaatgtggagatattttgttggagatctcgtctttgaagtttctaagatgacttctccctacattaaatgtacagtctctttcttcatagcatttggaaatttggtgatgacaccatcaatttg

SEQ ID NO: 145036 - DNA, 245 bp, Glycine max
atgatattctgtgttgcgattatgctagttttgatggtttgattaccaagcaagttatgagcaagatggcagtaatgataaacagtctttgtggtggtgatgaaaaattgatgcgtgaaaggacgcacctgctgttggcttgttgttcaaggatggcaatttgtaagaaagatgtttggagagttgaatgtggaatcccttctggatttccgctcacagttatttgcaatagcattttgaatgag

SEQ ID NO: 145037 - DNA, 241 bp, Glycine max
tgaatatgtcaagccttactttagtggttctaaattgaaaagctttctagctggtcataatatcaccattactgatggtattgacaaaactagtgcaactttgcaatttagaaagttagcagattgtgattttctcaagagaaactttaagcagatgtctaatgttttatgggtggctcctgaggacaaggcgagtttatggtcacaacttcattatgttcgcgcaataatctggaaatgc

SEQ ID NO: 145038 - DNA, 243 bp, Glycine max
caattgggcaaatgcatccatagtgactagggtggatatctggtatccgaaaacttgcagtttgccctgtcaatcctccagggtccaaataactcagttttctctcatgaactatttgggtcaatggattagtttgatccaaaacttgagataatggatgtaatccaaaaaaagattcataagtaaaggttatgatgttcaatacagaaaaacttcaactgtatgtcccaactccagtgacag

SEQ ID NO: 145039 - DNA, 245 bp, Glycine max
ctcccactctcctatctggtttaggacttcgtgggtagacttatctatttctctcctttctttcactctcttcttctcactgttccgcattgccgttcaaagtggtcttatttgaaaaacacttgggcgttggtgcaaatgtttgcttcattcattttctctggagacaacaggctcactgagaaaacaatttttacttgcagagatttggacatcttggttgtttattatacaatagcaactca

SEQ ID NO: 145040 - DNA, 242 bp, Glycine max
gattaccaagcaagttatgagcaagatggcagaaatgataaacagtctttgtggtggtgatgaaaaattgatgcgtgaaaggacacacctgctgttggcttgttgttcaaggatggcaatttgtaagaaagatgtttggagagttgaatgtggaatcccttctggatttccgctcacagttttttgtaatagcatttttaatgagatgctcattagatatagctatgaaaaattactgcgcc

SEQ ID NO: 145041 - DNA, 242 bp, Glycine max
aactactactacttccctgggcttatgttgttgaaaatatgaccaagatatacggtttttctttttctttctttaatttgatgagaaatttggtgcaattctgatgcagctgaggccatacttcttggttttcaacattatcttgtgatgctgggtacaactgtgctaattcccactgctcttgttccccagatgggaggtggcaatgaggagaaggcaaaagttatccaaactctactctt

SEQ ID NO: 145042 - DNA, 161 bp, Glycine max
ctttattgaattaaacaaacgaacaagcgaaagataattaggcatgaccctcttgttgagtatgctctgcctatctgaaaatttccacacctcttttaattgtcgtaatgatgtgtgaagtgtgtgttattttaaaaaaaaaaaaaaaaaaaaaaacaaat

SEQ ID NO: 145043 - DNA, 235 bp, Glycine max
tgttactgctgctcttttctcttttcttttctctttagttctctcttcccctttctttttctttttcttcttcttctgagcttgtttaagcttttcttccattaacatattatcacaatgtgtggtattcttgctgttcttggttgttctgatgactctcgagccaaaagggtccgcgtgcttgagctctctcgaagattgaagcacgtggccctgactggagtgggctccatca

SEQ ID NO: 145044 - DNA, 236 bp, Glycine max
caaatctcttcgttccttcgattcgttccatttcttccaaaatggccaaagacccagttcgcgttctcgtcactggagctgcagggcaaattgggtatgctcttgtccctatgattgctaggggagtgatgttgggtcctgaccagcccgtgatcctccacatgcttgacattcctccggcagcagagtcattgaatggggttaaaatggaattggtggatgctgcattccctctt

SEQ ID NO: 145045 - DNA, 219 bp, Glycine max
atgaggttcaggctcagatggaaacaaatttgtttaaattgtctcttgatgatgttgaaactcctaaaggttctatgttggatcttaaaatttctcaatctaaaattgcacttcccaagaacacagttggaggaaccattctgcgtagtgatctattggcaaattttttgacagagggcaattttagagcaagtgttgatttgcagcgcactcatcgta

SEQ ID NO: 145046 - DNA, 235 bp, Glycine max
tggatgctgatgggaatggtaccattgacttccctgagttcctaaatctcatggccaggaagatgaaggacactgattctgaggaggagctgaaagaggcattccgggttttcgacaaggaccagaatgggttcatctctgctgctgagttcgccatgtgatgaccaacctcggggagaagctcaccgatgaagaggttgatgagatgattcgcgaggccgatgttgatggcgat

SEQ ID NO: 145047 - DNA, 233 bp, Glycine max
gaaatttggctgatgacaccatcaattttgaggcttttccccacaagctggtgcagtttggagagattcaggaaaaagttgtgttgaaattttcacaagaggaatttcttacagcttggtcaactcaggtgcgtcccgcaacgactctgttggctgatgggtgcccatatttgtatgctatggtgcatgatagttcagtgtctacaataccaggtgattttgtcattggtgtt

SEQ ID NO: 145048 - DNA, 243 bp, Glycine max
gttgccgcaccttaaaaccggaaacaaaagcaatcgttacttgatttcaagaatttctcaatttcttcctacttctttgtgtacgatttcttaagggaaagaaaatcactctctgtgctggccacagacttcgtgaatcattttcttttccactcttagtttattctctgaacactctcctatttgatataggacttcgtgtcagatttaaacttcttctgtttccttctcagttctctgttt

SEQ ID NO: 145049 - DNA, 243 bp, Glycine max
gccacctacattcccaccctgtactctaagaacagcacttacacgatatgcagatgttttgagttcacccaaaaagtctgccttgcttgccttagctgctcatgcatctgatccatctgaagctgatcgactaagacatcttgcctcacctgctggaaaggatgaatattcagagtgggtgattgcctctcagagaagtctccttgaggtcatggctgaatttccatcagccaaacctccaat

SEQ ID NO: 145050 - DNA, 241 bp, Glycine max
ctgaactatcatgcaccatagcaggtgattttgtcattggtgataagttgacaaccataaacaatatgtgtgcatatgggctcaatcctggtatttcaggttctcgtcttttgggcaccattcctcagtccatttcacagcaaactgtttggaatgagatggcagcagtgagaacaccattgaattttgattctagcaagcaaagcctttggtcaattttctattgaccttctcggtggag

SEQ ID NO: 145051 - DNA, 124 bp, Glycine max
agcgcatttctgtctaaatttaaggaagatggggaaggtctaggttcacatcactatagtggtcattggccatgtcgactctgggaaatccactaccactggtcacctgatttacaagcttaga

SEQ ID NO: 145052 - DNA, 237 bp, Glycine max
attggatcacacttatacaaaattctccaattagtaacttgttgagagttgctgcttggaagaaaggttgtttaatggtcaagattgtgatgtctgggaatgcagcagtcaaaaggagtgattgggcctcattggtacaagtgtttttaacaaacagcaacagtacagagcattttgatgcatgtaagtggacaaaatcagaaccacattcctgggaattaatcttcccaatagagg

SEQ ID NO: 145053 - DNA, 108 bp, Glycine max
gcaacatatacaatcaaggcaatagatgatccacgaacccttaacaaaacattgtacctaaggcctccagaaaatattatctctcaagcagagcttattggaattggg

SEQ ID NO: 145054 - DNA, 240 bp, Glycine max
ttttcacaagaggaatttcttacagcttggtcaactcaggtgcgtcccgcaacgactctgttggctgatgggtgcccatatttgtatgctatggtgcatgatagttcagtgtctacaataccaggtgattttgccattggtgttaagttgacaaccataaacaatatgtgcgcatatgggcacatcctggaatttcaggttctcgtcttttgggcacaattcctcggtccatttcacagc

SEQ ID NO: 145055 - DNA, 240 bp, Glycine max
caattttagagcaagtgttgatttgcagcgcactcatcgtattaaaggaatgattaaaatggtggccacagttggtattcctgagaatacaggtatagcattggcctgtgctatgaatagttcttttagggggcgcgccagttctgatatttacaccatctgctctcaagactgtgaattatggaatcctgcttgcacaaaagcaatgactatgtcatttaatccaaacccgtgttctga

SEQ ID NO: 145056 - DNA, 238 bp, Glycine max
attgaaccagacatgaattcaaggtttcagcttttgagtaccactaccaatggtgattttgctcaagggaaagatctcgcaatggttaaagttaatgtagcatgtgctgctgttggcttgacatcaagttacactccaactccattgttggaatctggtttgcaaaaagacagagggttaattgtggagtattttggaaggatgtcttacgttgctcataacgttaatcagccccaag

SEQ ID NO: 145057 - DNA, 135 bp, Glycine max
cggctcgaggggtggttacatttccgaataccattgtgcagattgaaccagacatgaattcacggtttcagcttttgagtaccactaccaatggtgattttgttcaaggaaaagatctcgcagtggtaaaattaa

SEQ ID NO: 145058 - DNA, 234 bp, Glycine max
ggctcctgaagacaaggcgagtttatggtcacaacttcattatgtttcgtgtaataatctggaaatgcaagaagcttatcttgtcaatctcgtaaatgtgttacgagaactgtatttgcacagtccagaggaagctcgccaattgagaagataagctctctctcgtattgatggctgcaaaaagctgatgtgcctaccatagcacagattgaagagttccattcgatgcagagg

SEQ ID NO: 145059 - DNA, 288 bp, Glycine max
gaggaattttagtggacaaaactggagattagatcacacttatacaaaattctccaattagtaacttgttgagagttgctgcttggaagaaaggttgtttaatggtcaagattgtgatgtctgggaatgcagcagtcaaaaggagtgattgggcctcattggtacaagtgtttttaacaaacagcaacagtacagagcatgttgatgcatgtcagtggacaacatcagaaccacattcctgggaattaatcttcccaatagaagtatgtggtcctaataatggttttg

SEQ ID NO: 145060 - DNA, 286 bp, Glycine max
tctcgctctctctctcgcatctcaaaccttccaactcttctacgacgtcgtcttgttcttcaccctctgctgctgcttcttcatcttcttctccttcttctccgtttcggcttcgccttcccaagcctcccaccgtgttctctgcttcttcttctgcttcgtctacctctccgaacggcaccgttttgaagaggaagcgacccgctaggttggacatacccgtttcctctctcacctttgcggttccgcccacgccctccgcggcggcgcgtgacttggtcgaggc

SEQ ID NO: 145061 - DNA, 306 bp, Glycine max
ctcttctccaagaatagagttttcacgtagtacatcgtgttaaaggatacagggttcacaattgaaacattcgtaggtcatttggccatggtcgacctctggagaacgtcaaaccaccaccggtcaccttatctacaagctcggaggtattaacaagcgggtcatcgagattttcgagaagaaagctgctgatatgaataagaggtctttcaagtatgcctgggtgcttgacaagctcaaggctgagcgtgaaagaggaatcaccattgatattgctctgtggaagtttgagaccacaaagtacta

SEQ ID NO: 145062 - DNA, 282 bp, Glycine max
ggaaatttggctgatgacaccatcaattttgaggcttttccccacaagctggtgcagtttggagagattcaggaaaaagttgtgttgaaattttcacaagaggaatttcttacagcttggtcaactcaggtgcgtcccgcaacgactctgttggctgatgggtgcccatatttgtatgctatggtgcatgatagttcagtgtctacaataccaggtgattttgtcattggtgttaagttgacaaccataaacaatatgtgtgcatatgggctcaatcctggt

SEQ ID NO: 145063 - DNA, 270 bp, Glycine max
aacccatactccatggaatggactggtttggccaatagattactgagtaagggcaatgatattctgtgttgcgattatgctagttttgatggtttgattaccaagcaagttatgagcaagatggcagaaatgataaacagtctttgtggtggtgatgaaaaattgatgcgtgaaaggacgcacctgctgttggcttgttgttcaaggatggcaatttgtaagaaagatgtttggagagttgaatgtggaatcccttctggatttccgctc

SEQ ID NO: 145064 - DNA, 182 bp, Glycine max
ggagagattcaggaaaaagttgtgttgaaattttcacaagaggaatttcttacagcttggtcaactcaggtgcgtcccgcaacgactctgttggctgatgggtgcccatatttgtatgctatggtgcatgatagttcagtgtctacaataccaggtgattttgtcattggtgttaagttgac

SEQ ID NO: 145065 - DNA, 282 bp, Glycine max
caggttgccgcaccttaaaaccggaaacaaaagcaatcgttacttgatttcaagaatttctcaatttcttcctacttctttgtgtacgatttcttaagggaaagaaaatcactctctgtgctggtcacagacttcgtgaatcattttcttttccactcctagttcattctctgaacactctcctatttgatataggacttcgtgtcagatttaaactttttctgtttctttctcagttctctgtttaatttcaagttcaagctggtgaaattttggattagt

SEQ ID NO: 145066 - DNA, 282 bp, Glycine max
gggttcacgaagaaacaccaatccgctccgagagctagaagaaatcaacgatgcctcgctatgatgataaatatggtaatacccgcctctatgttggacgcttgtcttcgaggactcgttcccgtgacctggagcgtgtcttcagcagatatggaagagttcgaggcgtagatatgaagaatgatttcgcctttgttgaatttagtgatcctcgagatgctgatgatgctagatacaacctggatggtcgtgatgttgaaggaagtcgtattattgtggaat

SEQ ID NO: 145067 - DNA, 267 bp, Glycine max
ccgggttcctttagtgtcatttgccgctacagaccccaccctctcatcgctgcagttccctgtctttgtgaggacaacacagagtgatttgtaccaaatgaaggcagttgctgagattattgattattatggttggaaggaggtgattgccatatatgtggatgatgattatgggcgaaatggtgtggccgcattggatgacgaactagctgcaaggcgttgtagaatctctttcaaagagggaatcaattcaggacctgaagttga

SEQ ID NO: 145068 - DNA, 280 bp, Glycine max
caaaattctccaattagtaacttgttgagagttgctgcttggaagaaaggttgtttaatggtcaagattgtgatgtctgggaatgcagcagtcaaaaggagtgattgggcctcattggtacaagtgtttttaacaaacagcaacagtacagagcattttgatgcatgtaagtggacaaaatcagaaccacattcctgggaattaatcttcccaatagaggtatgtggtcctaataatggttttgaaatgtggagttctgagtgggcaaatcagacttcat

SEQ ID NO: 145069 - DNA, 281 bp, Glycine max
tggaaatgcaagaagcttatcttgtcaatctcgtaaatgtgttacgagaattgtatttgcacagtccagaggaagctcgccaattgagaaggaaagctctctctcgtattgaatggctgcaaaaagctgatgtgcctaccatagcacagattgaagagttccattcgatgcagaggatgatgaatgctcctgattcaaatgataatattgatctactgttgagcattgatttgttgggtttacaaggagcaggtaaagcttttccaaacaagattgttttt

SEQ ID NO: 145070 - DNA, 281 bp, Glycine max
cgtgcgtgtgcgtgggagggtccgaagaagcacaacgttggagaaagtgattctcgttctgttcttctactcacaagagcagagacaacaacatcagaatcagaaacagcaatggccaacactaacttggacgatgttccctctctggatctcatgactgagctccttcgtcgcttcaagtgctgttccaaacctgacaagcgtcttattctcattggcccacctggatctgggaaaggcacccagtcaccaatcataaaagatgagtactgcttatgcca

SEQ ID NO: 145071 - DNA, 280 bp, Glycine max
ggaattcccgatttgttattactattgattcaatggacccaaaaaacaatggttgagaaacttacatacagtgaagaagtgcatgcactgttttagaggtgaaggtagttgaaggccatggaactactattgatgttgttttagtaaatggtgtcctccatgaaggagaacaaatagttgcctgcggaatccagggtccaattgttaccacaattcgagctttattgacacctcatccgatgaaggaacttcgtgtcaagggaacatatctccatcacaa

SEQ ID NO: 145072 - DNA, 277 bp, Glycine max
gagtgagcaagagtgaagagcgtagagaatggctccgaagggtttaatctgggtggctgtgctatgcttctcagcactggcactgagtcgttgtcttgcggaggataatggacttgttatgaacttctagaaggaatcatgccctcaggctgaagacatcatcaaagaacaagtcaagcttctctacaagcgcgacaagaacactgctttctcctggctcagaaacatcttccatgactgtgctgttcagagttgtgatgcttcactgctgctggac

SEQ ID NO: 145073 - DNA, 277 bp, Glycine max
cctcgagccactgagattgtgtttgtgttggatggacaactagatgttggattcatcaccacagccaacaaactcatctcaaagtccattaataagggtgaaatctttgtgttcccaaaaggtttggtgcactatcagaagaacaatggggataagcctgcttctgtgctttctgccttcaacagccaactccctggcacagtgtctatagctgcaactcttttcacttcaacaccaactgtgcctcataatgttctttctcaggccttccagattg

SEQ ID NO: 145074 - DNA, 171 bp, Glycine max
aaaaggcaaaaggagatttgtctctggggatggtgaagagatgacattgattccaggaaccagtgttgaagaggcttacaacaagctaatagttgaacttgagaaaagtgttcctacattggttggcaatgaattcccaagggatgagaacttcctcgtccgcaaaatttt

SEQ ID NO: 145075 - DNA, 278 bp, Glycine max
atttcttacagcttggtcaactcaggtgcgtcccgcaacgactctgttggctgatgggtgcccatatttgtatgctatggtgcatgatagttcagtgtctacaataccaggtgattttgtcattggtgttaagttgacaaccataaacaatatgtgtgcatatgggctcaatcctggtatttcaggttctcgtcttttgggcaccattcctcagtccatttcacagcaaactgtttggaatcaaatggcaacagtgagaacaccattgaattttgatt

SEQ ID NO: 145076 - DNA, 278 bp, Glycine max
gaatttgaaaaacatgttgctcatgaaagccttaaggatcaaattcctgctgttgacaagttgtattctactaaggttaataagtttgcaaaaattatgaaccttagacaaagtgttgttggtgatcttaaacttcttactgatgggaagttgtatgagggtaagcatattcctgtatctaatattagtgcaggggaaaatcatgtagttcaaatacccttaatggcacaggaggaaattctgtcttctagtgcaagtgatttcagaactgcaatggt

SEQ ID NO: 145077 - DNA, 278 bp, Glycine max
ggttggttcacaattggctgagccagagataaagatgctgatggaagtggctgatgttgatgggaatggagtacttgactatggagagtttgtagccgtgacaattcacttgcaaagaatggagaatgatgagcatttccgcaaagcattcatgtattttgacaaagatgggagtgggtatatcgagttaggggagctagagaaagcattaacagatgagtcgggagatactgatactgctgtattgaatgacatcatgcgtgaagtcgacactgaca

SEQ ID NO: 145078 - DNA, 277 bp, Glycine max
acgccagtgttggttttggtggatcctgcttccagaaggatatcttgaaccttgtttacatctgcgagtgcaatggccttccagaggtggctgagtactggaaacaagttatcaagatcaatgattatcagaagagccgttttgtgaaccgtgtagttgcatcaatgttcaacacagtctcaaacaaaaagattgctattctgggatttgccttcaagaaagacactggtgacactagggagacccctgccattgatgtatgccaggggctacttgg

SEQ ID NO: 145079 - DNA, 196 bp, Glycine max
  unsure (1)..(196): unsure at all n locations
tnttttccactccctcttttggcngccagaacaaacaaaacccacacttcactcccatccaattccaaacccacgttgttgttggtgcatggaatgaccgagtaccggatgaacctgtggaccgacgacaactcctccgtcatggaggccttcatgagctcctccgacctctcctccctctggcttgccacgccgc

SEQ ID NO: 145080 - DNA, 132 bp, Glycine max
cttagacttcttactgatgggaagtcgtatgagggtaagcatagtcctgtatctaatattagtgcaggggaaaatcatgtaggtcaaatacccttaatggcacaggaggaaattctgtcttctagtgcaagt

SEQ ID NO: 145081 - DNA, 273 bp, Glycine max
attctgcgtagtgatttattggcaaattttttgacagagggcaattttagagcaagtgttgatttgcagcgcactcatcgtattagaggaatgattaaaatggtggccacagttggtattcctgagaatacaggtatagcattggcctgtgctatgaatagttcttttagggggcgcgccagttctgatatttacaccatctgctctcaagactgtgaattgtggaccccggtttgcacaaaagcaatgactatgtcatttaatccaaacccg

SEQ ID NO: 145082 - DNA, 277 bp, Glycine max
aggatatgagtcatcctcaaatgcctaagcaaattgaggatgctaaaattgctatcctcacatgcccctttgagcctcccaagccaaagactaagcataaggttgacattgatacagtggagaagttccagacgttgaggttgcaggaacagaagtattttgatgacatggttcagaaatgcaaggatgtgggtgcacccttgtcatttgccaatggggttttgacgatgaagcaaatcatctcttaatgcacaggaacttgccagctgttagatgg

SEQ ID NO: 145083 - DNA, 275 bp, Glycine max
gtgatgtctgggaatgcagcagttaaaaacacttgtaccaatgatgcccaatcactccttttgactgctgcattcccagacatcacaatcttgaccattaaacaacctttcttccaagcagcaactctcaacaagttactaattggagaatgttgtataagtgtgatccaatctccagtcaaaaggagtgattgggcctcattggtacaagtgtttttaacaaacagcaacagtacagagcattttgatgcatgtaagtggacaaaatcagaacc

SEQ ID NO: 145084 - DNA, 270 bp, Glycine max
ggagtctgacatgtgtgcgagtcaacgggcgagtaaacccgtaaggcgcaaggaagctgattggtgggatccccctgtgggttgcaccgccgaccgaccctgatcttctgtgaagggttcgagtgagagcatacctgtcgggacccgaaagatggtgaactatgcctgagcggggcgaagcagaggaaactctggtggaggcccgcagcgatactgacgtgcaaatcgttcgtctgacttgggtataggggcgaaagactaatcgaaccg

SEQ ID NO: 145085 - DNA, 267 bp, Glycine max
cttgcaggcgaaacgcagcgtttcggcatcatgatacgcggaggccaaaactacgtttcttccgctccggcgttttcaaacgacggcaagcgcctcctcgtttgcagcggctccaccgtgtccatcttcagcaccggcaccggctccctcgtttcctcgctcgaaggccacaccgcctccgtcaccgccgtcgtggtggtcccctcctccactggcctaagctactgctggaccgcttctgtcgacggtaccatccgccactgggac

SEQ ID NO: 145086 - DNA, 269 bp, Glycine max
cttctttgaacaatacctggatatatggaagttagccctgatcaacatttccatagcactaggtgctatttttgttgtctgtctgatcatcacatccagtgtgtggagttcagtaatcatattacttgttctgatcatgataattttggatctcatgggcgtaatggcaattttgggtattcaactgaatgcggtgtctgttgtaaaccttattatgtcaataggaattgctgtggagttctgtgtgcatatagtacatgcttttacgg

SEQ ID NO: 145087 - DNA, 189 bp, Glycine max
atttttgacaaacctaagacgcgctgcttcactattctccctatggagtttaatcttgtggtccgtcagaagtttttaaattttgtgaggttcattatgaagaaaagggacaagcttagttgtcaagttggaatcaacccatactccatggaatggactggtttggccaataaggtactgagtaagggc

SEQ ID NO: 145088 - DNA, 264 bp, Glycine max
gttgccaagaggtttctcattgccggcggtggtgcgcctgagattgagctctccaggcagctgggtgcctgggctaaggtgttgcatgggatggagggttactgtgtgagggcatttgctgaggcgcttgaagttattccctatactctggctgagaatgctggtttgaacccgattgccattgttaccgagctgaggaatcgtcatgcaaagggtgagatacatgctggaataaatgtgaggaagggttcagataccaacatc

SEQ ID NO: 145089 - DNA, 273 bp, Glycine max
tccaatgtagtggtgctaacacctgaaaattttaatgaggttgtcttggatgaagccaaagatgtcttggttgagttttatgcaccatggtgtggacattgcaaaagtcttgctcctacttacgagaaagttgccacagcatttaaattggaggaagatgtagtaattgcaaatctggatgctgataaatatagggatctggctgaaaagtacgacgtgagtggatttcctaccttgaagttcttcccaaagggcaacaaagctggtgaagac

SEQ ID NO: 145090 - DNA, 274 bp, Glycine max
caaggtgctccgcgacaatatccagggaatcacgaagcccgcgattcggagactggcgagaagaggtggcgtgaagagaatcagtggtttgatctacgaagagaccaggggcgtgctcaagatctttctcgagaacgtgattcgcgatgccgtgacgtacacggagcacgctaggagaaagacagtgacggccatggatgtcgtttacgctctcaagaggcagggaaggactctctatggtttcggaggctgagggtttggccttctttggtgg

SEQ ID NO: 145091 - DNA, 273 bp, Glycine max
ctcaggaatgtgttcccaggacctattgtgttttaaatccacaaaatccttttgtgttaaataggtggatgggaaaactgactttccctcagggcacttcccgaagtgttaagagaatgcctctttctatagggggaggagctggtgcaaagaatgctattctcatgaatatgccaaatgctgttctttcaatgtggagatattttgttggagatctcgtctttgaagtttctaagatgacttctccctacattaaatgtacagtctctttct

SEQ ID NO: 145092 - DNA, 271 bp, Glycine max
ctcaaaaatcgttctcttcgattttagggttttgttttgctgctgactccgttccccccttctcataaacaacgcgttttctcttctgcttcgtatctattctttgcttttggttttggttgattcaaggccttcacagcattcgttgcggcattttaatcgatttatccaagcaggactgaatgaactaatggagtctaaaggtgggaaaaagaagtctagtagtagtagtagtaaatcattgttctacgaagctcccctcggatacagc

SEQ ID NO: 145093 - DNA, 271 bp, Glycine max
aatcaaatggcaacagtgagaacaccattgaattttgattctagcaagcagagcttttgtcaattttctattgaccttctcggtggaggaattttagtggacaaaactggagattggatcacacttatacaaaattctccaattagtaacttgttgagagttgctgcttggaagaaaggctgtttaatggttaagattgtgatgtctgggaatgcagcagtcaaaaggagtgattgggcctcattggtacaagtgtttttaacaaacagca

SEQ ID NO: 145094 - DNA, 266 bp, Glycine max
ggcaacagtgagaacaccattgaattttgattctagcaagcagagcttttgtcaattttctattgaccttctcggtggaggaattttagtggacaaaactggagattggatcacacttatacaaaattctccaattagtaacttgttgagagttgctgcttggaagaaaggttgtttaatggtcaagattgtgatgtctgggaatgcagcagtcaaaaggagtgattgggcctcattggtacaagtgtttttaacaaacagcaaca

SEQ ID NO: 145095 - DNA, 190 bp, Glycine max
tgaaattttaataaaccgcgatcacaggttgccgcaccttaaaaccggaaacaaaagcaatcgttacttgatttcaagaatttctcaatttcttcctacttctttgtgtacgatttcttaagggaaagaaaatcactctctgtgctggtcacagacttcgtgaatcattttcttttccacacaacatacg

SEQ ID NO: 145096 - DNA, 170 bp, Glycine max
aataaaccgcgatcacaggttgccgcaccttaaaaccggaaacaaaagcaatcgttacttgatttcaagaatttctcaatttcttcctacttctttgtgtacgatttcttaagggaaagaaaatcactctctgtgctggtcacaaatttcgtgaatcattttctttccca

SEQ ID NO: 145097 - DNA, 150 bp, Glycine max
ttggcttgttgttcaaggatggcaatttgtaagaaagatgtttggagagttgaatgtggaatcccttctggatttccgctcacagttatttgcaatagcatttttaatgagatgctcattagatatagctatgaaaaattactgcgccag

SEQ ID NO: 145098 - DNA, 262 bp, Glycine max
gttgaatctggattgtgatcactacgtcaataatagcaaggcagtcagagaggccatgtgctttttaatggaccccaatcttgggaagaagctgtgctatgtccaatttccacaaagatttgatggtcattgatcgccacgatagatatgctaaccgaaacacggtgttctttgatatcaatatgaaagggcttgatggggattcagggtccagtatatgttggtactggactgtgttcaacaggcaggcattgtatggcta

SEQ ID NO: 145099 - DNA, 236 bp, Glycine max
aaacatggttgatctacattggcaaacaaagatggttcactccaacatgcctccaaagtcccccaaactctctctcccggataataacattccaatcccccttcgccagaacgacatcaccgcagcgtcgtctccaatctgcgctgcctacgacaactacctccgcttccctgagctcagagccctctgggcctccaacgacttccctaattgggcaacgagccatcttaaaccca

SEQ ID NO: 145100 - DNA, 171 bp, Glycine max
caattttagagcaagtgttgatttgcagcgcactcatcgtattaaaggaatgattaaaatggtggccacagttggtattcctgagaatacaggtatagcattggcctgtgctatgaatagttcttttagggggcgcgccagttctgatatttacaccatctgctctcaaga

SEQ ID NO: 145101 - DNA, 117 bp, Glycine max
tgctattctcatgaatatgccaaatgctgttctttcaatgtggagatattttgttggagatctcgtctttgaagtttctaagatgacttctccctacattaaatgcacagtctcttt

SEQ ID NO: 145102 - DNA, 255 bp, Glycine max
gagaatggctcccaagggtttaacctttctggctgtgttaatatgcgtttcagcactgtcactgagtccttctgttgcgggggaagggcaaaataatggccttgttatgaacttctacaaggaatcatgccctcaggctgaagacatcatcacagaacaagtcaagcttctctacaagcgccacaagaacactgctttctcctggctcaggaacatcttccatgactgtgctgttcagagttgtgatgctcactg

SEQ ID NO: 145103 - DNA, 257 bp, Glycine max
ggcaaatcaaacttcatggcatttgagtttccttattgacaatcccaaacagtctacagtttttgatattctcttgggaatctctcaagattttgaaattgctggtaatactcttatgccagctttttctgttccacaggctactgccagatcttctgaaaatgcggaatcctctgcatgatctggaattcgtgttttctttcgcttgttcgtttgtttaattcaataaaggaaattaggcatgaccctcttgttga

SEQ ID NO: 145104 - DNA, 216 bp, Glycine max
cgaaacataatgaagttgtgaccataaactggaaatgcaagaagcttatcttgtcaatctcgtaaatgtgttacgagaattgtgtttgcacagtccagaggaagctcgccaattgagaaggaaagctctctctcgtattgaatggctgcaaaaagctgatgtgcctaccatagcacagattgaagagttccattcgatgcagaggatgatgaatgc

SEQ ID NO: 145105 - DNA, 242 bp, Glycine max
cagtaaggacagggttaacctttccccatggtaacatgctggcaattccaaggaagaagacaggaattcttgacgattttcgttctagcggttggctcgatgcaatgaaatcgtcttctcctactcacactaaggtatccaaggatgttagtcatgggattggatcacctgattctgcttatagtacctggctgctaaagtttccatcagcactagcatcttttggatcaatttaccaactg

SEQ ID NO: 145106 - DNA, 258 bp, Glycine max
gggttattcctaccactgtaatggttaatcgcatagttcctgagccatatatggatgaaatatttcatataccacaggcacagcagtactgcaagggaaaatttggaagttgggaccctatgattaccactcctcctggcctgtactatctttcacttgcccatgttgcttctttgtttccaggcttttactgtgtagaagctgcttcaatttctgacttgtgctctgctgcaattcttcgatcaattaatggtgttt

SEQ ID NO: 145107 - DNA, 184 bp, Glycine max
gaaaagtatctgcttgatcttcaaagggtgcagggtccacagtttcttttcttggatctatgtgctgctttccttgcacagcttcgggtcctctagagcaaagagcttaggctcacaagagacataaatatgccttgtgtttcatgtgaataagcttacattgtacatataagtatctgttcgg

SEQ ID NO: 145108 - DNA, 155 bp, Glycine max
tgtgaattgtggaatcctgcttgcacaaaagcaatgactatgtcatttaatccaaacccgtgttctgatgcatggagtttggaatttttgaagcgtaccggatttcattgtgatatcatttgtgtcactgggtggactgccacccaaatgcagga

SEQ ID NO: 145109 - DNA, 139 bp, Glycine max
ctcgagccgctcgagccggccaccccaatgcaagatgttcaggttacaattgattggtttatttcctctcacgaatgtgttcccaggacctattgtgttttaaatccacaaaatccttttgtgttaaatgggtggatgg

SEQ ID NO: 145110 - DNA, 167 bp, Glycine max
gcgattatgctagttttgatggtttgattaccaagcaagttatgagcaagatggcagaaatgataaacagtctttgtggtggtgatgaaaaattgatgcgtgaaaggacacacctgctgttggcttgttgttcaaggatggcaatttgtagaaaagatgtttggaga

SEQ ID NO: 145111 - DNA, 144 bp, Glycine max
taggttactgagtaagggcaacgatattctgtgttgcgattatgctagttttgatggtttgattaccaagcaagttatgagcaagatggcagaaatgataaacagtctttgtggtggtgatgaaaaattgatgcgtgaaaggac

SEQ ID NO: 145112 - DNA, 245 bp, Glycine max
attctcttgggaatctcaaaaactgtagactgtttgggattgtcaataaggaaactcaaatgccatgaagtttcatgtgcccactcagtctacagtttttgatattctcttgggaatctctcaagattttgaaattgctggtaatactcttatgccagctttttctgttccacaggctactggcagatcttctgaaaatgcggaatcctctgcatgatctggaatccgggtttccttaggctggt

SEQ ID NO: 145113 - DNA, 187 bp, Glycine max
gtctttgtggtggtgatgaaaaattgatgcgtgaaaggacacacctgctgttggcttgttgttcaaggatggcaatttgtaagaaagatgtttggagagttgaatgtggaatcccttctggatttccgctcacagttatttgtaatagcatttttaatgagatgctcattagatatggctaggaaaa

SEQ ID NO: 145114 - DNA, 251 bp, Glycine max
attagtgctcccactctcctatctggtataggtcttcgtgggtagacttcgctacttctctcctttctttcactctcttcttctcactgatccgcattgccgttcaaagtggtcttatttgaaaaacacttgggcgttggtgcaaatgtttgcttcgttaattttctctggacacaacaggctcactgtcagaacaatttttacttgcagagatttggacatcttggttgtctattatacaatagcaactc

SEQ ID NO: 145115 - DNA, 251 bp, Glycine max
gcatatgggctcaatcctggtatttcaggttctcgtcttttgggcaccattcctcagtccatttcacagcaaactgtttggaatcaaatggcaacagtgagaacaccattgaattttgattctagcaagcagagcttttgtcaattttctattgaccttctcggtggaggaattttagtggacaaaactggagattggatcacacttatacaaaattctccaattagtaacttgttgagagttgctgcttg

SEQ ID NO: 145116 - DNA, 193 bp, Glycine max
tttccccacaagctggtgcagtttggagagattcaggaaaaagttgtgttgaaattttcacaagaggaatttcttacagcttggtcaactcaggtgcgtcccgcaacgactctgttggctgatgggtgcccatatttgtatgctatggtgcatgatagttcagtgtctacaataccaggtgattttgtcattg

SEQ ID NO: 145117 - DNA, 224 bp, Glycine max
attctgtgttgcgattatgctagttttgatggtttgattaccaagcaagttatgagcaagatggcagaaatgataaacagtctttgtggtggtgatgaaaaattgatgcgtgaaaggacgcacctgctgttggcttgttgttcaaggatggcaatttgtaagaaagatgtttggagagttgaatgtggaatcccttctggatttccgctcaaagttatttgcaa

SEQ ID NO: 145118 - DNA, 173 bp, Glycine max
gatttgaaattttaataaaccgtgatcacaggttgccggaccttaaaaccggaaacaagagcaatcgttacttgatttcaagaatttctcaatttcttcctacttctttgtgtacgatttcttaagggaaagagaatcactcctctgtgctggtcacagacttcgtggatcat

SEQ ID NO: 145119 - DNA, 155 bp, Glycine max
cccacaagctggtgcagtttggagagattcaggaaaaagttgtgttgaaattttcacaagaggaatttcttacagcttggtcaactcaggtgcgtcccgcaacgactctgttggctgatgggtgcccatatttgtatgctatggtgcatgatagt

SEQ ID NO: 145120 - DNA, 195 bp, Glycine max
ctttcttatgctgataggtaccagtacaatgatgttggtttacggtgggatacatggggacgatttgttgaaaggagtacagcatatcatccatggttatggtctgctggaaatcacgaaatagactatatgccttacatgggagaagttgttcctttcaaaaactatctttaccgatatactactccctacttg

SEQ ID NO: 145121 - DNA, 245 bp, Glycine max
ggatgggtggcctttgaccccaagataaacaggtggatttctttacctaagataccttgtgatgagtgctttaatcatgcagacaaggagtccttggccgtgggctgcgaactgttggtcttcggtcgagaattgatggagtttgccatttggaagtatagcatgatttgtcgtggttgggtgaagtgccaggagatgaaccaaccccgttgtttgtttggatctagtagtcttggttcgattgc

SEQ ID NO: 145122 - DNA, 174 bp, Glycine max
gagcattttgatgcatgtaagtggacaaaatcagaaccacattcctgggaattaatcttcccaatagaggtatgtggtcctaataatggttttgaaatgtggagttctgagtgggcaaatcaaacttcatggcatttgagtttccttattgacaatcccaaacagtctacagtt

SEQ ID NO: 145123 - DNA, 205 bp, Glycine max
tgataacttaattagtgttcatgaatatgtcaagccttactttagtggttctaaattgaaaagctttctagctggtcataatatcaccattactgatggtattgacaaaactagtgcaactttgcaatttagaaagttagcagattgtgattttctcaagagaaactttaagcagatgtctaatgttttatgggtggctcctgag

SEQ ID NO: 145124 - DNA, 161 bp, Glycine max
caaatataaccaatataagtggctggctacacgaggggtagatgaagaagctcttctcaaaggacttccagctgatctgaggagagacatcaagcgccacctttgtctggaactagttcgacgagtcccattgtttgatcaaatggacgagagaatgctgg

SEQ ID NO: 145125 - DNA, 217 bp, Glycine max
atttcataattccatcagccatgagttttcaagacatccaaggtgggcccaaccctccctctcgccggaaccagtccccgtcgcaggccgttgccgccggaattttccagatcaacaccgccgtcgctactttccggcgactcgtcgatggcgttggaaccgttaaagacactcccgaacaccgtcagaaactgcacaatacgaggcagagaatatt

SEQ ID NO: 145126 - DNA, 160 bp, Glycine max
tgaaattttaataaaccgcgatcacaggttgccgcaccttaaaaccggaaacaaaagcaatcgttacttgatttcaagaatttctcaatttcttcctacttctttgtgtacgatttcttaagggaaagaaaatcactctctgtgctggtcacagacttcg

SEQ ID NO: 145127 - DNA, 189 bp, Glycine max
agcatttggaaatttggctgatgacaccatcaattttgaggcttttccccacaagctggtgcagtttggagagattcaggaaaaagttgtgttgaaattttcacaagaggaatttcttacagcttggtcaactcaggtgcgtcccgcaaccgactctgttggctgatgggtgcccatatttgtatccta

SEQ ID NO: 145128 - DNA, 245 bp, Glycine max
gatctcgtctttgaagtttctaagatgacttctccctacattaaatgtacagtctctttcttcatagcatttggaaatttggctgatgacaccatcaattttgaggcttttccccacaagctggtgcagtttggagagattcaggaaaaagttgtgttgaaattttcacaagaggaatttcttacagcttggtcaactcaggtgcgtcccgcaacgactctgttggctgatgggtgcccatattt

SEQ ID NO: 145129 - DNA, 264 bp, Glycine max
tgccaaatgctgttctttcaatgtggagatattttgttggagatctcgtctttgaagtttctaagatgacttctccctacattaaatgtacagtctctttcttcatagcatttggaaatttggctgatgacaccatcaattttgaggcttttccccacagctggtgcagtttggagagattcaggaaaaagttgtgttgaaattttcacaagaggaatttcttacagcttggtcaactcaggtgcgtcccgcaacgactctgtt

SEQ ID NO: 145130 - DNA, 260 bp, Glycine max
cacctgctgttggcttgttgttcaaggatggcaatttgtaagaaagatgtttggagagttgaatgtggaatcccttctggatttccgctcacagttatttgcaatagcatttttaatgagatgctcattagatatagctatgaaaaattactgcgcaggctaaagctccaagtatgtttttacaatccttcaaaaattttgtttctttgtgtgtgtatggtgatgataacttaattagtgttcatgaatatgtcaagcct

SEQ ID NO: 145131 - DNA, 258 bp, Glycine max
gtgattgggcctcattggtacaagtgtttttaacaaacagcaacagtacagagcattttgatgcatgcaagtggacaaaatcggaaccacattcctgggaattgatcttcccaatagaggtatgtggtcctaacaatggttttgaaatgtggagtctgagtgggcaaatcaaacttcatggcatttgagtttccttattgacaatcccaaacagtctacagtttttgatattctcttgggaatttctcaagattttga

SEQ ID NO: 145132 - DNA, 258 bp, Glycine max
agcattgaggagaaagaagaagaaggatgtggcacgaggcgaggaggtcggagaagaaggtccacgacatgatggacgcggctcggaagagagcgcaacgacgcgccgtttacctcgccaagaggcgcggcgatcctcagcaatctattcagctcgtcggctttcgaagccgaacctatcgcgacgacgctctctaccaagccacgcaggatcagcagggcctgataccttggaatgggaaacaagatgtattgattg

SEQ ID NO: 145133 - DNA, 254 bp, Glycine max
cgccagttctgatatttacaccatctgctctcaagactgtgaattatggaatcctgcttgcacaaaagcaatgactatgtcatttaatccaaacccgtgttctgatgcatggagtttggaatttctgaagcgtaccggatttcattgtgatacatttgtgtcactggatggactgccaccccaatgcaggatgttcaggttacaattgattggtttatttcctctcaggaatgtgttcccaggacctattgtgt

SEQ ID NO: 145134 - DNA, 255 bp, Glycine max
tgttgcgattatgctagttttgatggtttgattaccaagcaagttatgagcaagatggcagaaatgataaacagtctttgtggtggtgatgaaaaattgatgcgcgaaaggacacacctgctgttggcttgttgttcaaggatggcaatttgtagaaagatgtttggagagttgaatgtggaatcccgtctggatttccgctcacagttatttgcaatagcatttttaatgagatgctcattagatatagctatg

SEQ ID NO: 145135 - DNA, 255 bp, Glycine max
gtttcttctgcagctatggcgattcaagatcaaaatggatttttcagatcacagggtggtcctccagaaggaggtggtgtatctttgagttctgggcattctgtcacacatattcaacttaatgaccagttttcttgtgggaatgactatgcctgaaggtaaggaagccgtatactatcactaaacagagagagcgatggacagatgaagaacataagaagttccttgaagctttaaagctgtatggacgggctt

SEQ ID NO: 145136 - DNA, 252 bp, Glycine max
gctcattgctccagatgccttatcccatggacagaattcggtggtatttatctcatggaaatacaccgtatccgtcgtcccggaggattttgggttttgtctggtccacctgttaactacgagcacaggtggcgtggatggaacacaaccatgaagaccagagatcagattatgagaagttgcaagaattacttacttcaatgtgctttaaattgtacaataaaaaggatgacattgcagtatggcagaagg

SEQ ID NO: 145137 - DNA, 252 bp, Glycine max
gatgttcttgcaaagcgagctcatgaatttgaaaaacatgttgctcatgaaagcctcaaggatcaaattcctgctgttgacaagttgtattctactaaggttaataagtttgcaaaaattatgaaccttagacaaagtgttgttggtgatctaaacttcttactgatgggaagttgtatgagggtaagcatattcctgtatctaatattagtgcaggggaaaatcatgtagttcaaatacccttaatggcac

SEQ ID NO: 145138 - DNA, 253 bp, Glycine max
cttcactcctctcaataacaggcccatccgtattatgtattcgcatcgtgatcccagtatccgtaaaagtggacaaggaaatatatttattaagaatttggatagggcaattgatcacaaggcattgcatgataccttttctacatttggaatatcctttcgtgcaaggtagctacggattcatctgggcaatcaaaaggctatggctttgttcaatttgataatgaggaatctgcccaaaaagctatagaga

SEQ ID NO: 145139 - DNA, 254 bp, Glycine max
aatcctcttgatagtacagtagtagcatctaaatgtgctccaacctcgaatcgttggtgaagaacattatgagactgcgcaaagagttaaacaaactttacaacgttacaaagaacttcaagacattatagctatccttggcttggacgaatatccgaagaagatcgcttaaccgtagcaagagcacgaaaaattgagcgtttcttatcacaaccttttttcgtagcagaagtttttaccggttcgccggggaa

SEQ ID NO: 145140 - DNA, 157 bp, Glycine max
ggttgccgcaccttaaaaccggaaacaaaagcaatcgttacttgatttcaagaatttctcaatttcttcctacttctttgtgtacgatttcttaatggaaagaaaatcactctctgtgctggtcacagacttcgtgaatcattttcttttcacacaa

SEQ ID NO: 145141 - DNA, 256 bp, Glycine max
tctagattggaaaaagtttcctctacaaaagcacaatttgttagtggaaaaaccttcaaatatgatataattggtgctggttcacattcttcaggagattttcctgaaaaggaagatcaagaaaaacccaaaaagattgataccagattgaacaaagaatagatcctcaatacaatgaggttcaggctcagatggaaacaaatttgtttaaattgtctcttgatgatgttgaaactcctaaaggttctatgttgga

SEQ ID NO: 145142 - DNA, 255 bp, Glycine max
atccttttgtgttaaataggtggatgggaaaactgactttccctcagggcacttcccgaagtgttaagagaatgcctctttctatagggggaggagctggtgcaaagaatgctattctcatgaatatgccaaatgctgttctttcaatgtgagatattttgttggagatctcgtctttgaagtttctaagatgacttctccctacattaaatgtacagtctctttcttcatagcatttggaaatttggctgatga

SEQ ID NO: 145143 - DNA, 250 bp, Glycine max
gtttcactttctttgcatagggcaacctcctttctctgtgactctgagtatcgtatcgttttattattatttctaattctctcttatcaggtccattgaatatgtctccgtcgttggatcttcctcccaagggtggcttcagttttgactatgccgaagaaacgcaatgcttcaaaacaagggcctcaaagccccaacctttctcaaaactggcaccactattgtcggtttagttttccaggatggtgtc

SEQ ID NO: 145144 - DNA, 251 bp, Glycine max
gtgctggttcacattcttcaggagattttcctgaaaaggaagatcaagaaaaacccaaaaagattgataccagattgagacaaagaatagatcctcaatacaatgaggttcaggctcagatggaaacaaatttgtttaaattgtctcttatgatgttgaaactcctaaaggttctatgttggatcttatgatttctcaatctaaaattgcacttcccaagaacacagttggaggaaccattctgcgtagtg

SEQ ID NO: 145145 - DNA, 253 bp, Glycine max
gttttctttcgcttgttcgtttgtttaattcaataaaggaaattaggcatgaccctcttgttgagtatgctctgcctatctgaaaatttccacacctcttttaattgtcgtaatgatgtgtgaagtgtgtgttattttaaaaaaaaaaaaaaaaaaaaaaaaaaaaaaaaaaaaaaagggggcccccccaataaagaaccccaccccccgggaaattattccggaccgggacccagagggggaacaagtttcc

SEQ ID NO: 145146 - DNA, 250 bp, Glycine max
gcaggaccgtgagaaacctcacagacatctttttcgctttcctcatatgggaatgtggactaaactcagaccaggaatctggaacttcttggagaaggctagtaagctctatgagttgcatctttacactatgggaaacaagctatatggacagaaatggcaaaggtgcttgatccaaagggagttttgtttgctggaagagttatctctagaggtgatgatactgattcagttgatggtgaggagaggg

SEQ ID NO: 145147 - DNA, 250 bp, Glycine max
atggaatggactggtttggccaataggttactgagtaagggcaacgatattctgtgttgcgattatgctagttttgatggtttgattaccaagcaagttatgagcaagatggcagaaatgataaacagtctttgtggtggtgatgaaaattgatgcgtgaaaggacacacctgctgttggcttgttgttcaaggatggcaatttgtaagaaagatgtttggagagttgaatgtggaatcccttctggatt

SEQ ID NO: 145148 - DNA, 252 bp, Glycine max
agcgaagagaatggctcccaagggtttaatctttttggctgtgttatgcttctcagcactgtcactgagtcgttgtcttgcggaggataatggacttgttatgaacttctacaaggaatcatgccctcaggctgaagacatcatcaaaaacaagtcaagcttctctacaagcgccacaagaacactgctttctcctggctcagaaacatcttccatgactgtgctgttcagagttgtgatgcttcactgttg

SEQ ID NO: 145149 - DNA, 253 bp, Glycine max
ggaaaaccaccaaaaccacaaggtagaaccagtacctgacatagagaagaaccataaccaccgccaccagcagcaacaacaccgtaacgtcgcgtggggcacctgggaggagctgttgctagcgtgcgccgtgaaccgccatggcgtcaggactgggacgccgtcgccatggaggtccagtcgcgcaccacgcgcctcctcgccaccgcgcgccactgcgagcagaaatttcatgatctcagccgccgattcg

SEQ ID NO: 145150 - DNA, 250 bp, Glycine max
ggagtttctcaaagtggttttcactctgtttcaagacctggattttactttcttagagatgaatcctttcacattggttgatggaaagccttatcctttggatatgagaggcgagctagatgacactgctgctttcaagaacttcaagaatggggacattgaatttccactgccatttggaagggttatgagtgccaccgagtctttcattcatggattagatgaaaagacaagtgcatccttaaaattc

SEQ ID NO: 145151 - DNA, 253 bp, Glycine max
gccaagggcggtgctgaaacaaccaagttcaacatggccttgatcttgttgcctgtctgcagaaacaccattacttggctcaggagcaggaccaaactaggagccatcattccctttgacgacaacatcaactttcacaaggtggtagctttggcattgcaattggggttggattgcatgcgatttcacatctgacgtgtgacttcccaaggttgttacatgcgacggacgaagaatacgagcccatgaaaca

SEQ ID NO: 145152 - DNA, 248 bp, Glycine max
gttttctttcgcttgttcgtttgtgtaattcaataaaggaaattaggcatgaccctcttgttgagtatgctctgcctatctgacaatttccacacctcttgcaattgtcgtaatgatgtgtgaagtgtgtgttatgttagcagagcgtgatcattatcgcagagttgactttcctgggggggtccgcccgtggttcaggcacctctgcctatcaggtggccggagcttctaacgaagatgggagaact

SEQ ID NO: 145153 - DNA, 248 bp, Glycine max
gtggtagtggacgtggtggtttacccaccactgcttggattagttctgcagttaacaatcgctcctcagacatcaacaaaaggattcgcacagcacttgggaaaggtaagaaaattgtttttcttactagagttgatccttttccatagctttattggctgttctttttggcgttaagaatgaaattctgagttctaacgccactaaccctatgctgacgcgacttcttgagaactgtaagagtctca

SEQ ID NO: 145154 - DNA, 244 bp, Glycine max
gttaaataggatagatgagaaaactgactttccctcagggcacttcccgaagtgttaagagaatgcctctttctatagggggaggagctggtgcaaagaatgctattctcatgaatatgccaaatgctgttctttcaatgtggagatttttgttggagatctcgtctttgaagtttctaagatgacttctccctacattaaatgtacagtctctttcttcatagcatttggaaatttggctgat

SEQ ID NO: 145155 - DNA, 250 bp, Glycine max
aagctttcttgttttgctattgcttgctccgcaatcataatttcatcatcgaatcaaatcaattttgacggttcattataatggcggaagagataaccaagaacgacgtcggagtaacctccaaaaccaccagaagcagctccaggtctggcctcgttggattcccacttccaccgatcacatcatcgatgccgagaagcgccttctttccgtcgtcaagactggttatgttcaagagcatgttaacatt

SEQ ID NO: 145156 - DNA, 247 bp, Glycine max
cattgtttgtcatcctatggattacccatatgttgtgtttatgtgtcatgagatatcaaatactactgcgcattttatgcctttggagggagaagatggaaccagagttaaagctgcagctgtatgccacaaagacacatcagaatggatccaaaccatgtgtttttacaaatgcttaaaaccaagcctggagctgctccagtgtgtcacatcttccctgagggccaccttctctggtttgccaaat

SEQ ID NO: 145157 - DNA, 250 bp, Glycine max
tatggaaagaattcctcttgccacatctgagggttttcctcatgtgctttcacgcaaaaatggcgagaaaggcaaaaggagatttgtctctggggatggtgaagagatgacattgattccaggaaccagtgttgaagaggcttacaaaagctaatagttgaacttgagaaaagtgttcctacattggttggcattgaatgtcccaaggatgagaaacttcctcgtcgcaaaatttttgacaaacctaaga

SEQ ID NO: 145158 - DNA, 252 bp, Glycine max
ctttcacgcaaaaatggcgaaaaaggcaaaaggagatttgtctctggggatggtgaagagatgacattgattccaggaaccagtgttgaagaggcttacaacaagctaatagttgaacttgagaaaagtgttcctacattggttggcttgaatgtcccaaggatgagaaacttcctcgtcgcaaaatttttgacaaacctaagacgcgctgcttcactattctccctatggagtttaatcttgtggtccgtc

SEQ ID NO: 145159 - DNA, 248 bp, Glycine max
gtttcacttgaggtaattgctatgagaacacctggttttagtggagcagatctggcaaacctgctgaacgaagctgctatattagctggtcgtcgtggaaagacagcaatttcttccaaagagattgatgattccattgataggatgtggctggaatggaaggaaccgtaatgacagatggaaagagcaaaagcttagtggcatatcatgaagttgggcatgctatttgcggaactttgactcctggt

SEQ ID NO: 145160 - DNA, 245 bp, Glycine max
gagctagtagagaagatggaagcgctgcgcaacacaatcggggaggtcaatggccaattcaaggacgccgacctgacgaccttcgtctgtgtatgcataccggagttcttgtctctctacgagacggagcgcatgattcaggactaaacagctacgaaatcgacacccatgcaattgtggtgaaccagctgctgttccccaagaaagataacccgtgcgagcaatgtaacgcgcgccgcaagatg

SEQ ID NO: 145161 - DNA, 242 bp, Glycine max
gtttggagagattcaggaaaaagttgtgttgaaattttcacaagaggaatttcttacagcttggtcaactcaggtgcgtcccgcaacgactctgttggctgatgggtgcccatatttgtatgctatggtgcatgatagttcatgtctacaataccaggtgattttgtcattggtgttaagttgacaaccataaacaatatgtgtgcatatgggctcaatcctggtatttcaggttctcgtct

SEQ ID NO: 145162 - DNA, 245 bp, Glycine max
aaaacttctttgatccagccacaaagaaatggtccagcaagaacactggttctgctacctgcaagcgtgggtttgttcagttctgttacgagcccatcaagcagattattaacacttgtatgaatgatcagaaggataagctgggcctatgctgcaaaagcttggggtcaccatgaaatctgaggagaaggacctaatgggcaaagcattgatgaagcgtgtcatgcaaacctggcttccagcaa

SEQ ID NO: 145163 - DNA, 246 bp, Glycine max
ctttttgactcctggaatcatataccagtgcgacctgggaacacaaactcctgacatgaagatatttcgtgagattgacatccctgggtttgatcgctctgagtttcatgtcaatcaggtttttgtgccttctaaagacggtacaagattccaatgttcattgttgccagaaaggatattgttttggatggttcacacccttgtctgttatatggatatggcggctttaacgtcagtcttacacca

SEQ ID NO: 145164 - DNA, 244 bp, Glycine max
gtgattgggcctcattggtacaagtgtttttaacaaacagcaacagtacagagcattttgatgcatgcaagtggacaaaatcggaaccacattcctgggaattgatcttcccaatagaggtatgtggtcctaacaattgttttgaatgtggagttctgagtgggcaaatcaaacttcatggcatttgagtttccttattgacaatcccaaacagtctacagtttttgatattctcttgggaatt

SEQ ID NO: 145165 - DNA, 246 bp, Glycine max
tctccctacattaaatgtacagtctctttcttcatagcatttggaaatttggctgatgacaccatcaattttgaggcttttccccacaagctggtgcactttggagagattcaggaaaaagttgtgttgaaattttcacaagagaatttcttacagcttggtcaactcaggtgcgtcccgcaacgactctgttggctgatgggtgcccatatttgtatgctatggtgcatgatagttcagtgtcta

SEQ ID NO: 145166 - DNA, 247 bp, Glycine max
cacattttagcaggcagctcttacatcaaagctgctaagaagttgcatgagattgatcctttgcaaaagcctaaacaagatcgctatgcacttaggacttcaccacaatggcttggtcctcaaattgaagtgattagattctctccaagtcaattgagctggagataaactcagtcaatgacaaccctttgattgatgtctcaaggaacaaggcccttcatggtggtaacttccaaggaacacctat

SEQ ID NO: 145167 - DNA, 247 bp, Glycine max
tttacgacggcagatacaaattctggactaaacacgagaaaaatcttgctttgacagaagaggaaaagatggaagtgattagaaatagaggcattcctgctgatgttcttgcaaagcgagctcatgaatttgaaaaacatgttctcatgaaagcctcaaggatcaaattcctgctgttgactagttgtattctactaaggttaataagtttgcaaaaattatgaaccttagacaaagtgttgttggt

SEQ ID NO: 145168 - DNA, 247 bp, Glycine max
  unsure (1)..(247): unsure at all n locations
cgcgttgtgcatggtattgatgtctttgatccaaaattcaacattgtctcccctggagctgatcaaaccatttacttcccccacactgaaaccagccgtaggttgacatccttccaccctgaaatcgaagaactcctttacantcagtggagaatgaagaacacatatgtgtgctgaaggaccgcagcaagccaattatcttcaccatggcaaggttggatcgagtgaagaacatcacaggacttgt

SEQ ID NO: 145169 - DNA, 240 bp, Glycine max
aggaaattaaagacactactaaagaaggatatagttttgaagagctatgcatcaagaaagaagccattgagggagaagagaagttttgtgcaaaatccttgggaacagtaattggttttgccatttcaaagctgggaaagacattcaagtactttcaagttcctttgtcaataagcaagaccaatacactgtggaaggagtgcagaatcttggagacaaagcagtgatgtgtcataggct

SEQ ID NO: 145170 - DNA, 148 bp, Glycine max
  unsure (1)..(148): unsure at all n locations
attggatgtggatcgtcacgattcagttgacccagttagagaagttttcgaggaaaaagcaagaattcgaagaataattgaagccgaaggaattccatacacttacctatgttgnatcatgcgctttactggtctactatgcttacgt

SEQ ID NO: 145171 - DNA, 245 bp, Glycine max
ctcgagccgctcgagccgcgttggtgcaaagcatccttcgtttcaatttctctctctcagcgccttctgcacatcgaacctttcatctccaaagggatccacaggccgaaggagaaatggggctgacattcacaaagcttttagtcggcttttcgcgaagaaggaaatgcgaattctgatggttggtcttgatgctgctggtaagaccactatcctgtacaagctcaagctcggagagatcgtta

SEQ ID NO: 145172 - DNA, 241 bp, Glycine max
gtttgctgtgaaatggactgaggaatggcaacagtgagaacaccattgaattttgattctagcaagcagagcttttgtcaattttctattgaccttctcggtggaggaattttagtggacaaaactggagattggatcaacttatacaaaattctccaattagtaacttgttgagagttgctgcttggaagaaaggttgtttaatggtcaagattgtgatgtctgggaatgcagcagtcaa

SEQ ID NO: 145173 - DNA, 242 bp, Glycine max
tcttagtggattggatcattgtcatagtcgtggtgtcctccaccgcgacataaagggctcaaatcttctcattgacaataatggcatcttaaagattgcagattttggtctggcaaattttattgacccccatcacaaggtccattgaccagccgtgtagtaactctgtggtatagaccaccagaactcttacttggagcatctaattacggagttgctgtggatttgtggagcactggttg

SEQ ID NO: 145174 - DNA, 243 bp, Glycine max
gttctgagtgggcaaatcaaacttcatggcatttgagtttccttattgacaatcccaaacagtctacagtttttgatattctcttgggaatctctcaagattttgaaattgctggtaatactcttatgccagctttttctgttccacaggctactgccagatcttctgaaaatgcggaatcctctgcatgatctggaattcgtgttttctttcgcttgttcgtttgtttaattcaataaagga

SEQ ID NO: 145175 - DNA, 240 bp, Glycine max
ctccatagggagaatagtgaagcagcgcgtcttaggtttgtcaaaaatttttaaattttgtgaggttcattatgaagaaaagggacaagcttagttgtcaagttggaatcaacccatactccatggaatggactggtttgccaatagattactgagtaagggcaatgatattctgtgttgcgattatgctagttttgatggtttgattaccaagcaagttatgagcaagatggcagaaat

SEQ ID NO: 145176 - DNA, 242 bp, Glycine max
tcacatcatcctcatcatcttcttcaatcagttgactcttcgttcctccctctattctttcggatggagcccatggacatcgttgggaaggccaaggaagacgcttctcttcctaaagcgacaatgacgaaaattattaagagatgttgcccccggacgtgcgtgtcgccagagatgcacaggatttattgatcgagtgttgtgtcgagtttataaaccttgtctcgtcagagtccaatgaa

SEQ ID NO: 145177 - DNA, 246 bp, Glycine max
cgctcgagccgaatcggctcgagcacactacttactctctttctctacctgacggtttccgcacgttctctttcaagttccacgaaatgtcaattataacacgcagaggcatccgttacatgccaagactagatgcagcaaaatatctgctgctttgctagaaaaaggccaaaatcgtgtcatagatgcttcacttacacttattcgagaaagagcaaagcttaagggagaacttgtgcgtgcttt

SEQ ID NO: 145178 - DNA, 244 bp, Glycine max
gtttactttgacttcttccctgtggaggttgatagtcaagaggggttgctcacattggtgaattgaaatctggtgtctatgttccactgcctacaaaaactaatttgatggaaactcccaaggaatggcaactggatctacttgtgacaaaattcctagtgtcttgactacaactgatgagagattggtaggcacagaacatgagggatatgatccttttcttggtggaattcaaaaatatgcc

SEQ ID NO: 145179 - DNA, 242 bp, Glycine max
atgctatggtgcatgatagttcagtgtctacaataccaggtgattttgtcattggtgttaagttgacaaccataaacaatatgtgtgcatatgggctcaatcctggtatttcaggttctcgtcttttgggcaccattcctcagtccatttcacagcaaactgtttggaatcaaatggcaacagtgagaacaccattgaattttgattctagcaagcagagcttttgtcaattttctattgac

SEQ ID NO: 145180 - DNA, 242 bp, Glycine max
aagagatgctgcagctagattacctggaagtattggcactagagcagatgtttgtactttaattcgagattctcaatatattgttgaagatgtttctgatgcacaaattaaccaagtagttagtggagccttggatagattgcattatgaacgtgatccttgtgtacaatttgatggggaaaggaaactgtgggtttacttgcatagagaaagagaagaagaagattttgaggatgatggca

SEQ ID NO: 145181 - DNA, 242 bp, Glycine max
gaggcttttccccacaagctggtgcagtttggagagattcaggaaaaagttgtgttgaaattttcacaagaggaatttcttacagcttggtcaactcaggtgcgtcccgcaacgactctgttggctgatgggtgcccatatttgtatgctatggtgcatgatagttcagtgtctacaataccaggtgattttgtcattggtgttaagttgacaaccataaacaatatgtgtgcatatgggct

SEQ ID NO: 145182 - DNA, 241 bp, Glycine max
ctcttgggaatctctcaagattttgaaattgctggtaatactcttatgccagctttttctgttccacaggctactgccagatcttctgaaaatgcggaatcctctgcatgatctggaattcgtgttttctttcgcttgttcgtttgtttaattcaataaaggaaattaggcatgaccctcttgttgagtatgctctgcctatctgaaaatttcaaaaactctactcatcatcgcgatgatg

SEQ ID NO: 145183 - DNA, 240 bp, Glycine max
cttgatgatgttgaaattcctaaaggttccatgttggatcttaaaatttctcaatctaaaattgcacttcccaagaacacagttggaggaaccattctgcgtagtgatttattggcaaattttttgacagagggcaattttagagcaagtgttgatttgcagcgcactcatcgtattagaggaatgattaatatggtggccacagttggtattcctgagaatacaggtatagcattggcc

SEQ ID NO: 145184 - DNA, 239 bp, Glycine max
accttagcagatattgaattaccaggcatagaaagttcaggaagaggtgattcccttgtggagtccagccatggaaagagaaaaggaatggttcttccttttgagccacattctatcacctttgatgaagtcgtatactcggttgacatgccacaggaaatgaaggagcaatgtgtacaagaggacagattggtgcttttgaagggtgttagtggtgcattcaagcctggtgttctcac

SEQ ID NO: 145185 - DNA, 243 bp, Glycine max
  unsure (1)..(243): unsure at all n locations
ctcctttggaagggcacttcaacagngcacccttaaggcatgnggcggaaaanaaganaatgtgnagaaggctcnggaagcccttttggtaagagccaaggctaactcagangcaactctgggancctacaagggtaactcacagcttgctgatggtgcctcagngagcctccatgtttcgaactacagctactgatcaatcgaagttggtgttgtntgaagagactagtncgagtaggaatc

SEQ ID NO: 145186 - DNA, 245 bp, Glycine max
  unsure (1)..(245): unsure at all n locations
ctcctttggaagggcacttcaacagagcacccttaaggcatgnggcggaaaagaagagaatgtgaagaaggctcaggaagcccttttggtaagagccaaggctaactcagaggcaactctgggaactacaagggtaactcanagcttgctgatggtgcctcagagagctnccatgtttcgaacttacnggtantgntcaatcgaattgggtggtngttnnaganacctattgcgnntaggnatcg

SEQ ID NO: 145187 - DNA, 245 bp, Glycine max
gaaagaggcattctcttaacacttcgggaagtgccctgagggaggagctggtgcaaagaatgctattctcatgaatatgccaaatgctgttctttcaatgtggagatattttgttggagatctcgtctttgaagtttctaagatgacttctccctacattaaatgtacagtctctttcttcatagcatttggaaatttggctgatgacaccatcaattttgaggcttttccccacaagctggtgg

SEQ ID NO: 145188 - DNA, 241 bp, Glycine max
gagattggatcacacttatacaaaattctccaattagtaacttgttgagagttgctgcttggaagaaaggttgtttaatggtcaagattgtgatgtctgggaatgcagcagtcaaaaggagtgattgggcctcattggtacaagtgtttttaacaaacagcaacagtacagagcattttgatgcatgtaagtggacaaaatcagaaccacattcctgggaattaatcttcccaatagaggt

SEQ ID NO: 145189 - DNA, 237 bp, Glycine max
acctaagacgcgctgcttcactattctccctatggagtttaatcttgtggtccgtcaaaagtttttaaattttgtgaggttcattatgaagaaaagggacaagcttagttgtcaagttggaatcaacccatactccatggaatggactggtttggccaatagattactgagtaagggcaatgatattctgtgttgccattatgctagttttgatggtttgattaccaagcaagttat

SEQ ID NO: 145190 - DNA, 238 bp, Glycine max
atcctggcttctatttcttgtaggagtgctattttcagctttcttctcatctgcatctttctttctgtttacaatatcaaagtgtgtgaggcacaagccaagcctcccacagcgaaggggctatcatataacttctacgacaaaagctgtcctaagcttaaatctatcgttagatcagagctcaaaaaggtcttcaacaaggacattgctcaagctgctggcttgcttcgccttcact

SEQ ID NO: 145191 - DNA, 236 bp, Glycine max
aaactggagattggatcacacttatacaaaattctccaattagtaacttgttgagagttgctgcttggaagaaaggttgtttaatggttaagattgtgatgtctgggaatgcagcagtcaaaaggagtgattgggcctcattggtacaagtgtttttaacaaacagcaacagtacagagcattttgatgcatgtaagtggacaaaatcagaaccacattcctgggaattaatcttc

SEQ ID NO: 145192 - DNA, 240 bp, Glycine max
ggaatggactggtttggccaatagattactgagtaagggcaatgatattctgtgttgcgattatgctagttttgatggtttgattaccaagcaagttatgagcaagatggcagaaatgatatacagtctttgtggtggtgatgaaaaattgatgcgtgaaaggacgcacctgctgttggcttgttgttcaaggatggcaatttgtaagaaagatgtttggagagttgaatgtggaatccc

SEQ ID NO: 145193 - DNA, 240 bp, Glycine max
ttttaataaaccgcgatcacaggttgccgcaccttaaaaccggaaacaaaagcaatcgttacttgatttcaagaatttctcaatttcttcctacttctttgtgtacgatttcttaagggagagaaaatcactctctgtgctggtcacagacttcgtgaatcattttcttttccactcctagtttatttcctgaacactctcctatttgatataggacttcgtgtcagatttaaacttttt

SEQ ID NO: 145194 - DNA, 238 bp, Glycine max
cgcgatcacaggttgccgcaccttaaaaccggaaacaaaagcaatcgttacttgatttcaagaatttctcaatttcttcctacttctttgtgtacgatttcttaagggaaataaaatcactctctgtgctggtcacagacttcgtgaatcattttcttttccactcctagtttatttgctgaacactctcctatttgatataggacttcgtgtcagatttaaacttgttctgtttctt

SEQ ID NO: 145195 - DNA, 237 bp, Glycine max
atctttccaaggcttttggcgggatggatagacttgacatgtttttcccatttgatccatgtttgttgaagagaagtgaaagctacataaggccacattttgttcgctggtcaaaagtcagaactacatatgatgacgataacgacaatgatgaagtcagtgatagtggcagtgaattatcagatgatgattttagtgacaggaacgccaaggatatgattgacgatgatatgatgg

SEQ ID NO: 145196 - DNA, 236 bp, Glycine max
  unsure (1)..(236): unsure at all n locations
caagctaacattccataagcgccaccgtgatattgtcaccatgtcttacatnaagcatgttttggatgagggaaaggatattgagatgagaaacagacagttgaagctttacaccaacaatcctagtagtggttggtatggttacaagcaatcaaagtggagccacattgtgtttgagcaccctgccacttttgaaacactcgctatggatcggagaaagaaggaggatatactta

SEQ ID NO: 145197 - DNA, 235 bp, Glycine max
gaaatttttcctttgatattaaatctcgctctagattggaaaaagtttcctctacaaaagcacaatttgttagtggaaaaaccttcaaatatgatataattggtgctggttcacattcgtcaggagattttcctgaaaaggaagatcaagagaaacccataaagattgataccagattgagacagagaatagatcctcaatacaatgaggttcaggctcagatggaaacaaattt

SEQ ID NO: 145198 - DNA, 238 bp, Glycine max
ggagattttcctgaaaaggaagatcaagaaaaacccaaaaagattgataccagattgagacaaagaatagatcctcaatacaatgaggttcaggctcagatggaaacaaatttgtttaaattgtctcttgatgatgttgaaactcctaaaggttctatgttggatcttaaaatttctcaatctaaaattgcacttcccaagaacacagttggaggaaccattctgcgtagtgatctat

SEQ ID NO: 145199 - DNA, 234 bp, Glycine max
gattatgctagttttgatggtttgattaccaagcaagttatgagcaagatggcagaaatgataaacagtctttgtggtggtgatgaaaaattgatgcgtgaaaggacacacctgctgttggcttgttgttcaaggatggcaatttgtaagaaagatgtttggagagttgaatgtggaatcccttctggatttccgctcacagttatttgtaatagcatttttaatgagatgctc

SEQ ID NO: 145200 - DNA, 241 bp, Glycine max
ctcgagccgctcgagccgtttgcaatttagaaagttagcagattgtgattttctcaagaggaactttaagcagatgtctaatgttttatgggtggctcctgaggacaatgcgagtttacggtcacaacttcattatgaggcgtgctataatctggttatgcgagaagcttatctcgtcaatctcgtaaatgtgttacgagaattgtatatgcacagtccagatgtagctcgccaattgagg

SEQ ID NO: 145201 - DNA, 240 bp, Glycine max
aagagaatgcctctttctatagggggaggagctggtgcaaagaatgctattctcatgaatatgccaaatgctgttctttcaatgtggagatattttgttggagatctcgtctttgaagtttctaagatgacttctccctacattaaatgtacagtctctttcttcatagcatttggaaatttggctgatgacaccatcaattttgaggcttttccccacaagctggtgcagtttggagag

SEQ ID NO: 145202 - DNA, 236 bp, Glycine max
aagagaatgcctctttctatagggggaggagctggtgcaaagaatgctattctcatgaatatgccaaatgctgttctttcaatgtggagatattttgttggagatctcgtctttgaagtttctaagatgacttctccctacattaaatgtacagtctctttcttcatagcatttggaaatttggctgatgacaccatcaattttgaggcttttccccacaagctggtgcagtttgg

SEQ ID NO: 145203 - DNA, 240 bp, Glycine max
ccttcatccaggcaaaacaatgaaagtacaattcaccaagcgtccctatgcacaaccttatggtgtatatacatggttaacggatattaaagacacctctaaagaaggatatagttttgaagagatatgcatcaagaaagaagcgtttgagggagaagagaagttttgtgcaaaatccttgggaacagtaattggttttgccatttcaaagctgggaaagaacattcaagtactttcaag

SEQ ID NO: 145204 - DNA, 235 bp, Glycine max
ggtttgcaaaaagacagagggttaattgtggagtattttggaaggatgtcttacgttgctcataacgttaatcagccccaagagaaagatttgttagagggaaatttttcctttgatattaaatctcgctctagattggaaaaagtttcctctacaaaagcacaatttgttagtggaaaaaccttcaaatatgatataattggtgctggttcacattcttcaggagattttcctg

SEQ ID NO: 145205 - DNA, 234 bp, Glycine max
agatggcagaaatgataaacagtctttgtggtggtgatgaaaaattgatgcgtgaaaggacacacctgctgttggcttgttgttcaaggatggcaatttgtaagaaagatgtttggagagttgaatgtggaatcccttctggatttccgctcacagttatttgtaatagcattttgaatgagatgctcattagatatagctatgaaaaattactgcgccaggctaaagctccaa

SEQ ID NO: 145206 - DNA, 234 bp, Glycine max
ttttcccagtccaagcagcctccaattcgtgccactctcttcaaaatggccgttaccttctcaaatctccacacagaatcaggtctcaagtccctcgacgacttcctctctgggaaggtctacgtttctggggatcagttcacaaaggacgacatcaaagtgtatggtgctgttttggagaagccaggtgactcttttcccaatgctgccaagtggtacgaggttgtctcatct

SEQ ID NO: 145207 - DNA, 239 bp, Glycine max
attttaataaaccgcgatcacaggttgccgcaccttaaaacctgaaacaaaagcaatcgttacttgatttcaagaatttctcaatttcttcctacttctttgtgtacgatttcttaaggaaaagaaaatcactctctgtgctggtcacagacttcgtgaatcattttcttttccactcctagtttattttctgaacactctcctatttgatataggacttcgtgtcagatttaaacttt

SEQ ID NO: 145208 - DNA, 188 bp, Glycine max
cggggatcgtgctgcagttcgcggggattgatgatgttttcacctcctccagaggatccaccaagaccctcggcaacttcgttaaggctacttttgattgcttgatgaaaacctatggattcctgacaccagaattctggaaggagactcgcttctccaaatctccattccaggagtacacagatcta

SEQ ID NO: 145209 - DNA, 238 bp, Glycine max
ggtgttgttactgctgctcttttctcttttcttttctctttagttctctcttcccctttctttttctttttcttcttcttctgagcttgtttaagcttttcttccattaacatattatcataatgtgtggtattcttgctgttcttggttgttctgatgactctcgagccaaaagggtccgcgtgcttgagctctctcggagattgaagcaccgtggccctgactggagtgggctcca

SEQ ID NO: 145210 - DNA, 234 bp, Glycine max
attggatgtggatcgtcacgattcacttgacccagttagagaagttttcgaggaaaaagcaagaattcggataataattgaagccgaagaattccatacacttacctatgttgtcaacctttactggttacttcttacgtaacctggcacagattgacatcactgttcctccgagggacaaggtattcattctaggagatggaaatgtgaaaggagcgtttgtgactgaggctg

SEQ ID NO: 145211 - DNA, 235 bp, Glycine max
ctcaaagtgctgaagtttactttgacttcttccctgtggaggttgatagtcaagagggagttgctcacattggtgaattgaaatctggtgtctatgttccactgcctacaaaaactaatttgatggatactcccaaggaatggcaactggatctaccttgtgacaaaattcctagtgtcttgaccacaactgatgagagattggtaggcacagaacatgagggatatgatccttt

SEQ ID NO: 145212 - DNA, 235 bp, Glycine max
cttttcttggtggaattcaaaaatatgccactcccatgatgcccatagatgaagaaattctttctaaggttgcacaagatatggttgaggaatggtttgattgtgttgatgaggaggttcctttgaggaagtttctttaagtgcagcacttaatggtgttgagggtttggactatatggaaagaattcctcttgccacatctgagggttttcctcatgtgctttcacgcaaaaat

SEQ ID NO: 145213 - DNA, 189 bp, Glycine max
tgaaattgtaataaaccgcgatcacaggttgccgcaccttaaaaccggaaacaaaagcaatctttacttgatttcaagaatttctcaatttcttcctacttctttgtgtacgatttcttaatggatagaaaatcactctttgtgctggtcacagacttcgtgaatcattttcttttccacacaacatac

SEQ ID NO: 145214 - DNA, 231 bp, Glycine max
cacaagctggtgcagtttggagagattcaggaaaaagttgtgttgaaattttcacaagaggaatttcttacagcttggtcaactcaggtgcgtcccgcaacgactctgttggctgatgggtgcccatatttgtatgctatggtgcatgatagttcagtgtctacaataccaggtgattttgtcattggtgttaagttgacaaccataaacaatatgtgtgcatatgggctc

SEQ ID NO: 145215 - DNA, 236 bp, Glycine max
taccaatccattcctgagatgtgttgatattaagctggtttcagagctttgccacaagaaggggactttgctctgtattgatggtacatttgcaactccattgaaccagaaggcccttgcccttggcgctgatctgattctgcactccttaacaaaatacatgggtggacatcatgatgtccttggtggttgcataagtggttcaattaaggtggtttcgcaaattcggactttgc

SEQ ID NO: 145216 - DNA, 239 bp, Glycine max
caaggatcaaattcctgctgttgacaagttgtattctactaaggttaataagtttgcaaaaattatgaaccttagacaaagtgttgttggtgatcttaaacttcttactgatgggaagttgtatgagggtaagcatattcctgtatctaatattagtgcaggggaaaatcatgtagttcaaatacccttaatggcacaggaggaaattctgtcttctagtgcaagtgatttcagaactg

SEQ ID NO: 145217 - DNA, 234 bp, Glycine max
gcagacaataagttcgaacaagttcaggactggcatggacttctttcaccgcgcgaaggcggtgcgcctccgcagccaccacgacaagtacctcctcgcggatgacgacgaggattcggtgacgcaggaccgcaaaggctcctcgaaaagcgcgcggtggacggtagaatacgtggctgaatacgataacataattcgcctgaagagctgttacggcaagtacctcaccgcctc

SEQ ID NO: 145218 - DNA, 188 bp, Glycine max
ctgccagatcttctgaaaatgcggaatcctctgcatgatctggaattcgtgttttctttcgcttgttcgtttgtttaattcaataaaggaaattaggcatgaccctcttgttgagtatgctctgcctatctgaaaatttccacacctcttttaattgtcgtaatgatgtgtgaagtgtgtgttatttt

SEQ ID NO: 145219 - DNA, 235 bp, Glycine max
ctggtttgcaaaaagacagagggttaattgtggagtattttggaaggatgtcttacgttgctcataacgttaatcagccccaagagaaagatttgttagagggaaatttttcctttgatattaaatctcgctctagattggaaaaagtttcctctacaaaagcacaatttgttagtggaaaaaccttcaaatatgatataattggtgctggttcacattcttcaggagattttcc

SEQ ID NO: 145220 - DNA, 236 bp, Glycine max
cttctctctctcaatctctttcatgtgagggtagaaccacaacaaaacacaaaccacacactctcctaactcgaggttatttttttctttccccaaagaggcatgagttgcaacgggtgccgcgtccttcgaaagggttgcagcgagtcttgtattctgcggccgtgtctacagtggatcgatacgcccgaagcacaaggccatgccactgtcttcgttgccaaattcttcggtcg

SEQ ID NO: 145221 - DNA, 233 bp, Glycine max
tccgccctcccggaacacctccacgacggtctcctccacaccgcctgcggcacgccggccttcaccgcgccagagatcctccgccgcgtcggctacgacggctcaaaagccgacgctggtcctgcggcgtcatcctctacaacctcctcgccggccacctccccttcgacgactccaacatccccgccatgtgccggcgcatctcccgccgcgactaccagttcccggcatgg

SEQ ID NO: 145222 - DNA, 229 bp, Glycine max
gacaagcttagttgtcaagttggaatcaacccatactccatggaatggactggtttggccaatagattactgagtaagggcaatgatattctgtgttgcgattatgctagttttgatggtttgattaccaagcaagttatgagcaagatggcagaaatgataaacagtctttgtggtggtgatgaaaaattgatgcgtgaaaggacgcacctgctgttggcttgttgtt

SEQ ID NO: 145223 - DNA, 228 bp, Glycine max
aaataggtggatggggaaactgactttcccccagggcacttcccgaagtgttaaaaggatgcctctttctatagggggaggagctggtgcaaagaatgctattctcatgaatatgccaaatgctgttctttcaatgtggagatattttgttggagatctcgtctttgaagtttctaagatgacttctccctacattaaatgtacagtctctttcttcatagcatttgg

SEQ ID NO: 145224 - DNA, 231 bp, Glycine max
cttccaaattctctgctgttggcttagacacaaccgatcttgttgcattatctggtgcacacacttttggtcgtgcccaatgccaatttttctcccaaaggttattcaacttcagtggcacaggaagccctgatccaaccttgaactcaacctatttggccactcttcagcaaaattgtccccaaagtgggagtggatctacattgaacaaccttgacccttctacccctg

SEQ ID NO: 145225 - DNA, 237 bp, Glycine max
ggggaatccatgccctcgagcatactacagatgcactatggcagttggttgcccagttcgcaaacaagttcaacactgtgctgatgatagaaccattttggttacaacatatgaaggcacgcataaccatccactgccacctgctgctatggccatggcatcaaccactacagctgctgctagcatgttgctttctggatcaatgtccagtgcagatgggataatgaacccaaattt

SEQ ID NO: 145226 - DNA, 223 bp, Glycine max
gcaatattttgtgcatgttgatgacagcgttcctcaaaaggtcgttgttcacaaagatggtgcaagaggggtacattttaggcgtgccgggcctcgtcaaaaggtgtactttgaagctgatgaagttcaagctgccattgttacttgtgggggtctgtgtcctgggctcaacactgtcattagggaattagtgtgtggcttacaccatatgtatggggtgaag

SEQ ID NO: 145227 - DNA, 253 bp, Glycine max
attctcttgggaatctctcaagattttgaaattgctggtaatactcttatgccagctttttctgttccacaggctactgccagatcttctgaaaatgcggaatcctctgcatgatctggaattcgtgttttctttcgcttgttcgtttctttaattcaataaaggaaattaggcagagcatactcaacaagaggttcatgcctaatttcctttattgaattaaacaaacgaacaagcgaaagaaaattaggct

SEQ ID NO: 145228 - DNA, 253 bp, Glycine max
ctggactgggcgtgtaaagagtttcgaaggtaaaggtaaaatcggtgatggtttgatgcctattctgcataaatctgcaccacaggtagcattattctctgctcgagggccaaatataaaggacttcagcttccaagaggcagatcttctcaaaccagatatattagctcctggttcattgatttgggctgcttggtgtccaaatggaactgatgagccaaattatgttggtgaagcgtttgccatgatatct

SEQ ID NO: 145229 - DNA, 251 bp, Glycine max
ctagcacacaaaacttgctatagcagtaagctataactcatttgaggctctgtgagaattgagaaatggctaaagatgttgaggttcaagagcaaggaggagagtactctgccaaagactaccatgaccctcctccagcacctttgttcgacccaaagagctcacacagtggtccttctatagagccctcatcgcggagttcatagcaaccttctcttcctttatgtcactgtgctcaccattattggcta

SEQ ID NO: 145230 - DNA, 252 bp, Glycine max
ggagctcattatctggccactggtgagctcgtgagccttagcgagcaacagcttgtggattgcgatcacgtgtgtgatccagaagaatatggagcgtgtgactcaggctgtaatggtgggttgatgaacaacgcatttgagtacatacttcagtctgggggagtacagaaagaaaaggactatccatacaccgggagagatggcacctgcaaatttgacaaaaccaaagttgcggctactgtatctaattac

SEQ ID NO: 145231 - DNA, 239 bp, Glycine max
gtgcaattgttgttacaggttttgatatgccgaaatgaggctgaaaaatgcttaatagaaacatctatcaattcattgcggataagtctcaaggtgaagcaggctgatgaacttgaaaacatattgaccaaaaaatttctaagatttctctcaatgagagccgaggctttccaagtactgaggagaaagcctgttcagggatatgacattagcttccttataacaaattaccactgtga

SEQ ID NO: 145232 - DNA, 251 bp, Glycine max
  unsure (1)..(251): unsure at all n locations
gagaaacacaaacactgaaacactcaagtgagttcgatagtatatttgtttttctttttcacaaagatggtgagaaccccgtccttgtgacaaaagtggaatgaggaaaggtacttggactccagaggaagatatgaagttaattgcttatgtcactaggtatggctgctggaattggcgccaactccccaagtttgcaggtctngcaagatgtgggaaaagttgtagattgagatggatgaattatctaa

SEQ ID NO: 145233 - DNA, 250 bp, Glycine max
gctattaatgctggcattatcaatcttgttgataagttttttgagatgcccagacatgacgctatgaaagcccttgatgcctataaacgtgcgggtcagcaggcagcaagtctatctgatttctatgatgtttgccaaggattggaacttgctaggacttttcagtttcctgtcttaagagagcctccacaatcttgacttacaaccatggacgagtacattcaggcggcgccacgagtggttacagttc

SEQ ID NO: 145234 - DNA, 249 bp, Glycine max
tcttgtctcactgctgaaattaaatataagcggaagttgagtaatattcatatttccggcttattttacgacggcagatacaaattctggactaaacacgagacaaatcttgctttgacagaagaggaaaagatggaagtgattagaaatagaggcattcctgctgatgttcttgcaaagcgagctcatgaatttgaaaaacatgttgctcatgaaagcctcaaggatcaaattcctgctgttgacaag

SEQ ID NO: 145235 - DNA, 253 bp, Glycine max
gcacaggaggaaattctgtcttctagtgcaagtgatttcagaactgcaatggtgagtaaaaatagcaaacctcaagctactgcaatgcatgtgggagctatagaaattatcattgatagtttcgcaagtcctgattgcaacatagttggtgcaatgcttttggttgatacttatcataccaatcctgaaaatgcagttcgtagtatttttgttgcgcctttcagaggcggaaggcccattcgggtggttacat

SEQ ID NO: 145236 - DNA, 251 bp, Glycine max
gtttttcttctctctctcaatctctttcatgtgagggtagaaccacaacaaaacacaaaccacacactctcctaactcgaggttatttttttctttccccaaagaggcatgagttgcaacgggtgccgcgtccttcgaaagggttgcagcgagtcttgtattctgcggccgtgtctacagtggatcgatacgcccgaagcacaaggccatgccactgtcttcgttgccaaattcttcggtcgtgccgacct

SEQ ID NO: 145237 - DNA, 252 bp, Glycine max
gcatttggaaatttggctgatgacaccatcaattttgaggcttttccccacaagctggtgcagtttggagagattcaggaaaaagttgtgttgaaattttcacaagaggaatttcttacagcttggtcaactcaggtgcgtcccgcaacgactctgttggctgatgggtgcccatatttgtatgctatggtgcatgatagttcagtgtctacaataccaggtgattttgtcattggtgttaagttgacaacc

SEQ ID NO: 145238 - DNA, 254 bp, Glycine max
gtggaaaaaccttcaaatatgatataattggtgctggttcacattcttcaggagattttcctgaaaaggaagatcaagaaaaacccaaaaagattgataccagattgagacaaagaatagatcctcaatacaatgaggttcaggctcagatggaaacaaatttgtttaaattgtctcttgatgatgttgaaactcctaaaggttctatgttggatcttaaaatttctcaatctaaaattgcacttcccaagaac

SEQ ID NO: 145239 - DNA, 252 bp, Glycine max
taatatcaccattactgatggtattgacaaaactagtgcaactttgcaatttagaaagttagcagattgtgattttctcaagagaaactttaagcagatgtctaatgttttatgggtggctcctgaggacaaggcgagtttatggtcacaacttcattatgtttcgtgcaataatctggaaatgcaagaagcttatcttgtcaatctcgtaaatgtgttacgagaattgtatttgcacagtccagaggaagc

SEQ ID NO: 145240 - DNA, 250 bp, Glycine max
tgctcgagccgaatcggctcgacagtctttcttggaactttgttactctcacacatgtctcgctccgtgcctttggtttcaaccatttttgtcttgcttctgcttctggtggccactgagatgatggggccaacaatggtggcagaagcaagaacttgtgagtctcagagccaccgtttcaaggggccatgtttgagtgacaccaactgtggctctgtttgccgaaccgaacgtttcactggaggacact

SEQ ID NO: 145241 - DNA, 249 bp, Glycine max
gacttacaggatagagacaattaccttcagaagctgtcgttgtaaatgttacatgtggtagtggacgtggtggtttacccaccactgcttggattagttctgcagttaacaatcgctcctcagacatcaacaaaaggattcgcacagcacttgggaaaggtaagaaaattgtttttcttactagagttgatccttttccagtagctttattggctgttcgtgttggcgttaagaatgaaattctgagtt

SEQ ID NO: 145242 - DNA, 250 bp, Glycine max
tgtcaagcttcatgctgaggaagggagtgatgaagtttattgccaggtggtgctggttcccgaaagtgagcaagtgcagcagaagttgcgggagggggaatttgatgctgatggtgaagaggaagatgctgaagctgtgatgaagtcgacgacgccccacatgttctgcaagactttgactgcttctgataccagcactcatggtggattctctgtgcctcgtcgcgccgcggaagattgcttccctccc

SEQ ID NO: 145243 - DNA, 265 bp, Glycine max
gatacatcggttttaccggcatgtctcgggccatctctcaatcaatgtgtttatcctgcagctgatgcatttacacctggcccgccgctcgaactcccacctattattatttataattagatctcggaagtactgcaaacagaagaataattgggtttgctcgatcagcctatctaataatcctttggcctagtgaagggactaaagtctttatctctcttgaaacgttccagtgatatgtcaattatacatgattgccttgcaa

SEQ ID NO: 145244 - DNA, 247 bp, Glycine max
accataaacaatatgtgtgcatatgggctcaatcctggtatttcaggttctcgtcttttgggcaccattcctcagtccatttcacagcagactgtttggaatgaaatggcaacagtgagaacaccattgaattttgattctagcaagcagagcttttgtcaattgtctattgaccttctcggtggaggaattttagtggacacaactggagattggatcacacttatacaaaattctccaattagta

SEQ ID NO: 145245 - DNA, 249 bp, Glycine max
agttggaatcaacccatactccatggaatggactggtttggccaatagattactgagtaagggcaatgatattctgtgttgcgattatgctagttttgatggtttgattaccaagcaagttatgagcaagatggcagaaatgataaacagtctttgtggtggtgatgaaaaattgatgcgtgaaaggacgcacctgctgttggcttgttgttcaaggatggcaatttgtaagaaagatgtttggagagt

SEQ ID NO: 145246 - DNA, 250 bp, Glycine max
gtgcatatgggctcaatcctggtatttcaggttctcgtcttttgggcaccattcctcagtccatttcacagcaaactgtttggaatcaaatggcaacagtgagaacaccattgaattttgattctagcaagcagagcttttgtcaattttctattgaccttctcggtggaggaattttagtggacaaaactggagattggatcacacttatacaaaattctccaattagtaacttgttgagagttgctgc

SEQ ID NO: 145247 - DNA, 250 bp, Glycine max
gggggaggagctggtgcaaagaatgctattctcatgaatatgccaaatgctgttctttcaatgtggagatattttgttggagatctcgtctttgaagtttctaagatgacttctccctacattaaatgtacagtctctttcttcatagcatttggaaatttggctgatgacaccatcaattttgaggcttttccccaaagctggtgcagtttggagagattcaggaaaaagttgtgttgaaattttcaca

SEQ ID NO: 145248 - DNA, 249 bp, Glycine max
gagatagaggcattcctgctgatgttcttgcaaagcgagctcatgaatttgaaaaacatgttgctcatgaaagcctcaaggatcaaattcctgctgttgacaagttgtattctactaaggttaataagtttgcaaaaattatgaaccttagacaaagtgtgttggtggatctaaacttcttactgatgggaagttgtatgagggtaagcatattcctgtatctaatattagtgcaggggaaaatcatgt

SEQ ID NO: 145249 - DNA, 250 bp, Glycine max
cggtgccgcgttaaccgcgccggagactcggcgtactcaccgctgaactcggggtcgtcgtcttcgtcgttcagcgaccgcccccccacggagatggcgccgctcttccccggctgcgactacaaccactggctcatcgtcatggagaatcccggtggtgagggcgccaacacagcagcagatgatcgattgctacatccaaaccctagccaaggttctcggcagtgaggaggaagctaagaagaagatt

SEQ ID NO: 145250 - DNA, 247 bp, Glycine max
cggtgccgcgttaaccgcgccggagactcggcgtactcaccgctgaactcggggtcgtcgtcttcgtcgttcagcgaccgcccccccacggagatggcgccgctcttccccggctgcgactacaaccactggctcatcgtcatggagaatcccggtggtgagggcgccaacacagcagcagatgatcgattgctacatccaaaccctagccaaggttctcggcagtgaggaggaagctaagaagaag

SEQ ID NO: 145251 - DNA, 249 bp, Glycine max
gtcaatgttgagacagatgaatggcagcttgacacactgtgtgatcttcatgagacattggcaattactcagagtgtcattatcgtgaacaccagaagataggttgattggctgactgacaagatgcgaagtcgagaccacacagtctcagcaacccatggagacatggaccagaataccagggacattattatgcgtgaattccgttctgggtcatcccgtgtcgtgataactactgatcttttggcc

SEQ ID NO: 145252 - DNA, 247 bp, Glycine max
catgtcaaaagttgcggtatcattcacacacattatcaagagtggtgaacctgcttttagtgttctggtttcaagatttcttttgggtgagagctttcctgtgccagtctatctgtctttaattccaatcattggtggatgtgcacttgctgctgtgactgagctcaatttcaatatgatcggttttatgggggccatgatatcgaatttggcatttgtattccgtaatatcttttcgaaaaagggc

SEQ ID NO: 145253 - DNA, 249 bp, Glycine max
actggtttggccaatagattactgagtaagggcaatgatattctgtgttgcgattatgctagttttgatggtttgattaccaagcaagttatgagcaagatggcagaaatgataaacagtctttgtggtggtgatgaaaaattgatgcgtgaaaggacgcacctgctgttggcttgttgttcaaggatggcaatttgtaagaaagatgtttggagagttgaatgtggaatcccttctggatttccgctc

SEQ ID NO: 145254 - DNA, 213 bp, Glycine max
ctaaaattgcacttcccaagaacacagttggaggaaccattctgcgtagtgatctattggcaaattttttgacagagggcaattttagagcaagtgttgatttgcaacgcactcatcgtattaaaggaatgattagacatgggggcccagttgggaattcctgagatgacaggttaaccattggccgtgggattgaaaagtcctttaaggggg

SEQ ID NO: 145255 - DNA, 212 bp, Glycine max
agttaagtaagccacatcctcagggtgaagaatatggtcctgttagcgaagtctacgtgcctgccagcgaaggagtggaagcttatatttggttactggcaaaggcttatgttgttgtgaatgatgcatgctaccatcaaatcattagccattggctaagcattcaatgcattgtttgagcccatttgtcatagcaacaaaccggccacttg

SEQ ID NO: 145256 - DNA, 250 bp, Glycine max
gacacccgtgacaacagttttatagtggctcgggatgctattggggtcacttccttgtacattggatgggggttagatggctctgtttggatttcatcagaaatgaaaggcctgaatgatgattgtgaacactttgagtgttttccacctggtcacttgtactctagcaaagaaagagggttccgcagatggtacaatcctccttggttctctgaggctattccatctgccccttatgatcctcttgttt

SEQ ID NO: 145257 - DNA, 247 bp, Glycine max
tttcgatcaggaagacaacagtggtttaagtcttgcactccaggaagacagtgcaaaaacagggaaggttacctctgctgggatgtattttcttgggtttcctgtttatcgattagatcaaacaatgaactctatagctgctgctaaggatccagatacgtcatttttcagaaagctggatgcgtttcagccctgtgaattaacagaattgaaggctggtacccatgtatttgctgtttatggtgac

SEQ ID NO: 145258 - DNA, 248 bp, Glycine max
ctgaaagattacgaggaggattttgaaaatcctgaaaagaagcccagaaggaacaagtacgctttcgcatgtgctattttggcttcaatgacttccatcctactaggttactatattggagtgatgagtggtgcagcactgtacatacaaagatatctcaaggtatcggacgttcaaatcgaaatcctgaacggtatcataaacctctactctcccgtcggttctttcatcgccggcagaacctccga

SEQ ID NO: 145259 - DNA, 246 bp, Glycine max
caaagggtggtccacacccaactaagtcaagctcctattcgaattcccttcccagtttttcaagactactgcaaaggttcatgttatgcagatgaacattacctgccaacgtatgtgcagcataaatttttggaggggaattccgataggagcttgacttgggttgattggtcaaagggtggtccacacccaactaagtttttgagatcggagattactgttaagttcttggagagtttaagggat

SEQ ID NO: 145260 - DNA, 246 bp, Glycine max
ctcacatggaaccaaatttgtttaaattgtctcttgatgatgtggaaactcctaaaggttctatgttcgatcttaaaatttctcaatctaaaattgcacttcccaagaacacagttggaggaaccattctgcgtagtgatctattggcaatttctttgacagagggcaattttagagcaagtgttgatttgcagcgcactcatcgtatcaaaggaatgcttaacatggtggccacagttggtcatt

SEQ ID NO: 145261 - DNA, 248 bp, Glycine max
ggagaagtttctgaactggtttttgccaaatctgggcccactgtcattttattggctggacttcagggagttggttaagacaacggtttgcgcaaagttggcaaattatctcaagaaacagggaaaaagttgcatgctagttgctggggatgtttacatacctgctgctattgaccagcttgctattttgggaaaacaggtggatgtgcctgtctatacagcaggtaccgatgttaaaccttcagaat

SEQ ID NO: 145262 - DNA, 248 bp, Glycine max
caaaacttgcagctgatactcctcttcttactggtcagcgtgttcttgatgcccttttcccctcagttcttggcgggacttgtgccataccgggagcttttggttgtggtaaaactgtcattagtcaggctctttctaagtattccaattctgatgccgttgtttatgtcggctgtggggaacgtggaaatgaaatggcagaggttctaatggactttccccaacttacaatgacattacctggatgg

SEQ ID NO: 145263 - DNA, 248 bp, Glycine max
aaggttggaaatcacaaacaaattgttggtttccatgttgctggaagcaaaggaagactgggatatgcttcattgataccatatgttgagccagttgtgcaagctcaaagtgctgaagtttactttgacttcttccctgtggaggttgatagtcaagagggagttctacattggtgaattgaaatccggggctatgttccattgcctacaaaaaacacgattttgatggaaactcccaaggaatggca

SEQ ID NO: 145264 - DNA, 254 bp, Glycine max; identical to SEQ ID NO: 145238

SEQ ID NO: 145265 - DNA, 248 bp, Glycine max
gttttatgggtggctcctgaggacaaggcgagtttatggtcacaacttcattatgtttcgtgcaataatctggaaatgcaagaagcttatcttgtcaatctcgtaaatgtgttacgagaattgtatttgcacagtccagaggaagctcgccaattgagaaggaaagctctctctcgtattgaatggctgcaaaaagctgatgtgcctaccatagcacagattgaagagttccattcgatgcagaggat

SEQ ID NO: 145266 - DNA, 237 bp, Glycine max
atggtgatgataacttaattagtgttcatgaatatgtcaagccttactttagtggttctaaattgaaaagctttctagctggtcataatatcaccattactgatggtattgacaaaactagtgcaactttgcaatttagaaagttagcagattgtgattttctcaagagaaactttaagcagatgtctaatgttttatgggtggctcctgaggacaaggcgagtttatggtcacaac

SEQ ID NO: 145267 - DNA, 247 bp, Glycine max
ctaaaacatctccagtgggttcttcttcttctattacaacaacgtcgtccaagaccatgaccatggccatggccacgatcctgctcctgttcacggtcttcgcggtttcatcggccctagacatgtcgataatctcgtacgacaacgcccacgccgccacgtcgcgcagcgacacggagctgatgtccatgtacgagcagtggctagtaaagcacggcaaggtgtacaacgcgctcggagagaagga

SEQ ID NO: 145268 - DNA, 247 bp, Glycine max
ggaaaaagttgtgttgaaattttcacaagaggaatttcttacagcttggtcaactcaggtgcgtcccgcaacgactctgttggctgatgggtgcccatatttgtatgctatggtgcatgatagttcagtgtctacaataccaggtgattttgtcattggtgttaagttgacaaccataaacaatatgtgtgcatatgggctcaatcctggtatttcaggttctcgtcttttgggcaccattcctcag

SEQ ID NO: 145269 - DNA, 248 bp, Glycine max
ttgaaaagctttctagctggtcataatatcaccattactgatggtattgacaaaactagtgcaactttgcaatttagaaagttagcagattgtgattttctcaagagaaactttaagcagatgtctaatgttttatgggtggctcctgaggacaaggcgagtttatggtcacaacttcattatgtttcgtgcaataatctggaaatgcaagaagctatcttgtcaatctcgtaaatgtgttacgagaa

SEQ ID NO: 145270 - DNA, 170 bp, Glycine max
gaaattttaataaaccgcgatcacaggttgccgcaccttaaaaccggacacaaaatcaatcgttacttgatttcaagaatttctcaatttcttcctacttctttgtgtacgatttcttaagggaaagaaaatcactctctgtgctggtcacagacttcgtgaatcatttt

SEQ ID NO: 145271 - DNA, 108 bp, Glycine max
caataaaggaaattaggcatgaccctcttgttgagtatgctctgcctatctgaaaatttccacacctcttttaattgtcgtaatgatgtgtgaagtgtgtgttatttt

SEQ ID NO: 145272 - DNA, 247 bp, Glycine max
tccctccaatgagaaccctatcagggtttagaaggtcttgaatagctgttccctcagagagaaactcaggatttgacaaaatttgatacttgatgcccttgctattagtattatggcatagaattttctcaattgcctcagctgttctaactgggacagtggatttctcaacaacaactttgttacacctggaaacatcagctatcatcctagctgcactctcccaataggtcaagtccgcagcctt

SEQ ID NO: 145273 - DNA, 245 bp, Glycine max
aaacatgggaggtgactttgccggcagaggaagttccaccagagcttccggagcctgcactcggaatcaattttgctagggatggcatgaaccgcagggactggctttctctggttgctgtgcacagtgattcgtggttgctctctgtggccttctatcttggagctcgtcttaaccgcaacgaaaggaaacgtttatttagcttgatcaatgatcttcctactgtttttgaagttgtgacagag

SEQ ID NO: 145274 - DNA, 246 bp, Glycine max
gtcacaacttcattatgtttcgtgcaataatctggaaatgcaagaagcttatcttgtcaatctcgtaaatgtgttacgagaattgtatttgcacagtccagaggaagctcgccaattgagaaggaaagctctctctcgtattgaatggctgcaaaaagctgatgtgcctaccatagcacagattgaagagttccattcgatgcagaggatgatgaatgctcctgattcaaatgattatattgatct

SEQ ID NO: 145275 - DNA, 246 bp, Glycine max
caaactatgttgcggagaaagtcaccaacatgcccaagccagaggcgagtgtcaccgacgtggacttcaagcgcgtgagccgcgacagcgtccagtacttggctaaggtcaccgttcagaacccttattccacttcgattcccatttgtgagatcaagtactccctcaaaagtgctggcagggagatagcagcaggaacaatacctgacccagggtcattgaaggcaagtgacacaacaatgttgg

SEQ ID NO: 145276 - DNA, 247 bp, Glycine max
ctgaaaaggaagatcaagaaaaacccaaaaagattgataccagattgagacaaagaatagatcctcaatacaatgaggttcaggctcagatggaaacaaatttgtttaaattgtctcttgatgatgttgaaactcctaaaggttctatgttggatcttaaaatttctcaatctaaaattgcacttcccaagaacacagttggaggaaccattctgcgtagtgatctattggcaaattttttgacaga

SEQ ID NO: 145277 - DNA, 264 bp, Glycine max
ggaatgattaaaatggtggccacagttggtattcctgagaatacaggtatagcattggcctgtgctatgaatagttcttttagggggcgcgccagttctgatatttacaccatctgctctcaagactgtgaattatggaatcctgcttgcacaaaagcaatgactatgtcatttaatccaaacccgtgttctgatgcatggagtttggaatttctgaagcgtaccggatttcattgtgatatcatttgtgtcactggatggcct

SEQ ID NO: 145278 - DNA, 276 bp, Glycine max
tcggctcgaggctgtctctgcttctctctctaccccccactctctctctaaaccaagacggcctcttcctcctccaagccaaactccaactctccgacccccaaaacgccctctccgactggaaccaccgcgacgccaccccatgcaactggaccgccgtcacgtgcgacgccgcatccggaggcgtcgccactctcgacttctccaacctccaactctccggccccgtccccgccaccaccctctgccgcctccctcgctcgcctccctcaactt

SEQ ID NO: 145279 - DNA, 262 bp, Glycine max
gacaagcttagttgtcaagttggaatcaacccatactccatggaatggactggtttggccaatagattactgagtaagggcaatgatattctgtgttgcgattatgctagttttgatggtttgattaccaagcaagttatgagcaagatggcagaaatgataaacagtctttgtggtggtgatgaaaaattgatgcgtgaaaggacgcacctgctgttggcttgttgttcaaggatggcaatttgtaagaaagatgtttgga

SEQ ID NO: 145280 - DNA, 264 bp, Glycine max
ggaaatttggctgatgacaccatcaatttagaggcttttccccacaagctaatgcagttcagagagattcaggcacaagttgtgttgaaattttcacacgaggcatgtcttacagcttggtcaactcaggtgcgtcccgcaacgactctgttggctgatgggtgcccatatttgtatgcgatggtgcatgatagttcagtgtctacaataccaggtgatattgtcattggtgttaggttgacaaccatactacaatatgtgtgc

SEQ ID NO: 145281 - DNA, 269 bp, Glycine max
cgctgcctctttctatagggggaggagctggtgcacagaatgctattctcatgaatatgccaaatgctgttctttcaatgtggagatattttgttggagatctcgtctttgaagtttctaagatgacttctccctacattaaatgtacagtctctttcttcatagcatttggaaatttggctgatgacaccatcaattttgaggcttttccccacaagctggtgcagtttggagagattcaggaaaaagttgtgttgacattttcacaa

SEQ ID NO: 145282 - DNA, 274 bp, Glycine max
cgttgctcataacgttaatcagccccaagagaaagatttgttagagggaaatttttcctttgatattaaatctcgctctagattggaaaaagtttcctctacaaaagcacaatttgttagtggaaaaaccttcaaatatgatataattggtgctggttcacattcttcaggagattttcctgaaaaggaagatcaagaaaaacccaaaaagattgataccagattgagacaaagaatagatcctcaatacaatgaggttcaggctcagatggaa

SEQ ID NO: 145283 - DNA, 272 bp, Glycine max
catgaaagcctcaaggatcaaattcctgctgttgacaagttgtattctactaaggttaataagtttgcaaaaattatgaaccttagacaaagtgttgttggtgatcttaaacttcttactgatgggaagttgtatgagggtaagcatattcctgtatctaatattagtgcaggggaaaatcatgtagttcaaatacccttaatggcacaggaggaaattctgtcttctagtgcaagtgatttcagaactgcaatggtgagtataaatagcaa

SEQ ID NO: 145284 - DNA, 270 bp, Glycine max
cgctctgtttctgtctctgtgtttgcggctgaggattccgaacgagcgaccttcttcgtttctcgcaaagtttaagtcatcatgggtaaggaaaagactcacatcaacattgtcgtcattggacatgtcgactctgggaagtcaactaccactggtcatttgatctacaagcttggaggtattgacaagcgtgtgattgagaggttcgagaaggaggctgctgagatgaacaagaggtcattcaagtatgcctgggtgcttgacaagctc

SEQ ID NO: 145285 - DNA, 271 bp, Glycine max
caagatatggttgaggaatggtttgattgtgttgatgaggaggattcctttgaggaagtttctttaagtgcagcacttaatggtgttgagggtttggactatatggaaagaattcctcttgccacatctgagggttttcctcatgtgctttcacgcaaaaatggcgaaaaaggcaaaaggagatttgtctctggggatggtgaagagatgacattgattccaggaaccagtgttgaagaggcttacaacaagctaatagttgaacttgaga

SEQ ID NO: 145286 - DNA, 190 bp, Glycine max
aaaggagtgattgggcctcattggtacaagtgtttttaacaaacagcaacagtacagagcattttgatgcatgtaagtggacaaaatcagaaccacattcctgggaattaatcttcccaatagaggtatgtggtcctaataatggttttgaaatgtggagttctgagtgggcaaatcaaacgtcatggca

SEQ ID NO: 145287 - DNA, 263 bp, Glycine max
gtatttgcagaactttgtttcccaacctccattgcctccgcttctacctcgctaccatgatcattcctgagaagaaccgcaaggagatctgcaaatacctcttccaagagggagtttgctttgcgaagaaggacttcaatttggcgaagaccctgagattgacgtgccgaatctgcaggtgattaagctgatgcagagtttcaagtctcgcgagtatgtgagggagacttttgcttggatgcactattactggttcctcacca

SEQ ID NO: 145288 - DNA, 264 bp, Glycine max
cttccaggatgacaacctggtggccttgtacaagaaaatttaccgcggtgacttcaagtgtccgccgtggttctcctccgaggcgcggaggctcatcaccaagctcctcgaccccaacccgaacacgcgaatcacaatttcaaaaatcatggactcgtcgtggttcaagaatcccgtgccgaagaacttgatgggaaagctaagagaggaattggatctggaggagaagattaaacagcatgagcaggaggtttctactacgat

SEQ ID NO: 145289 - DNA, 267 bp, Glycine max
ctcgagccgaatcggctcgaggagtgggaaaaagtgcagggagaggtttgagaacctgtacaaatattacaagaagacaaaggaaggaaaagctggaagacaagatgggaagcattacaggttctttcgtcaacttgaagccttatatggtgaaaacagtaaccaagcctcggtgccagaaaccaattttggcagtggtagccttcgtttccacacaagcagccaaggaaataacccttctcaaacaaatcaagaaatgtttcagtc

SEQ ID NO: 145290 - DNA, 273 bp, Glycine max
aactgaaccaaatcatcacacacacatactaagttgcaacaattcttctactatggatctcctccttctggtatagaccctcataggtctcttcttcgctgtggtggtcgccatcgtcgtctccaccctccgcggccggtaattctagctctcaccgggcccacctcgagccgctcgagccgcaaagtggtcttatttgttaaacacttgggcgttggagcaaatgtttgcttcatacattttctctggtatcaacatgctcactgtagaaaa

SEQ ID NO: 145291 - DNA, 270 bp, Glycine max
ctttagggaaggaagaaggaacaactatactactattatccttattattgttattattgtaattaatctttttattatagttattgttgttgttattattcctcaaatatggattcgttgtgcctctccaacgactcagttgtttctggattcaaagacaaggagtcaatggttgacccctttttggtcgaggctctccagaaccctcgtcaccgcctcaccattttgaggatggagctggacatccagaagtttttgaataatgctgat

SEQ ID NO: 145292 - DNA, 269 bp, Glycine max
ctttagggaaggaagaaggaacaactatactactattatccttattattgttattattgtaattaatctttttattatagttattgttgttgttattattcctcaaatatggattcgttgtgcctctccaacgactcagttgtttctggattcaaagacaaggagtcaatggttgacccctttttggtcgaggctctccagaaccctcgtcaccgcctcaccattttgaggatggagctggacatccagaagtttttgaataatgctga

SEQ ID NO: 145293 - DNA, 273 bp, Glycine max
cttccaggatgacaacctggtggccttgtacaagaaaatttaccgcggtgacttcaagtgtccgccgtggttctcctccgaggcgcggaggctcatcaccaagctcctcgaccccaacccgaacacgcgaatcacaatttcaaaaatcatggactcgtcgtggttcaagaaacccgtgccgaagaacttgatgggacaagagaagagaggaattggatctggaggagacgattaaacagcatgagcaggaggtttctactacgatgaatgctt

SEQ ID NO: 145294 - DNA, 183 bp, Glycine max
tgaaattttaataaaccgcgatcacaggttgccgcaccttaaaaccggaaacaaaagctatcgttacttgatttcaagaatttctcaatttcttcctacttctttgtgtacgatttcttaagggtaagaaaatcactctctgtgctggtctcatacttcgtgaatcattttcttttccactcc

SEQ ID NO: 145295 - DNA, 272 bp, Glycine max
tcaaattcaaattcagaagatgttacgccgcgttcgccgatgagaatcgcgagtacgtgatcgttggcggcggaaatgccgcgggatatgctgcgcgcactttcgttgagcatggaatggctgatggtcgtctctgtattgtaaccaaagagccgtatacaccttacgagcgtcccgctctgacgaaagcgtatttgttcccgccggataagaaaccagcacgccttcctggttttcacacttgtgttggatccggtggagagaggcagact

SEQ ID NO: 145296 - DNA, 278 bp, Glycine max
ataatgtcagagtgtgctcaactagcccaatatgatgaagaactttatatggtaactggtgaaggagatgacagatatctgattgaaacatctgagcagccactctgtgcatatcatttagatgattggatccatcctacccagctaccattaagatatgctggttattcatcatgctatcgtaaagaagctggatctcatggtcgagacactctaggaatattccgagtccaccactttgagacagtggagcagttttgcctcactagcccaaatga

SEQ ID NO: 145297 - DNA, 259 bp, Glycine max
atctggtttgcaaaaagacagagggttaattgtggagtattttggaaggatgtcttacgttgctcataacgttaatcagccccaagagaaagatttgttagagggaaatttttcctttgatattaaatctcgctctagattggaaaaagtttcctctacaaaagcacaatttgttagtggaaaaaccttcaaatatgatataattggtgctggttcacattcttcaggagattttcctgaaaaggaagatcaagaaaaa

SEQ ID NO: 145298 - DNA, 259 bp, Glycine max; identical to SEQ ID NO: 145297

SEQ ID NO: 145299 - DNA, 266 bp, Glycine max
caaagaatagatcctcaatacaatgaggttcaggctcagatggaaacaaatttgtttaaattgtctcttgatgatgttgaaactcctaaaggttctatgttggatcttaaaatttctcaatctaaaattgcacttcccaagaacacagttggaggaaccattctgcgtagtgatctattggcaaattttttgacagagggcaattttagagcaagtgttgatttgcagcgcactcatcgtattaaaggaatgattaaaatggtggc

SEQ ID NO: 145300 - DNA, 268 bp, Glycine max
gaattatgaggtaaatgagattgcttggaacatgacgggtgagatgttctttctaacaacaggaaatgggactgtggaagtactttcttacccatctcttcgacctcttgacactctcatggctcatacagctggttgttattgcatcgcaattgatccagtaggaagatattttgctgttggaagtgctgattcccttgtcagtctgtgggatatctcagagatgctctgcgtgcgtaccttcacaaagctggaatggcctgtccgg

SEQ ID NO: 145301 - DNA, 267 bp, Glycine max
gtttttgatattctcttgggaatctctcaagattttgaaattgctggtaatactcttatgccagctttttctgttccacaggctactgccagatcttctgaaaatgcggaatcctctgcatgatctggaattcgtgttttctttcgcttgttcgtttgtttaattcaataaaggaaattaggcatgaccctcttgttgagtatgctctgcctatctgaaaatttccacacctcttttaattgtcgtaatgatgtgtgaagtgtgtgt

SEQ ID NO: 145302 - DNA, 267 bp, Glycine max
gaatacccgctgaacttaagcatatcaataagcggaggaaaagaaaataacaatgattcctctagtaactgcgagtgaagagggaaaagctcaaattttaaatctgttaggtttacctaaccgagttgtaatttgaagaagcgttttctgcgaatttggttagtccaaatcctttggaataaggtatcatggagggtgagaatcccgttcggttaaccaaagcgctttacgatacgctttcaaagagtcaagttgtttgggattgca

SEQ ID NO: 145303 - DNA, 267 bp, Glycine max
cttttgtcaattttctattgaccttctcggtggaggaattttagtggacaaaagctctgcttgctagactcttaattcaatggcgttactcactgttgccatttgattctagtcagcagagcatttgtcaattttctattgaccttctcggtggaggaattttagtggacaaaactggagattggatcacacttatacaaaattctccaattagtaacttgttgagagttgctgcttaggagaaaggttgtttaatggtcaagattg

SEQ ID NO: 145304 - DNA, 269 bp, Glycine max
caaatggcaacagtgagaacaccattgaattttgattctagcaagcagagcttttgtcaattttctattgaccttctcggtggaggaattttagtggacaaaactggagattggatcacacttatacaaaattctccaattagtaacttgttgagagttgctgcttggaagaaaggttgtttaatggtcaagattgtgatgtctgggaatgcagcagtcaaaaggagtgattgggcctcattggtacaagtgtttttaacaaacagcaa

SEQ ID NO: 145305 - DNA, 269 bp, Glycine max
accaagcaagttatgagcaagatggcagaaatgataaacagtctttgtggtggtgatgaaaaattgatgcgtgaaaggacgcacctgctgttggcttgttgttcaaggatggcaatttgtaagaaagatgtttggagagttgaatgtggaatcccttctggatttccgctcacagttatttgcaatagcatttttaatgagatgctcattagatatagctatgaaaaattactgcgccaggctaaagctccaagtatgtttttacaatc

SEQ ID NO: 145306 - DNA, 229 bp, Glycine max
gtatttttgttgcgcctttcagaggcggaaggcctcttcgggtggttacatttccgaataccattgtgcagattgaaccagacatgaattcaaggtttcagcttttgagtaccactaccaatggtgattttgttcaagggaaagatctcgcaatggttaaagttaatgtagcatgtgctgctgttggcttgacatcaagttacactccaactccagtgtgggcatctgg

SEQ ID NO: 145307 - DNA, 273 bp, Glycine max
gtggaatcccttctggatttccgctcacagttatttgcaatagcatttttaatgagatgctcattagatatatctatgaacaattactgcgccaggctaaagctccaagtatgtttttacaatccttcaaaaattttgtttctttgtgtgtgtatggtgatgataacttaattagtgttcatgaatatgtcaagccttactttagtggttctaaattgaaaagctttctagctggtcataatatcaccattactgatggtattgacaaaacta

SEQ ID NO: 145308 - DNA, 261 bp, Glycine max
agagcctgctcttgcacctcctgctctgaatcctctaccaatgcccaggcctaaaaggcctcgatctaatgtggttccatcatccccggattcctctgttcttactcgtgaagcttcatctaaagtcagcgtagatcctttgccaacaagtgggtttcaaagggtcttgcaaggtcaagaactgtcgaccttgagaggtaattttgctgaaagcaacgaatctgatacggtcgagaagtctgctgtgtggccacctgttgc

SEQ ID NO: 145309 - DNA, 253 bp, Glycine max
ctcgcaatggttaaagttaatgtagcatgtgctgctgttggcgtgacatcaagttacactccaactccattgttggaatctggtttgcagaaagacagagggttaattgtggagtattttggaaggatgtcttacgttgctcataacgttaatcagccccaagagaaagatttgttagagggaaatttttcctttgatattaaatctcgctctagattggaaaaagtttcctctacaaaagcgcgatttgtta

SEQ ID NO: 145310 - DNA, 264 bp, Glycine max
gctcgagcaagccttattttagtggttcaaattgaaaagctttctagctggtcataatatcaccattactgatggtattgacaaaactagtgcaactttgcaatttagaaagttagcagattgtgattttctcaagagaaactttaagcagatgtccaatgttttgtgggtggctcctgaggactaggcgagtttatggtcacaacttcattatgtttcgtgtaataatctggaaatgcaagaagcttatcttgtcaatctcgt

SEQ ID NO: 145311 - DNA, 257 bp, Glycine max
tattttacgacggcagatacaaattctggactagacacgagaaaaatcttgctttgacagatgaggaaaagatggaagtgattagaaatagaggcattcctgctgatgttcttgcaaagcgagctcatgaatttgaaaaacatgttgctcatgaaagcctcaaggatcaaattcctgctgttgacaagttgtattctactaaggttaataagtttgcaaaaattatgaaccttagacaaagtgttgttggtgatctt

SEQ ID NO: 145312 - DNA, 261 bp, Glycine max
gtcaatgttgagaaagaggaatggaagcttgacacactgtgtgatctttatgagacattggcaattactcagagtgtcatttttgtgaacaccagaagaaaggttgattggctgactgacaagatgcgaagtcgagaccacacagtctcagcaacccatggagacatggaccagaataccagggacattattatgcgtgaattccgttctgggtcatcccgcgttttgataactactgatcttttggcccgtggtattgat

SEQ ID NO: 145313 - DNA, 266 bp, Glycine max
gttcaggctcagatggaaacaaatttgtttaaattgtctcttgatgatgttgaaactcctaaaggttctatgttggatcttaaaatttctcaatctaaaattgcacttcccaagaacacagttggaggaaccattctgcgtagtgatctattggcaaattttttgacagagggcaattttagagcaagtgttgatttgcagcgcactcatcgtattaaaggaatgattaaaatggtggccacagttggtattcctgagaatacagg

SEQ ID NO: 145314 - DNA, 265 bp, Glycine max
ggaatcctgcttgcacaaaagcaatgactatgtcatttaatccaaacccgtgttctgatgcatggagtttggaatttctgaagcgtaccggatttcattgtgatatcatttgtgtcactggatggactgccaccccaatgcaggatgttcaggttacaattgattggtttatttcctctcaggaatgtgttcccaggacctattgtgttttaaatccacaaaatccttttgtgttaaataggtggatgggaaaactgactttccc

SEQ ID NO: 145315 - DNA, 266 bp, Glycine max
tctcgagccgaatcggctcgagaagataagcaaagcgtgaaaaataccaaaataccaaatcacaataacaagcacaattacagtgactccgcttggttcctcttcttcgatcttcggtttgattctgcgtttgttcacatcatggccaccgcttcagtggcatttaagtccagggaggaccaccgcaagcagattgagttggaggaggcgcgtaaagcggggcttgcgccactgaactcgatgaagatggaaaggaaatcaatcct

SEQ ID NO: 145316 - DNA, 270 bp, Glycine max
tgccaccccaatgcaggatgttcaggttacaattgattggtttatttcctctcaggaatgtgttcccaggacctattgtgttttaaatccacaaaatccttttgtgttaaataggtggatgggaaaactgactttcccccagggcacttcccgaagtgttaagagaatgcctctttctatagggggaggagctggtgcaaagaatgctattctcatgaatatgccaaatgctgttctttcaatgtggagatattttgttggagatctcgt

SEQ ID NO: 145317 - DNA, 272 bp, Glycine max
gaagagttttgctcggttggttttcaatgacttcttaatgaattccagctctgtagatgaggttgccaaagaaaaactgggaccttttgcaactttatctggtgatgagagctaccaaagtcgggatcttgaaaaggcatcccagcaagtagcaaagcctctatatgatcagaaggtacaaccaactactctgattccaaagcaagttggaaacatgtacacggcgtctctttatgcagcatttgcctcccttattcacaacaaaaatagca

SEQ ID NO: 145318 - DNA, 270 bp, Glycine max
tgctgttcgaggacagcggcgtttgaggcattgtgctttcatggtcatggcaatgcatggatgcattctttcggaaatacaggcacccccagaaaagaggctggttttcagtaatgaacttcagaaggttggtactgaaggagctaaagtattgcgtcaacttggaagcaaagtggaaaagatggaaaagctaagcaacatagacatactcttgaaagtgcatgaagcagctgagcaattgtcgatgaagattgaccaacaatcattcct

SEQ ID NO: 145319 - DNA, 255 bp, Glycine max
caagccttattttagtggttctaaattgaaaagctttctagctggtcataatatcaccattactgatggtattgacaaaactagtgcaactttgcaatttagaaagttagcagattgtgattttctcaagagaaactttaagcagatgtccaatgttttgtgggtggctcctgaggacaaggcgagtttatggtcacaacttcattatgtttcgtgtaataatctggaaatgcaagaagcttatcttgtcaatct

SEQ ID NO: 145320 - DNA, 255 bp, Glycine max
cattcatcacctatttcctcaaattccacactatcacttagttgaggctactgaggctgctaagccagtgtttggaaaatattatagagaaccaaagaaatcagcagcacctcttccttttcaccttattggggaaataataaggagcttcaagactgaccattttgttagtgacacgggggatgttgtgtactatcaaaccgactctaagattaatggctcttccaaattagagtgaatattaaaattcttttc

SEQ ID NO: 145321 - DNA, 254 bp, Glycine max
taccaatccattcctgagatgtgttgatattaagctggtttcagagctttgccacaagaaggggactttgctctgtattgatggtacatttgcaactccattgaaccagaaggcccttgcccttggcgctgatctgattctccactccttaacaaaatacatgggtggacatcatgatgtccttggtggttgtctaagtggttcaattaaggtggtttcgcaaattcggactttgcaccatgttttgggtggta

SEQ ID NO: 145322 - DNA, 260 bp, Glycine max
caagaagacatcgccaccgaagctcaatctttcatactattttcaattcccgatcttgtagcacaatcattgctacaccctttgagaatctacttaagaagtcaatctataaccctgcctctcacatacactgcctctctgtctattctccttcacgtccccatcaactacttccttgtctctgtgcttaagcttggaatcaaaggcattgccttaggcgctgtttggacgaatttcaacctcgtcttttcgttgattct

SEQ ID NO: 145323 - DNA, 264 bp, Glycine max
gtgctggttcacattcttcagaagattttcctgaaaaggaagatcaagaaaaacccaaaaagattgatgccagattgagacaaagaatagatcctcaatacaatgaggttcaggctcagatggaaacaaatttgtttaaattgtctcttgatgatgttgaaactcctaaaggttccatgttggatcttaaaatttctcaatctaaaattgcacttcccaataaatcactacgcagaatggttcctccaactgtgttcttgggaa

SEQ ID NO: 145324 - DNA, 263 bp, Glycine max
aaaaagttgtattgaaattttcacaagaggaatttcttacagcttggtcaactcaggtgcgtcctgcaacaactctgttggctgatgggtgtccatatctgtatgctatggtgcatgatagttcagtgtctacaataccaggtgattttgtcattggtgttaagttgacaaccataaacaatatgtgtgcatatgggctcaatcctggtatttcaggttctcgtcttttgggcaccattcctcagtctatttcacagcaaact

SEQ ID NO: 145325 - DNA, 264 bp, Glycine max
taattagtgttcatgaatatgtcaagccttactttagtggttctaaattgaaaagctttctagctggtcataatatcaccattactgatggtattgacaaaactagtgcaactttgcaatttagaaagttagcagattgtgattttctcaagagaaactttaagcagatgtctaatgttttatgggtggctcctgaggacaaggcgagtttatggtcacaacttcattatgtttcgtgcaataatctggaaatgcaagaagctt

SEQ ID NO: 145326 - DNA, 265 bp, Glycine max
ctcgagccgaatcggctcgagacacaaacctctttgcggagatccaactccgaggatgttggctctctgggagaaaagcccaccatcctggtctccgagaaacttggagaggcagggctgcaggtgttacgtggcgttgggcacgtggaatgcgcgtatgagctctcacaggaggagctatgcacgaagatctcgtgctgtgacgctctgatagtcaggagcgggacgaaggtgacgagggaagtgtttgaagctgggaaaggga

SEQ ID NO: 145327 - DNA, 264 bp, Glycine max
ggaattttagtggacaaaactggagattggatcacacttatacaaaattctccaattagtaacttgttgagagttgctgcttggaagaaaggttgtttaatggtcaagattgtgatgtctgggaatgcagcagtcaaaaggagtgattgggcctcattggtacaagtgtttttaacaaacagcaacagtacagagcattttgatgcatgtaagtggacaaaatcagaaccacattcctgggaattaatcttcccaatagaggta

SEQ ID NO: 145328 - DNA, 269 bp, Glycine max
ctagttttttttctacacatccatataaataacgaaaaattaagcaacgattcaagaagaaaatgggttctgaacttgaagctcacattcaagtcctcatggtgtcctatccagcacaaggacacataaaccctttgctcagactaggtaagtgccttgctgcaaagggcttatttgtaaccttcaccacctcagagaccgctggtaaaaacatgcgaaccgccaataacatcactgacaaatcagtgattcctgtcggcgatggtttt

SEQ ID NO: 145329 - DNA, 207 bp, Glycine max
aagagtctcaaatatctggttgatgagtgtccttttgcatttgtgaactagtatgtaatattttattcacttaaataaagcgcattactatgtgcaatgagtgtgtttaaatataaaacaaaaaaaaaaaaaaaaaaaaaaaaaaaaaaaaaaaaaaaaaaaaaaaaaaaaaaaaaaaaaaaaaaaaaaaaaaaaaaaagagggggg

SEQ ID NO: 145330 - DNA, 255 bp, Glycine max
aactagtgcaactttgcaatttagaaagttagcagattgtgattttctcaagagaaactttaagcagatgtctaatgttttatgggtggctcctgaggacaaggcgagtttatggtcacaacttcattatgtttcgtgcaataatctggaaatgcaagaagcttatcttgtcaatctcgtaaatgtgttacgagaattgtatttgcacagtccagaggaagctcgccaattgagaaggaaagctctctctcgtat

SEQ ID NO: 145331 - DNA, 255 bp, Glycine max
gatttgcagcgcactcatcgtattaaaggaatgattaaaatggtggccacagttggtattcctgagaatacaggtatagcattggcctgtgctatgaatagttcttttagggggcgcgccagttctgatatttacaccatctgctctcaagactgtgaattatggaatcctgcttgcacaaaagcaatgactatgtcatttaatccaaacccgtgttctgatgcatggagtttggaatttctgaagcgtaccgga

SEQ ID NO: 145332 - DNA, 240 bp, Glycine max
agaaacatatgattggatctgctcccttgtgtttttgatgtcatcagggccagtgtaccaaacgtggagttggattctgtctttgagcagaaaaatgatatagcaaaggctgtggaggaggagcttgagaaggccatgtcaaactatggatttgagatagttcagactctcattgttgatatagagcctgatgttaatgtcaagagagccatgaacgagataaacgcagctgctagattg

SEQ ID NO: 145333 - DNA, 260 bp, Glycine max
ctcgagccgaatcggctcgagcgagaaggcgaacatccgtttccatctaagtgactttgtcgccttgtgtcccccagaagcattaaagctcttctctgctttgaaaatggctgattggggcccggtggtgatcgcagtggtgctgttcgtgctgttaagcccggggcttctgtttcagatgccagccaggggaagggtagcagagtttgggaacatgcaaaccagtggggcctccattttggttcacgccatcatctact

SEQ ID NO: 145334 - DNA, 262 bp, Glycine max
tctttctccgatggctaatccctcactcttgttcttcagtctcctcctattatccgccaccgtagccgccgccgaacggatcgacgatgaagacgaccttctgatccgtcaagtggtgccggatgcggaggaccaccacctgctcaacgcggagcaccacttctccgccttcaagacaaagttcggcaagacctacgccacgcaggaggagcacgaccaccgcttccgtatcttcaagaacaacttgctccgcgccaagtca

SEQ ID NO: 145335 - DNA, 263 bp, Glycine max
agagatgaaaattttggtcacttgaagtcatcggatttccttacatacggaatcatatccttatctcacgatgtgatacctttgttcaaatctgcaatttttcaattaagggtcacatcgagtgagtttgaaagcttcgaagatgtgcgtagtctctatgagggtggaattaaattgccaacagatatactgagccaaattagccccttaccagccctcaaggaaatcttccgcactgatggtgaaaatgttcttcaatttcc

SEQ ID NO: 145336 - DNA, 264 bp, Glycine max
gttctgagtgggcaaatcaaacttcatggcatttgagtttccttattgacaatcccaaacagtctacagtttttgatattctcttgggaatctctcaagattttgaaattgctggtaatactcttatgccagctttttctgttccacaggctactgccagatcttctgaaaatgcggaatcctctgcatgatctggaattcgtgttttctttcgcttgttcgtttgtttaattcaataaaggaaattaggcatgaccctcttgt

SEQ ID NO: 145337 - DNA, 269 bp, Glycine max
gcaattgaagttaaaagccttagccttccctacaactccaaacataaagacatcatcatccatggctgcctccgtctccactgtcggagctgtcaacagagctcttttgaacctgaatggttctggagctggagcttcagctcccattcagccttctttgggaccagcttgaagaaggttattgcctcaagggtccccaacagcaaggtttccggtggaagcttcaagattgttgctgtagaagagcagaaagagattgaagagaccca

SEQ ID NO: 145338 - DNA, 259 bp, Glycine max
gaacaagtagttgagaactaagaaggagtagcaaatggcttcctcaatgatctgcttcctcagctgttaccactgtcaaccgtgccggtgccggcatggtggctccattcactggcctcaagtccatggctggcttccccccagaaagaccaacaatgacattacctccattgctagcaacggtggaagagtgcaatgcatgcaggtgtggccacctgttggcaagtagaagtttgagactctttcctacctgccagac

SEQ ID NO: 145339 - DNA, 266 bp, Glycine max
cgggtcgagcttgaactatcgtgtcttcttggctttctctgttcaggatcaagatggatattgtatcacgagctttgctatttccgttggctatacttgtgctcatattaagcacaccttgctcaggtgcttttgggaagagtggaataatgtgaaaacagctatttttctgtcccccaagtttgaacttggaccaggatcggtagccaataaatatgattatgacgctgattttccaagaggtcatatagcacttaagagtgtca

SEQ ID NO: 145340 - DNA, 257 bp, Glycine max
cttggtgtagaatatatggtataaactgtattgtggcatgaatgctgcaggaacttttgcccgatgcaacaattgagagtcctgaagatgctgtaatgaagcaacatatgagaaaagacgtacatgatctcctgaaagcttgaacttaagggaaaggaaaatattaaccctacgctttggccttaatgataaccagcctaggtctcttcaggacatagggacacttttcaaagttagcaaagagaggataaggaaga

SEQ ID NO: 145341 - DNA, 255 bp, Glycine max
caaccatgcttctcagaacagcttcatctttctctctcctcaaagccaacgccgaccatatactccctctccccaactcttcttcttctggtattattcgctactctcagtctctggggaaaaacttggttccatgcgtaccaaggacaccaacaaccgccccttaaccggcgtcgtttttgaaccctttgaagaggtcaagaaggagctcgaccttgttcccaccgtcccacaagcttccctcgctcgccagaa

SEQ ID NO: 145342 - DNA, 251 bp, Glycine max
gcagacacaagggaaagcttgagacagagagtttgctgcaagcaaggggtgttaattggacttctataaggccagtctatatctatggacccttgaactacaaccctgttgaagagtggttcttccatagattgaaaccggacgcccaattcctatccccagctcaggactacagataacccaacttggtcatgttaaggatttggcgacagttttatccaagttcttggtaatgagaaggccagcaagga

SEQ ID NO: 145343 - DNA, 247 bp, Glycine max
caagtgaacaaatcaaatctctctctcaatctagccttctttctgtttttcaatttccaaatcacgaaactcaagaagatggagaaagcgatcaacagacagaagattttgcttcatcatctcaacccttcatcatccaccaccccaacgaatcatcctccctccatgcttcagcatgtgtggcgggggatagcgctgcttatcaaaggacatcgacattcggggacgatgttgtgatcgtggctgc

SEQ ID NO: 145344 - DNA, 258 bp, Glycine max
agcattagcaaaagcaagaagaactagtctaagcagaaatggcctcttcagtgatggcatctgtggccctcaaacctgcccctttcactgttgagaagtcctcagttagaggccttccctccctctcaaggaactcctctcattcagagttgtggccagtggtggcaagaagatcaagactgacaagccttatggaattaatggtggcatggctttgagggaaggagttgatgcatctggcaggaaaggaaagggaaa

SEQ ID NO: 145345 - DNA, 262 bp, Glycine max
agcctattccaggactctacgcgagcggagaagtcgccggtggtgttcacggagcaaaccgattaggaggatcctcccttctcggatgcgtcgtctacggtcgtgttgccggtgacgaggctgcctcttaccttctcaagcgctctcttccggtcagatcgcaggagagcgtttgggtcaggtcgccaaccatctcgagactaagattcggattgacccctctaccaacaaggctgtcattgagttcagctgggatggtcag

SEQ ID NO: 145346 - DNA, 259 bp, Glycine max
aaaaaaattgcttgaagattaccgaatcggggagctcatcaccactggctacacctcagactcatcgcccaacaactccgtgcatggcaattccgaattcactcatttggcccctattaaggaaactacaacaccaccacacgtatgtggctctcaacccacgcgagaaaatcccatgcaagctcgtgtcaaagacctccatttctcatgacgcgaggctattccgttttgcattaccctcagaggaccaactcttggg

SEQ ID NO: 145347 - DNA, 259 bp, Glycine max
cagagcaagacatacttggaagtgaagggaactggaactgctaatcagtgcccaaccattgaaggtggagtggactcatttgccttcaaggcagggaaatacaaggcccagaagttgtgcctggaaccaacttccttcaggtgaaggcagagggtgtggccaagaatgccccgctcgaatttcagaacaccaagctcatgactcgtctgacctacaccctggacgagatcgagggtcccttcgaggtttcatccgatgg

SEQ ID NO: 145348 - DNA, 257 bp, Glycine max
aggttgtgaaagcagagaagtgagatacactaagttatcctcataaatacactctaattaggtggcaagataagtgtctaaccttagtaacattgccacatattgtgttcattttggaattgtgccactaaaattctatcaattcatctatggctgcctcttcttatgctatgcaatcaatcctggcaaaccctttgatccgcatttccagcgggtctagggtgaaccaatttggcgttcctgctttgcacatgaga

SEQ ID NO: 145349 - DNA, 254 bp, Glycine max
aaattagttcattctctttgcgcagttccctacctctcctttcaagatgcagattttcgtcaagaccctcaccggaaagaccatcacccttgaggtggaaagctctgacaccatcgacaacgtcaaggccaagatcaggacaaggaaggaattcccccggatcagcaacgtctcatcttcgccggaaagcagctcgaggacggccgtaccctcgccgactacaacatccagaaggagtcaacccttcaccttgt

SEQ ID NO: 145350 - DNA, 253 bp, Glycine max
ctctcgagccgaatcggctcgagagcggccaaaggtatctatccaatagtagatcctttagattcaacctcaactaaactacaacctcgaatcgttggtgaagaacattatgagactgcgcaaagagttaaacaactttacaacgttacaaagaacttcaagacattatagctatccttggcttggacgaattatccgaagaagatcgcttaaccgtagcaagagcacgaaaaattgagcgtttcttatcaca

SEQ ID NO: 145351 - DNA, 277 bp, Glycine max
acacgtacgtattctcgctcgacggcacagtcaaggagcagacagtgagcaatcttttacaatcactcctagttggagcatcagtgtttgctatgcctgccataaaaaagataccaacttcagttctctggggatattttgcttacatggccattgatgtcttccaggaaatcaattctgggaaaggatcctacttctttttgtaacacctagtaggtggtacaagttgctagaaggggatcatgcttcctttgttgagtcggtaccttacaaatac

SEQ ID NO: 145352 - DNA, 252 bp, Glycine max
aatggcttcatccgtatcattggatttgacaacgttcgccaagtgcagtgcatcagcttgcatcgcctacaagcccccaggcttctaagtcattgaaaaatttgcaaagcatctgtagccaccccactttgtttgttgtcttaaactacattcccatttgtttttgctttatgagatttcatcatcctgtatttttggtttctgttttcggacttcaatggaaattaatggatgagaactaatgaataagct

SEQ ID NO: 145353 - DNA, 258 bp, Glycine max
gcttttgctaaatgcagttcgcgggatagatgttgaaagacccccggtttggctcatgaggcaagcagggaggtacatgaagagttaccaaaccatctgtgagaaatatccttcattccgtgaaagatctgaaaatgtgatctcgtggtggaaatttctctgcaaccgtggcatgttttcaagcctgatggagtgattttattctcagacattcttaccccactttctggaatgaatataccctttgatattgtgaag

SEQ ID NO: 145354 - DNA, 254 bp, Glycine max
cttggtatctggggaggcaagggacaaggaaaatctttccaatgtgagcttgtctttgccaagatgggaatcaaccccatcatgatgagtgctggagagttggaaagtggaaatgcaggagagccagcaaaactgtcaggcagagataccgtgaagccgcagacttgatcaagaagggaaagatgtgtgctctcttcatcaacgatcttgatgcaggagctggtcgtcttggtggaacacccaatacactgtca

SEQ ID NO: 145355 - DNA, 253 bp, Glycine max
aaagcattgaattcaaaaactaagttcatttcttgtgctttgctttattcctcaaaaccaaacatgtcgaacacatgcggcaactgtgactgcgctgacaagactaactgcaccaagggaaacagctatggtgtatagtagagactgagaagagctacatcgagactgttgacatggatgttccagcagctgagcatgatgggaagtgcaagtgtggcactaactgcacttgcacggactgcacttgtggcca

SEQ ID NO: 145356 - DNA, 249 bp, Glycine max
ctcttgttctgaacgacttttcaagagaatcaaaccatggcagtgaaagtatacggtccccactgtgcttccaccaagcgggtgctggtttgtctggttgagaaggaagtcgaatttgaggttgtccctgttatgtcactaagggggagcagaaggatcctgagtacctcaaactacagccatttggagttgttcctgtcatcaaagatggagattataccttatatgaatctcgtgctataatgaggt

SEQ ID NO: 145357 - DNA, 246 bp, Glycine max
cgaagatttagggtttcgcattgctacttcgcgttcgttcatctctctctcacgcctcaagattttcaagaacacattccaatctggatttctttccattttgtacagccttggataggagtaaacctttgagatatgggacaaagaagttgtgaatgcccatgttaaacgaccacaggatgaagacatacaatccaatgtactggaaataattggatcaaatattcagtccacatacattacatg

SEQ ID NO: 145358 - DNA, 240 bp, Glycine max
cattgatgcagttgagaaggccaactctggtcaccctggtctccccatggggtgtgctctaatgggctcacattctctacgatgagataatgaggtacaattctaagaaccccgcttggttcaaccgtgacgtttcgttctctctgctggacatggctgcatgctccaatatgctctccttcaccttgctggctatgacactgttcaggaacaagaccttaaggaattccgacaatgggg

SEQ ID NO: 145359 - DNA, 246 bp, Glycine max
gtaagctcccaagcagtgggaggaggctcgggactctgaccgcgtgcctgttgaagaatgagccggcgactcataggcagtggcttggttaagggaaaccaccggagccgtagcgaaagcgagtcttcaagggcaattgtcactgcttatggacccgaacctgggtgatctatccatgaccaggatgaagcttgggtgaaactaagtggaggcccgaaccgactgatgttgaagaatcagcggatg

SEQ ID NO: 145360 - DNA, 252 bp, Glycine max
cttcctttgaagttttcgtagttctctgcatcatggagatggaacgcgtcttcgagtttcctcacactcacatgcctcggcgcccgagaaagagagcgagattgggctgggacatccctgaggtccccaagatagatacatagcaaaatgggtgaaggaacttttgggcaggtcttagaatgctgggatagagaaaggaaggaaatggttgccgtaaaaattgtccgtggtattaagaagtatcgagaagca

SEQ ID NO: 145361 - DNA, 250 bp, Glycine max
cgcaagtattttcagcagttaatcagcgccgttgattactgccacagcagaggtgtatcccaccgtgatctcaaaccagagaatctactcctcgacgaagacgaaaaccttaaaatctccgatttcggtctctccgcgctgccggagcagcttcgttacgatggactcctccacacccagtgcggcatacctgcctacgtggcaccagaagtgttaagaaaaaaaggctacgacgggtcaaaagcagata

SEQ ID NO: 145362 - DNA, 243 bp, Glycine max
tagaaacctctcagcccctctccgatcaaatggccaccgtaatcgacggcaaagccgttgcgcaaaccatccgatctgaaatcgccgacgaggtgcgccactctctcaaaaatacggcaaggttccggattagcggtggtgatagtagggaacagaaaagattcacagagctatgttggaatgaagagaaaggcatgcgctgaattgggaatcaaatccttcgatgtggaccttcccgaacaa

SEQ ID NO: 145363 - DNA, 244 bp, Glycine max
aaacggtggaatcaagaaattcagatctgctgcttactctaactgttctcgcaaaccatcctgatacacatccggattgatagttcgttgcatgcaaccatagttttattaggattttttcttctttgttttcaattaggtttttttgttgctctccttcaaactccatctttccaaatcctctctttgcgattgtgttttgatctgcttcctactgcgatagtttctctactgttacatggcc

SEQ ID NO: 145364 - DNA, 245 bp, Glycine max
ggaaaaccatatggttaccataacatgatcttcagttggatagacactttaaatgaaaactatccaccccccttggatgctaatgtggttgcttgcgttatgacaatttggagtcaacttcaacctgatatgcagcaaatatgtggaatgaagccttgaacaaacgacttggaactaaaggacttgacctttcagaagttttagtagaagttgaaaagcgtggatcatcttttgatgaactactg

SEQ ID NO: 145365 - DNA, 249 bp, Glycine max
gcagctgctaacaacttgaaacgccttgctgaagaatttggtcctgagtgggctatgcagcacataattcctcaggttttggagatgaacaacaacccacactatttgtatcggatgactattcttcgtgctatctctctgcttgctcctgtgatgggccctgaaatcacttgttcaaacttgttaccagttgttgttgctgcatcaaaagacagagtgcccaacataaagttcaatgtggcaaaggta

SEQ ID NO: 145366 - DNA, 246 bp, Glycine max
caggatgctggaactcactatgccttcatgagctcctactagtagcttagcactggacttcgccagtacttggacaacaacatggatggattttacattgctccagctttgatggacaaacttgttgtcacattaccaagaacttcatgaccctgcccaacatcaaggttcctctcattcttggtatctggggaggcaagggacaaggaaaatctttccaatgtgagcttgtctttgccaagatgg

SEQ ID NO: 145367 - DNA, 242 bp, Glycine max
ctgaacagcagaggactatgctcggtgaagctttatacccgcttgtggatcagctggaacacgatgctgcagcaaaggttactggcatgcttctggagatggaccagcctgaagttttacatctgatgagtcaccagatgctctgaaggcaaaagttgctgaagccatggatgtgttaagaaatgttgctcaacagcaaactaacccagctgatcaactagcttcactctctctcaatgaca

SEQ ID NO: 145368 - DNA, 238 bp, Glycine max
tcttcatcaacgatcttgatgcaggagctggtcgtcttggtggaaccacccaatacactgtcaacaaccagatggtgaatgccaccctcatgaacattgctgataaccccaccaatgtgcagcctctggtatgtataacaaggaagagaatccccgtgtgcccatcatcgtcaccggtaacgatttctccacactctatgcacgtgtcatccgtgatgggcgtatggagaagttctac

SEQ ID NO: 145369 - DNA, 227 bp, Glycine max
tggaccacctagacatccctgtggccaacaatgcttgggtctatgccactaagttttccccagggtcttaaaatgtatatgacttcttcttccctaatccctatgatcccatccctcgtgcttaccttgtgatttatgtgtagattatatgatcacaataattgttggattagtgtacttcttaaggactaaggttcaatttaaacctcggatgtctcttgtttgtt

SEQ ID NO: 145370 - DNA, 247 bp, Glycine max
cgagaaatggcgatggcaatggcgcttcgcaggctttcatcttcaattgacaagcctctgcgccctctcttcaatgccggttccctctactacaagtcgtctttgcctgatgaagctgtttacgacaggagcgacccggagttacatggccgaagcagttgaatgctccacttgaggtcgtggatcctgagattgctgatattattgagcttgagaaagctaggcaatggaaggggctagaattgat

SEQ ID NO: 145371 - DNA, 243 bp, Glycine max
ggtggatgagcaagggcttcagttcagtccccgcaaggtcaccatttcaaccagcgggcttgttccacagcttaaacgtttcctccatgaatcaaactgtgcattagctgttagtttgaatgcactactgatgaggtaagaaactggatcatgcctataaatcgaaagtacaagctggagttgcttcttcagacacttcgagaggagctttgcttcaaaaagaactacaaagttctatttgag

SEQ ID NO: 145372 - DNA, 238 bp, Glycine max
aatggcatcaatgactagcttacgtggttcctctcaggctgtgttgtaaggtagccttggctccacacgcttgaatgcctggagtggaagcagggtggcctcagtcacacgtgcagggttccagttagagcacagcaacaacaagtgaatggtggtgaggtacaaagtagccgtagggcagtgctttcacttgttgctgctggtttgaccactggctcttttgttcaagctgtgcttg

SEQ ID NO: 145373 - DNA, 239 bp, Glycine max
ttaagatccaaattttatccattaatagatggagcgtcgatcgcagctagatctagagggaaattatgagcattacgttcatgcattacttccataccaaggttagcttggttaataatatcgcccaggtattaattacacgaccttgactatcaactacggattggttgaaattgaaaccatttaagttgaaagccatagtgctgatacctaaagcggtaaaccaaatacctactaca

SEQ ID NO: 145374 - DNA, 235 bp, Glycine max
aagatatggttgaggaatggtttgattgtgttgatgaggaggattcctttgaggaagtttctttaagtgcagcacttaatggtgttgagggtttggactatatggaaagaattcctcttccacatctgagggttttcctcatgtgctttcacgcaaaaatggtgccaaaggcaaaagaagatttgtttctggggatggtgaagagatgacattgattccgggaaccagtgttgaa

SEQ ID NO: 145375 - DNA, 233 bp, Glycine max
caagataagtgtctaaccttagtaacattgccacatattgtgttcattttggaattgtgccactaaaattctattcaattcatctatggctgcctcttcttatgctatgcaatcaatcctggaaaccctttgatccgcatttccagcgggtctagggtgaaccaatttggcgttcctgctttgcacatgagaaggaatgttggcctgagagttaggtccatggctaaggaaga

SEQ ID NO: 145376 - DNA, 240 bp, Glycine max
gacatccaagactatctccaactcttcttcctctggttactctccatcatcgccgttagagccatactcaccaaactccgccacaagcctcgccgtccaccgggcccacggtccctccccatcatcggccacctccatctcatctccgccctgcctcaccagtctttccacgcgctctccacgctctacggccccgccgtgcgcgtcttcctcggctccgtccccgccgtggtcgtttcg

SEQ ID NO: 145377 - DNA, 239 bp, Glycine max
cacgtacttccaatgtgagactcgagttacgtaccttacaaatgaatcctaacatcccaccacactccacagctccaatgtgcacgtgggttggctctgcactaaccctttgattagtcttggactcgtagacgaatactgcaatatctgcttcaccacctgcaccactcatttgtagctgagaatcatgtaggaaatctctgataccaattaataagaaccttgggagaaccacatca

SEQ ID NO: 145378 - DNA, 239 bp, Glycine max
aaccgacacaggtgggtaggtagagaatacctagaggcgcgagacaactctctctaaggaactcggcaaaatagccccgtaacttcgggagaaggggtgcctcctcatctataaaaatggaaatattttgaaaaaaaaaaacgttttttttttttcaaaatatttccatttttatagatgaggcgttatttgatttcgaaatccgattattatattcctaacccgaagtgctccttggt

SEQ ID NO: 145379 - DNA, 240 bp, Glycine max
tatagctccgtccaaacatgactctccgcaaccaccaagagctgttggttgctcttgcaattctatattttcttgccacctcactcccttcagtttcagctcatggcccatatgcatgggatggggaggccacatataaattcactacttaccaccctggccaaaactacaaaggtttatccaatgtcaaaaactacttccaccatctcggctacatccccaatgcaccacacttcgacg

SEQ ID NO: 145380 - DNA, 237 bp, Glycine max
cttaatttctatagagctgaagaaattaatattaatcaatcaatcaaaatggggttgtgcaaggtttcatttcctgtattatgtgcgttggggttggtcatgattgtgagtcacgttgccaatgctctggactcaccagcagattacgtcaatgcacacaacgctgcaagatcagaggtgggtgttcaaaacttggcttgggatgacacggttgctgcttttgcacagaactatgct

SEQ ID NO: 145381 - DNA, 232 bp, Glycine max
gcaaaaatgattaatgaggataagatacatatccttgtcaacctaaatggttatacaaagggtgccagaactgagatatttgctatgcaacctgcacccattcaagtttcatatatgggattccctggaacaactggggctacttacatagactacttagtcactgatgagtttgtttcaccactacggtatgcaaatatatattcagagaagattgtacatctaccgcatt

SEQ ID NO: 145382 - DNA, 233 bp, Glycine max
aagcggctcgagcggctcgagtgcaattgaagttgaagtcttgcccttctctcttcaactccaaacacaatacaatagaaaccatggctgcctccgtctccactgtcggagctgtcgacagagctctgttgaacctgaatgggtctggacctagggtttcagctcccagtacatccttctttgggagcagcttgaagaaggttattggctcaagggtccccaacacaaagatt

SEQ ID NO: 145383 - DNA, 238 bp, Glycine max
gttaggagatatcattccggctgacgctcgtcttcttgagggtgatcctttgagtgttgatcagtctgctttgactggagaatctcttcccgtaacaaagagcccttcggatgaagtgttttcgggatcaacagttaagaagggtgagatagaagcagttgtgattgctactggggtgcacaccttttttggcaaagcagctcatctggtggacagcaccaaccaagttggacacttc

SEQ ID NO: 145384 - DNA, 240 bp, Glycine max
ctcgagccgaaaaaaaaaatctcaaaataaaacaaccaaaccacacacttcacacccccttcaacatcctcagcaagtacaagaacaagaagaaacaatgtcttgctccaatctcacaatgttggtgtcctcaaaaccttccctttccgatccctccaatctctccttccgctctgtcctcaacccttttcagctcccttcacaaaacccaacttcatgcactccttcacgctcctcaac

SEQ ID NO: 145385 - DNA, 238 bp, Glycine max
aatttcttagataactagatattaataaattaatttaattaaagttaacatatttaattaatttaaaattaaattttagtaaacaaaaatcttaaaagataagttataagataaaatataaaaaaattaaaactcaatactggtatgaataaaaatattcaacagttaagtttgtaaaaatttaagtgaaaaaaatttaaataaaatttattttaaaaatagattataaataaacaca

SEQ ID NO: 145386 - DNA, 236 bp, Glycine max
tcaagccctaatttcccctcatttccatggccacagaagagtacactgtcgcggtggaacccgctcccgaacctgcctccgccgatcctcccccggaggagaaggaggagaccaaacctgaagccatggctaagaaaaccaaggagcccaaacctaaaaaggtttccagacctcgcaaccctcccactcatccttcctacgaagagatggttaaagatgcaattacctcgctgaag

SEQ ID NO: 145387 - DNA, 233 bp, Glycine max
gaccaacaatgacattacctccattgctagcaacggtggaagagtacaatgcatgcaggtgtgtccaccaattggcaagaagaagttcgagactctttcctacttgccagacctcgatgatgcccaattggcaaaggaagtcgaataccttctaaggaaaggatggattccttgcttggaattcgagctggagcacggtttcgtgtaccgtgagcacaacaggtcacctggat

SEQ ID NO: 145388 - DNA, 233 bp, Glycine max
ttccggaatccttaacggctagacttctaaacgtggaagtgttggacgtgcgttccaaccagctaaactcccatcccaattccattggctgcctctctaagctcaaggttttgaatgtctcaggcaacttcatcgaatccctccccaaaaccattgagatttgcagagccttagaagagctgaatgcaaacttcaacaagctgagctagctgccagacacaatagggtttgag

SEQ ID NO: 145389 - DNA, 241 bp, Glycine max
ggaaattgtttgatatggtcaggtaaaaaggcaaaagcttgagatccgtttaaacagatccagttttgatccagaagaatttgctttgtacagaagatatcagctcaaagtacataatgataaaccacaaaatgtcacagagaactcatatcgtaggtttctggttgatactccattaatactagtttctcccactggtgatagcacagttcctccttgtggttgtggctctttccatcaa

SEQ ID NO: 145390 - DNA, 238 bp, Glycine max
actgcttcaccttactgctctagaaaattcagtgctgaaacatggcttcggctactctctgtgtagccaaaccagagcttcaggcaaatgggaaaggcttcactgaagtctctggcctgcgaagctcatcaggctaccttccctttactagaaaatcttcagaggatttccattctgtcattggcttccagacgtatgcagtaggaagcagttgaggatacacgaagggtgtgacaga

SEQ ID NO: 145391 - DNA, 193 bp, Glycine max
ctcgagcgaatcggctcgagaatacacaatttttacattactcaatacactacactgacacaatccccttccctcttctctttctatccaaattctccaccagccatggcagtttcttcagcaacagcttcctccaaactcatactattcgcccatgcatcatcatcctcttcccttaattccacaccctacc

SEQ ID NO: 145392 - DNA, 236 bp, Glycine max
gcggtcaggaccaaaccaaccagttcatggttctcaaccccaagttgcggcaggacctacacatcattatgggaagccccggggtccatctggtgggccaggaagatatcctcccaatgggaacccaggtggaggatacaatcacccaaatcgaggaggtcaaggtggtggtggttatggcagtggaccttatcctcctcaagggcggggggcaccttacgggtccaatagtatgc

SEQ ID NO: 145393 - DNA, 236 bp, Glycine max
ccaaaaccaggatgaaatgatcaagagtggtcggttgtctgaaccatacaagggaatcggcgattgtttcagtcgaaccatgaaggatgaaggggtgattgctctttggagaggaaacactgctaatgttatcagatacttccctactcaggctctcaactttgcttttaaggattatttcaagaggcttttcaatttcaaaaaggataaagatgggtactggaaatggtttgctg

SEQ ID NO: 145394 - DNA, 236 bp, Glycine max
atactcattaaagtccacacacgctgcgcttgtgtgcactgtgtggaaacgaaacatggcaagagtggtggcactccaacagacccaactatctttctctaccttagcttcctctctatctgacttcagtggaaccagacttcggactcaacttcagttcaagagaaagcgatgccatccaaaagggtctttctacgtctccgcatcgagcaccaagaaaatcctaataatgggag

SEQ ID NO: 145395 - DNA, 234 bp, Glycine max
aatatttaccgccccgccggagcataagaagaaggatccgtgtcacagtcactgctcatcgccatgtctcgggttgataacagaaattcctcagccaccaagcgtgctaggactgatggacaacttgtaacatgcgtaattgcactcaaccaaggccggctgatcataattacaaatctgctgccaagcctctacaagctccacagggttattcatcctcagctccttacttag

SEQ ID NO: 145396 - DNA, 242 bp, Glycine max
caggacctggcattcgctttttccagctatatgtgtacaaggacaggaatgtggttgctcagcttgtgagaagagctgaaaggcctggattcaaagccattgcccttactgttgataccccaagactaggacgcagagaagctgatatcaagaacagattcacactgccaccatttttgacattgaagaactttgaaggattggaccttggaaagatggacaaagctgatgactctggactt

SEQ ID NO: 145397 - DNA, 238 bp, Glycine max
cagattcaggtacattactgtgggaaatgaagtgaagcctatgggactcatttgcacagtttgtagtgcctgcaatgcaaaacatccaaagagcaatttgtaatgctggccttggaaaccaaatcaaagtttccactgccattgagtctggtgcattggcagaatcataccctccatcaagaggctcatttaggtctgattatagaacatcatatcttgatggtgtcatcagattttt

SEQ ID NO: 145398 - DNA, 233 bp, Glycine max
ctagtttcaccagagtatcttaagattcctgactacaagagtacaaccagatcaccaagctcctttttcaagagagtgcccaagtcaagtgctataaaagttattgattttggcagcactacatatgaacgagaagatcagacttacattgtgtcaactcgtcattatagggcacctgaagttatccttggacttgggtggagctatccatgtgatatatggagtgtgggctg

SEQ ID NO: 145399 - DNA, 236 bp, Glycine max
gctcgagtcaggatttagatttggtatttgaccattcacactaataatgaggctggtactcctctatgaagttctctaccacctcctgatcctggcccttgcacactgcgcttagctttggcaaattatgcagatctcttgaatcccccacgcaagctgtgcttctcgttcaggcttctttagtggctctggctgcacatacttcggaacccagtgaagcggatagattaacattc

SEQ ID NO: 145400 - DNA, 234 bp, Glycine max
gaaggggactacactcatcagatctctaacattataagcaacgcttcctgcaccacaaactgtcttgctccctttgtgaagatcctggatgaagagtttggaattgtgaagggaaccatgacaaccacacattcctacacaggagaccagaggcttttggatgcttcacaccgtgacttgagaagagccagggctgcagcactgaacattgtcccaaccagcactggagctgcc

SEQ ID NO: 145401 - DNA, 234 bp, Glycine max
gatcttaaggacattgattacaagtctggggatgtttgtggtgtgcgtgtgcagtaccctggcactgagggagaggttttggactatggagagtgtgtgaagaaggctcatgctcatgaggtgaaggttgtcatggcaagtgatttgttggcactgactgtgttgaagcctcctggggaacatggggcagatattgttgtcggctcggctcagcaggttcggggtgccaatggg

SEQ ID NO: 145402 - DNA, 231 bp, Glycine max
gtatattgcgcctattggcttgctacaatatcctctctttttctctccgcactctccctgatgccaaggttgagaggctctatggtctcgcccccgttgccaagtacttggttaagaacgaagatggtgtctccattgctgcgctcaacctcatgaaccaggacaaagtcctcatggaaagctggtactatttgagagatgcagtccttgaaggaggcattccatttaaca

SEQ ID NO: 145403 - DNA, 229 bp, Glycine max
ctttatcttttctctatagctccgtccaaacatgactctccgcaaccaccaagagctcttggttgctcttgcaattctatattttcttgccacctcactcccttcagtttcagctcatggcccatatgcatgggatggggaggccacatataaattcactacttaccaccctggccaaaactacaaaggtttatccaatgtcaaaaactacttccaccatctcggctac

SEQ ID NO: 145404 - DNA, 238 bp, Glycine max
aattattggagacagacaaacgggtaaaacagcagtagccacagatactattctcaatcaacagggacaaaatgtaatatgtgtttatgtagctattggtcaaaaagcatcttctgtggctcaagtggtgaataccttacaagaaagaggagcaatggaatacactattgtagtagctgaaacagcggattctccagctacattacaatacctcgccccttatacaggagcagctctg

SEQ ID NO: 145405 - DNA, 243 bp, Glycine max
ggcgaactgatttcgttatcagaacaagaattggtggattgtgatactggatataaccaaggatgcaatggaggacttatggactatgcatttgagttcataatcaacaatggcggcattgattctgatgaggattacccataccgtggtgttgatggtagatgcgacacatataggaaaaatgctaaagtcgtttctattgatgactacgaagatgttcctgcctatgatgagttagccttg

SEQ ID NO: 145406 - DNA, 230 bp, Glycine max
cagcactatagattttcgagggcaagattttgagttaattccatttggtgctggtcgtagaagttgcccgggcatgcttatggcaactgcctcattggatcttatacttgctaatcttctttatttatttgattgggaattgccagcagggatgaaaaaggaagacatcgatactgaagtcttgccaggacttgtccagtataagaagaatcctctttgtattttggcca

SEQ ID NO: 145407 - DNA, 230 bp, Glycine max
gtcagtgggaattccaagttggaccttcagttggaatctcagctggtgatgagatttgggcagctcgttacatcttggagaggatcactgagattgctggtgtggtggtttcctttgaccccaagccaattaagggtgattggaatggtgctggtgctcacacaaactacagcaccaagtccatgagagaagatggtggctatgaagtgatcagagcagcaattgacaag

SEQ ID NO: 145408 - DNA, 232 bp, Glycine max
cgaaatcctcggcgtttcgaagaacgcttcgccggatgatttaaagaaggcttacaagaaagccgccattaagaaccaccctgacaaaggcggtgatcctgagaagttcaaagagcttgctcaagcctatgaggttctgagtgaccctgagaagcgtgaaatttatgacacatatggagaagatgctcttaaggaaggaatgggtggtggtggcggtggccatgatccattt

SEQ ID NO: 145409 - DNA, 233 bp, Glycine max
gatgccatggagttagatctcagttcgatgaagtctgtcaggaaatttgcatcagagtttaagtcctctggtcttccattgaacatcttaataaacaatgcaggaattatggcttgccctttcagtctctctaaagacaaaattgaactacagtttgccacaaatcacataggtcattttctcttgacaaatcttttgttggacactattaaaaaaacttcacgtgaatcaaa

SEQ ID NO: 145410 - DNA, 234 bp, Glycine max
ccatccttggctggcaaggatggggaagagagagccatggaggaggctgctgccatttttaaaactctcttccccatccatggctggcaaggccgtgaagctgggcccatcagcccccgaagtcgggagggtcagcatgaggaagaccgtcaccaagcaggcctcctccggaagcccatggtacggcccagaccgcgtcaagtacttgggcccattctctggcgagcccccgtc

SEQ ID NO: 145411 - DNA, 229 bp, Glycine max
ccacagtttcggaggagaagaaaatagtcgttcgagatggcccgtacgaagcaaactggacgtaagtccacaggaggaaaggctcctaggaagcagcttgcaaccaaggctgcacgtaagtctgcaccaactactggtggtgtgaagaagccacatcgttaccgtcctggtaccgttgctcttcgtgagattaggaaataccagaagagtaccgagcttttgatcagga

SEQ ID NO: 145412 - DNA, 235 bp, Glycine max
cagcactatagattttcgagggcatgattgtgagttaatgccatttggtgctggtcgtagaagttgtccgggcatgcttatggcaactgactcattggatcttatacttgctaatcttctttatgtatttgattgggaattgccagcagggatgaaaaaggaagacatcgatactgaagtcttgccaggacttgtccagtataagaagaatcctctttgtattttggccaaatgt

SEQ ID NO: 145413 - DNA, 237 bp, Glycine max
aatggttttccacttttgactaaaaaaagaaaatattttgagaaagataaaaaaaaaactaatgaatttcaaaatttttctttggccaaaatatcgattagaagatttagcttgtataaatcgatattggtttaatacccataatggaagccgtttcagtatagtaaggatacatatgtatccgcgaatgagaattcgttaatccaaatttgtcttctatttaccatatttatatgg

SEQ ID NO: 145414 - DNA, 230 bp, Glycine max
tcaggatttagatttggtattttccattcacactaataatgaggatggtactcctctaggaagttctctgccacctccttttcctggcccttgcacactgcgctttgctttggcacattatgcagatctcttgaatcccccacgcaagctgtgcttctctttcaggcttctttagtggctctggctgcacatacttcggaacccagtgaagcagatagattaacattcct

SEQ ID NO: 145415 - DNA, 231 bp, Glycine max
gcaagcacaatggacaaaacaagatatgagaatgccattaaagtttgtgctttagataaagatattgaagactttagccatggtgatcttacagaaataggtcagcgagggattaacatgagtggaggacaaaagcaaaggattcaactagctcgtgcagtctacaatgacgctgacatctatctcctcgatgaccctttcagcgcagttgatgctcacactgctgctatt

SEQ ID NO: 145416 - DNA, 231 bp, Glycine max
attgatagttgcattgagagtttcaatttaggtgatattgacaaatacaatgatatttatttttagagttacatttttttgaagggcagaaattgtagtgaaagcgataattctagtactagtataatcactagtacgaatgatacaaatgagagtgattccactataggtgagagttaaaatagtctcgatgaaagtcaaaaatataagcatttgtggcttgaatgcgaa

SEQ ID NO: 145417 - DNA, 232 bp, Glycine max
atttcttaaaatatcctatatacgtaggtgggaacaggggaaggggtcagatttatcttgacgggagcaagagtaataataatgtgtataatgctacagcagcgggtatggtaaaaaaaatcatacgaaaagaaaaagggggatacgaaataactatagtggatgcattggatgggcgtgaagtgattgatattatacctccaggaccagaacttcttgtttcagaaggtga

SEQ ID NO: 145418 - DNA, 229 bp, Glycine max
aggaaattgaagaacaggggaacaataagaatgttggaatgaatcttgaggaagttattgaagaatgcaagctcttctactttgcagggcaggacaccacttcagttttgcttgtttggacaatgctattattgagtaggtaccctgattggcaagcacgcgcaagggaggaagtctcacaagtttttggcaaccaaaaaccgacttttgatggactgaatcaattaaa

SEQ ID NO: 145419 - DNA, 230 bp, Glycine max
aattgaagttgaagtcttgcccttctctcttcaactccaaacacaagacatcatcatccatggctgcctccgtctccactgtcggagctgtcaacagagctcttttgaacctgaatgggtctggacctggggtttcagctcccagttcatccttctttgggagcagcttgaagaaggttattggctcaagggtccccaacacaaagatttcctctggaagcttcaagatt

SEQ ID NO: 145420 - DNA, 235 bp, Glycine max
ccaaagaatgctcttgggaagcaatacaagaagatgttccaaatgaatggggtaaagctacattttacagaaaacgctctaagatcaattgccagaaaggcaatatctaaaaatactggtgctcggggattacgatcaatattagaaaatgtgttggtagatgccatgtatgagattcctgatattagaacaggcgatgatgttatagatgctgttgttgttgatgaagaggctg

SEQ ID NO: 145421 - DNA, 238 bp, Glycine max
gagggttgtctttatagatccagaacggcaaagttctgttttggaaaaactgagaagacaattggctgaagctgatgccgcagttgaagctcggaagacgcctcccgtggaggcaggtcctcgggttgctgccgaagggcttgtaattgatgaatgtaaagagagaagggagaagtacttggcccggcaacaagttcaagcagtagattcagtgtaaaacgcaatttgttcttccagc

SEQ ID NO: 145422 - DNA, 146 bp, Glycine max
aattgtttaaacctaattctcatttcttcatcgttcgattcttctcctcctaaagatgcagatcttcgtgaaaactacgaccggtatgaccatcacccttgaggtggagtcctccgacaccatcgataacgtgaaagctaagattc

SEQ ID NO: 145423 - DNA, 257 bp, Glycine max
cagccgactactctgagacaatgaaggctctggcgtggtacggcaagaacgacgtccgaatgattgacacaccgaagcccaagattctagaggatcgtgacgttatcgttaaggtcactggttccacagtctgcggttctgacctgcacttgcttcacggcgctgtcgtggagatgcaaaagggcgacattctcggacacgagttctgtggtgtcgtagacgagtgcggccccggtgtcacaaagttcaagaagggt

SEQ ID NO: 145424 - DNA, 254 bp, Glycine max
gagcacgagtacaagccagagcttgacattatttccaatgctagctgcacaaccaactgccttgccccgctcgtcaaggttatcaatgacaggtttggcattgttgagggtttgatgaccactgttcattccatcactgctacccagaagactgttgatgggccatcagccaaagactggagaggtggaagagctgcttcatttaacatcattcctagcagcactggagctgccaaggctgttggaaaagtcct

SEQ ID NO: 145425 - DNA, 260 bp, Glycine max
ggagctcttctccattggttcttcatctgcatgcacacacttgcatagttttggaaaccaagaatttttgaagggtagcatcaacaagaagttctggaaatggagatcaccaatgtcagcgagtatgaagctattgcaaagcagaagttgccaaagatggtgtttgactactacgcatctggtgcagaggaccagtggactctgcaggagaacagaaatgccttttccagaattttgtttcggccacgtattcttattga

SEQ ID NO: 145426 - DNA, 254 bp, Glycine max
gtctgggtggatgactgatgaggaatttgctagagaggtgattgccggtgtaaacccaaatgtgatccgtcgtcttcaagaattcccaccaaagagcacacttgatcccacactctatggtgactaaaccagtaccataacaaaagaacaattggagattaacatgggaggggtctagtagaagaggcacttagtactcagagattattcatattagattaccaagatgcattcatcccatatttgacgaggat

SEQ ID NO: 145427 - DNA, 262 bp, Glycine max
tccgtatatcatgaacacaataatagacaaccccttttaaattaaatcaactttaggacaaaacttgacccttaaaaacagatagtaactccaactccaagtcacattggtgacaaagttagaaacaaggagaaagaaagaagatggcaggaaagaaaatcccagatgtgttgctgaattcaggacacaaaatgccagttataggcatgggaacttcagtggagaatcgtccatcaaatgagacccttgcttctatctatgt

SEQ ID NO: 145428 - DNA, 263 bp, Glycine max
cggctcgagcaacacacgaccgcttcaacaactactccatcatcatccatccacaacaccacatcacacacaagcaaccacacaccactgccaacatgcagatctttgtcaagaccctgacgggcaagaccattaccctcgaggttgagtcctcggacacgatcgacaacgtgaagagcaagatccaggacaaggagggcatccctccggaccagcagcgcctcatcttcgcaggcaagcagctggaggatggtcgcactctc

SEQ ID NO: 145429 - DNA, 254 bp, Glycine max
gaagagcatcactgaactaacaaagcaaccctatgtcgaaggtggtttgtgtcaccggagccagcggcgccatcggatcatgggtggtcctactcctcctccagcgtggttacaccgtccatgccaccgtccaagatatcaaggatgaaaatgagacgaaacatttggaggaaatggaaggagcaaagagtcatctccatttttttgaaatggatcttcttgacatcgactccattgccgctgccataaagggt

SEQ ID NO: 145430 - DNA, 254 bp, Glycine max
aagagtccaagaaacaggatgaaggtgtggttgtgaacaagttcaaacccaagaccccttacgttgacagatgcctgctcaacacaaagatcactggggatgatgctccaggagaaactcggcacatggtcttcagcaccgagggagagattccttacagagaaggacaatcaattggggtaattcctgatggtgttgacaagaatggcaaacctcataaactgagattgtattctattgctagcagtgccatt

SEQ ID NO: 145431 - DNA, 255 bp, Glycine max
ccatccttggctggcaaggatggggaagagagagccatggaggaggctgctgccatttttaaaactctcttccccatcctacggctggcaaggccgtgaagctgggcccatcagcccccgaagtcgggagggtcagcatgaggaagaccgtcaccaagcaggcctcctccggaagcccatggtacggcccagaccgcgtcaagtacttgggcccattctctggcgagcccccgtcctacctcactggcgagttcc

SEQ ID NO: 145432 - DNA, 257 bp, Glycine max
ctcatgttgaagagtctaccttgaatgatctcaagaccaaaattctagctcgtgatccttcaagttctggagatattcaaaaggcggttcaaaaatctcttttgtggttgagggatgaggttcgaaaccttccttgtacatacaaatgtcggcatgatgctgctgctgacttaattcatatttatgcttataccaagtacttctttagaatacaggattatcaaactattacttcgccacctgtctatattagtcca

SEQ ID NO: 145433 - DNA, 258 bp, Glycine max
ctcttccagaagcagctgccgaagatgcctcgggagtatatcacccgcttggtgctcgacaagaaccacatcagcatggcaatcgtcaagaaggggtggcgcgtggtgggcgggatttgttatcggccgttcgagtcgaggggctttgcggagattgtcttttgcgctgtcgatagctcggagcagatcaagggatacggttcgcatctgatgaactcgctgaaagaccacgtcaggaaggctcatcccacgataaat

SEQ ID NO: 145434 - DNA, 257 bp, Glycine max
ttcacattttagaagaataccccctcttttgctgcatcagaggagttgtaaattaagagcatggctgcacaagctcttgtatcatcatcttctcttaccttctcagcggaggctgcaagacaaagtcttggaccaagatcactccaatctccatttggcttctccagaaaagcctcctttcttgttaaggcagctgctaccccccctgtcaagcaaggatcagacagacctttgtggtttgcatcaaagcaaagtct

SEQ ID NO: 145435 - DNA, 172 bp, Glycine max
accagcccttaggcaaatgggaaaggcttctctgaattctctggcctccgcagctcatcaggcttccttccctttctagaaaatcttcagaggatttccattgctgtcgattgccgttccagaacctatggcagttgtcaagcagtggaggatacaagaagggtgtgacaga

SEQ ID NO: 145436 - DNA, 251 bp, Glycine max
tgagtcttgcaattgaagttgaagtcttgcccttctctcttcaactccaaacacaagacatcatcatccatggctgcctccgtctccactgtcggagctgtcaacagagctcttttgaacctgaatgggtctggacctggggtttcagctcccagttcatccttctttgggagcagcttgaagaaggttattggctcaagggtccccaacacaaagatttcctctggaagcttcaagattattgctgtaga

SEQ ID NO: 145437 - DNA, 250 bp, Glycine max
ttcgttttctctctctctcactctttcgaggtaatttgcaatggctgaaccttccaaggtcattcacgttcgaaatgtggggcatgagatatctgaaaatgatttgcttcaactatttcagccttttggagtaataacaaagcttgtgatgttgcgtgccaaaaatcaggctcttcttcaaatgcaagatattccttctgcagttaatgctttacaattttatgcaaatgtccagccaagcataaggggg

SEQ ID NO: 145438 - DNA, 252 bp, Glycine max
cttaggacttcaccacaatggcttggtcctctaattgaagtgattagattctctaccaagtcaattgagagggatattaactcagtcaatgacaaccctttgattgatgtgtcaaggaacaaggcacttcatggtggtaacttccaaggaactcctattggagtctccatggataatacacgtttggctcttgcttcaattggtaaactcatgtttgctcaattctctgagcttgtcaatgattattacaac

SEQ ID NO: 145439 - DNA, 252 bp, Glycine max
gaggtatattaccagcatcatatcattagaagtgtaattgcactccacaacttgattaacaacaagatgcttaacaaggaacatgagcgggcagaagattcgaaatcagttacggtgccaggtgcagctgcttaagttttgaggggttgtgatgttcggagctctaaatgtcatttgagtacatggatttgagattgttacaccttttcctatttctgctagggttagagtacttacacctaacatggcata

SEQ ID NO: 145440 - DNA, 251 bp, Glycine max
gtgattagtcgcggtatttaaaataaaaaatgaaagtagacaaataaaaaaggaaaggagatgtttgaataaaaataattccccttcaagttcttattttttgagaggacaggacaatatgaatgttttattatgctctatcaacacattaaaaagattctatgatatatctgctgtggaagtaggtcaacatttctattggcaaatagggagtttccaagtacatgcccaagtacttattacttcttggg

SEQ ID NO: 145441 - DNA, 245 bp, Glycine max
gagaacttctgctgggccaaagtgaaaggcaagtcgagtatgaccgtgctggtagaattattaagggccatgaagtagctctccccaggagcaagtatgaagaagatgtttacattaacaaccacacgactgtttgggcctcatggtggaaggatcatcaatgtggctataaatgctgcaagctgacaatacgcaatagctattgcactggtgctgctggtattgatgcggcagaggctgcaagc

SEQ ID NO: 145442 - DNA, 248 bp, Glycine max
ctttgccaagatgggaatcaaccccatcatgatgagtgctggagcgttggaaagtggaaatgcaggagagccagcaaaactgatcaggcagagataccgtgaagctgcagacatgatcaagaagggaaagatgtgcgctctcttcatcaacgatcttgatgcaggagctggtcgtcttggtggaaccacacaatacactgtgaacaaccagatggtgaatgccactctcatgaacattgctgataacc

SEQ ID NO: 145443 - DNA, 248 bp, Glycine max
gtatagcattggcctgtgctatgaatagttcttttagggggcgtgccagttctgatatttacaccatctgctctcaagactgtgaattatggaatcctgcttgcacaaaagcaatgactatgtcatttaatccaaacccgtgttctgatgcatggagtttggaatttctgaagcgtaccggatttcattgtgatatcatttgtgtcactggatggactgccactccaatgcaggatgttcaggttaca

SEQ ID NO: 145444 - DNA, 253 bp, Glycine max
ctccatctacaatcatacatacctttattctaagttctgatggctctgcgatcattctcttacgatgtgttcctcagcttccgaggggaagatactcgttatggtttcactggctatctctacaatgtccttcgggaaaggggaattcacaccttcattgatgacgacgagccccaggaaggggacgaaatcacgacagcacttgaggcggctattgagaagtccaagattttcatcatcgtgctctctgaaa

SEQ ID NO: 145445 - DNA, 238 bp, Glycine max
gacgtagtggtgatggaggtgccgaagctgggaaaacaagccgcaacgaaagcgattaaggagtggggtcaaccaaagtcaaagatcacacaccttgtgttctgcaccacttcaggcgtggacatgcccggagcagattaccagctcacgaagcttctcggcctgaggccctccgtgaagcgcctcatgatgtatcagcagggctgcttcgccggcggcaccgtactccgcctcgcga

SEQ ID NO: 145446 - DNA, 244 bp, Glycine max
gggttaagcggtgagatttgcgaatctgagaaatggcggattcttctcgggaggagaacgtttacatggcgaaattggcggacaggccgagcgttacgaggagatggttgagttcatggagaaggttgcaaagactgtggaggttgaggagttgacggtggaggagaggaatctcctctctgtggcttacaagaacgtgattggtgcgaggagggcttcgtggaggatcatatcctccattgag

SEQ ID NO: 145447 - DNA, 242 bp, Glycine max
tcaacaccaaaaatatctgttgctctctactctgcttagggttccaacttccaacccaacacttatctttctcatgcaacaagggaaaatgaggcctattttctgtggaaattttgaatatgatgcccggcagtcagagctggagcggctttttagacgatatgggaaggttcatagggtggatatgaagtctggttttgcttttatctatatggaagacgagagagatgctgaggctgcta

SEQ ID NO: 145448 - DNA, 248 bp, Glycine max
aaaaaaaaatctgggacgtatcgcccaaataattggtccggtactagatgtagcttttcccccaggtaagatgcctaatatttacaacgctctgatagttaagggtcgagatactgttggtcaacaaattaatgtgacttgtgaagtacagcaattattaggaaataatcgaattagagctgtagctatgagtgcgacagaaggtctaatgagaggaatggaagtgattgacacaggagctgccctaa

SEQ ID NO: 145449 - DNA, 250 bp, Glycine max
gcctgcgaccccagttacaccaccaccagcagaacccaaaccacagccagtctctactccttcaccaaaggtgagcaccaagttttctgatgtgttggcgttcagtgggccagcacctgagaggatcaatggaaggttggccatgattgggtttgtgggtgcaatggcagtggaagtagccaaagggcaaggtgtgtttgaacaaatatccaatggtggtatcccatggttcttgggaacaagtgtggtc

SEQ ID NO: 145450 - DNA, 256 bp, Glycine max
ggaattcagctcgagtatgattcggcttgacatgagtgaattcatggaaaggcacactgtctccaaacttattggttcacctcctggatatgttggttacactgaaggtggtcaattgaccgaggcagttcggcgtcgtccttacactgttgtactgtttgatgagattgagaaagcccatcctgatgtgttcaacatgatgcttcagatcctggaagatggaagactaacagacagtaagggcagaacagtggat

SEQ ID NO: 145451 - DNA, 240 bp, Glycine max
gccggtgaaggcccaattcgagggtgctgaaatgggtgttgcagctgagaacggtggctgcaactgtggatcaaactgcacttgcgacccatgcagctgcaagtgagatcaacatgcataaccttcaagcagagatagctgtaatacatgtatcaataaataataagtatgtgttgtgtttgaagttttagaataaagtggtcatggcccgcctttgcaaattcaaatgttctaggattt

SEQ ID NO: 145452 - DNA, 242 bp, Glycine max
ctcgagccgaatcggctcgaggtcgccttctgcagaatgtgtttactcgtaaagtcaagaacctgaaagcccctaagtttgatcttgggaaactgatggaggttcatggagattactcagaggatgttggtgccaaggtagacagacctgctgatgaaatagtggcagaggaacccactgaaattgttggagcttgatttcatgatgcattcagtttgttctaggttttctttttcttacgt

SEQ ID NO: 145453 - DNA, 245 bp, Glycine max
aaaagagaaaattgaacttacactgaaaatgagaggacagagggcaggacaccacttcagttttgcttgtttggacaatgatattattgagtaggtaccctgattggcaagcacgcgcaagggaggaagtctcacaagtttttggcaaccaaaaaccgacttttgatggactgaatcaattaaagattgttactatgattttgtatgaggttcttagattataccctccaggagttggtgttcct

SEQ ID NO: 145454 - DNA, 241 bp, Glycine max
gaaaaacaaaagagtagtggcctttaggtggtgaagaacaagagctcaaatcaaatcgaatcgaaaaaagaaagatagatcatattcatggcgatggcaagcctggctcgacggaagggttacgccgtcgttttgtcgtcgaggtcgtcgttttgtctgacaagctggaggggattcgcgtccggatctgacgaaaacgacgtcgtcgtcatcggcggcggtcccggcggctacgtggccg

SEQ ID NO: 145455 - DNA, 246 bp, Glycine max
gtcgacgacggtggtgacgctacccttctcatccacgaaggcgtcaaggccgaggagctctatgagaagaccggcgaactccccgaccccaactccaccgacaacgccgagtttcagatcgtgcttaccatcatcagagatgggttgaagaccgatcccaccaggtaccgcaagatgaaggagcgtctcgttggggtttctgaggaaaccaccactggagttaagaggctctatcagatgcaggcg

SEQ ID NO: 145456 - DNA, 243 bp, Glycine max
aagcaatttggcattttaaaggctggggcagttgggttggtatttcaagcgttacttctcagcatggctgttgctgtatattggagtggaacaatttctcatcagagccctcttcttactttcctatttctgattattctgtcacggttaggacacatgtcatatgatgttgtaggggctcagattctccagacaggaatcccatcatccaaagcaaatctcattgggacgacagagattgct

SEQ ID NO: 145457 - DNA, 246 bp, Glycine max
aagaaaagaaaatcctcaattttctgagcagccaaacactctctctctgtctctcgaaaattctcagtttgcagagaaaatctgaatcatgtcgtggcaagcgtatgtcgacgatcaccttctgtgtgacatcgaaggtaaccacctcactcacgctgctatcatcggccaagacggcagcgtttgggctcagagtaccgacttccctcagttcaaacctgaggagataactgccatcatgaatga

SEQ ID NO: 145458 - DNA, 241 bp, Glycine max
ggtggacctaaaatcatggcaactaatggagtcgttcatcttacagtttccgatgatcttgaaggtgtttcttctattttgaagtggcttagctacattccttctcatgttggcggtgcacttcccattgtaaagccacttgatcctccagaaagaccagtggagtatttcccagaaaactcgtgtgatcctcgtgctgccatttctggaaccttggatggtaatggaagatggctgggag

SEQ ID NO: 145459 - DNA, 260 bp, Glycine max
gtgcggtaggctcttccgagacccgaagcagccatggggatcgatctcaaggccggaggtaagagcaaaaagaccaaaagaacagcacccaagtccaatgatatctatctcaagctcttggtcaagctttatcgcttccttgttcggagaactggcagcaacttcaatgctgttatacttaagagattgttcatgagcaaggttaacaaacccccattgtctttgtcaaggttgattaagtatacgaaggggaaggtttg

SEQ ID NO: 145460 - DNA, 262 bp, Glycine max
taaagattcaacaatggcctctgcttctgctactcttctcaagtcatctcctgttcttgacaagtgcgagtgggtcaaaggccagacccttcgccaacctctcgtgagatgtaacccttcctcagcatcagctctcaccatcaaagctgcttcctatgctgacgagctcgtcaaaaccgccaaaacagtggcctcaccggggcgtggtattttggcgatggatgagtcaaatgcaacctgcgggaagcgtttggcatctatt

SEQ ID NO: 145461 - DNA, 263 bp, Glycine max
cagagatgtttgtagcagtggaagggtagtttccatcagagctcaagtcaccactgaggctccagccaaggttgaaaaagagtccaagaaacaggatgaaggtgtggttgtgaacaagttcaaacccaagaccccttacgttggtagatgcctgctcaacacaaagatcactggggatgatgctccaggagaaacttggcacatggtcttcagcaccgagggagagattccttacagagaaggacaatcaattggggtaattc

SEQ ID NO: 145462 - DNA, 258 bp, Glycine max
gtgtggtgcaacgcagtcctttttctatttgtatgtttgtatgagactgagaaagatagagagatagtgtgtgcagaagatgtggctattcggcagaaaaggggcttctgggttttcatcatcatccactgcagagcaagtcactgaaggaattgatggaactggtttcactgccattgtcacaggggcatccagtggtattggcactgagactacgcgtgttcttgctttgcgtggtgtccatgtgattatgggtgt

SEQ ID NO: 145463 - DNA, 258 bp, Glycine max
cacgagtgagattggaggaacaccactgaacttaagcgcgtgttcttccattcaggcaagtccacaatcctcgtcatacccgagtcctgtaccatcctaccatgctagcccaacctcttcctcgttcccaagccccacgcgcattgacggaaaccacccttcttcctttctcatcccattcatccgcaacataacttccatccccgccaacctccctcctctcaggatatccaacagcgcccccgtcaccccacctct

SEQ ID NO: 145464 - DNA, 257 bp, Glycine max
ctctctctcaccaaagccttcctagaacgaaaaaaaaaagaagagcaattttccctcgccaaagaagaagaagcaaacaatggccgatcaacttaccgatgaacagatctccgagttcaaggaagccttcagcttgttcgacaaggacggcgatggttgcatcacaaccaaggagcttggaactgttatgcgttcattggggcaaaacccaactgaggcagagctccaggacatgatcaatgaagtggatgctgatg

SEQ ID NO: 145465 - DNA, 259 bp, Glycine max
tttgcaactatcaaccatcttcacttccaggcttattatttggctctgcccttcccaattgagaaggcccccactaagagaattgcaagtgtaaatggtggggtgaagatatctgaactgttgaagtatccggttagaggctttgtctttgagggcggcgaaatgctggaagatctatcaaacgttgtttcagatgcatgtatatgtcttcagaacaacaacatacctttcaatgttcttatctctgactgtggaaagc

SEQ ID NO: 145466 - DNA, 259 bp, Glycine max
ctagcctctcgctcagctgcatactacgagcaaggtgcccgtttcgccaaatggcgtactgttgtgagcatccccaacggtccctctgctctggcagttaaggaagcagcctggggtctggctcgctatgctgcaattgctcaggacaatgggttggtcccaattgtggagccagagatcttgcttgatggggagcatggtattgatagaacttttgaagtagcccaaaaggtctgggcagaggttttcttctaccttg

SEQ ID NO: 145467 - DNA, 240 bp, Glycine max
ctgatccagcagcgggttccgtgttttcccctacgcacaaatcagctgttctcaatcagtttcaacagctccaaagtatgttatcacctataaatactaacttgctatctcctaagaatgttgagcatcctcttttacaggcttcctttggtgtatctccttcgggtaggatgtcaccaagaagtgttgaaccaatctctccaatgagctctcgcatatcggcatttgctcagcgcgaaa

SEQ ID NO: 145468 - DNA, 262 bp, Glycine max
tcacagtgccgatgctcaacgcacggacttgatgaccatcacccgcttcgtgctgaaccaacaatccaaccaccctgagtctcgtggcgatttctcaatcttgctcagtcacattgttctcggttgcaagttcctctgctctgctgttaacaaggcgggtcttgctaagcttattggacttgcaggagagacaaatgttcagggcgaagagcaaaagaaactggatgtcctttccaatgatgtctttatcaaggctttggtc

SEQ ID NO: 145469 - DNA, 262 bp, Glycine max
tagcggtataggatttacgccatgccatttccaaggttggtgatttcgctgatgacaacaggtcaggtattgataggtctttgcatcggataagcgcgattcggaatcggaaaatgcaaatcattgggcttacttgtcgggtgggtcgagctgtgggtggcagtgctgaaattatacgtgatttggttgaggatggaggttctatcttggtcattggacctcctggagttggcaaaacaaccttaatcagagagattgctag

SEQ ID NO: 145470 - DNA, 255 bp, Glycine max
gtgtggtgcaacgcagtcctttttctatttgtatgtttgtatgagactgagaaagatagagagatagtgtgtgcagaagatgtggctattcggcagaaaaggggcttctgggttttcatcatcatccactgcagagcaagtcactgaaggaattgatggaactggtttcactgccattgtcacaggggcatccagtggtattggcactgagactacgcgtgttcttgctttgcgtggtgtccatgtgattatggg

SEQ ID NO: 145471 - DNA, 253 bp, Glycine max
ctgagtcttgcaattgaagttgaagtcttgcccttctctcttcaactccaaacacaagacatcatcatccatggctgcctccgtctccactgtcggagctgtcaacagagctcttttgaacctgaatgggtctggacctggggtttcagctcccagttcatccttctttgggagcagcttgaagaaggttattggctcaagggtccccaacacaaagatttcctctggaagcttcaagattgttgctgtagaa

SEQ ID NO: 145472 - DNA, 254 bp, Glycine max
gtgtgaaggagcatgctgtgattgagtcaaagcctgaccattttttggatgatctccggttaaataatccttggcctgaactcaagagatttgcagatgacattgacttgaatgtgcaagatcctgtagctcataaacacataccatatgttgtcattcttgtcaagatggctgatgagtgggccaaaagccatggaggaaggctcccatcaaccagagaagaaaaaaaggagttcaaggagcttcttaaggct

SEQ ID NO: 145473 - DNA, 255 bp, Glycine max
ggccttccttaccgtgatgagaccgatgataaagttacaattgaaagtgcggaagcaactctcaagtataatgtggcaattaagtgcgcaactattactccagatgaagctcgtgtgaaggagtttggtctgaagtcaatgtggaagagtccaaatgggacaattaggaacattttgaatggaactgtcttcagagaaccaattctttgcaaaaacattccccgccttgttcctggttggacaaaggcaatatgc

SEQ ID NO: 145474 - DNA, 255 bp, Glycine max
gtgcatcactggtttgttggttaatagaatttgttttcccttttataatctgttgactttgtttcaagcaacatggttgatagtcttccttctttcaggatctgctccactcaccgctgttcagttgctttgggtcaacttgatcatggacactcttggtgcattagccctggctactgaacctcctaacgatggacttttgaaaagacccccagttgcaaggggagcaaactttatcaccaaacctatgtggag

SEQ ID NO: 145475 - DNA, 253 bp, Glycine max
gaaaaacaaaagagtagtggcctttaggtggtgaagaacaagagctcaaatcaaatcgaatcgaaaaaagaaagagagatcatattcatggcgatggcaagcctggctcgacggaagggttacgccgtcgttttgtcgtcgaggtcgtcgttttgtctgacaagctggaggggattcgcgtccggatctgacgaaaacgacgtcgtcgtcatcggcggcggtcccggcggctacgtggccgccatcaaagccg

SEQ ID NO: 145476 - DNA, 255 bp, Glycine max
aaacattgttcctggtattaaagtcgacaagggtttggtgccccttgcaggttccaacgacgagtcatggtgccaaggtttggatggtctagcctctcgctcagctgcatactacgagcaaggtgcccgtttcgccaaatggcgtactgttgtgagcatccccaacggtccctctgctctggcagttaaggaagcagcctggggtctggctcgctatgctgcaattgctcaggacaatgggttggtcccaattgt

SEQ ID NO: 145477 - DNA, 255 bp, Glycine max
caaccatgcttctcagaacagcttcatctttctctctcctcaaagccaacgccgaccatatactccctctccccaactcttcttcttctggtattattcgctactctcagtctctggggaaaaacttggttccatgcgctaccaaggacaccaacaaccgccccttaaccggcgtcgtttttgaaccctttgaagaggtcaagaaggagctcgaccttgttcccaccgtcccacaagcttccctcgctcgccaga

SEQ ID NO: 145478 - DNA, 267 bp, Glycine max
gagccaatgattttgatctcatgtatgaacaagttaaagctcttaaggatggaattgctgttgaaaaaccaatctacaaccatgtcaatgggctcctggatcccgctgagctcatttcaccgcccaaaatcttagtcattgaaggcttgcacccaatgtatgattctcgggtcagagatctcttggactttagcatctacctagacattagcaatgaggtcaaattcgcttggaaaattcagagagacatggcagagcgtggacaca

SEQ ID NO: 145479 - DNA, 249 bp, Glycine max
ggaggaacgcagaccgaggcgtttccagttcgaaagggaaatgtaagtgtcgttgttggtgaagggtaggtgagagaaacgaaaggggtgtgtgttgggttgaataggtatagataggatcaatgagcaacaacaacgcaggaaaggtggtgtgtgtgacgggtgcttctggtttcatagcttcatggatcgtcaaattccttctccaacgtggttacactgtcagggccaccgttcgctacccaagta

SEQ ID NO: 145480 - DNA, 253 bp, Glycine max
ccgccatattccacaagaactctccaaggatcctccttcccacgagattctttggtgggaaaaatccaagaggtttgaaatttgaaggcagggaagatggattatttcaatgcaccaggaagaaaccatctctttgttccagggccggttaacattccggaccagatcatccgggccatgaacagaaacaatgaggactaccgttctccagcaattccagctatgacaaaaactttgcttgaggatgtcaaga

SEQ ID NO: 145481 - DNA, 256 bp, Glycine max
ggactgtgaagatgttggagaaagttgaagaatttaacacggagaggatgatggaggaatttgagagggtgacaaaggatgctgagaggattcaaagggaaaccctgaagaggattttggaagataatgcttctgctgagtacttgctgaatttgggcttgaatgggaggacggatcctgagagtttcaaggcctttgttccacttgttactcatacggatttggagccttatatcaatagaataattgatggtga

SEQ ID NO: 145482 - DNA, 258 bp, Glycine max
cgccaaatggcgtactgttgtgagcatccccaacggtccctctgctctggcagtgaaggaagctgcctggggtctagctcgctatgctgcaatttcacaggagaacgggttggtcccaattgtggagccagagatcttgcttgatggtgagcatgggattgacaggacattcgaagtagcccaaaaggtgtggtcagaggtattcttctacctggctgagaacaatgtcctgttggaaggtattctcctcaagcctag

SEQ ID NO: 145483 - DNA, 247 bp, Glycine max
cgcaatcatgttttatgccccggtgctgttcaacacgttaggattcaagaacgatgcatccctgtattctgctgtgataactggggctgtgaacgtgctctccactgttgtatcgatctactcagtggacaaagtgggacgtcgcattctgttgctggaagctggtgtgcagatgttcttgtctcaagtggtgattgcaatcatactgggaataaaggtgacggaccattctgatgacctttcaaaa

SEQ ID NO: 145484 - DNA, 248 bp, Glycine max
gttgtgaaagcagagaagtgagatacactaagttatcctcataaatacactctaattaggtggcaagataagtgtctaaccttagtaacattgccacatattgtgttcattttggaattgtgccactaaaattctattcaattcatctatggctgcctcttcttatgctatgcaatcaatcctggcaaaccctttgatccgcatttccagcgggtctagggtgaaccaatttggcgttcctgctttgc

SEQ ID NO: 145485 - DNA, 248 bp, Glycine max
ggaatccatggtgaaacaagcagtgactaacaagtttacagagaccatcacaactggacaagcaactctgcgtctctttttccatgattgctttgttgagggctgtgatgcctccgtgataatctcctcgccaaatggggacacagagaaggatgccgaggaaaatatttcactgccaggagatgggtttgacactgtgatcaaggcaaagcaagcagtggaagcttcgtgccctggagtggtttcct

SEQ ID NO: 145486 - DNA, 250 bp, Glycine max
aaagattttgctcaaaaatgtgtcgacgccaccaaaattgcaggattcgcccttgccacctcagctctcgttgtttctggagcgagtgcagaaggtgttccaaagaggctaaccttcgacgaaatccagagcaagacatacttggaagtgaagggaactggaactgctaatcagtgcccaaccattgaaggtggagtggactcatttgccttcaaggcagggaaatacaaggcccagaagttgtgcctgg

SEQ ID NO: 145487 - DNA, 249 bp, Glycine max
ctcgagccgaatcggctcgagtggaatttaagcagaatagattcatttctgctgaaaagcagatggtgacagccaatccagacataaatactgttgaactttgtgatgaagatgaatttatagtgctggcttgtgatggcatatgggattgcttgtcaagccaacaattggtagattttgtacgtcaacaactgctcttggaaactaaactttctgccgtttgcgaaagagtactagatcaatgtttgg

SEQ ID NO: 145488 - DNA, 239 bp, Glycine max
gatctcttgctggttgccacactacaccgatatctccaccaaacccgtttgccttgttgtttgcgaataaatggcaactaagaggagcgtgggaacgttgaaggagggtgatttgaaggggaagagggtattcgtgagggtcgatcctgaacgtgcctttggatgacaaccttaacatcaccgatgacactagagtccgtgctgctgttcccacatcaagtacttgactggttatggtg

SEQ ID NO: 145489 - DNA, 239 bp, Glycine max
ggtctagttaccacttatgtcaactagcacatccacttctaaaagcatctggatatgggagcatagtgtttatatcctccattgcaggtctgaaagctttgccttacagttctgtgtatgcatcctctaaaggagctatgaatcaattcactaagaacatagcattggaatgggcaaaggataatattcgcgcaaatgctgtggcaccggggatgttaagactgtacttctggattcta

SEQ ID NO: 145490 - DNA, 239 bp, Glycine max
cgagcccccgtcctacctcactggcgagttcccaggtgactacggctgggacactgctgggctttcggccgacccagaaaccttcgccagaaaccgtgagctcgaagtgatccactccaggtgggccatgctcggggccttgggctgcgtcttccccgaactgttgtcccgcaacggggtcaagtttggagaagctgtgtggttcaaggccggtcccagatcttcagcgagggtgggct

SEQ ID NO: 145491 - DNA, 240 bp, Glycine max
gaaacctcggaagaacgtgctaaaatgtttaacccttctctgttcatttccatctatgcaattattactgctgtttcaattattttggtagtgataagatcctacatctttacactcttgggtctaaagacagcacaaattttcttcatacaaattcttcgttgcatcttgcgtgcgcccatgtccttctttgacactacgccatctgggagaatctaagtagggcatccactgatcaga

SEQ ID NO: 145492 - DNA, 242 bp, Glycine max
ttcacattttagaagaataccccctcttttgctgcatcagaggagttgtaaattaagagcatggctgcacaagctcttgtatcatcatcttctcttaccttctcagcggaggctgcaagacaaagtcttggaccaagatcactccaatctccatttggcttctccagaaaagcctcctttcttgttaaggcagctgctaccccccctgtcaagcaagatcagacagacctttgtggtttgca

SEQ ID NO: 145493 - DNA, 243 bp, Glycine max
ctgaaactgcacgcatcacaggatctgctcccctcacagctgttcagttgctttgggtcaacttgattatggacactctgggtgcattggctttggccactgaacctcccaatgatggacttatgctaagacccccagttggaaggacaacaaattttatcaccaaacccatgtggaggaatatttttggtcaaagtttatatcaactaattgtcctgcggtcctcacttttgatgggaagag

SEQ ID NO: 145494 - DNA, 246 bp, Glycine max
gcttactggggcatttgctcttggaataaagaaacttggaactgtggaaattcaggaccttcccttctttgacactgtgaaggttaagacttccaatgcacacgcaattgctgatgctgctctcaaaagtggaataaatttgcgagttgttgatggaaacactatcactgttgcttttgatgaaacaaccacattagaggatgttgataatcttgtcaaagttttgctggtggaaagcccgtctcc

SEQ ID NO: 145495 - DNA, 259 bp, Glycine max
tcggctcgagcgaagaagaagatggctttaggtgttcctgctcttccgttgacatacgtggctcacgttctggcagttgttgccagcgtcttggtcgtggtctgggtcgtcaatttcaggggtggcttggcttgggattctgataacaagtccctcatcttcaacattcatccagttcttattgttattggcttactagttcatgggggtgaagctattataagttacaaagttttcccctaaagaaggaagtgaagaa

SEQ ID NO: 145496 - DNA, 241 bp, Glycine max
ctccatctcgtgtggctgttctaataaaatctctgaatgtatccagaatcaaactctatgatgctgatccaaatgttctatctgcattctccaattcagatgtggaattcatcataggactagggaacgagtatctgcagagcatgagagacccttctaaggctcagagctgggttcaaaagcatgttcagccttacatttcacaaaccagaatcacttgcatcactgtaggaaatgaggt

SEQ ID NO: 145497 - DNA, 237 bp, Glycine max
gcagaaagcaagctcatcctagagtttgaaaaatggcagcagcctcctccatggctctctcttccccatccttggctggcaaggccgtgaagctgggcccatcagcccccgaagtcgggagggtcagcatgaggaagaccgtcaccaagcaggcctcctccggaagcccatggtacggcccagaccgcgtcaagtacttgggcccattctctggcgacccccgtgctacctcactgg

SEQ ID NO: 145498 - DNA, 241 bp, Glycine max
caaacacaaattttatgtgattagtcgcggtatttaaaataaaaaatgaaagtagacaaataaaaaaggaaaggagatgtttgaataaaaataattccccttcaagttcttattttttgagaggacaggacaatatgaatgttttattatgctctatcaacacattaaaaagattatatgatatatctgctgtggaagtaggtcaacatttctcatggcaaatagggagtttccaagtaca

SEQ ID NO: 145499 - DNA, 240 bp, Glycine max
tgtgagtgcatggtcaccactaggagcttacaaaagtgctcaaggtacaaatgcagttatggagagcccaatccttaaggaaattgcttgtgaacgacagaagagcatggctcagattgcactaagatggatatatgagcaaggggcaattgcaattgtgaaaagcttcaacaaggagaggatgaaacaaaaccttgacatatttgactgggaatgagccaagaggaatcacagaaattc

SEQ ID NO: 145500 - DNA, 242 bp, Glycine max
cgatcaacttgctttgttatcgaacatttctttttgatttcaaaaattttccggaaaaaatttgaatctatttttatatgcgaatcaatcctactacttctggtcctgaggtttctgcgcttgaaaaaaaaaatctgggacgtatcgcccaaataatcggtccggtactagatgtagcttttcccccaggtccgatgcctaatatttacaacgctctgatagttaagggtcgagatactgtt

SEQ ID NO: 145501 - DNA, 242 bp, Glycine max
tgaattctatcatgtttcctgtcatggataaaattatcaaagctttgtgtgatatggctaaagataatgcacatgttcctatgctttcccgcactcatggacagccagcttcaccaactactttgggaaaggaaatggcgatctttgctgcaagattaagcagagaaaggaaggatctgtctcaggttgagatagtggggaaatttgctggtgcggtggaaattacaatgcacatattgttg

SEQ ID NO: 145502 - DNA, 252 bp, Glycine max
tcggctcgagttcgaatatattccattctctctgtgtatttccctacctctcccttcatggttagtcgatttcttctgtctttgctcttcgctctttccatgaattgtgtatgttctttgatcaatacgatgttgatttgattgtgttttgtttggtctcatcgatcttcaattttcataatcagattcagcttttattatctttacaacaacgtcctccatttgatattctgtaatcgtagatttgctcta

SEQ ID NO: 145503 - DNA, 240 bp, Glycine max
cagaaaaacaagtagttgagaactaagaagaaggaaatggcttcctcaatgatctcctccccagctgttaccaccgtcaaccgtgccggtgccggcatggttgctccattcaccggcctcaaatccatggctggcttccccacgaggaagaccaacaatgacattacctccattgctagcaacggtggaagagtacaatgcatgcaggtgtggcaccaattggcaagaagaagctcgaga

SEQ ID NO: 145504 - DNA, 237 bp, Glycine max
ggagaccaagaccaagtccactggcaagaccctcctcgaggccatcgatgccatcgacccacctcagcgaccaactgagaagcctctccgtctcccactccaggacgtgtacaagattggtggtattggcacggtcccagtcggtcgtgtcgagaccggtatcattaaggccggtatggtcgtcaccttcgccccagctggtgtcaccaccaagtcaagtccgtcgagatgcaccac

SEQ ID NO: 145505 - DNA, 233 bp, Glycine max
gcttcggctactctctctgtagccaaaccagcccttcaggcaaatgggcaaggcttctctgaattctctggcctccgcagctcatcaggcttccttcccttttcacgaaaatcttcagaggatttccattctgtcattgccttcccgacctatgcagttgtaagcagtggaggatacaagaagggtgtgacagaacaaaacctgaaggttccataaacggatttggaaggatt

SEQ ID NO: 145506 - DNA, 238 bp, Glycine max
cagaaaaacaagtagttgagaactaagaagacggaaatggcttcctcaatgatctcctccccagctgttaccaccgtcaaccgtgccggtgccggcatggttgctccattcaccgacctcaaatccatggctggcttccccacgaggaagactcaacaatgacattacctccattgctagcaacggtggaagagtacaatgcatgcaggtgtggccaccaattggcaagaagaagttc

SEQ ID NO: 145507 - DNA, 237 bp, Glycine max
gcacaattgaatctggaaactggaattcccctttatgaagcggagctcttcttctgtttttcatcctcttcaccctgctaggagccattggaggtttaggtgaccgtggaaaatttgttgatgacgaacctactactggaggtgttattcctccaggcaaaggcttcagggaagctcttggtcttggtccaggtcctttatttggattcacaaagcaaacgagctatttgtgggaag

SEQ ID NO: 145508 - DNA, 241 bp, Glycine max
cgtgcgtgcgattcttctgatattccaaggcgacgcaccgacaccggacccatctccggcgacatctcaccgatctccggcgaatccccggtccccactttcttccctcgaaatgaatcccgagtatgattatctgttcaagctccttcttattggagactctggtgttggtaaatcatgccttcttctgagatttgctgatgattcgtacatcgagagctacataagcaccattggagtt

SEQ ID NO: 145509 - DNA, 241 bp, Glycine max
caagagctgatctttctgctattgaaacccaggttcggaatttggttgagggcttgaagagctctgatgttgatactcagagagaggcaacagcagaactccgccttcttgctaagcacaatatggataatcgaattgcgattgcaaactgtggagccattaatgtattagttgatttacttcaatcaactgatacaacaatccaagaaaatgctgttactgcacttctaaacttatcaat

SEQ ID NO: 145510 - DNA, 226 bp, Glycine max
gacaagcagctcaagaaaaatctgcaaagaataaaacaagaggaggaaatgcaacttacttgttgatataaacttcagacagagcgagttgttgtaaagctagccttgttgcagccatggccacccacgcggctctagcttctacaaggatccccactaacaccaagttcccatccaaggcttcacactctttcccaaccaatgcgcctcagagagacttgaggtg

SEQ ID NO: 145511 - DNA, 236 bp, Glycine max
cagaattctctaaaagagatctttttctgctctttgaagaaagaagggtctttgcttgattttggagatgtctctgctctcagatctcatcaaccttaacctctccgataccaccgagaaggtgatcgcagagtacatatggatcggtggatcaggaatggacctgaggagcaaagcaaggactctcccaggaccagttagcgaccctgagagcttcccaagtggaactatgatgg

SEQ ID NO: 145512 - DNA, 240 bp, Glycine max
cttgggaggagttcaaaagacacagactaggcgctgcccaaaattgctctgccactcttaacggcaaccacaagctcactgatgctgttcttcctcccacgaaagactggaggaaagaaggaatagtgagtgatgttaaagatcaaggcagctgcggatcatgctggacattcagcacaactggggctttagaagcagcctatgcacaagcattgggaagagtatctctctttctgagca

SEQ ID NO: 145513 - DNA, 228 bp, Glycine max
  unsure (1)..(228): unsure at all n locations
aacacaatccccttccctcttctctttctatccaaattctccaccagccatggcagtttcttcagcaacagcttcctccaaactcatactattcgcccatgaatcatcatcctcttcccttaattccacacacttcaggtaataggancagcaacacgcacaaactaacccctctctgctcctccttcctccagcccaccaccgtgctcgccgcaccccttcttcaca

SEQ ID NO: 145514 - DNA, 233 bp, Glycine max
tttggccactggctcttttgttcaagctgtgcttgctgatgccaaatctatcaaagttggaccacctcccccaccttctggtggattgcctggaacgttgaactcagatgaagcaagagaccttcagctgccattgaaagataggttcttccttcaaccattgtctcctactgaggctgcacaaagggcaaaggaatcagccaaggagttgttggtgttaagaagttgattga

SEQ ID NO: 145515 - DNA, 241 bp, Glycine max
gaaagattttatccaattgaaattttagaaatgactgggataaacttaagaattcaattattgaaattgaataagtaaacaatttaattggattggtcgaatggtatcaaaaaaatggagtactaactcccatttcttatttattattgaattaaccgatcaacttgctttgttatcgaacatttctttttgatttcaaaaattttccggaaaaaattgaatctatttttatatgcgaatc

SEQ ID NO: 145516 - DNA, 238 bp, Glycine max
gttggatcttaaaatttctcaacttaatattgcttttcccaaaaacacagttggaggaaccattctgcgtagtgatctattggcaaattttttgacagagggcaattttagagcaagtgttgatttgcagcgcactcatcgtattaaaggaatgattaaaatggtggccacagttggtattcctgagaatacaggtatagcattggcctgtgtatgaatagttcttttagggggcgtg

SEQ ID NO: 145517 - DNA, 236 bp, Glycine max
ttggcatcgcttctcctctctcccaagaaagaatcatcaatggcgattgaacacgaagacgatctcaaagacgagaagaaccctcgacctctcgacgaggatgacatcgccctactcaagacctacggtttgggactttactccacaagcataaaaaaggcggagaaggaaatcaaagatatggccaagaaagtgaatgacttatgtggtataaaggagtctgatactggtttagc

SEQ ID NO: 145518 - DNA, 231 bp, Glycine max
gtttctgtctctgtgtttgcggctgaggattccgaacgagcgaccttcttcgtttctcgcaaagtttaagtcatcatgggtaaggaaaagactcacatcaacattgtcgtcattggacatgtcgactctgggaagtcaactaccactggtcatttgatctacaagcttggaggtattgacaagcgtgtgattgagaggttcgagaggaggctgctgagatgaacaagaggt

SEQ ID NO: 145519 - DNA, 231 bp, Glycine max
gaaggagctcaatggactgggatagtaacaaccattgcaatagaaatgcttaaatcaggcatggtggaggctgtcatttgtgtacaaagtgatcctgatgatagatttgctccaagacctgttttagcaaggacaccagaagaggtgttggctgctaaaggtgtcaagccaacattgtcacctaacctcaatactctcgcacttgttgaggctgcaggtgtcaagcgcctt

SEQ ID NO: 145520 - DNA, 218 bp, Glycine max
ggctcgaggcctattggaggcaacattatggctcatgccacaactacgagtgtagctctcaggaaagggacaggggaagagcggatctgtaaagtgataagttctccttgcttagcggaagccgaagcaaggtttcagatttgtgcagaaggagtttcagatgttaaagactaactgatttcagaatgtttgaatttttgttttcctatttgcatatc

SEQ ID NO: 145521 - DNA, 239 bp, Glycine max
gttgaagccattgaggtgggttaccgtcattttgacactgctgcagtgtatggaacagaggaagccataggcctagccgtggccaaagccatagacaaaggccttataaagagtagagatgaagttttcatcacttcaaagccttggaacacagatgcacaccgtgaccttattgtcccagctcttaagaccacattaaagaagctggggacgggtatgtggatctttatctgattcat

SEQ ID NO: 145522 - DNA, 244 bp, Glycine max
atggtccagattagtaccacaaaaatggagaaatagaataactgaatatcgtatagctcaaaataaagatttaaccaaatgcaattcatatgaaaaaagccaattaattctttacaaagaacaacaagtaaacgagttaaaaaaaaaaattagaaaacaatatagatacgatcttttatcctataattttatcaattatgcagataagaaagactcaatatttatggatatagatccctatttc

SEQ ID NO: 145523 - DNA, 262 bp, Glycine max
gctcgaagtccttctccagcgcgactttctacatcgtgatgcaatgcttgggtgctatttgtggcgctggcgtggtgaagggtttcgaggggaaaacaaaatacggtgcgttgaatggtggtgccaactttgttgcccctggttacaccaagggtgatggtcttggtgctgagattgttggcactttcatccttgtttacaccgttttctccgccaccgatgccaaacgtagcgccagagactcccacgtccccattttggc

SEQ ID NO: 145524 - DNA, 254 bp, Glycine max
ctttaattgaagctcatgtggatgttaagaccactgataattatacattgaggatgttctgcattggctttactaagaggcgtagtaaccaggtgaagaggacctgttatgcacaatcgagccaaatcagacagattcgcaggaagatgagagagataatggtcaaccaagcaacagcatgtgatttgaaagaattggtgcgcaagttcatccccgaaatgattggaaaggagattgagaaggcaacatctagc

SEQ ID NO: 145525 - DNA, 252 bp, Glycine max
gttggtggtgggactggacctgtaatcaacatgattgtctcaaagcatcccactattaagggcattaattttgatttgcctcatgtcattgaagatgccccatcttatcctggagtggagcatgtaggtggagatatgtgtccgagtgttccgaaagctgatgctatttttatgaagtggatttgccacgattggagtgatgagcactgcttgaagtttttgaagaactgctacgaggcactaccagacaat

SEQ ID NO: 145526 - DNA, 256 bp, Glycine max
tcattctcatctttctctcttctctctccacccaaaccctaactcccgaccctgttcccctctcgtatccgtcatgaaaggaggaaagtccaagaccgaatctaagagagccgaacccaaacttgctgtgaataagaagggagccgccaccaaggctaggaaacccgccggcaaggggaaggcagcgaaagaccctaacaagccaaagaggcctccaagtgctttcttcgttttcatggaggagttcaggaaggta

SEQ ID NO: 145527 - DNA, 263 bp, Glycine max
tcattctcatctttctctcttctctctccacccaaaccctaactcccgaccctgttcccctctcgtatccgtcatgaaaggaggaaagtccaagaccgaatctaagagagccgatcccaaacttgctgtgaataagaagggagccgccaccaaggctaggaaacccgccggcaaggggaaggcagcgaaagaccctaacaagccaaagaggcctccaagtgctttcttcgttttcatggaggagttcaggaaggtattcaaca

SEQ ID NO: 145528 - DNA, 274 bp, Glycine max
tacgtaatctcgctctactgctattctcatcctcctctgtctctctctctccaccattgccatggatccttacaagctccggccatccagcgccttcaattctcccttctggactacaaattctggtgctcctgtttggaacaacaactcctctttaaccgttggagctagaggtccaattctgcttgaggattatcatcttgtggagaagcttgcaaactttgacagggaacgtatcccagaacgtgttgtccatgccaggggagctagtgca

SEQ ID NO: 145529 - DNA, 252 bp, Glycine max
gaacaccccttcatggtacactgctggagagttggagtacttcacagacactaccacactcttcgtagttgagctctttttcattggttgggccgagggtagaaggtgggctgatatcatcaagccaggctgtgtcaacactgaccctatctttcccaacaacaagctcacaggaactgatgttgggtacccaggtgggctttggtttgatccacttggctggggaagtggttctcctgagaagatcaagga

SEQ ID NO: 145530 - DNA, 252 bp, Glycine max
gaagttgtcagtatcttattgtcctctatccttggtatccctgatggtttcaactctattcaactcctttgggtcaacctcgtaactgatggtttcccagccactgctctctctttcaaccctcctgacccacaaatcatgaagaagcctcccaggaaacatgatgagcctattattacttcatgggtgttcgtccgttatcttataattggaacatacgttggtctcgccaccgtcggaatattcacatac

SEQ ID NO: 145531 - DNA, 253 bp, Glycine max
gtcagggtgcacccattccatgttcttaggatcaacaagatgctttcgtgtgctggtgctgataggctccaaactggaatgagaggtgcttttggaaagccacagggtacttgtgctagagtggctattggacaggtccttctttctgtccgctgcaaggacagcaacagccatcatgctcaggaggctcttcgccgtgccaagttcaagttccctggtcgtcaaaagattatagttagcaggaaatggggct

SEQ ID NO: 145532 - DNA, 253 bp, Glycine max
cccgcggatacttcgtatggcggtgatctcttcgatgcttcaaatgattacgttgaatggttggactcacagcctgagttatctgcggtttatgtttcatttggtacccttgctgtgttggctgatagacagatgaaggagcttgcacgcgcgctgctagattccggatatctcttcttgtgggtcattagagatacgcaaggaatagaagataactgcagagaggaactggagcagaggggtggaggttctg

SEQ ID NO: 145533 - DNA, 252 bp, Glycine max
gtggatcctgaaaaagtgatacgtctaagtttaagtgagcaacagcttgaaaaggctgctataaattatggacaacaaattgtcaggtttactcagcggaatatactgagggtgtatccaaaaggtactcgcattgactcatcaaattataacccattaattgggtggatgcatggagctcagatggttgcatttaatatgcaggggtatgggagatctctttggttgatgcatggaatgttcagagccaat

SEQ ID NO: 145534 - DNA, 257 bp, Glycine max
ctggtagaaaattggtggtggattgtactggagagggtgtcatgttcattgaggctgatgcagatgcaacacttgatcaattgggtgacacacttcaacctccattcccatgcttcgaacaactcctttatgatgttccaggctcggagggagttattgactgtcccctaatgctctttcaggtgacacgtttcaagtgtggtggttttgccctagccgttcgcttgaaccacactatgagcgacggagccggcata

SEQ ID NO: 145535 - DNA, 255 bp, Glycine max
ccttcccatggtctctctctcttcaattaattacatttagctttccccaaatcccaaaccctttttcgcttagatcccaatccaattgggttatggacatggcttccagtccccgcaccgtagaagagatcttcaaggattacagcgccagaagaacctctgttattcgcgctctcactcacgacgttgatgaattttacggcctctgtgatccagataaggataacctgtgcctctatggacatccaaatgagg

SEQ ID NO: 145536 - DNA, 251 bp, Glycine max
caacaaaaaccctttttgtgattaactttgacccaatccgtactagagttcgtgatatagaaaaacactttgaaccttatgggaatgttcttcatgttcgaattcggcggaactttgcatttgtgcagtttgagacacaagaagatgctaccaaagctatagagtgtacaaatatgagtaagatcctggacagggtggtgtctgtggagtatgctctgagggatgatggtgagaggggggacaattatgac

SEQ ID NO: 145537 - DNA, 249 bp, Glycine max
cagtgctatgataagtatatgcttgcttctctgaatgcctctgcaagaaatattggaaagcgtgaatggggaaatggtggtccatttggtagtgaaagtttgatgcaaaatcctgagcatactgattttttcagaaatgacggtggctcttgggacacaccatatggtaaattttttcttgaatggtactcagatatgctgctgctgcatggggagaggatttgtagggaagctgaaactatatttagg

SEQ ID NO: 145538 - DNA, 252 bp, Glycine max
gttggtggtgggactggagctgtaatcaacatgattgtctcaaagcatcccactattaagggcattaattttgatttgcctcatgtcattgaagatgccccatcttatcctggagtggagcatgtaggtggagatatgttcccgagtgttccgaaagctgatgctatttttatgaagtggatttgccacgattggagtgatgagcactgcttgaagtttttgaagaactgctacgaggcactaccagacaat

SEQ ID NO: 145539 - DNA, 253 bp, Glycine max
gccagttctgatatttacaccatctgctctcaagactgtgaattatggaatcctgcttgcacaaaagcaatgactatgtcatttaatccaaacccgtgttctgatgcatggagtttggaatttctgaagcgtaccggatttcattgtgatatcatttgtgtcactggatggactgccactccaatgcaggatgttcatgttacaattgattggtttatttcctctcaggaatgtgttcccaggacttattgtg

SEQ ID NO: 145540 - DNA, 251 bp, Glycine max
ggcggggctaccgtgagtttaagcatatcaataagcggaggaaaagaaactaacaaggattcccttagtaacggcgagcgaaccgggaaaagcccaccatgaaaatcggtcgccctcggcgtccgaattgtagtctggagaagcgtcctcagtggcggaccgggcccaagtcccctggaagggggcgccagagagggtgagagccccgtcgtgcccggaccctgtcgcaccacgaggcgctgtcggcgagt

SEQ ID NO: 145541 - DNA, 252 bp, Glycine max
cttccgttccttctttctttatcatcaccagtgttccatatttcatagaaaatggctttatcatctccctctctagtgttcaccgtacagaggtgtcaaccggagctggtggctcctgctaaacccactcctcgcgaagttaaacccctctccgacatagatgaccaacagggcttgcgtttccaaattccattcatactattctatggtaatgaaccatcaatggcagggaaagaccctgctaaggtcatt

SEQ ID NO: 145542 - DNA, 254 bp, Glycine max
gttgcagatggccaggtaacaacaagtgctgcgtctgaggatggagaactcagtccacaagaagcgaggacaatcaaagcaatagctgatgcaagttcatatcccctttctattattctggttggagttggtgatggaccttgggaagacatgaagaagtttgatgacaagataccagctcgcgactttgacaattttcagtttgttaacttcactgacataatggctaagaaatcaagcccctcagaaaaaga

SEQ ID NO: 145543 - DNA, 259 bp, Glycine max
cttcatcacttcattcaacatttctccccttagcttgtttcaccaatggctgctgcggttagtgctgcagtctcttttccatccaccaagtctacctctcttccaagcaggacctccctcattgccccagagagagttgtgttcaaaaaggcttcattgcaaaacagagatgtttctagcagtggacgggtagtttccatcagagctcaagtcaccactgaggcaccagccaaggttgaaaaagagtccaagaaacagg

SEQ ID NO: 145544 - DNA, 251 bp, Glycine max
cgttgccattctcatcctcctctgtctctctctctccaccattgccatggattcttacaagctccggccatccagcgccttcaattctcccttctggactacaaattctggtgctcctgtttggaacaacaactcctctttaaccgttggagctagaggtccaattctgcttgaggattatcatcttgtggagaagcttgcaaactttgacagggaacgtatccctgaacgtgctgtccatgccaggggag

SEQ ID NO: 145545 - DNA, 248 bp, Glycine max
cggctcgagcggctcgagcggctcgagggatggttggatgagaagaccctctccccggccaaagcaggctacggaatggacgttgccatcaaaaagttgaaccccgaaagcacgcaaggcttccaagagtggcagtcagaagtgaactttttaggaaggctttctcaccccaacctggtcaagttgttgggttattgttgggacgatgatgagcttcttcttgtctatgaattcttgccaaagggaag

SEQ ID NO: 145546 - DNA, 249 bp, Glycine max
ctcgagccgattttcttaaagaacaaaatgtttgttatgcttaatatctttaatttggtctgtatttgtattcactccgtcctttattcaagtagttttttctcggcgaaattgcccgaagcctacgctttcttgaatccaattgtggatattatgccagtaatacccttactcttttttcttttagcttttgtttggcaagctgctgtaagttttcgatgatatctgtaatttgagtaatgtcttaaa

SEQ ID NO: 145547 - DNA, 249 bp, Glycine max
ggagtgacatctgtacaataatgtatactagtggaactactggtgaccccaagggagtgttgatatcaaatgagagtattattactctcttagctggggttaagcgactgttggagagtgtaaatgaacaattgactgagaaggatgtatacatatcataccttccacttgcacatatatccgatagggtcattgaggagacattcatatggcatggtgcttcaataggtttctggcgtggggatgtca

SEQ ID NO: 145548 - DNA, 248 bp, Glycine max
atttaaccgttggagctagaggtccaattctgcttgaggattaacatcttgtggagaagcttgcaaactttgacagggaacgtatcccagaacgtgttgtccatgccaggggagctagtgcaaagggtttctttgaggtcacacatgacatttctcacctgacatgtgcagatttccttcgagcccctggagttcagacgcctgtaattgttcgtttctcaactgtcattcatgagcgtggtagccct

SEQ ID NO: 145549 - DNA, 251 bp, Glycine max
cgaaggaggagagcgacttccggaacctgctggagaatgaactcgacaaattcaacaccttcttcgttgagaaggaggaagagtacattatcagactcaaggagttacaagatagtgtggcccaagttaagggttcgcgggaagagatgatgaaaatccacaaggaaattgtggatttccatggagagatggtcttgctggaaaactacagtgccctcaactatacagggctagtgaaaatacttaaaaag

SEQ ID NO: 145550 - DNA, 255 bp, Glycine max
agcgccccgaagaagtacgacgagatcgacgccgccccggaggaacgcgcccgcggcatcaccatcaacaccgccaccgtcgagtacgagaccgagaaccgccactacgcccacgtggactgccccggccacgccgactacgtcaagaacatgatcaccggcgccgcccagatggacggcgccatccttgtcgtctccggcgccgacggccccatgccccaaaccaaagaacacatcctcttagccaagcaagtc

SEQ ID NO: 145551 - DNA, 255 bp, Glycine max
acagccttgaacttgaactatcgtgtcttcttggctttctctgttcaggatcaacatggatattgtatcacgagctttgctatttccgttggctatacttgtgctcatattaagcacaccttgctcaggtgcttttgggaatcgtggaactaatgtgaaatcagctatttttctgtcccccaagtttgaacttggaccaggatcggtagccaataaatatgattatgacgctgattttccaagaggtcatatagc

SEQ ID NO: 145552 - DNA, 260 bp, Glycine max
tgagactagaactcatagggaagaaaatagatttatgaatggaataaaatatgcagtatttacagacaaaagtattcggttattggggaaaaatcaatatacttttaatgtcgaatcgggattaactaggacagaaatcaagcattgggtcgaactcttctttgatgtcaaagtaatagctatgaatagtcatcgactcccggtaaagggtagaagagtacgacctattatgggacatacaatgcattacagacgtatga

SEQ ID NO: 145553 - DNA, 246 bp, Glycine max
gacaggattctctcatcagccacgtcgatctttgacaacactggagttaagatgctcagtgaaggttgccggcattcactggcactatggtacaaggtctcacgccccagaactcactgcagggtattacaacacccgattccgtgatggctacctccccattgctcaaatgctggcgcgccacggtgccatctttaacttcacctgtatcgagatgcgcgatcacgagcagccacaagaggccct

SEQ ID NO: 145554 - DNA, 245 bp, Glycine max
aacggcaccgcgccgtagaagaaaacaaccatggtgcacgtctccttttacaggaactatgggaagacattcaagaagccgcgtcgtccgtacgagaaggagcgtctcgacgcggagttgaagctggttggtgagtacgggcttcggtgcaagagagagctgtggagggtgcagtacgcgctcagccgcatccgcaacaacgcgcggaacctcctcaccctcgacgagaagaacccgcgccggat

SEQ ID NO: 145555 - DNA, 248 bp, Glycine max
tggtgaatgccaccctcatgaacattgctgataaccccaccaatgtgcagcttcctggtatgtataacaaggaagagaatccccgtgtgcccatcatcgtcaccggtaacgatttctccacactctatgcgcctctcatccgtgatgggcgtatggagaagttctactgggcaccaacaagggatgaccgcattggtgtctgcactggaatttttcgcaccgattcaattcctgaacaggacgttgtc

SEQ ID NO: 145556 - DNA, 249 bp, Glycine max
tgtcttgcaattgaagttgaagtcttgcccttctctcttcaactccaaacacaagacatcatcatccatggctgcctccgtctccactgtcggagctgtcaacagagctcttttgaacctgaatgggtctggacctggggtttcagctcccagttcatccttctttgggagcagcttgaagaaggttattggctcaagggtccccaacacaaagatttcctctggaagcttcaagattgttgctgtaga

SEQ ID NO: 145557 - DNA, 250 bp, Glycine max
tggatacaaggtattcatatctattgctctgattttaggggatggcatttacaatctgataaagattatactgataaccattacggagatgtggagggcaagctccaaacagcttcctgttgtgacagaggttcaagatgatgagagttctcaactgcaatcagaagaaaagaggagggatgaagtattcttgaaggacaggatacccacctggtttgcagcctctggatatgtgggcttggctgcgata

SEQ ID NO: 145558 - DNA, 255 bp, Glycine max
gaaatttggctgatgacaccatcaattttgaggcttttccccacaagctggtgcagtttggagagattcaggaaaaagttgtattgaaattttcacaagaggaatttcttacagcttggtcaactcaggtgcgtcctgcaacaactctgttggctgatgggtgtccatatttgtatgctatggtgcatgatagttcagtgtctacaataccaggtgattttgtcattggtgttaagttgacaaccataaacaata

SEQ ID NO: 145559 - DNA, 247 bp, Glycine max
ggcagatgccatggccagggccaaggtgtttgatatcgacctgcagaaacagttgaggccttacatggaatctatggttccactccccggaatctatgaccccgatttcattgctgccaaccaaggagaccgtgccaacaacgtgatcaagggcacaaagaaagaacaagttcaacaaatcatcaaagacattaaggagtttaaggaaagcactaaggttgacaaggtggttgtcctgtggacagcc

SEQ ID NO: 145560 - DNA, 246 bp, Glycine max
ctgaagagtgcgggggtggagggggtaatgatggacgtgtggtggggtttggtggagagagagaagcctggggagtataattggggagggtacgttgaactcatggagatggcgaagaagcatggcctgaaggtgcaggccgttatgtcatttcaccaatgtggcggtaacgtcggagactcttgcactattcctttacccaaatgggttgtggaggagattgataatgaccccgatcttgcatat

SEQ ID NO: 145561 - DNA, 245 bp, Glycine max
gaccaacaatgacattacctccattgctagcaacggtggaagagtacaatgcatgcaggtgtggccaccaattggcaagaagaagttcgagactctttcctacttgccagacctcgatgatgcccaattggcaaaggaagtcgaataccttctaaggaaaggatggattccttgcttggaattcgagctggagcacggtttcgtgtaccgtgagcacaacaggtcacctggatactatgatggac

SEQ ID NO: 145562 - DNA, 240 bp, Glycine max
tatcccacattcagctttggttctttgttgctgggacagtgagaaaactttgccaaataatttttctgcagaattgctctcttgcaaattggatactgttactggccaatattatcctgagtgggctccaattaattgtcgagttcatcgacaaccaattcacatcactgaaggaaattatgtcagaaagcaagatgtcagcattgaatatgatgcatgtacaattccaaatgattgtgg

SEQ ID NO: 145563 - DNA, 245 bp, Glycine max
gactgtcccactgtgtgagactgaactgccccttattctacctgaattggatgatttttctcccactggaacaggggagcctcctctgtctaaggcagtgtcttgggtgaagaccacggatagcttatctggaagaccagctacccgtgaaactaataccatgccacagtgggctggttcatgctggtactatttgagatttatggacccacataattccaaggaattggttgataagacaaaag

SEQ ID NO: 145564 - DNA, 252 bp, Glycine max
caaggttgagagtcctaacgtgaagtacacagagactgagattcagtccgtgtacaactatgaaaccactgaacttgttcacgagaacaataatggcacttatcagtgggttgtcaagcccaaaactgtcaaatatgaatttaaaaccaacacccatgtccctaaactaggggtaatgcttgtggggtgggggggaaacaatggctcaaccctcactggtggtgttattgctaaccgagagggtatttcatg

SEQ ID NO: 145565 - DNA, 250 bp, Glycine max
ctcgagccgaatcggctcgagaacaaatcagagtaattggaacttcaaacttgtcattcaatcatggcgattgaggcatggttgatggacgaaagcaatgaagatccaagactccctcaccgccgcaatcccaacaagtcagtgtcattggaccaattagcagaatttggggtgttatactggaagctgaatccaactatctatgagaacgatgaagagttggccagcatagaggagatagggataccac

SEQ ID NO: 145566 - DNA, 260 bp, Glycine max
cttctctttcaatctcttttcgcgatgctcgtgttttcactgcaccaaaatgctctcccaccactcactttcctcatcggaatttggttccaactcgagcatcattcatcgctggttccccactgttgattcgaagaaatcatggaaggaatggtgcatgcaaagcaatgcctgtttcaataagatgtgagcaaagtacccaggaagggaacagtttagatgtgtggctaggccggctagccatggttgggtttgcagta

SEQ ID NO: 145567 - DNA, 256 bp, Glycine max
gtgtgaaaagtccatgataaagaagcgatacatgcacctgacggaggagtttctgaaagagaacccgaacatgtgcgagtacatggcgccatcgctggacgtgagacaagacgtagtggtgatggaggtgccgaagctgggaaaacaagccgcaacgaaagcgattaaggagtggggtcaaccaaagtcaaagatcacacaccttgtgttctgcaccacttcaggcgtggacatgcccggagcagattaccagctc

SEQ ID NO: 145568 - DNA, 257 bp, Glycine max
aaaagacttaaaaaggaggatttgaaatgcgagatctaaaaacatatctttccgtggcaccagtagtaagtactctatggttcggggctttggcgggtctcttgatagagatcaatcgtttttttccagatgcattgatattcccttttttttcattctagttattgacacggaaaggggtgaagaagattatagatccaattaagtattaaatatatgtaattaatatgtaattaatctcctcttctttatttcgt

SEQ ID NO: 145569 - DNA, 255 bp, Glycine max
cccatttcgtttttcttcccaaatggccctttcttgctccaaagttttaagcttttatctctcgcccgttgtgggtggtggtgatgttccgaaaaagctcactttttcttcttttttgggtctttctaagggtgttggtggaagcaggagctcgagggtgtgtgctgcttcaaatgcacccgcaccactcgctggggtcatatttgaaccatttcaagagctcaagaaggattatcttgctgttccgattgcaca

SEQ ID NO: 145570 - DNA, 254 bp, Glycine max
ggcctctttgggaggagatatctttggctatgaagagcattggttatgatcgaagtgcaaagaggtgtaaagagaaatgggagaacataaacaagtacttcaagaggataaaggagaagaacaagaggaaacctcaggattccaagacgtgtccttattatcaccaccttgaggctttgtacagtaagaagcctaagaaggtggtggatcatgggaacgagttgaagcctgaggagctgttaatgcatatcatg

SEQ ID NO: 145571 - DNA, 251 bp, Glycine max
ctcgagcgattcggctcaggcgattggccccaacaagaacctcttggagtatacttgagaaattgcttggttgcttactcattctatagaaatatttttccaatgtgggctttggctgaataccgcacaaatgttttattgccttcctttactatttaagttgaaaaattgtgagctcaaaaagataatgtcataccaataaaagtctagaaaaaaaaaagttggtaatgaaaaaaaaaaaaaaggggggg

SEQ ID NO: 145572 - DNA, 254 bp, Glycine max
gtttctatccctcactaggagctcttctccattggttcttcatctgcatgcacacacttgcatagttttggaaaccaagaatttttgaagggtagcatcaacaagaagttctggaaatggagatcaccaatgtcagcgagtatgaagctattgcaaagcagaagttgccaaagatggtgtttgactactacgcatctggtgcagaggaccagtggactctgcaggagaacagaaatgccttttccagaattttg

SEQ ID NO: 145573 - DNA, 264 bp, Glycine max
tgatgatgttgtgtttgggggatgggatatcagtaacttgaacctggcagatgccatggccagggccaaggtgtttgatatcgacctgcagatacagttgaggccttacatggaatctatggttccactccccggaatctatgaccccgatttcattgctgccaaccaaggagaccgtgccaacaacgtgatcaagggcacacagacagaacaagttcaacaaatcatcatcgacattaaggagtttaaggatagcactaaggt

SEQ ID NO: 145574 - DNA, 259 bp, Glycine max
ggaggtgaaaacaggctctcacagagtgtggatactgagggttccagtgatggaagtgatggcaacacttcaggggctaatcaatcaagaaggaaaagaagccgtgagggaacaccaaccactgatggagaagggaaaactgagatacaaggcagtccaatttccaaagagactgcagcttctaataagatgttgggagttgtccctgccagtgttgcaggaacaatagttggacatgtagtttcttcaggtatgacca

SEQ ID NO: 145575 - DNA, 256 bp, Glycine max
gcagatttcaatgttgcagcagctcaacaaggaataatttacattgatgaagttgacaaaataactaagaaggccgagagcttaaatatcagtcgggatgtttctggtgagggtgttcagcaggcattattgaaaatgctggaaggaactatagtaaatgttcctgagaaaggagctaggaagaatccacggggggataacattcagatcgacacaaaaaatattctttttatatgtggtggagcatttattgatc

SEQ ID NO: 145576 - DNA, 255 bp, Glycine max
aagaaaagaaaatcctcatatttctgagcagccaaacactctctctctgtctctcgaaaattctcagtttgcagagaaaatctgaatcatgtcgtggcaagcgtatgtcgacgatcaccttctgtgtgacatcgaaggtaaccacctcactcacgctgctatcatcggccaagacggcagcgtttgggctcagagtaccgacttccctcagttcaaacctgaggagataactgccatcatgaatgactttaatga

SEQ ID NO: 145577 - DNA, 258 bp, Glycine max
gtctcacttgactcgattgcaagtgatccacgacacactgttcgcttcacaaaagcttcgaatccaattcctcagtaacatctgcttgaagtcttctccttcaccatgccaccaaagcctttagactatgggtcaataaatgaaaacgtgaagaagagtcaatatgctgtcagaggtgaattataccttcgagcttctgagcttcagaaagagggcaaaaagattatatttactaatgttggcaacccacatgcattg

SEQ ID NO: 145578 - DNA, 254 bp, Glycine max
ttgtgaaagcagagaagtgagatacactaagttatcctcataaatacactctaattaggtggcaagataagtgtctaaccttagtaacattgccacatattgtgttcattttggaattgtgccactaaaattctattcaattcatctatggctgcctcttcttatgctatgcaatcaatcctggcaaaccctttgatccgcatttccagcgggtctagggtgaaccaatttggcgttcctgctttgcacatgag

SEQ ID NO: 145579 - DNA, 254 bp, Glycine max
caagattgttgctgtagaagagaagaaagagattgaagagacccagcagaccgacaaggacagatggaagggtcttgcctatgatatctcagacgaccaacaggacatcacaagaggaaagggtttggttgactcccttttccaagctccacaggatgctggaactcactatgctgtcatgagctcctacgagtaccttagcactggacttcgccagtacttggacaacaacatggatggattttacattgctc

SEQ ID NO: 145580 - DNA, 250 bp, Glycine max
ctctcattcaacccacttccaccatcaacttcttccttttcttcaccccgtacattcacaaccctggctctcttcaaatctaagacaaaagccgctcctgctaagactaaggttacaaagccaaagcaaaaggttgaagatggtatctttggcacttctggaggatttggttttactaagcagaacgagctctttgtgggtcgtgttgctatgcttggttttgcagcatcattgttgggtgaaggaataa

SEQ ID NO: 145581 - DNA, 252 bp, Glycine max
gaccaacaatgacattacctccattgctagcaacggtggaagagtacaatgcatgcaggtgtggccaccaattggcaagaagaagttcgagactctttcctacttgccagacctcgatgatgcccaattggcaaaggaagtcgaataccttctaaggaaaggatggattccttgcttggaattcgagctggagcacggtttcgtgtaccgtgagcacaacaggtcacctggatactatgatggacgctactg

SEQ ID NO: 145582 - DNA, 255 bp, Glycine max
gttctgaacttcaatatttggcgaatccggtgacaagccacgtgcaaagcgcggagaacacaaccaagatgtgaactctctggggctgatttcatcaaggaagactcatgaggctattgagatcctcaagctcatgtcctccactttcctggtcgccctttgccaagccattgacttgaggcatttggaggagaatttgaagaacacggtcaagaacgttgtgagtcaagttgctaagaggactctcaccacagg

SEQ ID NO: 145583 - DNA, 259 bp, Glycine max
ggcttatggtggatacctaggcacccagagacgaggaagggcgtagtaagcgacgaaatgcttcggggagttgaaaataagcgtagatccggggattcccgatataggtcaacctttcgaactgctgctgaatccacgggcaggcaagagacaacctggtgaactgaaacatcttagtagccagaggaaaagaaagcaaaagcgattcccgtagtagcggcgagcgaaatgggagcagcctaaaccgtgaaaacggggt

SEQ ID NO: 145584 - DNA, 250 bp, Glycine max
atctcctcttaccgtggaagaacagataataactatttatactggaccgaatggttatcttgattcattagaaattggacaggtaaggaaatttcttgttgagttacgtgcttacttaaacacgaataaacctcaattcaaagaaatcatatcttctaccaagacattcactggggaagcagaagtccttttgaaggaagctattcaagaacagatggaactctttttactacaggaacaggtagaaaaa

SEQ ID NO: 145585 - DNA, 241 bp, Glycine max
gataaacttaagaattcaattattgaaattgaataagtaaacaatttaattggattggtcgaatggtatcaaaaaaatggagtactaactcccatttcttatgtattattgaattaaccgatcaacttgctttgttatcgaacatttctttttgatttcaaaaattttccggaaaaaatttgaatctatttttatatgcgaatcaatcctactacttctggtcctgaggtttctgcgcttg

SEQ ID NO: 145586 - DNA, 254 bp, Glycine max
gagaatccgaggcgaagagaagagaaaaattaagatggaggggaaggagcaggatgtgtcgctgggagcgaacaagttcccggagagacagccgattgggacggcggcgcagagccaagacgacggcaaggactaccaggagccggcgccggcgccactggttgacccgacggagtttacgtcatggtccttttacagagcagggatagcagagtttgtggccacttttctgtttctatacatcactgtcttaa

SEQ ID NO: 145587 - DNA, 245 bp, Glycine max
gacattttcaggatggaagggttatatgttcttcaataccaaggtatggaaagggaaaggaagcaggaaacgaagtagactacattgtaggaatgagcacatgttatcctcaaccaggttctgtaaagataattgatggtgaaactataactctagagtctaactacagcagcagccgtggccacactggagtaatggggcttttctacctattggtggcagaacagcttccacaccaacacttc

SEQ ID NO: 145588 - DNA, 251 bp, Glycine max
gtgtttttcatttcatcgtgcattcaatggccaccacagcagctctatccggaaccatggtgagcacctccttcatgaggaggcaacctatgaccaccacaagcctaaagacattccccaacgttggtgaagctctttttggtctgaaaagtggacgaggtggtcgtgtcacttgcatggcctcgtacaaggtgaagctcataaccccagaaggagaagtggagtttgaatgcccagatgatgttttcatt

SEQ ID NO: 145589 - DNA, 252 bp, Glycine max
cttgtgcctcaagaaataggttagttccgagctgaaacaagatggctggtgataaacaaaaactctttaacagactgaagccattcataggtgtagtgttcttacagtttggatatgctggtatggatattctatccaaagctgcactgaacaagggaatgagtaactatgtatttgtcgtgtaccgtcatgtttttgcctttgttgtcatggccccttttgcactgatcttggagaagaaagtaaggccga

SEQ ID NO: 145590 - DNA, 254 bp, Glycine max
attattataacctcaacttgaactatccatacatagccactttccactcactcttgtgttgttgccttcatggccaagccagtgtccattgaggtatggaacccaagtggcaaatacagagttgttagcaccaaaccaatgcctggaactcgttggatcaatcttctcgttcaaaatgatgttcgccttgaaatatgtaccgagaagaaaacgattctgtcagttgaagacatcattgctttgattggtgataa

SEQ ID NO: 145591 - DNA, 260 bp, Glycine max
acttttgcttcttttggactcattctatcttgcaaaatagcaactgatgcttctggtctgtctaagggctatggttttgttcaatttgacaatgaagaggctgcacagaatgctattgacaagttaaatggcatgctgatcaatgataagcaggtctatgtaggccatttcctgcgaaagcaagatagagagactgctctcagcaagacataaatttaataatgtctatgtgataaacttatcagagtcaaccacggatg

SEQ ID NO: 145592 - DNA, 249 bp, Glycine max
catgaaggcaattgatcttattcgtaaatggatggaggatgctggtttgagaacttgggtggaccaaatgggaaatgtacatggtcgagttgatggtgcaaatgaaaatgctgaagctttattgattggatctcacatggacactgttgttgatgctgggatgtttgatggatcactaggaattgtctctgcaatatctgccgtgaaggctatgcatgtcaatggaaagctgcaaaagctaaagcgccc

SEQ ID NO: 145593 - DNA, 249 bp, Glycine max
ctcgagcgcagttgcatttgttcggccggttagtgtggcctttcaggtggtgaatgaggttccatttctacgagaatggagtttacactagtgacatttgcggtagacttcccaggatgtgaaccatgccgtccttgctgtggggtatggagttgaaaatggcgtcccatattggctcataaaaaattcatggggagaaagttggggtgagaatggctacttcaaaatggaattggggaagaacatgtg

SEQ ID NO: 145594 - DNA, 247 bp, Glycine max
gcactcatattgccaatctcttacacttacatagccatgatgggttctaaaggactcaccgatgcatcaaagatagccattttgaatgcaaactacatggcaaaacgattggagaattattacccggttcttttccgtggagtcaatggaacagttgctcatgaattcatcattgacttgagaggctttaagaatactgctggaattgagcctgaagatgttgcaaagcgcctcatggactacggtt

SEQ ID NO: 145595 - DNA, 249 bp, Glycine max
gacaggattctctcatcagccacgtcgatctttgacaacactggagttaagatctcagtgaaggttgccggcattcactggcactatggtacaaggtctcacgccctcgaactcactgcagggtattacaacacccgattccgtgatggctacctccccattgctcaaatgctggcgcgccacggtgtcatctttaacttcacctgtatcgagatgcgcgatcacgagcagccacaagaggccctttgt

SEQ ID NO: 145596 - DNA, 252 bp, Glycine max
aatatttttctcactgtctctccagagaacttgatagagagatggcagctgcaacatctggtgctgtgttaaatgggttgggatcttccttcttgagtggaggaaacaggagccaaacccttctggcctctgctattggaggcaaagttggtgctgctgttactgttaatcccagaagactcattgtggtagctgctgctgcaccaaagaagtcatggctccctggtgttagaggtggtggcaatctcgtcg

SEQ ID NO: 145597 - DNA, 268 bp, Glycine max
gaaagggagttcaaggtgctcaaccaggaccaactcttgattggatacagcgagttagaattgcagttgatgctgctcggggattggaatatttacatgagaaagttcaaccaccgattatacacagggatatcagatcaagtaatgtgctaatctttgaagattacaaggccaagatagccgactttaacctttctaatcaggcccctgacatggctgcacgccttcattcaactcgtgtattgggaacttttgggtatcatgctcc

SEQ ID NO: 145598 - DNA, 264 bp, Glycine max
gagaaattgagtttctgagataaccacttttctctttgattcatcaatggcaaccgcgaggaccgtgaaggatgtttcgcctcacgatttcgtgaaggcttacgcctcccatctcaagcgttccggcaagatggagcttcctgagtggactgatattgtaaaaacagcaaaatttaaggaattggctccatatgatcctgactggtattatgttagggctgcctcaatggcaagaaagatttatttgagaggcggtcttggtgt

SEQ ID NO: 145599 - DNA, 259 bp, Glycine max
ctcaaacattgtttgttgtaggaagaggaatcttgcgaaatggcaggggacagcaagagcaagattctgttcatcggagggactggttacatcggaaaattcatcgtggaagccagcgccaaagctggccacccaactttccttttggtgagggagtccactctctccaaccccgcaaaatcacccctcatcgacaatttcaaaggcctcggtgtcaatcttgttttaggagatctatacgatcaccaaagtttggtga

SEQ ID NO: 145600 - DNA, 256 bp, Glycine max
gacaatttatatgggtttttgaggatgccaagaacaagaatgttgagcatatattgatactttctggcgatcatctttaccgtatggactatatggactttgtacagagacatgttgacacaaatgccgatatcacagtttcatgtgtacccatggatgacagtcgggcatcagactatggactgatgaaaattgataaaacaggacggattatacagtttgcagaaaaacctaagggatcagatctaaaggcaat

SEQ ID NO: 145601 - DNA, 242 bp, Glycine max
gtactttcatgcattttactttaaaaaattcttttattcacttctttaccaatttcgtttcaatttctttctcaaaatttcatcttacgtggtagggcaaaatatggcattgatgagatgtgccgcgatcaatggaattgggctagcaaaaacccttatggctatggagatcaggaggattccagcgtttaactatatatatatatagtgatctctatgggtccttttccgaactcccccac

SEQ ID NO: 145602 - DNA, 149 bp, Glycine max
atcaaatcctaatgatatgactggggagactggtactcttggttatatggctccagaggttttaaatggcaacccctataacaggccatgtgatgtgtacagttttggcatctgcttatgggaaatatattgttgtgacatgccatatc

SEQ ID NO: 145603 - DNA, 259 bp, Glycine max
gttgtggttcaagctgagaaggttccctatgtccctgaaggacttgaagccatcattttcacagctgacggtgatatgagacaggcattgaataacttgcaagcaacatacagtgggttccaatttgttaaccaagcaaatgttttcaaggtttgtgaccagccacatccactgcatgtgaagaatatggtgcgtaatgtgattgaagggaattttgatgaagcttgttcaggcctcaagcaactgtatgacttgggat

SEQ ID NO: 145604 - DNA, 247 bp, Glycine max
gttgacggcattgggaagaagcttgtgaactcaaaagatggacctccaacctttgagcagcccaagatgactctggagaagctcttgacgtatggtaacatgcttgtccaagaacaagagaatgtcaagagagtccaattggctgacaagtacttgaacgaggctgcacttggaaatgctaacgaggatgctattaacaggggaactttcttccaatcttgaattggaggcaaagcaaacttggcaa

SEQ ID NO: 145605 - DNA, 245 bp, Glycine max
cgcgtcgctccgcaccagtttcaccgcacgaatatcttgctgtgtggagcgatccgagacaaactctctaaacatgttggtttaccaggacctccttacaggtgatgagcttctctctgactccttccgatcccaatgaaattgagaatggaatgctgtgggcagttgaggggaagtgggttgttaaaggagcagttcatgtagacattggtgcaaacccttctgctgagggtggaggacaagat

SEQ ID NO: 145606 - DNA, 245 bp, Glycine max
aggaaataaaacaaataccaaagaaccttctatgctttctctcctttgcactttcctcctcttccttgtgattattgtatgcatcacagggagaaactgagacacagaagatgagagagataattagtattcatattggacaagctggaattcaggtgaggaattcatgctgggagttgtatcgccttgagcatggaattaaccctgatggcaccatgcctagtgatacctcagttggtgtagca

SEQ ID NO: 145607 - DNA, 248 bp, Glycine max
  unsure (1)..(248): unsure at all n locations
gaaagagttcagctacgagaagatcctcaaagacctcaagaaagagttctgctgcaatggcaatgttgtgcatgacaaggagcttggcaagattatccaactccagggtgatcagcgcaagaacgnttctcacttcctcattcatgctcgcctttgttaggagggacagatcaagattcatgggttttaaaccactaacactaactaccactttcttctatgatgaaattaaacctatggcagcggtt

SEQ ID NO: 145608 - DNA, 230 bp, Glycine max
taaagattttatccaattgaaattttaaaaatgaatgggataaacttaagacttcaattattgaaattgaataagtaaacaattaaattggattggtcgaatggtatcaaaaaaatggagtactaactcccatttcgtatttattattgaattaacgatcaactgcttggttatcgaacatttcttttgatttcaaaattttccggaaaaatttgaatctattttatatg

SEQ ID NO: 145609 - DNA, 237 bp, Glycine max
agacatgggtacggtggctccaagagttgaaagcttggcgagcagcgggataaagtgtatcccgaaggaatacgtgaggcctcaagaagagctcaagagcatagggaacgtgtttgaggaggaaaagaaggaagggctacaggttccgacaattgacttgagagagatagattcggaggacgaggttgttcgagggaaatgtcgtgagaagctgaagaaagcggcggaggagtgggg

SEQ ID NO: 145610 - DNA, 237 bp, Glycine max
cgaaacatggcaagagtggtggcactccaacagaaccaactatctttctctaccttagcttcctctctttctgacttcagtggaaccagacttcaaactcaacttcagttcaagagaaagcaatgccatccaaaagggtctttctacgtctccgcatcgagcaccaagaaaatcctaataatgggaggcaccaggtttattggtgtgtttttgtctaggctccttgtcaaagagggt

SEQ ID NO: 145611 - DNA, 234 bp, Glycine max
catctttcaatttcaatcaacggttataaccttttctatttgagcatcatcatgtccaccgcagcgcacccaaggccaagaaaacggcgtcgtccaagaagcccctctcccatcctaccttcgccgcgatgatagcggaggcgatagcgagtctgaaggagagaaccggttcgagccaatacgcgataaccaaattcatcgaaggcaagcacaaggagttgcctccaacctaca

SEQ ID NO: 145612 - DNA, 232 bp, Glycine max
ggacctccaacctttgagcagcccaagatgactctggagaagctcttgctgtatggtaacatgcttgtccaagaacaagagaatgtcaagagagtccaattggctgacaagtacttgaacgaggctgctcttggaaatgctaacgaggatgctattcagaggggaactttcttccagtcttgaattggaggcaaagcaaacttggcaagtaaatatttctgttcgtgaaggt

SEQ ID NO: 145613 - DNA, 233 bp, Glycine max
atctgttccttctagtggacctaatgctaatcctttagacctctttccccagggccttcctaatgttgggtctggtgctgctggtgctggttccttagactttcttcgcaacagtcaacagttccaagccttacgcgctatggtacaggctaatccacaaatattgcagcctatgctacaagagcttggcaaacaaaatcctcatcttatgcgattgattcaagagcatcaag

SEQ ID NO: 145614 - DNA, 234 bp, Glycine max
tgtgattttctcaagagaaactttaagcagatgtctaatgttttgtgggtggctcctgaggataaggcgagtttatggtcacaacttcattatgtttcgtgtaataatctggaaatgcaagaagcttatcttgtcaatctcgtaaatgtgttacgataattgtatttgcacagtccagaggaagctcgccaattgagaaggaaagctctctctcgtattgaatggctgcaaaaa

SEQ ID NO: 145615 - DNA, 235 bp, Glycine max
attgactagtatcattaagatggctaattcctacttatccttgcttgtcttgatccttgtagctctgctcctcacccctcaagggcttgctgatgaatctgattcttactataagccaccagtttacaagaaaccaccagtgtacaagcccaagcccaagccacccattcacaagcccaagccacccgtttacaagcccaagccacccgtttacaagaaacccccttatggtaag

SEQ ID NO: 145616 - DNA, 228 bp, Glycine max
cacaagccaagtgaaagtgagaaaaaataaaaatcaaagagcataatgtcagggatcattcacaagattggggagacccttcatgtgggagggcacaagaaggaggaggagcataagggtgagcaccatgctggagaatacaaaggggagcaccatggtgaacacagtagtgagtacaaaggagagcatcatggtgaacacaaagctggagagtaccatggtgagcac

SEQ ID NO: 145617 - DNA, 232 bp, Glycine max
ctggacaagacaattgcaagtgatttcaaaggaagggagataggaactgaaaagttgatttgacttattgatctgcagaatatttcatataaaaatattgatgcacgtgggttaatcacaggttttcaatttttacaggcttactacccagaacgtttagcaaaatgctatatgttacacatgccatggttttttgtgagtgtttggaaactagtttctcgcttcctagaga

SEQ ID NO: 145618 - DNA, 233 bp, Glycine max
gcacgagcgcaacttcgtccccggattcgagtacctgtcgaggttccaatctcgctccctcgacgccaacgccagagtagtatccgttgcatggattctcaaggtacacgcgtattatggctttcagcctttgacggcgtacctcgccgtcaactattcggatcggtttttggattctagccagttgccggtgagctctcatttctcggcagctttttaaggatgtgttattt

SEQ ID NO: 145619 - DNA, 222 bp, Glycine max
tgcaaacattagctatccctacaatactccttgtgatattcatatgggtggtacaaccaaagcaacgtcatgggaagattgcaccaggtcccaaggcgttgccaattattggtaacctccacatgctagggaaactcccgcaccgcacccttcaaacctttgcaagaaaatatggacccataatgtccttgaagctagggcaagtccaagccatagtggttt

SEQ ID NO: 145620 - DNA, 233 bp, Glycine max
caagattgtataaaattgccattgatagcacataattcttcaacaggttcctggatctaactggcaatgtattggggaaaatttggattgggaatagtataaattggaattgatagaaaaaaaaaaaaaaaaaaaaaaaaaaaaaaaaaaaaaaaaaaaaaaaaaaaaaaaaaaaaaaaaaacaaaaaaaaaaacggggcccccccccctaccagccccccccccccccgaaa

SEQ ID NO: 145621 - DNA, 230 bp, Glycine max
ggtgaacttaagaaactggtggaggagggcaaagtgaggtatatagggttatctgaagccagctcagatacaataaggagagcgcacgcagttcatcccatcacagctgtgcaaatagagtggtctatatggactcgtgacattgaggaccagatagttactatctgcagggaacttggtattggaattgtatcatatagtcctcttggtcgtggtttctttggcggcaa

SEQ ID NO: 145622 - DNA, 231 bp, Glycine max
tggcaaacctgctgaacgaagctgctatattagctggtcgtcgtggaaagacagcaatttcttccaaagagattgatgattccattgataggattgtggctggaatggaaggaaccgtaatgacagatggaaagagcaaaagcttagtggcatatcatgaagttgggcatgctatttgcggaactttgactcctggtcatgatcctgtacaaaaagtaaccttagttcctc

SEQ ID NO: 145623 - DNA, 235 bp, Glycine max
ttcggctcgagggttcttagatattaggatgaagtttgattcaaccatcagtgttgcgttcatggtcactgcaactgatgagaagtccatgactggctatggttctcctgtagagttcctatctcatgtggattacgggctttgaggacgatccgtctttggctatactgtgtgctgtgggtggttatgattccaatgctggtgcaactgcaaatgtcttggagtggtcaacgcc

SEQ ID NO: 145624 - DNA, 228 bp, Glycine max
gaacaactgaaactattagattcaatttattcgctcctttcttcactgaaccaaaattggattgaatggatgctatcagaaagcaagcctccaagcttcgagaacaggtcgctcgccagcaacaggctgttctgaagcagtttgggggtggcggttatggaggttcagataatgtggttactgatggagtggagctccagctacaccagagacttgagaaactttata

SEQ ID NO: 145625 - DNA, 232 bp, Glycine max
gaagcaatgaaagtgagagagtccaattatgcgaacgctttgtgatgcttgtgagagcgccgcgggtatagttttctgcgccgctgatgaggctgcactttgtcgtgcctgtgatgagaaggttcacatgtgcaacaagctagctagtaggcatgtgagggttggtcttgctagtccaagtgatgtaccacggtgtgacatatgtgagaatgcacctgctttcttctattgc

SEQ ID NO: 145626 - DNA, 231 bp, Glycine max
aaattagttcattctctttgcgcagttccctacctctcctttcaagatgcagatcttcgtcaagaccctcacccgctagaccatcacccttgaggtggaaagctctgacaccatcgacaacgtcaaggccaagatccaggacaaggaaggaattcccccggatcagcaacgtctcatcttcgccggaaagcagctcgaggacggccgtaccctcgccgactacaacatcca

SEQ ID NO: 145627 - DNA, 218 bp, Glycine max
taaaagttgcaaatgcttataaacatccttatattattgcagaatttatagctggacaattatcgcttagaggctcgtctcgtatagcaatgataatagctattgaattaactgcacaggcgggtacaaaacgagttcaagtacaaattgcaggacgtatcgacggcaaagaaattgcacgtgttgaatggatcagagcaggtagagttccgccacac

SEQ ID NO: 145628 - DNA, 227 bp, Glycine max
gatttccagtacgaatacgatccgtgaaagcgtggcctatcgatcctttagtccttcggaatttgaagctagaggtgtcagaaaagttaccacagggataacttgcttgtggcagccaatcgttcatagcgacgttgcttgttgatccttcgatgtcggcttctcctgtcattgtgaagcagaattcatcaagtgttggattgtgcacccaccaatagggaacgtga

SEQ ID NO: 145629 - DNA, 222 bp, Glycine max
aaactcttgaggaatctaatgcaaacttggatgaagtggttgcccttgctcaagagctccagactaaggctaaaaaaagagtgttatggggaacagctcagttgttcatgcatcctcgttacatgccatggtgctgctactagctctgaattaaaggtctatgcatatgctgctgctcaagcgaagaaagccatagaggtgacacattatttggggggagaa

SEQ ID NO: 145630 - DNA, 257 bp, Glycine max
ctgatttggtgcctcttgcacccttgcgactatctccaatagttatccagaaaatgccgagtgtcttcagtaaggaaactgagattgtcatgtatgtcgagaatatgttgaggctggagagtggtgcacttggagaaactgttggttctaccatgctgcctgctcttgtggataggttgctagagttggatgtggaaattggatgggatggaatcctgcaagaagatgctaaaggcatatttgaaatggagttagaa

SEQ ID NO: 145631 - DNA, 252 bp, Glycine max
ttttcatccaaaattctatcaaactcaagctagagtgtgtcaagaaggaaaaaatggtaggtgaagaaactgagatgaaacaacaatccaggttcaagaggatttatgtgttctgtggaagcagccccggaaacaagagtagctataaggatgctgctattgagcttgggaaagagttggtgtcaagaaatattgatctggtttatggaggaggcagcatcggtttgatggggttggtttcccaggctgttt

SEQ ID NO: 145632 - DNA, 253 bp, Glycine max
agcaaagccagttacatattcatatgccttctgccacttgattttctctcttgctagcatgtattctgcaatgcttctgactggttggtctacatctgttggagagagcgggaagttggttgacgtggggtggccttctgtgtgggttcgaatcatcacttcctgggcaactgctctgctgtacttgtggtctctcgtagctcctatcatgtttccagaaagggagttctgagcatcacgttcctcagttcca

SEQ ID NO: 145633 - DNA, 252 bp, Glycine max
ttttcatccagaattctatcaaactcaagctagagtgtgagaagaaggaaaaaatggaaggtgaagaaactgagatgaaacaacaatccaggttcaagaggatttgtgtgttctgtggaagcagccccggaaacaagagtagctataaggatgctgctattgagcttgggaaagagttggtgtcaagaaatattgatctggtttatggaggaggcagcatcggtttgatggggttggtttcccaggctgttt

SEQ ID NO: 145634 - DNA, 254 bp, Glycine max
ggctgcacaagctcttgtatcatcatcatctcttaccttctcagccgaggctacaagacaaagtcttggaccaagatcactccaatctccatttggcttctcaagaaaagcctcctttcttgttaaggcagctgctactccccctgtcaagcaaggatcagacagacctttgtggtttgcatcaaagcaaagtctttcctacttggatggcagccttccgggtgactatggatttgaccctctgggactttcgg

SEQ ID NO: 145635 - DNA, 253 bp, Glycine max
ctcagttcatgggcgcaggatccaaccaatgcagtttcatcatttcaagtcagtgttggtagagctggaaccacaaacaaaactgtcaaagtccccaaaaacttcaccttgaaagcaccaggaccaggttatacttgtgggccagccaagattgtggcacccactaaattcattacttcagacaaaaggagagtgacccaagcactgatgacatggaatgtgacatgcacatactcacaatttctggctcaga

SEQ ID NO: 145636 - DNA, 252 bp, Glycine max
gcgctgcctgaatatacagccaatagggcccctatgcataacaccttcatgtaatgggttttcaatggcaaagtactattgcaatatatgcaaattttttgatgatgaaaggactgtatatcattgcccattttgcaatttatgccgtgttggacaagggcttggtattgattattttcattgcatgaagtgcaattgttgcctggggattaaatcatcatctcataagtgcctggagaaaggtttagaaat

SEQ ID NO: 145637 - DNA, 250 bp, Glycine max
caggcagtcataaaaagattgatgactgatgtgccttttggtgttctactctctggaggtttggactcttcattggttgcatccgtcacttctcgctacttggccaacacaaaggctgctgagcagtggggatcaaagttacattcattctgtgtaggccttgagggctcaccagatttgaaggctgcaaaagaagttgctgactatctaggcactgtccaccatgagtttaccttcactgttcaggatg

SEQ ID NO: 145638 - DNA, 248 bp, Glycine max
ccgtaagctcccaagcagtgggaggaggctcgggactctgaccgcgtgcctgttgaagaatgagccggcgactcataggcagtggcttggttaagggaaaccaccggagccgtagcgaaagcgagtcttcacagggcaattgtcactgcttatggacccgaacctgggtgatctatccatgaccaggatgaagcttgggtgaaactaagtggaggtccgaaccgactgatgttgaagaatcagcggat

SEQ ID NO: 145639 - DNA, 249 bp, Glycine max
gaggaaccctagctagggtttggaagaagctgatccgagaagatggtgcagcgtctcacctaccgcaaacgccacagctatgctaccaaatccaaccagcacagagtcgtcaagactcccggtggcaagcttgtttatcagaccacgaagaagagggccagcggacccaagtgccctgtcactggaaagaggattcaagggattccacatttaaggccagcagagtataatagatcaaggttacacaga

SEQ ID NO: 145640 - DNA, 252 bp, Glycine max
tggaaacatgactaaccttgtagtccactggaccagccgtaccagacattttagggacacagtcaaagcagcttctgaatttgcttcaagaaatcatttgccccatcgcattcaggatcaaatgttgtcacatatatgtttaaggttcaaaacagaaggactgaagcagcaagaaacattgaatgatcttccaaaggcaattcgttcaagcattgcacaccatctgtttttccctgtcgtgcaaaaggtcta

SEQ ID NO: 145641 - DNA, 249 bp, Glycine max
gcacgagcgcaacttcgtccccggattcgagtacctgtcgaggttccaatctcgctccctcgacgccaacgccagagaagaatccgttgcatggattctcaaggtacacgcgtattatggctttcagcctttgacggcgtacctcgccgtcaactatatggatcggtttttggattctagccagttgccggtgagctctcatttctcggcagctttttaaggatgtgttatttccgaaagttgaaaaac

SEQ ID NO: 145642 - DNA, 250 bp, Glycine max
attcgcggttgttgaattctgagcagccaccgtgaaccggtctcacctcgttgactcattctccgtccacttgcgaaagagaagagatctgaaaccctaacctaaccctaacagaggtaatggattcagtgcctcgaagaagcagaggaggaggcgttttcgaaagcctctacaaggtcctcatgcgccgcaactccgtctacgtcaccttcatcatcgccggcgccttcctcggagagcgggctgtgga

SEQ ID NO: 145643 - DNA, 245 bp, Glycine max
cttccattaacgggtggtgcctctcttccatctccccagccaaattctctctcaagaaggccacattaggcccttctgtcttcgcaaccgttagcactccttcttctccttcttcttcttcttcttcttccttcccttctctcattcaagacaggcctgtctttgctgcccctgcccccatcatcaccccaactgtgagagaggatatggcaaaggaatacgagcaagctattgaagaactccag

SEQ ID NO: 145644 - DNA, 246 bp, Glycine max
ggctcgagccgaatcggctcgacacagctgctagagatcccgtgtattatccgcatcacacgaactcggatcgactgtgggaggatatggaaaaaattgggagaaggaagagaggactatagtgatgatccagattggttagattctgagttggacttctatgatgagaatgccaattttgttcgcgtgaaggtaagagattgctttgatactaaaagattggggtatgtttacgaagatgttgat

SEQ ID NO: 145645 - DNA, 246 bp, Glycine max
attgataagcactctgaatggctgtgatggcattccctgggttcattacaagggtcggcaaggagatttctacattttggtcatggacatgcttgggcccagtctttgggatgtatggaattctgttggtcaacaaatgtcaccaaatatggttgcgtgcattgcagtagaggcaatatcaattcttgagaagctccacttgacagggtttgtgcatggagatgtgagacctgaaaactttttgct

SEQ ID NO: 145646 - DNA, 249 bp, Glycine max
attgtggcctctggcgtttcggtcgcggcttctactctcacagccgaagcagaaccatcttccaaaggttttgaaagattgccgtacaagccggaagggtacaattattggacatggaggggtcataaaatacatgctgtagtgcaaggagaaggctctcccattgttcttattcatggttttggggcctctgcattccactggaggtacaacattccagaattggctaagaaacacaaggtatatgcc

SEQ ID NO: 145647 - DNA, 244 bp, Glycine max
ggaagtagtggaggacaaggaaacgggattgcagaaatacaccgtagcaccgggagtgaacaagttatcaggggacaaggctgttgtgtgccacaagcagaactacccttatgctgttttttactgtcacaaaactgagaccacaagagcttactctgtgcctttggagggtgctaatggggttagggttaaagcggtagcagtgtgccacactcacacgtcggaatggaaccctaaacatttg

SEQ ID NO: 145648 - DNA, 243 bp, Glycine max
cagtccatttggatgagaacgccatctatggagttccgttttagggagggtggagacgggaaagagatatctttgagtagtagtctgtaagtatacttacacattatgcaaaccagaaagaaaataattaaagaggatctcaatagatggagtgcggatacagatcgaattagatcttgccacgaggaccgagctttggtgggagttgtggtcccttcttgattggtagaatgtgccctgagg

SEQ ID NO: 145649 - DNA, 245 bp, Glycine max
aagaaaagaaaatcctcaattttctgagcagccaaacactctctctctgtctctcgaaaattctcagtttgcagagaaaatctgaatcatgtcgtggcaagcgtatgtcgacgatcaccttctgtgtgacatcgaaggtaaccacctcactcacgctgctatcatcggccaagacggcagcgtttgggctcagagtaccgacttccctcagttcaaacctgaggagataactgccatcatgaatg

SEQ ID NO: 145650 - DNA, 245 bp, Glycine max
ctcttggtttcatagttgaccgtcctttgaagttcaagcaattgagccttcgaaaggggcttaatttgaagagacgtcatcgggatttcttgctgaaatttgaagaaatgccattggtgtgcccctataggaatcctgctgaggctttggccaaggagtcattggaggcagagaagagatcttgtgcactggtgagggaggttcttgcaatgacggttgagaagcggactttaattgaccacttg

SEQ ID NO: 145651 - DNA, 149 bp, Glycine max
attgattaatgatcagaaacggagggcgggagcgtgagatcgtacggagacgaatcgtcggaggaagcgacgagagtgacgcgtagtatcatgatcgtgaaaccgcccgggtaccagagtggatcgcctccggtttctcccgccggttc

SEQ ID NO: 145652 - DNA, 241 bp, Glycine max
ataaaacaaaaggatgtgtatgaacagcataaagaattaattttactgggagagagggttgttcttgcaactcttggttttgatctgaatgtgcatcatccttataaacctcttgttgaggcaataaagaaattcaaagtagctcaaaatgccctagctcaagttgcgtggaattttgtaaatgatggacttcggacatcactttgcttgcaatttaagccccatcacattgcagctggag

SEQ ID NO: 145653 - DNA, 190 bp, Glycine max
aagataagagtcacacccgtttacaaatttgaggatatctgcgaacttttgcgttcttcgcatgttagtattgtgaaggaggtttcagagtttgtcttaaaacgtttggaaaataaaagcccaattgttaaacagaaggctttaagattgataaagtatgcagttgggaagtctggtgtggagttcagaa

SEQ ID NO: 145654 - DNA, 243 bp, Glycine max
gtcgaactccgacggcaccactaacggcgcaatcactgaggcgcagagacagcagcaacagcaaggggggaaggcgttagccgttaagaagccgccgtcaaaggaccgtcacagcaaggtggacggtcgcgggcgccgcataaggatgccaatcatatgcgccgcacgtgtgttccagctcacgcgcgagcttggccacaagtccgacggtcaaaccatcgagtggctcctccgtcaggccga

SEQ ID NO: 145655 - DNA, 240 bp, Glycine max
tgcaattcgaggaactggtgaaaagaggcattcttccattcaaagatgaaaattttgctattgatggcaccttggataagagtttaaattggatttctgaaatgaaggatattagactcaaagaccttccaagttttatcagaacgaccactttggatgatactatgtttgatttcttgggttctgaggcacgaaacactttgagatcatcttcaatcatcattaacacattccaagact

SEQ ID NO: 145656 - DNA, 237 bp, Glycine max
ggcttatggtggatacctaggcacccagagacgaggaagggcgtagtaagcgacgaaatgcttcggggagttgaaaataagcgtagatccggggattcccgatataggtcaacctttcgaactgctgctgaatccacgggcaggcaagagacaacctggtgaactgaaacatcttagtagccagaggaaaagaaagcaaaagcgattcccgtagtagcggcgagcgaaatgggagca

SEQ ID NO: 145657 - DNA, 241 bp, Glycine max
ctttctccgatggctaatccctcactcttgttcttcagtctcctcctattatccgccaccgtagccgccgccgaacggatcgacgatgaagacgaccttctgatccgtcaagtggtgccggatgcggaggaccaccacctgctcaacgcggagcaccacttctccgccttcaagacaaagttcggcaagacctacgccacgcaggaggagcacgaccaccgcttccgtatcttcaagaaca

SEQ ID NO: 145658 - DNA, 238 bp, Glycine max
tggctcgtcactccttgctcttagccctcctcctcttcgccgccgtggtcaccgccgcgatggcggtgcgcgtccgacgccgacgacatcctgatccgtcaggtggtgccagatgttggcgaacgaaagaggaggacaacctgctgaacgccgagcaccacttcgcgagcctcaaggccaagttcgccaagacctacgccaccaaggaggagcacgatcatcgcttcggcgtcttcaa

SEQ ID NO: 145659 - DNA, 228 bp, Glycine max
agcagggcaaccttaaagtctccgactttggactcagcgcggtgaaggaccagataggggtggacgggttgcttcacacgctgtgtgggacccctgcttacgtggcacccgagattctcgcgaagaagggttacgatggggcgaaggttgatgtttggtcatgtgggattatcctctttgttcttgtcgctgggtatcttccgtttaatgatcctaatttgatggtta

SEQ ID NO: 145660 - DNA, 230 bp, Glycine max
gttgaagccattgaggtgggttaccgtcattttgacactgctgcagtgtatggaacagaggaagccataggcctagccgtggccaaagccatagacaaaggccttataaagagtagagatgaagttttcatcacttcaaagccttggaacacagatgcacaccgtgaccttattgtcccagctcttaagaccacattaaagaagctggggacggagtatgtggatcttta

SEQ ID NO: 145661 - DNA, 229 bp, Glycine max
agaacttcatgaccctgtccaacatcaaggttcctctcattcttggtatctggggaggcaagggacaaggaaaatatcttccaatgtgagcttgtctttgccaagatgggaatcaaccccatcatgatgagtgctggagagttggaaagtggaaatgcaggagagccagcaaaactgatcaggcagagataccgtgaagccgcagacttgatcaagaagggaaagatgt

SEQ ID NO: 145662 - DNA, 230 bp, Glycine max
gagttgatcatgatgttttggctgaaatggatgtgctgtataggtgcatcaaagatgctttgagactccatcctcctctaatcatgctgatgagaagctcacacactgattttagtgtcacaacacgagaggggagagagtatgacattcccaagggtcatataattgccacatcacctgcttttgcaaacaggctaggtcatgttttcaaagaccctgataggtatgat

SEQ ID NO: 145663 - DNA, 232 bp, Glycine max
gttcttccatttgactcttgttctgaacgacttttcaagagaatcaaaccatggcagtgaaagtatacggtccccactgtgcttccaccaagcgggtgctggtttgtctggttgagaaggaagtcgaatttgaggttgtccctgttgatgtcactaagggggagcagaaggatcctgagtacctcaaactacagccatttggagttgttcctgtcatcaaagatggagatta

SEQ ID NO: 145664 - DNA, 230 bp, Glycine max
ccctgctgctgctgttcttctcgaacgaacctccaatctgcttgtcacaaaagaggaagggttggaactctatgaagacatgatattagggaggttttttgaggacaagtgcgctgagatttattataggggcaaaatgtttggttttgttcacttgtacaatggccaagaggctgtgtcaactgggttcatcaagcttctgaagaaggaagattctgtagtgagcacct

SEQ ID NO: 145665 - DNA, 223 bp, Glycine max
gataaacttaagaattcaattattgaatttgaataagtaaacaatttaattgtattggtcgaatggtatcaaaaaaatggagtactaactcccatttcttatttattattagattaaccgatcaacttgctttgttatcgaacatttcttttttatttcaaaaattttccggaaaaaatttgaatctatttttatatgcgaatcaatcctactacttctggtc

SEQ ID NO: 145666 - DNA, 228 bp, Glycine max
gtaagctcccaagcagtgggaggaggctcgggactctgaccgcgtgcctgttgaagaatgagccggcgactcataggcagtggcttggttaagggaaaccaccggagccgtagcgaaagcgagtcttcacagggcaattgtcactgcttatggacccgaacctgggtgatctatccatgaccaggatgaagcttgggtgaaactaagtggaggtccgaaccgactgat

SEQ ID NO: 145667 - DNA, 230 bp, Glycine max
tctttttctctctttctctctgcttgcggtgcttcacaagccaaatctaacttgtctctgttttctccgatctagtactactatcaatggccggaaaaggagatggtcctgctatcggaatcgatctcggcaccacctactcctgcgtcggagtgtggcagcacgaccgtgtcgaaatcatcgccaatgaccagggtaacagaaccacgccgtcttacgtcgctttcact

SEQ ID NO: 145668 - DNA, 229 bp, Glycine max
gaagaacaagtagttgagaactaagaaggagaagcaaatggcttcctcaatgatctcttccccagctgttaccactgtcaaccgtgccggtgccggcatggttgctccattcactggcctcaagtccatggctggcttccccaccagaaagaccaacaatgacattacctccattgctagcaacggtggaagagtgcaatgcatgcaggtgtgggcaccagttggcaag

SEQ ID NO: 145669 - DNA, 226 bp, Glycine max
gaagatggagaagtatcagatctggagcaggagaatagcgttggcagcgtttgcgtttgctctgctgttccaatcggcctcagcagacgacgtcgttgtgctctctgaagataacttcgagaaggaagttggtcaggacagaggagctctcgttgagttctatgctccttggtgtggacactgcaaaaagcttgctccagaatatgaaaagcttggtagcagcttc

SEQ ID NO: 145670 - DNA, 225 bp, Glycine max
gtgagatacactaagttatcctcataaatacactctaattaggtggcaagataagtgtctaaccttagtaacattgccacatattgtgttcattttggaattgtgccactaaaattctattcaattcatctatggctgcctcttcttatgctacgcaatcaatcctggcaaaccctttgatccgcatttccagcgggtctagggtgaaccaatttggcgttcctg

SEQ ID NO: 145671 - DNA, 221 bp, Glycine max
ttcttctcttgcggctaggtttagcgcagttcttctagatttaaggaagatgggtaaggtcaaggttcacatcagtattgtggtcattggccatgtcgactctgggaaatccactaccactggtcacctgatttacaagcttggaggcattgacaagcgtgttattgagaggtttgagaaggaagctgctgagatgaacaagaggtctttcaagtatgcct

SEQ ID NO: 145672 - DNA, 225 bp, Glycine max
ctagcgcttcttctctcgcattccgtggagatctagtgctgccaaacctcgctgaaaattagggtttcgtttcggaggtagacgaagatgttcggaagggcaccgaagaaaagcgacagcaccaggtactacgaaatcctcggcgtttcgaagaacgcttcgccggatgatttaaagaaggcttacaagaaagccgccattaagaaccaccctgacaaaggcggt

SEQ ID NO: 145673 - DNA, 223 bp, Glycine max
ggaacactgcaccaaggtcaaacggatatccatccacaagtctcaacatttaagcaccgcctcatcaaacagatgtatcaggcacttctcatgatcattttttgccttcaccaagtgctggaatgttttatgcgatgcctgaaaattatgtacaccagccttctaattctaattatgacagacaagcattttctgctgctgatggggtttttaatgatcttac

SEQ ID NO: 145674 - DNA, 208 bp, Glycine max
ggctcagcggctcgagaaaatgcccacttactttcttccaacgctcctcctcctactcatagccttagccacctctgtctccggccgccgtgacctcgtcggagactttctccggctgccctccgaaactgataacgacgacaacttcaagggcacccggtgggccgtcctcctcgccggttccaatggttactggaattacagacat

SEQ ID NO: 145675 - DNA, 222 bp, Glycine max
gcaaggactaaagataacaatttgttgggcaaatttgaactttctggcattcctcctgcccccaggggtgttcctcagattactgtgtgctttgacattgatgccaatggtattttgaacgtctctgccgaagataagaccactggccagaaaaataagatcactatcaccaatgacaagggtagactgtcaaaggaagatatcgagaagatggttcaagag

SEQ ID NO: 145676 - DNA, 212 bp, Glycine max
  unsure (1)..(212): unsure at all n locations
gagaaagtgaaagtgtctgagagtgtgtgtgtgacttatggagtccaattcagagttcgacgtgattatcatcggagctggcgtcatgggcagctccaccgcctaccacgccaccaaacgcgccctncnaacccttctcctggaacagttcgacttcctccaccactgtggctcctcccacggcgaatcccgcaccatccgcctcacctatc

SEQ ID NO: 145677 - DNA, 225 bp, Glycine max
gtagttgagaactaagaagaaggaaatggcttcctcaatgatctcctccccagctgttaccaccgtcaaccgtgccggtgccggcatggttgctccattcaccggcctcaaatccatggctggcttccccacgaggaagaccaacaatgacattacctccattgctagcaacggtggaagagtacaatgcatgcaggactggccaccaattggcaagaagaagtt

SEQ ID NO: 145678 - DNA, 219 bp, Glycine max
gagaaacaaaaaaaaaaaaaaaaactcttccaaagtagaggcagagaatctaaaacctagggtttgggatcccgaagaacaagggaaagggaggaaaaacccggaaccgcggtaagaacgaggcggacgacgaaaagcgggacctggtattcaaggaggccggccaggaatacgcgcaggttctccgaatgctcggaaacggtcgctgcaaacgatttc

SEQ ID NO: 145679 - DNA, 219 bp, Glycine max
agagagtggtttcagtgagtgatcggtgttcagttgatccttcataagtcgtcatcatcatcatcatcatcaccgttgattgaagaagatgccgatcagaaacatcgccatcggaaggcctgaagaggctactcaccccgacacgttgaaggcggggttggctgagttcatctccaccttgatcttcgtgttcgccggttcaggttccggcatcgccta

SEQ ID NO: 145680 - DNA, 217 bp, Glycine max
accgcaatggccaccgctgccgagaaactctccgctctcaaatccgccgtcgccggattgaacgaaatcagtgagaatgagaagaacggattcatcagccttgtcggccgctatctcagtggcgaacgcagcatgtggaatggttcaagatccagacgcctacggacgaagtggttgtgccttacgacactttggcgccaactcctgaaggttcttc

SEQ ID NO: 145681 - DNA, 221 bp, Glycine max
ggataggatctatgattatgatgtctacaatgacttgggcaacccggatagcggtgataaatatgcacgccccgttcttggtggttcagccttaccttaccctcgcagaggaagaaccggaagaggaaaaactagaaaagatcccaacagtgagaagccgagcgattttgtttaccttccaagagatgaagcatttggtcacttgaagtcatcagattttc

SEQ ID NO: 145682 - DNA, 222 bp, Glycine max
gaccatcacccttgaggtggagtcctccgacaccatcgataacttgagagctaagattcaagacaaggaagggatcccacctgaccagcagagacttatctttgcgggtaaacagcttgaggatggtcgaacccttgccgactacaacatccaaaaggaatccactctccacctcgtgcttcgcctcaggggtggcatgcaaatctttgtcaagactttgac

SEQ ID NO: 145683 - DNA, 232 bp, Glycine max
atccagacaatcctccatctgttagatttcaaacaaggattaacatgacatgtgtcaatcaactgactggagtggttgagccacatttgtttcctatgcttgctaattggaaacgtgagcgtacaatggaagacattttgattcaattgaagagagaaatgatgtctccccaaaataggaagctaactcagcctcctgaaggcaatgaagaatccagggttgatcaaaaggg

SEQ ID NO: 145684 - DNA, 229 bp, Glycine max
ccgcgatgggcgtatggagaagttctactgggcacctacaagggacgatcgtgttggcgtctgcaatggaattttccgcactgacaatgttcctaaggatgacattgtcaagcttgttgacaccttccccggccaatctattgatttctttggtgcactcagggctagagtatatgatgatgaggtgaggaagtggatttctgttgttggtgttgacttcattgggaag

SEQ ID NO: 145685 - DNA, 231 bp, Glycine max
ggtcaggaaccttttctattgatgttcagtatgatgacgtgagtggtttgcaaacacctgcaaagatcagcacatatactattggccctctccaatctacaaaaaatgactaagcaaaagttaaagtgaaagttcggttgaatgtgcatggaattatatctgtcgaatctgcaactctactggaagaggaagaagcttttgaggttccagtttacaaagaacctgcaggag

SEQ ID NO: 145686 - DNA, 231 bp, Glycine max
atttggaagacattgtcaatttaatatatgaaacgctgtcaaatccatcttacaaaggtgttatcaatggaactgcaccaaatcctgtgcgattggcagaattgtgtgatcagctgggacacgcttgggtcgtccctcatggctaccagtaccagactttgcgctcaaggctgtccttggagaaggtgctactgtggttttagaagggcagaaagtgcttcctactcaagc

SEQ ID NO: 145687 - DNA, 234 bp, Glycine max
aggagctcttctccattggttctgcatctgcatgcacacacttgcatagttttggaaaccaagaatttttgaagggtagcatcaacaagaagttctggaaatggagatcaccaatgtcagcgagtatgaagctattgcaaagcagaagttgccaaagatggtgtttgactactacgcatctggtgcagaggaccagtggactctgcaggagaacagaaatgccttttccagaat

SEQ ID NO: 145688 - DNA, 237 bp, Glycine max
  unsure (1)..(237): unsure at all n locations
gtttttatttctctcttctctctgcatcgcttcaggttcttctacaaaagatgtctcgcgtgtatgttggtaactnggattcacgagtcaccgagagagatctcgaagacgaattccgtgttntcggagttattcggagtgtttgggttgcacgtagaccacctggttatgcttttattgactttgatgaccgcagagatgcacaggatgctatccgtgaattggatggcaagaatg

SEQ ID NO: 145689 - DNA, 231 bp, Glycine max
ctctgagatggcaaagaatgtggggattctcgctatcgacatctacttccctcccacctgtattcagcaggaattgctggaggctcatgatggtgccagtaaagggaaatatactattggacttggtcaagattgcatggcgttttgtacagaagtagaagatgtcatctcgatgagtttgacagtagtttcttcccttcttgaaaagtatgcgattgatcctaaacaaat

SEQ ID NO: 145690 - DNA, 234 bp, Glycine max
cagagacagagacgcagccatggggcggagacctgcgaggtgttataggcaaatttagaacaagccataccccaagtcacgtttctgccgtggtgttcctgatcccaagatcaggatttatgatgttggtatgaagaagaagggtgttgatgagtttcctttctgtgtccatctggttagttgggagaaggaaaatgtttcaagtgaggccctggaagctgctcgcattgcttg

SEQ ID NO: 145691 - DNA, 237 bp, Glycine max
aagaagtgaacgagcttgtttatgatgacccgccagtgatttacacctgctcacattctttggttggcccttctagttgtgttagtcaatcacttaagcttggcaagctcactattcatgagaccgaggattcgttggaactagtggatcatgtcaatggagagaccattaaagacatcaaagattcttcatttgtcgacaaatcattgaaagatgaagatgggaatctcaagaaga

SEQ ID NO: 145692 - DNA, 232 bp, Glycine max
ccgtaagctcccaagcagtgggaggaggctcgggactccgaccgcgtgcctgttgatgaatgagccggcgactcataggcagtggcttggttaagggaaaccaccggagccgtagcgaaagcgagtcttcacagggcaattgtcactgcttatggacccgaacctgggtgatctatccatgaccaggatgaagcttgggtgaaactaagtggaggtccgaaccgactgatgt

SEQ ID NO: 145693 - DNA, 233 bp, Glycine max
gctctacccggaacgttaaaagtaatgcccgaaccgcatatctctgggttggaaactccgaaacacagtgccccgggcaatgcgcgtggccattccaccaaccgatttacctgccccagacgccgccgttagtttctcctaacggcgacgccggggttgacggaatggttattaacttggccacgcttctcgctggcacagttaccaaccctttcaacaacggttacttccag

SEQ ID NO: 145694 - DNA, 235 bp, Glycine max
ccacaatgcagatattcgtgaaaagcctaacggggaagacgataaccctagaggtagagtcatcggacacaatcgacaatgtgaaggcgaagatccaggacaaggagggcatcccgccggaccagcagcgcctgatcttcgccggtaagcagctggaggacggccgcaccctcgccgactacaacatccagaaggagtacacgcttcacctcgtcctccgcctccgcggcggcgc

SEQ ID NO: 145695 - DNA, 235 bp, Glycine max
ggaatacacaaacccaatacaatactacgatggacctgagaaatgtagctgatgattctgcagtagaatcttcaagtggtaccaggagagaaagggatggaggtttagttccagtatggtctccaccagcttccagttactcagaacaatttgtaggagatgaaaatggtataacaagcagttcatcttacttgcaaaggcatcctcaatctcaccaaatgctgaattggaagca

SEQ ID NO: 145696 - DNA, 253 bp, Glycine max
ggagttcggctcgaggttattgatgcgcctggacatagggatttcattaagaatatgattactgggacatcccaagctgactgtgctgttcttatcattgattcgaccactggtggttttgaagctggtatttccaaggatggacagactcgtgaacatgctctgctttcattcacccttggtgtgaaacagatgatttgctgctgtaacaaaatggatgctactacacccaagtattccaaggccaggtatg

SEQ ID NO: 145697 - DNA, 235 bp, Glycine max
aaaaaactttcgaaagattttatcgaattgagattttaaaaatgactgggataaacttaagaattcaattattgaaattgaataagtaaacaatttaattggattggtcgaatggtatcaaaaaaatggagtactaactgccatttcttatttatcattgaatttagcgatcaacttgcattgttatcgaacatttctttttgattgcaaaaattttccggagaaaatttgaatc

SEQ ID NO: 145698 - DNA, 226 bp, Glycine max
gaactttcgatgaaccgcgttcacaggtttccgcaccttaaaatctgagacaatagctatcgctacttgatttcaagagtctctcaatgtcttcctacttctttctgtactgtgtcttaagggatagagaatcactctctgtgctggccacagactgcgtgaatcgtatacttttccacacatcatacggatttaagacgatacgtgctgtaggatcaactttcta

SEQ ID NO: 145699 - DNA, 225 bp, Glycine max
gccggacaagagaagtttggtggcctcagggatggatattatatccatgggcaatgcgccattatcatgtttgatgttactgcccgactaacttacaaaaatgtccctacctggcatcgggatctttgccggttcataaatctgtttaacagtttcatcactgattatttatctgcaagttgtttacatcggatgatggacattttctgtataactgatttttca

SEQ ID NO: 145700 - DNA, 234 bp, Glycine max
gagagacaagtagttgagagctaagaataacgaaatggcttcctcaatgatctcctccccagctgttaccaccgtcaaccgtgccggtgccggcatggttgctccattcaccggcctcagatccatggctggcttccccacgaggaagaccaacaatgacattacctccattgctagcaacggtggaagagtacaatgcatgcaggagtggccaccaattggcaagaagaagtt

SEQ ID NO: 145701 - DNA, 227 bp, Glycine max
aaaatatggtccatatgagaatcttcctccattttcatacttgccaagagttgttcactttgagaataaccaacccttcgctgttgctaaagagttggtgcgagagatcgaaatttcccattggggcaatatacagatcacagagcattacagtattatccatgctggtgctcagagcaaaggagaattttctaggcttgactatcagaccaggcaatttttaagag

SEQ ID NO: 145702 - DNA, 221 bp, Glycine max
ctcgaagtgatccactccaggtgggccatgctcggagccttgggctgcgtcttcccggagttgctgtcccgcaacggggtgaagttcggagaagccgtgtggttcaaggccgggtcccagatcttcagcgagggtgggctcgactacttgggcaacccaagcctgatccacgcccagagcatcatctccatctgggccacacaagttatcctaatgggtgc

SEQ ID NO: 145703 - DNA, 221 bp, Glycine max
ggtgcaagcaagtcgtttgagcagacctgctttctggatgttaagggatactgtcgtgaagagaggagccacgaagggcttggaatgggtggttctgttgtctaccaaaaattcgggaagactagtgactgtggttcacctagatcaactctaaagtgctggaatgaggaagatgaggaagagtagtttccttaagtgtctttattattctgtccttgtga

SEQ ID NO: 145704 - DNA, 237 bp, Glycine max
cggtatgatgttatttctgcatccaacactggtggttcttgggataatgccaagaagtacattgaggctggtgcttctgagcatgcaagaagccttggtccaaaagggtcagattgtcacaaggcagctgttattggtgacaccattggagaccctctaaaggatacatctggaccttcacttaacatccttattaagctcatggcggttgagtctcttgtgtttgctcccttcttt

SEQ ID NO: 145705 - DNA, 220 bp, Glycine max
accagattgagacaaagaatagatcctcaatacaatgaggttcaggctcagatggaaacaaatttgtttgaattgtctcttgatgatgttgaaactcctaaaggttccatgttggatcttaaagtttctcaatctaaaattgcacttcccaaaaacacagttggaggaaccattctgcgtagtgatctattggcaaattttttgacagagggcaattttg

SEQ ID NO: 145706 - DNA, 219 bp, Glycine max
agtcgagcgaattcggctcgagggccaacctgaaaagataccgtagtgaggaggatttcaagttacaagctatgaatccctatggacggaccaagcttttcctggaagaaattgcccgagatattcagaaagctgaaccagaatggaagatcatattactgagatacttcaatccagttggggctcatgatagtggcaaactcggtgaagatcccaagg

SEQ ID NO: 145707 - DNA, 212 bp, Glycine max
cttccgagttccgagttgcgagttgcagagagagcaatgagtcaggaatcgtgtatatatagcttcgtggctcgggggacgatggtgttagccgagtacaccgagttcactgggaacttccctgcaattgcagctcagtgcctccagaaactaccctcttccaataacaagttcacctacaattgcgaccaccacaccttcaattttctcgt

SEQ ID NO: 145708 - DNA, 228 bp, Glycine max
ggaaaatgttcctttcattaatggaagtcctcagaacacttttgtaccagggctgcattgatcttgccatcgcgaggaacactttgattggtggagatgacttcaagagtggtcagaccaaaatgaaatctgtgttggttgattttcttgtgggggctggtatcaagccaacatctatagttagttacaaccatctgggaaacaatgatggtatgaatctctcggctc

SEQ ID NO: 145709 - DNA, 221 bp, Glycine max
atggtgccaaggtcttgatggtcttgcgtctcgctcagctgcatactaccagcaaggtgcccgtttcgccaaatggcgtactgttgtgagcatccccaacggtccctctgctctggcagtgaaggaagctgcctggggtctagctcgctatgctgcaatttcacaggagaacgggttggtcccaattgtggagccagagatcttgcttgatggtgagcatg

SEQ ID NO: 145710 - DNA, 222 bp, Glycine max
cgttcttccatagattgaaagccggacgcccaattcctatccccagctcaggactacagataacccaacttggtcatgttaaggatttggcgacacttttatccaagttcttggtaatgagaaggccagcaaggaagtattcaacatctcgggagagaagtatgtcacgtttgacggattagcaagagcatgtgctaaggctggtgggttcccagagccaga

SEQ ID NO: 145711 - DNA, 221 bp, Glycine max
tccagacctatgcagttggaagcagtggaggatacaagaagggtgtgacagaagcaaaactgaaggttgccataaacgggtttggaaggattggaaggaacttcttgaggtgctggcacggtcgcaaagactcccctcttgatgtcattgccatcaacgacaccggcggcgtgaaacaagcctctcaccttctcaaatacgattccatcctcggaaccttc

SEQ ID NO: 145712 - DNA, 220 bp, Glycine max
  unsure (1)..(220): unsure at all n locations
caggaataaaagtagtagatcttttagctccttatcgtcgtggaggaaaaataggacttttcggtggagctggagtgggtataacggtactgattattgaattgatcaataacattgccaaagctcatggaggtgtatctgtatttggcggagtaggtgaacgtactcgtgagggaaatgatcnttatatggacatgaaagaatctggagtaattaatga

SEQ ID NO: 145713 - DNA, 220 bp, Glycine max
cttgcccctttatctgaagggaggatagatgaagatgggaagttgcagtgttcttatcatgggtggtcttttgatgggtgtggatcttgtgttaagattcctcaggcttcatctgaaggccccgaagcacgtgctatgggatctcctacagcatgtgccactaggttccctaccttggtgtcccagggtttgctctttgtatggcctgatgagaatggtt

SEQ ID NO: 145714 - DNA, 222 bp, Glycine max
cggattgcaacgcaaagggagtgacacttcttgaagctgaaaccacaaagtcattgggtgattatggagatttttcaccttctgagtccatcaaggaagagcttgttccacaaattgattataataaacccttagaggagcttcctttgttgtttgtgcaattgacaagattcaaagatggtgaaagctttgccattggagttgcctgctcccatacgttgg

SEQ ID NO: 145715 - DNA, 220 bp, Glycine max
cctttctctttctctccgacctagcgagaccgagcgatccgatcctaaccccgcgatgctccgccgcgcaaccacctccctcatctccggcgcctcccgccgccgcctctccaccgacgtgccggcgccgcggtggcggattccgtcttcgcggaggcgtggaagaaagtgagccccaacatcgacccgccgaagacgccgctggcgtacatgaagcccc

SEQ ID NO: 145716 - DNA, 220 bp, Glycine max
ctccttgtgacagttccaggacttggtcagtacatctctggtgccattctctttgaggaaactctctaccaatccacaactgatggcaggaagattgtcgacgtgctcctcgagcaaaacattgttcccggtattaaagtcgacaagggtttggtaccccttgctggttccaacgacgagtcatggtgccaaggtcttgatggtcttgcctctcgctcgg

SEQ ID NO: 145717 - DNA, 211 bp, Glycine max
cccggttatcatggcgcaggcataccgcttacttgtggctgaaatgtatgtccaaggctgggattatccattacacttgggtgttactgaagctggaggaggtgaggatgacaggatgaagtctgcaattggcattggaactcttcttcaggatggattgggtgatacaattagggtgtctcgcacagaaccaccagaagaggagatagat

SEQ ID NO: 145718 - DNA, 208 bp, Glycine max
acccacgcggctctagcttctacaaggatccccactaacaccaagtccccatccaaggcttcacactctttcgcaacccaatgcgcctcaaagagacttgaggtgacataattctctgggctaagatccacttcatgtgtgacatatgctaacgatgctagagaatcgtccttttgtgatcttgtagctgcccaactcactcccaaga

SEQ ID NO: 145719 - DNA, 218 bp, Glycine max
tttgaccccaagccaattaagggtgattggaatggtgctggtgctcacacaaactacagcaccaagtccatgagagaagatggtggctatgaagtgatcaaagcagcaattgacaagttggggaagaagcacaaggagcacattgctgcttatggagaaggcaacgaacgtcgtttgacaggacgccacgaaaccgctgacatcaacaccttcttatg

SEQ ID NO: 145720 - DNA, 181 bp, Glycine max
agtgcctgcaatgctgcaggcactgtcacggaagggccaaaatcccctcccatgacatctaacgccagggttacacgtgtcaaggtatcgtcgccgcccggtttggtctttccccagttgcctggggaaaatcctcactaagcttcatcacgcagatgcgtgattacttagcgatgacctt

SEQ ID NO: 145721 - DNA, 214 bp, Glycine max
gtaagctcccaagcagtgggaggaggctcgggactctgaccgcgtgcctgttgaagaatgagccggcgactcataggcagtggcttggttaagggaaaccaccggagccgtagcgaaagcgagtcttcacagggcaattgtcactgcttatggacccgaacctgggtgatctatccatgaccaggatgaagcttgggtgaaactaagtggaggt

SEQ ID NO: 145722 - DNA, 217 bp, Glycine max
cagaaacaatgtcttgctccaatctcacaatgttggtgtcctcaaaaccttccctttccgatccctccaatctctccttccgctctgtcctcaacccttttcagctcccttcacaaaacccaacttcttgcactccttcacgctcctcaaccacccaaattcagtgtggtctgagagaactcagaacccgcattgattccgtgaagaacactcagaa

SEQ ID NO: 145723 - DNA, 220 bp, Glycine max
ggtggtaatggcagcgtcactacaagcagcagctactttcatgcaacccaccaagttgagcaggagcaacactttgcagcaaaagtctactcagtccatttccaaggcttttggtttggaacctgttggagctataaaggtcacatgctcccttcaggctgatcttaaggacttggctcacaagtgtgttgatgctaccaaaattgcaggattcgccctt

SEQ ID NO: 145724 - DNA, 217 bp, Glycine max
cgctttgggatgcggaggagcgaacaggctcgaacgaatgaatgtgagaggagcgaaaaaagcccagctccctaacctaatgcggcaccgggttcggaccgcagggaaccgtagcatgggaggatgtctaatccttttgcagccgcaaggctggctaatcgtacgcagctggctcgaatacccctggttctggaaggcacatgagtccgaacgctat

SEQ ID NO: 145725 - DNA, 218 bp, Glycine max
agtgacatttgccaagacaagccagcattcatattttgtgttgaagacagagcactcttctgtcaggattgtgatgaaccaattcattcagccggaagcctttccgcgaaccaccagcgcttccttgctactggtatccgagtggcctcgagttctaattgcaccaaagacaatgaaaaaagtcactcggagcctcctaataggagtgcacaacaagt

SEQ ID NO: 145726 - DNA, 215 bp, Glycine max
ctctagaaaattcagtgctgtaacatggcttcggctactctctctgtagccaaaccagcccttcaggcaaatgggaaaggcttctctgaattctctggcctccgaagctcatcaggcttccttcccttttctagaaaatcttcagaggatttccattctgtcattgccttccagacctatgaaaaaacaaacagtggaggatacaagaagggtgt

SEQ ID NO: 145727 - DNA, 214 bp, Glycine max
atggtgccaaggtcttgatggtcttgcgtctcgctcagctgcatactaccagcaaggtgcccgtttcgccaaatggcgtactgttgtgagcatccccaacggtccctctgctctggcagtgaaggaagctgcctggggtctagctcgctatgctgcaatttcacaggagaacgggttggtcccaattgtggagccagagatcttgcttgatggt

SEQ ID NO: 145728 - DNA, 212 bp, Glycine max
gtaaaaaaaaaccaagtgatttcttctaattacaacacgtataaaaaagaattattggatatcatagataatctctttatcaagaattatatatcggaagatgcgattctagatatggaaaaaaatatgtatagaaagtattttgattggatgggaatcaatagagaaatactaaatcgttccatatcgaatccagaattttggttcttttc

SEQ ID NO: 145729 - DNA, 216 bp, Glycine max
gcagattttcgtcaagactttgacaggaaagaccatcaccttggaggtggaaagttctgatacaattgataatgtgaaagccaagattcaggataaggagggtattcccccagaccagcagaggcttatctttgccgggaagcagcttgaagatggaagaacccttgctgattataacatccagaaggaatctactttgcacttggtgttgcgact

SEQ ID NO: 145730 - DNA, 212 bp, Glycine max
ctcgagcgtggctgaggcctctgcacaagcttgtgtctctattccttccaatccttagagttctctgcaaaggggtttcagtgcataataattcctgtaatgtgcaccagtaaagaccaaagtatgattattgttacattatgctatatgattgtacttgtatatacatattttgtcccgcctttgtaaatacaattgggacactactagga

SEQ ID NO: 145731 - DNA, 209 bp, Glycine max
aagaactatgagctcaaggaggggctgcttcgtgctgtcgctggcaccggcatgtgggagtgtgtggacttcttccctgtgtccaaggagaatgagaatggattggatacttctattaatggggctgaggtgaagcatgtgatgaaggtgagcctggatgatgatagacatgattactattcaattgggacttatgatgagaagaatgt

SEQ ID NO: 145732 - DNA, 102 bp, Glycine max
cagtgacaaaactgggactctcaccttaaataagttgagtgttgacaggaacttgattgaggtgtttgctaagggtgttgagaaagagtatgttatccttct

SEQ ID NO: 145733 - DNA, 257 bp, Glycine max
caacattgaaggggtataaagtcatagtggctatgccagcttctgtgagtcttgagagaaaaattgtacttcgagcctttggagctgaagtctatctcactgaccctgccacaggaaccgatgcagttcttaggaaggccgaggagatagtgaataacacgcccggaagttacatgctccgccagatagataatcctgctaatccaaaaattcattacgagaccactggtcctgagatttggagagactccggaggg

SEQ ID NO: 145734 - DNA, 251 bp, Glycine max
attgcctattccgcaatatggcggaaattgcttcgattgagctgaacaagtttgtgctcttttgtttgttggtgctaatacaagtggcagtatctgaaatcatttttgaagagcgttttgatgatggatggcgaggtaggtgggtgaagtcagactggaaaagcagtgaaggcaaagcaggttcattcaagcacacagctggaaaatgggccagtgatccagatgataaaggtattcaaacatccagtgat

SEQ ID NO: 145735 - DNA, 123 bp, Glycine max
cagcagccttggcaagaacgccgttctgcggaatatatgtcccatgctcctttaggctccttaaattccgtgggtggcgtactacagagattaatgcagtcaattatgtatctcctagaagtt

SEQ ID NO: 145736 - DNA, 279 bp, Glycine max
tcgcatgctcgcgtatgcggctcgagcggaagcatacacagatggctcgtacgaagcaaaccgctcgtaagtccacaggaggaaaggctcctaggaagcagcttgcaaccaaggctgcacgtaagtctgcaccaactactggtggtgtgaagaagccccaccgttatcgtcctggtaccgttgctcttcgtgagattaggaaataccagaagagtaccgagcttttgatccggaagctccccttccagaggctggttcgtgaaattgctcaggacttca

SEQ ID NO: 145737 - DNA, 253 bp, Glycine max
cgtgaatgcgtataaaaggtaaataaagaaattagcgtcaaaatgttgggtgtgttcagcagctccatagtgtcgccgccggacgagctcgtcgctgccggcctccgtactccgtcgccgaagatgacggcggcggcgctgcggaagcggttcgaggagaagaacccctccgccgtgtcggtggaggtcggagagcatgtccagctcgcttatacccaccacaacgagtcgccgtttcagcccagatcctttg

SEQ ID NO: 145738 - DNA, 251 bp, Glycine max
cacaaggcagaaagcaagctcatcctagagttttaaaaatggcagcagcctcctccatggctctctcttccccatccttggctggcaaggccgtgaagctgggcccatcagcccccgaagtcgggagggtcagcatgaggaagaccgtcaccaagcaggcctcctccggaagcccatggtacggcccagaccgcgtcaagtacttgggcccattctctggcgagcccccgtcctacctcactggcgagttc

SEQ ID NO: 145739 - DNA, 244 bp, Glycine max
cacaagaactctccaaggatcctccttcccacgtgattctttggctggaaaaatccaagaggtttgaaatttgaaggcagggaagatggatcatttcaatgcaccaggaagaaaccatctctttgttccagggccggttaacattccggaccagatcatccgggccatgaacagaaacaatgaggactaccgttctccagcaattccagctatgacaaaaactttgcttgaggatgtcaagaag

SEQ ID NO: 145740 - DNA, 250 bp, Glycine max
gtaggtaatatcgatgaagctactgcgaaagctacgaacttagaaatggagatcaatttgtcgaaatgactttaaatctttgtgtactgacccccaatcgaattgtttgggattcggaagtgaaggaaatcattttatctactaatagcggacaaattggagtattaccaaatcatgcgcctattgccacagccgtagatataggtattttgagaatacgtcttcttaaagaccaatggttaacgatggc

SEQ ID NO: 145741 - DNA, 251 bp, Glycine max
gttactggacgttatgtgatggacattgcttgtgggggtcggcatagtgttgtgataacagattctggggcgcttcttacattcggctggggactgtatggccagtgcggacaagggaataatgctgatcagctaagaccaacttcagttccttctttattgggaactagagtggaaaaaattgctgctggactttggcatacattgtgtgtttctgtaaatggtcaaatttatgcatttggtgggaatca

SEQ ID NO: 145742 - DNA, 255 bp, Glycine max
atcgacgaatgcttgcctattctacagttggaacacctgattatattgctccagaagttcttctgaagaaaggatatggcgtggaatgtgattggtggtctcttggagctataatgtatgaaatgcttgtggggtatccacccttttattcagatgaaccaatgttgacttgtagaaagatagtaacttggagaactactttaaaatttccagaagaagctaaacttgcagcagaggcaaaggatctcatttgta

SEQ ID NO: 145743 - DNA, 254 bp, Glycine max
atttatactggaacgaatggttatcttgattcattagaaattggacaggtaaggaaatttcttgttgagttacgtgcttacttaaacacgaataaacctcaattcaaagaaatcatatcttctaccaagacattcactggggaagcagaagtccttttgaaggaagctattcaagaacagatggaactctttttactacaggaacaggtagaaaaaaattgattaatcatttaataactttataatttcacttt

SEQ ID NO: 145744 - DNA, 249 bp, Glycine max
cacagccatgccactcaagacctccatgattcaattgctgctggtaactatcctgagtggaaactgtttgttcagacaatagatcctgagcacgaagacaaatttgactttgaccctcttgatgttactaagacttggcctgaggacattatacccttgcagcctgttggtcgcttggtcctgaataagaacatagataatttctttgctgagaatgaacaacttgcattttgccctgccattgtggtt

SEQ ID NO: 145745 - DNA, 248 bp, Glycine max
gcggctgttggggcttaccttcatgtcctcttgaacattgggggttttcttactacagtggcatgcgtgggaagcagtgtttggttactctcgacacctccttttgaagagaggaaaagagtgactttgttgatggccgcatcactgtttcagggtgcctctattggacccttgatagatttggctattcaaatcgatccaagccttatctttagtgcatttgtgggaacatccttggcctttgcatg

SEQ ID NO: 145746 - DNA, 195 bp, Glycine max
atgcatacttgtttggttggtcccattttaaatgactacaggtctgtgggggtaatcgttccttctcaagaaggaaaagcgatcattgtgcagccctgatcgggtggtgaatcgcaaatggacctgcatttggttgtgtgctgatgaaggatttccttaaggcacttgcaaagcgcctcaagcacaacaatactg

SEQ ID NO: 145747 - DNA, 248 bp, Glycine max
  unsure (1)..(248): unsure at all n locations
ggattgcaacgcaaagggagtgacacttcttgaagctgaaaccacaaagtcattgggtgattatggagatttttcaccttctgagtccatcaaggaagagcttgttccacaaattgattatatctgacccttagaggagcttcctttgttgtttgtgcaattgacaagattcaaagatggtgaaagctttgccattggagttgcctgctcccaaggnttggctgatggtcttagtgcaattcaattca

SEQ ID NO: 145748 - DNA, 254 bp, Glycine max
ctattgcacaatggatgcagatgcagctcctttgcacatagcaatgtatccatggtttgctatggggcacctcaccccatttctccaccttgccaacaagtcagccaaaaggggacacaaaatctccttcttcatacccagaagaacacaagccaagttagaagacctcaatcttcacccaaacctcatcacctttgtccccatcaatgttcctcacgttgatggtcctgcatatgatgcagaaaccacttcag

SEQ ID NO: 145749 - DNA, 244 bp, Glycine max
aaaatgtaagacagtggcggtgacttgttctggggtgtctgcaaggcaaagaagaatgaataccaagaggaagactgcgattaaaacttgtggtgctatgcagctgaagtccaaaatcagtccagagctgcttcaacaccgtttgaagggctatgtgaaaggcatagtgagtgaggaattgctctctcatgcagaagttgtaaacctatcagagagaataaaagttgggctttccttagaggag

SEQ ID NO: 145750 - DNA, 246 bp, Glycine max
ctggacttaaacagtataacttgggataacaacatggacggtttttccattgctcctgcttttatggacaagcttgttgttcacatcaccaagaacttcatgaccctgcctaacatcaaggttcctctcattcttggtatttggggaggcaaaggtcaaggaaaatccttccaatgcgagctcgtctttgccaagatgggaatcaaccccatcatgatgagtgctggagagttggaaagtggaaat

SEQ ID NO: 145751 - DNA, 246 bp, Glycine max
ggcgatgtgaattccttggttgcacaaagagtgcagaaggacgtacagatttctgtattgcccatggtggtggccggagatgcagtcatgaaggttgtacccgggctgccagagggaaatctggattatgcatccggcatggtgggggcaagagatgccagagagaaaattgtaccaagagtgcggaaggcctatcaggcctttgcatctcacatggtggagggcgtcgatgccaagttcctggat

SEQ ID NO: 145752 - DNA, 217 bp, Glycine max
  unsure (1)..(217): unsure at all n locations
acagttggtattcctgagatatcaggtatagcattggcctgtgctatgaatagttcttttagggggcgtgccagttctgatatttacaccatctgctctcaagactgtgaattatggaatcttcgcatgcataaatgctatgactatgntatttaatcctaacccgtgtactgttgcatggagtttggaatttctgaagcgtaccggatttcattgt

SEQ ID NO: 145753 - DNA, 168 bp, Glycine max
cgtcacgcctttgcgcagggtcgcccgtgggcggagctcatcgaccggagctccatgtcccgacctgacaccctcgccgaagcatactctcggatccgcaagaactacggctacttccgcgtccattatctaaccctaatcgcgctcgcgctggccgtctcgctcatc

SEQ ID NO: 145754 - DNA, 251 bp, Glycine max
attgactttgactacaaggagtatgcgaggcagagatttcagcaatactggttgaagaagcctactttattggactcaccaagtatcgtttcccaagatgggattgccaatggtgtgaaccattgacatggatgcttcttatgtatttagcatgttcagcttggtatgtgttgactaatatatagataggcatgatgtgatgcataaaatttgtaaataatatataactaaaaatgtgtgatttgagaatt

SEQ ID NO: 145755 - DNA, 250 bp, Glycine max
ggtgtaggagtgtaccaaagtcttccttgtgaagctgccagagagtagaaagttcattgtgcctaaaaacatgagggtgcttgcagttccgttgtgccaagttcatgaaaatcacaagacatatgggcaaattatatcaggggtcccacagctgctgtcaaaattctctttcaacatgatagaatcttgatacctgattgcaacctattttatcatccagggtgaagggactaaggctttgctcgttaga

SEQ ID NO: 145756 - DNA, 244 bp, Glycine max
gagaaattctcaagcaagattcacctccgactgtgtcttgaggccggctaccacgtgcttgatgagtccacgcatttcagcagtgatcttcagccatcctccaaacatttgaggaagaaaaacattggaattctcgaacttgggatcctgagtgcccgcaatttgctgcccatgaaggccagggaagggaggactactgatgcatactgtgtggccaagtatggcaacaaatgggttcgaacca

SEQ ID NO: 145757 - DNA, 246 bp, Glycine max
gataattggtcacactttttttatgaaatggattgaatttatattagtccgcatacagcaaactaattcgattaaatctaacgtacgtattcaatcaaataaatacattatgtcagaatttagaaattctatgttgaaaatctttcttgttttcttatttattacttgtttatattatttaggaagagtacccccccctttttttagtaagaaattgtcagaaattcaagaaacccatgaaattta

SEQ ID NO: 145758 - DNA, 245 bp, Glycine max
gttgtgagatgcaaccccatcaccccatcaggcctcacaatcagagctggttcctatgctgatgagctcgttaagaccgcgaaaacagtggcttcaccagggaggggtattttggccatggatgagtccaatgctacctgtgggaagcgtttggcttcaattgggctagagaacactgaagctaaccgccaggcgtaccgtaccctccttgtgacagttccaggacttggtcagtacatctctgg

SEQ ID NO: 145759 - DNA, 244 bp, Glycine max
cggactgtcaacagagctcttttgaacctgaatgcggctggacctgagggtttcatgctcccagttcatccttctttgggagcagcttgaagaaggttattggctcaagggtccccaacacaaagatttcctctggaagcttcaagattgttgctgtagaagagaagaaagagattgaagagacccagcagaccgacaaggacagatggaagggtcttgcctatgatatctcagacgaccaaca

SEQ ID NO: 145760 - DNA, 246 bp, Glycine max
gttgatgaaagggttttgccggggttcccccgacagttatggttaattggttgcataaaggatttgaacatcccggggagttgactactaagattggctccttgcaaatgttcatagagaataatggaagctgcgaagatatgggccctgggggtttcccagtgaaggaagtgtataaaatttcagtagtggacatgcgactcgcaaacgcagatagacatgctgggaatattctgatcggcaaag

SEQ ID NO: 145761 - DNA, 245 bp, Glycine max
gcacaaagcaaagctcatccttgagttataaaatggcagcagcttcttccatggctctctcatccccatcctcggctggcaaggccgtgaagctgggcccatcagccccagaagtgggaagggtgagcatgaggaagaccgtcaccaagcaggtctccttaggaagcccatggtacggcccagaccgagtcaagtacttgggcccattctctggcgagcccccgtcctacctaaccggtgagttc

SEQ ID NO: 145762 - DNA, 242 bp, Glycine max
tggaatgccaagtttgcagaatatgagaagaaatacagtgaggaagctgcagagctgaaggctattattactggtgaattaccagctggttgggagaaagcacttccgacatacactccagaaagccctgctgatgctacaagaaatctgtctcagcaaaatctaaatgcccttgttaaggttcttcctggtctacttggtggcagtgcagatcttgcctcttccaacatgaccttgttgaa

SEQ ID NO: 145763 - DNA, 244 bp, Glycine max
ctcgagccgctcgagccgattcggctcgaggcctttatttcacttattcacatcaagcatagaccattggaacgtaagagggtaatattgttctcgtatacaagtggcttaacttccacaatgttctctttgctattacgtgaaggtcaacatccatttagcctgtcaaacattgataaaatgatggatgttgctgggaaattgaagtcaagacatgagtttccaccagagaaatttgttgaaa

SEQ ID NO: 145764 - DNA, 242 bp, Glycine max
gctgaggttggaaccaatgtacaaattgttggtgatgatctcttggttaccaaccccaagagggttcagaaggcaattgatacaaaagcatgcaatgctcttctccttaaggtcaaccaaattggttctgtgactgagagtattgaagctgtcaggatgtccaaaaaagctggatggggtgtcatggcgagtcacagaagtggagagactgaggataccttcattgctgacctttctgttgg

SEQ ID NO: 145765 - DNA, 243 bp, Glycine max
tggcagagcaattttggacttgagacagaggaagcatacccctacactggaaaagatggtctatgcaaattctcagctgaaaatgttgccgttcaagtcattgactcggtcaatatcaccttgggtgctgagaatgaattaaaacatgcagttgcatttgttcggccggttagtgtggcctttcaggtggtgaatgggttccatttctacgagaatggagtttacactagtgacatttgcggt

SEQ ID NO: 145766 - DNA, 240 bp, Glycine max
  unsure (1)..(240): unsure at all n locations
cacaagcgcaccaggaacatggaggtggatgttaggagtagcagcagtaccagcattgacacaaatcatattgatggttttgctcccagaatcacctcgttggttgttcagaaagggtaaacaagaagaagccagagatctnntgaggaggattaccctccccaggatgttgaagatgaaatcaatgctttgaaggaatcaattgaaacggaactcaatgaagagcttcagcttcaaaca

SEQ ID NO: 145767 - DNA, 247 bp, Glycine max
gttcacacagcactttcccatcaatcaagaagcgacttgataaggaaattgaaacaaacgtctcgatcactgttgctccatcagaaacgggagaagcccttaaggtctcaggtcgaggagaacttcaacttggagttcttattgaaaatatgagaagagaaggattcgaaatctcagtttctccacccgaagtcgtcttcaaagaggaaaacggaaagaaattcgaacccatcgaagaagtcactat

SEQ ID NO: 145768 - DNA, 218 bp, Glycine max
cgaaggtttcctattcatcagacatggtgaaggcaatcagagttcacgaactcggtggccctcaagttctgaagtgggaggatgtggaaattggagatccaaaagaaggcgaggtccgtgtgaggaacaaagccattggggttaatttcattgatgtctactttcgcaaaggagtttacaaagccccttcttttcccttcactccaggtatggaagct

SEQ ID NO: 145769 - DNA, 235 bp, Glycine max
tgtaaattaagagcatggctgcacaagctcctgtaatcatcatcttcctctaccttctcagcggaggctgcaagacaaagtcttggaccaagatcactccaatctccatttggcttctccagaaaagcctcctttcttgttaaggcagctgctaccccccctgtcaagcaaggatcagacagacctttgtggtttgcatcaaagcaaagtctttcttacttggatggcagccttc

SEQ ID NO: 145770 - DNA, 230 bp, Glycine max
ggagtacaagagtgatatcttggggagagaggaattttacttggtgctgttcatggagttgtggaatccttgtttaggagatacactgataatggaatgaacgaagatctggcctataagaatactgttgagtctataacagggattatatctaaaaccatctcaactaaggttgtattttcatactcgtctagcattaaatttttgtctgttggactcccccatccctt

SEQ ID NO: 145771 - DNA, 232 bp, Glycine max
cgaaatcctcacccattttcttcgtagccaaacactctgaaattctcagttatgtcgtggcaagcgtatgtggatgatcacctactgtgtgaaatcgaaggtaaccacctcactcacgccgctatcatcggccaagacggaagcgtttgggctcagagcaccaacttccctcagttcaaacctgaggaaataactgccatcaataatgactttaatgagcctggatcacttg

SEQ ID NO: 145772 - DNA, 233 bp, Glycine max
ggcattcgctttttccagctatatgtgtacaaggacaggaatgtggttgctcagcttgtgagaagagctgaaagggctggattcaaagccattgcccttactgttgataccccaatactaggacgcagagaagctgatatcaagaacagattcacattgccgccatttttgacattgaagaactttgaaggattggaccttggaaagatggacaaagctgatgactctggact

SEQ ID NO: 145773 - DNA, 230 bp, Glycine max
  unsure (1)..(230): unsure at all n locations
atgagatcctatgaaagtaaaaatcttttntatnttacttataaatattactataaatattgggttgaattgagcgggtcgtacttaaataagaatttcttttccttttttcttagtttctatcgaaaaaaaaaagattcgatagaaactaagaaaataaccaaattgattcgccgagaaagaggagagagagggattcgaaccctcgatagttctttgttccgaactat

SEQ ID NO: 145774 - DNA, 228 bp, Glycine max
gaagaagcagaaggagtagcggcattaaaaatgcagttcctcgtgaaaaatctgacaagggaggactaataaccctcgaggtcgagagcagcgacaccatcgacaatgtcaaggccaagattcaagacaaggaaggcattcctccggatcagcagcgtttgattttcgccggaaagcagcttgaagatggaaggaccctggccgattacaacatccagaaggaatcaa

SEQ ID NO: 145775 - DNA, 231 bp, Glycine max
tcgagttctattattggaggataccaaaaccatctctgaatactcaaagtttcatatctgaagcaagttttcaagaaactgctagagttttatcaaaagccgctctccgggggcgcatagattggttgaaaggtctgaaagagaacgttgttttagggggaatgatacctgttggtaccggattcaaaagaataatgaaccgttcaaagcaaaggcaatataacaagatga

SEQ ID NO: 145776 - DNA, 237 bp, Glycine max
caaaaagatatctgcagtctcgatattttttgagacaatgccatatcgattgaatgaaagtacaggatacatcgactatgaccagatggagaaatctgctacactcttcaggccaaaattaattgatgctggagctagcgcttatgcacgtctctatgattatgaacgtgtacgcaaggtttgcgataaacagaaagctatactattggcagatatggcacacatcagtggattggt

SEQ ID NO: 145777 - DNA, 232 bp, Glycine max
tcttacttgaagaaggttggttacaacccagacaagattccctttgttcccatctctggttttgagggtgacaacatgattgagaggtccaccaaccttgactggtacaagggaccaactctccttgaggctcttgaccaaatcaatgagcccaagaggccctccgacaagcctctaaggcttccattgcaggatgtctacaagattggtggtattggtactgtgccagtgg

SEQ ID NO: 145778 - DNA, 229 bp, Glycine max
ggcaatttagcttcactgttagggccatccaatcagaaaagccaacctatcaagtgattcaaccaatcaacggtgatcccttcattggaagccttgaaaccccagttacatccagccccttgattgcatggtacttatcgaacctccccgcatacaggaccgcagtgagcccactactaagagggatcgaggtgggcctggcccatggctaccttctggtgggcccatt

SEQ ID NO: 145779 - DNA, 116 bp, Glycine max
ggaaggatttgatggaattcttgaggtctggcacggtcgcaaagactcccctcttgatgtcattgccatcaacgacacggcggcgtgaaacaagcctctcacttctcatatacgat

SEQ ID NO: 145780 - DNA, 230 bp, Glycine max
caaaataagaaagtttcacccacaagttctgctaaatttagagtgctggcaattaagtctgacaatagcatcatcaacaggctagagggtctacttaatttggatatcactccattcacggacaagataattgctgagtacatttggattggggggacaggaattgatgtgcgcagtaaatcaagaacaatatcaaagcctgttgaacatccctctgagctccctaaatg

SEQ ID NO: 145781 - DNA, 235 bp, Glycine max
agagagagaacttcaactgagggtgagagtgacacaaatctagggagcactactctaaaagttctattagattcttcaaaacatgaccatgcatcgcgagtcttgggcttttgtcttcggcgttatgggcaacatcatctcctttggagtgttccttgctccattgccaaccttttaccaaatctacaagaagaaatccactgaagggttccagtcacttccttatgttgttgca

SEQ ID NO: 145782 - DNA, 227 bp, Glycine max
  unsure (1)..(227): unsure at all n locations
ctgagtcttgcaattgaagttgaagtcttgcccttctctcttcaactccacacacaatacattattanccatggcngccnccgnctccactgtcggagctgnccacagagctcttttgaacctgaatgggtctggacctggggtttcagctcccagttcatccttctttgggagcagcttgaagaaggttattggctcaagggtccccaacacaaagatttcgtctg

SEQ ID NO: 145783 - DNA, 230 bp, Glycine max
ggacgctactggaccatgtggaagctgcctatgtttggttgcactgatgcttctcaggtgttgaaggagcttcaagaggctaagactgcataccccaacggcttcatccgtatcatcggattcgacaacgttcgccaagtgcagtgcatcagcttcatcgcctacaagcccccaggcttctaagtgtgaaaaatttgcaaagcatttgtagccgccaccccactttgttt

SEQ ID NO: 145784 - DNA, 227 bp, Glycine max
tgtatttcctctctcccatctctactagctgtgactgttgtcagaagcattgaggaagttatagagggagtgacttaggaatactaaaggatgtagagcttcttcggcagatatctgatgcttcgcgtggagcaattacttcctttgtgcagaggactactaataagaagggtcaagttgttgacgtagctgataaacttacctcaatccttggatttggcataaat

SEQ ID NO: 145785 - DNA, 227 bp, Glycine max
  unsure (1)..(227): unsure at all n locations
gtcaacaccacatatatcttctantctntgctctgctctgcttagggttccaacttcaaacccatcagcacttatcgttctcatgcaacaagggaatatgaggcctattttctgtggaaattttgagtatgatgcccggcagtcagagctggagcggcttattagacgatatgggaaggttgatagggtggatatgaagtctggatttgcttttatctatatggaag

SEQ ID NO: 145786 - DNA, 229 bp, Glycine max
gcagccacatcagtttgggctatgactgccctcataaaaaaccctagagtaatgaagaaagttcaagaagaaattagaaatgtgggaggcacaaaagatttcttagatgaagatgatgttcaaaaactttcctatttcaaggcaatgataaaggagacatttagattgtacccaccagccacactacttgtaccaagagaatcaaatgaagagtgcattatacatggct

SEQ ID NO: 145787 - DNA, 233 bp, Glycine max
gcacctccttggtgataccattgtgcgaatccaagttgggatgggaccagcaggtgagttgcgttacccttcgtacacagagcaaaatgggacatggaaattcccaggaattggtgctttccaatgctatgacaagtatatgttgagtagcttaaaagctgctgctgaagctcacggtaagcctgaatggggaagcacaggccctactgatgctggccactataacaactggc

SEQ ID NO: 145788 - DNA, 219 bp, Glycine max
agagaagaagaatcttaatcgatcatcacttcacttcactaatacatcatggcagacgagacccagaacaagtatgagagctctgaggttgaggtccaggatcgtggtgtttttgactttctcggtaagaaaaaggatgaagaagacaagcctcatcctcaggaggaggtcatcgccaccgagtttcaaaaagtcactgtctcagaccaaggagagaac

SEQ ID NO: 145789 - DNA, 233 bp, Glycine max
tcgaggggcaccaacaagggatgaccgcattggtgtctgcactggaatttttcgcaccgattcaattcctgaacaggacgttgtcaagattgttgacaccttccctggccaatccattgatttctttggtgcactgagggccagagtatatgatgacgaagtgaggaagtggatttctggtgttggtgttgacggcattgggaagaagcttgtgaactcaaaagatggacctc

SEQ ID NO: 145790 - DNA, 224 bp, Glycine max
gaaaatcctcacccattttcttcgtagccaaacactctgaaattctcagttatgtcgtggcaagcgtatgtggatgatcacctactgtgtgaaatcgaaggtaaccacctcactcacgccgctatcatcggccaagacggaagcgtttgggctcagagcaccaacttccctcagttcaaacctgaggaaataactgccatcaataatgactttaatgagcctgg

SEQ ID NO: 145791 - DNA, 222 bp, Glycine max
  unsure (1)..(222): unsure at all n locations
cgagtacttccaccagcctgnagaagangcgcaggctctccntggagcaagtgaagtttcttgagaagagctttgatgaggagaacaagctcgagcccgagaggaagatttggctagccaaggaactcggcttgcagcctaggcaggtggcgatntggtttcagaaccgccgcgcgcgctggaagaccaagcagatggaaaaggactatgattccctgcagg

SEQ ID NO: 145792 - DNA, 202 bp, Glycine max
ggccacgatcctgctcctgttcacggtcttcgcgggttcatcggccctagacatgtcgataatctcgtacgacaacgctcacgccggcacgtcgcgcacgaaagggtagctgatgtccatgtacgagcagtggctagtaaagcacggcaaggtgtacaacgcgctcggagagaaggagaagaaggtccagatcttcaaggac

SEQ ID NO: 145793 - DNA, 190 bp, Glycine max
ctctactctactgcttcactttctgctcaagaaaattcagtggtgatacatggcttcggctaatctctctgtagccaaaccagcacttcaggcaaatgggaaaagcttctctgaaatctcctgccttcgcagctcatcaggcttccttcgcctttctaggagatcttcagaggatttccattctgtcaat

SEQ ID NO: 145794 - DNA, 222 bp, Glycine max
tggattccatggaagtctcaaaagaagaagctcgagtggcacccgcaccggccctagtggcgatgaaacatcccctggcatgggccacctaatcccaatgatcgagttcgcaaagcgagtggtgtgctaccataacctggcggtgagcttcgtgatccccactgacggcccaccttcaaaagcccaaaaggcagttctggaggcccttccggactcaatttc

SEQ ID NO: 145795 - DNA, 212 bp, Glycine max
ccgcttgcttgttgcaaatgttggggattccagagctgttatatgcaagggtggtaatgccattgctgtttctcgagatcacaaaccagaccaaactgatgagaggcaaaggattgaagaagcaagaggctttgttatgtgggcaggaacttggagagttggaggtgttcttgctggttcccgtgcatttggtgatagactcctgaagcagt

SEQ ID NO: 145796 - DNA, 264 bp, Glycine max
aacgcccagaagttgtgcctggaaccaacttccttcacggtgaaggcagagggcgtggccaagaacgccccacccgaattccagaacaccaagctcatgcctcgtctcacctatcccctggacgagattgagggtcccttcgaggttacatccgatggaaccgtgaaattcgaggagaaagacggaattgactatgctgctgtcactgttcagcttcccgggggagagcgtgtgccattcctctttaccattaagcagttggtg

SEQ ID NO: 145797 - DNA, 263 bp, Glycine max
agtggactctgcaagagaacagaaatgccttttccagaattttgtttcggccacgtattcttattgatgtgagcaagatagacttgacaactactgtcctaggcttcaaaatatccatgccaatcatgattgccccaacagcctttcagaaaatggctcatcctgagggagaatatgcaacagcaagagctgcatctgctgctggaacaatcatgactttgtcctcatgggctacttccagtgttgaagaggtggcttcaaca

SEQ ID NO: 145798 - DNA, 260 bp, Glycine max
ctctgctcgtgcctctagggttatcatatctccatttccatttcctctctctcagtttccaagaatcttaagctatgggaaagtcttacccaaccgtgagcgctgattaccagaaggccgttgagaaggcgaagaagaagctcagaggcttcatcgctgataagagatgcgctcctctaatgctccgtttggcatggcactctgctggaacttacgacgtgagctcgaagaccggtggtcccttcggaaccataaagcac

SEQ ID NO: 145799 - DNA, 263 bp, Glycine max
ggaaagcccgtctccttcacagctgcatctcttgcaccagaagttcagagtgcgattccttctggattagttaggaagagcccttatctgacgcaccctatctttaacacgtaccaaactgagcatgagttgcttaggtacttgtataggctacaatcaaaagatctctcactatgccacagtatgatcccacttggatcttgtacaatgaagctgaatgcaacaactgaaatgatgcctgtgacatggcccagctttagtga

SEQ ID NO: 145800 - DNA, 209 bp, Glycine max
  unsure (1)..(209): unsure at all n locations
tctcctttgacgacaagatgagcatcccaattccccgtcggcagttattcatagacggagactggaaagtccccgtcctcaagaatcggattcccatcatcaacccttccacacaacatacgatggtaggatatncnancagntantaangatgacgttgatctcgatgtcgatgtcggcaaagcggccctctcccgcaacaagggcgc

SEQ ID NO: 145801 - DNA, 277 bp, Glycine max
gctcggagatcggctcgagtttctctctcgtttttgctcaaaaagttgcaagagttaaagctagaaccaaagtgagagagagaatgatgaagccatcgatgctcagatctcttcactctgccgccacccgcggcgcctcccacctctcccgccgtggctacgcctccgagccggtgccggagcgcaaggtggccgttctaggtgccgccggcgggatcgggcaacccctctcccttctcatgaagctcaaccccctcgtttccagcctctccctcta

SEQ ID NO: 145802 - DNA, 261 bp, Glycine max
cttcctcaaacccttttgcatacttgttcatagacttaaccactcttctgccattgagggtctcatacccccagttacttgttttgtctcttacggttgcatgccttttactatactagctgctcaagagcttggactccctaactttatcttttggcctgctagtgcctgttctttcttgtgtatcatcaactttcccactctggttgagaaaggtcttacaccactcaaagatgagagttatctgacaaatgggtattt

SEQ ID NO: 145803 - DNA, 255 bp, Glycine max
gcgcaaagagttaaacaatctttacaacgttacaaagaactccacgccaaggatagctataatgtcttgcagttctttgtaacgttgtaaagaacttcaagacattatagctatccttggcttggacgaattatccgaagaagatcgcttaaccgtagcaagagcacgaacaattgagcgtttcttatcacaaccttttttcgtagcagaagtttttaccagttcgccggggaaattgttagtctagcagaaaca

SEQ ID NO: 145804 - DNA, 256 bp, Glycine max
ctttggtggccacagcaacaataacaatggcagtctcactacaagctgcagctaccttcatgcaacccaccaaggtgggcatggccactcgcaacctcaaatctacacaatgcatttcttaggcttttggcttggaacccgctgcagctaaactcatttgctcccttaagcccgatctcaaagattttgctcaaaaatgtgtcgacgccaccataattgcaggatttgcccttgccacctcagctctcgttgtttc

SEQ ID NO: 145805 - DNA, 258 bp, Glycine max
tggggtttgaggaaactgagttaaggcttggactgcctggaaacggaggcactgaagaagtgctcatcaggaagaggggtttctctgagactgaaactggtcatgaagatgagtctgccaccactgtggatttgatgcttaatctttcttctaaggaggccgcaaccactgctgctgctgctgcagatccaactgataagcacaagactttgcctaaggagaagacccttctgccagcagatcctgctaagcctccag

SEQ ID NO: 145806 - DNA, 259 bp, Glycine max
aacttaggtggtctcactgttgagcaggctatccaaaacaagaagttgttcatcttagatcaccatgactatctcattccatctttgaggaaaattaatgcaaataccacaaagacttatgctacaagaaccatatttttcttgaaaaatgatggaactttgacgccattggccattgagttaagtaagccacatcctcagggtgaagcatatggtcctgttagtgaagtctacgtgccttcgagtgaaggagttgaag

SEQ ID NO: 145807 - DNA, 259 bp, Glycine max
gcttcaacaggacctggcattcgctttttccagctatatgtgtacaaggacaggaatgtggttgctcagcttgtgagaagagctgaaagggctggattcaaagccattgcccttactgttgataccccaatactaggacgcagagaagctgatatcaagaacagattcacattgccgccatttttgacattgaagaactttgaaggattggaccttggaaagatggacaaagctgatgactctggacttgcttcatatg

SEQ ID NO: 145808 - DNA, 259 bp, Glycine max
gtgactcatccacatcctggagaggcttcaagcccatcaattgcagcagttgtggcttcgcaagactatcctgaaattacaaagtatgctggtttagtttgtgcccaagttcataggcaggaactcattcaggatcttttcaaacaatggcaagatccagtcagaggaacagtgactggtggaatgatcaagtactctacttccctttttctcatatggaacttcttatatctgttaggagagctacaggacaaaagcc

SEQ ID NO: 145809 - DNA, 258 bp, Glycine max
gcctacacaatcacaatcccaaaacacacatcaattccatcaatacaaatcacataaccgtcaaaatggtcaaagctgtcgccgtcctccgtggagactccaacatcaagggtaccgtcacctttgagcaggctgacgagtcctccaacaccaccatctcatggaacatcaccggccacgacgccaacgctgagcgtggcatgcacgtccacgcctttggcgacaacacaaacggctgcacatccgccggtccccact

SEQ ID NO: 145810 - DNA, 245 bp, Glycine max
cttgatgcaggagctggtcgtcttggtggaaccacacaatacactgtgaacaaccagatggtgaatgccactctcatgaacattgctgataaccccaccaatgtgcagcttccaggtatgtacaacaaggaagagaacccccgtgttcccatcattgtcaccggtaacgatttctcaacactctatgcacctctcatccgtgatgggcgtatggaaatgctctactgggcaccaacaggggaacg

SEQ ID NO: 145811 - DNA, 253 bp, Glycine max
ggtgattcctggtgaatatggtttcgttgcccagcttaacgagggtcgtcacctcaagaagaggccaactgagttccgagttgataaggtccttcaaccctttgatgaaaacaaattcaactttaccaaagtcgggcaagaagaggtcctcttccaatttgaagctagcgaggatggacaagtccagttctttccaaatgctccagttgatgttgacaattctcccagctttgttgccatcaatgtcagtcct

SEQ ID NO: 145812 - DNA, 228 bp, Glycine max
ctcgggctcgagccgcacacggggaacagcacagatgatttcttctgggggcttcttgaagaagacattattcaactttgcttattcatataagcttaataacatgaagagagggcttagacatggagaagcatcttcacttcttgataacattgtgtttgacaaggtacagcgatgtttatggggtagagtacgtcttatagtgtctggagcagcacctgtatctgc

SEQ ID NO: 145813 - DNA, 262 bp, Glycine max
gtggaacactaccattggtcaaggtagaggaaatatctcagactattgacacgctgaattttaccgtccaaaactctgttcagttcgctggtcctttggccaccacctcaattagtactaatgccaaattcgatgttcgaagtccaaaacgtgtgcagataaaatttgaggaaggcataattggcactccacagcttacggactcactagagataccagaaaatgtggaacttctgggtcaaaagattgaccttacaccttt

SEQ ID NO: 145814 - DNA, 257 bp, Glycine max
caccaacaagtgtttctgtaaccatggcatccaccactctatcccctacaaccccttctcagctatgctcaggaaaaagtgggattttcagttcctcacaggcacttcttgtgaagccagtgaagaggcagatgatggggaagagcaagggattgagaattgcatgccaagccaccagcatttccgctgatagagtccctgacatgggcaaaagacagctcatgaatcttcttcttcttggtgccatttcactcccc

SEQ ID NO: 145815 - DNA, 271 bp, Glycine max
ggtattcggctcgagctcgagccgaatcggctcgagatgagatgttgattttgcaggtgactttgactcccacacaattagcaatagtgatggagtatgcagcagggggagagctctttgacaggatatgcagtgctggcaggttcagtgaagatgaggctagatatttctttcagcagctgatctccggtgtccatttctgtcataccatgcaaatatgccacagagatttgaagctagaaaatacccttctagatggaagtcctgctcc

SEQ ID NO: 145816 - DNA, 235 bp, Glycine max
aggcttatggtggagaccgagggacccagagaggtggaagggcgtagtaagcgacgaaatgcttcggggtgttgaaaataagcgtagatccggggattcgcgatataggtcaacctttcgaactgctgctgaatccacgggcaggcaagaggcagcctggtgaactgaaacatcttagtagccagaggaaaagaaagcgaaagcgattcccgtagtatcggcgagcgagatggga

SEQ ID NO: 145817 - DNA, 256 bp, Glycine max
ggaaagtccaagaccgaatctaagagagccgatcccaaacttgctgtgaataagaagggagccgccaccaaggctaggaaacccgccggcaaggggaaggcagcgaaagaccctaacaagccaaagaggcctccaagtgctttcttcgttttcatggaggagttcaggaaggtattcaacaaagaacatcctgaaaacaaagcagtgtctgctgtgggcaaagctgctggagcaaaatggaagaccatgtctgatg

SEQ ID NO: 145818 - DNA, 252 bp, Glycine max
gtatgtcctctctcgcatcattactagctgtgactgttggaagaagcattgaggaagtttatagagggagtgacaaaggaatactagaggatgtagagcttcttcggcagataactgaagcttcgcgtggagcaattacttccgttgtgcagaggactactaataagaagggtcaagttgttgacgtagctgataaacttacctcaatccttggatttggcataaatgaaccatgggtcgagtacttgtcaa

SEQ ID NO: 145819 - DNA, 252 bp, Glycine max
gtcatggggaaaactgacttcaatgcagtgaagcataaacagcaatctatgatcttagtggatgtccagactcctggcgttcacataaagagaccattgacagtgtttggctttgatgatgcaccgcatgggcatgcagaagtaacatttgaaaatgtttgtgtgcccgcaaaaaacatcatacttggcgaaggacgtggatttgagattgcccaaggtaggcttggtcctggaaggctccaccattgtatg

SEQ ID NO: 145820 - DNA, 255 bp, Glycine max
cacaaactcagggtagggcagagagagagagagagagagagagagagagagagaatgggagggtgggctatcgcggtgcatggtggcgctggtgtcgaccctaatctcacactcgagcgccaagaagaagcgaaacaacttctcacgcgctgtctcaatcttggaatctctgctctaaattctaatcttcgcgccatagatgtcgtcgaacttgtggtgagggattggaaacggatccgctgttcaatcgggcgt

SEQ ID NO: 145821 - DNA, 257 bp, Glycine max
  unsure (1)..(257): unsure at all n locations
cttgccaacaggaaagantattcatgccctggaccctcaatctattcctacaactgcagcgatnccagagtgccaaaatagtggtagataggttgattgagaggcagaaagctgagaatgggggaaaatatcctgagacaattgcacttgtattgtggggaactgataatattaaaacatatggtgaatccctggctcaagntcttgtggatgattggtgtggaaccagtggctgatacctttggcagggtaaaccg

SEQ ID NO: 145822 - DNA, 253 bp, Glycine max
agctactgctagagcagcatcagctgctggcacaatcatgacactatcctcatgcgctagttccagtgttgaggaggttgcttctacaggttccgacattcgattttttcaactttatgtgcttaaagacagaaatgtggttgctcagcttgtgagaagagctgaaagagctggtttcaaggcaattgcccttactgtggacactccaattcttggtcatagggaggctgatatcaaaaacagattgacattg

SEQ ID NO: 145823 - DNA, 254 bp, Glycine max
ctgcaactagtgccatcaagcaggttgcttctggaaggtttggtgtcaccccaacattcttggtaaatgctgatcagttagaaatcaagattgcacaaggtgcaaaacctggtgaaggtggacaattgcctggaaaaaaagttagcatgtgtattgctaggttgagaaattctaaaccaggagttcctcttatatctccacctacctcatcatgacatttattctatcgaggacctagctcagttgatctttga

SEQ ID NO: 145824 - DNA, 252 bp, Glycine max
ctcgagccgctcgagccgattcggctcgaggcctttatttcacttattcacaacaagcatagagccttggaacgtaagagggtaatattgttctcgtatagaagtggcttaacttccacaatgttctctttgctattacgtgaaggtcaacatccatttagcctgtcaaacattgataaaatgatggatgttgctgggaaattgaagtcaagacatgagtttccaccagagaaatttgttgaaaccatgaag

SEQ ID NO: 145825 - DNA, 249 bp, Glycine max
ttccatatcttatcttctcctcctccatctttgaggttctcacggaaactcctgaagatggctggcatagcattcggaagcttcaatgattctttcagtttggcctccatcaaggcctacattgctgagttcatctcaacccttctctttgtttttgctggtgttggttcagccatagcctatgctaagttgacatcagatgcagctcttgatccaactgggttggtagctgttgccatttgccatggt

SEQ ID NO: 145826 - DNA, 245 bp, Glycine max
tacaaaggttgctgtaggagataagattgcagtagtgctaagtgctaacacctgcagtgaacaatggcctctgcatcagcatctctgctcaagtcttcacttgttcttgacaagtctgagtgggtgaagggacaaacccttcgccaaccttctgcatcagttgtgagatgcaaccccaccaccccatcaggcctcaccatcagagctggttcctatgctgatgagctcgttaagaccgcgaaaac

SEQ ID NO: 145827 - DNA, 242 bp, Glycine max
agacgagtagaaagagattgaagagacccagcagatcgacaaggacagatggaagggtcttgcctatgatatctcagacgaccaacaagacatcacaagaggaaagggtttggttgactcccttttccaagctccacaggtgctggaactcactatgcagtcatgagctcctacgagtacctcagcactggacttcgccagtacttggacaacaaaatggatggattctacattgctccagc

SEQ ID NO: 145828 - DNA, 237 bp, Glycine max
ctgaaactcaaccttgtgcagaaagcacttctgctcaacaggggtggagacaggttgctgatgcattatgcaaggttgtatctgcatctcctacgaaagcagctatggcagttgttcttcaggccgagaaggaattgagccatggattgccaaagatgacaatctaggtcagaagttgtggagaatcaatcagcggattgtaaaattgataactgaactattgaggaatcatgataa

SEQ ID NO: 145829 - DNA, 240 bp, Glycine max
agccaagtgaaattgagaaaaaataaaaatcaaagagcataatgtcagggatcattcacaagattggggagacccttcatgtgggagggcacaagaaggaggaggagcataagggtgagcactctgctggagaatacaaagggagcaccatggtgaacacagtagtgagtacaaaggagagcatcatggtgaacacaaagctggagagtaccatggtgagcacacgccagagcacaaaga

SEQ ID NO: 145830 - DNA, 245 bp, Glycine max
cgctcgagccgaatcggctcgagctaaagttgcagacaatgggatgacagcctgattcaatacactctcaatgctatgatcaaagccttttctgagtctggcaaggtagatgaggccatgaaaatctttcagaaaatgaaggagatggatgtaaaccaacgactagtacttataatactctcatcaaaggatttgggattgctggaaggccttatgaatctatgaaattgctagagatgatgggt

SEQ ID NO: 145831 - DNA, 244 bp, Glycine max
gtctttagaggacccaatggtgctgctgctggggttggtgctcagcattctcaatgttatgcatctttgtatggttcatgccctgggttgaaagtcttgtcaccatattcatctgaagatgcccgtggtttgcttaaagctgtattagggaccctgatcctgttgttttccttgaaaatgaattgttatatggtgagtcattccctgtttcggccgaagttcttgattccagtttttgccttcc

SEQ ID NO: 145832 - DNA, 237 bp, Glycine max
taaatcctctggctccaccatgaagagtatttagtgatgttctttggaaagtgaaaagatatcaaaaagaaggtccaagtcccagcattaccttcagttaccatagtgctgatggtgaacaaggattccctggtgactcctagtaactgtgagctacattctaacggggaaaaatcaattggttatacttatgaaaggaaaagccctaaacaagccaacaccagtgaatttggcaaa

SEQ ID NO: 145833 - DNA, 159 bp, Glycine max
tctcagtctctgtgtttgcggctgaggattccgaacgagtgaccttcctcgtttctcgcaaagtttacgtaatcatgggtaaggacaaggttcacatcaacattgtcgtcattggacatgtcgactctgggaagtcaaataccatggtcacttgatcta

SEQ ID NO: 145834 - DNA, 248 bp, Glycine max
cagcaacgcttctgatgctttggataagattcgattcgagagtttaaccgacaagagcaagctcgatgctcagccagagctcttcattcgtcttgtgcccgacaaggccaacaagactctttccgttattgacagcggcattggatgaccaaagcagatttggtgaacaacttgggtaccattgcgaggtccgggaccaaggagttcatggaggcattgcaggctggtgctgatgtaagcatgattgg

SEQ ID NO: 145835 - DNA, 253 bp, Glycine max
ctccttgtcagtctcttgtctgtgcctgactcccgcactcaagaacatgctgtgacagcgctcctgaatctttccatatacgaaaataaccaaggacgtattgtttcttcaggagcagttccaggtatagttcatgtgctgaagaaggaagcatggaagctcgggaaaatgcagctgcaacacttttcagcctttcagttatagatgaaaacaaggttacaattgggtctttaggagccataccaccactggt

SEQ ID NO: 145836 - DNA, 235 bp, Glycine max
ttcatcacttcattcaacatttctctctcccttagctagtttttaccaatggctgctgcggttagtgctgcagtctcttttccatccaccaagtctacctctctcccaagcaggacctccatcattaccccaggagagttgtattcaagaaggcttcattgcaatacagagatgtttgtagcagtggaagggtagtttccatcagagctcaagtcaccactgaggctccagccaa

SEQ ID NO: 145837 - DNA, 237 bp, Glycine max
caaggttctcggcctgcaccgaaccgcgaccaaggaagagatcaaagcggcgttcaagaagctagcgttccagttccacccggacaagcattcgcaatcgccgaaggccgttcgggaaaatgccacacttcgattcagcaggtctccgaggcctacgaggttctgatggacgatcgcaagcgcgccgattacaatttccggcggactccggcgccggcaccggaaacaactactatt

SEQ ID NO: 145838 - DNA, 239 bp, Glycine max
ctttgatgttttgtcttggactgggaattctgtgtggagctgtgggttatcttggttcgaatttgtttgtgaggaggatctacagaaacatcaagtgtgactaaggcttttgtaggagtctgagaccagagcacttcatatgtttgttgctggagacaataaatttcttagaggaagcctctggtcatgtgtggggaccaaacaatgtttacaggtagtaagtatcacagggttgagga

SEQ ID NO: 145839 - DNA, 242 bp, Glycine max
cacaaagcacaaagcaaagctcatccttgagttaaaaaatggcagcagcttcttccatggctctctcatccccatccttggctggcaaggccgtgaagctgggcccatcagccccagaagtgggaagggtgagcatgagaagaccgtcaccaagcaggtctcctcaggaagcccatggtacggcccagaccgagtcaagtacttgggcccattctctggcgagcccccgtcctacctaaccg

SEQ ID NO: 145840 - DNA, 232 bp, Glycine max
  unsure (1)..(232): unsure at all n locations
gaagtgatttacactaagttatcctcataaatacactcttattagngtgtctgataagtgtctaaccttagtaacattgccacatattgtgttcattttggaattgtgccactaaaattctattcaattcactatggctgcctcttcttatgctatgcaatcaatcctggcaaaccctttgatccgcatttccagcgggtctagggtgaaccaatttggcgttcctgctttg

SEQ ID NO: 145841 - DNA, 232 bp, Glycine max
caaaattctcagaagctaacaagctaggtgaaggtggatttggtgaggtttacaagggcttgcttccaagcggacaagaagtggctgtcaagagactctctaaaatctctggacaaggtggggaagaatttaaaatgaagtagagattgttgcaaagcttcaacacaggaatttggtgaggcttctaggattttgtttggaaggggaagaaaagatacttgtctacgaattt

SEQ ID NO: 145842 - DNA, 231 bp, Glycine max
gaagaacaagtagttgagaactaagaaggagaagcaaatggcttcctcaatgatctcttccccagctgttaccactgtcaaccgtgccggtgccggcatggttgctccattcactggcctcaagtccatgctggcttccccaccagaaagaccaccaatgacattacctccattgctagcaacggtggaagagtgcaatgcatgcaggtgtggccaccagttggcaagaag

SEQ ID NO: 145843 - DNA, 231 bp, Glycine max
agttgccaagcaacttgttgatgcaaaactagatgaactacttggtgatcggacagcagctgatgatgaaaagccttctagaaagaagaaggagaaacctgcaaaagtagaggataaggcagcacctgttgctactcctgaaaagtcacctgaagaagaccttaatccatttttaatattccctaatccagaggaaaatttcaaggtgcatactgaagtgccttttagtga

SEQ ID NO: 145844 - DNA, 232 bp, Glycine max
tggtgatgacaaattgctgcgtgaaaggacacacctgctgttggcttggtgttcaagaatggcaatttgtaagaaagatgtttggagagttgaatgtggaatcccttctggatttccgctcacagttatttgtatagcatttttaatgagatgctcattagatatagctatgaaaaattactgcgccaggctaaagctccaagtatgtttttacaatccttcaaaaattttg

SEQ ID NO: 145845 - DNA, 228 bp, Glycine max
gtggaaatgcaggagagccagcaacactgatcaggcagagataccgtgaagccgcagacttgatcaagaagggaaagatgtgtgctctcttcatcaacgatcttgatgcaggagctggtcgtcttggtggaccacccaatacactgtcaacaaccagatggtgaatgccaccctcatgaacattgctgataaccccaccaatgtgcagcttcctggtatgtataacaa

SEQ ID NO: 145846 - DNA, 231 bp, Glycine max
ctcgttttcgctgcagaagaagaagaagagtgatggctgagtacgacctaactccgcggatggcgccgaatctcgacaggcaccttgtgttccctctcctggagttcctgcaggagcggcagctctagcgctacgaccacatcctgaaggcgaagatcgaccttcttaacaacaccaacatggttgactacgctatggacatccacaagagcctctaccacaccgaggacg

SEQ ID NO: 145847 - DNA, 231 bp, Glycine max
gcagaaagtagccattaagattgttggcagcaattctgaagagcaacaaaaaatgttcgggaggcactttgagattgatgatgaacttgtaagccatatttcacggagatctatcgatatactcaaagcaattatcgggatgaactaaatatggaggaatggaggttggttgtgaaattgaagaatcttttcaagatacaatgaggagacttgatgtgtgggcattcattt

SEQ ID NO: 145848 - DNA, 235 bp, Glycine max
gtttactactgcctcaagcttttggaagccactggcatatccactgttactggttcaggatttggtcagaaagaaggggtgttccatttgaggagaactattttaccagctgaggaagacatgcctgatatttggatagtttcaaaaagttcaatgatgaattcatggagcaatacgaagacgatagaggttattcaaggttgtaagaaaatcattgtaaaagctgcattatact

SEQ ID NO: 145849 - DNA, 207 bp, Glycine max
ctgagtcttgcaattgaagttgaagtcttgcccttctctcttcaactccaaacacaagacatcatcatccatggctgcctccgtctccactgtcggagctgtcaacagagctcttttgaacctgaatgggtctggactggggtttcagctccagttcatccttctttgggagaagcttgaagacggttattggctcaagggtcccca

SEQ ID NO: 145850 - DNA, 226 bp, Glycine max
aagtatctcaatcaatcagttttagagggtcgttacatcactgttgagcggtcacgaagaaaacgtgcaagaactccaaccccagggcactatcttggactgaaaaacacaagggagtatggctatcgtggtgaccgaggtggtgaccggggaaggtatcgcgatggtcctgaccgtgacaattactcacgtcgtaggtctccgaggcgttcaccatacagaggtg

SEQ ID NO: 145851 - DNA, 221 bp, Glycine max
gaagaacttaaccgggttagttgaatggtatggcaagaacaagagactgagaaatttggtgaaccttgtcatagtaggaggcttctttgccccttcaaaatcaaaagatagggaggaaatggcagaaataaaaaatatgcatgacttaattgataagtaccaactcaagggtcaatttagatggattgctgctcagactaataggtatcgcaatggagagc

SEQ ID NO: 145852 - DNA, 221 bp, Glycine max
ggcaagcctcaaggttgcatttgtggttgctgtgctatacatggttgtggtgagtgcacacatggcacatgctaggatcaactgcggccgtgtcgcggtcgcggtgtctccgtgccttggctaccttcgtcgcggtggaaggccacaggcgaggtgctgcaacggagtgagaaacctccacgccctggccaagaccaccgtggaccgccggacggcgtgca

SEQ ID NO: 145853 - DNA, 244 bp, Glycine max
  unsure (1)..(244): unsure at all n locations
cgtaagctcggactactaatcgagattaacaaaccagatggaggtgatgtttatgaaggagttccaaaggattacaccggaaaagatgtnactgttggtaacttttatgctgctttacttggatacaagtcgccacttagtggtggcagtgggaaggtgttggacagtggacctgatgatcatatatttgtatactatactgaccatggaggtccaggggagctcgggatgcctgctggtcctt

SEQ ID NO: 145854 - DNA, 219 bp, Glycine max
cacacacacagctagcagatattacatacacgtgaatcagcaattaagccatggagaagaaatcaatagctgggttgtgcttcctcttccttgttctctttgttgctcaagaagttgtggtgtaaactgaggcaaagacttgcgagaacctggctgatacatacaggggtccatgcttcaccactggcagctgcgatgatcactgcaagaacaaagagc

SEQ ID NO: 145855 - DNA, 218 bp, Glycine max
ctttgctctcagtgccttagaacacaatccatgtaaccaccacaagcaccataccacactgccaaaatcaacaaaccaaaaaggtaaactttttgcaacaaccatggttgcaatggcagcagcaacagcatccacccagttgattttctcaaagccttgttccccttcacgtctatgccccttccaactatgtgtctttgacactaaacaagtgctat

SEQ ID NO: 145856 - DNA, 218 bp, Glycine max
gtggggtgaagatatctgaactgttgaagtatccagttagaggtctcgtctttgagggtggcgatacgctggaagatttatcaaatgttgtttcagatgcctgtatatgtcttcagaacatcaacatacctttcaatgttcttatctctgactgtggaaagcaagtctatctgttaccacagtgttatgcagagaaacaagctcttggagaatggatg

SEQ ID NO: 145857 - DNA, 218 bp, Glycine max
aaaacactcataacacaaagcacaaagcaaagctcatccttgagttaaaaaatggcagcagctacttccatggctctctcatccccatccttggctggcaaggccgtgaagctgggcccatcagccccagaagtgggaagggttagcatgaggaagaccgtcaccaagcaggtctcctcaggaagcccatggtacggcccagaccgagtcaagtactt

SEQ ID NO: 145858 - DNA, 221 bp, Glycine max
gtggatgctgagcttcttgacacccaagtgaatcctgctgtgtgggaaattagtgggcacatggttctaaagaggaagaaggattatgatgaggcatctgaaggcaatgcttggaggcttcttgcagaggtgtccctctctcaagagaggtttcaagaagtcaatgatcttatttttgaagccattggctgtggtgaattggaggatgtcaacgttgaaag

SEQ ID NO: 145859 - DNA, 217 bp, Glycine max
tccatttgactcttgttctgaacgacttttcaagagaatcaaaccatggcagtgaaagtatacggtccccactgtgcttccaccaagcgggtgctggtttgtctggttgagaaggaagtcgaatttgaggttgtccctgttgatgtcactaagggggagcagaaggatcctgagtacctcaaactacagccatttggagttgttcctgtcatcaaag

SEQ ID NO: 145860 - DNA, 218 bp, Glycine max
tccatttgactcttgttctgaacgacttttcaagagaatcaaaccatggcagtgaaagtatacggtccccactgtgcttccaccaagcgggtgctggtttgtctggttgagaaggaagtcgaatttgaggttgtccctgttgatgtcactaagggggagcagaaggatcctgagtacctcaaactacagccatttggagttgttcctgtcatcaaaga

SEQ ID NO: 145861 - DNA, 215 bp, Glycine max
cttgcattttgccctgccattgtggttcctggtgtatactactcagatgataagatgcttcagaccaggatattctcttatgctgattcacaaaggcacagacttggaccaaactatctgcaacttcctgctaatgctcccaagtgtgctcaccacaataatcatcatgaaggtttcatgaatttcattcacagggatgaggaggtcaattactt

SEQ ID NO: 145862 - DNA, 216 bp, Glycine max
tgttaatctgtggtctatgggatgggagcccataaattttgagaggtccctcttgaggtcaagcctgagaggtttatgaacaataatgaagacaaacaacttgatgtgaagggacagaattccagctattgccatttgggactgggagaaggttgtgccctggtgcatcacttgcacttcagactgtgcctactaacgttgctgctatgattcaat

SEQ ID NO: 145863 - DNA, 218 bp, Glycine max
ttgtacttgtatatacatattttgtctcgcctttgtaaatacaattgggacactactaggattgggaagaagggtctttacatttttagtttggcaaatagatattgcaactacctttgtataaatctatttctgaagaagcaattacaactttcaagggatgatagcattttgtggcataaggattaaggaggcataaaggaccaattgctttggaa

SEQ ID NO: 145864 - DNA, 215 bp, Glycine max
ggaatttgaatttgtcgtttgcttacgttgagaaggagagtctgcttatggggttgaaggaggtggctgtgtccagtggcagtgcctgcactagtgctagtttggagccttcttatgtgttgagggcgttgggagttgaagaggacatggctcacacttctattaggtttggaattggtaggttcactaccgaggctgagattgatagggcggtt

SEQ ID NO: 145865 - DNA, 212 bp, Glycine max
gaagattttcaagaccactactggaaccccatttctcatccctacaactggtactggtgcttgggagagtgctctcacaaacacactgtctcctggggatcgaattgtatcgttcctgaatggccaattcagcttgctttggattgatcagcagcaacgcctgaagttcaatgttgatgttgttgagagtgaatggggccatggtgctaagc

SEQ ID NO: 145866 - DNA, 214 bp, Glycine max
aaacaggtgtcgcttgctgattgggcgaggttctgctgccacaatgggaccataggccagattgtggaccccactttaaaggggaggatggcgccagagtgtttgaggaaattctgcgaggttgcggtgagttgtttgttggacgacggaacgctgaggccgtcgatgaacgacgtcgtttggatgctggagtttgcgttgcagttgcaggaga

SEQ ID NO: 145867 - DNA, 210 bp, Glycine max
gcaaaaacaatatctggtctagtgtgggctagataaataagttttccctatcagtctttgatatcaagcctatttgagctctcccattcctatccaatgattttgcttgatgagctctccatatgttttacgacccaatttgcttgtctctctaagaagatcaatggcatattttctttgagagataaagatgccttttttggagcaggc

SEQ ID NO: 145868 - DNA, 213 bp, Glycine max
agaagaacaagtagttgagaactaagaaggagaagcaaatggcttcctcaatgatctcttccccagctgttaccactgtcaaccgtgccggtgccggcatggttgctccattcactggcctcaagtccatggctggcttccccaccagaaagaccaacaatgacattacctccattgctagcaacggtggaagagtgcaatgcatgcaggtgt

SEQ ID NO: 145869 - DNA, 239 bp, Glycine max
atccaaatcaacactaaaggtttcaaagacaaagaatacttcactcgtgaccagatgtgaaattggtgacagtctggaagaattcctcacaaaagcaacaccagataaggggttgatcaggttgttggtgtccatgggagaagcattaagaacaatttcctccaaagtgaagacggcttcttgtggtggaacacaatgtgttaatacttttggggacgagcagcttgcagtggatttgc

SEQ ID NO: 145870 - DNA, 229 bp, Glycine max
caagccaaaagaaagaatcccaggcgaggagaaagatggaggggaaggagcaggatgtgtcgttgggagcgaacaagttccccgagagacagccgattgggacggcggcgcagagccaagacgacggcaaggactaccaggagccggcgccggcgccgctggttgacccgacggagtttacgtcatggtcgttttacagagcagggatagcagagtttgtggccacttt

SEQ ID NO: 145871 - DNA, 246 bp, Glycine max
cttggccaccacctcaattagtactaatgccaaatttgatgttcgaagtccaaaacgtgtgcagataaagtttgaggaaggcataattggcactccacagcttacggactcattagagataccggaaaatgtggaatttctgggtcaaaagattgaccttacacttttcaaaggcatccttacctctgtccaagacacagccacatcggtagtgaaaacaatttcaagtaggcctcccttgaagat

SEQ ID NO: 145872 - DNA, 251 bp, Glycine max
cggcacaacattgttcctggtattaaagtcgacaagggtttggtgcccctttgcaggttccaacgtacgagtcatggttgccaaggttctggactggtctagtcctcttcgctcaggctgcatgactacgcagcgaaggtgcccgtattcgccaaatggcgtactgttgtgagcatccccaacggtccctctgctctggcagttaaggaagcagcctggggtctggctcgctatgctgcaattgctcagga

SEQ ID NO: 145873 - DNA, 238 bp, Glycine max
agggatcagttatggctctgtgttcagtttttttcaattttcttcttctgcttcttctttctttcaccaaagaagctttaggtgtttcagagcaagaagctgtcagagtgcatggactacccggacagcctccggtgaagttcaaacaatattctggttatatcactgtcaatgaaacccatggaagagcactcttctattggttctttgaggccactcataaaccagaagaaaaacc

SEQ ID NO: 145874 - DNA, 240 bp, Glycine max
cggaagcagacacagatggctcgtacgaagcaaaccgctcgtaagtccacaggaggaaaggctcctaggaagcagcttgcaaccaaggctgcacgtaagtctgcaccaactactggtggtgtgaagaagccccaccgttatcgtcctggtaccgttgctcttcgtgagattaggaaataccagaagagtaccgagcttttgatccggaagctccccttccagaggctggttcgtgaaatt

SEQ ID NO: 145875 - DNA, 242 bp, Glycine max
ggagcatggtattgacagaacttttgaagtagcacaaaaggtctgggcagaggttttcttctaccttgctgagaacaatgtcctttttgagggtattcttcttaagcctagcatggttacacctggagctgagtccaaggacaaggccagtcctcagacagttgctgattacaccctcaagctccttcacaggagaattccccctgctgtccctggaattatgtttttgtctggtggacagt

SEQ ID NO: 145876 - DNA, 238 bp, Glycine max
tgaagttggtccaagggatggattacaaaatgagaaaaacattgtaccaacagatgtaaagattgaattgattcatagattggcaccttctgggttatccgtcattgaagctactagttttgtatctcctaaatgggtccctcagttggcagatgcaaaggatgtaatgcaagcagttcataacctgggaggcattagattgccagttctgactcctaatttaaagggttttgaaact

SEQ ID NO: 145877 - DNA, 205 bp, Glycine max
  unsure (1)..(205): unsure at all n locations
ctggaacgaagatggcaccagcttcatcgtttggcgacccgcggaattcgctagggatttgcttcctaagtacttcaaacacaacaactatngccagtttcgtccgtcagnttaacacctatggtttccggaaggttgtccctgaccgttgggaattcgccaacgactgtttccggcgaggcgagagagctacttccacacaaca

SEQ ID NO: 145878 - DNA, 118 bp, Glycine max
cttaagctatgggaaagtcttacccaaccgtgagcgctgattaccagaaggccgttgagaaggtcgaagaagaagctcagaggcttcatcgctgataagagatgcgctcctctaatgc

SEQ ID NO: 145879 - DNA, 237 bp, Glycine max
gcaaccctagctttcagctgtttgcaatcaatggctggtgaatctgatgtatcggaaaacaccctctcttgtgctaattgtggcaaacctgcgaacttcagtgtccaaaatgtatggaattgaagcttcctcgagaaggtgctgccttctgctctcaggattgtttcaagtcttcatggaactctcacaaatcagtgcatctgaaggcaaaactatcctcacctggcacacaaaatt

SEQ ID NO: 145880 - DNA, 240 bp, Glycine max
attgaattctccagagagaagaagaaacttaatcgatcatcacttcacttcactaatacatgctggcagacgagtgccagaacaagtatgagagctctgaggttgaggtccaggatcgtggtgtttttgactttctcggtaagaaaaaggatgaagaagacaagcctcatcctcaggaggaggtcatcgccaccgagtttcaaaaagtcactgtctcagaccaaggagagaacaagcaca

SEQ ID NO: 145881 - DNA, 242 bp, Glycine max
cgtgcttggttcgtttttgttatggttcggctggtacggcttcaaccctggttcgtttctgacaatagccaaggggtatggaagtggagggtattatggtcaatggagcgctatagggaggacagctgtcacgacgacattggctgggagcactgcggctctgacgacgttgttcagcaagtggttattggctggccactggaacgtgattgacgtgtgtaacggcctgcttggcgggttcg

SEQ ID NO: 145882 - DNA, 241 bp, Glycine max
ctctgtcgtgcctctagggttatcatatctccatttccattacctctctctcagtttccaagactcttaagctatgggaaagtcttacccaaccgtgagcgctgattaccagaaggccgttgagaaggcgaagaagaagctcagaggcttcatcgctgataagagatgcgctcctctaatgctccgtttggcatggcactctgctggaacttacgacgtgagctcgaagaccggtggtccc

SEQ ID NO: 145883 - DNA, 234 bp, Glycine max
gaaggctgttgctcgccgatgttttgcctcagtcgctgagctgaaaaagacagtgtttcatgacttccatgttgctcatggtgggaagatggttccatttgctggatggagcatgccaatccaattcaaggactcaatcatggactctaccatcaactgtaggcagaatggtagcctttttgatgtttcccatatgtgtgggctgagcctcaaggggaaggatgctgtcccatt

SEQ ID NO: 145884 - DNA, 240 bp, Glycine max
tcttgcccttctctcttcaactccaaacacaagacatcatcatccatggctgcctccgtctccactgtcggagctgtcaacagagctcttttgaacctgaatgggtctggacctggggtttcagctcccagttcatccttctttgggagcagcttgaagaaggttattggctcaagggtccccatcacaaagatttcctctggaagcttcaagattgttgctgtagaagagaagaaagag

SEQ ID NO: 145885 - DNA, 180 bp, Glycine max
agagaaggtgcagggaaacacattcaagcaggagctaagaagtcgctcatcactgctcctggtaaaggagatatccccacctacgtggttggtgtcaatgagtatgactacagccctgatgaacccatcatcagcaatgcctcttgcaccactaactgccttgcaccctttgtcaaggtc

SEQ ID NO: 145886 - DNA, 235 bp, Glycine max
cgttctttctctcgcaatcttcactacattcaccgagcatttgcattcacattgaatatggctgagactacacaatctaatgctgagttgttggagtggcctaagaaagataagcgccgcttcctgcatgttgtgtatcgtgttggtgatcttgatcgcaccattaagttttatactgaatgttttgggatgaagcttttgaggaaaagagatattccagaggagaaatatgcca

SEQ ID NO: 145887 - DNA, 125 bp, Glycine max
aaaaaggagagtaatgagtataatctttcgctcagacgatgtactgatatattctatggcggaggttcgaagaacaagcaatttcattttgggccgttttcactttgttaggttcattggggtta

SEQ ID NO: 145888 - DNA, 234 bp, Glycine max
agagaagagaaaaattaagatggaggggaaggagcaggatgtgtcgctgggagcgaacaagttcccggagagacagccgattgggacggcggcgcagacccaagacgacggcaaggattaccaggagccggcgccggcgccactggttgacccgacggagtttacgtcatggtccttttacagagcagggatagcagagtttgtggccacttttctgtttctatacatcactgt

SEQ ID NO: 145889 - DNA, 233 bp, Glycine max
gcggcgctgaacaccatgaagaaggagacgcaggctgaggtggagcagaagattgctgaggggaggaagaaagtcgaggctgagctgcaggaggctctgtctagcttggagaatcaaaaggaagaaaccatcaagtcccttgattcccagattgcagctcttagccaggagattgttaataaggttcttcccactgcttaatatgtctatgtaattttcatttcaatcccctc

SEQ ID NO: 145890 - DNA, 230 bp, Glycine max
ggcgcacgttagcacaaactatcatggccacggcaacagcagctgccacctcgtcctttatggggacgcgtctcctggaggctcactccggagcggggcgagtgcacgcccgattcggcttcggcaagaaaaaggctcccgccccaaagaaagcctccaggggatcgggccgagacaccgacagacccctttggtatccgggcgccaaagcgcccgaatacctcgatggg

SEQ ID NO: 145891 - DNA, 225 bp, Glycine max
cccaattcctaattgtttaaacctaattctcatttcttcatcgttcgattcttcacctcctaaagatgcagatcttcgtgaaaactttgaccggtaagaccatcacccttgaggtggagtcctccgacaccatcgataacgtgaaagctaagattcaagacaaggaagggatcccacctgaccagcagagacttatctttgcgggtaaacagcttgaggatggtc

SEQ ID NO: 145892 - DNA, 233 bp, Glycine max
gagacaaatcagcaagagtggagatggcgacgtcgacgtgcttcctgtgtccgtctacggcgagtttgaaaggcagggccagattcagaatcagaatcagatgcagcagcagcgtgtcggtcaatattcgaagggagcccgaacctgtaacgacgctggtgaaagcgtttgctcccgccacggtggcgaatctaggtccaggcttcgacttcctaggctgcgccgtggacgga

SEQ ID NO: 145893 - DNA, 214 bp, Glycine max
  unsure (1)..(214): unsure at all n locations
ggccagagggcaaagattttgagcacaatggcctcgacacaatgctttttgcaccaccacgccctcaccactccagctagagcttcaacacagcgcctagttctgagcaccaaaccaaaccacattgtttgcaaggcagcacagaagcaggttactggtccaagacgggtgaggacactgactactaggccttgatctctcgncaggtgtggcc

SEQ ID NO: 145894 - DNA, 273 bp, Glycine max
cggctcgaggaagaacaagtagttgagaactaagaaggagaagcaaatggcttcctcaatgatctcttccccagctgttaccactgtcaaccgtgccggtgccggcatggttgctccattcactggcctcaagtccatggctggcttccccaccagaaagaccaacaatgacattacctccattgctagcaacggtggaagagtgcaatgcatgcaggtgtggccaccagttggcaagaagaagtttgagactctttcctacctgccagacct

SEQ ID NO: 145895 - DNA, 212 bp, Glycine max
ggcaagcctcaaggttgcatttgtggttgctgtgctatacatggttgtggtgagtgcacacatggcacatgctaggatcaactgcggccgtgtcgcggtcgcggtgtctccgtgccttggctaccttcgtcgcggtggaaggccacaggcgaggtgctgcaacggagtgagaaacctccacgccctggccaagcacaccgtggaccgccgga

SEQ ID NO: 145896 - DNA, 261 bp, Glycine max
cgttgccattctcatcctcctctgtctctctctctccaccattgccctggatgcttacaagctccggccatccagcgccttcaattctcccttctggactacaaattctgttgctcctgtttggaacaacaactcctctttaaccgttggagctagaggtccaattctgcttgaggattatcatcttgtggagaagcttgcaaactttgacagggaacgtatcccagaacgtgttgtccatgccaggggagctagtgcaaa

SEQ ID NO: 145897 - DNA, 262 bp, Glycine max
atcatcttttgtttgttcttcagtactttagtgtgtgatttaattccaagattttgagaatgtctagctgtgggtgtggaagtagctgcaactgtggcagcaactgcggttgcaacaagtactcttttgacttgagctatgttgagaagacaaccacagagactcttgttttgggtgttgggtctgtgaaggcccaattggagggtgctgaaatgggtgttgcagctgagaacggtggctgcaactgtgcgatcaagctgca

SEQ ID NO: 145898 - DNA, 268 bp, Glycine max
cgaaatacttcgagatggcccgtacaaagcaaactgctcgtaagtcaactggaggaaaagctcccaggaagcagcttgcaaccaaggctgcacgtaagtctgcaccaacaactggtggtgtgaagaagcctcatcgttatcgccctggaactgttgctcttcgtgagattaggaaataacagaagagcactgagctcctaatcaggaagcttcctttccagaggttggttcgtgaaattgcccaggatttcaagactgatctgcgttt

SEQ ID NO: 145899 - DNA, 267 bp, Glycine max
agagacctctcggggagaatcacccagaaagagttatctaaaagctgttaaaaaagtggcaaagacagagaaagatgctcaaataagacttcaactttatgagccatctgaatttcatgtggtgaacccattgaagaagacaagggtagggaaccccgttgggtacaaattggttcccggtgccacagcagctagcctgctggatccagaagatccaccacagaaaagagcagcttttaccaacaaccaattatgggtcactcctta

SEQ ID NO: 145900 - DNA, 262 bp, Glycine max
caaagcagccgtagggcagtgctttcacttgttgctgctggtttggccactggctcttttgttcaagctgtgcttgctgatgccaaatctatcaaagttggaccacctcccccaccttctggtggattgcgtatgtgtctctctctctctctccctccctcttctcttacaattcaattcaatccattttgaagaaatgatgattagttgagagtgtaaaaatctctactgatagtgcatgaaaattgatctctctctctct

SEQ ID NO: 145901 - DNA, 263 bp, Glycine max
agcgattggaaaataaatacaaagctgcacaacaagcttctgacgagtggtaccggaaagcacaacttgctcttcagaaaggtgaagaagatcttgctcgtgaagcacttaagaggcgtaaatcttatgcggataatgccagttctttgaaggctcgacttgatcaacaaaagactgttgttgagaatcttgtctctaatacaaggcttttggagagtaagatacaggaggcaaggtcgaagaaggatactctcaaagcaaga

SEQ ID NO: 145902 - DNA, 261 bp, Glycine max
gcaaatctttgttaagaccttgaccggaaagacaatcacccttgaggtcgagagctctgacaccattgacaatgttaaggctaagattcaggacaaagagggtatcccaccagaccaacaaaggcttatctttgcaggaaagcagctagaagatggcagaaccttggctgattacaatatccagaaggaatctaccctccacttggtgctccgtcttcgtggtgggatgcaaatctttgtcaagaccttgactggaaagac

SEQ ID NO: 145903 - DNA, 257 bp, Glycine max
cggctcgaggaagaacaagtagttgagaactaagaaggagaagcaaatggcttcctcaatgatctcttccccagctgttaccactgtcaaccgtgccggtgccggcatggttgctccattcactggcctcaagtccatggctggcttccccaccagaaagaccaacaatgacattacctccattgctagcaacggtggaagagtgcaatgcatgcaggtgtggcccacagttggcaagaagaagttctagactcttc

SEQ ID NO: 145904 - DNA, 263 bp, Glycine max
cctcgctggacacgatgagtacatcgtaaaaggaggcagggatttgtttcacttgttgcccgatgctttcaagggtatcaagcagattggtgttatcggttgtggatctcagggacctgctcaggctcagaatctacgggactctcttgctgaagcaaagtctgatattgtggtcaagattggactcaggaaaggttctcgttcctttgccgaagctcgggcagctgggttttctgaggagaatgggactctaggtgacatat

SEQ ID NO: 145905 - DNA, 266 bp, Glycine max
agcactcagaggagaaaaagaacgaggtcaacgacaccagtaacgccgtcgttacgagttactggggaatcacaaggcccaaggttcgtagggatgacgggacagagtggccgtggaactgcttcatgccatgggatagttaccactctgatgtgtcactagacgtgaccaagcatcatacaccaaagtcattaacggacaaggttgcttttagggctgtcaagtttctaagggttctctctgatatctacttcaaggaacggtat

SEQ ID NO: 145906 - DNA, 263 bp, Glycine max
ggaggcgcagcagagccaccaaagggtggcaaccctgactccaacactctcatcagtgacaccaccactgtcatatgcttggatgattaccactctgtggacagaactggaagaaaggagaagggtgtcactgcccttgaccctagagccaatgattgcgatctcatgtatgcacaagttaaagctcttaaggatggaattgctggtgaaagaccaatctacaaccatgtcactggtctcttggatacccctgagctcattaa

SEQ ID NO: 145907 - DNA, 262 bp, Glycine max
gtgatgtacgttctgactccgctgtgctattggctcgacttgtacaacgccaaaaccttccccattttctcggacgaactcttcacggagaaaggtcaagtttataacatcacagccataatagactccaatttccacctagaccttgcggcttatgagagacaaggtagattgtacatcagcactttctttgccatgacctatggtgttggctttgctgcactcaccgccaccattatgcatgttgctctctttcacggaa

SEQ ID NO: 145908 - DNA, 262 bp, Glycine max
atcttggcaatgataggattgcagatgtaccaaggtggtgctggtcctgacatgggtggtgctggtgctggggcagccgaggatgattatgctgctccttctggtggaagtggtgctggccccaagattgaggaagtggactacatgtgtagttgctttcatccatttatctgtttaaaacttatttgatgcttttttattgaattttaacttttatgatttttgttggatgggatactaattgttttgcccgtgtgatatg

SEQ ID NO: 145909 - DNA, 259 bp, Glycine max
ctggcgccgaatgttcggcaggtgatcaaactggcgaatctgcttagttcttgggtatgctcccatatcctcggcgtgaaagatacgaagcagcgggcgggaatcatgaagtatttcatccagacttcgatggaagcacgcaatctgaacaatttctcatctatggcatcgttgatggctggtctgaattccgctccgatcttacggctcaaacggactaaagagtttttgagcgcaaagacgaatgctcagaaggttg

SEQ ID NO: 145910 - DNA, 263 bp, Glycine max
gtaaagccttgttgctgccatggctacccacgcggctcttgcttctatcaggatcccttcaaacacaaggttcccatccaaggcctctcactctttcccaacccaatgcgccttaaagagacttgaggtgacagaattctctgggcttagatccacttcatgtgtcacatatgctaacagtgctagagaatcttccttttttgatcttgtagcttcccaactcactcccaagcagaccaatggatcaactcctgtgaggggag

SEQ ID NO: 145911 - DNA, 256 bp, Glycine max
tgaagctcaggagattgagtttgagattgcaagaatgagaccaagattgaatgaggaattctttgcgcaactcaaattcgagttaggacagcttcgattcgctgttaacaaaacacagctcatggaggacagacagattgagctggaggctctagagaaagccatactagaaggattagaagcctatgataagatgcaaggtgaactcgtaaaagccagggcaagcctaaccaaaatcttgacatcaaaggatgcc

SEQ ID NO: 145912 - DNA, 259 bp, Glycine max
gggttctccgcaacatggacgacgacgaggtcttcaccttcgccaagagcatcgctgcgccctacgacctcgtcatgcagaccaaacagctcggccgcctccccgtcgtccacttcgccgccggcggagtcgccacccccgccgacgccgcgctcatgatgcagctcggatgcgacggcgtcttcgtcggctccggcgtcttcaagagcggcgatcccgcgaacggacgagggcaattgttcaggccgtgactcactac

SEQ ID NO: 145913 - DNA, 258 bp, Glycine max
gttaaaagccttagccttccctacaactccagactgtaagacatcctcatccatggctgcctccgtctccactgtcggagctgtcaacagagctcttttgaacctgaatggttctggagctggagcttaagctcccagttcagccttctttgggaccagcttgaagaaggttattgcctcaagggtccccaacagcaaggtttccggtggaagcttcaagattgttgctgtagaagagaagaaagagattgaagagac

SEQ ID NO: 145914 - DNA, 257 bp, Glycine max
gaagaacaagtagttgagaactaagaaggagaagcaaatggcttcctcaatgatctcttccccagctgttaccactgtcaaccgtgccggtgccggcatggttgctccattcactggcctcaagtccatggctggcttccccaccagaaagaccaacaatgacattacctccattgctagcaacggtggaagagtgcaatgcatgcaggtgtggccaccagttggcaagaagaagttactgactctttcctacctgc

SEQ ID NO: 145915 - DNA, 260 bp, Glycine max
gacataagtataagccagacatttgaagttccttttttgaatctaacaatgaaaggtggagatgattattatgtcatggatcctataatacaagtttctagtgaggaggaaggagatcttctttgtttgggaatccagaaaagtgacagcgtgaatatcattggacaaaacttcatgactggttacaaaatagtcttcgatcgtgacaacatgaatcttggttggaaggaaactaattgttctgatgatgtgctctcaaa

SEQ ID NO: 145916 - DNA, 261 bp, Glycine max
  unsure (1)..(261): unsure at all n locations
ggggaagcttccaggggacaccacatcccttttgtncagcttggtggcaatcacattctaaatggccttaccccactgaggaagacaaggctagattngtgcaggaaacagggttgcnttaaagcagataaataattggttcataaatcaaaggaaaaggaactggcatacaaataacccctcatcctctagcaactccaaaagcaagcgcaagagtagtgcaggagaagccagtaaccagagcttcatgtgaacggtcgc

SEQ ID NO: 145917 - DNA, 257 bp, Glycine max
gactcacccaaacaaaaaaacaaacgcacgcttctcattctctctctactcgttcagaagatgtttctcacaaggactgagtatgaccgaggagtcaacaccttttctcccgaaggccgtttgtttcaggttgagtatgcaatcgaagccatcaagctgggatcaactgcgattgggttgaagaccaaagaaggagttgtccttgcagttgaaaagcgcatcacatcgccgctcctggagcctagtagtgttgagaa

SEQ ID NO: 145918 - DNA, 257 bp, Glycine max
gggatattacttggatacatatcaaactatggattttcgaagctgacactgaaggtgggatggcgaatgatgcttggagtgggtgcaattccttcggtagtcctaacggtgggagtgttagcgatgcctgagtccccaaggtggctagtgatgaggggtcgtttgggagaggcaagataagtgcttaacaaaacctcagacagcagggaagaggcccaactaaggctagccgaaatcaaacaagccgcagggatccc

SEQ ID NO: 145919 - DNA, 209 bp, Glycine max
ggttccggtccacctgattccaaagttagatggttccgttcatctagcaatgaaccacggtttattaacacggttacatttgacagtaaggatgattctcctacgctggtgatcgttcatggatatgcagcatcgcagggtttcttctttcgcaattttgatgcccttgcctcccgtttcagagtgattgctattgatcaacttggttg

SEQ ID NO: 145920 - DNA, 252 bp, Glycine max
cttgaaggtgctactgaagttatatgttcacgcactccatcgcatctacaatatctaaaacagatctatcattctatgtatggtgtttatcttgagcatgatattcaaacaaacaccagccccggcgatcatcaaaagctcttgcttgcatatataagcacacctcgtcatgagggccccgaggttaatagagaaattgctcagaaggatgcaaagggtctttacaaagcaggggagaagaaactgggaact

SEQ ID NO: 145921 - DNA, 251 bp, Glycine max
gagaagcattatggaattcatattgagtacatgttccctgatgcggttgaggttcaggcattagtaagctataaggggctcttctcattttatgaggatgggcatcaagagtgctgtagagtaagaaaggtgaggcccttgaggagagcccttaagggtctcaaagcatggattactggacagagaaaagaccagtctcctggtactaggtctgaaatccctattgtccaggttgatcctgtttttgaggg

SEQ ID NO: 145922 - DNA, 249 bp, Glycine max
ctatgctctagaccaggcaataaggcgtcgttttgataagcgcatatatattccactaccagatttgaatactcgccaacacatgttcaaggtgcatctagagatactccccataacttgactgaaagcgattttgaatacttggctagcaggacagaggggttttctggttcagacatatctgtctgtgtaaaggatgtgttatttgaacctgttcgcaaaacccaagatgcaatgttcttcttgaag

SEQ ID NO: 145923 - DNA, 154 bp, Glycine max
ctgtgggcagcgtttggcttcaattgggctagagaacactgaagctaaccgctaggcataccgtaccctccttgtgacagttccaggatttggtcagttcatctctggtgccattctctttgaggaaactctctaccaatccacaactgatggc

SEQ ID NO: 145924 - DNA, 244 bp, Glycine max
gagaaatcggagaagctgaaggtgaagaaggcgatcgagaaaggcaacatggacggcgctcgaatctacgcggagaacgcgatccgtaagcgcacggacagatgaactacctccgcctggcctcgcgcctcgacgccgtggtcgcccgcctcgacacgcaggcgaagatgacgacgatcagcaagtcgatgggcaacatcgtgaaatcgctggagtcatcgctggccacggggaacctccagaa

SEQ ID NO: 145925 - DNA, 242 bp, Glycine max
ctcttatttccattagacaagaaattgctgagattgagaaaggaaaggttgacattaacaacaatgtacttaagggcgcccctcatcgaccatcactgtcatggctgatgcatggacaaaaccatactccagggaatatgcagccttcccagatccttggctccgtactgcaaagttctggcctaccacaggacgtgttgataatgtgtacggtgaccgcaacctcatttgcacccttctcc

SEQ ID NO: 145926 - DNA, 242 bp, Glycine max
ttcccaaattcattttaatcctaattctgcacttcttgatcatccgattttactcctcaagatgcagatattcgtaaaaactttcaccggcaagaccacacccttgaggtggaatcctccgacaccattgacaacgtaaaagctaagattcaagacaaggaagggatcccacctgaccagcagagacttatctttgcgggtaaacaacttgaggatggtcgcacccttgccgattacaacat

SEQ ID NO: 145927 - DNA, 149 bp, Glycine max
gaaattgcaaagagttatgtccttttctgttgtattaaaaactacttgtgtatccaatttcaaacttactaagttaaaaaaaaaaaaaaaaaaaaaaaaaaaaaaaaaaaaaaaaaaaaaaaaaaaaaaaaaaaaaaaaaaaggggggg

SEQ ID NO: 145928 - DNA, 248 bp, Glycine max
aaagcattgaattcaaaaactaagttcatttcttgtgctttgctttattcctcaaaaccaaacatgtcgaacacatgcggcaactgtgactgcgctgaaagactaactgcaccaagggaaacagctatggtgttatagtagagactgagaagagctacatcgagactgttgacatggatgttccagcagctgagcatgatgggaagtgcaagtgtggcactaactgcacttgcacggactgcacttgt

SEQ ID NO: 145929 - DNA, 239 bp, Glycine max
aacttttgacaaaccttagacgcgctgcttctctattctccctatggagtttaatcttggggtccgtcaaaagtttttaaattttgtgaggttcatatgaagaaaaggctcaagcttagttgtcaagttggaatcaacccatactccatggaatggactggtttggccaatagattactgagtaagggcaacgatattctgtgttgcgattatgctagttttgatggtttgattaccaa

SEQ ID NO: 145930 - DNA, 239 bp, Glycine max
cgacaaggctcttttgtctgaccctgtattccgccctctcgttgataagtatgcagcggacgaagatgccttctttgctgattacgctgaggctcccaaaagctttccgagcttgggtttgctgatgcctaagcaacgtttaggggattgttgaagaggcatggtgcccataatatttctctaaaaaattgtatggtcatggtttttaatgccaatgtgggttccccagattttagata

SEQ ID NO: 145931 - DNA, 240 bp, Glycine max
tcaacatcagtagaataatggagaggtgatgccgggtcagtgggaattccaagttggtacttcagttggaatctcagctggtgatgagatttgggagctcgttacatcttggagaggatcactgagattgctggtgtggtggtttcctttgaccccaagccaattaagggtgattggaatggtgctggtgctcacacaaactacagcaccaagtccatgagagaagatggtggctatgaa

SEQ ID NO: 145932 - DNA, 239 bp, Glycine max
cgaaggtggctttggttgtgtatacaagggccaacaatcagatggtacaatgatagcagtaatgcagctttcttcaaaatctaaacaaggaaatctgagtttgtgaatgagatgggactgatatctggacttcaacatcccaatcttgttaagctttatggatgttgtgtggagggcaaccagctaatactgatatatgagtacatggaaaacaattgtctatctcgcattctttttgg

SEQ ID NO: 145933 - DNA, 239 bp, Glycine max
catcaatgtcagtcctattgagtatgggcatgttttgctgattccgcgcattttcgagtacatgcctcaaaggattgaccgtgagagcttcctcctgcacttcacatggcagtggaagctgataatccatattttcgattgggttacaacaggttgggtgcttttgcaaccattaaccatcttcacttccaggcttattatttggctctgcccttcccaattgagaaggcccccactaa

SEQ ID NO: 145934 - DNA, 251 bp, Glycine max
aagtagttgagaactaagaaggagaagcaaatggcttcctcaatgatctcttccccagctgttaccactgtcaaccgtgccggtgccggcatggttgctccatcactggcgtcaagtccatggctggcttccccaccaggaagaccaacaatgacattacctccattgctagcaacggtggaagagtgcaatgcatgcaggtgtggccaccagatggcaagaagaagtttgagactctttcctacctgcca

SEQ ID NO: 145935 - DNA, 244 bp, Glycine max
gtaatttcaatttagtctgtgccgtttcgaaccctgggcaactacagcggcgtttgaaactgagaaaataatggggtgggagagcttcgtggtgggcacaacatagcaaagaggcacaacgtgggaacacttgctcgcagtgccaccgcgttcggcgtatcagaactcatcctcgttggtcgaagagatttcaactgtttcgggagccatgggtcctcctcccacctccgatttcgacacttcc

SEQ ID NO: 145936 - DNA, 237 bp, Glycine max
ctcgagcgttttgctgattggacttgggaggagatcaaaagacacagactaggcgcagcccaaaattgctctgccactcttaacggcaaccaaagctcactgatgctgttcttcctcccacgaaagactgtaggaaagaaggaatagtgagtgatgttaaagatcaaggcagctgcggatcatgctggacattcagcacaactggggcttcagaagcagcctatgcacaagcatttg

SEQ ID NO: 145937 - DNA, 238 bp, Glycine max
taagggaactggcaaggcagacgtttgaagtgattgaacaattcttgatacctttgaaggtagctggatatccagagctcaggcctttgctctgtttggtggagtggatatgagatcgcagcttgatattgtgaagaagggtgttcatattgttgttgccactcctgggaggctgaaggatatgttggccaagaagaaaatgaatcttgataattgcagctatttaatattggatgag

SEQ ID NO: 145938 - DNA, 239 bp, Glycine max
aaaaggtctgggcagaggttttcttctaccttgctgagaacaatgtcctttttgagggtaatctccttaagcctagcatggttacacctggagcgagtccaaggacaaggccagtcctcagacagttgctgattacaccctcaagctccttcacaggagaattccccctgctgtccctggaattatgtttttgtctggtggacagtctgaggttgaagctaccctcaatttgaatgcca

SEQ ID NO: 145939 - DNA, 241 bp, Glycine max
tagattgagaaaggaagatattgataagatggaacaagaggctgagaagtacaagtctgaagatgaagagcacaagaagaaggttgaggccaaaacgctttggaaaactatgcatacaacatgaggaagaccgtgaaggatgacaagattggtgagaaacttgacccggctgacaagaagaagattgaggatgcaattgagcaagcaatccagtggttagacagcaaccagcttgcagaag

SEQ ID NO: 145940 - DNA, 259 bp, Glycine max
attcggctcgagtttcgattttgaaatgaaagaaaagtgtggggataaatataaatgacaaaaagatattggaacataatcttggatgagatgatggaagcagtagatcatttggccacggtactagaaaatggaatcctaaaatgtcaccttatatatctgcaaagcgtaaggatattcatattataaatcttattagaactgctcggtttttatcagaagcttgtgatttagtttttgatgcagcaagtgagggaaa

SEQ ID NO: 145941 - DNA, 240 bp, Glycine max
caattttcaggagctggcatcagatttagctcaaattacctttgattatccttttaggatacccccatactttgcccttataattagagctatggggttctggaagggatagctttagtaggaaattctgaatttgccattgttgacgaggcttatccttatattgcacagaggctcctcacagatgaatctcctcggctaagggatgctctgcgttacactatatatgggaaatctggg

SEQ ID NO: 145942 - DNA, 239 bp, Glycine max
cttaagcgaaaagcaatagaattcaaagagagagtttcttgttctgtattttttgatttgatcatttcaatcttcaatttttttttatatatcaccaatccgcaaagtgcaaatttctaatctttcacgtattgggttcttctcttttccctcttcgtctccgatcgatccaattctcttcccatggctacgatcggacacaacaatctcaatgccaaattggttcttctcggggacat

SEQ ID NO: 145943 - DNA, 239 bp, Glycine max
gcgctgcctgaatatacagccaatagggcccctatgcataacaccttcatgtaatgggttttcaatggcaaagtactattgcaatatatgcaattttttgatgatgaaaggaatgtatatcattgcccattttgcaatttatgccgtgttggacaagggcttggtattgattattttcattgcatgaagtgcaattgttgcctggggattaaatcatcatctcataagtgcctggagaa

SEQ ID NO: 145944 - DNA, 238 bp, Glycine max
gggaagggtgagcatgaggaagaccgtcaccaagcaggtctcctcaggaagcccatggtacggcccagaccgagtcaagtacttgggcccatctctggcgagcccccgtcctacctaaccggtgagttcccaggcgactacggctgggacactgctgggctttccgcagacccagaaaccttcgccaagaaccgtgaactcgaagtgatccactccaggtgggccatgctcggagcct

SEQ ID NO: 145945 - DNA, 242 bp, Glycine max
catcaaagttttaatttcaggagtttatgtcaggactgaatcatctgatactagccttattgtgaaagatggataccaatggaggaaatatggcaaaaggtgaccagagataacccttaccctagagcatatttcaagtgctcttttgctcaaagctgccctgtcaaaaagaaggtgcaaagaagtgtggatgatcattctgttctgcttgctacttatgaaggggagcacaatcatcctca

SEQ ID NO: 145946 - DNA, 234 bp, Glycine max
tggaaaaggaaagtcgtctggtgagaaggatggagactcaatgcaggttgatagcccaacaacggagaagaaatcagagcctgagccacgtttgagattctgactaatcctgcaagggtggttcctgcacaggagaagtttattaaatttttgcaggacagcagatatgttccagttaagttggcaccatcaggatttgtgcttctcaaagacttgcgtcctactgagccagaa

SEQ ID NO: 145947 - DNA, 236 bp, Glycine max
tggaaaaggaaagtcgtctggtgagaaggatggagactcaatgcaggttgatagcataacaacggagaagaaatcagagcctgagccatgtttgagattctgactaatcctgcaagggtggttcctgcacaggagaagtttattaaatttttgcaggacagcagatatgttccagttaagttggcaccatcaggatttgtgcttctcaaagacttgcgtcctactgagccagaagt

SEQ ID NO: 145948 - DNA, 233 bp, Glycine max
aattttcaggatcaatgattagaccatgcaaactagaaatgctttttcttgtataaaggaagggattgctcgatccatttccatatcgatcatgatatatataataattcgagcacccatttcaaacgcatatccaatttttgcacagcagggttatgaaaatccccgagaagcaaccggtcgtattgtctctgccaattgccatttagctaataagcccgtggatattgagg

SEQ ID NO: 145949 - DNA, 243 bp, Glycine max
ctggtaagcctgagaaaagcagagcaccaaagaaggagaagaaggccaagaaagaccccaacaagcctaaaagaccaccgagtgctttcttcgtgttccttgaggagttcaggaagacctttaaggctgagaatcctctcgtgaaggctgtatcagttgttggaaaagctggaggagagaaatggaaatccctgtccagtgctgagaaagctccatatgaagccaaggctgcaaaaaggaaag

SEQ ID NO: 145950 - DNA, 243 bp, Glycine max
gtcaggcttcttgggttttgcttgcaaggagaagagaagatacttgtttatgaatatgtgcccaacaaaagtctcgactatattctctttgatcctgaaaagcaaagggagttggattgggggagacgttacaagattattggagggattgctcgaggcattcaataccttcatgaagattctaggcttagaattatacatcgtgatcttaaagctagtaacatattgttggatggagatatg

SEQ ID NO: 145951 - DNA, 247 bp, Glycine max
caggaggacctttcttcaacccactaggctttggtgaggatgagaagtccttgaaggatttgaagctcaaggaagtgaagaatggaaggttggctatgttggcaatcttgggttactttgttcaagctcttgtcacaggtgttggcccataccaaaacctcctagatcatttggctgaccccgtgcacaacaacatcttgaccagtctcaagttccactgaatgtattatatgttattttacatatt

SEQ ID NO: 145952 - DNA, 241 bp, Glycine max
cttctcgcggcttctttctccaagattaagtttcagtagtaatgggtaaggaaaaggttcacattaacatcgtggtcattggccatgtcgactctgggaagtcaaccaccaccggtcaccttatctacaagctcggaggtattgacaagcgtgtcatcgagagattcgagaaggaagctgctgagatgaataagaggtctttcaagtatgcctgggtgcttgacaagctcaaggctgagcg

SEQ ID NO: 145953 - DNA, 237 bp, Glycine max
gaacaagcagcattagcaaccaagcaagagaatggcgacttcagcagccttgtgcggcactatgatgagcagctccttcctgaggagaaaagcagtggtcacaagcctgaaggcattccccaatgctaacgcagtgtttggtgtaaagggtggacgtgtgggtggtgtgactgccatggctagcttcaaggtgaagctgataaccccagagggagagaaagaatttgaatgcccaga

SEQ ID NO: 145954 - DNA, 237 bp, Glycine max
cgatgttccgctttcatattatactggtattcttggtatgccgggaatgactgcatatgcaggtttctttgaagtaggctctcccaagaaaggagagaatgtttttgtttcagctgcctctggtgctgttggtcaacttgttggccaatttgctaaattgactgattgttatgtggttggaagtgctggaagtaaagagaaggtggatcttttgaagaataaattaggatttgatga

SEQ ID NO: 145955 - DNA, 242 bp, Glycine max
gtcagcttcttgggttttgcttgcaaggagaagagaagatacttgtttatgaatatgtgcccaacaaaagtctcgactatattctctttgatcctgaaaagcaaagggagttggattgggggagacgttacaagattattggagggattgctcgaggcattcaataccttcatgaagattctaggcttagaattatacatcgtgatcttaaagctagtaacatattgttggatggagatatg

SEQ ID NO: 145956 - DNA, 250 bp, Glycine max
aggatatccaggtttttattctcgaaatacagttcctttgacaccatgggttgtgaatgatatccacaaacgtggtggaagcatccttgggacatcatatggaggccatgacacctcaaagattgttgatagcattcaggaccggggaattaatcaggtttatatacttggaggatatggaactcagtatgaagcagctatgatttttgacgaagttagaaggcgtggcttgaaagttgcagtggtcgga

SEQ ID NO: 145957 - DNA, 249 bp, Glycine max
ttcctcactaggagctcctgtccactggttcttcatctgcatgcacacagttgcatagttttggaaaccaagaattcctgaagaagggtagcatcaacaagcagttctgaaaatggagatcaccaatgtcagtgagtatgaggctattgcaaagcagaagttgccaaagatggcgtttgactactacgcatctggtgcagaggaccagtggactctgcaagagaacagaaatgccttttccagaatttt

SEQ ID NO: 145958 - DNA, 243 bp, Glycine max
caagaagggaaagatgtgcgctctcttcatcaacgatcttgatgcaggagctggtcgtcttggtggaaccacacaatacactgtgaacaaccagatggtgaatgccactctcatgaacattgctgataaccccaccaatgtgcagcttccaggtatgtacaacaaggaagagaacccccgtgttcccatcattgtcaccggtaacgatttctcaacactctatgcacctctcatgcgtgatgg

SEQ ID NO: 145959 - DNA, 239 bp, Glycine max
tagagtgtcttgaatggctagaatctaaggaatctcgatccgttgtttatgtgaattttggcagcatcactgttatgtctgcagaacaactcttggagtttgcttggggtttggccaatagcaagaaaccctttttgtggatcattaggcctgaccttgtcattggtggatccgtgattttgtcgtctgagtttgtcagtgaaacaagagacagaagcctaatagcaagttggtgtcca

SEQ ID NO: 145960 - DNA, 154 bp, Glycine max
caagatatggttgaggaatggtttgattgtgttgatgaggaggattcctttgaggaagtttctttaactgcagcacttaatggtgttgagggtttggactgtatggaaagaattctgcttgccacatctgagggttttcctcatgtgcttccac

SEQ ID NO: 145961 - DNA, 235 bp, Glycine max
gtgattccacagcgctgatcccagagccaagaaagactggtacgatatcaaggccccttccctcttccaggtcaagaatattggcaaaaccctcgtctctcgtacccagggaaccaagattgcatccgaaggactcaaacatcgggtttttgaggtctcattggctgatctccaaggggatgaagaccactccttcaagaagattcgtttgagagctgaggacgttcaagggaag

SEQ ID NO: 145962 - DNA, 240 bp, Glycine max
tctggctcagagctttaccaagcgcccaatgaagggaatgcttaccggtcctgttaccattctcaactggtcctttgttagaaatgaccaacctagatctgagaccacctaccagattgctttgtctatcaaggacgaagtggaagaccttgaaaaggctggcatcactgttatccaaattgatgaagctgctttgagagagggtcttccactgaggaaatcagagcaagctcactactt

SEQ ID NO: 145963 - DNA, 242 bp, Glycine max
cttctgttgattcccaaaccgatgctgttattcagaagatcatcagagaggactttgcagctcgtaccatcatcagcattgctcatagaataccaacagtaatggactgtgatagagttctagttgtagatgcagggcgggccaaagaatttgattcaccagccaacttgctccaaaggccatctctctttggggcattagttcaagagtatgccaaccgttccagtggcctataagaaagt

SEQ ID NO: 145964 - DNA, 242 bp, Glycine max
cagattttgattcgattcgattcgattcagtcgaggttttaagcagcagcaagatgtctgggcgtggaaagggaggaaagggattgggaaaaggaggagcaaaacgacatcgtaaggtgctccgcgacaacattcagggaattacgaagccagcgattcgtcgtttggctcgcaggggtggcgtgaagcgtatcagcggtttgatctacgaggagactcgcggtgttctcaagatcttcttg

SEQ ID NO: 145965 - DNA, 242 bp, Glycine max
cggtgagggcgatatcgatcgaacatggcggaggagtacgatgtgatcgtgttgggcacgggtctcaaggagtgtattctcagcggtgttctctccgtcgatggcctcaaggttctgcatatggataggaacgactattacggaggagaatccacttcgctcaatcttattcagctttggaagagattcaggggagatgacaagcctcctccacatttgggcgctatagggactacaacatc

SEQ ID NO: 145966 - DNA, 241 bp, Glycine max
gattcccatagctaaagttgatgtcttggagttagatcttagctctatgacatctattcggaattttgcatcaaatttcaattcatctggtctttcattgaatattttgataaacaatgcagggatttgtgcagctccttttgcactatccaaggataacattgaacttcaatttgccataaattacttaggccactttcttttaacaaatatgttgttggatactatgaagatagcaaca

SEQ ID NO: 145967 - DNA, 224 bp, Glycine max
gaccagatggagaaatctgctacactcttcaggccaaaattaattgttgctggagctagcgcttatgcacgtctctatgattatgaacgtgtacgcaaggtttgcgataaacagaaagctatactattggcagatatggcacacatcagtggattggttgcagctggtgtcatcccatcaccttttgattatgctgatgtagttactaccacaactcacaagtc

SEQ ID NO: 145968 - DNA, 234 bp, Glycine max
aagattaaagattcaacaatggcctctgcttctgctactcttctcaagtcatctcctgttgttgacaagtgcgagtgggtcaaaggccagacccttcgccaacctctcgtgagatgtaacccttcctcagcatcagctctcaccatcaaagctgcttcctatgctgacgagctcgtcaaaaccgccaaaacagtggcctcaccggggcgtggtattttggcgatggatgagtca

SEQ ID NO: 145969 - DNA, 233 bp, Glycine max
gttaccatgaggacacctactaggaagattcgaaagagtgaatcgtctgagggaaagtcgggttctgaagcaaaaactgcagcaggggtttaaacagcattacactgcttcaattgttatacttgaagaaaccagctggtgcctcaagttacctggcgggttgtcactgaatttagcgtggttgtcaaattgttgggaagacattcagaacaatcttccgcaactgagttttc

SEQ ID NO: 145970 - DNA, 230 bp, Glycine max
ctcgagccgattcggctcaggtcgcgaatttgaccgaatagataatccacagtttgtgggctagaaatgtgacccaaatggagaatatgtgcgacgctggcttcctgaacttgctagattaccaactgaatggatacaccatccatggaatgcaccagagtctgtactccaagctgctggaattgaacttggttcaaattatcctcgtcccgttgtgggaatagatgcag

SEQ ID NO: 145971 - DNA, 232 bp, Glycine max
tggcagagatcatgtgcatcagttgcgtctacttatggagctgattggcaccccatcagaggctgatttggggttcctgaatgaaaatgctaagagatacattaggcaactacccctttaccgccgtcaatctttccaggaaaagtttccacatgtccatcctctagctatagatcttgttgaaaaaatgttaacttttgatcctagaaaaaggattactgttgaagatgca

SEQ ID NO: 145972 - DNA, 233 bp, Glycine max
tcttgatcattcgatttttctcctcaagatgcagatattcgtaaaaactttgaccggcaagactgtcacccttgaggtggaatcctccgacaccattgacaacgtaaaagctaagattcaagacaaggaagggatcccacctgaccagcagagacttatctgtgcgggtaaacaacttgaggatggtcgcacccttgccgattacaacatccaaaaggaatcaaccctccatc

SEQ ID NO: 145973 - DNA, 238 bp, Glycine max
tgtgattttctcaagagaaactttaagcagatgtctaatgttttgtgggtggctcctgaggataaggcgagtttatggtcacaacttcattatgtttcgtgtaataatctggaaatgcaagaagcttatcttgtcaatctcgtaaatgtgttacgataattgtatttgcacagtccagaggaagctcgccaattgagaaggaaagctctctctcgtattgaatggctgcaaaaagctg

SEQ ID NO: 145974 - DNA, 273 bp, Glycine max
acgcgttcggctcgagattgcagtagtgctaagtgctaacacctgcagtgtacaatggcctctgcatcagcatctctgctcaagtcttcacttgttcttgacaagtctgagtgtgtgaagggacaaacccttcgccaaccttctgcatcagttgtgagatgcaaccccaccaccccatcaggcctcaccatcagagctggttcctatgctgatgagctcgttaagaccgcgaaaacagtggcttcacctcggaggggtattttggccatggat

SEQ ID NO: 145975 - DNA, 269 bp, Glycine max
tcggattctgctcgaggtgaacaatggcctctgcatcagcatctcttctcaagtcttcacttgttcttgactagtttgagtgcgtgaagggacaaacacttcgccaaccttctgctgcatcagttgtgagatgcaaccccaccactccttcaggcctcaccatcagagctgtttcctatgctgatgagctctttaagaccgcgaaaacagtggcttcacctcggaggggtattttggccatgtctgagtccactgctccctgttcgaag

SEQ ID NO: 145976 - DNA, 252 bp, Glycine max
tgaacaaatcctgctagtgcagctatgtgtggaatgaaaattgtctctgttggaactgatgccaagggaaacattaatatagaagagctgaggaaggctgctgaaacacacaaggataacttatctgcacttatggtaacatatccttcaacccacggtgtttatgaggaaggtattgacgaaatttgcaatattattcatgataatggaggccaagtatatatggatggtgccaacatgaatgctcaggtg

SEQ ID NO: 145977 - DNA, 257 bp, Glycine max
agaggtagaggaaagggtaaaaaactaactgttgccaattttgaggatccagcgagtggcgaggatgaaaaagttcccacgcaaaagagaagagggaggccacaaaaaccgctaaaggacgactttgatgaagaagaggtagagaaaatagaagacgacagtgacaatgttaagaatggaaccgcttacaaagagatgaaaagccccactgcaactgaaaatggaaggaaaagaaagcgaaactcacaggtaaaaga

SEQ ID NO: 145978 - DNA, 258 bp, Glycine max
ctcttcttctcttgcggcgagggttttagcgcacttcttctagatttaaggaagatgggtaaggaaaaggttcacatcagtattgtggtcattggccatgtcgactctgggaaatccactaccactggtcacctgatttacaagcttggaggcattgacaagcgtgttattgagaggtttgagaaggaagctgctgagatgaacaagaggtctttcaagtatgcctgggtgctggacaaacttaaggctgagcgtgaa

SEQ ID NO: 145979 - DNA, 262 bp, Glycine max
cggctcgagcaacacacgaccgcttcaacaactactccatcatcatccatccacaacaccacatcacacacaagccaccacacaccactgccaacatgcagatctttgtcaagaccctgacgggcaagaccattaccctcgaggttgagtcctcggacacgatcgacaacgtgaagagcaagatccaggacaaggagggcatccctccggaccagcagcgcctcatcttcgcaggcaagcagctggaggatggtcgcactct

SEQ ID NO: 145980 - DNA, 263 bp, Glycine max
ttcggctcgagacattaaatacaatggtggcctcgacacagaagaagcatatccctacaccggaaaagatggtgtctgcaaatttacagctaaaaacgttgctgttcgagtcattgactctatcaatatcactttgggtgctgaggatgaattgaaacaagcggttgcttttgttcggccagttagtgtggcatttgaggtagcgaaggacttccgattctacaataatggagtttacactagtaccatttgtggtagcacgc

SEQ ID NO: 145981 - DNA, 254 bp, Glycine max
ctccttctctcgttgattcggatctagagtcttttttcactcttcagttctcgttgttgttcttcgctttcctgaaactagggttttcaatttcgattcattcgttaataattaaagatgtttgggagggcaccgaagaagagcgataatacgaggtactacgaaatcctcggcgtctcgaagaacgcttcgcaggatgatctgaagaaggcttactcgaaagccgccatcaagaatcaccctgacaagggcgg

SEQ ID NO: 145982 - DNA, 258 bp, Glycine max
atatcataccctttctatcctacttgctacttcccacttccattcttttcttaaccagctaggatggtgagtgttgaagagattcgtaaggcgcaacgtgcagaaggccctgccactgtcatggctattggcaccgccactcctcccaactgcgtggatcagagtacctatcctgactattatttccgcatcaccaacagctcgcacatgaccgagctcaaagaaaaattcaagcgcatgtgtgataagtcgatgatt

SEQ ID NO: 145983 - DNA, 257 bp, Glycine max
  unsure (1)..(257): unsure at all n locations
gttacttcagatttctaagancatgacccttattctgactatgcatcattttgtactaganttaagagccaanntaccaaaaacccagaanatnggtatagaaagttacaagctgttttgaagacaataatgttacgccggaccaaaggtacacttcttgacggggaacctattatttccttgccgcctaagtatatagagctgaaaaaagttgatttttctatggaggaacgtgatttctattccaaactagaggc

SEQ ID NO: 145984 - DNA, 251 bp, Glycine max
cggctaagacagaatatggagagtagtgagggaattaggtgtaaggtatgcgtgaccggcggtgctagttacataggctcttgccttgtcaagaagcttctgcaaaagggctacaccgtccactccaccctcagaaactttaaggacgagtcaaagataggccttctgagagggttgcctcatgctaatgatgagagactggtgttatttgaagcagacatatataaaccagacgagtacgagccagcaat

SEQ ID NO: 145985 - DNA, 254 bp, Glycine max
atgaaatgttgattggtatttattgatgaattgagtaaagagtaaacctttttcttttagattagagtttttttatagattttgaaagtgaaaaccctttgttttttttatttgttataactacttgagccggatgaaaggaaaccttcacgtccgattttgaaagggggagatcttattggattggatcctatctcaatttttcgtttgctagacccgtagttaaaaaacccactttcttacgattacgaggt

SEQ ID NO: 145986 - DNA, 177 bp, Glycine max
ttcccctctaagggtatctttctctctagctttttgttatgctttgctattctgtctttgggagctgaagctcgtagatcaccatcacccatctcttctctcattagcaaagagctttttgattccattttcatccacaaagataacaatgcatgccctgccagaaacttccacaca

SEQ ID NO: 145987 - DNA, 253 bp, Glycine max
gtgtcataaaaaatggaacttgaaaagttacatgattcaatcaatttgatactgtcacttcagagtaaaaatggaggtatgactgcgtgggagcccgcaggagcttataaatggttggaactactcaatcctacggaattttttgctgacatagtagttgagcacgaatatcttgaatgcactgcatcagcaattcaggttttagtgttgttcaaaaagctttaccctgagcatagaaaggaagagatagaga

SEQ ID NO: 145988 - DNA, 257 bp, Glycine max
gttacaagaagtcttcaacgttgtaccaacttccgaatcagaagagtttcagttaccaactcaaacatcgctttccctcaccttcttcgacctcctatggttaaggttaccacctgttcaacgcgtcttcttctatgaattccctcacccaacccatctcttctttgatacccttcttcccaaactcaaacactctctttctcttgcacttgcccactttttccctcttgcgggccacctcacttggccacttcact

SEQ ID NO: 145989 - DNA, 248 bp, Glycine max
acggtctgtgactcacacagactcacttcaagttcccagcttttgccatttttcccactgtttattgagatgaactgcagaacatggcacagattttggctccctctacgcaatggcagatgcgaatctcaaaatcctctcccaatgcaactcccattacatcaaacatgtggagttctttattgtggaaacaaaataagaaagtttcacctaccagttctgctaaatttagagtgctggcaattaag

SEQ ID NO: 145990 - DNA, 247 bp, Glycine max
cggcagtgtcatgctcattgccactgccatcgcctccaccggtagtccctcttgcaagaaagattggagcggagttcatagggaccttcatcctcatgttcgcaggcactgccgctgccattgtcaaccaaaagacaaatggctctgagacccttattggatgtgctgccaccactggtctcgccgtcatgatcgtgatcctcgccaccggccacatctccggtgctcatctcaaccctgctgtcac

SEQ ID NO: 145991 - DNA, 245 bp, Glycine max
cttggtggtcaggccaagatccgtccactgtggaggcattatttccataacactcagggtctcatttatgtggtctgatagcaatggtagagatcgagtggttgaggcaatggattagctgcacagaatgttgaatgaggctgaacttatagatgctgtcatgcttgtttttgccaacaagcaatatcttcctagtgcaatgaatgctgcagagatacctgagaagcttggacttcattcgctcc

SEQ ID NO: 145992 - DNA, 246 bp, Glycine max
ctttaaatctttgtgtactgacccccaatcgaattgtttgggattcggaagtgaaggaaatcattttatctactaatagcggacaaattggagtattaccaaatcatgcgcctattgccacagccgtagatataggtattttgagaatacgtcttcttaaagaccaatggttaacgatggctctgatgggcggttttgctagaataaacaataatgagatcactgttttagtaaatgatgcggaaa

SEQ ID NO: 145993 - DNA, 243 bp, Glycine max
caaacttcataagtgtcaaaggtcctgagctactcacaatgtggtttggagaaagtgaggctaatgtgagggaaatttttgacaaggctcgcggttctgctccatgtgtcctattctttgatgaacttgactctattgcaactcagaggggtagtagtgtcggagatgctggtggtgctgctgacagggttttgaaccaactgcttacagaaatggatggaatgtcggcgaagaaaactgtgt

SEQ ID NO: 145994 - DNA, 247 bp, Glycine max
gtcttctggttctttgaagaagaacccttctctttgcgcgtgtcccgttctcttctccaatcctcctccatccccactgtgtgatctgatcctaaaccctatagccatgactaccatggaggttaagctatggaatgacaagcgcgagagagaaatgtatgacaactttggggagctttatgccattatcaaagccgctgtgaggcttgagaaggcctatgttagagatataatctcaccccaggaa

SEQ ID NO: 145995 - DNA, 252 bp, Glycine max
gtggaagagtacaatgcatgcaggtgtggccaccaattggcaagaagaagttcgagactctttcctacttgccagacctcgatgatgcccaattggcaaaggaagtcgaataccttctaaggaaaggatggattccttgcttggaattcgagttggagcacggtttcgtgtaccgtgagcacaacaggtcacctggatactatgatggacgctactggaccatgtggaagctgcctatgtttggctgcactg

SEQ ID NO: 145996 - DNA, 249 bp, Glycine max
cattgctggaatcagactctctattaatgtatgtatttccgtttccagagttggatcggcatctcaaattaaagccatgatacaagtatctggtaaattaaaattggaattagcacaattcgcagaattagaagctttttcccaattcgcttctgatctcgataaagctactcaaaatcaattagcaagatgtcaacgattgcgcgagttgcttaaacaatctcaatcagctcctcttaccgtggaaga

SEQ ID NO: 145997 - DNA, 244 bp, Glycine max
tagaattcaaagaaacactattattcttttcaacacttttgatggcatttagagtgatgtaatgaatgctctatcctctatgttcccttctctttatcccattggtcctttccctttacttttaaatcaaagtccacaaagccacttgacttctttaggttccaatctttggaatgaagatctagagtgtcttgaatggctagaatctatggaatctcgatccgttgtttatgtgaattttggc

SEQ ID NO: 145998 - DNA, 246 bp, Glycine max
  unsure (1)..(246): unsure at all n locations
gtaagatacatgacggaacctaactcctccttcaggaagagcgcacatgaacaacctctcacagtacgacgcggagttcaacgccgncgacgccggctacgcctctcacgacgtcgttcacgcctccggccgcacgcgcgagccaagcgaggtgtttcttggacggaggaagagcatagattgttcctgttagggttacacaaagtcggaaaaggagattggagagggatttctagaaacttcgtg

SEQ ID NO: 145999 - DNA, 248 bp, Glycine max
  unsure (1)..(248): unsure at all n locations
gctcttttctgctgagatttctttgtctccccggtattctgatccagcagccggttctgtgttttcccctactcacaaatcagctgttctcaatcagtttcaacagctccaaagtatgttatcacctataaatactaatttgctgtctcctaagaatgttgagcatcctctttttcaggcttcttttggtgtctctccttctggaaggntntcaccaagaagtgttgaaccaatctctccaatgagtg

SEQ ID NO: 146000 - DNA, 251 bp, Glycine max
  unsure (1)..(251): unsure at all n locations
atttcttgcacccttattcctaaggactccgataaggttatgcttgcaaaacaaactggacttactcggagccaggtgtctaactggtttataaatgcccgagttcggctatggaagccaatggtagaagaaatgtacttggaagaggtaaaacaagaaccaaacaatagctctcaggataacaccacaaaaagatcanaagaatcaagcaaggagttatggtcagaagctaatgctactgcacaggaatc

SEQ ID NO: 146001 - DNA, 246 bp, Glycine max
ggtgcaagcaagtcgtttgagcagacctgctttctggatgttaagggatactgtcgtgaagagaggagccacgaagggcttggaatgggtggttctgttgtctaccaaaaattcgggaagactagtgactgtggttcacctagatcaactctaaagtgctggaatgaggaagatgaggaagagtagtttccttaagtgtctttattattctgtccttgtgaaaataagtctggttttccagatacg

SEQ ID NO: 146002 - DNA, 258 bp, Glycine max
tcgcagcacgcgtagatacgtcataaaatactacttacatgaaatcctgtacagaaattaaccccatatgttcttgtgctggcattgtcaacagagtggtgttcatcatgcagtaaatccatgcccttatagaggcattttcggttctgatggagagaagtatgcaagagatgtacaagatatcattaacttcggaacttctggaaatgttgcagccttcatttctgaagccatacagggagtggggggtatcattga

SEQ ID NO: 146003 - DNA, 237 bp, Glycine max
ctcacagctccaaagccacaagcctcctccgacctccccgaaggcaacaactggcgctacagcgagttcttgaacgccgtcaagaagggtaaagtcgagcgagtcaggttcagcaaagacggttccgccctccagctaaccgccattgacggccgtcgcgcctccgttattgtccccaatgacccggacctcatcgacatcctcgccatgaacggcgtcgacatttccgtcgccgag

SEQ ID NO: 146004 - DNA, 234 bp, Glycine max
agattttgagcacaatggcctcgacacaatgctttttgcaccaccacgccctcaccactccagctagagcttcaacacagcgcctagttgttagcaccaaaccaaaccacattgtttgcaaggcagcacagaagcaggttactgtccaagagggtgaggacactactactggccttgtctctcgcaggttggccctcactgtgctcattggtgctgctgctgttggctctaagg

SEQ ID NO: 146005 - DNA, 232 bp, Glycine max
cttgaatcttcgttatccttctttttttctccttgaactcgaatattcactatggcagatgaggtggttctgctagatttctggccaagtccatttgggatgagggtcaggattgcacttgctgaaaagggtatcaaatatgagtccaaagaagaggacttgcagtacaagagccctttgctcctcaaaatgaacccggttcacaagaaaatcccggttctcatccacaatg

SEQ ID NO: 146006 - DNA, 236 bp, Glycine max
ccctaatccctatttttcttcctcagtagtgtcatttacgcttctcttctctgcagcaactatgcctaaccctaaggtcttcttcgacatgaccatcggcggtcaatctgctggccgcatcgtgatggagctctacgccgacgtcactccccgcaccgccgagaacttccgcgcgctttgcaccggcgagaagggcgtagggcggagcggcaagcccctccactacaagggctcgt

SEQ ID NO: 146007 - DNA, 233 bp, Glycine max
ccacatttggaatgtcaaactggtgatttgcagcaaatcaccagtttggcaaaacagatggtgaccacatttggactgtctgatattggtccttggtcacttatggaaccatcagcaacaggtggggatgtcatcatgagaatgatggcaaggaactcaatgtcagagaggcttgcagaagacattgatgctgccatcaagaggatctcagatgaagcatatgaaattgcact

SEQ ID NO: 146008 - DNA, 229 bp, Glycine max
agaagagggatgctattgacacaaagaaccaggcagactctgtggtataccagacagaaaagcaattgaaagagcttggagacaaggttcctggccctgtgaaagagaaggttgaagcaaaactaggagagcttaaagacgccatttcttggggttcaacccaagctatcaaggatgccatggctgcactaaatcaggaagtcatgcagcttggtcagtccctttacaa

SEQ ID NO: 146009 - DNA, 243 bp, Glycine max
cggctcaacacgagctggttctatgctgatgagctcgttaagaccgcgaaaacagtggcttcaccagggaggggtattttggccatggatgagtccaatgctacctgtgggaagcgtttggcttcaattgggctagagaacactgaagctaaccgccaggcgtaccgtaccctccttgtgacagttccaggacttggtcagtacatctctggtgccattctctttgaggaaactctctaccaa

SEQ ID NO: 146010 - DNA, 237 bp, Glycine max
  unsure (1)..(237): unsure at all n locations
ctctttttnatnngttggatgatccatgaaatccagctgtgattgctgataatgttggtgataatgttggtgatatcgctggtatgggatctgatctttttggttcatatgccgagtcatcctgtgctgctcttgttgttgcttccatctcttcttttggggtgaatcatgagttgactgctatgttataccctctaattatcagttctgtgggtatccttgtttgtttgctcacaa

SEQ ID NO: 146011 - DNA, 230 bp, Glycine max
tgcaattgaagttgaagtcttgcccttctctcttcaactccaaacacaagacatcatcatccatggctgcctccgtctccactgtcggagctgtcaacagagctcttttgaacctgaatgggtctggacctggggtttcagctcccagttcatccttctttgggagcagcttgaagaaggttattggctcaagggtccccaacacaaagatttcctctggaagcttcaag

SEQ ID NO: 146012 - DNA, 228 bp, Glycine max
gcttttatggacaaacttgttgttcacattaccaagaacttcatgaccctgcccaacatcaaggttcctctcattcttggtatctggggaggcaagggacaaggaaaatctttccaatgtgagcttgtctttgccaagatgggaatcaaccccatcatgatgagtgctggagagttggaaagtggaaatgcaggagagccagcaaaactgatcaggcagagataccgt

SEQ ID NO: 146013 - DNA, 230 bp, Glycine max
gggttctgaacttgaagctcccattcacgtcctcatggtgtcctatccagcacaaggacacataaaccctttgctcagactaggtaagtgccttgctgcaaagggcttatttgtaaccttcaccacctcagagaccgctggtaaaaacatgcgaaccgccaataacatcactgacaaatcagtgattcctgtcggcgatgggtttctcaagttcgatttctttgaagatg

SEQ ID NO: 146014 - DNA, 228 bp, Glycine max
gttgatccagataagtgggagtttgctaatgagatgtttcttagagggcaaaggattcttctgaagaacattagaaggaggaaagcaaatcatcatcaatcccatcagcacgcgatgcagcaaggtgtagaagagccttttgttgaggtggggcagtttgaattagatggagaaattgatcggttaaggcgagacaggcaagttcttatggtggagttggtgaagctc

SEQ ID NO: 146015 - DNA, 230 bp, Glycine max
ggagaatctgcttggccttttgagggttcgcgtgaagcgtggtgtcaaccttgccgttcgtgatgttcgaagcagcgacccttatgttgtcatcaagatgtacatccagaaactaaagactcgtgtgattaaaaaggatgtgaatcctgagtggaatgaagaccttactctttctgttataaatccgaatcacaaaattaaactgactgtgtatgaccatgacactttta

SEQ ID NO: 146016 - DNA, 232 bp, Glycine max
gcagcgttcacgaagtgggatacttcgacctcgtcgttaaggtttacttcaaaggggtgcaccctaagttccccaacggtgggatcatgtctcaacacttggactctctccccattggttctgtcttggacgtgaaaggcccacttggccacattgaatacactggcagaggaaacttcctcgttcatgggaaaccaaggtttgccacgaggctagccatgttggctggtgg

SEQ ID NO: 146017 - DNA, 234 bp, Glycine max
aagtagttgagaactaagaaggagaagcaaatggcttcctcaatgatctcttccccagctgttaccactgtcaaccgtgccggtgccggcatggttgctccattcactggcctcaagtccatggctggcttccccaccaggaagaccagcaatgacattacctccattgctagcaacggtggaagagtgcaatgcatgcaggtgtggccaccagtcggcaagaagaagtttgag

SEQ ID NO: 146018 - DNA, 244 bp, Glycine max
ggtgcaagcaagtcgtttgagcagacctgctttctggatgttaagggatactgtcgtgaagagaggagccacgaagggcttggaatgggtggttctgttgtctaccaaaaattcgggaagactagtgactgtggttcacctagatcaactctaaagtgctggaatgaggaagatgaggaagagtagtttccttaagtgtctttattattctgtccttgtgaaaataagtctggttttccagata

SEQ ID NO: 146019 - DNA, 229 bp, Glycine max
gggaaatgatctttatatggaaatgaaagaatctggagtaattaatgaacaaaatattgcagaatcataagtagctctagtatatggtcaaatgaatgaaccgcccggagctcgtatgagagttggtttaactgccctgactatggcggaatattttcgagatgtcaatgaacaagatgtacttctatttatcgacaatatctttcgcttcgtccaagcaggatctgaa

SEQ ID NO: 146020 - DNA, 225 bp, Glycine max
tatttttcttcctcagtagtgtcatttccgcttctcttctctgcagcaactatgcctaaccctaatgtcttcttcgacatgaccatcggcgctcaatctgctggccgcatcgtgatggagctctacgccgacgtcactccccgcaccgccgagaacttccgcgcgctttgcaccgtcgagaagggcgtagggcggagctgaaagcccctccactacaagggctcg

SEQ ID NO: 146021 - DNA, 229 bp, Glycine max
  unsure (1)..(229): unsure at all n locations
tttgtttgtatgtgtagggggacacataaacccggcggtgacatttgggctgtttttggcgaggaagttgtcgttgcccagggcgattttctacatcgtgatgcaatgcttgggtgctatttgtggcgctggcgtggtgaagggtttcgaggggaaaacaaaatacggtgcgttgaatggtggtgccaactttgttgcccctggttacaccaagggtngatggtcttgg

SEQ ID NO: 146022 - DNA, 227 bp, Glycine max
gtgaatgtggatgatacaattgcacaacagatagttgttcacaaaaatagtcctagagggacccattttcgtcgtgctgggcctgctcagtaggtatattttgattcagaggtagtacacgcttgtattgtcacgtgcggtggactttgtcctggtctaaatacagtgataagagaaatagtatgcggcttatatcatatgtatggggtgcacaaagttttgggaat

SEQ ID NO: 146023 - DNA, 230 bp, Glycine max
tgtagacatgctttttccgtcaatttgggcattctgtggttcttgcggattatcttacgcttcgcaaaggcttcatcatgaatcacaacctttcattcaaatatgattttcacagctacatgattcgatcaatggaagaggaattccaaaggatagttggtgtgagtggtccactctggggatttgttattgccttcatgcttttcaacattaaaggatctaatctatat

SEQ ID NO: 146024 - DNA, 229 bp, Glycine max
ctcttcaaaagggagaagaaaaggaaagaaaactctcaaaaaactattatagcaatggcagaacaaaaccaaaaccaaacaactgaagctggaaggcaccaagaggttggtcacaagagccttctccagagtgatgctctttaccagtatattctggagacaagtgtctacccaagagaacctgaatccatgaaagaactgagagagttgacagcaaaacacccatgga

SEQ ID NO: 146025 - DNA, 225 bp, Glycine max
tgtgcattattcaatggccaccacagcagctctatccggaaccatggtgagcacctccttcatgaggaagcaacctatgacgaccaagagcctaaagacattccccaacgctctttttggtctgaaaggtggacgaggtggtcgtgtaacttgcatggcctcgtacaaggtgaagctcataaccccagaaggagaagtggagtttgaatgcccagatgatgtttt

SEQ ID NO: 146026 - DNA, 224 bp, Glycine max
gttggtggtcaggacaagatccgtccactgtggaggcattatttccagaacactcagggtctcatttttgtggttgatagcaatgatagagatcgagtggttgaggcaagggatgagctgcacagaatgttgaatgaggatgaacttagagatgctgttttgcttgtttttgccaacaagcaagatcttcctaatgcaatgaatgctgcagaaataactgacaa

SEQ ID NO: 146027 - DNA, 220 bp, Glycine max
aagatacttaccaagggggagaaatgggtgaacccaaaggatcctgatgatgttttagtcaagtatgaagcatgccttgaagatggaactcttgtggcaaaatctgatggagtggagttcacagtcaatgatggttatttttgtcctgctttgtcaaaggctgttaaaaccatgaagaagggagagaaagtgcttctgacagtgaagcctcaatatggat

SEQ ID NO: 146028 - DNA, 221 bp, Glycine max
gtgacactgtgactgctgttcttgttcctgcttacattgatagtactgaaatagttagaagggcatggaagagatacaatttgagcttaggtcttggactgaacaaagttgctgggaaggttttcagaattggacatcttggcaacttgaatgagttgcaactgttgggatgtctagctggtgtggagatgatactgaaagatgtgggctatcctgtaaag

SEQ ID NO: 146029 - DNA, 219 bp, Glycine max
gcaagttagttggatgtggctctgctgtgccagctcttcagatttccaatgacgacctttcgaaaatggttgatactaatgatgaatggatatctgttcgcaccggaattcgtagacgacgagttctttcaggcaaagataacttgacaagtttagcagtagaggcagctaggaaagctcttgagatggcaaaggtagaccctgatgatcttgacctaa

SEQ ID NO: 146030 - DNA, 221 bp, Glycine max
ggttcttagatatgaggacatttttgattcaaccagcacttttgctgtcatggtcactgcaactgacaagaagtccatcactgactatggttcacctgaggagttcctatcttaggtggattacttgcttggaaaacaagccttctttggccaaactgatgctgagggtggttttgattccaatgctgtggcaactgcaaatatcgttggagagttcaacg

SEQ ID NO: 146031 - DNA, 223 bp, Glycine max
ggaaaatctttccaatgtgagcttgtctttgccaagatgggaatcaaccccatcatgatgagtgctggagagttggaaagtggaaatgcaggagagccagcaaaactgatcaggcagagataccgtgaagctgcagacatgatcaagaagggaaagatgtgcgctctcttcatcaacgatcttgatgcaggagctggtcgtcttggtggaaccacacaataca

SEQ ID NO: 146032 - DNA, 220 bp, Glycine max
ggaggttatatggaggtgactgggttttctgcagaagtgagggaacaaatatataaagtggcatctgtcaacctttgctctaatatctctggtcaaattcttgcaagcttggtcatgagtccacccaaggttggagatgagtcctatgactcattcatggctgagaaggagaatattttggcgtcccttgccaggcgtgcaaagacattagaagatgcat

SEQ ID NO: 146033 - DNA, 233 bp, Glycine max
tcgggctcgagggtttagtatcaagggtaacaagacttgtgatgtgtgcaaggaggaggttcggaacctccctgtcactctcttaaggatccgaagtgttcgagctcagaatactagagcaaggtccgaacagggagatgacttcagggcttggcaggaacttccagtgcttgtcattgtcagcatgcttgcctatttctgtttccttgagcagctgttggttggaagaatga

SEQ ID NO: 146034 - DNA, 218 bp, Glycine max
  unsure (1)..(218): unsure at all n locations
agaagaacaagtagttgagaactaagaaggagaagcaaatggcttcctcaatgatctcttccccagctgttaccactgtcaaccgtgccggtgccggcatggttgctccattcactggcctcaagtccatggctggcttccccaccagatagaccccaaatganattacntcnattgctagnaactgtggaagagtgcaatgcatgnaggtgtggcca

SEQ ID NO: 146035 - DNA, 217 bp, Glycine max
atctggactttagttctgacgctgacatgatcaagaaatttcgtgcaggccttgctttgcagccgatagcaacggctctttttgcaaattcaccctttaaagagggaaagccaaatggttttgtcagtatgagaagccatatttggactgatactgataaggaccgcacaggcatgctgccttttgtttttgatgactcttttgggtttgagcaata

SEQ ID NO: 146036 - DNA, 219 bp, Glycine max
ttgacaacttgtacgggtgccgtcactctctccctgatggtctgatgagggctactgatgtgatgattgctggaaaggtggctgttgtggctggatatggtgatgttggcaagggttgtgctgctgcattgaagcaggctggtgctcgtgtcatcgtgactgagattgaccccatttgtgcccttcaggctctcatggaaggccttcaggttctgacct

SEQ ID NO: 146037 - DNA, 262 bp, Glycine max
ttcggctcgagcaggccacgaaggatgctggagtcattgcgggtctcaatgtcatgcgtatcatcaatgaacccaccgctgctgccattgcttacggtcttgacaagaaggccaccagtgtgggtgagaagaacgtgttgatttttgacttgggtggcggtacctttgatgtctctcttctcaccattgaggagggtatttttgaggtcaaggccactgccggagatactcatcttggaggtgaagattttgataacaggat

SEQ ID NO: 146038 - DNA, 235 bp, Glycine max
aaacatggcaagagtggtggcactccaacagaaccaactatctttctctaccttagcttcctctctttctgacttcagtggaaccagacttcaaactcaacttcagttcaagagaaagcaatgccatccaaaagggtctttctacgtctccgcatcgagcaccaagaaaatcctaataatgggaggcaccaggtttattggtgtgtttttgtctaggctccttgtcaaagagggt

SEQ ID NO: 146039 - DNA, 248 bp, Glycine max
gaactattgcaaggctgtaaaagcaggccttcttaaaattctttccaaaatgggcatctcgttgctatcaagttactgtggtgcacaaatatttgaagtctatggattagggaaggaagttgttgatcttgcattcagaggaagtgtgtcgaaaattggtggattaacttttgatgaggtggcaagagagactttgtctttctgggtgaaggcattctctgaagatacagctaaaaggttggaaaatt

SEQ ID NO: 146040 - DNA, 249 bp, Glycine max
gcgaagtgtgaagacagacacagtgagaatgatgaagcgtcggttccttttggttctcttggttctctatgtcacagtggagttctacgtagaagcagatggtagtggtgggtttgtgagaacaagaggagtgcagcttatgctgaatgggagcccctactatgctaatggctttaatgcctattggctaatgtatcttgcctctgatccttctcagagaaacaaagtctcatcagtgtttcaacaggc

SEQ ID NO: 146041 - DNA, 247 bp, Glycine max
tgaggatggtcgcacccttgccgattacaacatccaaaaggaatcaaccctccatctcgtgcttcgcctcaggggtggcatgcaaatctttgtcaagactttgaccgggaagaccatcacccttgaggtggaatcctcggacaccattgataatgttaaggccaagatccaggacaaagagggcatccccccagatcagcagaggctgatttttgccggtaaacaacttgaggatggaagaaccctt

SEQ ID NO: 146042 - DNA, 250 bp, Glycine max
tgttaaagagggtcaccaggtgactttattcacaagaggtaaagcgcctgtcactcaacagttgccaggtgaatcagacaatgattatgctgatttttcttccaagatcttgcatttgaacaggagacaggaaggactttgactttgtaaaatccagtctctcggcagagggatttgatgttgtttatgacataaatggacgtgaggcagatgaagttgagcccatactggatgcgctgcctaatctgga

SEQ ID NO: 146043 - DNA, 172 bp, Glycine max
gatccacaagaagcacagcaaactcttgaaatagcagaagctaatttgaataaggcggaaggcaagagacaaacaattgaggcaaatctagctcttagacgagctaggacacgagtagaggctatcaatgtgatttcataacaagttgatgcgtccgaatatcggaataact

SEQ ID NO: 146044 - DNA, 257 bp, Glycine max
aaaagagcaagcagaacttgcaatgaaagctataatgaaactttacatccctggatggagatttctacctactgctaaccataggaggatgaaggaaattgatagagaaataaaagcttcacttacagatatgattagcaacagagagaaagcactaaaggcgggtgaggctaccgagaatgacttgttaggtatacttttggagtcaaatcacaaggaaactgaagaacatggaaacagtaagaatgttggaatga

SEQ ID NO: 146045 - DNA, 250 bp, Glycine max
ctttccccaaatcccaaaccctttttcgcttagatcccaatccaattgggttatggacatggcttccagtccccgcaccgtagaagagatcttcaaggattacagcgccagaagaacctctgttattcgcgctctcactcacgacgttgatgaattttacggcctctgtgatccagataaggataacctgtgcctctatggacatccaaatgaggcctgggaagtaactctgccagcggaggaagttccg

SEQ ID NO: 146046 - DNA, 247 bp, Glycine max
agctgtttcatcgaaaacaagatggtatctgttgagaggataaagcaatttacaaatattccatcagaaccagcatggaatatcaaggatcgtatgcctccttcaaattggccaagtcaaggcaatgtagatatcaaagacttgcaggtcagatatcgtctaaacactcctctggttcttaaaggcattactttaagcattagtggaggtgaaaaggttggtgttgttggtcgaactgggagcggaa

SEQ ID NO: 146047 - DNA, 245 bp, Glycine max
ctgggaatgcagcagtcaaaaggagtgattgggcctcattggtacaagtgtttttaacaaacagcgacagtacagagcatttcgatgcatgtaagtggacaaaatcggaaccacattcctgggaattgatcttcccaatagaggtatgtggtcctaataatggttttgaaatgtggagttctgagtgggcaaatcaaacttcatggcacttgagtttccttattgacaatcccaaacagtctaca

SEQ ID NO: 146048 - DNA, 243 bp, Glycine max
ttttgaacatgccacaagatatcatgtatggctgggacatctcacaatggtgctttttactgtccatggactcctctatgttattgcatgggcaatggaaggccaccttgtacaagaattaatacaatggaaagatattggtgttgccaatctcccaggagttatcagccttctagctggtttgttaatgtgggtgacctctcttcccggagtgcggacatggaactttgagttgtttttcta

SEQ ID NO: 146049 - DNA, 244 bp, Glycine max
gtggccagtggcaagaagatcaagactgacaaaccttatggaattaatggtggcatggccttgagggatggaactgatgcatctggcaggaaaggaaagggaaagggtgtttaccagtttgtagacaaatacggtgctaatgtcgatggttacagtcctatctacgacaccaaggactggtctccaaccggtgatgtctacgctggcggtacgactggcttggctatctgggctgtgactctac

SEQ ID NO: 146050 - DNA, 141 bp, Glycine max
tgatgcgacttgccatgtcaacttgtggaaaaccggacatattatcaacgagcttaacataaactccgtgataaccacgccttgccacgaagagatcttgcccatcaactcatgggatactcagatgccttatttcatcag

SEQ ID NO: 146051 - DNA, 247 bp, Glycine max
ccggaattttccgcactgatggtattcctgaacaggacattgtcaagcttgttgacaccttccctggccaatccattgatttctttggtgcactgagggccagagtatatgatgatgaagtgaggaagtggatttctggtgttggtgttgacagtgttgggaagaagcttgtgaactcaaaagatggacctccaacctttgagcagcccaagatgactctggagaagctcttgctgtatggtaacat

SEQ ID NO: 146052 - DNA, 251 bp, Glycine max
caagtaccagcaggctttaaaggatctgtatacgcatctgactcctattcagcgggtcaacatcgcacggcaccctaacaggccaactttccttgatcatgtctttaacataactgaaaagtttgttgaactccatggtgatcgggcaggttatgatgatcctgctattgttactggtctagggactatagatggtagaagctacatgttcatcggtcaccaaaagggtagaaatactaaagaaaacattc

SEQ ID NO: 146053 - DNA, 204 bp, Glycine max
caggcatagcatgctacactcgcgggcctttcttgcctagtgtttcttccaagcactctccaccttccatttctccatcttttggcttgaggagtctgaaatcaagctctttatttggagaatcgctaagagtggcctccaaatcaacaataaaggtttcaaagacaaagaatacttcactcgtgaccagatgtgaaattggtg

SEQ ID NO: 146054 - DNA, 252 bp, Glycine max
atgagatcctatgaagtagaaatcacttttattttactataaatattactataaatattgggttgaattgagcgggtcgtatttaaataagaatttcttttccttttttcttagtttctatcgaaaaaaaaaagattcgatagaaactaagaaaataaacaaattgattcgccgagaaagaggagagagagggattcgaaccctcgatagttctttgttccgaactataccggttttcaagaccggggctat

SEQ ID NO: 146055 - DNA, 248 bp, Glycine max
cttcaaaacactcataacacaaagcacaaagcaaagctcatccttgagttaaaaaatggcagcagcttcttccatggctctctcatccccatccttggctggcaaggccgtgaagctgggcccatcagccccagaagtgggaagggtgagcatgaggaagaccgtcaccaagcaggtctcctcaggaagcccatggtacggcccagaccgagtcaagtacttgggcccattctctggcgagcccccgt

SEQ ID NO: 146056 - DNA, 244 bp, Glycine max
gagagagaacttcaactgagggtgagagtgacacaaatctagggagcactactctaaaagttctattagattcttcaaaacatgaccatgcatcgcgagtcttgggcttttgtcttcggcgttatgggcaacatcatctcctttggagtgttccttgctccattgccaaccttttaccaaatctacaagaagaaatccactgaagggttccagtcacttccttatgttgttgcactgttcagtg

SEQ ID NO: 146057 - DNA, 242 bp, Glycine max
gtcttgcaattgaagttgaagtcttgcccttctctcttcaactccaaacacaagacatcatcatccatggctgcctccgtctccactgtcggagctgtcaacagagctcttttgaacctgaatgggtctggacctggggtttcagctcccagttcatccttctttgggagcagcttgaagaaggttattggctcaagggtccccaacacaaagatttcctctggaagcttcaagattgttgc

SEQ ID NO: 146058 - DNA, 245 bp, Glycine max
caaagattttgagcacaatggcctcgacacaatgctttttgcaccaccacgccctcaccactccagctagagcttcaacacagcgcctagttgtgagcaccaaaccaaaccacattgtttgcaaggcagcacagaagcaggttactgtccaagagggtgaggacactactactggccttgtctctcgcaggttggccctcactgtgctcattggtgctgctgctgttggctctaaggtggcacct

SEQ ID NO: 146059 - DNA, 249 bp, Glycine max
aggttgctgtaggagataagattgcagtagtgctaagtgctaatgcctgcagtgaacaatggcctctgcatcagcatctctgctcaagtcttcacttgttcttgacaagtctgagtgggtgaagggacaaacccttcgccaaccttctgcatcagttgtgagatgcaaccccaccaccccatcaggcctcaccatcagagctggttcctatgctgatgagctcgttaagaccgcgaaaacagtggcttc

SEQ ID NO: 146060 - DNA, 248 bp, Glycine max
cagtgtgtcaccaccatggccaccgtcacaacccaagcctccgccgcgattttccggccatgtgcctcgaaatcgaggtttctgacgcgctcttccggtaaactcaaccgggaagtgactatgaggccaatggggtgccctccttctgcctctttcaaggttgaagccaagaagggagagtggttacctggcttggcctccccaacttacctcaatggcactcttcctggtgacaatggatttgaccc

SEQ ID NO: 146061 - DNA, 244 bp, Glycine max
ggacaagaacattgatatatcttcagataagcgtgctttgcaaaagctacgccgtgaagcagagcgtgtcaagcgtgcattgtcgactcaggctcaggctcgtcttgaaattgagtcgctgctggacggcgaagacttcaccgagtctctgagtcgtgcacgttttgagaagcttaacgaggacctgttcaagaagacccttggcccagtggagaaggtgatgaaggatgctgacctcaagaag

SEQ ID NO: 146062 - DNA, 237 bp, Glycine max
gactccgtgccctagcttcttcttcctcctcctcctctgccattgcagcaaggcacacacctcaggctccaacccatttcacgagagatcggattcgctcgccatcatggggaagaagaagaagagagtttcctcgaaggtgtggtgttattactgcgatcgcgaattcgacgacgagaagatcttggtgcagcatcagaaagccaagcactttaagtgccatgtctgacacaagaa

SEQ ID NO: 146063 - DNA, 239 bp, Glycine max
ccctcctcttcacacattttctgtgctctctaacaaacattctcgttcacactttcagattgtccgaagatgggggcgggtggccgaactgatgttcctcctgccaacaggaagtcagaggttgaccctttgaagcgggtgccatttgaaaaacctccatttagtctcagccaaatcaagaaggtcattccacctcactgtttccagcgttctgttttccgctcattctcctatgttgt

SEQ ID NO: 146064 - DNA, 243 bp, Glycine max
cgccatattccacaagaactctccaatcgatcctccttcccacgagattctttggtgggaaaaatccaagaggtttgaaatttgaaggcagggaagatggattatttcaatgcaccaggaagaaaccatctctttgttccagggccggttaacattccggaccagatcatccgggccatgaacagaaacaatgaggactaccgttctccagcaattccagctatgacaaaaactttgcttgag

SEQ ID NO: 146065 - DNA, 269 bp, Glycine max
aattcggctcatgcgatacgattagatcctgaaccctttgaacatcgtattgcagtcatggatataagcctaatatgatacagatatctgcagtctcgatattttttgagacaatgccatatcgattgaatgaaagtacaggatacatcgactatgaccagatggagaaatctgctacactcttcaggccaaaattaattgttgctggagctagcgcttatgcacgtctctatgattatgaacgtgtacgcaaggtttgcgctaaacag

SEQ ID NO: 146066 - DNA, 240 bp, Glycine max
cttacaccggctgcttgcaccattgtttcatctctcagacatgaacatgtcgactcctatgtgctgtctgagtccagtctctatgtttatgcctacaagatcatcatcaaaacctgtggtactacaaagctactgcttgcaatcccatccatattgacatttgctgaaatgctttccctcaatgttagatctgtgaattacaccaggggaagtttcatctttcccggtgctcagccctat

SEQ ID NO: 146067 - DNA, 234 bp, Glycine max
aacatgctctgctttcattcacccttggtgtgaaacagatgatttgttgctgtaacaaggtaaattatgtgttgaattttaaggcccttatgtctcctttacatcacacaatatcttcattccttttgtgtgttcatatgagattaattagtgttctcttctcattttgaaacagatggatgctactacaccaaagtactccaaggccaggtatgatgaaattgtgaaggaagt

SEQ ID NO: 146068 - DNA, 235 bp, Glycine max
gtccctgcggatgttgacgcaatgtgatttctgcccagtgctctgaatgtcaaagcgaagaaattcaaccaagcgcgggtaaacggcgggagtaactatgactctcttaaggtagccaaatgcctcgtcatctaattagtgacgcgcatgaatggattaacgagattcccactgtccctgtctactatccagcgaaaccacagccaagggaacgggcttggcggaatcagcgggg

SEQ ID NO: 146069 - DNA, 242 bp, Glycine max
gttaaagataaaggcagctgcggatcatgctggaccttcagctccactagggctttcgacgcaggctatgcacacgtatttaggcgtagagtatctctcttaactgagtagcagctatctggactatgctggtcctttcaagaacttatggctgtcatggtgggttgccatcacaagtctttgaatacattaaatacactggtggactagagactgcggaagtatattcctagacaggagaa

SEQ ID NO: 146070 - DNA, 239 bp, Glycine max
acacgatgaggagccacacattccttaggataacttcacttttggtgtttattgggtggctcacggtttggatcttgttgcctacaaaggtttacaagaacacctggacccccaaactcaaaaccaagttaaactctacatactttagagagcaaggaacaaatctcttgcttttcacattccccgttatgctcataggggccctgagctgcatctatctccatcttcacgaaaaagga

SEQ ID NO: 146071 - DNA, 238 bp, Glycine max
cgcttattctctcgcattccgtggagatctagtgcttctgctgcaagacctcgctgaaaattagggtttcgattcggaggtagacgaagatgttcggaagggctccgaagaaaagcgacagcaccaggtactacgaaatcctcggcgtttccaagaacgcttcgccggatgacttaaagaaggcttacaagacagccgccattaagaaccatcctgacaaaggcggggatcccgagaa

SEQ ID NO: 146072 - DNA, 232 bp, Glycine max
tgtttgtgatttagctctattttttatggttctgtttgtgattgaacagatgcagatcttcgtgaaaactttgaccggtaagaccatcacccttgaggtggagtcctccgacaccatcgataacgtgaaagctaagattcaagacaaggaagggatcccacctgaccagcagagacttatctttgcgggtaaacagcttgaggatggtcgaacccttgccgactacaacatc

SEQ ID NO: 146073 - DNA, 232 bp, Glycine max
agagaagaagaaacttaatcgatcatcacttcacttcactaatacatcatggcagacgagacccagaacaagtatgagagctctgaggttgaggtccaggatcgtggtgtttttgactttctcggtaagaaaaaggatgaagaagacaagcctcatcctcaggaggaggtcatcgccaccgagtttcaaaaagtcactgtctcagaccaaggagagaacaagcacagcctct

SEQ ID NO: 146074 - DNA, 229 bp, Glycine max
agcctccaatgttgcctgatgactttgacataccggagtttgccacggtcaacattcagcgtgatctgttctatggttacgatactctcatggagaatgtctctgatccttctcacattgagtttgctcatcacaaggtcacaggaaggagagacagagccaagcctctgccattcaagatggattctcgtggttcatggggcttctctggagctaatgaagggaacca

SEQ ID NO: 146075 - DNA, 229 bp, Glycine max
gtactaactcccatttcttatttattattgaattaaccgatcaacttgctttgttatcgaacatttctttttgatttcaaaaattttccggaaaaaatttgaatctattttgatatgcgaatcaatcctactacttctggtcccgaggtttctgcgcttgaaaaaaaaaatctgggacgtatcgcccaaataattggtccggtactagatgtagcttttcccccaggta

SEQ ID NO: 146076 - DNA, 214 bp, Glycine max
ggctcgaggcatttttggaaatgtggccattggagcccgttattctccgcgtgttcatggattgaagcgtgtgtttataattgactttgatgttcatcatgggaatggaacaaatgatgctttctatgatgatccagatgtatttttcctttcatttcaccaagatggaagctatcccggtactggtaaatttgatgaagttggaagtggagat

SEQ ID NO: 146077 - DNA, 206 bp, Glycine max
acctactcgtctccttgcgcttactctactgctcgctcgagcgatcgtgcgcgtcatgctcttagctaccatggcgactgagaagcctttcaatagcattttgacgacgctcgacaagcccggtggtgctggcgagtttggtaagtactgtagcttgccttctctcaacgatcgtagaatcgatagacttccttactctatgagga

SEQ ID NO: 146078 - DNA, 256 bp, Glycine max
tcggctcgagtggcacttgatcttcctcatggtggccatctttctcacggatgtcagagtgctatggtaagataacttctattgtgattctatcttgcatggtggctgccactggaggcattatcttcggttatgatataggaatttcaggtggagtaacatctatggtgccatttttggacgaatttttcccagatgtgtacaccaagatgaagcaagacaccaaggttagcaactactgcaaatttgatagcca

SEQ ID NO: 146079 - DNA, 274 bp, Glycine max
gattagtctttctattataaaatagagtataggcattatttttttcttctaaaaaaataaaattaagaaattttcatggtaaccattcgtgcagatgaaattagtaaaattatccgtgaacgcattgagcaatataatacggaagtaaaaattgtaaatacgggtaccgtacttcaagtaggcgacggtattgctcgtatttatggtcttgatgaagtaatggcgggtgaattagtggaatttgaagagggtactataggcattgctttgaatt

SEQ ID NO: 146080 - DNA, 268 bp, Glycine max
gaagaaaccatctctttgttccagggccggttaacattccggaccagatcatccgggccatgaacagaaacaatgaggactaccgttctccagcaattccagctatgacaaaaactttgcttgaggatgtcaagaagattttcaagaccactactggaaccccatttctcatccctacaactggtactggtgcttgggagagtgctctcacaaacacactgtctcctggggatcgaattgtatcgttcctgattggccaattcagctt

SEQ ID NO: 146081 - DNA, 269 bp, Glycine max
gaggaaagggaaaaagaagaagagagaaaaactacagggctgctcatggtggctacactggcctccctcctccacctgatgcttctaaacatgacgctttgccctccaaacttcgtcaaatcatctctttcacacaaaacccaactggggcgattgggttttcaaatgacaagaaaaacgttggtgggcatgcccaaaataagactgccttaaaggacacaggtgatgttgaaactgtagatgtcaaacaggggatctctaatggacaa

SEQ ID NO: 146082 - DNA, 270 bp, Glycine max
cggctcgagggcccttgcaaagtgatggctccaaagtttcaagaattatctgaaaagtatctggatgttgtctttctaaagcttgattgcaaccaagagaacaggcccttggcaaaagagctgggaattaacgtggttcccacttttaaaattctgaaggacaacaaggttgtaaaagaagttactggagctaaatacgatgatttggttgatgccattgacaaagttcgatctagctaaaaatatatatgactattctctttctatgta

SEQ ID NO: 146083 - DNA, 271 bp, Glycine max
aaagaagggtgaccatgagagcgtttggagctgaattaatcctcactgatccagccaaaggaatgggaggaacagtaaagaaggcttatgaacttttggaaaacacaccaaatgctcacatgctgcaacaattttcaaaccctgccaatactcaggtgcattttgaaacaacaggtcctgagatatgggaggatacaaatggacaagttgacatatttgttatgggaataggtagtggaggcacagtctctggggttggacaatatcttaa

SEQ ID NO: 146084 - DNA, 272 bp, Glycine max
attttcccttctgctgatattcagctaaactaagtcaataagatgactcagggaaagatagtttaagctgcagaagctcataaaacacttgaggatttcgatcctccaaagaagcgcaaaaggaacaagtatgcttttgcttgtgctgtgctggcctccatgacttccatcttgcttggctacgatattggtgtgatgagtggagcagccttgtacataaaaagggacctgaaagtgtcggatgtgcaaatcgagatcctgctcggaatcat

SEQ ID NO: 146085 - DNA, 268 bp, Glycine max
cctttgttcactcttcttctcttgcggctagggttttagcgcacttcttctagatttaaggaagatgggtaaggaaaaggttcacatcagtattgtggtcattggccatgtcgactctgggaaatccactaccactggtcacctgatttacaagcttggaggcattgacaagcgtgttattgagaggtttgagaaggaagctgctgagatgaacaagaggtctttcaagtatgcctgggtgctggacaaacttaaggctgagcgtgaa

SEQ ID NO: 146086 - DNA, 268 bp, Glycine max
tcaagcctagcgtctctcaactcaacaatgggtcttcttgacatcgtgcagccaggcgtcctcaacggtggggacgtcatgaaggtgtacaaatatgctcaggagcacaagtttgccatcccggccgtgaacgtgacatcgtcgtcgacgacgaatgccgctctgcaggccgcccgcgacatcaagtcgcccatcatcatccagacatcaaatggcggcgccgccttctacgctggcaaaggtattgacaacaagaaccagaacgcct

SEQ ID NO: 146087 - DNA, 266 bp, Glycine max
gcaattgaagttgaagtcttgcccttctctcttcaactccaaacacaagacatcatcatccatggctgcctccgtctccactgtcggagctgtcaacagagctcttttgaacctgaatgggtctggacctggggtttcagctcccagttcatccttctttgggagcagcttgaagaaggttattggctcaagggtccccaacacaaagatttcctctggaagcttcaagattgttgctgtagaagagaagaaagagattgaagaga

SEQ ID NO: 146088 - DNA, 267 bp, Glycine max
cagcagtcaaaaggagtgattgggcctcattggtacaagtgtttttaacaaacagcaacagtacagagcatttcgatgcatgtaagtggacaaaatcggaaccacattcctgggaattgatcttcccaatagaggtatgtggtcctaataatggttttgaaatgtggagttctgagtgggcaaatcaaacttcatggcacttgagtttccttattgacaatcccaaacagtctacagtttttgatattctcttgggaatttctcaag

SEQ ID NO: 146089 - DNA, 269 bp, Glycine max
cgcttattctctcgcattccgtggagatctagtgctactgctgcaagacctcgctgaaaattagggtttcgattcggaggtagacgaagatgttcggaagggctccgaagaaaagcgacagcaccaggtactacgaaatcctcggcgtttccaagaacgcttcgccggatgacttaaagaaggcttacaagaaagccgccattaagaaccatcctgacaaaggcggggatcccgagaagtttaaagagcttgctcaagcctatgaggtt

SEQ ID NO: 146090 - DNA, 258 bp, Glycine max
cttcttccatggcctccaagcggattctgcaggagcttaaggaactccagtgagaccctccaacctcttgcagcgccggtcctgtagcggtaggtatgtttcattggcaagcgactatcatgggtccccctgatagccctcatgctgggggcgttttactagttactatccaatctcctccggatcatccattcaagccacccaaggctgcatttcagactagagttttccactcacatatgaacagcaatggtagta

SEQ ID NO: 146091 - DNA, 263 bp, Glycine max
tatacctgtcatgttccttggattattcacaagcggtattcaagctctcatttttgctactttagctgcggcttatataggtgaatccatggaaggccatcattgaccagttttctacaaaatagtccttttcgtttagcttgccgcacatatattgcggctcaatataatctacttagtaaacatctatatctatctacctatatctatatagatataggtagatagatatagatagatattcgattagcatatattagcat

SEQ ID NO: 146092 - DNA, 265 bp, Glycine max
aaaccattcaagcaatcacatcaccatggcacccaagatcgctatcgtctactactccacctacggccatgtgaagacactggcagaggccgaggccgagggcatcaaggctgctggcggccaggtcgacatctaccagattccggagactctctccgaggaggtcttgaccaagatgcatgcaccgcccaaggccgaccacccagtcctcaacgacccaaagaccctcgagcagtatgatgctttcctgtttggtatcccaacc

SEQ ID NO: 146093 - DNA, 266 bp, Glycine max
ctttgtttcccagagatcctgccaagaaagagttcggagagcaattgatatcccatgttgatacattcagcagagacctgttcgtttcattgaaaggggatgctgtacagcaagccagtcccgcttttgaatacttggagaatgctcttggtaaatttgatgatgggccattcttgcttggtcaattcagtttggtggatattgcctatattccatttgctgaaagattccaaattgtctttgctgaggtgttcaaacatgacatc

SEQ ID NO: 146094 - DNA, 263 bp, Glycine max
ggaattttagtggacaaaactggagattggatcacacttatacaaaattctccaattagtaacttgttgagagttgctgcttggaagaaaggctgtttaatggttaaaattgtgatgtctgggaatgcagcagtcaaaaggagtgattgggcctcattggtacaagtgtttttaacaaacagcaacagtacagagcatttcgatgcatgtaagtggacaaaatcggaaccacattcctgggaattgatcttcccaatagaggt

SEQ ID NO: 146095 - DNA, 265 bp, Glycine max
gattgcagtagtgctaagtgctaacacctgcagtgaacaatggcctctgcatcagcatctctgctcaagtcttcacttgttcttgacaagtctgagtgggtgaagggacaaacccttcgccaaccttctgcatcagttgtgagatgcaaccccaccaccccatcaggcctcaccatcagagctggttcctatgctgatgagctcgttaagaccgcgaaaacagtggcttcaccagggaggggtattttggccatggatgagtcca

SEQ ID NO: 146096 - DNA, 264 bp, Glycine max
ggacattgcaaaagtcttgctcctgtaagtatatctttgaggttccttgttatcaatttaaggttgggacctttaattttcataaaaccaatattgtggaacctgactatgctcttttttccctccagacttacgagaaagttgccacagcatttaaattggaggaagatgtagtaattgcaaatctggatgctgataaatatagggatctggctgaaaagtacgacgtgagtggatttcctaccttgaagttcttcccaaagg

SEQ ID NO: 146097 - DNA, 261 bp, Glycine max
atcagcctctaatatttttctcactgtctctccagagaacttgatagagagatggcagctgcaacatctggtgctgtgttaaatgggttgggatcttccttcttgagtggaggaaacaggagccaaacccttctggcctctgctattggaggcaaagttggtgctgctgttactgttaatcccagaagactcattgtggtagctgctgctgcaccaaagaagtcatggctccctggtgttagaggtggtggcaatctcgtc

SEQ ID NO: 146098 - DNA, 263 bp, Glycine max
cccgagtccgcctctaaaattggttattgctctcgcaagcacaaggtgcctttattatctgtggaagcacttcaccaccttcacatcttcatttttgtcctcgctgtcgtacacgtctccttttccgtgctcaccgttgtctttggaggcgccagaatacgtcagtggaaacactgggaagattctattgcaaaacagaactacgagactgaccgagttctcaaaccaaaggtcactcaggttcaccagcatgattttatcag

SEQ ID NO: 146099 - DNA, 260 bp, Glycine max
tgttgaaactgtgagtctatgttatttgtggcggagcatgaactcctccaccaacacctcgaattctcagtcaatggctgcagcagccagtgatgggtctgggaagaaggtaagaaaaccttacaccataaccaagtccagggagagttggactgaggaagagcacgacaagtttctcgaagctcttcaattatttgacagggactggaagaaaattgaagattttgtaggttcaaaaacagttattcagattcgaagcc

SEQ ID NO: 146100 - DNA, 260 bp, Glycine max
gaggaaagggactaagaagaagagagataaactacagggctgctcatggtggctacactggcctccctcctccacctgatgcttctaaacatgacgctttgccctccaaacttcgtcaaatcatctctttcacacaaaacccaactggggcgattaggttttcaaatgacaagaaaaacgttggtgggcatgctcaaaataagactgccttaaaggacacaggtgatgttgaaactgtagatgtcaaacaggggatctct

SEQ ID NO: 146101 - DNA, 257 bp, Glycine max
ggctgtagcaatattggatcaaatgaatgtggcaggtgttggaccaaatgagcatacatatacaactcttatgcaaggttatgcttcactgggtgacactgaaaaggcctttcagtacttttcagtgttgaggaatgagggcctggagattgatgtctatacttacgaagcgttattgaagtcatgttgcaagtcaggcagaatgcagagtgcccttgcagtcacaaaagaaatgagtgcaaaaaatattccaagaa

SEQ ID NO: 146102 - DNA, 260 bp, Glycine max
caagcagtgggaggaggctcgggactctgaccgcgtgcctgttgaagaatgagccggcgactcataggcagtggcttggttaagggaaaccaccggagccgtagcgaaagcgagtcttcacagggcaattgtcactgcttatggacccgaacctgggtgatctatccatgaccaggatgaagcttgggtgaaactaagtggaggtccgaaccgactgatgttgaagaatcagcggatgagttgtggttaggggtgaaatg

SEQ ID NO: 146103 - DNA, 261 bp, Glycine max
cttcttgctccgggaggagaatttgcatttgtggcttttggtgaagctgttaatcagggcataatgtcttcccagttgtcctctttactgtttcttgttgtgggaatttcaatggctctcactccatggctagctgaaggaggtcagctccttgcttcccgttttgagttacacgatgttcgaagtttattacctgtggaaagtgagacagatgatctgcaaaatcatatcattatttgtggatttgggcgagttgggcag

SEQ ID NO: 146104 - DNA, 260 bp, Glycine max
gtttctgtaaccatggcatccaccactctatcccctacaaccccttctcagctatgctcaggaaagagtgggattttcagtccctcacaggcacttcttgtgaagccagtgaagaggcagatcgatggggaagagcaagggaatgagaattgcatgccaagccaccagcattcctgctgatagagtccctgacatgggcaaaagacagctcatgaatctgcttcttcttggtgccatttcactcccctctgctggaatgc

SEQ ID NO: 146105 - DNA, 255 bp, Glycine max
gtggcgagggtaatgagaaagtgcaggatcttctgttgttggatgttactcctctctcccttgggttggagaccgcgggaggagtcatgactgtgttgattcccagaaacacaaccattcccaccaagaaggagcaggtattttcgacctattccgacaaccagcctggtgtgttgattcaggtctatgaaggtgaacgtacgaggactcgtgataacaatttgcttggcaaatttgagttatctggaattcctc

SEQ ID NO: 146106 - DNA, 255 bp, Glycine max
ggagggtgatttgaaggggaagagggtattcgtgagggtcgatctgaacgtgcctttggatgacaaccttaacatcaccgatgacactagagtccgtgctgctgttcccaccatcaagtacttgactggttatggtgctaaagtgatcctttctagccatttgggacgtccaaaaggtgtaacacctaaatacagtttgaagcctcttgtgccaaggctgtctcaacttcttggaattgaggttacgatggccaa

SEQ ID NO: 146107 - DNA, 257 bp, Glycine max
gggggaggagctggtgcaaagaatgctattctcatgaatatgccaaatgctgttctttcaatgtggagatattttgttggagatctcgtctttgtagtttctaagatgacttctccctacattaaatgtacagtctctttcttcatagcatttggaaatttggctgatgacaccatcaattttgaggcttttccccacaagctggtgcatattggagagattcaggaaaaagttgtattgaaattttcacaagagga

SEQ ID NO: 146108 - DNA, 256 bp, Glycine max
attgttgtaactttttgattcctaaattctctaaaattcgaaattctaatttcgttaggggaaagagattgtttgtgtgtgagtgagtatggctggaaaaggcgagggtcctgctatcggaatcgatttgggaacgacgtactcttgcgtcggcgtgtggcaacacgatcgtgttgaaatcatagccaacgatcagggtaacagaactaccccatcctacgtggctttcaccgacacagaacggttgatcggcgat

SEQ ID NO: 146109 - DNA, 258 bp, Glycine max
cctcaatcaccccccctcgcactcgctcttcccttcctctggtggcgacaatgtcgactcctgctaggaagaggctgatgagagagctcaagatgctgcaacaagacccgcctgcagggatcagtggtgccccccaggataacaacataatgctgtggaatgctgtcatatttggtcctgatgatactccatgggatggaggcacgttcaagttgacactccaatttactgaggactatccaaataaaccaccgactg

SEQ ID NO: 146110 - DNA, 258 bp, Glycine max
ctcttgtatctgagcttaaacagatgtcaaaagaggttgaagatagtgagttggcagatgtggcagcagtcagtgcagggaacaattatgaagtaggaaatatgattgctgaagcattgagcagagttggtagaaagggtgtcgtgacccttgaggagggaaagagtgctgataacagtctgtatgttgttgaggggatgcaattcgaccgtggttatatttctccatacttcgttactgacagtgagaaaatggctg

SEQ ID NO: 146111 - DNA, 255 bp, Glycine max
actaatccaagtgctagaagttgtgatggaacttgcgtgtaacattcttagcattctcaatgtcttaggtgcaaagagaagatgctaagtttgagatgatcttactatatttttcatattggaccgtcttcctctataattttgagttacagtgtccacttaaattgaatttggtgccttttccttttgtcctatattcgagatttatttttttaaaatttatttcttttgtttgacgtacaaatattagtacat

SEQ ID NO: 146112 - DNA, 255 bp, Glycine max
gcacaccacacaaaaaagcaaaacagagagaacaactgttactcacacacgccatgggtaaatgaatggtttttgagcaacagcagttaaaagagaaaagggattcagcgaagatgacatcggttggtgtggcaccaacttcgggtttgagagaagccagtgggcatggagcagcagctgcggatagattgccagaggagatgaacgatatgaaaattagggatgatagagaaatggaagccacagttgttgatg

SEQ ID NO: 146113 - DNA, 256 bp, Glycine max
caggaaagatggaggagccattcgccaagaactgtactacctcctcaaagatgagaatgatgttcatttcacatttgggagcataggtggaaatgggattaatcaggcaagccagggcatggccttgtcgaaattctgcctcaacattgcaggggataccccatcctcaaatcgcctttttgatgccatagtaagccactgtgttcctgtgatcatcagtgatgaaattgagctaccctttgaagatgacttggac

SEQ ID NO: 146114 - DNA, 264 bp, Glycine max
aaaagaaaggctcctcatgctcatactgtgtgtgaaattgtcaaggcccgttgggggacttctgcgcacattgttttcctcattttctgcttcttgacgaatataattgtgacggctatgttgctcctcggtggttctgcggttgtaaatgcattaactggagtgaacctttatgctgctagctttctaataccacttggagtaattgtctatacactagcgggtggactgaaggccacattcttagcaactatatccattctg

SEQ ID NO: 146115 - DNA, 261 bp, Glycine max
gtcactggctcctgttgttattggtgtgtccatggcatctttgactgagctctcgttcaactgggtcggcttcataagtgctatgatttcaaacatctccttcacataccgaagcatctattcaaagaaagccatgactgatatggacagtaccaatatctatgcctacatttccatcattgctctaattgtctgtataccacctgccgtaattttggaagggcctacactgttgaagcacggcttcaagatgccattgct

SEQ ID NO: 146116 - DNA, 262 bp, Glycine max
ggcaccaacaagggatgaccgcattggtgtctgcactggaatttttcgcaccgattcaattcctgaacaggacgttgtcaagattgttgacaccttccctggccaatccattgatttctttggtgcactgagggccagagtatatgatgacgaagtgaggaagtggatttctggtgttggtgttgacggcattgggaagaagcttgtgaactcaaaagatggacctccaacctttgagcagcccaagtgactctggagaagc

SEQ ID NO: 146117 - DNA, 260 bp, Glycine max
actcttgttgccttcatggccaagccagtgtccattgaggtatggaacccaagtggcaaatacagagttgtcagcaccaaaccaatgcctggaactcgttggatcaatcttctcattcaaaatgatgttcgccttgaaatatgtaccgagaagaaaacgattttgtcagttgaagacatcattgctttgattggtgataagtgcgatggagttattggacagttgactgaagactggggagaagagtgttctctgctttg

SEQ ID NO: 146118 - DNA, 260 bp, Glycine max
gttgtgtgggtgtgaagctgggaaaatggggagagcctttgtgtatgtgattcttggaggaggcgtggctgctggctatgctgctcttgaattcgtcaagaaaggagtctctcatggtgaactgtgtattatttccgatgaaccagtggctccttatgaaaggcccgcattgagcaaaggatttttgcttccagaagctgctgcccggcttccatcctttcatacctgtgttggtgcaaatgaggaaggctaacttcaaa

SEQ ID NO: 146119 - DNA, 261 bp, Glycine max
gcaaagcgtatatgctctcctgcggacaagagatatggccatttcacggtacaaggaatttggaatcccagtgaactggctaatggattcaggggttgtaggcaagatcaagctttcttctgtacaactggcaaagaagtatatgaaacgtgttgcatctgaacttgatgaactatctggtcctgataaagaaccagctagagagtttttggttctgcaaggtgtgcgtttcgctttccgtgtccacagtttgcaggaggc

SEQ ID NO: 146120 - DNA, 258 bp, Glycine max
cttatatcaggggttagctattgtcatgcaatgcaagtatgccatcgcgacttgaagttggaaaacacattgttggatggtagtcctgctcctcgtttgaagatttgtgattttggctattccaagtcctcagtgctacattcacaaccaaaatctacagttggtacccctgcatatattgctccagaagttttgcttaagaaggaatatgatggcaagattgcagatgtgtggtcttgcggggtaccttatatgtca

SEQ ID NO: 146121 - DNA, 256 bp, Glycine max
ctatatctggagattcatactatggctctcacgtgatgcagtatggtgatgtaggctttagcagagatgttctcttccattatttgggtacagatcctgctaatgataatttcacttttgtggatgaaaactccttatggtcaccttcaaaaccagtcaaccaacgtgatgctgatctcatccatttttgggataaggtatcctatttgtgcaatattttctattctttatgttatgaattaattcttgatcttgt

SEQ ID NO: 146122 - DNA, 261 bp, Glycine max
tggttgattcggatctagagtcttcagtttctcctcgttgttcttcgctttcctgttttcaatttcgattctttcgttaatttaataagatgtttgggagggcaccgaagaagagcgataatacgaggtactacgaaatcctcggcgtctccaagaacgcttcgcaggatgatctgaagaaggcttacaagaaagccgccattaagaatcaccccgacaagggcggtgatcccgagaagtttaaagactggcgcaacttat

SEQ ID NO: 146123 - DNA, 260 bp, Glycine max
catccgcagctgcttttattcgcaccgcaaacagtgagccatggccgtcggaaagaacaagcgcatctccaaggggaagaagggtggcaagaagaaggcagctgatccctttgccaagaaggattggtatgacattaaggctccttctgtttttcaagtgaaaaatgttggcaaaaccctcgtctctcgtactcagggtaccaagattgcttctgaaggactcaagcatagagtgtttgaggtctcttggctgatcttca

SEQ ID NO: 146124 - DNA, 256 bp, Glycine max
tcctcactaggagctcctctccactggttcttcatctgcatgcacacagttgcatagttttggaaaccaagaattcctgaagaagggtagcatcaacaagcagttctgaaaatggagatcaccaatgtcagtgagtatgaggctattgcaaagcagaagttgccaaagatggcgtttgactactacgcatctggtgcagaggaccagtggactctgcaagagaacagaaatgccttttccaaattttgtttcggcc

SEQ ID NO: 146125 - DNA, 253 bp, Glycine max
gtgatttcagtgagtgatcggtgttcacttgatctcatcataatcgtcagcgtcaattgaagaagatgccgatcagaaacatcgccgtcggaaggcctgaagaggcgactcaccccgacacgttgaaggcggctttggctgagttcatctcaaccttcatcttcgtgttcgccggctcaggctccggcatcgcctacaacaagctcaccgacaacggcgctgccacccctgccggcctcattccgcctccatc

SEQ ID NO: 146126 - DNA, 255 bp, Glycine max
gaagcatctaagtgagatacacagtagttacgtagcaagcataagtgtctaaccttagacacatttctgctacatatcgtgtgcattttggaattctgccactaaaattctattcatctatggctgcctcatcttatgctatgcaatcaatccttgcaaaccctatgatccgcatttccagcgggtctagggagaaccattttggtgttcctgcttatcacatgagaaggaatgttggcctgagagttaggtcca

SEQ ID NO: 146127 - DNA, 252 bp, Glycine max
ggaaaatacggggagaatcttgccggaagcaccggtaacctaagtggtacaaatgcagtgaaattgtgggttgatgagaaatccaagtatgactacaattccaacacgtgcgttggtggggagtgcaggcactacactcaggttgtttggaaaaactctgtgcgtcttggatgtggaaaagtaaggtgtgacaatggaggcactttcattacttgcaactatgctcctcctggcaactatgtggccaaagac

SEQ ID NO: 146128 - DNA, 253 bp, Glycine max
ctagaggccagggtctcggagtgtttgggtttgtttatcttaaacaccacaaacacagaacagaggtgtagagaagaaagctcaaaaatatggcggcagagtcatcactgagggtggcgactcccactctttgcaacctcaatgggtctcagagacgaccaaccaccaccactctctctccgcttcgcttcatgggttttcgtcctcgaccctcctctcactctctcacctcctcttccctttcacacttctt

SEQ ID NO: 146129 - DNA, 250 bp, Glycine max
ggaaaatacggggagaatcttgccggaagcaccggtaacctaagtggtacaaatgcagtgaaattgtgggttgatgagaaatccaagtatgactacaattccaacacgtgcgttggtggggagtgcaggcactacactcaggttgtttggaaaaactctgtgcgtcttggatgtggaaaagtaaggtgtgacaatggaggcactttcattacttgcaactatgctcctcctggcaactagttggccaaag

SEQ ID NO: 146130 - DNA, 253 bp, Glycine max
ctcatccatcatgaaaggaggaaagtccaagaccgaatctaagagagccgatgccaaacttgctgtgaataagaagggcgccgccaccaagactaggaaacccgccggaaaggggaaggcagcgaaagatcctaacaagccaaagaggcctccaagtgctttcttcgttttcatggaggaattcaggaaggtgttcaacaaggaacatcccgacaacaaagcagtgtctgctgtgggcaaactgctggagcaa

SEQ ID NO: 146131 - DNA, 248 bp, Glycine max
cccaaacgcatgagtggaggtgggaaagcgctgtgttgggttgttgctttattttcttcctcctcgtcacaagatacttcaacaaacgacagccaaagttcttctgggtgtcagcaatggcaccactgacgtccgttatattgggaagtctgctggtctatgtcacacacgctgagaaacatggagttcaagtgataggaaatttgaagaaggggctgaatccaccttcggcaaggatttggtgtttg

SEQ ID NO: 146132 - DNA, 256 bp, Glycine max
caattttgccagacatttgataagaaagcaagattggaaggctttgcaagagtttgaccagctccagaaagaactagaagaaggtggagtattcgagggttggaaagagggtgacatagaattcgctccaacatataaatactcatcctccactaccaatagatactgtggtagcctccctagtagatccggagaaaaacaaagaactccagcatggtgtgatagaattttatggtatggtaaagagtggagcaac

SEQ ID NO: 146133 - DNA, 257 bp, Glycine max
tatgagtccaaagaagaggacttgcagaacaagagccctttgctcctcaaaatgaacccggttcacaagaaaatctcggttctcatccacaatggcaaacccatttgtgaatctctcgttgctgttcagtacattgaggaggtctggaatgacagaaatcccttgttgccttctgacccttaccagagagctcaggctagattctgggctgactttgttgacaataagatatttgatcttggagaaagatttggaca

SEQ ID NO: 146134 - DNA, 253 bp, Glycine max
cttcttccatggcctccaagcggattctgaaggagcttaaggacctccagaaagaccctccaacctcttgcagcgccggtcctgtagcggaagatatgtttcattggcaagcgactataatgggtccccctgatagcccttatgctgggggtgtttttctagttactattcattttcctccggattatccattcaagccacccaaggttgcatttaggactaaagttttccacccaaatatcaacagcaatgg

SEQ ID NO: 146135 - DNA, 248 bp, Glycine max
gaagcatctaagtgagatacacagtagttaggtagcaagcataagtgtctaaccttagaaacatatctgctacatatcgtgtgcattttggaattgtgccactaaaattctattcatctatggctgcctcatcttatgctatgcaatcaatccttgcaaaccctatgatccgcatttccagcgggtctagggagaaccattttggtgttcctgcttatcacatgagaaggaatgttgcctgagagtta

SEQ ID NO: 146136 - DNA, 249 bp, Glycine max
gaagcatctaagtgagatacacagtagttaggtagcaagcataagtgtctaaccttagaaacatatctgctacatatcgtgtgcattttggaattgtgccactaaaattctattcatctatggctgcctcatcttatgctatgcaatcaatccttgcaaaccctatgatccgcatttccagcgggtctagggagaaccattttggtgttcctgcttatcacatgagaaggaatgttgcctgagagttag

SEQ ID NO: 146137 - DNA, 251 bp, Glycine max
ccgtggtggcatgcagatcttcgttaagaccctcaccggcaagactataaccctagaagtcgagagctccgacaccatcgacaacgtcaaggctaagatccaggacaaggagggtatccccccagaccagcagaggctgatcttcgccggcaagcagctcgaggacggacgtacccttgctgactacaacatccagaaggagtcaactctccacttggtgttgcgtcttcgtggtggatgcagatcttcgt

SEQ ID NO: 146138 - DNA, 251 bp, Glycine max
gagaataatcatattaaatattaaatagaaaaaatggcccgatcatttatcaaaggccaatcttcggtagaagagaaggttcctttggaacacttatttctatttcagtataccgggtctctttctttcatttcaaaaaatttatagaatttcgattttgaaatgaaagaaaagtgtggggataaatataaatgacaaaaagatattggaacataatcttggaagagatgatggaacaggagttcattttg

SEQ ID NO: 146139 - DNA, 252 bp, Glycine max
aagcagtctgctgaggaaagagaagaaagaagagttaaggctagaagacgcatgttgggaaacatcagattgattggagaactatacaagaagaaaatgttgacagagagaataatgcatgagtgtatcaagaagttactgggtcagtatcaggatccagatgaagaagacattgaagctttgtgcaagctgatgagtactattggggagatgattgaccatccaaaagccaaggtacaatggatgcatatt

SEQ ID NO: 146140 - DNA, 250 bp, Glycine max
ggaacatggagaagactttgtggacatgctggatggtatcttctcatttgttctactggacacccgtgacaacagttttatagtggctcgggatgctattggggtcacttccttgtacattggatgggggttagatggctctgtttggatttcatcagaaatgaaaggcctgaatgatgattgtgaacactttgagtgttttccacctggtcacttgtactctagcaaagaaagaggttccgcagatggt

SEQ ID NO: 146141 - DNA, 252 bp, Glycine max
ctttgtcttttgcttgcgaatctgaatcgaataataatcaatcaactctcatgtcgtcggcgaagaagatcacactgaagagttcggacggcgaggctttcgaggtggacgaggcggtggcgctggagtctcagacgataaagcacatgatcgaggacgactgcgccgacagcggcatccctctgccgaacgtgacgagcaagatcctggcgaaggtgatcgagtactgcaagaagcagtcgaggccgcgaa

SEQ ID NO: 146142 - DNA, 250 bp, Glycine max
aattgttgtaactttttgattcctaaattctctaaaattcgaaattctaatgtcgttaggggaaagagattgtttgtgtgtgagtgagtatggctggaaaaggcgagggtcctgctatcggaatcgatttgggaacgacgtactcttgcgtcggcgtgtggcaacacgatcgtgttgaaatcatagccaacgatcagggtaacagaactaccccatcctacgtggctttcaccgacaagaacggttgatc

SEQ ID NO: 146143 - DNA, 249 bp, Glycine max
actatcgtgacaccatgaacatcaatggactcgcaagacaatcactcatcaatgcaggtggcattattgagcaatcatttctgcctgggccatttgctgtggagatgtcttcggcagtttacaaggggtgggttttcactgatcaagcccttcctgcggatcttatcaagagaggaatggcagtggaggatccatcctctccctatggccttcgccttgtgatagatgactaccctatgctgttgatgg

SEQ ID NO: 146144 - DNA, 248 bp, Glycine max
gtggggccaatttggggtctccaggttaaaaggcaggtgcctgaagctccatattatcaaatcagccctgctggtcactgccctcatgatgaagttcctgagatcataaatttcttacttcgcgggtggatcagaaacctagagtctcagggttctgtgtcattaccattgcttgaagatctagacagtatgaagcactctattattgacagggaattagaatttcccagagaagttcaaaaaagtca

SEQ ID NO: 146145 - DNA, 247 bp, Glycine max
tcgcgcccaaggggaccgtcgatgttcatgagatgctcttcaagaccgctgactatttgaccagagggggtgactctggcactttctcgccgatgcacatgatcctctgcagaaagccccatgacaaggacgaccataactgagcgtttcattgggaaattccaaaactataacaaccaccaccttgtttctttccggtactctctttttttttttcataattatcattatcttggtttaacttatt

SEQ ID NO: 146146 - DNA, 247 bp, Glycine max
aaatgtacagtctctttcttcatagcatttggaaatttggctgatgacaccatcaattttgaggctttttcctgaatctctccaaactgcaccagcttgttgggaaaagcctcaaaattgatggtgtcatcagccaaatttgaggcttttccccacaagctggtgcagtttggagagattcaggaaaaagttgtattgaaattttcacaagaggaatttcttacagcttggtcacttccgtgcgtcc

SEQ ID NO: 146147 - DNA, 245 bp, Glycine max
aagatgctgacctctcttcatcttctggacatgattctcaaataccaaacccccatctagcaaacgggcaaccgatgtctggtgagtttccatgtgctacttctgatgctcaatctatgcaaactacatctataggtcaatccgaaaaggttcactcactttcatatgctgatccaaagcaaccaggtcctgagagtgatgaagagataagaagagtgccagagattggaggtaaagtgccggaa

SEQ ID NO: 146148 - DNA, 246 bp, Glycine max
atggccatgtcgaaaatgatgaatcttggcacccattgccagagaaaattttcaagagcttggataatgtaacacgcattttaagatttactctaccttttccattgcttgcatatcctatctacctgtggagcaggagtcccgggaagactggttctcactttaatccagacagtgacttgtttgttcccagtgagagaaaagatgttattacttcaacaatttgttggacgctatggctgcttt

SEQ ID NO: 146149 - DNA, 247 bp, Glycine max
caaaacactcataacacaaagcacaaagcaaagctcatccttgagttaaaaaatggcagcagcttcttccatggctctctcatccccatccttggctggcaaggccgtgaagctgggcccatcagccccagaagtgggaagggtgagcatgaggaagaccgtcaccaagcaggtctcctcaggaagcccatggtacggcccagaccgagtcaagtacttgggcccattctctggcgagcccccgtcc

SEQ ID NO: 146150 - DNA, 243 bp, Glycine max
ccaagctccacaggatgctggaactcactatgctgtcatgagctcctacgagtaccttagcactggacttcgccagtacttggacaacaacatggatggattttacattgctccagcttttatggacaaacttgttgttcacattaccaagaacttcatgaccctgcccaacatcaaggttcctctcattcttggtatctggggaggcaagggacaaggaaaatctttccatgtgagcttgtc

SEQ ID NO: 146151 - DNA, 243 bp, Glycine max
ggaacgagtatgaagaaattaacgatacttctttaccttttgagttgttctgccggatcggtcgctcaagacctttggtctctacccggacctgatgaaaaaaatgggatcacatcttatggactcgttgagaataattctgatctagttcatggcctattagaagtagaaggcgctctggtgggatcctcacgtacagaaaaagattgcagtcagtttgataaggatcagtgacattgcttc

SEQ ID NO: 146152 - DNA, 242 bp, Glycine max
tgaacttgttgcaccctttcttttctttggatgatttgttatacaacaagcttttgtttctgggttgattgctgctactttttctattttctctgttggtgattgtcccttcaaatgtcgcagacaagttgccttttacactggtcccacagttggaggacttctgaatgctacatgtgggaatgttactgagctcataatagcaatatttgcccttagcagtaacaaattgccgtggtcaa

SEQ ID NO: 146153 - DNA, 243 bp, Glycine max
gctgaatgttgccatgagggcccttggatttgagatgacagaagagcaaattaataaaatgatagaagatgtggacaaggatggaagtggagcaattgattatgatgaatttgagtacatgatgacagccaaaataggagaaagggacactaaagaggagctcatgaaagctttcaatattattgatcatgataaaaatggaaagatatctgcattagacatcaagcgcattgcaaaagagct

SEQ ID NO: 146154 - DNA, 239 bp, Glycine max
ccgctcgagctcgagcgctcgagccatcaccatcgcgcccaagagagagagagagagagaggagcgaaactgagcgaccgaaggggaagaagaagggagcgagctttgtgatcgattgcgcgaaccggtggaggataaaattatggacattgcttctctggagaagttccttcaggagaggattaaggttggcggcaaggccggtgcactcggcgattccattactgtcactagggaca

SEQ ID NO: 146155 - DNA, 243 bp, Glycine max
gaggtgcgaacagagagaggcagtgatgtcattattgttcttgttgggaacaaaactgatcttgtcgagaaaagacaagtctctatagaggaaggggaagcaaaagcacgtgagctcaatgtcatgttcattgaaactagtgctaaggctgggtttaatataaaggccctatttcgaaaaattgctgcagcactacctggaatggaaacactatcttctgcaaaacaagaagacatggttgat

SEQ ID NO: 146156 - DNA, 243 bp, Glycine max
tcgagacagaatcggggtcaacgtgggtggctgacctgaagcaagcgtcttcggcggcggtggtgatgttcgagaagccgttgatgaatctgagcttcaaggacctcattgttgcaacgtcacacttcgggaaggagtcgcttctagcggagggaaggtgtgggccagtgtatagggcagtgctacccggggacctccacgtggcaatcaaggtcctggaagaggccaggacgttgatcctga

SEQ ID NO: 146157 - DNA, 243 bp, Glycine max
cttcagcctctacagcagagtcccagatctctgcattccaattcccatggctggtcgctatgacagtaaccccttcgatgaggaagaagttaaccccttctataatcctggaagtgttcccgctgccactaattcaaggctttcacctctgaagccagaacctgttgattataattatggctttggtgcgacagttgatatacctcttgattcatcaacggatttgaaaagaaggagaaggaa

SEQ ID NO: 146158 - DNA, 239 bp, Glycine max
gttggtgaccagaaatgggtagtatggatatgttccttcaatgtccccatggcacctggtaagactcgctccattgtttgcagtgctcgaaacttcttccagttctcagtgccagggcctgcctggtggcaagtcgttcctagatggtatgagcattggacttcaaataaggtatatgatggagacatgattgtccttcaaggtcaagagaaaatcttcctttcaaaaccaaggaaggt

SEQ ID NO: 146159 - DNA, 236 bp, Glycine max
aattgttgtaactttttgattcctaaattctctaaaattcgaaattctaatttcgttaggggaaagagattgtttgtgtgtgagtgagtatggctggaaaaggcgagggtcctgctatcggaatcgatttgggaacgacgtactcttgcgtcggcgtgtggcaacacgatcgtgttgaaatcatagccaacgatcagggtaacagaactaccccatcctacgtggtttcaccgaca

SEQ ID NO: 146160 - DNA, 237 bp, Glycine max
ggaattgatgccggggtggagcccaaactgaatttcaagggttacatggttggaaatggtgtcacagatgaacaaattgatggcaatgctcttgttccatttgtacatgggatgggacttatcccagatgaactgtttgaggaggttaaccgtgagtgcaatgggaatttttatgatccaacaagtgctaattgttctagcaagctttcaaaagttgatgagtggttgatgagataa

SEQ ID NO: 146161 - DNA, 239 bp, Glycine max
gtgggggtctgtgaaaggtggtggaaatgatgatgatggactaagaactctgaacattagccaatgcacagcactcaccccttctgctgtgcaggctgtgtgtgactcatgcccttccctccacacctgttctggaagacactcactcatcatgagtggttgtctgaacctgacttctgtgcattgtgtttgtgctggccaagcacaccgtgctatcactctccccatgcagctcattg

SEQ ID NO: 146162 - DNA, 244 bp, Glycine max
atttgagtcttcatgtgtaattgacagtgaattctttcgagttcgtattcgatgtatgtattcttttttctagagtttacaaggcgatgactaactcccgaactgcaagtaaaaaaaatgatagaatagaatatagatgtatctataagctctatgacttgtaatagaacttatgcttgatagaaaggttattatcatatagagttgacgaatgagatgaagttgagtcattaaataaagacga

SEQ ID NO: 146163 - DNA, 270 bp, Glycine max
cgcctgcaacctactcgagatgccattcaagttttcctaacagaagctgcaaagttggatgcactggctttatctcacgcccttgagctgaagctccaatctccaatttggcaggttcgcatgaaagctgtttgtgtccttgaggccatccttagaaagaaggacgatgatcatttttcaccagtggattcttacttcaccgaaaataaagatgtggtgctgagatgttctgaatctccccaagcctctttaagggaaaggactgtgaag

SEQ ID NO: 146164 - DNA, 262 bp, Glycine max
ctctgatggttttgacctaggggggcctaaagaggctggagggtccaaggcatatttagatcgcttttggcaagttgggccagaaacatttgctgagcttcttgagaaacttggtaaatcaaatgaccatgttgattgtgttgtttatgatgcattcttaccttgggcactagatgtggctaagagatttgggatagttggtgctgcttatctcactcaaaatatgactgtgaatagtatatattatcatgtccaattggga

SEQ ID NO: 146165 - DNA, 261 bp, Glycine max
cacttaatctatacttcatgcaggtttgtcttaacatttgctctcggagctggcccagttccaggtctccttctaccagaaatctttcctagtcgaataagagccaaagccatggcagtctgtatgtcagtgcattgggtgataaatttctttgttggactactgttcttgcgtttgctggagaaacttggtccacagctgctttactctatgtttgctaccttttgcatcatggcagtaatttttgtaaaaagaaatgtg

SEQ ID NO: 146166 - DNA, 257 bp, Glycine max
cggctcgagtacaaactagtactacttgctttcaataaaaacaaaaacacactctttggtgaccacaacaacaataacaatggctgcctcactacaagctgcagctaccttcatgcaacccaccaaggttggcatagcctctcgcaacctcaaatctacacaatgcatttctaaggcttttggcttggaacctgctgcagctaaactcacttgctcccttcagcctgatctcaaagaatttgctcaaaaatgtgtcg

SEQ ID NO: 146167 - DNA, 264 bp, Glycine max
ccaaaagctccaaagtgaattacataggcttcagggacttcactctcatgctaatatcatttatgctgattattacaatgccatattgtcattatatcgtgatcccacaatgtttggttttactaatcttaaaacctgttgtggaatgggaggtccatataattacaacgcatcagcagattgtggggatccaggagtgaatgcttgtgatgatccttctaagcatattggatgggatggtgttcacctgactgaggctgcata

SEQ ID NO: 146168 - DNA, 261 bp, Glycine max
gatttatcaaaggccaatcttcggtagaagagaaggttcctttggaacacttatttctatttcagtataccgggtctctttctttcatttcaaaaaatttatagaatttcgattttgaaatgaaagaaaagtgtggggataaatataaatgacaaaaagatattggaacataatcttggaagagatgatggaagcaggagttcattttggccacggtactagaaaatggaatcctaaaatgtcaccttatatatctgcaaa

SEQ ID NO: 146169 - DNA, 261 bp, Glycine max
caaaagtcttccgtacattcaatgcatcgatcacattggatgttatgttgaataaggaaactaaagatggagatgttggggaaaagattgttgtttatcaacatgcaaataaacaggttgctatcatttgtaatcatcaacgcagtgtttcaaaatctcatactgcacaaatgtcaaagttaactgaaaaaattgatgaacttcaggctgttctgaaagagctgaaaacggatttagacagggcaaggaaaggaaagcccc

SEQ ID NO: 146170 - DNA, 261 bp, Glycine max
aggcgttatggcttactcggattaaatggttgtggaaaatctacactgcttacagccatcggtagtcgggaacttccaattcccgaccacatggacatatatcatctaaccagggagattgatgcctctgatatgtctgcattggaagctgtcataagctgtgacgaagaaagattgaaattggagaaagaagcagaagctttagctgcacaggatgatggaggtggtgaatcccttgaacgcatttatgaacgattggat

SEQ ID NO: 146171 - DNA, 258 bp, Glycine max
caagaacaaagaaaaaaaaaaacccttagccaacacaaccatcatggccacctctgctattcagcaatcagcattcactggtcaaactgctctgaagcagctcaatgagttcgtccgcaagaccggtggcgccggcaaaggtcgcactaacatgcgccgcaccgtcaagagtgctcctcagagcatttggtatggccctgaccgtcccaagtacttgggtccattctcggagcagattccatcatacctgaccggaga

SEQ ID NO: 146172 - DNA, 254 bp, Glycine max
gacgtatggtgatggaggtgccgaagctgggaaaacaagccgcaacgaaagcgattaaggagtggggtcaaccaaagtcaaagatcacacaccttgtgttctgcaccacttcaggcgtggacatgcccggagcagattaccagctcacgaagcttctcggcctgaggccctccgtgaagcgcctcatgatgtatcagcagggctgcttcgccggcggcaccgtactccgcctcgcgaaggacctcgccgagaac

SEQ ID NO: 146173 - DNA, 256 bp, Glycine max
cttcctttgcagtattcgtagttctctgcatcatggagatggaacgcgtcttcgagtttcctcacactcacatggaacggcgcccgagaaagagagcgagattgggctgggacatccctgaggtccccaagataagatacatagcaaaatgggtgaaggaacttttgggcaggtcttacaatgctgggatagagaaaggaaggaaatggttgccgtaaaaattgtccgtcgtattacgaagtatcgagaagcagcc

SEQ ID NO: 146174 - DNA, 263 bp, Glycine max
aaagattttatccaattgaaattttaaaaatgactgggataaacttaagaattcaattattgaaattgaataagtaaacaatttaattggattggtcgaatggtatcaaaaaaatggagtactaactcccatttcttatttattattgaattaaccgatcaacttgctttgttatcgaacatttctttttgatttcaaaaattttccggaaaaaatttgaatctatttttatatgcgaatcaatcctactacttctggtcctg

SEQ ID NO: 146175 - DNA, 263 bp, Glycine max
catttttcttcctccatctttatcttaaacataacttgaactctccattccttaaattttagctacgagctagtttcgacacagacaaagcaatggcaaagaccgagttagaggtgactgttgagagcaagaacaaagacctcaagcacctggggtttgtgaggattgctgctattcaaacatttgtgattgtgtcaaatctgtatgagtacgcaaagcagaattctgggcctttgagatccgtcgtaggaacggttgagaac

SEQ ID NO: 146176 - DNA, 263 bp, Glycine max
cccatgcttggttgtcgtggctgcaggctgggaatttcatacccagaactgactaagatgcaggcccgtgcaatctttcaggctgctgtttcagtgagtaaccatggtattacagttcttccggagataatggttccacttatcggtacacctcaggagttaaggcatcaagtgaatttaataaggaatgttgctgataaagtgttgtctgagatgggttcttctttaagctataaggttggaactatgattgaagttccaag

SEQ ID NO: 146177 - DNA, 255 bp, Glycine max
ctcttggggagttcattctaactcaccctgacatcaagatcccatagaaaggcaagatctattcagtgaatgaaggaaatgctaaaaactgggatggccctactaccatgtatgtataaatccaatagtgttaaaatgtttcaggcattataatgcagtttgtgacactatgatttcctttccttctttctgttcaggtatgtggaaaactgcaagtatccagaagatggttcatcaccaaagtccctaggatat

SEQ ID NO: 146178 - DNA, 242 bp, Glycine max
gcgggaacaacaacaactgcagaaagattcagagtgagagagagagaggtgtgaagctcgtgtacgtttatgagatggggtatataccgtagtgctggaatggtagctggttcgcatcacaggaccgcacttgttagagttacacacggctctgatagtaggtctagacccttgtagacttagaatggtcagacttgtcggatatgtggtaataccattggattaacggctactggtgatgt

SEQ ID NO: 146179 - DNA, 256 bp, Glycine max
aaaaaggatctaatgaaaaaaaagaacttttgttttctaacagtttgggggatggaagtcgacttgcccttttctggttctccccaaaaaaatagattttcatcattttttgaccccatttttaaagaactaaaaaaaaaaacgaaacaatttcaatttttcacttttcgagttctaaaagttttaagtgaaaaattgaaattgtttctaactatcttaatagaaaaagcaaaaaggattagcaaaagtattatcg

SEQ ID NO: 146180 - DNA, 254 bp, Glycine max
gagctgtgtctggggaaatttgcgttgtttttcgcggtacagctcacacacactgaacggtaagtatggcggacaaggctgttacaatccgaacccgaaagttcatgaccaacaggcttctttccaggaagcagtttgtcgttgatgttcttcatccagggagggcaaatgtttccaaggctgaacttaaggagaagctagctaggatgtatgatgtgaaagaccctaatactgtatttgtcttcaaattccga

SEQ ID NO: 146181 - DNA, 260 bp, Glycine max
tacacaacgagaaaatgggagaagagatgaccgcaagtatagtagattgaaatatttgataagctcttggggaattgaaaagtttagaagtgtagttgagcaatattatggcaagaaatttgaacctttccgtgcattgccagaatgggaatttaaaagttatcttgggtggcatgaacagtgcgatggcaaacttttttatggtcttcatgttgataatggtcgtattggtggaaacatgaaaaagacattgagggagg

SEQ ID NO: 146182 - DNA, 257 bp, Glycine max
aaactatactgcaaaagtttctgattttggtctctccaagtctatcttagatgatgaaaaagattacgtctccactcaagttaaaggaacaatgggctacttggatccagattattatactagtcagaagttgactgaaaagagtgatgtctatagttttggagtgctaatactggagctgattactgcaagaaagccaatagaacgagggaaatacattgtgacagtggtcaggagtacaatagataagacaaaag

SEQ ID NO: 146183 - DNA, 268 bp, Glycine max
ggctcgagtgcaattgaagttaaaagccttagccttccctacaactccaaacaaaaagacatcatcatccatggctgcctccgtctccactgtcggagctgtcaacagagctcttttgaacctgaatggttctggagctggagcttcagctcccagttcagccttctttgggaccagcttgaagaaggttattgcctcaagggtccccaacagcaaggtttccggtggaagcttcaagattgttgctgtagaagagaagaaagagatt

SEQ ID NO: 146184 - DNA, 255 bp, Glycine max
aagccattgaagttccttcgtccgcattatggcactcttaagacctattatgaaactatggtggagtctgatttgaagaagtacctggcggatatattgtcggttttggcactcacaatgtctgctgaaggagaacgagaaagcctcaagtacagattattgggttccgagggtgacattggttcctggggccacgagtatgttaggaatctagctggagaaattgctcaggaatacacaaaacgacagagtgaa

SEQ ID NO: 146185 - DNA, 256 bp, Glycine max
aaagacggggcctgaaatcgaccagacacatgtgagcacagctgtcaaaggtagttttgggtaccttgatccggagtatttcaggaggcaacaactaacagaaaagtcagatgtgtattcatttggggtagttctgtttgaagttctttgcgcaaggcccgtcatagatccaacacttcctagagaaatggtaaacttggcggaatgggcgttgaaatggcagaagaaaggacagttggagcaaatcatagatcaa

SEQ ID NO: 146186 - DNA, 256 bp, Glycine max
gtttctgtaaccatggcatccaccactctatcccctacaaccccttctcagctatgctcaggaaagagtgggattttcagtccctcacaggcacttcttgtgaagccagtgaagaggcagatgatggggaagagcaagggaatgagaattgcatgccaagccaccagcattcctgctgatagagtccctgacatgggcaaaagacagctcatgaatctgcttcttcttggtgccatttcactcccctctgctggaa

SEQ ID NO: 146187 - DNA, 254 bp, Glycine max
tcctcactaggagctcctctccactggttcttcatctgcatgcacacagttgcatagttttggaaaccaagaattcctgaagaagggtagcatcaacaagcagttctgaaaatggagatcaccaatgtcagtgagtatgaggctattgcaaagcagaagttgccaaagatggcgtttgactactacgcatctggtgcagaggaccagtggactctgcaagagaacagaaatgccttttccagaattttgtttcg

SEQ ID NO: 146188 - DNA, 251 bp, Glycine max
gattgatgaggcatggaaacacttcaattccatgcattataaccatagtatcagtccaaggatggaacattatgcatgtatggttgatttgcttggtcgatctggattgcttttagaagccattgaatttattaactcgatgccttttgatgctgatgcattggtgtggcgtacctttcttggttcttgtcgggttcatcgtaacaccaagcttggggagcatgctgcaaaaaagattcttgagagggaac

SEQ ID NO: 146189 - DNA, 252 bp, Glycine max
caagaacttcaggagtggtgccgtggtagcaaagtatggtgacaagagtgtgtactttgatttggaggatctgggcaacactacagggcagtgggacttgtatggctcagatgcaccttcaccctacaaccctcttcagagcaagttcttcgagacatttgctgctccattcacaaagaggggattgttactcaagtttctgatattgggaggtggttccacccttgcatacttcagtgcaactgcctcagg

SEQ ID NO: 146190 - DNA, 255 bp, Glycine max
gtgtttagctagattgcactgttttaacttttcttattgatttttatccatctatctacgtttttggtctaatttttgttcaagcaaaaaacgggccaaggcccctaaacgaacaataaattaaattaaagcaaagtgaaaaatggcagatcatttgctgttaaggatgagatattctgcttgtttgagggggctctagacaatttgggcagcctgagacaacagtatggactggccaagtcagccaatgaagtg

SEQ ID NO: 146191 - DNA, 252 bp, Glycine max
tcattctcatctttctctcttctctctccacccaaaccctaactaccgaccctgttcccctctcgtatccgtcatgaaaggaggaaagtccaagaccgaatctaagagagccgatcccaaacttgctgtgaataagaagggagccgccaccaaggctaggaaacccgccggcaaggggaaggcagcgaaagaccctaacaagccaaagaggcctccaagtgctttcttcgttttcatggaggagttcaggaa

SEQ ID NO: 146192 - DNA, 251 bp, Glycine max
gcggatgccgtcgggaagggcggagaaggaggaggaccacctgctgaacgcggacaccacttcgcgagcttcaaggcgaagttcgggaagaagtacgcgaccaaggaggagcacgaccgtcgcttcggcgtcttcaagtccaacctccgcagagcgaggctgcacgccaagctcgacccctccgccgtccacggcgtcaccaaattctccgatctcactccggccgagttccgccgccaattcctgggctt

SEQ ID NO: 146193 - DNA, 229 bp, Glycine max
ctcgccgactacaacatccagaaggaatcaagccttcacctcgtcctccgtctccgtggtggcatgcagatcttcgttaagaccctcaccggcaagactataaccctagaagtcgagagctccgacaccatcgacaacgtcaaggctaagatccatgacaaggagggtatccccccagaacagcagaggctgatcttcggcgggaaacaagcttcgaggacggacgtac

SEQ ID NO: 146194 - DNA, 252 bp, Glycine max
ggccagagtatatgatgatgaagtgaggaagtggatttctggtgttggtgttgacagtgttgggaagaagcttgtgaactcaaaagatggacctccaacctttgagcagcccaagatgactctggagaagctcttgctgtatggtaacatgcttgtccaagaacaagagaatgtcaagagagtccaattggctgacaagtacttgaacgaggctgctcttggaaatgctaacgaggatgctattcagagggg

SEQ ID NO: 146195 - DNA, 250 bp, Glycine max
tactgcttcaccttctgctctagaaaattcagtgctgaaacatggcttcggctactctctctgtagccaaaccagcccttcaggcaaatgggaaaggcttctctgaattctctggcctccgaagctcatcaggcttccttcccttttctagaaaatcttcagaggatttccattctgtcattgccttccagacctatgcagttggaagcagtggaggatacaagaagggtgtgacagaagcaaaactgaa

SEQ ID NO: 146196 - DNA, 248 bp, Glycine max
ctcgagccgtgcccttctctcttcaactccaaacacaagacatcaacatccatggctgcctccgtctccactgtcggagctgtcaacagagctcttttgaacctgaatgggtctggacctggggtttcagctcccagttcatccttctttgggagcagcttgaagaaggttattggctcaagggtccccaacacaaagatttcctctggaagcttcaagattgttgctgtagaagagaagaaagagat

SEQ ID NO: 146197 - DNA, 262 bp, Glycine max
ttgagactttggttgatacatttgtattcttagacaagaacaaggatggatatgtcagcaaaaatgagatggtccaagctataaacgaaactacatcaggggagcgttcttctggaagaatagccatgaaaagatttgaagaaatggattgggataaaaatggaatggttaacttcaaggagtttctatttgcttttacacgttgggttggaattgatgaagttgacgatgaggaaaatgacgaggcttaaatcatttcatc

SEQ ID NO: 146198 - DNA, 252 bp, Glycine max
ggcgaactcttcaacaaggtcgcaaagggaaggttaaaagaagaagtcgccagaaagtacttccaacagttggtttccgcggtggagttttgccacgcgcgcggcgtgttccacagggatttaaagctcgagaatttgttgctggacgaggatgggaaccttaaagtctccgactttggactcagtgccgtgtcggaccagataaggcatgacgggctgttccacacgttatgcggatccaccgcgtatgtt

SEQ ID NO: 146199 - DNA, 247 bp, Glycine max
tgaaatgttaaaaatgactgggataaacttaagaattcaattattgaaattgaataagtaaacaatttaattggattggtcgaatggtatcaaaaaaatggagtactaactcccatttcttatttattattgaattaaccgatcaacttgctttgttatcgaacatttctttttgatttcaaaaattttccggaaaaaatttgaatctatttttatatgcgaatcaatcctactacttctggtcctg

SEQ ID NO: 146200 - DNA, 247 bp, Glycine max
gccctttaaaaccattactagctgaaatacctgattaattaagtatagtccctcttgccgaggaaactctccaagcatggaacgggtgaggaaaggtgcgaagagactaatgaggatgtacaatgtgagggtgtgtggatattgccctgaaattcatgttggtgcccagggtctcaaagctaaaaactgtgaagcccataaacaccaacaacgcaatgggcagcatggttggcagtctgcagttctg

SEQ ID NO: 146201 - DNA, 246 bp, Glycine max
gtcctttcaaaccattactagctgagatacctgattacgcaagtatagtgcctcttgccgaggaaactctccaagcatcgaacgggcgacgaaaggtgcgaagagactaatgaggatgtacgatgtgacggtgtgtggcacattgccctgaaattcatgttggtgcccagggtctcaaagctaaagactgcggagcccataaacaccatcaacgcaatgggcatcatagttggcagtctgcagttc

SEQ ID NO: 146202 - DNA, 248 bp, Glycine max
gcttgagagaaaaaatattccatttccagaattagtagcactagtgctctcttttgtttcgaaaaaaatggttcaacaggaagtgcgtaaaggtccttggacagaacaggaagacttcaaattggtgtcctttgttggattgtttggagaccgtagatgggactttatagctaaggtatcaggtttgaaggtggcgggagaaagtaaaataggcattagacaaaaaaaatcaaatgcttatttgggca

SEQ ID NO: 146203 - DNA, 252 bp, Glycine max
ctctagctgtcccatataacatggcctcctcttctccctctctaatgttcacagtgcgaaggtgtcaacctgagctggtgtctcctgctacacccactcctcaccaacttaaaccactatccgacatagatgatcaagacggctttcggttccaggttccaattattcagattgttcataaccagccatcaatggcaggggaagaccctgttgaagtcattcggcaggcactggcaaaaacacttgttttct

SEQ ID NO: 146204 - DNA, 256 bp, Glycine max
cttccttggaaggacttggggatagacttggtgattgaaggaaccggggtgtttgtagacagagaaggtgcagggaaacacattcaagcaggagctaagaaggtgctcatcactgctcctggtaaaggagatatccccacctacgtggttggtgtcaatgagtatgactacagccctgatgaacccatcatcagcaatgcctcttgcaccactaactgccttgcaccctttgtcaaggtccttgatcagaaattcg

SEQ ID NO: 146205 - DNA, 248 bp, Glycine max
tgatttagcatggtgatgaagaggaaaagcttgctgaagggataaaactttatgctatatcagtcactgccacttcaaagcggacaattctttactgatcttgtaactgtttacgcaaagggtgggaagactatagttattacacagacaggaagagatgctgatgaagtatcattgtcattaacaaatagtataatgtctgaagcactgcatggtgatatatctcagcatcagagagagagaacact

SEQ ID NO: 146206 - DNA, 251 bp, Glycine max
ctcgcaagcaaaaagaaagaatcccaggcgaggagaaagatggaggggaaggagcaggatgtgtcgttgggagcgaacaagttccccgagagacagccgattgggacggcggcgcagagccaagacgacggcaaggactaccaggagccggcgccggcgccgctggttgacccgacggagtttacgtcatggtcgttttacagagcagggatagcagagtttgtggccacttttctgtttctctacatcac

SEQ ID NO: 146207 - DNA, 249 bp, Glycine max
gttcatgtggatggtgcaagcaagtcgtttgagcagacctgctttctggatgttaagggatactgtcgtgaagagaggagccacgaagggcttggaatgggtggttctgttgtctaccaaaaattcgggaagactagtgactgtggttcacctagatcaactctaaagtgctggaatgaggaagatgaggaagagtagtttccttaagtgtctttattattctgtccttgtgaaaataagtctggtttt

SEQ ID NO: 146208 - DNA, 249 bp, Glycine max
gccgtggtggttctggctctgtccttttttcctttctctcgttaccagaaccagaagaaccatttgtggccaacatggatttggaccagtggatctccaaggtcaaagagggccagcatcttcttgaagacgagcttcaacttctctgcgaatatgtaaaagagatccttatcgaggagtccaatgtgcagcctgtcaatagtccagtgactgtttgtggtgatattcatggtcaattccatgatctaa

SEQ ID NO: 146209 - DNA, 248 bp, Glycine max
ggaaaatctttccaatgtgagcttgtctttgccaagatgggaatcaaccccatcatgatgagtgctggagagttggaaagtggaaatgcaggagagccagcaaaactgatcaggcagagataccgtgaagctgcagacatgatcaagaagggaaagatgtgcgctctcttcatcaacgatcttgatgcaggagctggtcgtcttggtggaaccacacaatacactgtgaacaaccagatggtgaatgc

SEQ ID NO: 146210 - DNA, 249 bp, Glycine max
ggcctttgcactcgagggccaatctccgtctggcccgagatttccaaccaggagaggcctttgtggtcacgaaatgttgccaacattgtcccaccatatgaccagtcaaaatacgctggaactggggctgcagttgagtatgctgttttgcatcttaaggtgtcggagattgtggtcattggacacagtgcttgtggtggtattaaggggcttctgtctttcccatatgatggaacctactctactgat

SEQ ID NO: 146211 - DNA, 250 bp, Glycine max
cagaaagtgacactgagagaagaaggaaaaactaaccaacaccacagcccctaatttcctttttctcacaatggcggcttcagtcgacaaccgtcaatacggcacccacataaacgccgtcgttcgcgcttgcggcccagacttcaatacccctctcccgtcggatttcgatctggactcatccagcgacgacgaagaccaaaacgacgacgcttcgtatctcaaggagttgatacaaaaagcgaacgcg

SEQ ID NO: 146212 - DNA, 250 bp, Glycine max
cactgtttaggtataatttaccgtgacttaaagcctgaaaatatcttacttcagaaggatggtcatgttgtattagctgattttgatctatcatatatgacatcttgtaaaccacaggttgtgaagcaagcgatacctggtaaaagaagatcacgaagtgaaccaccaccaacatttgttgcagagccagttacacaatcaaactcattcgttggaactgaagaatacattgctccagaaattataactg

SEQ ID NO: 146213 - DNA, 247 bp, Glycine max
aacacattgaaactaaactccaagttcctaccatagtgctaggaaagtgagtgagagaaagagatcacatagcagaatggcttctactcaatgtttcttgcaccaccatgctcttaccacccctgccagatccccatcacaacgcatcatggttagcaccaagcctaaccagcttgtttgcaaggcacagaagcaagaggatattgatgtcagcccaatctctcgccggttagctctaaccgtgctc

SEQ ID NO: 146214 - DNA, 246 bp, Glycine max
agaagcaatacagtgaggaagctgcagagctgaaggctattattactggcgaattaccagctggttgggagaaagcacttccgacatacacaccagaaagccctgctgatgctacaagaaatctgtctcagcaaaatctaaatgcccttgttaaggttcttcctggtctacttggtggtagtgcagatcttgcctcttccaacatgaccttattgaaatcgtatggggatttccaaaagaatactc

SEQ ID NO: 146215 - DNA, 245 bp, Glycine max
gacccattgggccttgctgatgacccagaggcttttgctgagcttaaggtgaaggaactcaagaacggacgattggccatgttctctatgtttggcttctttgttcaggccattgtcaccggaaagggtccattggagaacctcgccgatcaccttgctgaccctgtcaacaacaacgcctgggcctatgccaccaacttcgtccccggaaagtgagcgtcaaagaacgaaatgacttttgagag

SEQ ID NO: 146216 - DNA, 248 bp, Glycine max
gaagaacaagtagttgagaactaagaaggagaagcaaatggcttcctcaatgatctcttccccagctgttaccactgtcaaccgtgccggtgccggcatggttgctccattcactggcctcaagtccatggctggcttccccaccagaaagaccaacaatgacattacctccattgctagcaacggtggaagagtgcaatgcatgcaggtgtggccaccagttggcaaactgaagtttgagactcttt

SEQ ID NO: 146217 - DNA, 249 bp, Glycine max
gaattgttgtaactttttgattcctaaattctctaaaattcgaaattctaatttcgttaggggaaagagattgtttgtgtgtgagtgagtatggctggaaaaggcgagggtcctgctatcggaatcgatttgggaacgacgtactcttgcgtcggcgtgtggcaacacgatcgtgttgaaatcatagccaacgatcagggtaacagaactaccccatcctacgtggctttcaccgacacagaacggttg

SEQ ID NO: 146218 - DNA, 247 bp, Glycine max
ggacccagagaagaagaaataccctggtggtgcttttgatcctttgggatactctaaggaccctaaaacattccatgaatacaaagtcaaagaacttaagaatggacgtcttgctttgttggcttttgtgggattctgtgttcaacaatcagcttatcccggcactggacctttggagaacttggctgctcacttggctgacccatggcacaacaacattggaaacatcattattccacaatcgatt

SEQ ID NO: 146219 - DNA, 249 bp, Glycine max
ctttgtcaaggtccttgatcagaaattcggtatcatcaagggcaccatgaccaccactcactcctacaccggcgaccaaaggcttctcgacgcgagccaccgtgacctgaggcgcgccagggcggcagctctcaacattgtccccacttcaacaggagcagcaaaggcagtggcccttgtcctcccaaccctcaagggcaaactcaatggcattgcactccgtgtgccaacaccaaacgtctcagtggt

SEQ ID NO: 146220 - DNA, 247 bp, Glycine max
ggaaatttatgttgatgatcaggccaagttgacccttcacgggcttgtgcagcactacatcaaattgaaagaggaagaaaaaaaccgcaagttgaatgatcttcttgatgcactggactttaatcaagttgtgatctttgtgaaacgtcttagcagagcagctgagctggacaaactacttgtggagtccaactttccatctatatgcattccctctggcatgtcccaggaagacaggtttgtttta

SEQ ID NO: 146221 - DNA, 248 bp, Glycine max
ctcttctgaagcatggccatggcggtttctgcaattggttttgaaggtttcgagaagaggctggaaatatcctttttccagccgggactttttgctgaccctgagggaatgggtttaagagctcttgcaaagtcccagttggatgagatacttacaccggctgcttgcaccattgtttcatctctcagaaatgatcatgtcgactcctatgttctgtctgagtccagtctctttgtttatgcctacaa

SEQ ID NO: 146222 - DNA, 248 bp, Glycine max
caatgaatggggctactcccaaagggttgtggatttggctgacattgttgccaacaaatggaagtgagagccaaacaaattctcattggtaattaaattattatgtatgtaccatgccattgtaattttgtatgcttactactactactaccactacaacacttgttgcttcatttttcttttaaacttgtactgagaaacagaaccatcaattttctctgccttctcattgtgcaataaaattctta

SEQ ID NO: 146223 - DNA, 247 bp, Glycine max
ccaaagaggtactgaaaaaccatgacctagagtttagtggacgacctaaattacttggccaacagaaattgtcctataatgggtcagagattgcattttccccatacaatgaatattggagacaaattagaaaaatttgtgttgtccatatctttagctccaagcgtgtctctagcttttcctctataagaaattgtgaggtgaagcaaatgataaaaaaaaatatctgggcatgcctcttcttcgg

SEQ ID NO: 146224 - DNA, 245 bp, Glycine max
gtttattctggacaaatttgatgggaactctgaactggttgcagagttggttaccgttaatgggtttaaagcagcttatgcgattaaggatggtgcagaaggaccgcgaggatggaagagtagtggtcttccttggatagaaccacggaaaacattgagttttgacaatctgacagatgctatatctgaagcaataggagataccactgatggcgtggcagttactcttggggttgctgcagctg

SEQ ID NO: 146225 - DNA, 246 bp, Glycine max
tctgaactctctctctcatctataagtcaacatggctcatcatgaagattcaagtgcatggaattcgagtaaacctcaccctaagctcaatgaaagaattctgtcttctctgtcacggagaactgttgctgctcacccctggcacgacttagagattgggccaggagctccagcagttttcaactgtgtggttgaaattggcaaaggaagtaaggttaagtatgagctggacaagacaagtggact

SEQ ID NO: 146226 - DNA, 243 bp, Glycine max
gttcactcttcttctcttgcggctagggttttagcgcactcttctagatttaaggaagatgggtaaggaaaaggttcacatcagtattgtggttattggccatgttgactctgggaagtccactaccactggccacctgatctacaagcttggaggcattgacaagcgtgttattgagagatttgagaaggaagctgctgagatgaacaagaggtctttcaagtatgcctgggtgcttgataa

SEQ ID NO: 146227 - DNA, 246 bp, Glycine max
ccaccatctaatttctgattcacagtcctatcctttgagataagagcacacgtttaacaaaatgctattctctatttctcatcactttaatcacgcactatcagtacaacaactcactcactaagctaaacaatttcatcaagcctgccatggcttcctcgtgtgcttcctctgccattgcagctgttgccatctccacaccaagttcccagaagaatggatcactcttgggaagcacaaaagctt

SEQ ID NO: 146228 - DNA, 247 bp, Glycine max
gcttcaagttgttatgtctttccatcagtgtgggggaaatgttggagacaattgcagcattcctctaccaccatgggtgttggaagaaatcagcaagaaccctgagctggtttacacagacagatcagggaggaggaatcctgagtacatctccttgggctgtgattcggttcctgttctaaatggaagaactcctctccaagtgtactctgactacatgagaagctttcgtgacaaattcagagat

SEQ ID NO: 146229 - DNA, 246 bp, Glycine max
gtgtatttccctacctctcccttcaagatgcagatcttcgtcaagaccctcaccggcaagaccatcacccttgaggtggaaagctctgacaccatcgacaacgtcaaggccaagatccaggacaaggaaggaatccccccggaccagcaacgtctcattttcgccggaaagcaacttgaggacggccgtacccttgctgactacaacattcagaaggagagtactcttcacctcgtcctccgtctc

SEQ ID NO: 146230 - DNA, 245 bp, Glycine max
gctgggcacgggggtcccagtcccgaacccgtcggctgtcggtggactgctcgagctgcttccgcggcgagagcgggtcgtcgcgtgccggtcgggggacggattgggaacgggcccttcgggtgctcttccccgggcgtcgaacagtcaactcagaactggtacggacaaggggaatccgactgtttaattaaaacaaagcattgcgatggtccctgcggatgttgacgcaatgtgatttctgc

SEQ ID NO: 146231 - DNA, 246 bp, Glycine max; identical to SEQ ID NO: 146225

SEQ ID NO: 146232 - DNA, 243 bp, Glycine max
agaaagaggaaaaaaccgaggatttcacatagtacttttggtcgaaaaatcgatctgatttttttcgtacttttcgctcaatgatgaaatgggtcagattctacaggaccaaaccttgtgggagttaaggaatgatggaagaaaagaaataaaaaaaagtaaataaaaatgcagtagaagagtcctgattccaaacgaaaaaattcaaacttgattgaaaaggatctttctgattattgaaga

SEQ ID NO: 146233 - DNA, 242 bp, Glycine max
taactcttctagaagcttccaaaaacgctaacccccagcccgccatcgtttgggcctcctcgagttccgtctatgggctcaatgacgaaagcccattctccgaactccaccgtacggaccagcctgcgagcctctacgcggcaactaaaaaagcaggcgaagcaatcgcgcacacctataatcatatctatggactctccctcaccggattgcgcttcttcactgtttatgggccctgggga

SEQ ID NO: 146234 - DNA, 241 bp, Glycine max
attggaatggacttgtggaatgcatcttctggtggcgctgaagctgcaaaaatgagacataatcaatctggtgccccgggagttgcccttggtgatcaatgggtacaagatgaacgtgagctgaaaagacagaagaggaaacagtcaaaccgagagtcagccaggaggtcaagattacgcaagcaggctgagtgtgaagagttacaaaagagggtggatcgctgggaggtgagaatcaaac

SEQ ID NO: 146235 - DNA, 243 bp, Glycine max
tgggaatcaaccccatcatgatgagtgctggagagttggaaagtggaaatgcaggagagccagcaaaactgatcaggcagagataccgtgaagccgcagacttgatcaagaagggaaagatgtgtgctctcttcatcaacgatcttgatgcaggagctggtcgtcttggtggaaccacccaatacactgtcaacaaccagatggtgaatgccaccctcatgaacattgctgataaccccacca

SEQ ID NO: 146236 - DNA, 231 bp, Glycine max
tgaattctccagagagaagatgaaacttaatcgatcatcacttcacttcactaatacatcatggcagacgagacccagaacaagtatgagagctctgaggttgaggtccatgatcgtggtgtttttgactttctcggtaagaaaaaggatgaagaagtcaagcctcatcctcaggaggaggtcatcgccaccgagtttcaaaaagtcactgtctcagaccaaggagggaac

SEQ ID NO: 146237 - DNA, 243 bp, Glycine max
caagcgggttgagctacaaaaggctcttggaaatcaccttgcatggaaagataggtatcccgtgttctttgacgatatagcggcacgattacttccagtcatccccttgattatttatagacttattgaaaatgatgcaatggatacagcagaaagactgttggccatgtattctccattgcttgcttattaccctctaagatttacatttgttcgtgatatacttgcatatttctatggtca

SEQ ID NO: 146238 - DNA, 240 bp, Glycine max
gaaagaaatgatggtatcacttggtttcatggctgctgcaagtgttcgagtggcaaacgagcttggaaaaggaagctccaaagctgcaaagttctctatagttgtgacagtgcttacatccttggccattggatttgttctcttcttatttttcttatttttaaggggaaaacttgcttacatatttacctcaaataaagacgtggccgatgccgttggggacttgtcacctttgttggc

SEQ ID NO: 146239 - DNA, 241 bp, Glycine max
taattgtttaaacctaattctcatttcttcatcgttcgattcttctcctcctaaagatgcagatcttcgtgaaaactttgaccggtaagaccatcacccttgaggtggagtcctccgacaccatcgataacgtgaaagctaagattcaagacaaggaagggatcccacctgaccagcagagacttatcttctacgggtaaacagcttgaggatggtcgaacccttgccgactacaacatcc

SEQ ID NO: 146240 - DNA, 241 bp, Glycine max
gtagtagtatgcatacagtgccaagatatgtgaacataggacttctctgtgttcaagaaagtccagcagatagaccaaccatgtctgatgttgtatcaatgattgggaacgatactgtggcccttccttctcctaaaccacctgcatttctaaatgtgagaggtaatcaaaattcaatattgcccgctagcatgccagaaagcttttctttgaatttgatcacagatacaatggtggaagc

SEQ ID NO: 146241 - DNA, 240 bp, Glycine max
ggaaagtggagtacgagaagaacatgagagcttataacaagaaacaggcggaaggtcctactggtggggatgaagaagaatctgagaagtctgtatctgaggtgaatgatgaggatgatgacgaggaaggcagtggcgaggaggaggatgacgattagagaatggactgatgataatagcatttatgtagtttctgatgattttgatcatccgtgtaggtggtctggtcatttccttata

SEQ ID NO: 146242 - DNA, 243 bp, Glycine max
ccattttatgcattcatctgaagcttcaatcagagattctaagcttgtaatatctgcagaaagcattaagtatggacataaaattctacagggcattcaaaatgagaacaagaacatgaaaaaatcacttaaggacgtggttactgagaatgaatttgagaaaaaactacttactgatgttattccaccgactgatattcgcgtcacatttgacgatattggagctttagaaaatgttaagga

SEQ ID NO: 146243 - DNA, 240 bp, Glycine max
ttgcaattgaagttgaagtcttgcccttctctcttcaactccaaacacaagacatcatcatccatggctgcctccgtctccactgtcggagctgtcaacagagctcttttgaacctgaatgggtctggacctggggtttcagctcccagttcatccttctttgggagcagcttgaagaaggttattggctcaagggtccccaacacaaagatttcctctggaagcttcaagattgttgct

SEQ ID NO: 146244 - DNA, 240 bp, Glycine max
gctgcagtgaagaaaattcctctgtacaagcacattgctaatctggctggaaacaagactttggtactacctgtgccttcattcaatgttatcaatggaggctcacatgcaggaaataagctagcaatgcaggaatttatgattctccctgttggggcatcttccttcaaagaagccatgaaaatgggcgtagaagtataccatcatctaaaggctgtgattaaaaagaaatacggacag

SEQ ID NO: 146245 - DNA, 240 bp, Glycine max
gacgagtgaggaagtggatttctggtgttggtgttgacggcattgggaagaagcttgtgaactcaaaagatggacctccaacctttgagcagcccaagatgactctggagaagctcttgacgtatggtaacatgcttgtccaagaacaagagaatgtcaagagagtccaattggctgacaagtacttgaacgaggctgcacttggaaatgctaacgaggatgctattaacaggggaactt

SEQ ID NO: 146246 - DNA, 240 bp, Glycine max
aatcaacacacacaaacacaacaacatatggaggtgctaagggtgcaaaccatagcttccaaatccaaagatgctgccatcccagccatgtttgttagggcagagacagagcaaccaggcatcacaaccgttcaaggggtgaaccttgaggtgccaattattgattttagtgacccagatgaagggaaagtggtgcatgagattttggaggcaagtagggactggggcatgttccaaatt

SEQ ID NO: 146247 - DNA, 240 bp, Glycine max
cccttgaggtggaaagctctgacaccatcgacaacgtcaaggccaagatccaggacaaggaaggaatccccccggaccagcaacgtctcattttcgccggaaagcaacttgaggacggccgtacccttgctgactacaacattcagaaggagagtactcttcacctcgtcctccgtctccgtggtggcatgcagatcttcgttaagacactcaccggcaagaccataaccctagaggttg

SEQ ID NO: 146248 - DNA, 238 bp, Glycine max
gttttccaaggcggcggcggcggcgaggccggtgcagtggttcataggagagcccgccgcaacaacaacgaggaagaaggcggcggcggcggcgaagatagtgagggaaggtgtggagttttacagcaatggtgatttctacgagggggagtttcacaaaggaagaagcaacgggagtggggtctaccattacttggtgaatgggaggtacgaaggggattgggttgatggaaggtac

SEQ ID NO: 146249 - DNA, 238 bp, Glycine max
caggtagttttctggaggaacagcaacaggggcaacagcagcagcagaagaagctatgtgataacatgtgcagcaggtgactcacagacagtggtgattggtcttgctgcagactcagggtgtgggaagagcaccttcatgaggaggctgacaagtgtgtttggaggagcagcagagccaccgaaggtggcaaccctgactcagacacactcatcagtgacaccaccactgtcatatg

SEQ ID NO: 146250 - DNA, 243 bp, Glycine max
aaacaatccaattaatcaaaacgcacaacgaagatcgtatgaatacgattttgcacttctcgacaaatataatttgtttctttattctaagcggttattctattcttggtaatcaagaacttgttcttattaactctttggttcgagaatttatatataatttaagtgacacaataaaagctttttctattcttctattaactgatttatgtataggattccattcaacccatggttgggaac

SEQ ID NO: 146251 - DNA, 264 bp, Glycine max
ggcttatggtggatacctaggcacccagagacgaggaagggcgtagtaagcgacgagatgcttcggggagttgaaaataagcgtagatccggggattcccgatataggtcaacctttcgaactgctgctgaatccacgggcaggcaagagacaacctggtgaactgaaacatcttagtagccagaggaaaagaaagcaaaagcgattcccgtagtagcggcgagcgaaatgggagcagcctaaaccgtgaaaacggggttgtgg

SEQ ID NO: 146252 - DNA, 260 bp, Glycine max
tatggcttcaactcatctgcttcccctagcaaccttcttcttacttctctccgcttcttatctccagattgctgtggcggaagcacaaccgttgactagtctcaagcttaactctcatattcttcaggagtctactgctaagagatcaatgaaaatcccgaggcaggatgggaggctgctataaatcctcgtttctccaattatacagttgaacaatttaagcgccttcttggagtcaaaccaatgcctaagaaggaact

SEQ ID NO: 146253 - DNA, 266 bp, Glycine max
cacaaagcagagctcatccttgagttaaaaaatggcagcagcttcttccatggctctctcatccccatccttggctggcaaggccgtgaagctgggcccatcagccccagaagtgggaagggtgagcatgaggaagaccgtcaccaagcaggtctcctcaggaagcccatggtacggcccagaccgagtcaagtacttgggcccattctctggcgagcccccgtcctacctaaccggtgagttcccaggcgactacggctgggaca

SEQ ID NO: 146254 - DNA, 266 bp, Glycine max
ggcttatggtggatacctaggcacccagagacgaggaagggcgtagtaagcgacgaaatgcttcggggagttgaaaataagcgtagatccggggattcccgatataggtcaacctttcgaactgctgctgaatccacgggcagcaagagacaacctggtgaactgaaacatcttagtagccagaggaaaagaaagcaaaagcgattcccgtagtagcggcgagcgaaatgggagcagcctaaaccgtgaaaacggggttgtgggag

SEQ ID NO: 146255 - DNA, 265 bp, Glycine max
ctcgagccgctcgagccgtgcaattgatatttggagcattgggtgcatatttgcagaaatgctcactacgaagccattgtttcctgggaaaaatgttgtgcaccaattggatctcatgactgatttgcttggagatcctcctcctgagtccattgcaaggattcgaaatcaaaagggtaaaaggtctcttaatagcatgaggaaaaaacaaccaattccattctcccaaaaatttccaaatgcagatccattggctcttcgtttg

SEQ ID NO: 146256 - DNA, 264 bp, Glycine max
tgctcagattcttgagaggggcggttatactttgttcactccacactacataacttggttttgtccaccacccttcattcttagcagtcagtgcaagtctcaatgtataaaccatgggagatattgtgctccagatccggagaaggattttggagagggatatgaagggaaggatgtggtgtatgaaaatttgaggcagctttgtgttcatagagttgccaatgagagcaaccgttcttgggtttggtgggattatgtgacaga

SEQ ID NO: 146257 - DNA, 261 bp, Glycine max
gattttgcaagtggccctaggtttcaagatctgtgccaggcaggagttaaggggcttataacagcaatcgatcgttttgagccaaacaggagattccggctatcaacttatagtttgttttggataagacatgctatcatcgttcaatgaccctctcaaacttcacacgtgttccctttggacttgaatcggttcgagcagaaattcaaaaagctaaaactgagttaacatttgagcttcagaggtcaccaacagaggaag

SEQ ID NO: 146258 - DNA, 265 bp, Glycine max
tgcagtcataggaaccaaatgagtaattatacctattttgtatattatctcttctacactttgtttctctggttgcatgctatgtaatagtgtaagtttcctcaaaactgtttaggaagttggggttggagtatgtagatcctatttgattcattggccactgaggatgaaacctgaagccaaagggtaccataatatattaaaggagaatgtgcttccctcctttgacatgaaaggaatatgggaagctatggaagagtgttac

SEQ ID NO: 146259 - DNA, 265 bp, Glycine max
gggtcttactgctgaagatgtgaatgcagcattcagaaaggcagctgagggtccactgaaaggtgtgttggacgtgtgtgatgttccacttgtgtctatcgacttccgctgctctgatgtttcctctactattgactcctcttgactatggtcatgggagatgacatggttaaggtggttgcttggtatgacaatgaatggggttacagccaaagggtggtggatttggcacacctagtagcaagcaagtggccaggggcagcta

SEQ ID NO: 146260 - DNA, 187 bp, Glycine max
catagatgaacttttcgatgaaggcctttacttgcctcctctaaaaggtatcaggagtatcttgccaggctcgttaggcatattaaggatattcaggaagacattctcctttttgatcctcccgcaacaatgaacaatgacagatttttctggttaagggacgaagaatttggaagacagactctcg

SEQ ID NO: 146261 - DNA, 260 bp, Glycine max
atattatatcaatggatgcagatagcatatcaagatctaatagcacttacattggaaaactgaggtcaaattttcttggcaccaagtttataatttatgatacacagcctccctataacaatgctcagctgtctcctcaggctgaagccgtaggttttattcaaaaaaagtttctccaaaggtccctagtggcagctactatattgcccagatcacctatgagttgaatgtccttggtactaggggcccgcgcagaatga

SEQ ID NO: 146262 - DNA, 259 bp, Glycine max
ctagctctcgttttttctcagaaccttctgaggttaaagcaaagaacaaagagagagagagagagaaaatgatgaagccatcgatgctcagatctctccactccgccgccacacgcggcgcctctcatctcttccgccggggtacgcctccgagccggtgccggagcgcaaggtagccgttctcggcgccgcggcgggatcgggcagcctctctcccttctcatgaagctcaatcccctcgtttcgagcctcgcgcttt

SEQ ID NO: 146263 - DNA, 274 bp, Glycine max
tcggagtgcggctcaagtgccaccagagcaacagaggctcatttttgctggaaaacagcttgaagatggccgaaccttggcagattacaacatccagaaagaatctaccctccacttggtgctgccgtcttcgcggtggtatgcaaatctttgtgagactcttactgcggaggaccactactttggagctagagagctctgacacaattgacaatgtgaaggccaagatccaacacaaggagggtattcctccagacgagcaaaggttgatttt

SEQ ID NO: 146264 - DNA, 263 bp, Glycine max
tctcgagccgaatcggctcgagggatgatagagttagcttatatacgtcaaggagttaagacatcctttgagtggcatacactttacaaactctcttttggaggctacatgcttgtccaatgagcaaaaacagtttcttgagactagtgctgcttgtgagaagcagatgttaaagataatacacgatgttgatattgaaagcattgaggatgggtccctggagcttgaaaagggggattcttgcttggaaatgtcataaatgc

SEQ ID NO: 146265 - DNA, 266 bp, Glycine max
gcaacgagaacgagaggaggggttcgggtgtgagagcgagaatcagaagatgaagaaggaagacacagtgaagctgatcagtgccgaaggttttgaattggtggtcgacaaagaagctgcaatggtttcacagaccatactaacatgcttacttctccagggagtttcgctgagaggcagcacggcgaagttacctttcctgagatcagcaccaccattctcgagaagatttgccagtacttttattgggcatctccaattcgcca

SEQ ID NO: 146266 - DNA, 265 bp, Glycine max
aaaccctaagaagctacctctcatcgttttcttccacggcagcggcttcatcgtaaccagcgccgcctccactatgttccacgacttctgcgccgccatgtccgccgccgtccccgccgtggtggcctctgtcgaataccgctcgcgccggagcaccgtctcccggcggcgtatgacgacgcggcggaagccttggagtttatccgagacagcagcgaggaagaagaatggttgaccaaacacgccgacatgtctaattgctatc

SEQ ID NO: 146267 - DNA, 265 bp, Glycine max
ctttgtcaaggtccttgatcagaaattcggtatcatcaagggcaccatgaccaccactcactcctacaccggcgaccaaaggcttctcgacgcgagccaccgtgacctgaggcgcgccagggcggcagctctcaacattgtccccacttcaacaggagcagcaaaggcagtggcccttgtcctcccaaccctcaagggcaaactcaatggcattgcactccgtgtgccaacaccaaacgtctcagtggtggacctcgttgttcag

SEQ ID NO: 146268 - DNA, 259 bp, Glycine max
aaacgatctaaacatgcaaatttttgttaagactttaaccggtaagaccattaccctcgatgtcgagccttctgactccatcgagaatgtcaaggccaagatccaagacaaggaaggtatccctcccgatcaacaaagattatcttcgctggtaagcaactcgaggatggcagaactctttctgactacaacattcagaaggaatctaccctccacttggtcctcagactgagaggtggtatgcaaatcttcgtcaaga

SEQ ID NO: 146269 - DNA, 265 bp, Glycine max
ccaacaacttcatgaccctgcccaacatcaaggttcctctcattcttggtatctggggaggcaagggacaaggaaaatgctttccaatgtgagcttgtctttgccaagatgggaatcaaccccatcatgatgagtgctgggagttggaaagtggaaatggcaggagagccagcaaaactgatcaggcagagataccgtgaagctgcagacatgatcaagaagggaaagatgtgcgctctcttcatcaacgatcttgatgcaggag

SEQ ID NO: 146270 - DNA, 264 bp, Glycine max
ctcaatatccgccattgaattcttcttccatttctcttttttctgcatacccatttcgtttttcttcccaaatggccctttcttgctccaaagttttaagcttttatctctcgcccgttgtgggtggtggtgatgttccgaaaagctcactttttcttcttttttgggtctttctaagggtgttggtggaagcaggagctcgagggtgtgtgctgcttcaaatgcacccgcaccactcgctggggtcatatttgaaccatttca

SEQ ID NO: 146271 - DNA, 264 bp, Glycine max
gttccttggtattgagattggggtccttgttggggtttgggtttcacttgcgtttgtgcttcatgagtcagcaaatccacatattgctgttttaggtcgtttgccagggacaactgtttataggaatgttaaacagtatcctgaagcatatacatacaatggaattgtaatcgttcgtgttgatgctccaatttattttgcaaacacaagttacatcaaggacaggttgcgtgaatatgaagttgatgttgatcggtctaaaag

SEQ ID NO: 146272 - DNA, 260 bp, Glycine max
caggtatgtggttggttgccgcagtaaagtggataaggaaaaattgacttccgggacaagggtggttctcgatatgacaacactcaccataatgcgagctcttcctcgagaagttgatccagtggtttacaatatgttgcatgaagatcctggtaatatcagctattcagctgttggtggcttatctgatcagatcagggaattgagggagtcaattgaactacctctgatgaatcctgagctctttcttcgagttggaa

SEQ ID NO: 146273 - DNA, 263 bp, Glycine max
attcattccccttatctttctctcttctctctccccgcccaaaccctaactccctaccctattccgctttctctcatccatcatgaaaggaggaaagtccaagaccgaatctaagagagccgatgccaaacttgctgtgaataagaagggcgccgccaccaagactaggaaacccgccggaaaggggaaggcagcgaaagatcctaacaagccaaagaggcctccaagtgctttcttcgttttcatggaggaattcaggaagg

SEQ ID NO: 146274 - DNA, 259 bp, Glycine max
ctggactaccacgatttgttgttgccattagtaaaggatgtgagagaacttgaaggcacaacgctatatggatcaagggcattgttcttgctaacccgcgaaggcacattgagacctctggctattgagctgactcggccaccaatggacggaaaaccgcaatggaaggaagtcttcacgccttgctggcactcaactggtgtctggctttggaggctagccaaacttcatatcctcgcccatgactctggttaccatc

SEQ ID NO: 146275 - DNA, 262 bp, Glycine max
aagaactaaaagctattattaaagttattcccctgtggtctagagggatcatgatgtatcttaacattggaggctcgtttggattgctgcaagcgaaatcccttaaccgacatatcagtccaaatttcgaagttccactgggtctatgagtgtaatcatgatatttacaatatttgatttggatagctctttatgatcgtgtcattattcctcttgcatcaaagcttagaggcaaaccggttaggatcagtgccaagagaag

SEQ ID NO: 146276 - DNA, 251 bp, Glycine max
gacctgctcggagctagggagattgcggtgcgtgcttgggacgaggccctcaacagccaacctgaactgctcatttggaatgttatgggcatgatgaacaactgctggttcagagtgataaccaatggctgcaggcgccacaagggtgagataggtatagtgtttgaacaccccacccaaccaggcacctgatccggcggatggatggcaaaagaaaaacacctgagagaaatcatctgagtccaacccaa

SEQ ID NO: 146277 - DNA, 263 bp, Glycine max
atgtgaatcaaccccatcatgatgagtgctggagagttggaaagtggaaatgcaggagagccagcaaaactgatcaggcagagataccgtgaagctgcagacatgatcaagaagggaaagatgtgcgctctcttcatcaacgatcttgatgcaggagctggtcgtcttggtggaaccacacaatacactgtgaacaaccagatggtgaatgccactctcatgaacattgctgataaccccaccaatgtgcagcttccaggtat

SEQ ID NO: 146278 - DNA, 259 bp, Glycine max
gcgggaaatggaactggtcataagcatgtatcaggagcttctatcagtggcagtgcaccggctgctaaggcacaggttgttggttggcctcctataagatcatttaggaaaaactcattggccaccacttcaaagataatgatgaagtagatggaaaaccgggtgcagcagcactctttgtgaaggtcagcatggatggtgctcccgatctgaggaaggtagatcgaagaaattatacaatgtaccaggaactgtcttc

SEQ ID NO: 146279 - DNA, 259 bp, Glycine max
cgttgccattctcatcctcttctttctctctctacgattgccatggatccctacaagcaccggccatccagcgccttcaattctcccttctggactacaaattctggtgctcctatttggaacaacaactcctctggaaccgttggagctagaggtccaattctgctggaggattatcatcttgtggagaagcttgcaaattttgatagggaacgtatcccagaacgtgttgtccatgccaggggcgctagtgcaaagg

SEQ ID NO: 146280 - DNA, 259 bp, Glycine max
cgaaacatggcaagagtggtggcactccaacagaaccaactatctttctctaccttagcttcctctctttctgacttcagtggaaccagacttcaaactcaacttcagttcaagagaaagcaatgccatccaaaaggtctttctacgtctccgcatcgagcaccaagaaaatcctaataatgggaggcaccaggtttattggtgtgtttttgtctaggctccttgtcaaagagggtcaccaggtgactttattcacaag

SEQ ID NO: 146281 - DNA, 259 bp, Glycine max
agagaccctaaggcttggaaagaccctgaagagttttcacctgagaggttcttggacatcactatagatttacgagggaaagattttgagttaattccatttggtgctggtcgtagaatttgccctggcatgcatatggcaattgcctcattggatcttattcttgctaatcttcttaattcgtttgattgggaattgcctgaaagaatgagagaagaagacattgacactgagatgttaccaggaatcactcagcata

SEQ ID NO: 146282 - DNA, 258 bp, Glycine max
ttctaaagattttatccaattgaaattttaaaaatgactgggataaacttaagaattcaattattgaaattgaataagtaaacaatttaattggattggtcgaatggtatcaaaaaaatggagtactaactccctttcttatttattattgaattaaccgatcaacttgctttgttatcgaacatttctttttgatgtcaaaaatcttccggaaaaaatttgaatctattttgatatgcgaatcaatcctactacttc

SEQ ID NO: 146283 - DNA, 256 bp, Glycine max
cttatctttctctcttctctctccccgcccaaaccctaactccctaccctagtccgctttctctcatccatcatgaaaggaggaaagtccaagaccgaatctaagagagccgatgccaaacttgctgtgaatagaagggcgccgccaccaagactaggaaacccgccggaaaggggaaggcagcgaaagatcctaacaagccaaagaggcctccaagtgctttcttcgttttcatggaggaattcaggaaggtgtt

SEQ ID NO: 146284 - DNA, 254 bp, Glycine max
tgagagttatctgacaaatgggtatttggactccaaagtggactggattcctggaatgaagaacttccggctgaaggacatacctgacttcataaggacaacggatctaaatgatgtgatgttgcaatttttcattgaagttgcaaatagaattcaaagaaacactactattcttttcaacacttttgatggacttgagagtgatgtaatgaatgctctatcctctatgttcccttctctttatcccattggtc

SEQ ID NO: 146285 - DNA, 256 bp, Glycine max
caaacttgttgttcacattaccaagaacttcatgaccctgcccaacatcaaggttcctctcattcttggtatctggggaggcaagggacaaggaaaatcttgtccaatgtgagcttgtctttgccaagatgggatgaaccccatcatgatgagtgctggagagttggaaagtggaaatgcaggagagccagcaaaactgatcaggcagagataccgtgaagccgcagacttgatcaagaagggaaagatgtgtgct

SEQ ID NO: 146286 - DNA, 256 bp, Glycine max
caaggacttccacacatactccgtccaatggaatcctgcaagcatcatattctctgtggacgggaccccaataagggagttcaagaatttggagacaaaaggggttccattcccaaagagccaacccatgagatatactctagtctttggaacgctgaggattgggccacaaggggtgggcttgtgaaaacggattggagcaaggccccattcacagcctcatacagatacttcaattcccaaacttcttcctcca

SEQ ID NO: 146287 - DNA, 259 bp, Glycine max
tgatctcgagccgaatcggctcgagatcgtgaatgcgtataaaaggacactaaagaaattagcgacaaaatgttgggtgtgttcagcagctccatagtgtcgccgccggacgagctcgtagccgccggcagccgtactcgtcgccgaagatgacggcggcggcgctgcggaacggttcgaggagaagaaccccaccgccgtttcggtggaggtcggagagcatgtccagctcgcttatacccaccacaacgagtcgccg

SEQ ID NO: 146288 - DNA, 258 bp, Glycine max
aaaattgctctgccactcttaacggcaaccacaagctcaccgatgctgttcttcctccaacgaaagactggagaaaagaaggtatagtgagttcagttaaagatcaaggcagctgcggatcatgctggacattcagcacaactggggctttagaagcagcctatgcacaagcatttgggaagagtatctctctttctgagcagcagctagtggactgtgctggccctttcaacaactttggctgccatggtgggttgc

SEQ ID NO: 146289 - DNA, 257 bp, Glycine max
ggctatgacccttgtgattccaattatgtagaagaatacttcaatagaaaagatgttcagtcatcttttcatgcagatactaaaagagacactaacgtagcatggaaggtttgcaataattccatattgaggacttacaacttctctgttttctcggtcctacctgtctacactaaactcatcaaaggtggccttaagatatggatttatagtggagacgcagatggaagagtgccggtgataggaacacgatattg

SEQ ID NO: 146290 - DNA, 258 bp, Glycine max
gcagcttttcagataataaacgatgagttgatgttggatggtgcaccaaggctcatcttggcttcgtttgtgaccacttggatggagcctgagtgtgacaagctcataatggcttcacttaacaaaaactatgttgatatggatgagtatcctgtcaccactgagctccagaaccgttgtgttaatataatagcaaatctattccatgctcctataagtgaagaggagactgcagtaggtgtgggaactgtggggtca

SEQ ID NO: 146291 - DNA, 249 bp, Glycine max
gacgtatggtaacatgcttgtccaagaacaagagaatgtcaagagagtccaattggctgacaagtacttgaacgaggctgcacttggaaatgctaacgaggatgctattaacaggggaactttcttccatcttgaattggaggcaaagcaaacttggcaagtaaatatttctgttcctgaaggttgtgctgatccaagtgctagaagttgtgatgggacttgcgtgtaacattcttagaattctcaatg

SEQ ID NO: 146292 - DNA, 255 bp, Glycine max
ctttcactttaccaactcctaacaatttctctctgtttccttcttcaccgcatcaatggagttggacggcgttctcctcggcatgtgcaaccctctcctcgacatctctgccgtcgtcgacgacgctttctcgcaaaaatacggtatcaagttgaacgatgcgattctcgctgaggataagcacaaacctatgtatgaagaattggctaacaatcctaatgtggagtacattgctggaggtgctactcagaattc

SEQ ID NO: 146293 - DNA, 254 bp, Glycine max
tgatcatggtagtgtaacacatataccttcatggggaaaattttggctttcggtacttggtgtagttgatcggtgtggtattaaccctttgcccccagagttctggatccttcctactttttccccaatgatccagctaaaatgtggtgctattgtcgattgatatatatgcccatgtcttactgatatggaaaaaaatttgtgggttcaataacgccattagtcttaaacttgagagaagaactctttactca

SEQ ID NO: 146294 - DNA, 253 bp, Glycine max
atcttgttgaaggcaatatatctgtttgcatttgggattccaattttcatcaacagtgattaccctactcctcacgtgaagtggaacttgtgggttgcccacggagctgttgcttacccttgtttatggtttcatattgttcatgtatcatgctaggtggagagaaaggttacctgcaaggcctgcatactacaagtatgttactattatgctcatcttgaatgcaattgcactgtttgcttgtggtattaca

SEQ ID NO: 146295 - DNA, 227 bp, Glycine max
gttagcacggaattcggcccgcgatctctctatagcaggtgtacataagcataatattcgttggtagtgatacatccaagaggttttgactttgaatgcagggaagatggattctttcaatgcaacaggaagacaccatctctttgttccatggccggttaacattccggatcagatcatccgggccatgaacagaaacaacgagtgactaccgttctccagcaatt

SEQ ID NO: 146296 - DNA, 254 bp, Glycine max
cttccgttagctcggacatcctcgcaagtcgcatcgcacacgctgtgaatgccatcacggcaactggcggcaggaaacacagttgacgagtatgattaccttccatacttctattcccgttcattcgatctgtcttggcaattctatggcgacaatgtcggcgacacagtgctattcggagacaacaatcctgcgtcttcaaagccaaagtttgggacatactggattatagacgggaaagttgtcggggtctt

SEQ ID NO: 146297 - DNA, 249 bp, Glycine max
attcggctcgagcaggtcttggacagtcaagagtgagttagcgtagaaagctgcagccaaagcagccatcagagcacaagaggaagctgagaagaagcttaaggaccgtgagaagaaagcaaagaagaaatcaggcactgcagccgtggccaagcctgaggacgaaccgaaggatgaagttgtcgaggttacagagccagagaagattaacgattatgtccaagccccggctccagtgaaggaaaaggt

SEQ ID NO: 146298 - DNA, 237 bp, Glycine max
caatacaataatcactaactgaatattcgatcggagatgtctgccgccgccgaagaagctaacgctcccgccgtcgaaaagccggttgaggaggtgaaggcgccgaaccccgcgaaggagaagaaacctaaggctccgaaggaaaagaagccaaaacaggccaaaacagcttcacatcctccatattttcagatgattaaggaggctttgatcgctttgaacgagaaaggaggatcg

SEQ ID NO: 146299 - DNA, 249 bp, Glycine max
tcggctcgaggcataaacatgaagagaatgttgcgtctgttcgtcgacggctgtctcatgaaaaagacaaatggttaagttcctgtcctgacaccttaaagatcaacatggagtttcttcagcgttgtatatttccacgctgtacttttagtatgccagatgcagtttattgtgctatgttcgtacacacactccattcccttggaacccccttttttaacacagtcaatcacatagatgttcttattt

SEQ ID NO: 146300 - DNA, 241 bp, Glycine max
gcatattcaagaatgaaacagtcagccgtaaagcatttgctttacaatataggctttggtccatttgtgctggctggtactacagttcccatcccgttcttaagggcaacagatatatcaccaattgctctcctgtcagacaatgtacttggtggcatacaacaggatactggtggaactggaacagtgggagcattgcaagagctttttagtggtgacggacagtccaaaaagggccgga

SEQ ID NO: 146301 - DNA, 240 bp, Glycine max
gtgtggtctttgctagatttgggagatgtctctgctctcagatctcatcaatcttaacctctccggtatgcaccgagaaggtgatcgcagagtacatatggatcggtggatcaggaatggacctgaggagcaaagcaaggactctcccaggaccagttagcgacccttcagagcttcccaagtggaactatgatggttccagcacaggtcaagctcctggtgaagacagtgaagtgattt

SEQ ID NO: 146302 - DNA, 240 bp, Glycine max
ctctcttctcttctttgatctccgttaccctttttgttttctcaacagagagagagagagagaatctttcgaagttcgtttgcgtgtgtcgtgtggtcagtcaccgatggcagcaccacctgcgagggcacgtgccgattacgattacctcatcaagcttcttcttattggcgatagcggtgtgtgacagagttgtctgcttttgcgattttctgatggttccttcacaaccagttttat

SEQ ID NO: 146303 - DNA, 253 bp, Glycine max
cggctcgagaactaatctaccttaagatccaaattttatccattaatagatggagcgtcgatcgcagctagatctagagggaaattatgagcattacgttcatgcattacttccataccaaggttagctcggttaataatatcagcccaggtattaattacacgaccttgactatcaactacggattggttgaaattgaaaccatttaagttgaaagccatagtgctgatacctaaagcggtaaaccaaatac

SEQ ID NO: 146304 - DNA, 236 bp, Glycine max
tgcacattcttcatcacttcatgcagcatttcgcgctcccttagctagtttttaccaatggctgctgcggttagtgctgcagtctcttttgcatcgaccaagtctacctctctcccaagcaggacctccatcattaccccagagagagttgtattcaagaaggcttcattgcaatacagatatgtttgtagcagtggaagggtagtttccatcagagctcaagtcaccactgaggc

SEQ ID NO: 146305 - DNA, 235 bp, Glycine max
agtacaacaactcactcactaagctaaacaatttcatcaagcctgccatggcttcctcgtgtgcttcctctgccattgcagctgttgccatctccacaccaagttcccagaagaatggatcactcttgggaagcacaaaagcttcttttcttagtgggaggaaactgaaggtgaacagttttacagcaccagttggagcacgatccagcactacagtgtgtgcagttgctgagcc

SEQ ID NO: 146306 - DNA, 235 bp, Glycine max
ctctctccccccctctttctctctcacacaaatgtctaaaataacaataacctctccaaaacactgtgctgacaaagaaggactaaaaatcaagaactacaagaagatctacttcactttctcagcatttttcatcacaatcctactactaatacttgttatatggctcatcctccaccctgcaaagcctcaattctccctcaaagaagtcgacatcttccaacttaacctttca

SEQ ID NO: 146307 - DNA, 232 bp, Glycine max
caggccactactcccgaatatagagcatatcaatggcaagttctcaacaacagctttaaatttgcacaggctctgagtgagagaagctatgagcttgtctctggtggaaccgagaatcacctggttttggtgaatctgaagaataagggtattgatggctccagagttgagaaggtgttggaagcagttcatattgcagctaataaagacactgttcctggagatgtgtctg

SEQ ID NO: 146308 - DNA, 170 bp, Glycine max
ccgtctccactgtcggagctgtcaacagagctcttttgaacctgaatgggtctggacctggggtttcagctcccaggttcatccttctttgggagcagcttgaagaaggttattggctcaagggtccccaacacaaagatttcctctggaagcttcaagattgttgctgt

SEQ ID NO: 146309 - DNA, 249 bp, Glycine max
tcggttcgagatgcattgtgcgggaatagtttatgctgatgtaccagaagctctagaaaagtggcacgccttgggtataaaggtatacatatattctagtggtagcagattggctcaaaggctaatatttggaaaaaccaaccatggggacctaagaaaatatttatctgggttttttgacactacagtggggaacaaaagagagacacgcagttatgttgaaatttctgagtcactcggtgttgaaaa

SEQ ID NO: 146310 - DNA, 239 bp, Glycine max
gggcaaatacttttgtggcagaggtacttggagttgatccaagagaggttgatggtccagtggttggcggtcatgctggtgtcacaattttgcctcttttgtcacaggttaagcctcgcagtagcttcactgcagaagaaactgaatacctgacaaatcgcatccaaaatggtggaactgaagttgttgaggcaaaagctgggacaggttctgcaacactatcaatggcatatgcagct

SEQ ID NO: 146311 - DNA, 240 bp, Glycine max
gagagatagcgagcagtgtcagacacagagacaggggtttgggattcgagggattgacgctgcgtctcttcctcttctctttcgctcgatccctcattcctaatcctccaatccaaccacctcagcctcacactcacatatacacatatctgaacgcgtatcgtccctcctatggcttcaaagcgcatcctcaatgagctcaaggacttgcagaaagacccatcaacttcttgcagcgct

SEQ ID NO: 146312 - DNA, 224 bp, Glycine max
attcggctcgaggctcacttgaacgatagagcaaagtgagggaaggttgactttcaagaggattcccaacagtagctctatctaattaaggagagtttgtggttgccttatctatgtggtacgtctgaataacatagactgtatgcatgtctatgcgtaattattgccgaagcttctacactattgtatttggatactctcggtttggcatatgattgaagtgt

SEQ ID NO: 146313 - DNA, 235 bp, Glycine max
attgtagctgcattctagcagcaacaaacaatttctcggacgaaaataagcttggacaagggggatttggtcctgtctacaaggggaaaattccagggggagaggaagtagctgtcaagaggctttcaagaaagtctagccaaggtttagaggagttcaagaatgaaatggtgctcatagccaaactgcaacatagaaatctggttagactattggggtgttgcattcaagggga

SEQ ID NO: 146314 - DNA, 228 bp, Glycine max
caagggtccaactctgcttgatgcacttgaccagattagtgagcccaataggccctctgacaagcccctcaggcttccccttcaggatgtgtgcaagattggaggtattggaactgtgccagtgggacgtgttgagaccggtgtcttgaagcctggaatggtggtgacttttgcaccagctggactgacaactggagtcaagtctgtggagatgcaccatgaatctct

SEQ ID NO: 146315 - DNA, 239 bp, Glycine max
agcgtctgaaagaaggcacatacaaggggaagagattcaatgccatttgccacttttttggttatcaagctcgtggatctctgccatcaaaatttgactgtgattacgcatatgtccttgggcacatctgctaccatatactggccgctggtctaaatggatacatggcaactttaactaacctgaagaatccagtaaacaagtggaaatgtggggctgctccaattgcatctatgatg

SEQ ID NO: 146316 - DNA, 233 bp, Glycine max
taaatacaatggtggactagagacagaggaagcatatccctacacaggaaaagatggtgtctgcaaattctcagctgaaaatgttgctgttcaagtccttgactctgtgaatatcaccttgggtgctgaagatgaactaaaacatgcagttacatttgttcggccagttagtgtggacctttcaggtggtgaatgggttccatttctacgagaatggagttttcactagtgac

SEQ ID NO: 146317 - DNA, 203 bp, Glycine max
gagcccggatccgaacccggtggatggctgcgccggataacctgccgcagaagaatcactacagaggtgtccggcagcggccctggggcaaattcgccgccgagatccgcgacccgaacaaacgcggctctagggtttggctcgaaaccttcgacaccgccgtcgaagccgccaaggcctacgaccgagccgccttcagactc

SEQ ID NO: 146318 - DNA, 231 bp, Glycine max
gtttggttgacacagactttgagcagattggtgagttccttcaccgtgctgtgactctcacactggagatccagaaggagcatggcaaacttctcaaggatttcaacaagggtctcgtcaacaacaaggctattgaagatctcaaagctgatgttgagaagttctctgccttgtgtgacatgcctggcttcctggtatctgagatgaagtacaaggattaggttcaaccat

SEQ ID NO: 146319 - DNA, 257 bp, Glycine max
acttgagctcgggattcgagctcgagcgcttcttgcttcgatctactctacgtaagttccgtaccacccagtttccggttcaaccaataagtagataaataaatacataaccgaaccgaaccgaaccggcggatctcggttgttccatggaggctcacggcggcgggctccgccgagtccttgttctcgccttctgcgtcgctggaatctggtcggcatacatctaccaaggcgtgctgcaggaaaatgtgtcgacg

SEQ ID NO: 146320 - DNA, 233 bp, Glycine max
agccaagtgaaagagagaggagaagtcaaagacaatgtcagggatcattcacaagattgaggagacccttcatgtgggaggccacaagaaggaggaggagcacaagggtgagcagcaccatggtggagaatacaaaggggagcatcatggtgaacacagtactgaatacaaaggagagcatcatgttggtgagcacaagccggagcaccatggaggagaagagcacaaagagg

SEQ ID NO: 146321 - DNA, 231 bp, Glycine max
gagaagatgaagttcaatccacgtgtgtcgagcaaccgccgcaagagccgaacggtcatttcacggcgccgtcgagcgtgcggcgggtgcttatgagcgcccctctgtcggcggagctacggtccaagtacaacgtgaggtcgatcccagtacggaaggaggacgaggtgcaggtggtgcgaggaacatacaagggtcgcgaggggaaggtgactcaggtctaccgtcgaa

SEQ ID NO: 146322 - DNA, 233 bp, Glycine max
ggcctttcaggtggtgaatgggttccatttctacgagaatggagttttcactagtgacatttgcggtacacttcccaggatgtgaaccatgccgtccttgctgtggggtatggagttgaaaatggcgtcccatattggctcataaaaaattcatggggagaaagttggggtgagaatggctacttcaaaatggaattggggaagaacatgtgtggtgttgcaacttgtgcgtc

SEQ ID NO: 146323 - DNA, 132 bp, Glycine max
cattcctgagatgtgttgatattaagctggtttgcagagctttgccacaagaaggggactttgctctgtattgatggtacatttgcaactccatctgaaccagaaggcccttgcccttggcgctgatctgat

SEQ ID NO: 146324 - DNA, 232 bp, Glycine max
ctgcttcaccgtctgctctagaaaattcggtgctgaaacatgacttcggctactctctctgtagccaaaccagcccttcaggcaaatgggaaaggcttctctgaattctctggcctccgaagcgcatcaggcttccttcccttttactagaaaatcttcagaggatttccattctgtcattgccttccagacctatgcagttggaagcagtggaggatacaagaagggtgtg

SEQ ID NO: 146325 - DNA, 233 bp, Glycine max
attcagaaaaactgttcagcacgagggatttggtgcattagacgagggtctggtgcccaactctgtaaaggtggtcccatcgatagcaattgcattcgtaacatatgaggttgtgaaagacgtgttaggagttgagatcagagtatccgactaaagtttgataaccacacatctgttcacctggtgtggtgtttcattagtttgtcttgttagtatgcaaggggatgcagaga

SEQ ID NO: 146326 - DNA, 226 bp, Glycine max
cttcggattatctagatctaaagaactagtcaaaacagagaaaaatgtaaaaaaagatatattatagcaactgaactattgtgaagcatgaaagagcaaaaatcttatttagtgatgaagcaataaaaatatacagataaatgaagaggtgaaagaaagagagattaaaaatcaatgatatagaattctaatttgtttacgttataaattaattcatatataaata

SEQ ID NO: 146327 - DNA, 226 bp, Glycine max
tttcagagacagcttcggctgctgatgtaagacgtgcctacaagaaactcggcttacaatggcatccagataagaacgtcgacaagagggaagaagcagaggctaaattccgagaaattggtgctgcttatgaggtctattatgattatctgatggttacctgacctttctcctacagtctctaatcaggacgtgcctggtcattgtggaatgggaaatgcgaaca

SEQ ID NO: 146328 - DNA, 226 bp, Glycine max
cagagcaagacctacttggaagtgaaggggacatgagcagcaaaccagtgcccaacaattgatggtggattggactcatttgccttcaagccggggaaatacaatgccaagaagttgtgccttgagccaacttcattcacagtgaatgccgagggtgtggccaagaatgctccccttgagttccaaaacacaaagctcatgacacgtttgacctacactctggatg

SEQ ID NO: 146329 - DNA, 227 bp, Glycine max
gggcaaacaagtgagcatgcacaacttatcagaagctttggtgtttatcgggttatagttgctgtaaataagatggatgctgttgtgtactccaaagatcgatttgattttataaggcagcagctgggagtttttctccactcttgtggtttcaaagattcttcgctatcttggattcccatgagtgctatggaaaatcaaaatttggtggcatccccttctgatgc

SEQ ID NO: 146330 - DNA, 233 bp, Glycine max
gcagctagtggattgtgctggccgtttcaacaactttggctgtaatggtgggttggcatcacaagcctttgagtacatcaaatacaatggaggacttgagacagaggaagcatacccctacactggaaaagatggtgtatgcaaattctcagctgaaaatgttgccgttcaagtcattgactcggtcaatatcaccttgggtgctgagaatgaattaaaacatgcagttgcat

SEQ ID NO: 146331 - DNA, 253 bp, Glycine max
gctgccacaaattgggtcaacaagtacgtgaaagcatactcacaaaacgtgaaattcaagtacattgcagttggtaacgaaattcaccctggtgactctttagcagggtctgtacttccagcacttgaaaacattcagaaagcaatttctgccgccaatttacaaggccaaatgaaggtgtcaacagcaatagacaccactttacttggcaactcttacccaccaaaagatggcgttttcagcagtagtgcaa

SEQ ID NO: 146332 - DNA, 121 bp, Glycine max
tcctcaggtggaagaattttgttatataaccgacaatacttacttaaaagaagaggttttgcaaatggaatctgctgtcttgaattatcttagagttcgaagatgacaggctccagacagt

SEQ ID NO: 146333 - DNA, 247 bp, Glycine max
agtacaacaactcactcactaagctaaacaatttcatcaagcctgccatggcttcctcgtgtgcttcctctgccattgcagctgttgccatctccacaccaagttcccagaagaatggatcactcttgggaagcacaaaagcttcttttcttagtgggaggaaactgaaggtgaacagttttacagcaccagttggagcacgatccagcactacagtgtgtgcagttgctgagcctgataggcctct

SEQ ID NO: 146334 - DNA, 252 bp, Glycine max
gtcaacttagaggattaggtttgacccctaatcttcttgcttgtcgcagttctaaggaacttgatgacaatgtcaaggcaaagcttggtcaattttgtcatgtgccgctgtcaaacatacttactctccatgacgttccaaatatttggcacattcctttgctattgaaagaccagaaggcacatgaggcgatcctgaaagcattaaacttgctaggtgttgctgcagagcctaatttgaaggagtggactg

SEQ ID NO: 146335 - DNA, 210 bp, Glycine max
atctgcatgcacacacttgcatagttttgcgaaaccaagaatttttgaagggtagcatcaacaagaagttctggaaatggagatcaccaatgtcagcgagtatgaagctattgcaaagcagaagttgccaaagatggtgtttgactactacgcatctggtgcagaggaccagtggactctgcaggagaacagaaatgccttttccagaat

SEQ ID NO: 146336 - DNA, 248 bp, Glycine max
taaaaattggagaggacacttttgaggacttagatgaggttatggaccgctatgttgatcccttggtggctcacttaaagtcaatgttaaactatcgcaaattccgaaagggtacaaaagcagaagttgatgaacttttgaggatggagaaagctgagtatcctatgcgcatagtctatagttttggcatctcccatgatcatcctagcacattgatattaactcgtataagaagtacaaatccacac

SEQ ID NO: 146337 - DNA, 247 bp, Glycine max
gcctgatgaagctgtttacgacaaggagcgacccggagttacatggccgaagcagttgaatgcttcacttgaggtcgttgatcctgagattgctgatattattgagcttgagaaagctaggcaatggaaggggctggaactgataccgtcagagaatttcacttctgtgtctgtgatgcaagcagttggatctgtgatgaccaacaaatacagtgaggggtaccctggtgcaagatattatggtgga

SEQ ID NO: 146338 - DNA, 248 bp, Glycine max
atctgtttcccgccatatatccaataagctttaaccatgtctgcctttgttggaaagtacgcagatgagcttatcaagaatgccaagtacatagccacacctgggaagggcatcttggcagcagatgagagcactggcaccattgggaagcgcctatcgagcattaacgttgagaacattgaggccaaccgccaagctcttcgcgagcttctcttcaccgctccagatgccctccaatacctctctgg

SEQ ID NO: 146339 - DNA, 248 bp, Glycine max
atcctcttagtctgaaaatggatcttgccccagaagagcttcaattccttaccatccccgacatcctacgagaatcaatctcaatcccaaagcgttctccgaaaacattttacctcattaccctcagcctcatcttccccctctccttcgcgattctagctcattccctcttcacgcacccccttatttcccagctgcagtcccctttcaacgacccttcccaaacctcccacgagtggaccctcctt

SEQ ID NO: 146340 - DNA, 248 bp, Glycine max
aaaaattcttcccgctgattcggaacattctgcaatttttcagtctatccaggggttgccaaagggtgcacttaggaaaatccttttaactggatcaggaggtgctttcagagaatggcctgctgaaaagatgaaagatattaagcttgctgatgcattaaagcatcccatatggagtttggggagaaaaataactattgactctgctacccttttcaataagggtctagaagtaattgaagcacatt

SEQ ID NO: 146341 - DNA, 253 bp, Glycine max
gcatgcacacacttgcatagttttggaaaccaagaatttttgaagggtagcatcaacaagaagttctggaaatggagatcaccaatgtcagcgagtatgaagctattgcaaagcagaagttgccaaagatggtgtttgactactacgcatctggtgcagaggaccagtggactctgcaagagaacagaaatgccttttccagaattttgtttcgggcacgtatccttattgatgtgagcaagatagaccatca

SEQ ID NO: 146342 - DNA, 247 bp, Glycine max
agagaagaaaaagaaacaaaaatggctgaatcaaaattattggaccgtggaagttggaagaaacgcgattatctgatcaagcttctcctaatcggcgactcttccgttggaaaatcctgcttgcttctcagattcgttgttgtggatcgggacttagcagtgagacaatctcggagaatggacaccattggattgggcttgatatttcagcatcaattcctatttattttgaatttttatatatttg

SEQ ID NO: 146343 - DNA, 242 bp, Glycine max
ccaatctcaagttgccactcagatgggaagggttgctgcaaagttaaatatcgactttgtgatatccactggagacaatttctacgatgatggattgactggtatagatgaccctgcatttgaaatttccttctcaaaaatctacactgccaagagcctccaaaagcaatggtatagtgtgttgggcaaccatgactacaggggtgatgttgaagctcaattgaatccaatccttcagaaaa

SEQ ID NO: 146344 - DNA, 240 bp, Glycine max
aacttctcactacatgagaggccttgttgtcctgctgtgctacattgttattggggcatgcttcttcgtacaaagaacaccctttaataaccaagctgatgttactaacatcacacttaaaccagccactaatgcagttttaagcgcttaattagtaggctttggcctatttcttgtcctttcctgagatgatgaatggtggtatcgatccaaacccaaaatgcgattcaaattcaatgg

SEQ ID NO: 146345 - DNA, 244 bp, Glycine max
cttttgatgggtgtggatcttgtgttaagattcctcaggcttcatctgaaggccccgaagcacgtgctattggatctcctaaagcatgtgccactaggttccctaccttggtgtcccagggtttgctctttgtatggcctgatgagaatggttgggagaaagcaaaggcctccaagcctccaatgttgcctgatgactttgacaaaccggagtttgccacggtcaacattcagcgtgatctgtt

SEQ ID NO: 146346 - DNA, 245 bp, Glycine max
tatctgtttcccgccatatatccaataagctttaaccatgtctgcctttgttggaaagtacgcagatgagcttatcaagaatgccaagtacatagccacacctgggaagggcatcttggcagcagatgagagcactggcaccattgggaagcgcctatcgagcattaacgttgagaacattgaggccaaccgccaagctcttcgcgagcttctcttcaccgctccagatgccctccaatacctct

SEQ ID NO: 146347 - DNA, 244 bp, Glycine max
gcaggtttttattaatggagggatattacttggatacatatcaaactatggattttcgaagctgacactgaaggtgggatggcgaatgatgcttggagtgggtgcaattccttcggtagtcctaacggtgggagtgttagcgatgcctgagtccccaaggtggctagtgatgaggggtcgtttgggagaggcaagaaaagtgcttaacaaaacctcagacagcagggaagaggcccaactaagg

SEQ ID NO: 146348 - DNA, 248 bp, Glycine max
gtggattatttactaggaaaacaggccttcttcggcgaaacacaagccgagggtggttttgatccaaatgcggtggccacggctaacatcttagagacggcaacacctgtgattgatgggaagccgtactattttctgtctgtgttgacaaggactgctgatggagatgaaggtggcaagcaccacataattagagcaactgtaaaagatggaaaactgttcatttgcaaggctcaagctggagacaa

SEQ ID NO: 146349 - DNA, 242 bp, Glycine max
acgaagttccagattttgtgcatccttttagtccatatccatttctggggacactcatattggaacagtttaagaatttgtccaagcctttctgtgtgttggtggatagttttgaggaactagagcatgattacatagactatcttacaaagtttgtgcccataaggcccatcggtcctttgttcaagaccccaatagcaacaggcacaagtgaaatccgaggtgattttatgaagagtgat

SEQ ID NO: 146350 - DNA, 241 bp, Glycine max
tctgaagactgcaccgtgggaagttatgacgtgccacgtaacacaatgttaatggtgaatgcatgggccattcatagggacccaaaagtatgggctgatccaacgagctttaagcccgagaggtttgagaatggaccagtagatggtcacaagctaatctcttttggattggggaggagatcgtgtcctggtgcaggcatggcccaaagaactctgggcttgactttaggttcgttgattc

SEQ ID NO: 146351 - DNA, 241 bp, Glycine max
ggcgaatccggtgacaagccacgtgcaaagcgcggagcaacacaaccaagatgtgaactctctggggctgatttcatcaaggaagactcatgaggctattgagatcctcaagctcatgtcctccactttcctggtcgccctttgccaagccattgacttgaggcatttggaggagaatttgaagaacacggtcaagaacgttgtgagtcaagttgctaagaggactctcaccacaggtgtc

SEQ ID NO: 146352 - DNA, 243 bp, Glycine max; identical to SEQ ID NO: 146237

SEQ ID NO: 146353 - DNA, 243 bp, Glycine max
ctaaaggcgatttgggatttgttcttgatggttttcgtcgaacagttgagcaagcagaaatattggaaggggtaactgacattgacttggtagtcaatctgaagcttcgagaagatgttctgcttgagagatgccttggtaggagaatttgcaatcagtgtgggggaaattttgatgttgcttccatcaacgtcaaggctgagaatgggagccctggaattgttatggctccacttcttcctc

SEQ ID NO: 146354 - DNA, 246 bp, Glycine max
tttgatagaatattgtacgcataaatctagctccaattcctaatcacctggttaatttcttcacatagagctatcgagatccaacgttaacatgaagaatgttttagtaaggtcagctgcgcgagctctgcttggcggcggtgggcggagtactaccgccagctctcaacggcggcgatcgtggaacagagacaccagcacggtggcggcgcgtttggaagcttccacttgcggaggatgtccact

SEQ ID NO: 146355 - DNA, 237 bp, Glycine max
cgaaccactcaggcttccttcccttttctggagaatcttcagaggatttccattctgtcattgccttccagacctatgcagttggaagcagtggaggatacaagaagggtgtgacagaagcaaaactgaaggttgccataaacgggtttggaaggattggaaggaacttcttgaggtgctggcacggtcgcaaagactcccctcttgatgtgcattgccatcaacgacaccggcggc

SEQ ID NO: 146356 - DNA, 236 bp, Glycine max
cagagaacttgaggtggtacgttcaagccgagcttgtgaatggacgttgggccatgttgggtgttgcaggaatgttgcttcctgaggttttcaccaagtttggaatcatcaatgcgcctcaatggtatgatgctgggaaatcagagtactttgcatcttcctcaaccctcttcgtgatcgagttcatcttgttccactacgtcgagatccgaagatggcaggacatcaagaaccct

SEQ ID NO: 146357 - DNA, 238 bp, Glycine max
ggaaatgatctattcctgtggctggcctgtttgtcagatctataatggcatgcagcccaatttcaccgccattattgagcgttgcaatctttggagaggttgtgatgatattcaagattcatgggctagcttggaaagtgtaatagattattacggtaacaaccaagacgtgattgtaccaaacgcaggtccaggtcattggaatgatccagacatgttgatcatcggtaattttggg

SEQ ID NO: 146358 - DNA, 241 bp, Glycine max
ggcatacctttcatggaaacaagtgcaaaagatgctacaaatgtggaagatgctttcatggccatgtctgctgccatcaagaatagaatggctagtcagccttcagcaaacaatgcaaggcctccaacagtgcagatcagagggcaacctgttggacaaaaaagtggttgctgctcttcctaaccaggtggtgctgcttggtctacacttaccttttgcatgtaaggggcatatgctattt

SEQ ID NO: 146359 - DNA, 242 bp, Glycine max
ggaagggatcccaccagaccagcaacgtctcatttttgctggcaagcagcttgaggatggacgtacacttgctgattacaacatccaaaaggagtccactcttcacttggtgctccggctccgtggtggaatgcaaatctttgttaagacattgaccggaaagacaatcacccttgaggtcgagagctctgacaccattgacaatgttaaggctaagattcaggacaaagagggtatcccac

SEQ ID NO: 146360 - DNA, 242 bp, Glycine max
ggtggacaaggtcagtttgcagatatcaccgtccggtttgaacccatggacccaggtagtggatatgagttcaagagtgaaatcaaaggaggtgctgtaccaaaggaatacattcctggtgtgatgaaaggattggaagagtgtatgagcaatggtgtgcttgctggctttccggtcgttgatgaacgagcagtactcacagatggttcttaccacgatgtagattcaagtgtgttggcttt

SEQ ID NO: 146361 - DNA, 248 bp, Glycine max
gtggattatttactaggaaaacaggccttcttcggcgaaacacaagccgagggtggttgtgatccaaatgcggtggccacggctaacatcttagagacggcaacacctgtgattgatgggaagccgtactattttctgtctgtgttgacaaggactgctgatggagatgaaggtggcaagcaccacataattagagcaactgtaaaagatggaaaactgttcatttgcaaggctcaagctggagacaa

SEQ ID NO: 146362 - DNA, 240 bp, Glycine max
cgaaaattatctctacacctgtttggcacacaccggcgaggtggcttcagttaaagtcattcggaacaaacaaactagtcaatcggagggatatgggtttattgagtttactagtcgtgctggtgctgagagagtccttcaaacatacaatggcaccattatgccaaatggcgggcagaacttcagattgaactgggcaactcttagtgcaggtgagaggcgtcacgatgatagcccaga

SEQ ID NO: 146363 - DNA, 236 bp, Glycine max
ctcaaagtttcatatctgaagcaagttttcaagaaactgctagagttttatcaaaagccgctctccgggggcgcatagattggttgaaaggtctgaaagagaacgttgttttagggggaatgatacctgttggtaccggattcaaaagaataatgaaccgttcaaagcaaaggcaatataacaagatgacctcggaaacaaaatagaagaatttgttgaatggcgaaatgagagat

SEQ ID NO: 146364 - DNA, 237 bp, Glycine max
ggcgttgttcacatggttggcgggatagcgggcctgtggggggctttaattgatggcccgagaatcggccggttcgaccgttcgggccggtcggttgctttacgtggccacagcgcgtctttagttgtgcttggttcgtttttgttatggttcggctggtacggcttcaaccctggttcgtttctgacaatagccaaggggtatggaagtggagggtattatggtcaatggagcgct

SEQ ID NO: 146365 - DNA, 242 bp, Glycine max
ggacagtctgaggttgaagctaccctcaatttgaatgccatgaaccaatctccaaacccgtggcacgtgtcattctcgtatgccagagccctccaaaacactgccttgaagacatggggaggccgcccagagaacgtgaaggcagcacaagatgcactcgcattccgtgccaagtccaactcactcgctcagcttgggaagtacactggtgagggtgaatccgaggaagccaagaaggagtt

SEQ ID NO: 146366 - DNA, 240 bp, Glycine max
cccgaacttggggaaccactgcccctggcctaccctatgttgaacaaactataaccaatgctggaaattggttgattgggggtgacctagaggtcattgaaccaatccagtacaatgatggacttgatcattttcggctgtctccagcagaactccgtgcagagttcacaaggcgcaatgcagatgctgtgtttgccttccagctccggaatcctgttcacaatggccacgctttgctaa

SEQ ID NO: 146367 - DNA, 265 bp, Glycine max
  unsure (1)..(265): unsure at all n locations
ccagtccatgctggaaggactcgacgangaagggtgcgtggaagangcagggcannactctgagaagaaacgacgactaaacgtagatcaggtgaaggccttacanaagaacttcgaagtagagaacaaactggaacctgaccgaaaggtgaagctcgcgcaagaactcggcttgcaaccaagacaagttgcggtttggttccaaaaccgccgtgccagatggaaaacaaagcaattggaaagagattacggcgtcctcaaagcc

SEQ ID NO: 146368 - DNA, 260 bp, Glycine max
ttggtttccttgaatcccagcttcaggagttggacggtccaaaagcgagtgcttgcagactattttgatgtgatatcaggagcaagcacaggaggacttgtatctgctatgataactgatccaggctacaataatcggcctctgttcgctgccacagatatcaagccttatgacatggaccactgtcctaaaattttcccacagcatagtggcctcggtcggtcgatattagcaaagatgacaagatctctgggaggacc

SEQ ID NO: 146369 - DNA, 263 bp, Glycine max
caccactggtgtacccggtggtgaatgcattgtcaaagcagcgtgcaatgctggaaaacataatgagggcttgtgttggataggccccagagaataacatgattctcgagtacaagtgacgcatgggatagaataataattttgttggggtagcctatccgaatggtttatgttaataatatgtttgcttatgattttgcaagtgtaattgattgcatcttctcattaatgctttagagcaggacatattctgttttctaggg

SEQ ID NO: 146370 - DNA, 261 bp, Glycine max
cttctatagagacacacggagagagtctcagagcaataaacacccttcaatggctaccactaaagtttacattgtttactattctacgtacggacatgttgagaagttagctgaagagattaaaaagggagctggttccgttgaaggtgtggaagcaaagctatggcaggtacctgaaacactttctgaagaggtccttgggaagatgggtgcacctccaaagagtgatgtaccgattattacacccaacgagctacctga

SEQ ID NO: 146371 - DNA, 262 bp, Glycine max
ctgaggttgttgttgttgccaaggctgtaaatgatggtcccgcttctgtgcgtgatgctcttgaagccaacgccaaatccatgcaggcgcgtgccacgtcgaagcgtaccaataacaaggcggttaaggaccgtcaagccagcgtcactcctgagcaacacgagcgcaagtctcagttccctgaacgttatgcccagcagaagaagcacttgagccttcctttgttccccaccaccaccattggttccttccctcagaccaa

SEQ ID NO: 146372 - DNA, 261 bp, Glycine max
gcaaggtgcccgtttcgccaaatggcgtactgttgtgagcatccccaacggtccctctgctctggcagtgaaggacgctgcctggggtctagctcgctatgctgcaatttcacaggagaacgggttggtcccaattgtggagccagagatctcgcttgatggtgagcatgcgattgacaggacattcgaagtagcccaaaaggtgtggtcagaggtattcttctacctggctgagaacaatgtcctgttggaaggtattct

SEQ ID NO: 146373 - DNA, 255 bp, Glycine max
ggtcagtggcgattcttccggagagactgctttgaggatggcgatgcagactagggagcagcatatcaggaggtacatggccacgagcagcatttgcagtgctcaggcactgcgtgcaaacatggctgccatgtatgctgtgtagcatggacctgaaggcctcaagaacactgcacaccgggtccatggcctcgctggggcatttgctctgggaatacagaaacttggaactgtggacattcaggaccttccctt

SEQ ID NO: 146374 - DNA, 263 bp, Glycine max
caaaaggctgtggaactccagcgctggaaattagaggaagagaggagattggaggaggcaaggctcgccgaagaagctgcattggcagttgcagaaaaggagaaggcaagatcaaaagcagccatggagaatgctgaggttcagcagaggattgcagagttggaatcacagaagagaatcaatgcagaaaagaaagcatttatggaatcagaagaataaagaaaagcagtggatgctttatcaaacaattatgtgaggtatag

SEQ ID NO: 146375 - DNA, 260 bp, Glycine max
gcagtttgccaggagattttggctttgatcctctaggtcttgcatctgatcctgagagcctgagatggaatgtccaagcagagcttgtgcactgcagatgggccatgttgggagctgctggcattttcatcccagaattcctcacaaagattggtatcctgaacaccccttcatggtacactgctggagagttggagtacttcacagacaccaccacactcttcatagttgagctctttttcatcggttgggccgagggt

SEQ ID NO: 146376 - DNA, 259 bp, Glycine max
ctgttctctctccccctccccgattcgttttgcccctttcgctgccctaatttcaaccatgcctcgccgtagctccggtggaagatctgcccgtcctgctcctcgtgcagcacctcgtcctgctccagttcaccatgctcctcctccagcccctgctcagagcggtggcggatctatgcttggtggcattggttcaaccatagctcaaggtatggcttttggcactggaagtgcagtggcacacatggctgtggatgct

SEQ ID NO: 146377 - DNA, 248 bp, Glycine max
caaaggagaggaaaagtactgtgccacttcgcttgaatccatgattgatttcagcacttccaagcttggaaaaaatgttgaggttgtgtccacggaagtagtggaggacaaggaaacgggattgcagaaatacaccgtagcaccgggagtgaacaagttatcaggggacaaggctgttgtgtgccacaagcagaactacccttatgctgttttttactgtcacaaaactgagaccacaagagcttact

SEQ ID NO: 146378 - DNA, 258 bp, Glycine max
gctgtgggaagttgaggggaagtgggttgttaaaggagcagttgagctagacattggtgcaaacccttctgctgagggtggaggagaagatgagggagttgatgatgcagctgttaaggtagttgacattgttgacacattcagacttcaggagcaacccgcattcgataagaagcagtttgttaccttcatgaagaggtttatcaagaatttgactcccaagctcgatgcagagcaacaggagttgtttaagaagca

SEQ ID NO: 146379 - DNA, 208 bp, Glycine max
ggcttatggtggatacctaggcacccagagacgaggaagggcgtagtaagcgacgaaatgcttcggggagttgaaaataagcgtagatccggggattcccgacataggtcaacctttccaactgctgctgaatccacgggcaggcaagagccaacctggtgaactcagccatcttagtagccagaggaaaagaaagcaaaagcgattc

SEQ ID NO: 146380 - DNA, 262 bp, Glycine max
ggctcgagccaggacaaggaaggcattccaccagaccagcagcgcttgatcttcgccggaaaacagctcgaagacggcagaaccctcgccgattacaatattcagaaagaatcgacgcttcatctggtgcttcgactccgcggagggatgcagatcttcgtgaagacgctcaccgggaaaactattactctggcaggtggagagtgctgatacgatcgataacgtgaaggcgaagattcaggataaggagggattccacggt

SEQ ID NO: 146381 - DNA, 253 bp, Glycine max
cagaagcctctttgggaatcaaatccgaagcatgatgcattgtgcgagcattgtctcggctccgtcctacgcgttcccttttctctctggctccgcttccactactccaactgccctctcgctcactacgcgcagttggaagccacctccgagcatggcaaaaggcccagtcagagccaccgtttctatagagatagagaccccggaggccaatcgtcccgaaacgtttctcagaggagtggacgaggcccag

SEQ ID NO: 146382 - DNA, 259 bp, Glycine max
gaaattcagatctcaggtttaaaagaaaacctggacagggagcatcagaaatggcgggcaactcaaaccaattatgaaagacaggttgttctccagtccgaaactattcaggagttgacaaaaacatctgaagcactagccttgctgcaggaggaggcatctgaattacggaaactagccaatactcagaaaattgaaaatactgaactaaagactaagtgggaagatgagaaggcacaactagaaaagtctaggaatg

SEQ ID NO: 146383 - DNA, 258 bp, Glycine max
ggggaattaatcaggtttacatacttggaggagatggaactcagcgaggggcttctgtgatttttgaggaaattagaaaacgtggcttgaaagtttcagtggttggaattccagaatcagttgataatgacatcccggttatcgataagtcattcggttttgacactgctgttgaagaggcacaacgagccataaatgctgctcatgtggaagcagaaagcactgagaatggtatcggtattgtcaaactaatgggtc

SEQ ID NO: 146384 - DNA, 184 bp, Glycine max
  unsure (1)..(184): unsure at all n locations
ggcgttgttcaaatggttggcgggatacgggcccgtggggggctttaattgacgngccgagaatcggccggttcgaccgttcgggccggtcggttgctttacgtggccacagcgcgtctttagttgtgcttggttcgtttttgctatggttcggctggtacggcttcaaccctggttcgtttct

SEQ ID NO: 146385 - DNA, 256 bp, Glycine max
attttctaattctagataattttggtgcttgggagtccctaatgattaaatgaaccaagattttaccatgactgcaattttagagagagagagagaaattccaaaaccatgtcgtcccacagtcatctaagtttcgcctttggggttctaggtaacatcgcctccttcgtgtgctttctggcaccactaccgacattttatagagtttgtaagaagaaatcaaccgaagggctccaatcaattccatatgtggctg

SEQ ID NO: 146386 - DNA, 259 bp, Glycine max
gaaaaacaagtagttgagaactaagaagaaggaaatggcttcctcaatgatctcctccccagctgttaccaccgtcaaccgtgccggtgccggcatggttgctccattcaccggcctcaaatccatggctggcttccccacgaggaagaccaacaatgacattacctccattgctagcaacggtggaagagtacaatgcatgcaggtgtggccaccaattggcaagaagaagttcgagactctttcctacttgccagac

SEQ ID NO: 146387 - DNA, 249 bp, Glycine max
ggcttatggtggatacctaggcacccagagacgaggaagggcgtagtaagcgacgaaatgcttcggggagttgaaaataagcgtagatccggggattcccgatataggtcaacctttcgaactgctgctgaatccacgggcaggcaagagacaacctggtgaactgaaacatcttagtagccagaggaaaagaaagcaaaagcgattcccgtagtagcggcgagcgaaatgggagcagcctaaaccgtg

SEQ ID NO: 146388 - DNA, 233 bp, Glycine max
tgcgcctctcatccgtgatgggcgtatggagaagttctactgggcaccaacaagggatgaccgcattggtgtctgcactggaatttttcgcaccgattcaattcctgaacaggacgttgtcaagattgttgacaccttccctggccaatccattgatttctttggtgcactgagggccagagtatatgatgacgaagtgaggaagtggatttctggtgttggtgttgacggca

SEQ ID NO: 146389 - DNA, 271 bp, Glycine max
ggaattcggctcgcggccgccgtccccaccgatgcgatggcggtgcgtgcgtcaggacgccgacgacatccggatccgtcatgtgtgtgccagatgttgccgatcgtgtgatgagaccaacctgttgaacgccgttcaccacgtcgcgagcttcaaggccaagttcgccatgacctacgccagcaaggaggttcacgatcatcgcttcggcgttttcaagtccatctccgcagagccaggctgcacgccaagctcgacccttccgccgtcc

SEQ ID NO: 146390 - DNA, 254 bp, Glycine max
gagcatgtaaggatcctcttatggtaatagttacagagctattaccagggatgtcactgcgtaaatatttaacgagtatccgtcctaaactattagaccttgatgtggctataaactttgcccttgatattgctcgagccatggattggctacatgccaatgggatcatacacagagatctgaaacctgacaatctattgcttacggcggaccagaagtctgttaaacttgcagatttgggtcttgcaagagaa

SEQ ID NO: 146391 - DNA, 253 bp, Glycine max
cgggtggtgcctctcttccatctccccagccaaattctctctcaagaaggccacattaggcccttctgtcttcgcaaccgttagcactccttcttctccttcttcttcttcttcttcttccttcccttctctcattcaagacaggcctgtctttgctgcccctgcccccatcatcaccccaactgtgagagaggatatggcaaaggaatacgagcaagctattgaagaactccagaaattgttgagggagaag

SEQ ID NO: 146392 - DNA, 252 bp, Glycine max
ggcccttgcccttggcgctgatctgattctgcactccttaacaaaatacatgggtggacatcatgatgcccttggtggttgcataagtggttcaactaaggtggtttcgcaaattcggactttgcaccatgttttgggtggtacacttaacccgaatgctgcatacctattcatcagaggcatgaaaacgctgcatctccgtgtacagcagcagaattcaacaggaatgaggatggccgaacttttagaggc

SEQ ID NO: 146393 - DNA, 253 bp, Glycine max
gcacaattggcaaaggaagtagaataccttcttaggaagggatggattccttgcttggaattcgagttggagcacggtttcgtgtaccgtgagcacaacaggtcaccaggatactacgatggacgctactggaccatgtggaagctgcctatgtttggttgcactgatgcttctcaggtgttgaaggagcttcaagaggctaagactgcataccccaacggcttcatccgtatcatcggattcgacaacgttc

SEQ ID NO: 146394 - DNA, 257 bp, Glycine max
gctaaaatcacttcatcatggcttcctcgtgtgcttcctctgccattgcagctgttgccatctccacaccaagttcccagaagaatggatcactcttgggaagcacaaaagcttcttttcttagtgggaggaaactgaaggtgaacaactttacagcaccagttggagcacgatccagcactacagtttgcgcagttgctgagcctgataggcctctgtggtcccaggcagcacccctctccatggctagatggcag

SEQ ID NO: 146395 - DNA, 253 bp, Glycine max
accgcagcagccattaatgatcgacctagttgttttcgatacccaaggggaaatggcattggtgttcagctaccaactggaaataaaggaactcctcttgagattgggaaaggtaggatattgattgaaggggaaagagtggctctcttgggctatggatcagctgttcagaactgtttggctgcagcttccttagtggaatgtcatggcttgcgcttaacagttgctgatgcacgtttctgcaaaccactgg

SEQ ID NO: 146396 - DNA, 227 bp, Glycine max
gtattagggagatggctaaggagtgtatcactgtccattgatcacagcatagtctatcatacccgtagatgtagctccttagctaattgggctacaactatgccatgttaggcttcactccatatagtcctttatgacgtgagataaggaaattaactactattcagcttctatctaaccaccggcttgaactgctgactgaactacaagctcatctgagtcagaag

SEQ ID NO: 146397 - DNA, 251 bp, Glycine max
aatagcccgaacttggggaatcattgcccctggcctaccttatgttgaacaaactatcaccaatgctggaaattggttgattaggggtgacctagaggtcattgaaccaattcagtacaatgatggacttgatcattttcgtctatctccgacacaactccgtgcagagttcacaaggcgcaatgcggatgctgtgtttgccttccagctccggaatcctgttcacaatggccatgctttgctaatgactg

SEQ ID NO: 146398 - DNA, 250 bp, Glycine max
gaaaatttgattccaaaatgggatttcttcttgaccacaggttacccaaaatctgagttggttaagttccctcaatattttggatacaatttagaggaaagggttaaacctagattcacaattatgaaaaaatatggagtgaagttactgctgaatcaggttctttcactgtcaagcagcaactttgatgaagccttgaaaaagaaaatgaagaaaatgcaagttagttaggattctagtcatagcagca

SEQ ID NO: 146399 - DNA, 263 bp, Glycine max
aggacgctacgaattcggctcgagagctggaggagcaggtggtggattccatgtcaaagctatgtccaatattgatgattgggccaacagttccatcctttcacttggacaaggcagtcccaaatgacacagacaatgttttgaatctctttcaagtagattcatcagccattagttggctgagacaaaagcctgcagggtcagttatttacatatcatttggcagcatggtgtgcttcagctcacagcagatggaggaaata

SEQ ID NO: 146400 - DNA, 209 bp, Glycine max
ggctcgagtctctctctctgctcggttctccgatcgccgtcttcgccttgcccattcctgatcaatatgtctagaagatatgatagccgtacaacaatcttctcccccgaaggacgtctttaccaagtggagtatgcaatggaggccattgggaatgctggaactgcaatagggatcttgtcaaaaaatggggtagtctcggttggtga

SEQ ID NO: 146401 - DNA, 256 bp, Glycine max
ctcttccataaacgggtggtgcctctcttccatctccccagccaaaacctctctcaggaaggccacattacgcccttccgtcttcgcaacccttaacactccttcttctccttcctcttcatcttccttcccctctctcattcaagacaggcctgtttttgctgcccctgcccccatcatcaccccaactgtgagagaggatatggcaaaggaatacgagaaagctattgataaacttcagaaattgttgagggag

SEQ ID NO: 146402 - DNA, 252 bp, Glycine max
caagaggttggtcacaagagccttctccagagtgatgctctttaccaggtaccaccccaattgcattccattgataaaaagaaaaagaaaaaaaatctttttctcttttgggtttttgataaaatggttatgttgataaaaaaatctattttttgggggtttttgataaaatggttatgctgtgtttagtatattctggagacaagtgtctacccaagataacctgaatccatgaaagaactgagagagttg

SEQ ID NO: 146403 - DNA, 252 bp, Glycine max
ggagctcttctccattggttcttcatctgcatgcacacacttgcatagttttggaaaccaagaatttttgaagggtagcatcaacaagaagttctggaaatggagatcaccaatgtcagcgagtatgaagctattgcaaagcagaagttgccaaagatggtgtttgactactacgcatctggtgcagaggaccagtggactctgcaggagaacagaaatgccttttccagaattttgtttcggccacgtatt

SEQ ID NO: 146404 - DNA, 248 bp, Glycine max
cttttctttgtcaataccactagatgtctataccttgaactaaatatttctaagattgtgtattgtgatatgaacatttctgcatttgtgcaatatataggactttatgcttggagagacagtaagaagcttacctcattgccatcacatgtttcacctaccttgcatagataagtggctcttcagacatggttctggccaattagcacaaggggctctgaaattgtatatgcgtagtacagaccgcg

SEQ ID NO: 146405 - DNA, 247 bp, Glycine max
ggacgctactggaccatgtggaagctgcctatgtttggttgcactgatgcttctcaggtgttgaaggagcttcaagaggctaagactgcataccccaacggcttcatccgtatcatcggattcgacaacgttcgccaagtgcagtgcatcagcttcatcgcctacaagcccccaggcttctaagtgtgaaaaatttgcaaagcatttgtagccgccaccccactttgtttgtttgtacttaaactac

SEQ ID NO: 146406 - DNA, 244 bp, Glycine max
attgagaggtccacaaaccttgactggtacaagggtccaactctgcttgatgcacttgaccagattagtgagcccaagaggccctctgacaagcccctcaggcttccccttcaggatgtgtacaagattggaggtattggaactgtgccagtgggacgtgttgagaccggtgtcttgaagcctggaatggtggtgactttgcaccaactggactgacaactgaagtcaagtctgtggagatgca

SEQ ID NO: 146407 - DNA, 210 bp, Glycine max
ctcagtgaaagagaatccgaggcgaagagaagagaaaaattaagatggaggggaaggagcaggatgtgtcgctgggagcgaacaagttcccggagagacagccgattgggacggcggcgcagagccaagacgacggcaaggactaccaggagccggcgccggcgccactggttgacccgacggagtttacgtcatggtccttttacagag

SEQ ID NO: 146408 - DNA, 242 bp, Glycine max
gtgcgggtgagatgtttcaggtgaccactttgctgagtgaggcggagagattggagaaggagttgttgcagaatccacctccgtcggaagcggatgtggaggcggctagggttgttgttcaggagaaaggggaggttgtgtctcagttgaaagctgccaaggcgagtaagcaggagattggtgctgctgtggatcagcttaagaaggcgaaggagagtttggctaaggtggaggagtggtct

SEQ ID NO: 146409 - DNA, 230 bp, Glycine max
gaacttttgaagtagcccaaaaggtctgcggagaggttatcttctaccttgatgagaacaatgtccattttgatggtattctccttaagtctaacatggttacacctggaggcgagtccaaggacaaggacagtcctcagacagtagctgattacaccctcaagctaactcaaaggagaattcacactgatgaccctggaattatgataatgccaggtggacagtctgaa

SEQ ID NO: 146410 - DNA, 250 bp, Glycine max
gcgagtcaccagaatataaatctaattgggaatgtgtactcaagggactttgctgcatatgctgtgaaagcaatatcgattcttcgttgtacagatgtggtcatttgtgtacatgttcaaaatgtgcgaatgagttgcttcaaagcagaaggaagtgcccaatgtgtcaagctcctgtggtggaggtgatacgtgcttattctatacaataatttgacattaatataaaggtcacacttttaacaaaata

SEQ ID NO: 146411 - DNA, 249 bp, Glycine max
gcagatgtgaactcacttatgctgttgttgggattgttgtgctacttgcttccaatgctgttcaaatacagtggtgcctcagctgctctcactgtagacccttcactacacttgtcaagagcttctagcattgtgatgttgattgcatatgttgtctacattgtctttcaactgtggacacacagggagttatttgaagaagaagatgacggtaaagatggcgaggatggttcagaagaacaagctgtg

SEQ ID NO: 146412 - DNA, 247 bp, Glycine max
gaggcttttccccacaagctggtgcagtttggagagattcaggaaaaagttgtattgaaattttcacaagaggaatttcttacagcttggtcaactcaggtgcgtcctgcaacaactctgttggctgatgggtgtccatatttgtatgctatggtgcatgatagttcagtgtctacaataccaggtgattttgtcattggtgttaagttgacaaccataaacaatatgtgtgcatatgggctcaatc

SEQ ID NO: 146413 - DNA, 240 bp, Glycine max
gaagctgcctatgttttgttgcactgatgcttctcaggtgttgaaggagcttcaagaggctaagactgcataccccaacggcttcatccgtatcatcggattcgacaacgttcgccaagtgcagtgcatcagcttcatcgcctacaagcccccaggcttctaagtgtgaaaaatttgcaaagcatttgtagccgccatcccactttgtttgtctgtacttaaactacattcccatttgtt

SEQ ID NO: 146414 - DNA, 248 bp, Glycine max
ctcgagccgttttgaggcctcaatacatgctaaatcacttcgagttttctttgactggacagactacctgaaattctaccagctaggaacgtattggccatacactccttccatacatttgctgtatggtctgagagctgctcttgatctgatttttgaggaaggacttgaaaatgtgattgcaagacacagtcgtttaggcaaagcaaccagacttgctgtagaggcatggggtttgaagaattgca

SEQ ID NO: 146415 - DNA, 239 bp, Glycine max
tctctctctctcacccagatcttgtagcaatggcgagcgctcccactccacgcgaagagttcgataacatggcgaactggcggagaggccgagcgctacgaggagatggtggagttcatggagaaggtctccgcctccgccgagagcgaggagctgaccgtggaggagcgtaacctcctctccgtcgcctacaagaacgtgatcggcgctcgccgcgcctcctggcgcatcatctcctc

SEQ ID NO: 146416 - DNA, 244 bp, Glycine max
catcctccgtaacctccgagctctgcaccgaagaacgaagccatggggaagacacatggaatgggatctgctcgcaagctcaagtcccaccgcaggaggcaaaggtgggctgacaagtcatacaagaaatcacatcttggaaatgaatggaagaaaccttttgctggttcatcccatgccaagggaattgtccttgaaaagataggtattgaggctaagcagcccaactctgccattcgtaagt

SEQ ID NO: 146417 - DNA, 228 bp, Glycine max
gcattctcaatgtcttaggtgcaaagagaagatgctaagtttgagatgatcttactatatttttcatattggaccgtcttcctctataattttgagttacagtgtccacttaaattgaaaaaaaaaaaaaaaaaaaaaagggggggccgccgacaagggaccccgtcgccccgggaataaatccgggccgggaacctgcgggggaacaagtttcccctaaggggagcc

SEQ ID NO: 146418 - DNA, 257 bp, Glycine max
ttcggctcgagaaaaaatagtgtttcctggaggcgggactcattttcattatggagctgacaaatacatagcatcaattgcaaatatgcttaacttttcaaacaataatctaaacaatgaaggaaggttgcggacagtgcttgatgttggttgtggtgttgcaagttttggagcatatcttctatcatctgatatcattgcaatgtccttggcaccaaatgatgtgcatcagaatcaaattcaatttgctctagaaa

SEQ ID NO: 146419 - DNA, 250 bp, Glycine max
attttatccaattgaaattttaaaaatgactgggataaacttaagaattcaattattgaaattgaataagtaaacaatttaattggattggtcgaatggtatcaaaaaaatggagtactaactcccatttcttatttattattgaattaaccgatcaacttgctttgttatcgaacatttctttttgatttcaaaaattttccggaaaaaatttgaatctatttttatatgcgagtcaatcctactactt

SEQ ID NO: 146420 - DNA, 243 bp, Glycine max
cttccctacaactccaaacacaaagacatcgtcatccatggctgcctccgtctccactgtcggagtagtcaacagagctcttttgaacctgaatggttctggagctggagcttcagctcccagttcagccttctttgggaccagcttgaagaaggttattgcctcaagggtccccaacagcaaggtttccggtggaagcttcaagattgttgctgtagaagagaagaaagagattgaagagac

SEQ ID NO: 146421 - DNA, 246 bp, Glycine max
  unsure (1)..(246): unsure at all n locations
taggatggaagaggtttgcagtgcttgcagcgatgtgcattctagctgttcgggcagtaatagttcaacttgcattttttcttcacatatataatatagtatacatgaggtcacctgtcttnacaagatcatttatttttgctactgcattcatgagcttcttctctgtagttatagcacagtttaaggtnatacctgacattgtaggagataaagtatttggcatccaatctttttcagtgcgtt

SEQ ID NO: 146422 - DNA, 238 bp, Glycine max
ctggttcttgggacctctctattatgtggtggcattgcaaacgctggagtggaacaaaaatatgatagaagacaagcagatgtgaactcacttatgctgttgttgggattgttgtgctacttgcttccaatgctgttcaaatacagtggtgcctcagctgctctcactgtagacccttcactacacttgtcaagagcttctagcattgtgatgttgattgcatatgttgtctacattg

SEQ ID NO: 146423 - DNA, 238 bp, Glycine max
  unsure (1)..(238): unsure at all n locations
cctcgagtcgaattcggctcgaggttggtctctcggtacgacggacgttggtggaangagacattatcttgccactggtgagctcgtgagccttagcgagcaacagcttgtggattgcgctcacgtgtgtgatccagaagaatatggagcgtgtgactcaggctgtaatggtgggttgatgaacaacgcatatgagtacatacttcagtctgggggagtacagaaccgataggactat

SEQ ID NO: 146424 - DNA, 244 bp, Glycine max
aaacactcataacacaaagcacaaagcaaagctcatccttgagttaaaaaatggcagcagcttcttccatggctctctcatccccatccttggctggcaaggccgtgaagctgggcccatcagccccagaagtgggaagggtgagcatgaggaagaccgtcaccaagcaggtctcctcaggaagcccatggtacggcccagaccgagtcaagtacatgggcccattctctggcgagcccccgtc

SEQ ID NO: 146425 - DNA, 232 bp, Glycine max
acgtaagcgataagcaatagaattcagagagagagagaaagagagtctcttgctctgtatctttgatttgatcattccaatcttcaatttttctatatatccatcaatccgctgagtgcaaagttctaatctttcgcctattgggttctactcctttctctcttcgtttccgatcgatccaattttcttcccatggctacgatcggacacaacaatctcaatgccaaattgg

SEQ ID NO: 146426 - DNA, 239 bp, Glycine max
caaaaaaatggctttggaaactctcaactcaccaacaacaaccgccccatctttccccttcgacgacccaactattccatgggccaaaagaaaacgttcaaagcgttgttcacgcgaccacccttcggaggaagagtacctcgctctctgcctcatcatgctcgctcgcggcggcaccacccgccgcgtcagcactccaccgccgcaaccgactccagatccttccaccaagctcagtt

SEQ ID NO: 146427 - DNA, 218 bp, Glycine max
gggaactttagctggtgtttatcttggaatggaatatggggtagagaggatccgtggcaccagagattggaagaatgccatgattgggggtgcagtaactgcgactctgttatctgttgccaccaccaacaacaaagacaaaattgtacctgatgccattactggggcagcaattgctactgctgcagagtccataaattaccttacctgaagaatga

SEQ ID NO: 146428 - DNA, 228 bp, Glycine max
ctcgagccgaatcggctcgagagataaggttggaaatatcctttgcccagccgggactttagggctgacgctgaaggaagaggtctaagggctcttacaatatcacagttgggtgagattctaacaccagctgcttgcaccattgtttcttcgctcaaaaacgataatgtcgactcctatgttctatctgagtccagcctctttgtctatgcctacaagatcatcatc

SEQ ID NO: 146429 - DNA, 227 bp, Glycine max
gatggtttggtcagaactcttaaggatctagccaatagtccatattcaccagagtatgatattgctggtatcacagacccatttctgcacatcagattgcttaaacttttgcgagtgttgggtgaaggcaatgctgatgctagcgacaccatgaatgacatacttgcccaggtggctacgaagactgagtcaaataaagttgcagggaatgccattttataagaatg

SEQ ID NO: 146430 - DNA, 217 bp, Glycine max
ggctcgaggttggtctttcagtacgacgggggcgttggaaggagctgattatctggccactggtgaactcgtgagccttagcgagcaacagcttgtggattgcgatcacgtgtgtgatccagaagaatatggagcgtgtgactcaggctgtaatggtgggttgatggacaacgcatttgagtacatacttcagtctgggggattacaggaagaaaag

SEQ ID NO: 146431 - DNA, 252 bp, Glycine max
attgtatccaattgagattttaaaaatgactgggataaacttaagaattcaattattgaaattgaataagtaaacaatttaattggattggtcgaatggtatcacaaaaatggagtactaactcccatttcttatttattattgaattaaccgatcaacttgctttgttatcgaacatttcttgttgatttcaaaaattttccggaaaaaatttgaatctattattatatgcgagtcaatcctactacttct

SEQ ID NO: 146432 - DNA, 235 bp, Glycine max
cacctttctcctaaaacatctccagtgggttcttcttcttctattacaactacgtcacacaagaccatgaccatggccatggccacgatcctgctcctgttcacggtcttcgcggtttcatcggccctagacatgtcgataatctcgtacgacaacgcccacgccgccacgtcgcgcagcacgaggagctgatgtccatgtacgagcagtggctagtaaagcacggcaaggtgta

SEQ ID NO: 146433 - DNA, 234 bp, Glycine max
cttacctgctacttactactatagtgtctgactctcaggccagaacgcaaagattttgagcacaatggcctcgacacaatgctctctgcaccaccacgccctcaccactccagctagagcttcaacacagcgcctagttgtgagcaccaaaccaaaccacattgtttgcaaggcagcacagaagcaggttactgtccaagagggtgaggacactactactggccttgtctctcg

SEQ ID NO: 146434 - DNA, 232 bp, Glycine max
cttcaagggatcgcacctctattgatgactttgagattataaaacctatcagtcgtggggcatttggaagggttttcttggctaaaaatagaacaactggtgatctttttgcaataaaggttctcaagaaggcagatatgatccgtaagaatgctgtggaaagtatattagcagaacgtgatatcttaattacagtacgcaacccttttgtggttcgattcttctattcttt

SEQ ID NO: 146435 - DNA, 232 bp, Glycine max
actaaggcaatcaaggaatggggtcaacccaagtccaagattacccatctcatcttttgcaccactagtggtgtcgacatgcctggtgctgattatcagctcactaaactattaggccttcgcccctccgtcaagcgttacatgatgtaccaacaaggctgctttgccggtggcacggtgcttcgtttggccaaagacctcgctgaaaacaacaagggtgctcgcgtgcttg

SEQ ID NO: 146436 - DNA, 124 bp, Glycine max
cttccctacaactccaaacagcaaagacatccacatccatggctgcctccgtctccactgtcggagctgtcaacagagctcttttgaacctgaatggttctggagctggagcttcagctcccag

SEQ ID NO: 146437 - DNA, 227 bp, Glycine max
agcagacccagaggttgccgatgccattgaaaatgaaaaggtggttaataagaccataaaaatatacaacattgatcgtgctgtatgtggacgtatagctggtgtcattgcaaagaagtacggtgacactggttttgctggacagttgaatataacatttacaggaagtgctgggcagtcatttgcatgctttctgactcctggaatgaacattcgccttgttggag

SEQ ID NO: 146438 - DNA, 256 bp, Glycine max
gcaaaattctccggtacaccatgccggtgaagaagaaattgcagctgatgagagcctattgatttattgcaagcctgttgaactttacaatattctctaccgccgtgctcttcaaaatgttgagagcaggaattgtgattttcaattatagggaccgctacaacattcttcgaaagactgaagtgaccgaagacttttcttgtccgttttgcttgatgcagtgtggaaactttaagggcttgcgatttcatctttg
